United States Patent Application Publication US 2024/0175014 A1 - sequence listing, part 2

SEQ ID NO: 21529 - DNA, 20 bp, synthetic construct
  misc_feature 1..20: note = chemically synthesized
  source 1..20: mol_type = other DNA
cataaagtgagtggcttggt

SEQ ID NO: 21530 - DNA, 20 bp, synthetic construct
  misc_feature 1..20: note = chemically synthesized
  source 1..20: mol_type = other DNA
aaagtgagtggcttggtcag

SEQ ID NO: 21531 - DNA, 20 bp, synthetic construct
  misc_feature 1..20: note = chemically synthesized
  source 1..20: mol_type = other DNA
tggtcagaagcaatgctgtg

SEQ ID NO: 21532 - DNA, 20 bp, synthetic construct
  misc_feature 1..20: note = chemically synthesized
  source 1..20: mol_type = other DNA
tgctgtgtggaataccatga

SEQ ID NO: 21533 - DNA, 20 bp, synthetic construct
  misc_feature 1..20: note = chemically synthesized
  source 1..20: mol_type = other DNA
tgtgtggaataccatgacag

SEQ ID NO: 21534 - DNA, 20 bp, synthetic construct
  misc_feature 1..20: note = chemically synthesized
  source 1..20: mol_type = other DNA
gaataccatgacagtggata

SEQ ID NO: 21535 - DNA, 20 bp, synthetic construct
  misc_feature 1..20: note = chemically synthesized
  source 1..20: mol_type = other DNA
tacggcattctgtgattcca

SEQ ID NO: 21536 - DNA, 20 bp, synthetic construct
  misc_feature 1..20: note = chemically synthesized
  source 1..20: mol_type = other DNA
gcattctgtgattccatgga

SEQ ID NO: 21537 - DNA, 20 bp, synthetic construct
  misc_feature 1..20: note = chemically synthesized
  source 1..20: mol_type = other DNA
ttctgtgattccatggatgg

SEQ ID NO: 21538 - DNA, 20 bp, synthetic construct
  misc_feature 1..20: note = chemically synthesized
  source 1..20: mol_type = other DNA
gattccatggatggtagtct

SEQ ID NO: 21539 - DNA, 20 bp, synthetic construct
  misc_feature 1..20: note = chemically synthesized
  source 1..20: mol_type = other DNA
atggatggtagtcttggcat

SEQ ID NO: 21540 - DNA, 20 bp, synthetic construct
  misc_feature 1..20: note = chemically synthesized
  source 1..20: mol_type = other DNA
gtagtcttggcataagcatt

SEQ ID NO: 21541 - DNA, 20 bp, synthetic construct
  misc_feature 1..20: note = chemically synthesized
  source 1..20: mol_type = other DNA
cttggcataagcattgagtt

SEQ ID NO: 21542 - DNA, 20 bp, synthetic construct
  misc_feature 1..20: note = chemically synthesized
  source 1..20: mol_type = other DNA
ttggcataagcattgagttc

SEQ ID NO: 21543 - DNA, 20 bp, synthetic construct
  misc_feature 1..20: note = chemically synthesized
  source 1..20: mol_type = other DNA
ataagcattgagttcaggat

SEQ ID NO: 21544 - DNA, 20 bp, synthetic construct
  misc_feature 1..20: note = chemically synthesized
  source 1..20: mol_type = other DNA
taagcattgagttcaggatt

SEQ ID NO: 21545 - DNA, 20 bp, synthetic construct
  misc_feature 1..20: note = chemically synthesized
  source 1..20: mol_type = other DNA
aggattgggaaacccatatc

SEQ ID NO: 21546 - DNA, 20 bp, synthetic construct
  misc_feature 1..20: note = chemically synthesized
  source 1..20: mol_type = other DNA
gattgggaaacccatatcca

SEQ ID NO: 21547 - DNA, 20 bp, synthetic construct
  misc_feature 1..20: note = chemically synthesized
  source 1..20: mol_type = other DNA
gggaaacccatatccagagt

SEQ ID NO: 21548 - DNA, 20 bp, synthetic construct
  misc_feature 1..20: note = chemically synthesized
  source 1..20: mol_type = other DNA
tccagagtaagtgtctattc

SEQ ID NO: 21549 - DNA, 20 bp, synthetic construct
  misc_feature 1..20: note = chemically synthesized
  source 1..20: mol_type = other DNA
gagtaagtgtctattccagt

SEQ ID NO: 21550 - DNA, 20 bp, synthetic construct
  misc_feature 1..20: note = chemically synthesized
  source 1..20: mol_type = other DNA
agtaagtgtctattccagtg

SEQ ID NO: 21551 - DNA, 20 bp, synthetic construct
  misc_feature 1..20: note = chemically synthesized
  source 1..20: mol_type = other DNA
gtgtctattccagtgaggac

SEQ ID NO: 21552 - DNA, 20 bp, synthetic construct
  misc_feature 1..20: note = chemically synthesized
  source 1..20: mol_type = other DNA
agcctctgccctttccatga

SEQ ID NO: 21553 - DNA, 20 bp, synthetic construct
  misc_feature 1..20: note = chemically synthesized
  source 1..20: mol_type = other DNA
ctctgccctttccatgatgg

SEQ ID NO: 21554 - DNA, 20 bp, synthetic construct
  misc_feature 1..20: note = chemically synthesized
  source 1..20: mol_type = other DNA
ctgccctttccatgatggaa

SEQ ID NO: 21555 - DNA, 20 bp, synthetic construct
  misc_feature 1..20: note = chemically synthesized
  source 1..20: mol_type = other DNA
tgccctttccatgatggaag

SEQ ID NO: 21556 - DNA, 20 bp, synthetic construct
  misc_feature 1..20: note = chemically synthesized
  source 1..20: mol_type = other DNA
caatataatcaacctgccac

SEQ ID NO: 21557 - DNA, 20 bp, synthetic construct
  misc_feature 1..20: note = chemically synthesized
  source 1..20: mol_type = other DNA
aatataatcaacctgccacc

SEQ ID NO: 21558 - DNA, 20 bp, synthetic construct
  misc_feature 1..20: note = chemically synthesized
  source 1..20: mol_type = other DNA
ataatcaacctgccaccagg

SEQ ID NO: 21559 - DNA, 20 bp, synthetic construct
  misc_feature 1..20: note = chemically synthesized
  source 1..20: mol_type = other DNA
tcaacctgccaccaggtagc

SEQ ID NO: 21560 - DNA, 20 bp, synthetic construct
  misc_feature 1..20: note = chemically synthesized
  source 1..20: mol_type = other DNA
ggtagctggctgatcacccc

SEQ ID NO: 21561 - DNA, 20 bp, synthetic construct
  misc_feature 1..20: note = chemically synthesized
  source 1..20: mol_type = other DNA
gtagctggctgatcaccccg

SEQ ID NO: 21562 - DNA, 20 bp, synthetic construct
  misc_feature 1..20: note = chemically synthesized
  source 1..20: mol_type = other DNA
tggctgatcaccccgaggaa

SEQ ID NO: 21563 - DNA, 20 bp, synthetic construct
  misc_feature 1..20: note = chemically synthesized
  source 1..20: mol_type = other DNA
ccgaggaatggtgccatatc

SEQ ID NO: 21564 - DNA, 20 bp, synthetic construct
  misc_feature 1..20: note = chemically synthesized
  source 1..20: mol_type = other DNA
cgaggaatggtgccatatca

SEQ ID NO: 21565 - DNA, 20 bp, synthetic construct
  misc_feature 1..20: note = chemically synthesized
  source 1..20: mol_type = other DNA
gaggaatggtgccatatcaa

SEQ ID NO: 21566 - DNA, 20 bp, synthetic construct
  misc_feature 1..20: note = chemically synthesized
  source 1..20: mol_type = other DNA
atggtgccatatcaagggct

SEQ ID NO: 21567 - DNA, 20 bp, synthetic construct
  misc_feature 1..20: note = chemically synthesized
  source 1..20: mol_type = other DNA
ccatatcaagggcttagtgt

SEQ ID NO: 21568 - DNA, 20 bp, synthetic construct
  misc_feature 1..20: note = chemically synthesized
  source 1..20: mol_type = other DNA
ttagtgttggtctctgatgc

SEQ ID NO: 21569 - DNA, 20 bp, synthetic construct
  misc_feature 1..20: note = chemically synthesized
  source 1..20: mol_type = other DNA
tgttggtctctgatgctggc

SEQ ID NO: 21570 - DNA, 20 bp, synthetic construct
  misc_feature 1..20: note = chemically synthesized
  source 1..20: mol_type = other DNA
tggtctctgatgctggcaag

SEQ ID NO: 21571 - DNA, 20 bp, synthetic construct
  misc_feature 1..20: note = chemically synthesized
  source 1..20: mol_type = other DNA
tctctgatgctggcaagcag

SEQ ID NO: 21572 - DNA, 20 bp, synthetic construct
  misc_feature 1..20: note = chemically synthesized
  source 1..20: mol_type = other DNA
atgctggcaagcagtggctg

SEQ ID NO: 21573 - DNA, 20 bp, synthetic construct
  misc_feature 1..20: note = chemically synthesized
  source 1..20: mol_type = other DNA
tggcaagcagtggctgtggc

SEQ ID NO: 21574 - DNA, 20 bp, synthetic construct
  misc_feature 1..20: note = chemically synthesized
  source 1..20: mol_type = other DNA
ggcaagcagtggctgtggcc

SEQ ID NO: 21575 - DNA, 20 bp, synthetic construct
  misc_feature 1..20: note = chemically synthesized
  source 1..20: mol_type = other DNA
agcagtggctgtggccaggt

SEQ ID NO: 21576 - DNA, 20 bp, synthetic construct
  misc_feature 1..20: note = chemically synthesized
  source 1..20: mol_type = other DNA
ggctgtggccaggtcagctt

SEQ ID NO: 21577 - DNA, 20 bp, synthetic construct
  misc_feature 1..20: note = chemically synthesized
  source 1..20: mol_type = other DNA
gtggccaggtcagctttggt

SEQ ID NO: 21578 - DNA, 20 bp, synthetic construct
  misc_feature 1..20: note = chemically synthesized
  source 1..20: mol_type = other DNA
gccaggtcagctttggtgag

SEQ ID NO: 21579 - DNA, 20 bp, synthetic construct
  misc_feature 1..20: note = chemically synthesized
  source 1..20: mol_type = other DNA
aggtcagctttggtgagtgg

SEQ ID NO: 21580 - DNA, 20 bp, synthetic construct
  misc_feature 1..20: note = chemically synthesized
  source 1..20: mol_type = other DNA
gagtggaagtccatgttgct

SEQ ID NO: 21581 - DNA, 20 bp, synthetic construct
  misc_feature 1..20: note = chemically synthesized
  source 1..20: mol_type = other DNA
aagtccatgttgctgagccc

SEQ ID NO: 21582 - DNA, 20 bp, synthetic construct
  misc_feature 1..20: note = chemically synthesized
  source 1..20: mol_type = other DNA
aacttccatccctgcaactg

SEQ ID NO: 21583 - DNA, 20 bp, synthetic construct
  misc_feature 1..20: note = chemically synthesized
  source 1..20: mol_type = other DNA
aactgtggccactttgttca

SEQ ID NO: 21584 - DNA, 20 bp, synthetic construct
  misc_feature 1..20: note = chemically synthesized
  source 1..20: mol_type = other DNA
actgtggccactttgttcat

SEQ ID NO: 21585 - DNA, 20 bp, synthetic construct
  misc_feature 1..20: note = chemically synthesized
  source 1..20: mol_type = other DNA
cactttgttcatgggtccat

SEQ ID NO: 21586 - DNA, 20 bp, synthetic construct
  misc_feature 1..20: note = chemically synthesized
  source 1..20: mol_type = other DNA
ggtccattggacgatgacat

SEQ ID NO: 21587 - DNA, 20 bp, synthetic construct
  misc_feature 1..20: note = chemically synthesized
  source 1..20: mol_type = other DNA
ccattggacgatgacatgag

SEQ ID NO: 21588 - DNA, 20 bp, synthetic construct
  misc_feature 1..20: note = chemically synthesized
  source 1..20: mol_type = other DNA
ggacgatgacatgagtggcc

SEQ ID NO: 21589 - DNA, 20 bp, synthetic construct
  misc_feature 1..20: note = chemically synthesized
  source 1..20: mol_type = other DNA
gacgatgacatgagtggcct

SEQ ID NO: 21590 - DNA, 20 bp, synthetic construct
  misc_feature 1..20: note = chemically synthesized
  source 1..20: mol_type = other DNA
tgacatgagtggcctgggaa

SEQ ID NO: 21591 - DNA, 20 bp, synthetic construct
  misc_feature 1..20: note = chemically synthesized
  source 1..20: mol_type = other DNA
gacatgagtggcctgggaaa

SEQ ID NO: 21592 - DNA, 20 bp, synthetic construct
  misc_feature 1..20: note = chemically synthesized
  source 1..20: mol_type = other DNA
gagtggcctgggaaaaggct

SEQ ID NO: 21593 - DNA, 20 bp, synthetic construct
  misc_feature 1..20: note = chemically synthesized
  source 1..20: mol_type = other DNA
tggcctgggaaaaggctgag

SEQ ID NO: 21594 - DNA, 20 bp, synthetic construct
  misc_feature 1..20: note = chemically synthesized
  source 1..20: mol_type = other DNA
aaaaggctgagtggtgtcca

SEQ ID NO: 21595 - DNA, 20 bp, synthetic construct
  misc_feature 1..20: note = chemically synthesized
  source 1..20: mol_type = other DNA
tattaaaatcctcttctgct

SEQ ID NO: 21596 - DNA, 20 bp, synthetic construct
  misc_feature 1..20: note = chemically synthesized
  source 1..20: mol_type = other DNA
attaaaatcctcttctgctg

SEQ ID NO: 21597 - DNA, 20 bp, synthetic construct
  misc_feature 1..20: note = chemically synthesized
  source 1..20: mol_type = other DNA
cttctgctgaggtcacccat

SEQ ID NO: 21598 - DNA, 20 bp, synthetic construct
  misc_feature 1..20: note = chemically synthesized
  source 1..20: mol_type = other DNA
tgctgaggtcacccattggt

SEQ ID NO: 21599 - DNA, 20 bp, synthetic construct
  misc_feature 1..20: note = chemically synthesized
  source 1..20: mol_type = other DNA
cccattggtgagcactcaca

SEQ ID NO: 21600 - DNA, 20 bp, synthetic construct
  misc_feature 1..20: note = chemically synthesized
  source 1..20: mol_type = other DNA
ccattggtgagcactcacat

SEQ ID NO: 21601 - DNA, 20 bp, synthetic construct
  misc_feature 1..20: note = chemically synthesized
  source 1..20: mol_type = other DNA
atgggatgaaaatatctttg

SEQ ID NO: 21602 - DNA, 20 bp, synthetic construct
  misc_feature 1..20: note = chemically synthesized
  source 1..20: mol_type = other DNA
ttgtagtttttgactaatca

SEQ ID NO: 21603 - DNA, 20 bp, synthetic construct
  misc_feature 1..20: note = chemically synthesized
  source 1..20: mol_type = other DNA
gtagtttttgactaatcata

SEQ ID NO: 21604 - DNA, 20 bp, synthetic construct
  misc_feature 1..20: note = chemically synthesized
  source 1..20: mol_type = other DNA
tagtttttgactaatcatag

SEQ ID NO: 21605 - DNA, 20 bp, synthetic construct
  misc_feature 1..20: note = chemically synthesized
  source 1..20: mol_type = other DNA
tttctttgtcatcaattttc

SEQ ID NO: 21606 - DNA, 20 bp, synthetic construct
  misc_feature 1..20: note = chemically synthesized
  source 1..20: mol_type = other DNA
tttccagtcatgctttttcc

SEQ ID NO: 21607 - DNA, 20 bp, synthetic construct
  misc_feature 1..20: note = chemically synthesized
  source 1..20: mol_type = other DNA
tttccaagtccctgaccatc

SEQ ID NO: 21608 - DNA, 20 bp, synthetic construct
  misc_feature 1..20: note = chemically synthesized
  source 1..20: mol_type = other DNA
tgaccatctagccaaacctt

SEQ ID NO: 21609 - DNA, 20 bp, synthetic construct
  misc_feature 1..20: note = chemically synthesized
  source 1..20: mol_type = other DNA
tctagccaaacctttggcta

SEQ ID NO: 21610 - DNA, 20 bp, synthetic construct
  misc_feature 1..20: note = chemically synthesized
  source 1..20: mol_type = other DNA
tttggctacagcccatgaat

SEQ ID NO: 21611 - DNA, 20 bp, synthetic construct
  misc_feature 1..20: note = chemically synthesized
  source 1..20: mol_type = other DNA
taagtatataatcgcaaatc

SEQ ID NO: 21612 - DNA, 20 bp, synthetic construct
  misc_feature 1..20: note = chemically synthesized
  source 1..20: mol_type = other DNA
gccatttctccttctgtgca

SEQ ID NO: 21613 - DNA, 20 bp, synthetic construct
  misc_feature 1..20: note = chemically synthesized
  source 1..20: mol_type = other DNA
ttctgtgcaaagtgcacaac

SEQ ID NO: 21614 - DNA, 20 bp, synthetic construct
  misc_feature 1..20: note = chemically synthesized
  source 1..20: mol_type = other DNA
tctgtgcaaagtgcacaacc

SEQ ID NO: 21615 - DNA, 20 bp, synthetic construct
  misc_feature 1..20: note = chemically synthesized
  source 1..20: mol_type = other DNA
acaaccaggcacactgctca

SEQ ID NO: 21616 - DNA, 20 bp, synthetic construct
  misc_feature 1..20: note = chemically synthesized
  source 1..20: mol_type = other DNA
ctgctcaaagttctgccaac

SEQ ID NO: 21617 - DNA, 20 bp, synthetic construct
  misc_feature 1..20: note = chemically synthesized
  source 1..20: mol_type = other DNA
tgctcaaagttctgccaact

SEQ ID NO: 21618 - DNA, 20 bp, synthetic construct
  misc_feature 1..20: note = chemically synthesized
  source 1..20: mol_type = other DNA
tcaaagttctgccaactagg

SEQ ID NO: 21619 - DNA, 20 bp, synthetic construct
  misc_feature 1..20: note = chemically synthesized
  source 1..20: mol_type = other DNA
ttcccttcaccgttgtcctt

SEQ ID NO: 21620 - DNA, 20 bp, synthetic construct
  misc_feature 1..20: note = chemically synthesized
  source 1..20: mol_type = other DNA
tcccttcaccgttgtccttc

SEQ ID NO: 21621 - DNA, 20 bp, synthetic construct
  misc_feature 1..20: note = chemically synthesized
  source 1..20: mol_type = other DNA
cccttcaccgttgtccttca

SEQ ID NO: 21622 - DNA, 20 bp, synthetic construct
  misc_feature 1..20: note = chemically synthesized
  source 1..20: mol_type = other DNA
gttgtccttcagggatgtcc

SEQ ID NO: 21623 - DNA, 20 bp, synthetic construct
  misc_feature 1..20: note = chemically synthesized
  source 1..20: mol_type = other DNA
tccttcagggatgtcctaga

SEQ ID NO: 21624 - DNA, 20 bp, synthetic construct
  misc_feature 1..20: note = chemically synthesized
  source 1..20: mol_type = other DNA
ccttcagggatgtcctagaa

SEQ ID NO: 21625 - DNA, 20 bp, synthetic construct
  misc_feature 1..20: note = chemically synthesized
  source 1..20: mol_type = other DNA
cttcagggatgtcctagaaa

SEQ ID NO: 21626 - DNA, 20 bp, synthetic construct
  misc_feature 1..20: note = chemically synthesized
  source 1..20: mol_type = other DNA
ttcagggatgtcctagaaag

SEQ ID NO: 21627 - DNA, 20 bp, synthetic construct
  misc_feature 1..20: note = chemically synthesized
  source 1..20: mol_type = other DNA
gatgtcctagaaaggggctg

SEQ ID NO: 21628 - DNA, 20 bp, synthetic construct
  misc_feature 1..20: note = chemically synthesized
  source 1..20: mol_type = other DNA
agaaaggggctgtagtgctg

SEQ ID NO: 21629 - DNA, 20 bp, synthetic construct
  misc_feature 1..20: note = chemically synthesized
  source 1..20: mol_type = other DNA
gtgctgcggctgtccacttt

SEQ ID NO: 21630 - DNA, 20 bp, synthetic construct
  misc_feature 1..20: note = chemically synthesized
  source 1..20: mol_type = other DNA
tgctgcggctgtccactttt

SEQ ID NO: 21631 - DNA, 20 bp, synthetic construct
  misc_feature 1..20: note = chemically synthesized
  source 1..20: mol_type = other DNA
tgcggctgtccacttttggg

SEQ ID NO: 21632 - DNA, 20 bp, synthetic construct
  misc_feature 1..20: note = chemically synthesized
  source 1..20: mol_type = other DNA
ggtggtgcctgcatatcgtg

SEQ ID NO: 21633 - DNA, 20 bp, synthetic construct
  misc_feature 1..20: note = chemically synthesized
  source 1..20: mol_type = other DNA
gtgcagaactatctgtgaac

SEQ ID NO: 21634 - DNA, 20 bp, synthetic construct
  misc_feature 1..20: note = chemically synthesized
  source 1..20: mol_type = other DNA
tgcagaactatctgtgaacc

SEQ ID NO: 21635 - DNA, 20 bp, synthetic construct
  misc_feature 1..20: note = chemically synthesized
  source 1..20: mol_type = other DNA
actatctgtgaaccaggacc

SEQ ID NO: 21636 - DNA, 20 bp, synthetic construct
  misc_feature 1..20: note = chemically synthesized
  source 1..20: mol_type = other DNA
ctagtcttctcttcctctgt

SEQ ID NO: 21637 - DNA, 20 bp, synthetic construct
  misc_feature 1..20: note = chemically synthesized
  source 1..20: mol_type = other DNA
cttcctctgtcagctgatca

SEQ ID NO: 21638 - DNA, 20 bp, synthetic construct
  misc_feature 1..20: note = chemically synthesized
  source 1..20: mol_type = other DNA
ttcctctgtcagctgatcat

SEQ ID NO: 21639 - DNA, 20 bp, synthetic construct
  misc_feature 1..20: note = chemically synthesized
  source 1..20: mol_type = other DNA
tcctctgtcagctgatcata

SEQ ID NO: 21640 - DNA, 20 bp, synthetic construct
  misc_feature 1..20: note = chemically synthesized
  source 1..20: mol_type = other DNA
gatcatagggaactccccat

SEQ ID NO: 21641 - DNA, 20 bp, synthetic construct
  misc_feature 1..20: note = chemically synthesized
  source 1..20: mol_type = other DNA
ggaactccccatgagaccat

SEQ ID NO: 21642 - DNA, 20 bp, synthetic construct
  misc_feature 1..20: note = chemically synthesized
  source 1..20: mol_type = other DNA
tccccatgagaccatcggtg

SEQ ID NO: 21643 - DNA, 20 bp, synthetic construct
  misc_feature 1..20: note = chemically synthesized
  source 1..20: mol_type = other DNA
tgagaccatcggtgcagtct

SEQ ID NO: 21644 - DNA, 20 bp, synthetic construct
  misc_feature 1..20: note = chemically synthesized
  source 1..20: mol_type = other DNA
gagaccatcggtgcagtctc

SEQ ID NO: 21645 - DNA, 20 bp, synthetic construct
  misc_feature 1..20: note = chemically synthesized
  source 1..20: mol_type = other DNA
agaccatcggtgcagtctca

SEQ ID NO: 21646 - DNA, 20 bp, synthetic construct
  misc_feature 1..20: note = chemically synthesized
  source 1..20: mol_type = other DNA
accatcggtgcagtctcagg

SEQ ID NO: 21647 - DNA, 20 bp, synthetic construct
  misc_feature 1..20: note = chemically synthesized
  source 1..20: mol_type = other DNA
catcggtgcagtctcaggga

SEQ ID NO: 21648 - DNA, 20 bp, synthetic construct
  misc_feature 1..20: note = chemically synthesized
  source 1..20: mol_type = other DNA
ggtgcagtctcagggagaga

SEQ ID NO: 21649 - DNA, 20 bp, synthetic construct
  misc_feature 1..20: note = chemically synthesized
  source 1..20: mol_type = other DNA
gcagtctcagggagagaaag

SEQ ID NO: 21650 - DNA, 20 bp, synthetic construct
  misc_feature 1..20: note = chemically synthesized
  source 1..20: mol_type = other DNA
agggagagaaagcagtgtgt

SEQ ID NO: 21651 - DNA, 20 bp, synthetic construct
  misc_feature 1..20: note = chemically synthesized
  source 1..20: mol_type = other DNA
gggagagaaagcagtgtgtc

SEQ ID NO: 21652 - DNA, 20 bp, synthetic construct
  misc_feature 1..20: note = chemically synthesized
  source 1..20: mol_type = other DNA
gagagaaagcagtgtgtcag

SEQ ID NO: 21653 - DNA, 20 bp, synthetic construct
  misc_feature 1..20: note = chemically synthesized
  source 1..20: mol_type = other DNA
agaaagcagtgtgtcaggag

SEQ ID NO: 21654 - DNA, 20 bp, synthetic construct
  misc_feature 1..20: note = chemically synthesized
  source 1..20: mol_type = other DNA
aaagcagtgtgtcaggagtg

SEQ ID NO: 21655 - DNA, 20 bp, synthetic construct
  misc_feature 1..20: note = chemically synthesized
  source 1..20: mol_type = other DNA
tgtgtcaggagtggagacca

SEQ ID NO: 21656 - DNA, 20 bp, synthetic construct
  misc_feature 1..20: note = chemically synthesized
  source 1..20: mol_type = other DNA
gtgtcaggagtggagaccat

SEQ ID NO: 21657 - DNA, 20 bp, synthetic construct
  misc_feature 1..20: note = chemically synthesized
  source 1..20: mol_type = other DNA
agtggagaccatgggcattt

SEQ ID NO: 21658 - DNA, 20 bp, synthetic construct
  misc_feature 1..20: note = chemically synthesized
  source 1..20: mol_type = other DNA
ccctttctcatgtaacttac

SEQ ID NO: 21659 - DNA, 20 bp, synthetic construct
  misc_feature 1..20: note = chemically synthesized
  source 1..20: mol_type = other DNA
atgtaacttactagtgcctt

SEQ ID NO: 21660 - DNA, 20 bp, synthetic construct
  misc_feature 1..20: note = chemically synthesized
  source 1..20: mol_type = other DNA
tgtaacttactagtgccttc

SEQ ID NO: 21661 - DNA, 20 bp, synthetic construct
  misc_feature 1..20: note = chemically synthesized
  source 1..20: mol_type = other DNA
agtgccttcaggatctgctc

SEQ ID NO: 21662 - DNA, 20 bp, synthetic construct
  misc_feature 1..20: note = chemically synthesized
  source 1..20: mol_type = other DNA
tgatgcaatgctgctgtgca

SEQ ID NO: 21663 - DNA, 20 bp, synthetic construct
  misc_feature 1..20: note = chemically synthesized
  source 1..20: mol_type = other DNA
gctgtgcacagcccacttta

SEQ ID NO: 21664 - DNA, 20 bp, synthetic construct
  misc_feature 1..20: note = chemically synthesized
  source 1..20: mol_type = other DNA
tgcacagcccactttatggc

SEQ ID NO: 21665 - DNA, 20 bp, synthetic construct
  misc_feature 1..20: note = chemically synthesized
  source 1..20: mol_type = other DNA
cagcccactttatggctaga

SEQ ID NO: 21666 - DNA, 20 bp, synthetic construct
  misc_feature 1..20: note = chemically synthesized
  source 1..20: mol_type = other DNA
cactttatggctagatggat

SEQ ID NO: 21667 - DNA, 20 bp, synthetic construct
  misc_feature 1..20: note = chemically synthesized
  source 1..20: mol_type = other DNA
ttatggctagatggatcaga

SEQ ID NO: 21668 - DNA, 20 bp, synthetic construct
  misc_feature 1..20: note = chemically synthesized
  source 1..20: mol_type = other DNA
tagatggatcagaaagcacc

SEQ ID NO: 21669 - DNA, 20 bp, synthetic construct
  misc_feature 1..20: note = chemically synthesized
  source 1..20: mol_type = other DNA
agaaagcacccagttcatga

SEQ ID NO: 21670 - DNA, 20 bp, synthetic construct
  misc_feature 1..20: note = chemically synthesized
  source 1..20: mol_type = other DNA
gaaagcacccagttcatgat

SEQ ID NO: 21671 - DNA, 20 bp, synthetic construct
  misc_feature 1..20: note = chemically synthesized
  source 1..20: mol_type = other DNA
agcacccagttcatgatagg

SEQ ID NO: 21672 - DNA, 20 bp, synthetic construct
  misc_feature 1..20: note = chemically synthesized
  source 1..20: mol_type = other DNA
ccagttcatgataggcagtt

SEQ ID NO: 21673 - DNA, 20 bp, synthetic construct
  misc_feature 1..20: note = chemically synthesized
  source 1..20: mol_type = other DNA
cagttcatgataggcagttc

SEQ ID NO: 21674 - DNA, 20 bp, synthetic construct
  misc_feature 1..20: note = chemically synthesized
  source 1..20: mol_type = other DNA
gataggcagttcaggtcaca

SEQ ID NO: 21675 - DNA, 20 bp, synthetic construct
  misc_feature 1..20: note = chemically synthesized
  source 1..20: mol_type = other DNA
catggtgacttgatgactca

SEQ ID NO: 21676 - DNA, 20 bp, synthetic construct
  misc_feature 1..20: note = chemically synthesized
  source 1..20: mol_type = other DNA
caaatatttcgtttccacca

SEQ ID NO: 21677 - DNA, 20 bp, synthetic construct
  misc_feature 1..20: note = chemically synthesized
  source 1..20: mol_type = other DNA
atttcgtttccaccaaagcc

SEQ ID NO: 21678 - DNA, 20 bp, synthetic construct
  misc_feature 1..20: note = chemically synthesized
  source 1..20: mol_type = other DNA
tttccaccaaagcccagtaa

SEQ ID NO: 21679 - DNA, 20 bp, synthetic construct
  misc_feature 1..20: note = chemically synthesized
  source 1..20: mol_type = other DNA
ttccaccaaagcccagtaac

SEQ ID NO: 21680 - DNA, 20 bp, synthetic construct
  misc_feature 1..20: note = chemically synthesized
  source 1..20: mol_type = other DNA
ccaaagcccagtaacaggcc

SEQ ID NO: 21681 - DNA, 20 bp, synthetic construct
  misc_feature 1..20: note = chemically synthesized
  source 1..20: mol_type = other DNA
aaagcccagtaacaggccaa

SEQ ID NO: 21682 - DNA, 20 bp, synthetic construct
  misc_feature 1..20: note = chemically synthesized
  source 1..20: mol_type = other DNA
gccaagagctttctccctaa

SEQ ID NO: 21683 - DNA, 20 bp, synthetic construct
  misc_feature 1..20: note = chemically synthesized
  source 1..20: mol_type = other DNA
caagagctttctccctaaaa

SEQ ID NO: 21684 - DNA, 20 bp, synthetic construct
  misc_feature 1..20: note = chemically synthesized
  source 1..20: mol_type = other DNA
agagctttctccctaaaaga

SEQ ID NO: 21685 - DNA, 20 bp, synthetic construct
  misc_feature 1..20: note = chemically synthesized
  source 1..20: mol_type = other DNA
gctttctccctaaaagagag

SEQ ID NO: 21686 - DNA, 20 bp, synthetic construct
  misc_feature 1..20: note = chemically synthesized
  source 1..20: mol_type = other DNA
taaaagagagtagttatctg

SEQ ID NO: 21687 - DNA, 20 bp, synthetic construct
  misc_feature 1..20: note = chemically synthesized
  source 1..20: mol_type = other DNA
aagagagtagttatctgcag

SEQ ID NO: 21688 - DNA, 20 bp, synthetic construct
  misc_feature 1..20: note = chemically synthesized
  source 1..20: mol_type = other DNA
gagtagttatctgcagaaga

SEQ ID NO: 21689 - DNA, 20 bp, synthetic construct
  misc_feature 1..20: note = chemically synthesized
  source 1..20: mol_type = other DNA
tagttatctgcagaagatgg

SEQ ID NO: 21690 - DNA, 20 bp, synthetic construct
  misc_feature 1..20: note = chemically synthesized
  source 1..20: mol_type = other DNA
agttatctgcagaagatggc

SEQ ID NO: 21691 - DNA, 20 bp, synthetic construct
  misc_feature 1..20: note = chemically synthesized
  source 1..20: mol_type = other DNA
gttatctgcagaagatggca

SEQ ID NO: 21692 - DNA, 20 bp, synthetic construct
  misc_feature 1..20: note = chemically synthesized
  source 1..20: mol_type = other DNA
agggccttgctccaaaatcc

SEQ ID NO: 21693 - DNA, 20 bp, synthetic construct
  misc_feature 1..20: note = chemically synthesized
  source 1..20: mol_type = other DNA
ggccttgctccaaaatccta

SEQ ID NO: 21694 - DNA, 20 bp, synthetic construct
  misc_feature 1..20: note = chemically synthesized
  source 1..20: mol_type = other DNA
gccttgctccaaaatcctag

SEQ ID NO: 21695 - DNA, 20 bp, synthetic construct
  misc_feature 1..20: note = chemically synthesized
  source 1..20: mol_type = other DNA
tagaggcctccgctgtgatt

SEQ ID NO: 21696 - DNA, 20 bp, synthetic construct
  misc_feature 1..20: note = chemically synthesized
  source 1..20: mol_type = other DNA
agcctgccaaatgctccaaa

SEQ ID NO: 21697 - DNA, 20 bp, synthetic construct
  misc_feature 1..20: note = chemically synthesized
  source 1..20: mol_type = other DNA
ctccaaacagcatccctatc

SEQ ID NO: 21698 - DNA, 20 bp, synthetic construct
  misc_feature 1..20: note = chemically synthesized
  source 1..20: mol_type = other DNA
ctatctggcactgacacctc

SEQ ID NO: 21699 - DNA, 20 bp, synthetic construct
  misc_feature 1..20: note = chemically synthesized
  source 1..20: mol_type = other DNA
actgacacctcaagcatcat

SEQ ID NO: 21700 - DNA, 20 bp, synthetic construct
  misc_feature 1..20: note = chemically synthesized
  source 1..20: mol_type = other DNA
tcaagcatcattggatctgc

SEQ ID NO: 21701 - DNA, 20 bp, synthetic construct
  misc_feature 1..20: note = chemically synthesized
  source 1..20: mol_type = other DNA
caagcatcattggatctgct

SEQ ID NO: 21702 - DNA, 20 bp, synthetic construct
  misc_feature 1..20: note = chemically synthesized
  source 1..20: mol_type = other DNA
attggatctgctaggtcata

SEQ ID NO: 21703 - DNA, 20 bp, synthetic construct
  misc_feature 1..20: note = chemically synthesized
  source 1..20: mol_type = other DNA
tctgctaggtcatatggccc

SEQ ID NO: 21704 - DNA, 20 bp, synthetic construct
  misc_feature 1..20: note = chemically synthesized
  source 1..20: mol_type = other DNA
gctaggtcatatggcccaag

SEQ ID NO: 21705 - DNA, 20 bp, synthetic construct
  misc_feature 1..20: note = chemically synthesized
  source 1..20: mol_type = other DNA
gtcatatggcccaagtggca

SEQ ID NO: 21706 - DNA, 20 bp, synthetic construct
  misc_feature 1..20: note = chemically synthesized
  source 1..20: mol_type = other DNA
atatggcccaagtggcatag

SEQ ID NO: 21707 - DNA, 20 bp, synthetic construct
  misc_feature 1..20: note = chemically synthesized
  source 1..20: mol_type = other DNA
aagtggcatagcagcttgca

SEQ ID NO: 21708 - DNA, 20 bp, synthetic construct
  misc_feature 1..20: note = chemically synthesized
  source 1..20: mol_type = other DNA
tggcatagcagcttgcacag

SEQ ID NO: 21709 - DNA, 20 bp, synthetic construct
  misc_feature 1..20: note = chemically synthesized
  source 1..20: mol_type = other DNA
tagcagcttgcacagcagcc

SEQ ID NO: 21710 - DNA, 20 bp, synthetic construct
  misc_feature 1..20: note = chemically synthesized
  source 1..20: mol_type = other DNA
tgcacagcagcctggacctg

SEQ ID NO: 21711 - DNA, 20 bp, synthetic construct
  misc_feature 1..20: note = chemically synthesized
  source 1..20: mol_type = other DNA
acagcagcctggacctgtgg

SEQ ID NO: 21712 - DNA, 20 bp, synthetic construct
  misc_feature 1..20: note = chemically synthesized
  source 1..20: mol_type = other DNA
agcagcctggacctgtggca

SEQ ID NO: 21713 - DNA, 20 bp, synthetic construct
  misc_feature 1..20: note = chemically synthesized
  source 1..20: mol_type = other DNA
tgtggcagagccttctgttc

SEQ ID NO: 21714 - DNA, 20 bp, synthetic construct
  misc_feature 1..20: note = chemically synthesized
  source 1..20: mol_type = other DNA
ttctggactccactcaaaac

SEQ ID NO: 21715 - DNA, 20 bp, synthetic construct
  misc_feature 1..20: note = chemically synthesized
  source 1..20: mol_type = other DNA
tggactccactcaaaactgg

SEQ ID NO: 21716 - DNA, 20 bp, synthetic construct
  misc_feature 1..20: note = chemically synthesized
  source 1..20: mol_type = other DNA
actcaaaactggcagccttt

SEQ ID NO: 21717 - DNA, 20 bp, synthetic construct
  misc_feature 1..20: note = chemically synthesized
  source 1..20: mol_type = other DNA
cttttggatcactcgataaa

SEQ ID NO: 21718 - DNA, 20 bp, synthetic construct
  misc_feature 1..20: note = chemically synthesized
  source 1..20: mol_type = other DNA
ttttggatcactcgataaat

SEQ ID NO: 21719 - DNA, 20 bp, synthetic construct
  misc_feature 1..20: note = chemically synthesized
  source 1..20: mol_type = other DNA
ggatcactcgataaatgggc

SEQ ID NO: 21720 - DNA, 20 bp, synthetic construct
  misc_feature 1..20: note = chemically synthesized
  source 1..20: mol_type = other DNA
atcactcgataaatgggcca

SEQ ID NO: 21721 - DNA, 20 bp, synthetic construct
  misc_feature 1..20: note = chemically synthesized
  source 1..20: mol_type = other DNA
ccagagtaacacacccaaat

SEQ ID NO: 21722 - DNA, 20 bp, synthetic construct
  misc_feature 1..20: note = chemically synthesized
  source 1..20: mol_type = other DNA
cagagtaacacacccaaatc

SEQ ID NO: 21723 - DNA, 20 bp, synthetic construct
  misc_feature 1..20: note = chemically synthesized
  source 1..20: mol_type = other DNA
tgttgcctccaaaatccaaa

SEQ ID NO: 21724 - DNA, 20 bp, synthetic construct
  misc_feature 1..20: note = chemically synthesized
  source 1..20: mol_type = other DNA
gttgcctccaaaatccaaat

SEQ ID NO: 21725 - DNA, 20 bp, synthetic construct
  misc_feature 1..20: note = chemically synthesized
  source 1..20: mol_type = other DNA
caaaatccaaataggcccac

SEQ ID NO: 21726 - DNA, 20 bp, synthetic construct
  misc_feature 1..20: note = chemically synthesized
  source 1..20: mol_type = other DNA
aaaatccaaataggcccact

SEQ ID NO: 21727 - DNA, 20 bp, synthetic construct
  misc_feature 1..20: note = chemically synthesized
  source 1..20: mol_type = other DNA
taggcgttgtgcctatttct

SEQ ID NO: 21728 - DNA, 20 bp, synthetic construct
  misc_feature 1..20: note = chemically synthesized
  source 1..20: mol_type = other DNA
tgtgcctatttcttggttgt

SEQ ID NO: 21729 - DNA, 20 bp, synthetic construct
  misc_feature 1..20: note = chemically synthesized
  source 1..20: mol_type = other DNA
tgcctatttcttggttgtaa

SEQ ID NO: 21730 - DNA, 20 bp, synthetic construct
  misc_feature 1..20: note = chemically synthesized
  source 1..20: mol_type = other DNA
ctatttcttggttgtaagag

SEQ ID NO: 21731 - DNA, 20 bp, synthetic construct
  misc_feature 1..20: note = chemically synthesized
  source 1..20: mol_type = other DNA
gttgtaagagtggccaaatg

SEQ ID NO: 21732 - DNA, 20 bp, synthetic construct
  misc_feature 1..20: note = chemically synthesized
  source 1..20: mol_type = other DNA
cagcaaattatccttcactt

SEQ ID NO: 21733 - DNA, 20 bp, synthetic construct
  misc_feature 1..20: note = chemically synthesized
  source 1..20: mol_type = other DNA
caaattatccttcactttag

SEQ ID NO: 21734 - DNA, 20 bp, synthetic construct
  misc_feature 1..20: note = chemically synthesized
  source 1..20: mol_type = other DNA
aaattatccttcactttaga

SEQ ID NO: 21735 - DNA, 20 bp, synthetic construct
  misc_feature 1..20: note = chemically synthesized
  source 1..20: mol_type = other DNA
actttagaaggaatatctca

SEQ ID NO: 21736 - DNA, 20 bp, synthetic construct
  misc_feature 1..20: note = chemically synthesized
  source 1..20: mol_type = other DNA
tttagaaggaatatctcaaa

SEQ ID NO: 21737 - DNA, 20 bp, synthetic construct
  misc_feature 1..20: note = chemically synthesized
  source 1..20: mol_type = other DNA
ctcaaagagccccaaaccat

SEQ ID NO: 21738 - DNA, 20 bp, synthetic construct
  misc_feature 1..20: note = chemically synthesized
  source 1..20: mol_type = other DNA
ggacccctataaattttact

SEQ ID NO: 21739 - DNA, 20 bp, synthetic construct
  misc_feature 1..20: note = chemically synthesized
  source 1..20: mol_type = other DNA
gacccctataaattttactg

SEQ ID NO: 21740 - DNA, 20 bp, synthetic construct
  misc_feature 1..20: note = chemically synthesized
  source 1..20: mol_type = other DNA
ccctataaattttactgagg

SEQ ID NO: 21741 - DNA, 20 bp, synthetic construct
  misc_feature 1..20: note = chemically synthesized
  source 1..20: mol_type = other DNA
tataaattttactgaggtag

SEQ ID NO: 21742 - DNA, 20 bp, synthetic construct
  misc_feature 1..20: note = chemically synthesized
  source 1..20: mol_type = other DNA
ataaattttactgaggtaga

SEQ ID NO: 21743 - DNA, 20 bp, synthetic construct
  misc_feature 1..20: note = chemically synthesized
  source 1..20: mol_type = other DNA
agaaggtccctgaatttaat

SEQ ID NO: 21744 - DNA, 20 bp, synthetic construct
  misc_feature 1..20: note = chemically synthesized
  source 1..20: mol_type = other DNA
aaatgtctcatcaataaatc

SEQ ID NO: 21745 - DNA, 20 bp, synthetic construct
  misc_feature 1..20: note = chemically synthesized
  source 1..20: mol_type = other DNA
gtttgctacttcttgctcac

SEQ ID NO: 21746 - DNA, 20 bp, synthetic construct
  misc_feature 1..20: note = chemically synthesized
  source 1..20: mol_type = other DNA
tacttcttgctcactagttc

SEQ ID NO: 21747 - DNA, 20 bp, synthetic construct
  misc_feature 1..20: note = chemically synthesized
  source 1..20: mol_type = other DNA
tcttgctcactagttccagt

SEQ ID NO: 21748 - DNA, 20 bp, synthetic construct
  misc_feature 1..20: note = chemically synthesized
  source 1..20: mol_type = other DNA
tcagcatgtcatcaatgtaa

SEQ ID NO: 21749 - DNA, 20 bp, synthetic construct
  misc_feature 1..20: note = chemically synthesized
  source 1..20: mol_type = other DNA
tggaccactgtgatatcttg

SEQ ID NO: 21750 - DNA, 20 bp, synthetic construct
  misc_feature 1..20: note = chemically synthesized
  source 1..20: mol_type = other DNA
accactgtgatatcttgtgg

SEQ ID NO: 21751 - DNA, 20 bp, synthetic construct
  misc_feature 1..20: note = chemically synthesized
  source 1..20: mol_type = other DNA
gtgatatcttgtggaagtga

SEQ ID NO: 21752 - DNA, 20 bp, synthetic construct
  misc_feature 1..20: note = chemically synthesized
  source 1..20: mol_type = other DNA
tgatatcttgtggaagtgaa

SEQ ID NO: 21753 - DNA, 20 bp, synthetic construct
  misc_feature 1..20: note = chemically synthesized
  source 1..20: mol_type = other DNA
atcttgtggaagtgaaaggt

SEQ ID NO: 21754 - DNA, 20 bp, synthetic construct
  misc_feature 1..20: note = chemically synthesized
  source 1..20: mol_type = other DNA
tgtggaagtgaaaggtgagc

SEQ ID NO: 21755 - DNA, 20 bp, synthetic construct
  misc_feature 1..20: note = chemically synthesized
  source 1..20: mol_type = other DNA
tgagcaagttctctccaaat

SEQ ID NO: 21756 - DNA, 20 bp, synthetic construct
  misc_feature 1..20: note = chemically synthesized
  source 1..20: mol_type = other DNA
gttctctccaaataagatta

SEQ ID NO: 21757 - DNA, 20 bp, synthetic construct
  misc_feature 1..20: note = chemically synthesized
  source 1..20: mol_type = other DNA
ccaaataagattatggcaca

SEQ ID NO: 21758 - DNA, 20 bp, synthetic construct
  misc_feature 1..20: note = chemically synthesized
  source 1..20: mol_type = other DNA
ataagattatggcacaaagc

SEQ ID NO: 21759 - DNA, 20 bp, synthetic construct
  misc_feature 1..20: note = chemically synthesized
  source 1..20: mol_type = other DNA
aagattatggcacaaagctg

SEQ ID NO: 21760 - DNA, 20 bp, synthetic construct
  misc_feature 1..20: note = chemically synthesized
  source 1..20: mol_type = other DNA
gattatggcacaaagctgga

SEQ ID NO: 21761 - DNA, 20 bp, synthetic construct
  misc_feature 1..20: note = chemically synthesized
  source 1..20: mol_type = other DNA
tggagagttgatatactcct

SEQ ID NO: 21762 - DNA, 20 bp, synthetic construct
  misc_feature 1..20: note = chemically synthesized
  source 1..20: mol_type = other DNA
ttttctttcatcactttgtc

SEQ ID NO: 21763 - DNA, 20 bp, synthetic construct
  misc_feature 1..20: note = chemically synthesized
  source 1..20: mol_type = other DNA
actttgtccagcgaacttac

SEQ ID NO: 21764 - DNA, 20 bp, synthetic construct
  misc_feature 1..20: note = chemically synthesized
  source 1..20: mol_type = other DNA
gttccttgattctccacata

SEQ ID NO: 21765 - DNA, 20 bp, synthetic construct
  misc_feature 1..20: note = chemically synthesized
  source 1..20: mol_type = other DNA
gattctccacatatagtcaa

SEQ ID NO: 21766 - DNA, 20 bp, synthetic construct
  misc_feature 1..20: note = chemically synthesized
  source 1..20: mol_type = other DNA
agtcaaaagtattatgtata

SEQ ID NO: 21767 - DNA, 20 bp, synthetic construct
  misc_feature 1..20: note = chemically synthesized
  source 1..20: mol_type = other DNA
caaaagtattatgtatacag

SEQ ID NO: 21768 - DNA, 20 bp, synthetic construct
  misc_feature 1..20: note = chemically synthesized
  source 1..20: mol_type = other DNA
ctaaattccttgcctctcac

SEQ ID NO: 21769 - DNA, 20 bp, synthetic construct
  misc_feature 1..20: note = chemically synthesized
  source 1..20: mol_type = other DNA
cctctcacaagcgttgaatc

SEQ ID NO: 21770 - DNA, 20 bp, synthetic construct
  misc_feature 1..20: note = chemically synthesized
  source 1..20: mol_type = other DNA
tctcacaagcgttgaatcaa

SEQ ID NO: 21771 - DNA, 20 bp, synthetic construct
  misc_feature 1..20: note = chemically synthesized
  source 1..20: mol_type = other DNA
ctctctaaacaattgatgcc

SEQ ID NO: 21772 - DNA, 20 bp, synthetic construct
  misc_feature 1..20: note = chemically synthesized
  source 1..20: mol_type = other DNA
tctctaaacaattgatgcca

SEQ ID NO: 21773 - DNA, 20 bp, synthetic construct
  misc_feature 1..20: note = chemically synthesized
  source 1..20: mol_type = other DNA
caattgatgccaaggattat

SEQ ID NO: 21774 - DNA, 20 bp, synthetic construct
  misc_feature 1..20: note = chemically synthesized
  source 1..20: mol_type = other DNA
atcagtgttctccataccat

SEQ ID NO: 21775 - DNA, 20 bp, synthetic construct
  misc_feature 1..20: note = chemically synthesized
  source 1..20: mol_type = other DNA
agtgttctccataccattag

SEQ ID NO: 21776 - DNA, 20 bp, synthetic construct
  misc_feature 1..20: note = chemically synthesized
  source 1..20: mol_type = other DNA
gttctccataccattagaag

SEQ ID NO: 21777 - DNA, 20 bp, synthetic construct
  misc_feature 1..20: note = chemically synthesized
  source 1..20: mol_type = other DNA
tctccataccattagaagaa

SEQ ID NO: 21778 - DNA, 20 bp, synthetic construct
  misc_feature 1..20: note = chemically synthesized
  source 1..20: mol_type = other DNA
accattagaagaagagtcct

SEQ ID NO: 21779 - DNA, 20 bp, synthetic construct
  misc_feature 1..20: note = chemically synthesized
  source 1..20: mol_type = other DNA
agaagagtccttagcatatt

SEQ ID NO: 21780 - DNA, 20 bp, synthetic construct
  misc_feature 1..20: note = chemically synthesized
  source 1..20: mol_type = other DNA
gaagagtccttagcatattt

SEQ ID NO: 21781 - DNA, 20 bp, synthetic construct
  misc_feature 1..20: note = chemically synthesized
  source 1..20: mol_type = other DNA
tatttgggtctaatcatatt

SEQ ID NO: 21782 - DNA, 20 bp, synthetic construct
  misc_feature 1..20: note = chemically synthesized
  source 1..20: mol_type = other DNA
ttgggtctaatcatattaag

SEQ ID NO: 21783 - DNA, 20 bp, synthetic construct
  misc_feature 1..20: note = chemically synthesized
  source 1..20: mol_type = other DNA
tcatattaagcagccaactc

SEQ ID NO: 21784 - DNA, 20 bp, synthetic construct
  misc_feature 1..20: note = chemically synthesized
  source 1..20: mol_type = other DNA
agaaaccccaaaaccaatga

SEQ ID NO: 21785 - DNA, 20 bp, synthetic construct
  misc_feature 1..20: note = chemically synthesized
  source 1..20: mol_type = other DNA
tccttaatattctgttcctc

SEQ ID NO: 21786 - DNA, 20 bp, synthetic construct
  misc_feature 1..20: note = chemically synthesized
  source 1..20: mol_type = other DNA
tgttcctctagaaccactcc

SEQ ID NO: 21787 - DNA, 20 bp, synthetic construct
  misc_feature 1..20: note = chemically synthesized
  source 1..20: mol_type = other DNA
cctggtaccaaaatctgtat

SEQ ID NO: 21788 - DNA, 20 bp, synthetic construct
  misc_feature 1..20: note = chemically synthesized
  source 1..20: mol_type = other DNA
ctggtaccaaaatctgtatt

SEQ ID NO: 21789 - DNA, 20 bp, synthetic construct
  misc_feature 1..20: note = chemically synthesized
  source 1..20: mol_type = other DNA
tggtaccaaaatctgtatta

SEQ ID NO: 21790 - DNA, 20 bp, synthetic construct
  misc_feature 1..20: note = chemically synthesized
  source 1..20: mol_type = other DNA
aaatctgtattagggttcta

SEQ ID NO: 21791 - DNA, 20 bp, synthetic construct
  misc_feature 1..20: note = chemically synthesized
  source 1..20: mol_type = other DNA
atctgtattagggttctaca

SEQ ID NO: 21792 - DNA, 20 bp, synthetic construct
  misc_feature 1..20: note = chemically synthesized
  source 1..20: mol_type = other DNA
attagggttctacagagaaa

SEQ ID NO: 21793 - DNA, 20 bp, synthetic construct
  misc_feature 1..20: note = chemically synthesized
  source 1..20: mol_type = other DNA
ctacagagaaacagaattaa

SEQ ID NO: 21794 - DNA, 20 bp, synthetic construct
  misc_feature 1..20: note = chemically synthesized
  source 1..20: mol_type = other DNA
tacagagaaacagaattaat

SEQ ID NO: 21795 - DNA, 20 bp, synthetic construct
  misc_feature 1..20: note = chemically synthesized
  source 1..20: mol_type = other DNA
cagagaaacagaattaatag

SEQ ID NO: 21796 - DNA, 20 bp, synthetic construct
  misc_feature 1..20: note = chemically synthesized
  source 1..20: mol_type = other DNA
ctctatatctatatctatat

SEQ ID NO: 21797 - DNA, 20 bp, synthetic construct
  misc_feature 1..20: note = chemically synthesized
  source 1..20: mol_type = other DNA
ctatatctatatctatatga

SEQ ID NO: 21798 - DNA, 20 bp, synthetic construct
  misc_feature 1..20: note = chemically synthesized
  source 1..20: mol_type = other DNA
ctatatgagagtttattatg

SEQ ID NO: 21799 - DNA, 20 bp, synthetic construct
  misc_feature 1..20: note = chemically synthesized
  source 1..20: mol_type = other DNA
gtattgactcacatgttcac

SEQ ID NO: 21800 - DNA, 20 bp, synthetic construct
  misc_feature 1..20: note = chemically synthesized
  source 1..20: mol_type = other DNA
tattgactcacatgttcaca

SEQ ID NO: 21801 - DNA, 20 bp, synthetic construct
  misc_feature 1..20: note = chemically synthesized
  source 1..20: mol_type = other DNA
atgttcacaaggtcccaaaa

SEQ ID NO: 21802 - DNA, 20 bp, synthetic construct
  misc_feature 1..20: note = chemically synthesized
  source 1..20: mol_type = other DNA
tgttcacaaggtcccaaaac

SEQ ID NO: 21803 - DNA, 20 bp, synthetic construct
  misc_feature 1..20: note = chemically synthesized
  source 1..20: mol_type = other DNA
tcccaaaacaggccatctgc

SEQ ID NO: 21804 - DNA, 20 bp, synthetic construct
  misc_feature 1..20: note = chemically synthesized
  source 1..20: mol_type = other DNA
aaacaggccatctgccagct

SEQ ID NO: 21805 - DNA, 20 bp, synthetic construct
  misc_feature 1..20: note = chemically synthesized
  source 1..20: mol_type = other DNA
aacaggccatctgccagctg

SEQ ID NO: 21806 - DNA, 20 bp, synthetic construct
  misc_feature 1..20: note = chemically synthesized
  source 1..20: mol_type = other DNA
ccatctgccagctgaggaac

SEQ ID NO: 21807 - DNA, 20 bp, synthetic construct
  misc_feature 1..20: note = chemically synthesized
  source 1..20: mol_type = other DNA
catctgccagctgaggaaca

SEQ ID NO: 21808 - DNA, 20 bp, synthetic construct
  misc_feature 1..20: note = chemically synthesized
  source 1..20: mol_type = other DNA
ctgccagctgaggaacaagg

SEQ ID NO: 21809 - DNA, 20 bp, synthetic construct
  misc_feature 1..20: note = chemically synthesized
  source 1..20: mol_type = other DNA
cagctgaggaacaaggaagc

SEQ ID NO: 21810 - DNA, 20 bp, synthetic construct
  misc_feature 1..20: note = chemically synthesized
  source 1..20: mol_type = other DNA
tgaggaacaaggaagctagt

SEQ ID NO: 21811 - DNA, 20 bp, synthetic construct
  misc_feature 1..20: note = chemically synthesized
  source 1..20: mol_type = other DNA
aggaacaaggaagctagtcg

SEQ ID NO: 21812 - DNA, 20 bp, synthetic construct
  misc_feature 1..20: note = chemically synthesized
  source 1..20: mol_type = other DNA
ggaagctagtcggagtccca

SEQ ID NO: 21813 - DNA, 20 bp, synthetic construct
  misc_feature 1..20: note = chemically synthesized
  source 1..20: mol_type = other DNA
tagtcggagtcccaaagctg

SEQ ID NO: 21814 - DNA, 20 bp, synthetic construct
  misc_feature 1..20: note = chemically synthesized
  source 1..20: mol_type = other DNA
agtcccaaagctgaagaacc

SEQ ID NO: 21815 - DNA, 20 bp, synthetic construct
  misc_feature 1..20: note = chemically synthesized
  source 1..20: mol_type = other DNA
tcccaaagctgaagaacctg

SEQ ID NO: 21816 - DNA, 20 bp, synthetic construct
  misc_feature 1..20: note = chemically synthesized
  source 1..20: mol_type = other DNA
gaacctggagttcaatgttc

SEQ ID NO: 21817 - DNA, 20 bp, synthetic construct
  misc_feature 1..20: note = chemically synthesized
  source 1..20: mol_type = other DNA
aacctggagttcaatgttcc

SEQ ID NO: 21818 - DNA, 20 bp, synthetic construct
  misc_feature 1..20: note = chemically synthesized
  source 1..20: mol_type = other DNA
acctggagttcaatgttcca

SEQ ID NO: 21819 - DNA, 20 bp, synthetic construct
  misc_feature 1..20: note = chemically synthesized
  source 1..20: mol_type = other DNA
tggagttcaatgttccaggg

SEQ ID NO: 21820 - DNA, 20 bp, synthetic construct
  misc_feature 1..20: note = chemically synthesized
  source 1..20: mol_type = other DNA
ggagttcaatgttccagggc

SEQ ID NO: 21821 - DNA, 20 bp, synthetic construct
  misc_feature 1..20: note = chemically synthesized
  source 1..20: mol_type = other DNA
gttcaatgttccagggcagg

SEQ ID NO: 21822 - DNA, 20 bp, synthetic construct
  misc_feature 1..20: note = chemically synthesized
  source 1..20: mol_type = other DNA
gttccagggcaggaagaatc

SEQ ID NO: 21823 - DNA, 20 bp, synthetic construct
  misc_feature 1..20: note = chemically synthesized
  source 1..20: mol_type = other DNA
agggcaggaagaatccagca

SEQ ID NO: 21824 - DNA, 20 bp, synthetic construct
  misc_feature 1..20: note = chemically synthesized
  source 1..20: mol_type = other DNA
gggcaggaagaatccagcat

SEQ ID NO: 21825 - DNA, 20 bp, synthetic construct
  misc_feature 1..20: note = chemically synthesized
  source 1..20: mol_type = other DNA
gcaggaagaatccagcatgg

SEQ ID NO: 21826 - DNA, 20 bp, synthetic construct
  misc_feature 1..20: note = chemically synthesized
  source 1..20: mol_type = other DNA
tccagcatgggagaaaaatg

SEQ ID NO: 21827 - DNA, 20 bp, synthetic construct
  misc_feature 1..20: note = chemically synthesized
  source 1..20: mol_type = other DNA
ccagcatgggagaaaaatgt

SEQ ID NO: 21828 - DNA, 20 bp, synthetic construct
  misc_feature 1..20: note = chemically synthesized
  source 1..20: mol_type = other DNA
catgggagaaaaatgtaggc

SEQ ID NO: 21829 - DNA, 20 bp, synthetic construct
  misc_feature 1..20: note = chemically synthesized
  source 1..20: mol_type = other DNA
atgggagaaaaatgtaggct

SEQ ID NO: 21830 - DNA, 20 bp, synthetic construct
  misc_feature 1..20: note = chemically synthesized
  source 1..20: mol_type = other DNA
aaaatgtaggctgggatgcc

SEQ ID NO: 21831 - DNA, 20 bp, synthetic construct
  misc_feature 1..20: note = chemically synthesized
  source 1..20: mol_type = other DNA
gctgggatgccaagccaatc

SEQ ID NO: 21832 - DNA, 20 bp, synthetic construct
  misc_feature 1..20: note = chemically synthesized
  source 1..20: mol_type = other DNA
tttctgcctgctttatatcc

SEQ ID NO: 21833 - DNA, 20 bp, synthetic construct
  misc_feature 1..20: note = chemically synthesized
  source 1..20: mol_type = other DNA
gctttatatcctggctgtgc

SEQ ID NO: 21834 - DNA, 20 bp, synthetic construct
  misc_feature 1..20: note = chemically synthesized
  source 1..20: mol_type = other DNA
tggctgtgctggcaactgat

SEQ ID NO: 21835 - DNA, 20 bp, synthetic construct
  misc_feature 1..20: note = chemically synthesized
  source 1..20: mol_type = other DNA
tgtgctggcaactgattaga

SEQ ID NO: 21836 - DNA, 20 bp, synthetic construct
  misc_feature 1..20: note = chemically synthesized
  source 1..20: mol_type = other DNA
ctgattagatggtgcccacc

SEQ ID NO: 21837 - DNA, 20 bp, synthetic construct
  misc_feature 1..20: note = chemically synthesized
  source 1..20: mol_type = other DNA
agatggtgcccacccagatt

SEQ ID NO: 21838 - DNA, 20 bp, synthetic construct
  misc_feature 1..20: note = chemically synthesized
  source 1..20: mol_type = other DNA
gatggtgcccacccagatta

SEQ ID NO: 21839 - DNA, 20 bp, synthetic construct
  misc_feature 1..20: note = chemically synthesized
  source 1..20: mol_type = other DNA
atggtgcccacccagattaa

SEQ ID NO: 21840 - DNA, 20 bp, synthetic construct
  misc_feature 1..20: note = chemically synthesized
  source 1..20: mol_type = other DNA
gtgcccacccagattaaggg

SEQ ID NO: 21841 - DNA, 20 bp, synthetic construct
  misc_feature 1..20: note = chemically synthesized
  source 1..20: mol_type = other DNA
tgcccacccagattaagggt

SEQ ID NO: 21842 - DNA, 20 bp, synthetic construct
  misc_feature 1..20: note = chemically synthesized
  source 1..20: mol_type = other DNA
aagggtgggtctgccttccc

SEQ ID NO: 21843 - DNA, 20 bp, synthetic construct
  misc_feature 1..20: note = chemically synthesized
  source 1..20: mol_type = other DNA
actgaaatattaatctcctt

SEQ ID NO: 21844 - DNA, 20 bp, synthetic construct
  misc_feature 1..20: note = chemically synthesized
  source 1..20: mol_type = other DNA
ctcctttggtaacaccctca

SEQ ID NO: 21845 - DNA, 20 bp, synthetic construct
  misc_feature 1..20: note = chemically synthesized
  source 1..20: mol_type = other DNA
acaccctcacagacacaccc

SEQ ID NO: 21846 - DNA, 20 bp, synthetic construct
  misc_feature 1..20: note = chemically synthesized
  source 1..20: mol_type = other DNA
gatcattactttgcatcctt

SEQ ID NO: 21847 - DNA, 20 bp, synthetic construct
  misc_feature 1..20: note = chemically synthesized
  source 1..20: mol_type = other DNA
ttgcatccttcagtccaatc

SEQ ID NO: 21848 - DNA, 20 bp, synthetic construct
  misc_feature 1..20: note = chemically synthesized
  source 1..20: mol_type = other DNA
agtccaatcaagttgacact

SEQ ID NO: 21849 - DNA, 20 bp, synthetic construct
  misc_feature 1..20: note = chemically synthesized
  source 1..20: mol_type = other DNA
acactcagtattaaccatca

SEQ ID NO: 21850 - DNA, 20 bp, synthetic construct
  misc_feature 1..20: note = chemically synthesized
  source 1..20: mol_type = other DNA
catcacagtcactttctaat

SEQ ID NO: 21851 - DNA, 20 bp, synthetic construct
  misc_feature 1..20: note = chemically synthesized
  source 1..20: mol_type = other DNA
atcacagtcactttctaatg

SEQ ID NO: 21852 - DNA, 20 bp, synthetic construct
  misc_feature 1..20: note = chemically synthesized
  source 1..20: mol_type = other DNA
cagtcactttctaatgaggt

SEQ ID NO: 21853 - DNA, 20 bp, synthetic construct
  misc_feature 1..20: note = chemically synthesized
  source 1..20: mol_type = other DNA
aggttggtttttttgttgtt

SEQ ID NO: 21854 - DNA, 20 bp, synthetic construct
  misc_feature 1..20: note = chemically synthesized
  source 1..20: mol_type = other DNA
ttttgttgttgagttccttg

SEQ ID NO: 21855 - DNA, 20 bp, synthetic construct
  misc_feature 1..20: note = chemically synthesized
  source 1..20: mol_type = other DNA
tccttgtagattctgtatat

SEQ ID NO: 21856 - DNA, 20 bp, synthetic construct
  misc_feature 1..20: note = chemically synthesized
  source 1..20: mol_type = other DNA
ttagccttttgttgcattca

SEQ ID NO: 21857 - DNA, 20 bp, synthetic construct
  misc_feature 1..20: note = chemically synthesized
  source 1..20: mol_type = other DNA
aatttttttttctcattctg

SEQ ID NO: 21858 - DNA, 20 bp, synthetic construct
  misc_feature 1..20: note = chemically synthesized
  source 1..20: mol_type = other DNA
atttttttttctcattctgt

SEQ ID NO: 21859 - DNA, 20 bp, synthetic construct
  misc_feature 1..20: note = chemically synthesized
  source 1..20: mol_type = other DNA
atccgtttactctgttgatt

SEQ ID NO: 21860 - DNA, 20 bp, synthetic construct
  misc_feature 1..20: note = chemically synthesized
  source 1..20: mol_type = other DNA
tctgttgattcggtcttttg

SEQ ID NO: 21861 - DNA, 20 bp, synthetic construct
  misc_feature 1..20: note = chemically synthesized
  source 1..20: mol_type = other DNA
tgattcggtcttttgcggtg

SEQ ID NO: 21862 - DNA, 20 bp, synthetic construct
  misc_feature 1..20: note = chemically synthesized
  source 1..20: mol_type = other DNA
ttcggtcttttgcggtgcag

SEQ ID NO: 21863 - DNA, 20 bp, synthetic construct
  misc_feature 1..20: note = chemically synthesized
  source 1..20: mol_type = other DNA
tttgcggtgcagaagcattt

SEQ ID NO: 21864 - DNA, 20 bp, synthetic construct
  misc_feature 1..20: note = chemically synthesized
  source 1..20: mol_type = other DNA
agaagcattttagtttaatt

SEQ ID NO: 21865 - DNA, 20 bp, synthetic construct
  misc_feature 1..20: note = chemically synthesized
  source 1..20: mol_type = other DNA
gtttttgtttttgttgtgtt

SEQ ID NO: 21866 - DNA, 20 bp, synthetic construct
  misc_feature 1..20: note = chemically synthesized
  source 1..20: mol_type = other DNA
tttttgttgtgtttagtttt

SEQ ID NO: 21867 - DNA, 20 bp, synthetic construct
  misc_feature 1..20: note = chemically synthesized
  source 1..20: mol_type = other DNA
ttttgttgtgtttagttttg

SEQ ID NO: 21868 - DNA, 20 bp, synthetic construct
  misc_feature 1..20: note = chemically synthesized
  source 1..20: mol_type = other DNA
tgtgtttagttttgaggact

SEQ ID NO: 21869 - DNA, 20 bp, synthetic construct
  misc_feature 1..20: note = chemically synthesized
  source 1..20: mol_type = other DNA
ttggtcataaattctttgcc

SEQ ID NO: 21870 - DNA, 20 bp, synthetic construct
  misc_feature 1..20: note = chemically synthesized
  source 1..20: mol_type = other DNA
tggtcataaattctttgcct

SEQ ID NO: 21871 - DNA, 20 bp, synthetic construct
  misc_feature 1..20: note = chemically synthesized
  source 1..20: mol_type = other DNA
tctaatttttaatcctcttt

SEQ ID NO: 21872 - DNA, 20 bp, synthetic construct
  misc_feature 1..20: note = chemically synthesized
  source 1..20: mol_type = other DNA
taatttttaatcctctttta

SEQ ID NO: 21873 - DNA, 20 bp, synthetic construct
  misc_feature 1..20: note = chemically synthesized
  source 1..20: mol_type = other DNA
tttacccccatttgacacat

SEQ ID NO: 21874 - DNA, 20 bp, synthetic construct
  misc_feature 1..20: note = chemically synthesized
  source 1..20: mol_type = other DNA
atttgacacatgagctaatt

SEQ ID NO: 21875 - DNA, 20 bp, synthetic construct
  misc_feature 1..20: note = chemically synthesized
  source 1..20: mol_type = other DNA
aattgagccttctgtctgtt

SEQ ID NO: 21876 - DNA, 20 bp, synthetic construct
  misc_feature 1..20: note = chemically synthesized
  source 1..20: mol_type = other DNA
gagccttctgtctgttaagt

SEQ ID NO: 21877 - DNA, 20 bp, synthetic construct
  misc_feature 1..20: note = chemically synthesized
  source 1..20: mol_type = other DNA
tgtctgttaagtaagttgac

SEQ ID NO: 21878 - DNA, 20 bp, synthetic construct
  misc_feature 1..20: note = chemically synthesized
  source 1..20: mol_type = other DNA
gttaagtaagttgactagtt

SEQ ID NO: 21879 - DNA, 20 bp, synthetic construct
  misc_feature 1..20: note = chemically synthesized
  source 1..20: mol_type = other DNA
taagttgactagttcagtgt

SEQ ID NO: 21880 - DNA, 20 bp, synthetic construct
  misc_feature 1..20: note = chemically synthesized
  source 1..20: mol_type = other DNA
tttttgccatcataatgctt

SEQ ID NO: 21881 - DNA, 20 bp, synthetic construct
  misc_feature 1..20: note = chemically synthesized
  source 1..20: mol_type = other DNA
tactctccttaattttcccc

SEQ ID NO: 21882 - DNA, 20 bp, synthetic construct
  misc_feature 1..20: note = chemically synthesized
  source 1..20: mol_type = other DNA
actctccttaattttccccc

SEQ ID NO: 21883 - DNA, 20 bp, synthetic construct
  misc_feature 1..20: note = chemically synthesized
  source 1..20: mol_type = other DNA
tccttaattttcccccagga

SEQ ID NO: 21884 - DNA, 20 bp, synthetic construct
  misc_feature 1..20: note = chemically synthesized
  source 1..20: mol_type = other DNA
tttcccccaggatggttttc

SEQ ID NO: 21885 - DNA, 20 bp, synthetic construct
  misc_feature 1..20: note = chemically synthesized
  source 1..20: mol_type = other DNA
ccaggatggttttctagatg

SEQ ID NO: 21886 - DNA, 20 bp, synthetic construct
  misc_feature 1..20: note = chemically synthesized
  source 1..20: mol_type = other DNA
ttttctagatgtggacttgc

SEQ ID NO: 21887 - DNA, 20 bp, synthetic construct
  misc_feature 1..20: note = chemically synthesized
  source 1..20: mol_type = other DNA
atgtggacttgctggatcca

SEQ ID NO: 21888 - DNA, 20 bp, synthetic construct
  misc_feature 1..20: note = chemically synthesized
  source 1..20: mol_type = other DNA
ccaaatgtatccatatattg

SEQ ID NO: 21889 - DNA, 20 bp, synthetic construct
  misc_feature 1..20: note = chemically synthesized
  source 1..20: mol_type = other DNA
attgtggctttgtgttttaa

SEQ ID NO: 21890 - DNA, 20 bp, synthetic construct
  misc_feature 1..20: note = chemically synthesized
  source 1..20: mol_type = other DNA
tgtggctttgtgttttaata

SEQ ID NO: 21891 - DNA, 20 bp, synthetic construct
  misc_feature 1..20: note = chemically synthesized
  source 1..20: mol_type = other DNA
gtggctttgtgttttaatag

SEQ ID NO: 21892 - DNA, 20 bp, synthetic construct
  misc_feature 1..20: note = chemically synthesized
  source 1..20: mol_type = other DNA
gctttgtgttttaatagagg

SEQ ID NO: 21893 - DNA, 20 bp, synthetic construct
  misc_feature 1..20: note = chemically synthesized
  source 1..20: mol_type = other DNA
ttgtgttttaatagaggtag

SEQ ID NO: 21894 - DNA, 20 bp, synthetic construct
  misc_feature 1..20: note = chemically synthesized
  source 1..20: mol_type = other DNA
aatagaggtagcagcaatat

SEQ ID NO: 21895 - DNA, 20 bp, synthetic construct
  misc_feature 1..20: note = chemically synthesized
  source 1..20: mol_type = other DNA
tagaggtagcagcaatatta

SEQ ID NO: 21896 - DNA, 20 bp, synthetic construct
  misc_feature 1..20: note = chemically synthesized
  source 1..20: mol_type = other DNA
agaggtagcagcaatattag

SEQ ID NO: 21897 - DNA, 20 bp, synthetic construct
  misc_feature 1..20: note = chemically synthesized
  source 1..20: mol_type = other DNA
aggtagcagcaatattagag

SEQ ID NO: 21898 - DNA, 20 bp, synthetic construct
  misc_feature 1..20: note = chemically synthesized
  source 1..20: mol_type = other DNA
gtagcagcaatattagagga

SEQ ID NO: 21899 - DNA, 20 bp, synthetic construct
  misc_feature 1..20: note = chemically synthesized
  source 1..20: mol_type = other DNA
caatattagaggagagaatt

SEQ ID NO: 21900 - DNA, 20 bp, synthetic construct
  misc_feature 1..20: note = chemically synthesized
  source 1..20: mol_type = other DNA
aatattagaggagagaatta

SEQ ID NO: 21901 - DNA, 20 bp, synthetic construct
  misc_feature 1..20: note = chemically synthesized
  source 1..20: mol_type = other DNA
agagaattaaggaacgattc

SEQ ID NO: 21902 - DNA, 20 bp, synthetic construct
  misc_feature 1..20: note = chemically synthesized
  source 1..20: mol_type = other DNA
attaaggaacgattctagtg

SEQ ID NO: 21903 - DNA, 20 bp, synthetic construct
  misc_feature 1..20: note = chemically synthesized
  source 1..20: mol_type = other DNA
aaggaacgattctagtgtag

SEQ ID NO: 21904 - DNA, 20 bp, synthetic construct
  misc_feature 1..20: note = chemically synthesized
  source 1..20: mol_type = other DNA
aggaacgattctagtgtagc

SEQ ID NO: 21905 - DNA, 20 bp, synthetic construct
  misc_feature 1..20: note = chemically synthesized
  source 1..20: mol_type = other DNA
cgattctagtgtagcaggac

SEQ ID NO: 21906 - DNA, 20 bp, synthetic construct
  misc_feature 1..20: note = chemically synthesized
  source 1..20: mol_type = other DNA
aagctgcatacaaaacccct

SEQ ID NO: 21907 - DNA, 20 bp, synthetic construct
  misc_feature 1..20: note = chemically synthesized
  source 1..20: mol_type = other DNA
tacaaaacccctcagacacc

SEQ ID NO: 21908 - DNA, 20 bp, synthetic construct
  misc_feature 1..20: note = chemically synthesized
  source 1..20: mol_type = other DNA
acccctcagacaccgagtta

SEQ ID NO: 21909 - DNA, 20 bp, synthetic construct
  misc_feature 1..20: note = chemically synthesized
  source 1..20: mol_type = other DNA
cctcagacaccgagttaaag

SEQ ID NO: 21910 - DNA, 20 bp, synthetic construct
  misc_feature 1..20: note = chemically synthesized
  source 1..20: mol_type = other DNA
ctcagacaccgagttaaaga

SEQ ID NO: 21911 - DNA, 20 bp, synthetic construct
  misc_feature 1..20: note = chemically synthesized
  source 1..20: mol_type = other DNA
agacaccgagttaaagaagg

SEQ ID NO: 21912 - DNA, 20 bp, synthetic construct
  misc_feature 1..20: note = chemically synthesized
  source 1..20: mol_type = other DNA
gacaccgagttaaagaagga

SEQ ID NO: 21913 - DNA, 20 bp, synthetic construct
  misc_feature 1..20: note = chemically synthesized
  source 1..20: mol_type = other DNA
acaccgagttaaagaaggaa

SEQ ID NO: 21914 - DNA, 20 bp, synthetic construct
  misc_feature 1..20: note = chemically synthesized
  source 1..20: mol_type = other DNA
aaagaaggaagggctttatt

SEQ ID NO: 21915 - DNA, 20 bp, synthetic construct
  misc_feature 1..20: note = chemically synthesized
  source 1..20: mol_type = other DNA
aaggaagggctttattcggc

SEQ ID NO: 21916 - DNA, 20 bp, synthetic construct
  misc_feature 1..20: note = chemically synthesized
  source 1..20: mol_type = other DNA
aggaagggctttattcggct

SEQ ID NO: 21917 - DNA, 20 bp, synthetic construct
  misc_feature 1..20: note = chemically synthesized
  source 1..20: mol_type = other DNA
gaagggctttattcggctgg

SEQ ID NO: 21918 - DNA, 20 bp, synthetic construct
  misc_feature 1..20: note = chemically synthesized
  source 1..20: mol_type = other DNA
gctttattcggctgggagct

SEQ ID NO: 21919 - DNA, 20 bp, synthetic construct
  misc_feature 1..20: note = chemically synthesized
  source 1..20: mol_type = other DNA
ctttattcggctgggagctt

SEQ ID NO: 21920 - DNA, 20 bp, synthetic construct
  misc_feature 1..20: note = chemically synthesized
  source 1..20: mol_type = other DNA
attcggctgggagcttgggc

SEQ ID NO: 21921 - DNA, 20 bp, synthetic construct
  misc_feature 1..20: note = chemically synthesized
  source 1..20: mol_type = other DNA
gactcacatctccaacaacc

SEQ ID NO: 21922 - DNA, 20 bp, synthetic construct
  misc_feature 1..20: note = chemically synthesized
  source 1..20: mol_type = other DNA
atctccaacaaccaagctct

SEQ ID NO: 21923 - DNA, 20 bp, synthetic construct
  misc_feature 1..20: note = chemically synthesized
  source 1..20: mol_type = other DNA
ctccaacaaccaagctctca

SEQ ID NO: 21924 - DNA, 20 bp, synthetic construct
  misc_feature 1..20: note = chemically synthesized
  source 1..20: mol_type = other DNA
aacaaccaagctctcagagt

SEQ ID NO: 21925 - DNA, 20 bp, synthetic construct
  misc_feature 1..20: note = chemically synthesized
  source 1..20: mol_type = other DNA
gagcaattcctgtccctttt

SEQ ID NO: 21926 - DNA, 20 bp, synthetic construct
  misc_feature 1..20: note = chemically synthesized
  source 1..20: mol_type = other DNA
agcaattcctgtccctttta

SEQ ID NO: 21927 - DNA, 20 bp, synthetic construct
  misc_feature 1..20: note = chemically synthesized
  source 1..20: mol_type = other DNA
gcaattcctgtcccttttaa

SEQ ID NO: 21928 - DNA, 20 bp, synthetic construct
  misc_feature 1..20: note = chemically synthesized
  source 1..20: mol_type = other DNA
ttttaagggcttacaactct

SEQ ID NO: 21929 - DNA, 20 bp, synthetic construct
  misc_feature 1..20: note = chemically synthesized
  source 1..20: mol_type = other DNA
tttaagggcttacaactcta

SEQ ID NO: 21930 - DNA, 20 bp, synthetic construct
  misc_feature 1..20: note = chemically synthesized
  source 1..20: mol_type = other DNA
ttaagggcttacaactctaa

SEQ ID NO: 21931 - DNA, 20 bp, synthetic construct
  misc_feature 1..20: note = chemically synthesized
  source 1..20: mol_type = other DNA
taagggcttacaactctaag

SEQ ID NO: 21932 - DNA, 20 bp, synthetic construct
  misc_feature 1..20: note = chemically synthesized
  source 1..20: mol_type = other DNA
aagggcttacaactctaagg

SEQ ID NO: 21933 - DNA, 20 bp, synthetic construct
  misc_feature 1..20: note = chemically synthesized
  source 1..20: mol_type = other DNA
actctaagggggtacatgac

SEQ ID NO: 21934 - DNA, 20 bp, synthetic construct
  misc_feature 1..20: note = chemically synthesized
  source 1..20: mol_type = other DNA
ctctaagggggtacatgact

SEQ ID NO: 21935 - DNA, 20 bp, synthetic construct
  misc_feature 1..20: note = chemically synthesized
  source 1..20: mol_type = other DNA
tctaagggggtacatgactg

SEQ ID NO: 21936 - DNA, 20 bp, synthetic construct
  misc_feature 1..20: note = chemically synthesized
  source 1..20: mol_type = other DNA
ctaagggggtacatgactgg

SEQ ID NO: 21937 - DNA, 20 bp, synthetic construct
  misc_feature 1..20: note = chemically synthesized
  source 1..20: mol_type = other DNA
tgactgggggctgcatgcac

SEQ ID NO: 21938 - DNA, 20 bp, synthetic construct
  misc_feature 1..20: note = chemically synthesized
  source 1..20: mol_type = other DNA
gggctgcatgcactggtcat

SEQ ID NO: 21939 - DNA, 20 bp, synthetic construct
  misc_feature 1..20: note = chemically synthesized
  source 1..20: mol_type = other DNA
gcatgcactggtcatcagaa

SEQ ID NO: 21940 - DNA, 20 bp, synthetic construct
  misc_feature 1..20: note = chemically synthesized
  source 1..20: mol_type = other DNA
cactggtcatcagaatggaa

SEQ ID NO: 21941 - DNA, 20 bp, synthetic construct
  misc_feature 1..20: note = chemically synthesized
  source 1..20: mol_type = other DNA
gtcatcagaatggaacagaa

SEQ ID NO: 21942 - DNA, 20 bp, synthetic construct
  misc_feature 1..20: note = chemically synthesized
  source 1..20: mol_type = other DNA
tcatcagaatggaacagaac

SEQ ID NO: 21943 - DNA, 20 bp, synthetic construct
  misc_feature 1..20: note = chemically synthesized
  source 1..20: mol_type = other DNA
cagaatggaacagaacagga

SEQ ID NO: 21944 - DNA, 20 bp, synthetic construct
  misc_feature 1..20: note = chemically synthesized
  source 1..20: mol_type = other DNA
agaatggaacagaacaggac

SEQ ID NO: 21945 - DNA, 20 bp, synthetic construct
  misc_feature 1..20: note = chemically synthesized
  source 1..20: mol_type = other DNA
gaatggaacagaacaggaca

SEQ ID NO: 21946 - DNA, 20 bp, synthetic construct
  misc_feature 1..20: note = chemically synthesized
  source 1..20: mol_type = other DNA
tttcacactgcttttccata

SEQ ID NO: 21947 - DNA, 20 bp, synthetic construct
  misc_feature 1..20: note = chemically synthesized
  source 1..20: mol_type = other DNA
ctgcttttccatacagtgtc

SEQ ID NO: 21948 - DNA, 20 bp, synthetic construct
  misc_feature 1..20: note = chemically synthesized
  source 1..20: mol_type = other DNA
catacagtgtctggaatcta

SEQ ID NO: 21949 - DNA, 20 bp, synthetic construct
  misc_feature 1..20: note = chemically synthesized
  source 1..20: mol_type = other DNA
gaatctatagataacataac

SEQ ID NO: 21950 - DNA, 20 bp, synthetic construct
  misc_feature 1..20: note = chemically synthesized
  source 1..20: mol_type = other DNA
ctatagataacataactggc

SEQ ID NO: 21951 - DNA, 20 bp, synthetic construct
  misc_feature 1..20: note = chemically synthesized
  source 1..20: mol_type = other DNA
tatagataacataactggcc

SEQ ID NO: 21952 - DNA, 20 bp, synthetic construct
  misc_feature 1..20: note = chemically synthesized
  source 1..20: mol_type = other DNA
gataacataactggccaggt

SEQ ID NO: 21953 - DNA, 20 bp, synthetic construct
  misc_feature 1..20: note = chemically synthesized
  source 1..20: mol_type = other DNA
ataacataactggccaggtc

SEQ ID NO: 21954 - DNA, 20 bp, synthetic construct
  misc_feature 1..20: note = chemically synthesized
  source 1..20: mol_type = other DNA
taacataactggccaggtca

SEQ ID NO: 21955 - DNA, 20 bp, synthetic construct
  misc_feature 1..20: note = chemically synthesized
  source 1..20: mol_type = other DNA
aacataactggccaggtcag

SEQ ID NO: 21956 - DNA, 20 bp, synthetic construct
  misc_feature 1..20: note = chemically synthesized
  source 1..20: mol_type = other DNA
gtcaggggtctatctttaac

SEQ ID NO: 21957 - DNA, 20 bp, synthetic construct
  misc_feature 1..20: note = chemically synthesized
  source 1..20: mol_type = other DNA
tcaggggtctatctttaacc

SEQ ID NO: 21958 - DNA, 20 bp, synthetic construct
  misc_feature 1..20: note = chemically synthesized
  source 1..20: mol_type = other DNA
ggtctatctttaaccaggcc

SEQ ID NO: 21959 - DNA, 20 bp, synthetic construct
  misc_feature 1..20: note = chemically synthesized
  source 1..20: mol_type = other DNA
gtctatctttaaccaggccc

SEQ ID NO: 21960 - DNA, 20 bp, synthetic construct
  misc_feature 1..20: note = chemically synthesized
  source 1..20: mol_type = other DNA
ctttaaccaggcccaggatg

SEQ ID NO: 21961 - DNA, 20 bp, synthetic construct
  misc_feature 1..20: note = chemically synthesized
  source 1..20: mol_type = other DNA
ccaggcccaggatgtggtct

SEQ ID NO: 21962 - DNA, 20 bp, synthetic construct
  misc_feature 1..20: note = chemically synthesized
  source 1..20: mol_type = other DNA
caggcccaggatgtggtctc

SEQ ID NO: 21963 - DNA, 20 bp, synthetic construct
  misc_feature 1..20: note = chemically synthesized
  source 1..20: mol_type = other DNA
ggtctcaggctgtttgcctg

SEQ ID NO: 21964 - DNA, 20 bp, synthetic construct
  misc_feature 1..20: note = chemically synthesized
  source 1..20: mol_type = other DNA
tggatttcatttctgccttt

SEQ ID NO: 21965 - DNA, 20 bp, synthetic construct
  misc_feature 1..20: note = chemically synthesized
  source 1..20: mol_type = other DNA
gtttttacttcttctttctt

SEQ ID NO: 21966 - DNA, 20 bp, synthetic construct
  misc_feature 1..20: note = chemically synthesized
  source 1..20: mol_type = other DNA
ttttacttcttctttctttg

SEQ ID NO: 21967 - DNA, 20 bp, synthetic construct
  misc_feature 1..20: note = chemically synthesized
  source 1..20: mol_type = other DNA
tttacttcttctttctttgg

SEQ ID NO: 21968 - DNA, 20 bp, synthetic construct
  misc_feature 1..20: note = chemically synthesized
  source 1..20: mol_type = other DNA
acttcttctttctttggagg

SEQ ID NO: 21969 - DNA, 20 bp, synthetic construct
  misc_feature 1..20: note = chemically synthesized
  source 1..20: mol_type = other DNA
ctttctttggaggcagaaat

SEQ ID NO: 21970 - DNA, 20 bp, synthetic construct
  misc_feature 1..20: note = chemically synthesized
  source 1..20: mol_type = other DNA
tttctttggaggcagaaatt

SEQ ID NO: 21971 - DNA, 20 bp, synthetic construct
  misc_feature 1..20: note = chemically synthesized
  source 1..20: mol_type = other DNA
attgggcataaaacaatatg

SEQ ID NO: 21972 - DNA, 20 bp, synthetic construct
  misc_feature 1..20: note = chemically synthesized
  source 1..20: mol_type = other DNA
ttgggcataaaacaatatga

SEQ ID NO: 21973 - DNA, 20 bp, synthetic construct
  misc_feature 1..20: note = chemically synthesized
  source 1..20: mol_type = other DNA
tgggcataaaacaatatgaa

SEQ ID NO: 21974 - DNA, 20 bp, synthetic construct
  misc_feature 1..20: note = chemically synthesized
  source 1..20: mol_type = other DNA
gcataaaacaatatgaaggg

SEQ ID NO: 21975 - DNA, 20 bp, synthetic construct
  misc_feature 1..20: note = chemically synthesized
  source 1..20: mol_type = other DNA
agggtggtctcctcccttac

SEQ ID NO: 21976 - DNA, 20 bp, synthetic construct
  misc_feature 1..20: note = chemically synthesized
  source 1..20: mol_type = other DNA
gggtggtctcctcccttact

SEQ ID NO: 21977 - DNA, 20 bp, synthetic construct
  misc_feature 1..20: note = chemically synthesized
  source 1..20: mol_type = other DNA
tggtctcctcccttactagg

SEQ ID NO: 21978 - DNA, 20 bp, synthetic construct
  misc_feature 1..20: note = chemically synthesized
  source 1..20: mol_type = other DNA
gtctcctcccttactaggaa

SEQ ID NO: 21979 - DNA, 20 bp, synthetic construct
  misc_feature 1..20: note = chemically synthesized
  source 1..20: mol_type = other DNA
ctcctcccttactaggaaga

SEQ ID NO: 21980 - DNA, 20 bp, synthetic construct
  misc_feature 1..20: note = chemically synthesized
  source 1..20: mol_type = other DNA
ggaagagagaaataccatgt

SEQ ID NO: 21981 - DNA, 20 bp, synthetic construct
  misc_feature 1..20: note = chemically synthesized
  source 1..20: mol_type = other DNA
gaaatacgtatttgtgttat

SEQ ID NO: 21982 - DNA, 20 bp, synthetic construct
  misc_feature 1..20: note = chemically synthesized
  source 1..20: mol_type = other DNA
tgtgttattggatttgacat

SEQ ID NO: 21983 - DNA, 20 bp, synthetic construct
  misc_feature 1..20: note = chemically synthesized
  source 1..20: mol_type = other DNA
gtgttattggatttgacatc

SEQ ID NO: 21984 - DNA, 20 bp, synthetic construct
  misc_feature 1..20: note = chemically synthesized
  source 1..20: mol_type = other DNA
tgttattggatttgacatcg

SEQ ID NO: 21985 - DNA, 20 bp, synthetic construct
  misc_feature 1..20: note = chemically synthesized
  source 1..20: mol_type = other DNA
attggatttgacatcggggt

SEQ ID NO: 21986 - DNA, 20 bp, synthetic construct
  misc_feature 1..20: note = chemically synthesized
  source 1..20: mol_type = other DNA
tttgacatcggggttggacc

SEQ ID NO: 21987 - DNA, 20 bp, synthetic construct
  misc_feature 1..20: note = chemically synthesized
  source 1..20: mol_type = other DNA
catcttctatgaacatctat

SEQ ID NO: 21988 - DNA, 20 bp, synthetic construct
  misc_feature 1..20: note = chemically synthesized
  source 1..20: mol_type = other DNA
aagcacgttctccttatcaa

SEQ ID NO: 21989 - DNA, 20 bp, synthetic construct
  misc_feature 1..20: note = chemically synthesized
  source 1..20: mol_type = other DNA
agcacgttctccttatcaaa

SEQ ID NO: 21990 - DNA, 20 bp, synthetic construct
  misc_feature 1..20: note = chemically synthesized
  source 1..20: mol_type = other DNA
ttatcaaaaggtactttgct

SEQ ID NO: 21991 - DNA, 20 bp, synthetic construct
  misc_feature 1..20: note = chemically synthesized
  source 1..20: mol_type = other DNA
tactttgcttggtgctttaa

SEQ ID NO: 21992 - DNA, 20 bp, synthetic construct
  misc_feature 1..20: note = chemically synthesized
  source 1..20: mol_type = other DNA
ttaaaagataaatgactatg

SEQ ID NO: 21993 - DNA, 20 bp, synthetic construct
  misc_feature 1..20: note = chemically synthesized
  source 1..20: mol_type = other DNA
agataaatgactatgtagct

SEQ ID NO: 21994 - DNA, 20 bp, synthetic construct
  misc_feature 1..20: note = chemically synthesized
  source 1..20: mol_type = other DNA
gataaatgactatgtagctt

SEQ ID NO: 21995 - DNA, 20 bp, synthetic construct
  misc_feature 1..20: note = chemically synthesized
  source 1..20: mol_type = other DNA
taaatgactatgtagcttag

SEQ ID NO: 21996 - DNA, 20 bp, synthetic construct
  misc_feature 1..20: note = chemically synthesized
  source 1..20: mol_type = other DNA
ttcttcataattgaaaacca

SEQ ID NO: 21997 - DNA, 20 bp, synthetic construct
  misc_feature 1..20: note = chemically synthesized
  source 1..20: mol_type = other DNA
ttcataattgaaaaccacag

SEQ ID NO: 21998 - DNA, 20 bp, synthetic construct
  misc_feature 1..20: note = chemically synthesized
  source 1..20: mol_type = other DNA
gctgttatttgaacatacct

SEQ ID NO: 21999 - DNA, 20 bp, synthetic construct
  misc_feature 1..20: note = chemically synthesized
  source 1..20: mol_type = other DNA
gaacatacctgagccccttc

SEQ ID NO: 22000 - DNA, 20 bp, synthetic construct
  misc_feature 1..20: note = chemically synthesized
  source 1..20: mol_type = other DNA
gagccccttctggaccactg

SEQ ID NO: 22001 - DNA, 20 bp, synthetic construct
  misc_feature 1..20: note = chemically synthesized
  source 1..20: mol_type = other DNA
agccccttctggaccactgt

SEQ ID NO: 22002 - DNA, 20 bp, synthetic construct
  misc_feature 1..20: note = chemically synthesized
  source 1..20: mol_type = other DNA
ccccttctggaccactgtag

SEQ ID NO: 22003 - DNA, 20 bp, synthetic construct
  misc_feature 1..20: note = chemically synthesized
  source 1..20: mol_type = other DNA
cttctggaccactgtaggag

SEQ ID NO: 22004 - DNA, 20 bp, synthetic construct
  misc_feature 1..20: note = chemically synthesized
  source 1..20: mol_type = other DNA
ttctggaccactgtaggaga

SEQ ID NO: 22005 - DNA, 20 bp, synthetic construct
  misc_feature 1..20: note = chemically synthesized
  source 1..20: mol_type = other DNA
ctggaccactgtaggagaag

SEQ ID NO: 22006 - DNA, 20 bp, synthetic construct
  misc_feature 1..20: note = chemically synthesized
  source 1..20: mol_type = other DNA
tggaccactgtaggagaagg

SEQ ID NO: 22007 - DNA, 20 bp, synthetic construct
  misc_feature 1..20: note = chemically synthesized
  source 1..20: mol_type = other DNA
accactgtaggagaaggagg

SEQ ID NO: 22008 - DNA, 20 bp, synthetic construct
  misc_feature 1..20: note = chemically synthesized
  source 1..20: mol_type = other DNA
cactgtaggagaaggaggaa

SEQ ID NO: 22009 - DNA, 20 bp, synthetic construct
  misc_feature 1..20: note = chemically synthesized
  source 1..20: mol_type = other DNA
ctgtaggagaaggaggaaga

SEQ ID NO: 22010 - DNA, 20 bp, synthetic construct
  misc_feature 1..20: note = chemically synthesized
  source 1..20: mol_type = other DNA
tgtaggagaaggaggaagag

SEQ ID NO: 22011 - DNA, 20 bp, synthetic construct
  misc_feature 1..20: note = chemically synthesized
  source 1..20: mol_type = other DNA
agaaggaggaagagaggtga

SEQ ID NO: 22012 - DNA, 20 bp, synthetic construct
  misc_feature 1..20: note = chemically synthesized
  source 1..20: mol_type = other DNA
tgaaagtgatttctgctgct

SEQ ID NO: 22013 - DNA, 20 bp, synthetic construct
  misc_feature 1..20: note = chemically synthesized
  source 1..20: mol_type = other DNA
gaaagtgatttctgctgctg

SEQ ID NO: 22014 - DNA, 20 bp, synthetic construct
  misc_feature 1..20: note = chemically synthesized
  source 1..20: mol_type = other DNA
aaagtgatttctgctgctga

SEQ ID NO: 22015 - DNA, 20 bp, synthetic construct
  misc_feature 1..20: note = chemically synthesized
  source 1..20: mol_type = other DNA
gagggcatgtatgatgacaa

SEQ ID NO: 22016 - DNA, 20 bp, synthetic construct
  misc_feature 1..20: note = chemically synthesized
  source 1..20: mol_type = other DNA
agggcatgtatgatgacaat

SEQ ID NO: 22017 - DNA, 20 bp, synthetic construct
  misc_feature 1..20: note = chemically synthesized
  source 1..20: mol_type = other DNA
gtcctaactttgacactaca

SEQ ID NO: 22018 - DNA, 20 bp, synthetic construct
  misc_feature 1..20: note = chemically synthesized
  source 1..20: mol_type = other DNA
ctttgacactacaaagtgac

SEQ ID NO: 22019 - DNA, 20 bp, synthetic construct
  misc_feature 1..20: note = chemically synthesized
  source 1..20: mol_type = other DNA
ttgacactacaaagtgactg

SEQ ID NO: 22020 - DNA, 20 bp, synthetic construct
  misc_feature 1..20: note = chemically synthesized
  source 1..20: mol_type = other DNA
ctacaaagtgactggagctt

SEQ ID NO: 22021 - DNA, 20 bp, synthetic construct
  misc_feature 1..20: note = chemically synthesized
  source 1..20: mol_type = other DNA
tacaaagtgactggagcttt

SEQ ID NO: 22022 - DNA, 20 bp, synthetic construct
  misc_feature 1..20: note = chemically synthesized
  source 1..20: mol_type = other DNA
aagtgactggagctttaggc

SEQ ID NO: 22023 - DNA, 20 bp, synthetic construct
  misc_feature 1..20: note = chemically synthesized
  source 1..20: mol_type = other DNA
tgactggagctttaggcaag

SEQ ID NO: 22024 - DNA, 20 bp, synthetic construct
  misc_feature 1..20: note = chemically synthesized
  source 1..20: mol_type = other DNA
agttactccaattgtctttt

SEQ ID NO: 22025 - DNA, 20 bp, synthetic construct
  misc_feature 1..20: note = chemically synthesized
  source 1..20: mol_type = other DNA
ttttcagactctttcttttt

SEQ ID NO: 22026 - DNA, 20 bp, synthetic construct
  misc_feature 1..20: note = chemically synthesized
  source 1..20: mol_type = other DNA
tttcagactctttctttttg

SEQ ID NO: 22027 - DNA, 20 bp, synthetic construct
  misc_feature 1..20: note = chemically synthesized
  source 1..20: mol_type = other DNA
tgaggtatttgacctctttg

SEQ ID NO: 22028 - DNA, 20 bp, synthetic construct
  misc_feature 1..20: note = chemically synthesized
  source 1..20: mol_type = other DNA
atttgacctctttgcggcat

SEQ ID NO: 22029 - DNA, 20 bp, synthetic construct
  misc_feature 1..20: note = chemically synthesized
  source 1..20: mol_type = other DNA
gctgctatttcacatgcacc

SEQ ID NO: 22030 - DNA, 20 bp, synthetic construct
  misc_feature 1..20: note = chemically synthesized
  source 1..20: mol_type = other DNA
gctatttcacatgcacctag

SEQ ID NO: 22031 - DNA, 20 bp, synthetic construct
  misc_feature 1..20: note = chemically synthesized
  source 1..20: mol_type = other DNA
ctatttcacatgcacctaga

SEQ ID NO: 22032 - DNA, 20 bp, synthetic construct
  misc_feature 1..20: note = chemically synthesized
  source 1..20: mol_type = other DNA
tatttcacatgcacctagaa

SEQ ID NO: 22033 - DNA, 20 bp, synthetic construct
  misc_feature 1..20: note = chemically synthesized
  source 1..20: mol_type = other DNA
aagggactttaaaacatgca

SEQ ID NO: 22034 - DNA, 20 bp, synthetic construct
  misc_feature 1..20: note = chemically synthesized
  source 1..20: mol_type = other DNA
aacatgcacagaattgaaca

SEQ ID NO: 22035 - DNA, 20 bp, synthetic construct
  misc_feature 1..20: note = chemically synthesized
  source 1..20: mol_type = other DNA
atgcacagaattgaacaaag

SEQ ID NO: 22036 - DNA, 20 bp, synthetic construct
  misc_feature 1..20: note = chemically synthesized
  source 1..20: mol_type = other DNA
acaaagcagtaaccattcgt

SEQ ID NO: 22037 - DNA, 20 bp, synthetic construct
  misc_feature 1..20: note = chemically synthesized
  source 1..20: mol_type = other DNA
tcaaatactattatttttga

SEQ ID NO: 22038 - DNA, 20 bp, synthetic construct
  misc_feature 1..20: note = chemically synthesized
  source 1..20: mol_type = other DNA
caaatactattatttttgaa

SEQ ID NO: 22039 - DNA, 20 bp, synthetic construct
  misc_feature 1..20: note = chemically synthesized
  source 1..20: mol_type = other DNA
ttgaaaggtaaataaatcct

SEQ ID NO: 22040 - DNA, 20 bp, synthetic construct
  misc_feature 1..20: note = chemically synthesized
  source 1..20: mol_type = other DNA
tgaaaggtaaataaatcctt

SEQ ID NO: 22041 - DNA, 20 bp, synthetic construct
  misc_feature 1..20: note = chemically synthesized
  source 1..20: mol_type = other DNA
ggtaaataaatccttgggct

SEQ ID NO: 22042 - DNA, 20 bp, synthetic construct
  misc_feature 1..20: note = chemically synthesized
  source 1..20: mol_type = other DNA
aaataaatccttgggcttag

SEQ ID NO: 22043 - DNA, 20 bp, synthetic construct
  misc_feature 1..20: note = chemically synthesized
  source 1..20: mol_type = other DNA
attgctaacctgaatgataa

SEQ ID NO: 22044 - DNA, 20 bp, synthetic construct
  misc_feature 1..20: note = chemically synthesized
  source 1..20: mol_type = other DNA
agaaacttttttccttttaa

SEQ ID NO: 22045 - DNA, 20 bp, synthetic construct
  misc_feature 1..20: note = chemically synthesized
  source 1..20: mol_type = other DNA
acttttttccttttaacagt

SEQ ID NO: 22046 - DNA, 20 bp, synthetic construct
  misc_feature 1..20: note = chemically synthesized
  source 1..20: mol_type = other DNA
ttttttccttttaacagttg

SEQ ID NO: 22047 - DNA, 20 bp, synthetic construct
  misc_feature 1..20: note = chemically synthesized
  source 1..20: mol_type = other DNA
tttttccttttaacagttgg

SEQ ID NO: 22048 - DNA, 20 bp, synthetic construct
  misc_feature 1..20: note = chemically synthesized
  source 1..20: mol_type = other DNA
gaggcatctatactgtgatt

SEQ ID NO: 22049 - DNA, 20 bp, synthetic construct
  misc_feature 1..20: note = chemically synthesized
  source 1..20: mol_type = other DNA
tctatactgtgattcagaca

SEQ ID NO: 22050 - DNA, 20 bp, synthetic construct
  misc_feature 1..20: note = chemically synthesized
  source 1..20: mol_type = other DNA
ctatactgtgattcagacaa

SEQ ID NO: 22051 - DNA, 20 bp, synthetic construct
  misc_feature 1..20: note = chemically synthesized
  source 1..20: mol_type = other DNA
tcagacaaaggccaaaacaa

SEQ ID NO: 22052 - DNA, 20 bp, synthetic construct
  misc_feature 1..20: note = chemically synthesized
  source 1..20: mol_type = other DNA
gacaaaggccaaaacaacag

SEQ ID NO: 22053 - DNA, 20 bp, synthetic construct
  misc_feature 1..20: note = chemically synthesized
  source 1..20: mol_type = other DNA
ccaaaacaacagcagatgaa

SEQ ID NO: 22054 - DNA, 20 bp, synthetic construct
  misc_feature 1..20: note = chemically synthesized
  source 1..20: mol_type = other DNA
caaaacaacagcagatgaat

SEQ ID NO: 22055 - DNA, 20 bp, synthetic construct
  misc_feature 1..20: note = chemically synthesized
  source 1..20: mol_type = other DNA
aaaacaacagcagatgaatg

SEQ ID NO: 22056 - DNA, 20 bp, synthetic construct
  misc_feature 1..20: note = chemically synthesized
  source 1..20: mol_type = other DNA
aacaacagcagatgaatggg

SEQ ID NO: 22057 - DNA, 20 bp, synthetic construct
  misc_feature 1..20: note = chemically synthesized
  source 1..20: mol_type = other DNA
caacagcagatgaatgggga

SEQ ID NO: 22058 - DNA, 20 bp, synthetic construct
  misc_feature 1..20: note = chemically synthesized
  source 1..20: mol_type = other DNA
gggagagaactattttctga

SEQ ID NO: 22059 - DNA, 20 bp, synthetic construct
  misc_feature 1..20: note = chemically synthesized
  source 1..20: mol_type = other DNA
ggagagaactattttctgat

SEQ ID NO: 22060 - DNA, 20 bp, synthetic construct
  misc_feature 1..20: note = chemically synthesized
  source 1..20: mol_type = other DNA
ttctgataggtccatatttt

SEQ ID NO: 22061 - DNA, 20 bp, synthetic construct
  misc_feature 1..20: note = chemically synthesized
  source 1..20: mol_type = other DNA
catattttgagcataatatg

SEQ ID NO: 22062 - DNA, 20 bp, synthetic construct
  misc_feature 1..20: note = chemically synthesized
  source 1..20: mol_type = other DNA
ttgagcataatatgaagact

SEQ ID NO: 22063 - DNA, 20 bp, synthetic construct
  misc_feature 1..20: note = chemically synthesized
  source 1..20: mol_type = other DNA
tgagcataatatgaagactc

SEQ ID NO: 22064 - DNA, 20 bp, synthetic construct
  misc_feature 1..20: note = chemically synthesized
  source 1..20: mol_type = other DNA
gcataatatgaagactcagg

SEQ ID NO: 22065 - DNA, 20 bp, synthetic construct
  misc_feature 1..20: note = chemically synthesized
  source 1..20: mol_type = other DNA
atatgaagactcaggtggaa

SEQ ID NO: 22066 - DNA, 20 bp, synthetic construct
  misc_feature 1..20: note = chemically synthesized
  source 1..20: mol_type = other DNA
gaacctgtaaatgatgctgt

SEQ ID NO: 22067 - DNA, 20 bp, synthetic construct
  misc_feature 1..20: note = chemically synthesized
  source 1..20: mol_type = other DNA
cctgtaaatgatgctgtcag

SEQ ID NO: 22068 - DNA, 20 bp, synthetic construct
  misc_feature 1..20: note = chemically synthesized
  source 1..20: mol_type = other DNA
tgtaaatgatgctgtcagaa

SEQ ID NO: 22069 - DNA, 20 bp, synthetic construct
  misc_feature 1..20: note = chemically synthesized
  source 1..20: mol_type = other DNA
aaatgatgctgtcagaagag

SEQ ID NO: 22070 - DNA, 20 bp, synthetic construct
  misc_feature 1..20: note = chemically synthesized
  source 1..20: mol_type = other DNA
tgatgctgtcagaagagcag

SEQ ID NO: 22071 - DNA, 20 bp, synthetic construct
  misc_feature 1..20: note = chemically synthesized
  source 1..20: mol_type = other DNA
gagcagtggacgcaatgaat

SEQ ID NO: 22072 - DNA, 20 bp, synthetic construct
  misc_feature 1..20: note = chemically synthesized
  source 1..20: mol_type = other DNA
gtggacgcaatgaataagca

SEQ ID NO: 22073 - DNA, 20 bp, synthetic construct
  misc_feature 1..20: note = chemically synthesized
  source 1..20: mol_type = other DNA
caatgaataagcatggctgc

SEQ ID NO: 22074 - DNA, 20 bp, synthetic construct
  misc_feature 1..20: note = chemically synthesized
  source 1..20: mol_type = other DNA
acaggttcacactgttccac

SEQ ID NO: 22075 - DNA, 20 bp, synthetic construct
  misc_feature 1..20: note = chemically synthesized
  source 1..20: mol_type = other DNA
gctgttgttttggcctttgt

SEQ ID NO: 22076 - DNA, 20 bp, synthetic construct
  misc_feature 1..20: note = chemically synthesized
  source 1..20: mol_type = other DNA
gcaatttgtttaaagtaata

SEQ ID NO: 22077 - DNA, 20 bp, synthetic construct
  misc_feature 1..20: note = chemically synthesized
  source 1..20: mol_type = other DNA
taaagtaataagggatggaa

SEQ ID NO: 22078 - DNA, 20 bp, synthetic construct
  misc_feature 1..20: note = chemically synthesized
  source 1..20: mol_type = other DNA
cagatttttaaattagcatt

SEQ ID NO: 22079 - DNA, 20 bp, synthetic construct
  misc_feature 1..20: note = chemically synthesized
  source 1..20: mol_type = other DNA
atttaggatccactaagccc

SEQ ID NO: 22080 - DNA, 20 bp, synthetic construct
  misc_feature 1..20: note = chemically synthesized
  source 1..20: mol_type = other DNA
catattgttaagggacacca

SEQ ID NO: 22081 - DNA, 20 bp, synthetic construct
  misc_feature 1..20: note = chemically synthesized
  source 1..20: mol_type = other DNA
ggtcaaatacctcaaaaaga

SEQ ID NO: 22082 - DNA, 20 bp, synthetic construct
  misc_feature 1..20: note = chemically synthesized
  source 1..20: mol_type = other DNA
aaagagtctgaaaagacaat

SEQ ID NO: 22083 - DNA, 20 bp, synthetic construct
  misc_feature 1..20: note = chemically synthesized
  source 1..20: mol_type = other DNA
cccccagtcatgtaccccct

SEQ ID NO: 22084 - DNA, 20 bp, synthetic construct
  misc_feature 1..20: note = chemically synthesized
  source 1..20: mol_type = other DNA
tgtaagcccttaaaagggac

SEQ ID NO: 22085 - DNA, 20 bp, synthetic construct
  misc_feature 1..20: note = chemically synthesized
  source 1..20: mol_type = other DNA
agagcttggttgttggagat

SEQ ID NO: 22086 - DNA, 20 bp, synthetic construct
  misc_feature 1..20: note = chemically synthesized
  source 1..20: mol_type = other DNA
agtcttgcccaagctcccag

SEQ ID NO: 22087 - DNA, 20 bp, synthetic construct
  misc_feature 1..20: note = chemically synthesized
  source 1..20: mol_type = other DNA
cttctttaactcggtgtctg

SEQ ID NO: 22088 - DNA, 20 bp, synthetic construct
  misc_feature 1..20: note = chemically synthesized
  source 1..20: mol_type = other DNA
tgcagcttgtcctgctacac

SEQ ID NO: 22089 - DNA, 20 bp, synthetic construct
  misc_feature 1..20: note = chemically synthesized
  source 1..20: mol_type = other DNA
aaaacacaaagccacaatat

SEQ ID NO: 22090 - DNA, 20 bp, synthetic construct
  misc_feature 1..20: note = chemically synthesized
  source 1..20: mol_type = other DNA
atttggaaaatatgcacact

SEQ ID NO: 22091 - DNA, 20 bp, synthetic construct
  misc_feature 1..20: note = chemically synthesized
  source 1..20: mol_type = other DNA
catcctgggggaaaattaag

SEQ ID NO: 22092 - DNA, 20 bp, synthetic construct
  misc_feature 1..20: note = chemically synthesized
  source 1..20: mol_type = other DNA
aaaattaaggagagtatgaa

SEQ ID NO: 22093 - DNA, 20 bp, synthetic construct
  misc_feature 1..20: note = chemically synthesized
  source 1..20: mol_type = other DNA
aattagctcatgtgtcaaat

SEQ ID NO: 22094 - DNA, 20 bp, synthetic construct
  misc_feature 1..20: note = chemically synthesized
  source 1..20: mol_type = other DNA
gggaaagacaggctctaaaa

SEQ ID NO: 22095 - DNA, 20 bp, synthetic construct
  misc_feature 1..20: note = chemically synthesized
  source 1..20: mol_type = other DNA
aattagatgtggcctaggca

SEQ ID NO: 22096 - DNA, 20 bp, synthetic construct
  misc_feature 1..20: note = chemically synthesized
  source 1..20: mol_type = other DNA
tgcttctgcaccgcaaaaga

SEQ ID NO: 22097 - DNA, 20 bp, synthetic construct
  misc_feature 1..20: note = chemically synthesized
  source 1..20: mol_type = other DNA
accgcaaaagaccgaatcaa

SEQ ID NO: 22098 - DNA, 20 bp, synthetic construct
  misc_feature 1..20: note = chemically synthesized
  source 1..20: mol_type = other DNA
agaccgaatcaacagagtaa

SEQ ID NO: 22099 - DNA, 20 bp, synthetic construct
  misc_feature 1..20: note = chemically synthesized
  source 1..20: mol_type = other DNA
cagagtaaacggataaccta

SEQ ID NO: 22100 - DNA, 20 bp, synthetic construct
  misc_feature 1..20: note = chemically synthesized
  source 1..20: mol_type = other DNA
agaaaaaaaaattgcaaact

SEQ ID NO: 22101 - DNA, 20 bp, synthetic construct
  misc_feature 1..20: note = chemically synthesized
  source 1..20: mol_type = other DNA
tgcaacaaaaggctaatata

SEQ ID NO: 22102 - DNA, 20 bp, synthetic construct
  misc_feature 1..20: note = chemically synthesized
  source 1..20: mol_type = other DNA
agtgactgtgatggttaata

SEQ ID NO: 22103 - DNA, 20 bp, synthetic construct
  misc_feature 1..20: note = chemically synthesized
  source 1..20: mol_type = other DNA
gtgtcaacttgattggactg

SEQ ID NO: 22104 - DNA, 20 bp, synthetic construct
  misc_feature 1..20: note = chemically synthesized
  source 1..20: mol_type = other DNA
aaggatgcaaagtaatgatc

SEQ ID NO: 22105 - DNA, 20 bp, synthetic construct
  misc_feature 1..20: note = chemically synthesized
  source 1..20: mol_type = other DNA
atgatcttgggtgtgtctgt

SEQ ID NO: 22106 - DNA, 20 bp, synthetic construct
  misc_feature 1..20: note = chemically synthesized
  source 1..20: mol_type = other DNA
aaggcagacccacccttaat

SEQ ID NO: 22107 - DNA, 20 bp, synthetic construct
  misc_feature 1..20: note = chemically synthesized
  source 1..20: mol_type = other DNA
taatcagttgccagcacagc

SEQ ID NO: 22108 - DNA, 20 bp, synthetic construct
  misc_feature 1..20: note = chemically synthesized
  source 1..20: mol_type = other DNA
gcctacatttttctcccatg

SEQ ID NO: 22109 - DNA, 20 bp, synthetic construct
  misc_feature 1..20: note = chemically synthesized
  source 1..20: mol_type = other DNA
ttttgggaccttgtgaacat

SEQ ID NO: 22110 - DNA, 20 bp, synthetic construct
  misc_feature 1..20: note = chemically synthesized
  source 1..20: mol_type = other DNA
ctaatacagattttggtacc

SEQ ID NO: 22111 - DNA, 20 bp, synthetic construct
  misc_feature 1..20: note = chemically synthesized
  source 1..20: mol_type = other DNA
caggagtggttctagaggaa

SEQ ID NO: 22112 - DNA, 20 bp, synthetic construct
  misc_feature 1..20: note = chemically synthesized
  source 1..20: mol_type = other DNA
ttctagaggaacagaatatt

SEQ ID NO: 22113 - DNA, 20 bp, synthetic construct
  misc_feature 1..20: note = chemically synthesized
  source 1..20: mol_type = other DNA
gaggaacagaatattaagga

SEQ ID NO: 22114 - DNA, 20 bp, synthetic construct
  misc_feature 1..20: note = chemically synthesized
  source 1..20: mol_type = other DNA
tggagttctttcattggttt

SEQ ID NO: 22115 - DNA, 20 bp, synthetic construct
  misc_feature 1..20: note = chemically synthesized
  source 1..20: mol_type = other DNA
ttcattggttttggggtttc

SEQ ID NO: 22116 - DNA, 20 bp, synthetic construct
  misc_feature 1..20: note = chemically synthesized
  source 1..20: mol_type = other DNA
tccttggcatcaattgttta

SEQ ID NO: 22117 - DNA, 20 bp, synthetic construct
  misc_feature 1..20: note = chemically synthesized
  source 1..20: mol_type = other DNA
ttcaacgcttgtgagaggca

SEQ ID NO: 22118 - DNA, 20 bp, synthetic construct
  misc_feature 1..20: note = chemically synthesized
  source 1..20: mol_type = other DNA
aatacttttgactatatgtg

SEQ ID NO: 22119 - DNA, 20 bp, synthetic construct
  misc_feature 1..20: note = chemically synthesized
  source 1..20: mol_type = other DNA
tgaaagaaaatgatgaactc

SEQ ID NO: 22120 - DNA, 20 bp, synthetic construct
  misc_feature 1..20: note = chemically synthesized
  source 1..20: mol_type = other DNA
agcaagaagtagcaaacaca

SEQ ID NO: 22121 - DNA, 20 bp, synthetic construct
  misc_feature 1..20: note = chemically synthesized
  source 1..20: mol_type = other DNA
gatgagacatttgtgggaca

SEQ ID NO: 22122 - DNA, 20 bp, synthetic construct
  misc_feature 1..20: note = chemically synthesized
  source 1..20: mol_type = other DNA
tctacctcagtaaaatttat

SEQ ID NO: 22123 - DNA, 20 bp, synthetic construct
  misc_feature 1..20: note = chemically synthesized
  source 1..20: mol_type = other DNA
gagatattccttctaaagtg

SEQ ID NO: 22124 - DNA, 20 bp, synthetic construct
  misc_feature 1..20: note = chemically synthesized
  source 1..20: mol_type = other DNA
acaacgcctagtgggcctat

SEQ ID NO: 22125 - DNA, 20 bp, synthetic construct
  misc_feature 1..20: note = chemically synthesized
  source 1..20: mol_type = other DNA
ggaggcaacatattcctgat

SEQ ID NO: 22126 - DNA, 20 bp, synthetic construct
  misc_feature 1..20: note = chemically synthesized
  source 1..20: mol_type = other DNA
gtgttactctggcccattta

SEQ ID NO: 22127 - DNA, 20 bp, synthetic construct
  misc_feature 1..20: note = chemically synthesized
  source 1..20: mol_type = other DNA
gatccaaaaggctgccagtt

SEQ ID NO: 22128 - DNA, 20 bp, synthetic construct
  misc_feature 1..20: note = chemically synthesized
  source 1..20: mol_type = other DNA
aaaaggctgccagttttgag

SEQ ID NO: 22129 - DNA, 20 bp, synthetic construct
  misc_feature 1..20: note = chemically synthesized
  source 1..20: mol_type = other DNA
ttgaggtgtcagtgccagat

SEQ ID NO: 22130 - DNA, 20 bp, synthetic construct
  misc_feature 1..20: note = chemically synthesized
  source 1..20: mol_type = other DNA
tgtttggagcatttggcagg

SEQ ID NO: 22131 - DNA, 20 bp, synthetic construct
  misc_feature 1..20: note = chemically synthesized
  source 1..20: mol_type = other DNA
tgaatcacagcggaggcctc

SEQ ID NO: 22132 - DNA, 20 bp, synthetic construct
  misc_feature 1..20: note = chemically synthesized
  source 1..20: mol_type = other DNA
tggaaacgaaatatttgact

SEQ ID NO: 22133 - DNA, 20 bp, synthetic construct
  misc_feature 1..20: note = chemically synthesized
  source 1..20: mol_type = other DNA
cctgaactgcctatcatgaa

SEQ ID NO: 22134 - DNA, 20 bp, synthetic construct
  misc_feature 1..20: note = chemically synthesized
  source 1..20: mol_type = other DNA
actgcaccgatggtctcatg

SEQ ID NO: 22135 - DNA, 20 bp, synthetic construct
  misc_feature 1..20: note = chemically synthesized
  source 1..20: mol_type = other DNA
gaaatttggggaagaggtat

SEQ ID NO: 22136 - DNA, 20 bp, synthetic construct
  misc_feature 1..20: note = chemically synthesized
  source 1..20: mol_type = other DNA
caaagatattttcatcccat

SEQ ID NO: 22137 - DNA, 20 bp, synthetic construct
  misc_feature 1..20: note = chemically synthesized
  source 1..20: mol_type = other DNA
tcccatgtgagtgctcacca

SEQ ID NO: 22138 - DNA, 20 bp, synthetic construct
  misc_feature 1..20: note = chemically synthesized
  source 1..20: mol_type = other DNA
aatgggtgacctcagcagaa

SEQ ID NO: 22139 - DNA, 20 bp, synthetic construct
  misc_feature 1..20: note = chemically synthesized
  source 1..20: mol_type = other DNA
aagaggattttaataatcaa

SEQ ID NO: 22140 - DNA, 20 bp, synthetic construct
  misc_feature 1..20: note = chemically synthesized
  source 1..20: mol_type = other DNA
gattttaataatcaagtgga

SEQ ID NO: 22141 - DNA, 20 bp, synthetic construct
  misc_feature 1..20: note = chemically synthesized
  source 1..20: mol_type = other DNA
aacaaagtggccacagttgc

SEQ ID NO: 22142 - DNA, 20 bp, synthetic construct
  misc_feature 1..20: note = chemically synthesized
  source 1..20: mol_type = other DNA
cttgatatggcaccattcct

SEQ ID NO: 22143 - DNA, 20 bp, synthetic construct
  misc_feature 1..20: note = chemically synthesized
  source 1..20: mol_type = other DNA
gggcagaggcttgtcctcac

SEQ ID NO: 22144 - DNA, 20 bp, synthetic construct
  misc_feature 1..20: note = chemically synthesized
  source 1..20: mol_type = other DNA
cactggaatagacacttact

SEQ ID NO: 22145 - DNA, 20 bp, synthetic construct
  misc_feature 1..20: note = chemically synthesized
  source 1..20: mol_type = other DNA
aatagacacttactctggat

SEQ ID NO: 22146 - DNA, 20 bp, synthetic construct
  misc_feature 1..20: note = chemically synthesized
  source 1..20: mol_type = other DNA
tatgccaagactaccatcca

SEQ ID NO: 22147 - DNA, 20 bp, synthetic construct
  misc_feature 1..20: note = chemically synthesized
  source 1..20: mol_type = other DNA
gactaccatccatggaatca

SEQ ID NO: 22148 - DNA, 20 bp, synthetic construct
  misc_feature 1..20: note = chemically synthesized
  source 1..20: mol_type = other DNA
tgacagtgggctcatgctca

SEQ ID NO: 22149 - DNA, 20 bp, synthetic construct
  misc_feature 1..20: note = chemically synthesized
  source 1..20: mol_type = other DNA
ctatcatcctgaagcagctt

SEQ ID NO: 22150 - DNA, 20 bp, synthetic construct
  misc_feature 1..20: note = chemically synthesized
  source 1..20: mol_type = other DNA
tccagaaggctgtgtatgct

SEQ ID NO: 22151 - DNA, 20 bp, synthetic construct
  misc_feature 1..20: note = chemically synthesized
  source 1..20: mol_type = other DNA
ggtactgtttctcccataga

SEQ ID NO: 22152 - DNA, 20 bp, synthetic construct
  misc_feature 1..20: note = chemically synthesized
  source 1..20: mol_type = other DNA
ttctcccatagacaggattc

SEQ ID NO: 22153 - DNA, 20 bp, synthetic construct
  misc_feature 1..20: note = chemically synthesized
  source 1..20: mol_type = other DNA
tagacaggattcacgggtcc

SEQ ID NO: 22154 - DNA, 20 bp, synthetic construct
  misc_feature 1..20: note = chemically synthesized
  source 1..20: mol_type = other DNA
attcacgggtccaggaatca

SEQ ID NO: 22155 - DNA, 20 bp, synthetic construct
  misc_feature 1..20: note = chemically synthesized
  source 1..20: mol_type = other DNA
ttaagtcaacaggctaagaa

SEQ ID NO: 22156 - DNA, 20 bp, synthetic construct
  misc_feature 1..20: note = chemically synthesized
  source 1..20: mol_type = other DNA
gaggtaaggaagcgtatgca

SEQ ID NO: 22157 - DNA, 20 bp, synthetic construct
  misc_feature 1..20: note = chemically synthesized
  source 1..20: mol_type = other DNA
atggaatataggagatccat

SEQ ID NO: 22158 - DNA, 20 bp, synthetic construct
  misc_feature 1..20: note = chemically synthesized
  source 1..20: mol_type = other DNA
ctcttagttttaccatgtcc

SEQ ID NO: 22159 - DNA, 20 bp, synthetic construct
  misc_feature 1..20: note = chemically synthesized
  source 1..20: mol_type = other DNA
gcaggactacaaataaaggt

SEQ ID NO: 22160 - DNA, 20 bp, synthetic construct
  misc_feature 1..20: note = chemically synthesized
  source 1..20: mol_type = other DNA
aggtgcttgctgagggcaaa

SEQ ID NO: 22161 - DNA, 20 bp, synthetic construct
  misc_feature 1..20: note = chemically synthesized
  source 1..20: mol_type = other DNA
tgctgagggcaaagggaata

SEQ ID NO: 22162 - DNA, 20 bp, synthetic construct
  misc_feature 1..20: note = chemically synthesized
  source 1..20: mol_type = other DNA
atacaaggactgtaattgtc

SEQ ID NO: 22163 - DNA, 20 bp, synthetic construct
  misc_feature 1..20: note = chemically synthesized
  source 1..20: mol_type = other DNA
tatgtaatagcatttgcaat

SEQ ID NO: 22164 - DNA, 20 bp, synthetic construct
  misc_feature 1..20: note = chemically synthesized
  source 1..20: mol_type = other DNA
ggtgcattttcaattgcacg

SEQ ID NO: 22165 - DNA, 20 bp, synthetic construct
  misc_feature 1..20: note = chemically synthesized
  source 1..20: mol_type = other DNA
gaagataatgtatgacctca

SEQ ID NO: 22166 - DNA, 20 bp, synthetic construct
  misc_feature 1..20: note = chemically synthesized
  source 1..20: mol_type = other DNA
tggacttgtgatggttaata

SEQ ID NO: 22167 - DNA, 20 bp, synthetic construct
  misc_feature 1..20: note = chemically synthesized
  source 1..20: mol_type = other DNA
aatactgagtgtcaacttga

SEQ ID NO: 22168 - DNA, 20 bp, synthetic construct
  misc_feature 1..20: note = chemically synthesized
  source 1..20: mol_type = other DNA
aagtgtgcaaagtattgatc

SEQ ID NO: 22169 - DNA, 20 bp, synthetic construct
  misc_feature 1..20: note = chemically synthesized
  source 1..20: mol_type = other DNA
ttgatcctgagtgtgtctgt

SEQ ID NO: 22170 - DNA, 20 bp, synthetic construct
  misc_feature 1..20: note = chemically synthesized
  source 1..20: mol_type = other DNA
aaggcagacccacccttaat

SEQ ID NO: 22171 - DNA, 20 bp, synthetic construct
  misc_feature 1..20: note = chemically synthesized
  source 1..20: mol_type = other DNA
taatcagttgccagtgtggc

SEQ ID NO: 22172 - DNA, 20 bp, synthetic construct
  misc_feature 1..20: note = chemically synthesized
  source 1..20: mol_type = other DNA
gcctacatctttctcccatg

SEQ ID NO: 22173 - DNA, 20 bp, synthetic construct
  misc_feature 1..20: note = chemically synthesized
  source 1..20: mol_type = other DNA
ttcaacatcactaataatca

SEQ ID NO: 22174 - DNA, 20 bp, synthetic construct
  misc_feature 1..20: note = chemically synthesized
  source 1..20: mol_type = other DNA
tgatacctccttatgccagt

SEQ ID NO: 22175 - DNA, 20 bp, synthetic construct
  misc_feature 1..20: note = chemically synthesized
  source 1..20: mol_type = other DNA
caaaaacagcagatgttggt

SEQ ID NO: 22176 - DNA, 20 bp, synthetic construct
  misc_feature 1..20: note = chemically synthesized
  source 1..20: mol_type = other DNA
aatgcttatacactgttggt

SEQ ID NO: 22177 - DNA, 20 bp, synthetic construct
  misc_feature 1..20: note = chemically synthesized
  source 1..20: mol_type = other DNA
tcaatcctgcaatcccacta

SEQ ID NO: 22178 - DNA, 20 bp, synthetic construct
  misc_feature 1..20: note = chemically synthesized
  source 1..20: mol_type = other DNA
tgttcccaatagcaaagata

SEQ ID NO: 22179 - DNA, 20 bp, synthetic construct
  misc_feature 1..20: note = chemically synthesized
  source 1..20: mol_type = other DNA
aaatgtctaccaatggacga

SEQ ID NO: 22180 - DNA, 20 bp, synthetic construct
  misc_feature 1..20: note = chemically synthesized
  source 1..20: mol_type = other DNA
tatattactcagccataaaa

SEQ ID NO: 22181 - DNA, 20 bp, synthetic construct
  misc_feature 1..20: note = chemically synthesized
  source 1..20: mol_type = other DNA
agccaagtgggagctaaacg

SEQ ID NO: 22182 - DNA, 20 bp, synthetic construct
  misc_feature 1..20: note = chemically synthesized
  source 1..20: mol_type = other DNA
gatgagtaagcatagacata

SEQ ID NO: 22183 - DNA, 20 bp, synthetic construct
  misc_feature 1..20: note = chemically synthesized
  source 1..20: mol_type = other DNA
ttgagactagagaaaggtgg

SEQ ID NO: 22184 - DNA, 20 bp, synthetic construct
  misc_feature 1..20: note = chemically synthesized
  source 1..20: mol_type = other DNA
ctagagaaaggtgggaggat

SEQ ID NO: 22185 - DNA, 20 bp, synthetic construct
  misc_feature 1..20: note = chemically synthesized
  source 1..20: mol_type = other DNA
atggtgaggactgaaaaact

SEQ ID NO: 22186 - DNA, 20 bp, synthetic construct
  misc_feature 1..20: note = chemically synthesized
  source 1..20: mol_type = other DNA
gaggactgaaaaactacgga

SEQ ID NO: 22187 - DNA, 20 bp, synthetic construct
  misc_feature 1..20: note = chemically synthesized
  source 1..20: mol_type = other DNA
gtccccacccaaatctcatc

SEQ ID NO: 22188 - DNA, 20 bp, synthetic construct
  misc_feature 1..20: note = chemically synthesized
  source 1..20: mol_type = other DNA
taatcctcacgtgttgtggg

SEQ ID NO: 22189 - DNA, 20 bp, synthetic construct
  misc_feature 1..20: note = chemically synthesized
  source 1..20: mol_type = other DNA
agggatttggagggaggtaa

SEQ ID NO: 22190 - DNA, 20 bp, synthetic construct
  misc_feature 1..20: note = chemically synthesized
  source 1..20: mol_type = other DNA
ctcatgctcttctcgtgata

SEQ ID NO: 22191 - DNA, 20 bp, synthetic construct
  misc_feature 1..20: note = chemically synthesized
  source 1..20: mol_type = other DNA
gcaagcaaaatatcacttaa

SEQ ID NO: 22192 - DNA, 20 bp, synthetic construct
  misc_feature 1..20: note = chemically synthesized
  source 1..20: mol_type = other DNA
tcacttaatggggtaattaa

SEQ ID NO: 22193 - DNA, 20 bp, synthetic construct
  misc_feature 1..20: note = chemically synthesized
  source 1..20: mol_type = other DNA
agggtgaagaaattgggcaa

SEQ ID NO: 22194 - DNA, 20 bp, synthetic construct
  misc_feature 1..20: note = chemically synthesized
  source 1..20: mol_type = other DNA
ggcaaatggatgtcatgagg

SEQ ID NO: 22195 - DNA, 20 bp, synthetic construct
  misc_feature 1..20: note = chemically synthesized
  source 1..20: mol_type = other DNA
tcagagcccaggccctaagc

SEQ ID NO: 22196 - DNA, 20 bp, synthetic construct
  misc_feature 1..20: note = chemically synthesized
  source 1..20: mol_type = other DNA
gcccaggccctaagctggag

SEQ ID NO: 22197 - DNA, 20 bp, synthetic construct
  misc_feature 1..20: note = chemically synthesized
  source 1..20: mol_type = other DNA
tggagtagagtgtgcaagga

SEQ ID NO: 22198 - DNA, 20 bp, synthetic construct
  misc_feature 1..20: note = chemically synthesized
  source 1..20: mol_type = other DNA
agtgtgcaaggaaagagtaa

SEQ ID NO: 22199 - DNA, 20 bp, synthetic construct
  misc_feature 1..20: note = chemically synthesized
  source 1..20: mol_type = other DNA
gaaagagtaataggattgaa

SEQ ID NO: 22200 - DNA, 20 bp, synthetic construct
  misc_feature 1..20: note = chemically synthesized
  source 1..20: mol_type = other DNA
ccaggtaggaggacataggg

SEQ ID NO: 22201 - DNA, 20 bp, synthetic construct
  misc_feature 1..20: note = chemically synthesized
  source 1..20: mol_type = other DNA
agacctccagtaaacttagg

SEQ ID NO: 22202 - DNA, 20 bp, synthetic construct
  misc_feature 1..20: note = chemically synthesized
  source 1..20: mol_type = other DNA
actaaataataatcacatgt

SEQ ID NO: 22203 - DNA, 20 bp, synthetic construct
  misc_feature 1..20: note = chemically synthesized
  source 1..20: mol_type = other DNA
ttgttcatgagctagagcaa

SEQ ID NO: 22204 - DNA, 20 bp, synthetic construct
  misc_feature 1..20: note = chemically synthesized
  source 1..20: mol_type = other DNA
atgctattatatggtaccaa

SEQ ID NO: 22205 - DNA, 20 bp, synthetic construct
  misc_feature 1..20: note = chemically synthesized
  source 1..20: mol_type = other DNA
aaaatgcaagcaattttcat

SEQ ID NO: 22206 - DNA, 20 bp, synthetic construct
  misc_feature 1..20: note = chemically synthesized
  source 1..20: mol_type = other DNA
tacacaagctaattgtcctt

SEQ ID NO: 22207 - DNA, 20 bp, synthetic construct
  misc_feature 1..20: note = chemically synthesized
  source 1..20: mol_type = other DNA
aagtttaaactgtcattgag

SEQ ID NO: 22208 - DNA, 20 bp, synthetic construct
  misc_feature 1..20: note = chemically synthesized
  source 1..20: mol_type = other DNA
cagatgttatgtgatgagga

SEQ ID NO: 22209 - DNA, 20 bp, synthetic construct
  misc_feature 1..20: note = chemically synthesized
  source 1..20: mol_type = other DNA
agaacttttctttaaagtgt

SEQ ID NO: 22210 - DNA, 20 bp, synthetic construct
  misc_feature 1..20: note = chemically synthesized
  source 1..20: mol_type = other DNA
acaaaaatgcaaaatttcca

SEQ ID NO: 22211 - DNA, 20 bp, synthetic construct
  misc_feature 1..20: note = chemically synthesized
  source 1..20: mol_type = other DNA
ttcatcttcatcttttccag

SEQ ID NO: 22212 - DNA, 20 bp, synthetic construct
  misc_feature 1..20: note = chemically synthesized
  source 1..20: mol_type = other DNA
gatagtcccccatatagcct

SEQ ID NO: 22213 - DNA, 20 bp, synthetic construct
  misc_feature 1..20: note = chemically synthesized
  source 1..20: mol_type = other DNA
gtagaaaatcccacataaga

SEQ ID NO: 22214 - DNA, 20 bp, synthetic construct
  misc_feature 1..20: note = chemically synthesized
  source 1..20: mol_type = other DNA
tcccacataagagagaattc

SEQ ID NO: 22215 - DNA, 20 bp, synthetic construct
  misc_feature 1..20: note = chemically synthesized
  source 1..20: mol_type = other DNA
agcaaggaagcctacccagt

SEQ ID NO: 22216 - DNA, 20 bp, synthetic construct
  misc_feature 1..20: note = chemically synthesized
  source 1..20: mol_type = other DNA
acatctgcattatggactcc

SEQ ID NO: 22217 - DNA, 20 bp, synthetic construct
  misc_feature 1..20: note = chemically synthesized
  source 1..20: mol_type = other DNA
tccaggaatcctagccacag

SEQ ID NO: 22218 - DNA, 20 bp, synthetic construct
  misc_feature 1..20: note = chemically synthesized
  source 1..20: mol_type = other DNA
ctccagagaaggagctctca

SEQ ID NO: 22219 - DNA, 20 bp, synthetic construct
  misc_feature 1..20: note = chemically synthesized
  source 1..20: mol_type = other DNA
ctgacatcccccacccacag

SEQ ID NO: 22220 - DNA, 20 bp, synthetic construct
  misc_feature 1..20: note = chemically synthesized
  source 1..20: mol_type = other DNA
tactgctggctgctgtcacc

SEQ ID NO: 22221 - DNA, 20 bp, synthetic construct
  misc_feature 1..20: note = chemically synthesized
  source 1..20: mol_type = other DNA
aggcattctgctgggggcct

SEQ ID NO: 22222 - DNA, 20 bp, synthetic construct
  misc_feature 1..20: note = chemically synthesized
  source 1..20: mol_type = other DNA
gccggtgtccacacacacca

SEQ ID NO: 22223 - DNA, 20 bp, synthetic construct
  misc_feature 1..20: note = chemically synthesized
  source 1..20: mol_type = other DNA
acctcctgcatgtgccacct

SEQ ID NO: 22224 - DNA, 20 bp, synthetic construct
  misc_feature 1..20: note = chemically synthesized
  source 1..20: mol_type = other DNA
tgcagactgcttgggagcca

SEQ ID NO: 22225 - DNA, 20 bp, synthetic construct
  misc_feature 1..20: note = chemically synthesized
  source 1..20: mol_type = other DNA
agcaaactgcctgaaggcca

SEQ ID NO: 22226 - DNA, 20 bp, synthetic construct
  misc_feature 1..20: note = chemically synthesized
  source 1..20: mol_type = other DNA
cagccatggggcccaaggac

SEQ ID NO: 22227 - DNA, 20 bp, synthetic construct
  misc_feature 1..20: note = chemically synthesized
  source 1..20: mol_type = other DNA
aagaaatatgacacttccaa

SEQ ID NO: 22228 - DNA, 20 bp, synthetic construct
  misc_feature 1..20: note = chemically synthesized
  source 1..20: mol_type = other DNA
atttataaaattctggaaaa

SEQ ID NO: 22229 - DNA, 20 bp, synthetic construct
  misc_feature 1..20: note = chemically synthesized
  source 1..20: mol_type = other DNA
aagaaatcagaaaaacaatt

SEQ ID NO: 22230 - DNA, 20 bp, synthetic construct
  misc_feature 1..20: note = chemically synthesized
  source 1..20: mol_type = other DNA
tcagaaaaacaattcaggat

SEQ ID NO: 22231 - DNA, 20 bp, synthetic construct
  misc_feature 1..20: note = chemically synthesized
  source 1..20: mol_type = other DNA
acccaagagatagatacaac

SEQ ID NO: 22232 - DNA, 20 bp, synthetic construct
  misc_feature 1..20: note = chemically synthesized
  source 1..20: mol_type = other DNA
aaacagaaattctgtaactg

SEQ ID NO: 22233 - DNA, 20 bp, synthetic construct
  misc_feature 1..20: note = chemically synthesized
  source 1..20: mol_type = other DNA
aatgatagaaaggaaaaaaa

SEQ ID NO: 22234 - DNA, 20 bp, synthetic construct
  misc_feature 1..20: note = chemically synthesized
  source 1..20: mol_type = other DNA
agtcaaactgtcaaaagcca

SEQ ID NO: 22235 - DNA, 20 bp, synthetic construct
  misc_feature 1..20: note = chemically synthesized
  source 1..20: mol_type = other DNA
cctcacaggccaggagaaga

SEQ ID NO: 22236 - DNA, 20 bp, synthetic construct
  misc_feature 1..20: note = chemically synthesized
  source 1..20: mol_type = other DNA
tgaaagaaaaaaatgacacc

SEQ ID NO: 22237 - DNA, 20 bp, synthetic construct
  misc_feature 1..20: note = chemically synthesized
  source 1..20: mol_type = other DNA
aacattgttcttcaaaaatg

SEQ ID NO: 22238 - DNA, 20 bp, synthetic construct
  misc_feature 1..20: note = chemically synthesized
  source 1..20: mol_type = other DNA
tctgggcaagaaaaatttga

SEQ ID NO: 22239 - DNA, 20 bp, synthetic construct
  misc_feature 1..20: note = chemically synthesized
  source 1..20: mol_type = other DNA
gctttacaagaaatatttaa

SEQ ID NO: 22240 - DNA, 20 bp, synthetic construct
  misc_feature 1..20: note = chemically synthesized
  source 1..20: mol_type = other DNA
gaaagaaagagagagagaga

SEQ ID NO: 22241 - DNA, 20 bp, synthetic construct
  misc_feature 1..20: note = chemically synthesized
  source 1..20: mol_type = other DNA
aaaaaaaaaacaaaacaacc

SEQ ID NO: 22242 - DNA, 20 bp, synthetic construct
  misc_feature 1..20: note = chemically synthesized
  source 1..20: mol_type = other DNA
gaatcaattaacaaaatggc

SEQ ID NO: 22243 - DNA, 20 bp, synthetic construct
  misc_feature 1..20: note = chemically synthesized
  source 1..20: mol_type = other DNA
aataatagccttgcatgtaa

SEQ ID NO: 22244 - DNA, 20 bp, synthetic construct
  misc_feature 1..20: note = chemically synthesized
  source 1..20: mol_type = other DNA
gataaaaggaacaattcagc

SEQ ID NO: 22245 - DNA, 20 bp, synthetic construct
  misc_feature 1..20: note = chemically synthesized
  source 1..20: mol_type = other DNA
agcaaatgttattagatata

SEQ ID NO: 22246 - DNA, 20 bp, synthetic construct
  misc_feature 1..20: note = chemically synthesized
  source 1..20: mol_type = other DNA
attagatataaagggtgaaa

SEQ ID NO: 22247 - DNA, 20 bp, synthetic construct
  misc_feature 1..20: note = chemically synthesized
  source 1..20: mol_type = other DNA
aatccaatacaataatagtt

SEQ ID NO: 22248 - DNA, 20 bp, synthetic construct
  misc_feature 1..20: note = chemically synthesized
  source 1..20: mol_type = other DNA
agaaaattaacaaagaaaca

SEQ ID NO: 22249 - DNA, 20 bp, synthetic construct
  misc_feature 1..20: note = chemically synthesized
  source 1..20: mol_type = other DNA
taaacttgactttagaccaa

SEQ ID NO: 22250 - DNA, 20 bp, synthetic construct
  misc_feature 1..20: note = chemically synthesized
  source 1..20: mol_type = other DNA
aatatttcatccaacagcta

SEQ ID NO: 22251 - DNA, 20 bp, synthetic construct
  misc_feature 1..20: note = chemically synthesized
  source 1..20: mol_type = other DNA
tcagcacatgacgcattccc

SEQ ID NO: 22252 - DNA, 20 bp, synthetic construct
  misc_feature 1..20: note = chemically synthesized
  source 1..20: mol_type = other DNA
agcatcttctcagaccacaa

SEQ ID NO: 22253 - DNA, 20 bp, synthetic construct
  misc_feature 1..20: note = chemically synthesized
  source 1..20: mol_type = other DNA
ggaaattaaacaacatgctc

SEQ ID NO: 22254 - DNA, 20 bp, synthetic construct
  misc_feature 1..20: note = chemically synthesized
  source 1..20: mol_type = other DNA
atacaacataggaaaagcca

SEQ ID NO: 22255 - DNA, 20 bp, synthetic construct
  misc_feature 1..20: note = chemically synthesized
  source 1..20: mol_type = other DNA
aatagagaaaaacaacaaca

SEQ ID NO: 22256 - DNA, 20 bp, synthetic construct
  misc_feature 1..20: note = chemically synthesized
  source 1..20: mol_type = other DNA
tgttatttaaaaaagataaa

SEQ ID NO: 22257 - DNA, 20 bp, synthetic construct
  misc_feature 1..20: note = chemically synthesized
  source 1..20: mol_type = other DNA
acacataccacctaccaaga

SEQ ID NO: 22258 - DNA, 20 bp, synthetic construct
  misc_feature 1..20: note = chemically synthesized
  source 1..20: mol_type = other DNA
ctaccaagattgaattaaga

SEQ ID NO: 22259 - DNA, 20 bp, synthetic construct
  misc_feature 1..20: note = chemically synthesized
  source 1..20: mol_type = other DNA
aaaacctgaacagaccagta

SEQ ID NO: 22260 - DNA, 20 bp, synthetic construct
  misc_feature 1..20: note = chemically synthesized
  source 1..20: mol_type = other DNA
accagtaatgaataatgaaa

SEQ ID NO: 22261 - DNA, 20 bp, synthetic construct
  misc_feature 1..20: note = chemically synthesized
  source 1..20: mol_type = other DNA
cttttaaaaattaaacagga

SEQ ID NO: 22262 - DNA, 20 bp, synthetic construct
  misc_feature 1..20: note = chemically synthesized
  source 1..20: mol_type = other DNA
tcctgattccataaccagac

SEQ ID NO: 22263 - DNA, 20 bp, synthetic construct
  misc_feature 1..20: note = chemically synthesized
  source 1..20: mol_type = other DNA
ctcaacaaaatactagcaaa

SEQ ID NO: 22264 - DNA, 20 bp, synthetic construct
  misc_feature 1..20: note = chemically synthesized
  source 1..20: mol_type = other DNA
gataatacaccatgatcaag

SEQ ID NO: 22265 - DNA, 20 bp, synthetic construct
  misc_feature 1..20: note = chemically synthesized
  source 1..20: mol_type = other DNA
tgatcaagtgggatttatac

SEQ ID NO: 22266 - DNA, 20 bp, synthetic construct
  misc_feature 1..20: note = chemically synthesized
  source 1..20: mol_type = other DNA
aacccacagctaacatcata

SEQ ID NO: 22267 - DNA, 20 bp, synthetic construct
  misc_feature 1..20: note = chemically synthesized
  source 1..20: mol_type = other DNA
tctaagaactgaaacaaaat

SEQ ID NO: 22268 - DNA, 20 bp, synthetic construct
  misc_feature 1..20: note = chemically synthesized
  source 1..20: mol_type = other DNA
agctaaaaaataaaatattt

SEQ ID NO: 22269 - DNA, 20 bp, synthetic construct
  misc_feature 1..20: note = chemically synthesized
  source 1..20: mol_type = other DNA
aaactacaaaacactgataa

SEQ ID NO: 22270 - DNA, 20 bp, synthetic construct
  misc_feature 1..20: note = chemically synthesized
  source 1..20: mol_type = other DNA
tggagagatatcctatgttc

SEQ ID NO: 22271 - DNA, 20 bp, synthetic construct
  misc_feature 1..20: note = chemically synthesized
  source 1..20: mol_type = other DNA
agacacttagaccaatggaa

SEQ ID NO: 22272 - DNA, 20 bp, synthetic construct
  misc_feature 1..20: note = chemically synthesized
  source 1..20: mol_type = other DNA
agattttcaacaaaggtgac

SEQ ID NO: 22273 - DNA, 20 bp, synthetic construct
  misc_feature 1..20: note = chemically synthesized
  source 1..20: mol_type = other DNA
aagaaatggtgctgaaaaaa

SEQ ID NO: 22274 - DNA, 20 bp, synthetic construct
  misc_feature 1..20: note = chemically synthesized
  source 1..20: mol_type = other DNA
ctgaaaaaattggatatcca

SEQ ID NO: 22275 - DNA, 20 bp, synthetic construct
  misc_feature 1..20: note = chemically synthesized
  source 1..20: mol_type = other DNA
cattggatatccatgtgcaa

SEQ ID NO: 22276 - DNA, 20 bp, synthetic construct
  misc_feature 1..20: note = chemically synthesized
  source 1..20: mol_type = other DNA
aactggactgctgatatggt

SEQ ID NO: 22277 - DNA, 20 bp, synthetic construct
  misc_feature 1..20: note = chemically synthesized
  source 1..20: mol_type = other DNA
aaatataatccccaacttct

SEQ ID NO: 22278 - DNA, 20 bp, synthetic construct
  misc_feature 1..20: note = chemically synthesized
  source 1..20: mol_type = other DNA
cccaacttctcaggatcttg

SEQ ID NO: 22279 - DNA, 20 bp, synthetic construct
  misc_feature 1..20: note = chemically synthesized
  source 1..20: mol_type = other DNA
agcatgtggaggctcgcatt

SEQ ID NO: 22280 - DNA, 20 bp, synthetic construct
  misc_feature 1..20: note = chemically synthesized
  source 1..20: mol_type = other DNA
caggagacaccccaaatact

SEQ ID NO: 22281 - DNA, 20 bp, synthetic construct
  misc_feature 1..20: note = chemically synthesized
  source 1..20: mol_type = other DNA
gagaagtttctgaccttacc

SEQ ID NO: 22282 - DNA, 20 bp, synthetic construct
  misc_feature 1..20: note = chemically synthesized
  source 1..20: mol_type = other DNA
gtttctgaccttacctggag

SEQ ID NO: 22283 - DNA, 20 bp, synthetic construct
  misc_feature 1..20: note = chemically synthesized
  source 1..20: mol_type = other DNA
agaaaggccctgggagctca

SEQ ID NO: 22284 - DNA, 20 bp, synthetic construct
  misc_feature 1..20: note = chemically synthesized
  source 1..20: mol_type = other DNA
aggcatttacattactaaca

SEQ ID NO: 22285 - DNA, 20 bp, synthetic construct
  misc_feature 1..20: note = chemically synthesized
  source 1..20: mol_type = other DNA
ggcctaaatgctccacttaa

SEQ ID NO: 22286 - DNA, 20 bp, synthetic construct
  misc_feature 1..20: note = chemically synthesized
  source 1..20: mol_type = other DNA
catgcaaatggccaccaaaa

SEQ ID NO: 22287 - DNA, 20 bp, synthetic construct
  misc_feature 1..20: note = chemically synthesized
  source 1..20: mol_type = other DNA
agaaagtcaacaaaaaaata

SEQ ID NO: 22288 - DNA, 20 bp, synthetic construct
  misc_feature 1..20: note = chemically synthesized
  source 1..20: mol_type = other DNA
aaaaaaaagttcaggaccag

SEQ ID NO: 22289 - DNA, 20 bp, synthetic construct
  misc_feature 1..20: note = chemically synthesized
  source 1..20: mol_type = other DNA
aggaccagatggattcacaa

SEQ ID NO: 22290 - DNA, 20 bp, synthetic construct
  misc_feature 1..20: note = chemically synthesized
  source 1..20: mol_type = other DNA
attctactagacattcaaag

SEQ ID NO: 22291 - DNA, 20 bp, synthetic construct
  misc_feature 1..20: note = chemically synthesized
  source 1..20: mol_type = other DNA
gatcaagcaggttccatgcc

SEQ ID NO: 22292 - DNA, 20 bp, synthetic construct
  misc_feature 1..20: note = chemically synthesized
  source 1..20: mol_type = other DNA
caggttccatgccagggatg

SEQ ID NO: 22293 - DNA, 20 bp, synthetic construct
  misc_feature 1..20: note = chemically synthesized
  source 1..20: mol_type = other DNA
aacccacagccaacataata

SEQ ID NO: 22294 - DNA, 20 bp, synthetic construct
  misc_feature 1..20: note = chemically synthesized
  source 1..20: mol_type = other DNA
tctgagaactggaacaagac

SEQ ID NO: 22295 - DNA, 20 bp, synthetic construct
  misc_feature 1..20: note = chemically synthesized
  source 1..20: mol_type = other DNA
gcaaagtttccagatacaag

SEQ ID NO: 22296 - DNA, 20 bp, synthetic construct
  misc_feature 1..20: note = chemically synthesized
  source 1..20: mol_type = other DNA
acaccaacagcaaccaaatg

SEQ ID NO: 22297 - DNA, 20 bp, synthetic construct
  misc_feature 1..20: note = chemically synthesized
  source 1..20: mol_type = other DNA
atataaaacgtactctcaag

SEQ ID NO: 22298 - DNA, 20 bp, synthetic construct
  misc_feature 1..20: note = chemically synthesized
  source 1..20: mol_type = other DNA
cacagtgaagagacaagctg

SEQ ID NO: 22299 - DNA, 20 bp, synthetic construct
  misc_feature 1..20: note = chemically synthesized
  source 1..20: mol_type = other DNA
atatttgcatacatttgaca

SEQ ID NO: 22300 - DNA, 20 bp, synthetic construct
  misc_feature 1..20: note = chemically synthesized
  source 1..20: mol_type = other DNA
tttgacaaggaattaatctc

SEQ ID NO: 22301 - DNA, 20 bp, synthetic construct
  misc_feature 1..20: note = chemically synthesized
  source 1..20: mol_type = other DNA
atctcattaaaaaattggca

SEQ ID NO: 22302 - DNA, 20 bp, synthetic construct
  misc_feature 1..20: note = chemically synthesized
  source 1..20: mol_type = other DNA
agaagacatacaaatgcaca

SEQ ID NO: 22303 - DNA, 20 bp, synthetic construct
  misc_feature 1..20: note = chemically synthesized
  source 1..20: mol_type = other DNA
agatatcatcttatgccagt

SEQ ID NO: 22304 - DNA, 20 bp, synthetic construct
  misc_feature 1..20: note = chemically synthesized
  source 1..20: mol_type = other DNA
aataaataacacatgctggc

SEQ ID NO: 22305 - DNA, 20 bp, synthetic construct
  misc_feature 1..20: note = chemically synthesized
  source 1..20: mol_type = other DNA
aagatccagcaatcttatta

SEQ ID NO: 22306 - DNA, 20 bp, synthetic construct
  misc_feature 1..20: note = chemically synthesized
  source 1..20: mol_type = other DNA
tgggtatttatccaaaggaa

SEQ ID NO: 22307 - DNA, 20 bp, synthetic construct
  misc_feature 1..20: note = chemically synthesized
  source 1..20: mol_type = other DNA
ttatccaaaggaaaagaatt

SEQ ID NO: 22308 - DNA, 20 bp, synthetic construct
  misc_feature 1..20: note = chemically synthesized
  source 1..20: mol_type = other DNA
gattcacattagcaaagata

SEQ ID NO: 22309 - DNA, 20 bp, synthetic construct
  misc_feature 1..20: note = chemically synthesized
  source 1..20: mol_type = other DNA
atcaacctaagtgtccatca

SEQ ID NO: 22310 - DNA, 20 bp, synthetic construct
  misc_feature 1..20: note = chemically synthesized
  source 1..20: mol_type = other DNA
acctaagtgtccatcaatgg

SEQ ID NO: 22311 - DNA, 20 bp, synthetic construct
  misc_feature 1..20: note = chemically synthesized
  source 1..20: mol_type = other DNA
aatgtggtgtatacacacaa

SEQ ID NO: 22312 - DNA, 20 bp, synthetic construct
  misc_feature 1..20: note = chemically synthesized
  source 1..20: mol_type = other DNA
atcatttcatttgcagcaac

SEQ ID NO: 22313 - DNA, 20 bp, synthetic construct
  misc_feature 1..20: note = chemically synthesized
  source 1..20: mol_type = other DNA
aagttaatatcatgtaggta

SEQ ID NO: 22314 - DNA, 20 bp, synthetic construct
  misc_feature 1..20: note = chemically synthesized
  source 1..20: mol_type = other DNA
aatatcatgtaggtagagag

SEQ ID NO: 22315 - DNA, 20 bp, synthetic construct
  misc_feature 1..20: note = chemically synthesized
  source 1..20: mol_type = other DNA
gaaacaggcagttagataga

SEQ ID NO: 22316 - DNA, 20 bp, synthetic construct
  misc_feature 1..20: note = chemically synthesized
  source 1..20: mol_type = other DNA
tctgatgttcaatagcaaag

SEQ ID NO: 22317 - DNA, 20 bp, synthetic construct
  misc_feature 1..20: note = chemically synthesized
  source 1..20: mol_type = other DNA
aacgataaatacttgaggtg

SEQ ID NO: 22318 - DNA, 20 bp, synthetic construct
  misc_feature 1..20: note = chemically synthesized
  source 1..20: mol_type = other DNA
aaacttctctcttaacaagc

SEQ ID NO: 22319 - DNA, 20 bp, synthetic construct
  misc_feature 1..20: note = chemically synthesized
  source 1..20: mol_type = other DNA
cttaacaagctagaatataa

SEQ ID NO: 22320 - DNA, 20 bp, synthetic construct
  misc_feature 1..20: note = chemically synthesized
  source 1..20: mol_type = other DNA
tgaatgcaagagcatagaga

SEQ ID NO: 22321 - DNA, 20 bp, synthetic construct
  misc_feature 1..20: note = chemically synthesized
  source 1..20: mol_type = other DNA
gaaaatacttaatatcatta

SEQ ID NO: 22322 - DNA, 20 bp, synthetic construct
  misc_feature 1..20: note = chemically synthesized
  source 1..20: mol_type = other DNA
ttttaccacagcgtaggtca

SEQ ID NO: 22323 - DNA, 20 bp, synthetic construct
  misc_feature 1..20: note = chemically synthesized
  source 1..20: mol_type = other DNA
atcactatttcaaagaagta

SEQ ID NO: 22324 - DNA, 20 bp, synthetic construct
  misc_feature 1..20: note = chemically synthesized
  source 1..20: mol_type = other DNA
gaatagatatcagccaaaat

SEQ ID NO: 22325 - DNA, 20 bp, synthetic construct
  misc_feature 1..20: note = chemically synthesized
  source 1..20: mol_type = other DNA
aggggcctagacatagcatg

SEQ ID NO: 22326 - DNA, 20 bp, synthetic construct
  misc_feature 1..20: note = chemically synthesized
  source 1..20: mol_type = other DNA
gcatgctgaatgaaaaggaa

SEQ ID NO: 22327 - DNA, 20 bp, synthetic construct
  misc_feature 1..20: note = chemically synthesized
  source 1..20: mol_type = other DNA
tgagctaacttcctcatttt

SEQ ID NO: 22328 - DNA, 20 bp, synthetic construct
  misc_feature 1..20: note = chemically synthesized
  source 1..20: mol_type = other DNA
aagaaataagctaataccta

SEQ ID NO: 22329 - DNA, 20 bp, synthetic construct
  misc_feature 1..20: note = chemically synthesized
  source 1..20: mol_type = other DNA
attaaatgctaggcacagtt

SEQ ID NO: 22330 - DNA, 20 bp, synthetic construct
  misc_feature 1..20: note = chemically synthesized
  source 1..20: mol_type = other DNA
caacattacccaggtgatgg

SEQ ID NO: 22331 - DNA, 20 bp, synthetic construct
  misc_feature 1..20: note = chemically synthesized
  source 1..20: mol_type = other DNA
tacccaggtgatggtggagt

SEQ ID NO: 22332 - DNA, 20 bp, synthetic construct
  misc_feature 1..20: note = chemically synthesized
  source 1..20: mol_type = other DNA
gacagcaagatagtaagtaa

SEQ ID NO: 22333 - DNA, 20 bp, synthetic construct
  misc_feature 1..20: note = chemically synthesized
  source 1..20: mol_type = other DNA
aggaatggagcaacaaattg

SEQ ID NO: 22334 - DNA, 20 bp, synthetic construct
  misc_feature 1..20: note = chemically synthesized
  source 1..20: mol_type = other DNA
ttttgcttgtttgtttgaaa

SEQ ID NO: 22335 - DNA, 20 bp, synthetic construct
  misc_feature 1..20: note = chemically synthesized
  source 1..20: mol_type = other DNA
tctcactctgtcaccccggc

SEQ ID NO: 22336 - DNA, 20 bp, synthetic construct
  misc_feature 1..20: note = chemically synthesized
  source 1..20: mol_type = other DNA
ctgaagcctcactagaacgc

SEQ ID NO: 22337 - DNA, 20 bp, synthetic construct
  misc_feature 1..20: note = chemically synthesized
  source 1..20: mol_type = other DNA
tttttaaatttctgtagaaa

SEQ ID NO: 22338 - DNA, 20 bp, synthetic construct
  misc_feature 1..20: note = chemically synthesized
  source 1..20: mol_type = other DNA
aaagtgttgagattacaggt

SEQ ID NO: 22339 - DNA, 20 bp, synthetic construct
  misc_feature 1..20: note = chemically synthesized
  source 1..20: mol_type = other DNA
aatcaccatgctgggccttg

SEQ ID NO: 22340 - DNA, 20 bp, synthetic construct
  misc_feature 1..20: note = chemically synthesized
  source 1..20: mol_type = other DNA
atggatctttaaaagtggtg

SEQ ID NO: 22341 - DNA, 20 bp, synthetic construct
  misc_feature 1..20: note = chemically synthesized
  source 1..20: mol_type = other DNA
aaacatcgttaggtctcggg

SEQ ID NO: 22342 - DNA, 20 bp, synthetic construct
  misc_feature 1..20: note = chemically synthesized
  source 1..20: mol_type = other DNA
tcgttaggtctcgggaagga

SEQ ID NO: 22343 - DNA, 20 bp, synthetic construct
  misc_feature 1..20: note = chemically synthesized
  source 1..20: mol_type = other DNA
tctgtgttaacaaaaaacag

SEQ ID NO: 22344 - DNA, 20 bp, synthetic construct
  misc_feature 1..20: note = chemically synthesized
  source 1..20: mol_type = other DNA
tctgaaggtttagaaactcc

SEQ ID NO: 22345 - DNA, 20 bp, synthetic construct
  misc_feature 1..20: note = chemically synthesized
  source 1..20: mol_type = other DNA
ctttagaactcctgtcctag

SEQ ID NO: 22346 - DNA, 20 bp, synthetic construct
  misc_feature 1..20: note = chemically synthesized
  source 1..20: mol_type = other DNA
accactttgactctagtttt

SEQ ID NO: 22347 - DNA, 20 bp, synthetic construct
  misc_feature 1..20: note = chemically synthesized
  source 1..20: mol_type = other DNA
ccttaacatgttaatttctc

SEQ ID NO: 22348 - DNA, 20 bp, synthetic construct
  misc_feature 1..20: note = chemically synthesized
  source 1..20: mol_type = other DNA
agtaagacctgggcaaagga

SEQ ID NO: 22349 - DNA, 20 bp, synthetic construct
  misc_feature 1..20: note = chemically synthesized
  source 1..20: mol_type = other DNA
tttgggcaaaactttccatc

SEQ ID NO: 22350 - DNA, 20 bp, synthetic construct
  misc_feature 1..20: note = chemically synthesized
  source 1..20: mol_type = other DNA
acttagtacttcccactact

SEQ ID NO: 22351 - DNA, 20 bp, synthetic construct
  misc_feature 1..20: note = chemically synthesized
  source 1..20: mol_type = other DNA
gtacttcccactactgtgga

SEQ ID NO: 22352 - DNA, 20 bp, synthetic construct
  misc_feature 1..20: note = chemically synthesized
  source 1..20: mol_type = other DNA
tttgtcaattcttgaagatt

SEQ ID NO: 22353 - DNA, 20 bp, synthetic construct
  misc_feature 1..20: note = chemically synthesized
  source 1..20: mol_type = other DNA
tgatacctaatagacacttg

SEQ ID NO: 22354 - DNA, 20 bp, synthetic construct
  misc_feature 1..20: note = chemically synthesized
  source 1..20: mol_type = other DNA
agacacttgatgaatcctta

SEQ ID NO: 22355 - DNA, 20 bp, synthetic construct
  misc_feature 1..20: note = chemically synthesized
  source 1..20: mol_type = other DNA
aatccttactgaataataaa

SEQ ID NO: 22356 - DNA, 20 bp, synthetic construct
  misc_feature 1..20: note = chemically synthesized
  source 1..20: mol_type = other DNA
ctgaataataaaatggatta

SEQ ID NO: 22357 - DNA, 20 bp, synthetic construct
  misc_feature 1..20: note = chemically synthesized
  source 1..20: mol_type = other DNA
aaaaggttattttgaagtct

SEQ ID NO: 22358 - DNA, 20 bp, synthetic construct
  misc_feature 1..20: note = chemically synthesized
  source 1..20: mol_type = other DNA
tgggcaaaattctggcagca

SEQ ID NO: 22359 - DNA, 20 bp, synthetic construct
  misc_feature 1..20: note = chemically synthesized
  source 1..20: mol_type = other DNA
ctaagaaaccttttgttttc

SEQ ID NO: 22360 - DNA, 20 bp, synthetic construct
  misc_feature 1..20: note = chemically synthesized
  source 1..20: mol_type = other DNA
aaccttttgttttcttggat

SEQ ID NO: 22361 - DNA, 20 bp, synthetic construct
  misc_feature 1..20: note = chemically synthesized
  source 1..20: mol_type = other DNA
aaaacatggtaagataactg

SEQ ID NO: 22362 - DNA, 20 bp, synthetic construct
  misc_feature 1..20: note = chemically synthesized
  source 1..20: mol_type = other DNA
agaaactgttattcagttta

SEQ ID NO: 22363 - DNA, 20 bp, synthetic construct
  misc_feature 1..20: note = chemically synthesized
  source 1..20: mol_type = other DNA
tcttacataatagtaaaaaa

SEQ ID NO: 22364 - DNA, 20 bp, synthetic construct
  misc_feature 1..20: note = chemically synthesized
  source 1..20: mol_type = other DNA
cttgatcattaaatacctct

SEQ ID NO: 22365 - DNA, 20 bp, synthetic construct
  misc_feature 1..20: note = chemically synthesized
  source 1..20: mol_type = other DNA
caatttgctctatgaactgg

SEQ ID NO: 22366 - DNA, 20 bp, synthetic construct
  misc_feature 1..20: note = chemically synthesized
  source 1..20: mol_type = other DNA
tgctctatgaactggaggag

SEQ ID NO: 22367 - DNA, 20 bp, synthetic construct
  misc_feature 1..20: note = chemically synthesized
  source 1..20: mol_type = other DNA
tatagtggcaatgtattatt

SEQ ID NO: 22368 - DNA, 20 bp, synthetic construct
  misc_feature 1..20: note = chemically synthesized
  source 1..20: mol_type = other DNA
ataagtattaaaggcagctt

SEQ ID NO: 22369 - DNA, 20 bp, synthetic construct
  misc_feature 1..20: note = chemically synthesized
  source 1..20: mol_type = other DNA
ttttatttcaaggcatactc

SEQ ID NO: 22370 - DNA, 20 bp, synthetic construct
  misc_feature 1..20: note = chemically synthesized
  source 1..20: mol_type = other DNA
ttaaaaacacatgctcattt

SEQ ID NO: 22371 - DNA, 20 bp, synthetic construct
  misc_feature 1..20: note = chemically synthesized
  source 1..20: mol_type = other DNA
ggataaagatctctgaggaa

SEQ ID NO: 22372 - DNA, 20 bp, synthetic construct
  misc_feature 1..20: note = chemically synthesized
  source 1..20: mol_type = other DNA
ttctttctcactaaactaca

SEQ ID NO: 22373 - DNA, 20 bp, synthetic construct
  misc_feature 1..20: note = chemically synthesized
  source 1..20: mol_type = other DNA
tgacttttaattttgatttt

SEQ ID NO: 22374 - DNA, 20 bp, synthetic construct
  misc_feature 1..20: note = chemically synthesized
  source 1..20: mol_type = other DNA
ctttgaacagttagtataag

SEQ ID NO: 22375 - DNA, 20 bp, synthetic construct
  misc_feature 1..20: note = chemically synthesized
  source 1..20: mol_type = other DNA
taaggtgaattctgattttt

SEQ ID NO: 22376 - DNA, 20 bp, synthetic construct
  misc_feature 1..20: note = chemically synthesized
  source 1..20: mol_type = other DNA
gtcttgacacttttaaacta

SEQ ID NO: 22377 - DNA, 20 bp, synthetic construct
  misc_feature 1..20: note = chemically synthesized
  source 1..20: mol_type = other DNA
ctagagagtataaacccaca

SEQ ID NO: 22378 - DNA, 20 bp, synthetic construct
  misc_feature 1..20: note = chemically synthesized
  source 1..20: mol_type = other DNA
ttttgccttttgagaagctc

SEQ ID NO: 22379 - DNA, 20 bp, synthetic construct
  misc_feature 1..20: note = chemically synthesized
  source 1..20: mol_type = other DNA
acattaattccaagctaatt

SEQ ID NO: 22380 - DNA, 20 bp, synthetic construct
  misc_feature 1..20: note = chemically synthesized
  source 1..20: mol_type = other DNA
gcatttcatataattactaa

SEQ ID NO: 22381 - DNA, 20 bp, synthetic construct
  misc_feature 1..20: note = chemically synthesized
  source 1..20: mol_type = other DNA
atataattactaacagaatg

SEQ ID NO: 22382 - DNA, 20 bp, synthetic construct
  misc_feature 1..20: note = chemically synthesized
  source 1..20: mol_type = other DNA
tatttctatgttgtcataat

SEQ ID NO: 22383 - DNA, 20 bp, synthetic construct
  misc_feature 1..20: note = chemically synthesized
  source 1..20: mol_type = other DNA
ctagcaattggttatcacta

SEQ ID NO: 22384 - DNA, 20 bp, synthetic construct
  misc_feature 1..20: note = chemically synthesized
  source 1..20: mol_type = other DNA
cccactggggaagcccaccc

SEQ ID NO: 22385 - DNA, 20 bp, synthetic construct
  misc_feature 1..20: note = chemically synthesized
  source 1..20: mol_type = other DNA
cacccagggatgttacagag

SEQ ID NO: 22386 - DNA, 20 bp, synthetic construct
  misc_feature 1..20: note = chemically synthesized
  source 1..20: mol_type = other DNA
tacagtcctccgagactcct

SEQ ID NO: 22387 - DNA, 20 bp, synthetic construct
  misc_feature 1..20: note = chemically synthesized
  source 1..20: mol_type = other DNA
gaacttacaggcacaaaagt

SEQ ID NO: 22388 - DNA, 20 bp, synthetic construct
  misc_feature 1..20: note = chemically synthesized
  source 1..20: mol_type = other DNA
ggcacaaaagttagagttgg

SEQ ID NO: 22389 - DNA, 20 bp, synthetic construct
  misc_feature 1..20: note = chemically synthesized
  source 1..20: mol_type = other DNA
aggctttggtagcttctctt

SEQ ID NO: 22390 - DNA, 20 bp, synthetic construct
  misc_feature 1..20: note = chemically synthesized
  source 1..20: mol_type = other DNA
gaaatcttatgtgcttccca

SEQ ID NO: 22391 - DNA, 20 bp, synthetic construct
  misc_feature 1..20: note = chemically synthesized
  source 1..20: mol_type = other DNA
acagaattcctggtggaagg

SEQ ID NO: 22392 - DNA, 20 bp, synthetic construct
  misc_feature 1..20: note = chemically synthesized
  source 1..20: mol_type = other DNA
gaaagacgagaaagaggagg

SEQ ID NO: 22393 - DNA, 20 bp, synthetic construct
  misc_feature 1..20: note = chemically synthesized
  source 1..20: mol_type = other DNA
gaagaattcctccttccacc

SEQ ID NO: 22394 - DNA, 20 bp, synthetic construct
  misc_feature 1..20: note = chemically synthesized
  source 1..20: mol_type = other DNA
gcctgtaagttctcttctcc

SEQ ID NO: 22395 - DNA, 20 bp, synthetic construct
  misc_feature 1..20: note = chemically synthesized
  source 1..20: mol_type = other DNA
ggattacaactaattgaaac

SEQ ID NO: 22396 - DNA, 20 bp, synthetic construct
  misc_feature 1..20: note = chemically synthesized
  source 1..20: mol_type = other DNA
taattgaaacaggaattcaa

SEQ ID NO: 22397 - DNA, 20 bp, synthetic construct
  misc_feature 1..20: note = chemically synthesized
  source 1..20: mol_type = other DNA
gagtctcggaggactgtaag

SEQ ID NO: 22398 - DNA, 20 bp, synthetic construct
  misc_feature 1..20: note = chemically synthesized
  source 1..20: mol_type = other DNA
gatccctctctgtaacatcc

SEQ ID NO: 22399 - DNA, 20 bp, synthetic construct
  misc_feature 1..20: note = chemically synthesized
  source 1..20: mol_type = other DNA
agtcgaagaacttcctgtgg

SEQ ID NO: 22400 - DNA, 20 bp, synthetic construct
  misc_feature 1..20: note = chemically synthesized
  source 1..20: mol_type = other DNA
ggtttgtactgctcctgaag

SEQ ID NO: 22401 - DNA, 20 bp, synthetic construct
  misc_feature 1..20: note = chemically synthesized
  source 1..20: mol_type = other DNA
acaccttcactaggtgactg

SEQ ID NO: 22402 - DNA, 20 bp, synthetic construct
  misc_feature 1..20: note = chemically synthesized
  source 1..20: mol_type = other DNA
cactaggtgactgaggaatg

SEQ ID NO: 22403 - DNA, 20 bp, synthetic construct
  misc_feature 1..20: note = chemically synthesized
  source 1..20: mol_type = other DNA
ctagtgataaccaattgcta

SEQ ID NO: 22404 - DNA, 20 bp, synthetic construct
  misc_feature 1..20: note = chemically synthesized
  source 1..20: mol_type = other DNA
gagtgaggaaagcatttaaa

SEQ ID NO: 22405 - DNA, 20 bp, synthetic construct
  misc_feature 1..20: note = chemically synthesized
  source 1..20: mol_type = other DNA
cttgtctattacaacaggct

SEQ ID NO: 22406 - DNA, 20 bp, synthetic construct
  misc_feature 1..20: note = chemically synthesized
  source 1..20: mol_type = other DNA
gaaaatattagccattgcca

SEQ ID NO: 22407 - DNA, 20 bp, synthetic construct
  misc_feature 1..20: note = chemically synthesized
  source 1..20: mol_type = other DNA
agtaattatatgaaatgctt

SEQ ID NO: 22408 - DNA, 20 bp, synthetic construct
  misc_feature 1..20: note = chemically synthesized
  source 1..20: mol_type = other DNA
tttcatattcacaattagct

SEQ ID NO: 22409 - DNA, 20 bp, synthetic construct
  misc_feature 1..20: note = chemically synthesized
  source 1..20: mol_type = other DNA
gcaaaatactgtgctccttt

SEQ ID NO: 22410 - DNA, 20 bp, synthetic construct
  misc_feature 1..20: note = chemically synthesized
  source 1..20: mol_type = other DNA
cttcaatgctatgcttatgt

SEQ ID NO: 22411 - DNA, 20 bp, synthetic construct
  misc_feature 1..20: note = chemically synthesized
  source 1..20: mol_type = other DNA
tcaaattgataaaacaattt

SEQ ID NO: 22412 - DNA, 20 bp, synthetic construct
  misc_feature 1..20: note = chemically synthesized
  source 1..20: mol_type = other DNA
gaggtataacctcatctgtg

SEQ ID NO: 22413 - DNA, 20 bp, synthetic construct
  misc_feature 1..20: note = chemically synthesized
  source 1..20: mol_type = other DNA
aaattataaaacaattcctt

SEQ ID NO: 22414 - DNA, 20 bp, synthetic construct
  misc_feature 1..20: note = chemically synthesized
  source 1..20: mol_type = other DNA
aaaagtcatggttttgaagg

SEQ ID NO: 22415 - DNA, 20 bp, synthetic construct
  misc_feature 1..20: note = chemically synthesized
  source 1..20: mol_type = other DNA
ctgagttcctcaagatcttg

SEQ ID NO: 22416 - DNA, 20 bp, synthetic construct
  misc_feature 1..20: note = chemically synthesized
  source 1..20: mol_type = other DNA
agaatcaagccaactgattg

SEQ ID NO: 22417 - DNA, 20 bp, synthetic construct
  misc_feature 1..20: note = chemically synthesized
  source 1..20: mol_type = other DNA
atgtctattacagtaatcta

SEQ ID NO: 22418 - DNA, 20 bp, synthetic construct
  misc_feature 1..20: note = chemically synthesized
  source 1..20: mol_type = other DNA
aaaggatctgaaataataac

SEQ ID NO: 22419 - DNA, 20 bp, synthetic construct
  misc_feature 1..20: note = chemically synthesized
  source 1..20: mol_type = other DNA
tggcatgcattctgaaaaat

SEQ ID NO: 22420 - DNA, 20 bp, synthetic construct
  misc_feature 1..20: note = chemically synthesized
  source 1..20: mol_type = other DNA
tttgcctatgtagaagtgga

SEQ ID NO: 22421 - DNA, 20 bp, synthetic construct
  misc_feature 1..20: note = chemically synthesized
  source 1..20: mol_type = other DNA
ttctctgtagtttagtgaga

SEQ ID NO: 22422 - DNA, 20 bp, synthetic construct
  misc_feature 1..20: note = chemically synthesized
  source 1..20: mol_type = other DNA
cagaaccatctctatcacat

SEQ ID NO: 22423 - DNA, 20 bp, synthetic construct
  misc_feature 1..20: note = chemically synthesized
  source 1..20: mol_type = other DNA
tctctatcacatgtgaatcc

SEQ ID NO: 22424 - DNA, 20 bp, synthetic construct
  misc_feature 1..20: note = chemically synthesized
  source 1..20: mol_type = other DNA
tgaaataaaagttttctcta

SEQ ID NO: 22425 - DNA, 20 bp, synthetic construct
  misc_feature 1..20: note = chemically synthesized
  source 1..20: mol_type = other DNA
ctcaaggacatagcttattg

SEQ ID NO: 22426 - DNA, 20 bp, synthetic construct
  misc_feature 1..20: note = chemically synthesized
  source 1..20: mol_type = other DNA
ggaagggacttgttagcact

SEQ ID NO: 22427 - DNA, 20 bp, synthetic construct
  misc_feature 1..20: note = chemically synthesized
  source 1..20: mol_type = other DNA
cagtgaaactaagttatttt

SEQ ID NO: 22428 - DNA, 20 bp, synthetic construct
  misc_feature 1..20: note = chemically synthesized
  source 1..20: mol_type = other DNA
agtagcatgtgtgttgatct

SEQ ID NO: 22429 - DNA, 20 bp, synthetic construct
  misc_feature 1..20: note = chemically synthesized
  source 1..20: mol_type = other DNA
tggtacatagaaaatgctca

SEQ ID NO: 22430 - DNA, 20 bp, synthetic construct
  misc_feature 1..20: note = chemically synthesized
  source 1..20: mol_type = other DNA
ggtttgagattttcatatag

SEQ ID NO: 22431 - DNA, 20 bp, synthetic construct
  misc_feature 1..20: note = chemically synthesized
  source 1..20: mol_type = other DNA
gtttctttaaatttaatgat

SEQ ID NO: 22432 - DNA, 20 bp, synthetic construct
  misc_feature 1..20: note = chemically synthesized
  source 1..20: mol_type = other DNA
tatgaggtatcttagagatc

SEQ ID NO: 22433 - DNA, 20 bp, synthetic construct
  misc_feature 1..20: note = chemically synthesized
  source 1..20: mol_type = other DNA
tttaatgatcaagcaaatgg

SEQ ID NO: 22434 - DNA, 20 bp, synthetic construct
  misc_feature 1..20: note = chemically synthesized
  source 1..20: mol_type = other DNA
gcaaatggcagagttaggac

SEQ ID NO: 22435 - DNA, 20 bp, synthetic construct
  misc_feature 1..20: note = chemically synthesized
  source 1..20: mol_type = other DNA
tcacttttttactattatgt

SEQ ID NO: 22436 - DNA, 20 bp, synthetic construct
  misc_feature 1..20: note = chemically synthesized
  source 1..20: mol_type = other DNA
agtacttgcagtcaaaggtc

SEQ ID NO: 22437 - DNA, 20 bp, synthetic construct
  misc_feature 1..20: note = chemically synthesized
  source 1..20: mol_type = other DNA
ctgaaaaagaaccccttaaa

SEQ ID NO: 22438 - DNA, 20 bp, synthetic construct
  misc_feature 1..20: note = chemically synthesized
  source 1..20: mol_type = other DNA
aactgaataacagtttcttc

SEQ ID NO: 22439 - DNA, 20 bp, synthetic construct
  misc_feature 1..20: note = chemically synthesized
  source 1..20: mol_type = other DNA
acagtttcttcatgaataaa

SEQ ID NO: 22440 - DNA, 20 bp, synthetic construct
  misc_feature 1..20: note = chemically synthesized
  source 1..20: mol_type = other DNA
aacaaaaggtttcttaggag

SEQ ID NO: 22441 - DNA, 20 bp, synthetic construct
  misc_feature 1..20: note = chemically synthesized
  source 1..20: mol_type = other DNA
ggagaagaatcccttgctgc

SEQ ID NO: 22442 - DNA, 20 bp, synthetic construct
  misc_feature 1..20: note = chemically synthesized
  source 1..20: mol_type = other DNA
gtgaaaaacataacagatga

SEQ ID NO: 22443 - DNA, 20 bp, synthetic construct
  misc_feature 1..20: note = chemically synthesized
  source 1..20: mol_type = other DNA
tgagagagtcacagttagtt

SEQ ID NO: 22444 - DNA, 20 bp, synthetic construct
  misc_feature 1..20: note = chemically synthesized
  source 1..20: mol_type = other DNA
aatccattttattattcagt

SEQ ID NO: 22445 - DNA, 20 bp, synthetic construct
  misc_feature 1..20: note = chemically synthesized
  source 1..20: mol_type = other DNA
gcactgagaggcgagggaga

SEQ ID NO: 22446 - DNA, 20 bp, synthetic construct
  misc_feature 1..20: note = chemically synthesized
  source 1..20: mol_type = other DNA
gaggcgagggagatagagtt

SEQ ID NO: 22447 - DNA, 20 bp, synthetic construct
  misc_feature 1..20: note = chemically synthesized
  source 1..20: mol_type = other DNA
agaactgattcttaatcttc

SEQ ID NO: 22448 - DNA, 20 bp, synthetic construct
  misc_feature 1..20: note = chemically synthesized
  source 1..20: mol_type = other DNA
atacaatacagtcaaatgtg

SEQ ID NO: 22449 - DNA, 20 bp, synthetic construct
  misc_feature 1..20: note = chemically synthesized
  source 1..20: mol_type = other DNA
taagactatacagtgtaccg

SEQ ID NO: 22450 - DNA, 20 bp, synthetic construct
  misc_feature 1..20: note = chemically synthesized
  source 1..20: mol_type = other DNA
atacagtgtaccgtggaatg

SEQ ID NO: 22451 - DNA, 20 bp, synthetic construct
  misc_feature 1..20: note = chemically synthesized
  source 1..20: mol_type = other DNA
gatgtttgagctgacacttg

SEQ ID NO: 22452 - DNA, 20 bp, synthetic construct
  misc_feature 1..20: note = chemically synthesized
  source 1..20: mol_type = other DNA
gctcagagagggaaaaggag

SEQ ID NO: 22453 - DNA, 20 bp, synthetic construct
  misc_feature 1..20: note = chemically synthesized
  source 1..20: mol_type = other DNA
actagattgtgaagctcagg

SEQ ID NO: 22454 - DNA, 20 bp, synthetic construct
  misc_feature 1..20: note = chemically synthesized
  source 1..20: mol_type = other DNA
agggggagttaatagcctta

SEQ ID NO: 22455 - DNA, 20 bp, synthetic construct
  misc_feature 1..20: note = chemically synthesized
  source 1..20: mol_type = other DNA
gccttaaggagttttgtctc

SEQ ID NO: 22456 - DNA, 20 bp, synthetic construct
  misc_feature 1..20: note = chemically synthesized
  source 1..20: mol_type = other DNA
ttgtctccagggtatgaaca

SEQ ID NO: 22457 - DNA, 20 bp, synthetic construct
  misc_feature 1..20: note = chemically synthesized
  source 1..20: mol_type = other DNA
cagggtatgaacaatgaatg

SEQ ID NO: 22458 - DNA, 20 bp, synthetic construct
  misc_feature 1..20: note = chemically synthesized
  source 1..20: mol_type = other DNA
aattagactgtggtgtgacc

SEQ ID NO: 22459 - DNA, 20 bp, synthetic construct
  misc_feature 1..20: note = chemically synthesized
  source 1..20: mol_type = other DNA
tctggagaaattaacatgtt

SEQ ID NO: 22460 - DNA, 20 bp, synthetic construct
  misc_feature 1..20: note = chemically synthesized
  source 1..20: mol_type = other DNA
attaacatgttaaggatatt

SEQ ID NO: 22461 - DNA, 20 bp, synthetic construct
  misc_feature 1..20: note = chemically synthesized
  source 1..20: mol_type = other DNA
cacataatgaaagttaattt

SEQ ID NO: 22462 - DNA, 20 bp, synthetic construct
  misc_feature 1..20: note = chemically synthesized
  source 1..20: mol_type = other DNA
tcagtcttgacactacacct

SEQ ID NO: 22463 - DNA, 20 bp, synthetic construct
  misc_feature 1..20: note = chemically synthesized
  source 1..20: mol_type = other DNA
atggtacaagtggcacaggg

SEQ ID NO: 22464 - DNA, 20 bp, synthetic construct
  misc_feature 1..20: note = chemically synthesized
  source 1..20: mol_type = other DNA
cagggaagaattcagaaaac

SEQ ID NO: 22465 - DNA, 20 bp, synthetic construct
  misc_feature 1..20: note = chemically synthesized
  source 1..20: mol_type = other DNA
ttatggaagaaattataata

SEQ ID NO: 22466 - DNA, 20 bp, synthetic construct
  misc_feature 1..20: note = chemically synthesized
  source 1..20: mol_type = other DNA
tgagtccactcttctaggac

SEQ ID NO: 22467 - DNA, 20 bp, synthetic construct
  misc_feature 1..20: note = chemically synthesized
  source 1..20: mol_type = other DNA
ctttgatataagtgaactca

SEQ ID NO: 22468 - DNA, 20 bp, synthetic construct
  misc_feature 1..20: note = chemically synthesized
  source 1..20: mol_type = other DNA
tttctctagagcaaaatgaa

SEQ ID NO: 22469 - DNA, 20 bp, synthetic construct
  misc_feature 1..20: note = chemically synthesized
  source 1..20: mol_type = other DNA
acttttcaaggctgaggtgg

SEQ ID NO: 22470 - DNA, 20 bp, synthetic construct
  misc_feature 1..20: note = chemically synthesized
  source 1..20: mol_type = other DNA
tgggagaattgtttgagacc

SEQ ID NO: 22471 - DNA, 20 bp, synthetic construct
  misc_feature 1..20: note = chemically synthesized
  source 1..20: mol_type = other DNA
gaattgtttgagaccaagag

SEQ ID NO: 22472 - DNA, 20 bp, synthetic construct
  misc_feature 1..20: note = chemically synthesized
  source 1..20: mol_type = other DNA
tacctgagaggctaaagcag

SEQ ID NO: 22473 - DNA, 20 bp, synthetic construct
  misc_feature 1..20: note = chemically synthesized
  source 1..20: mol_type = other DNA
ggctaaagcaggaggatcaa

SEQ ID NO: 22474 - DNA, 20 bp, synthetic construct
  misc_feature 1..20: note = chemically synthesized
  source 1..20: mol_type = other DNA
ttgcaccattgcactccagc

SEQ ID NO: 22475 - DNA, 20 bp, synthetic construct
  misc_feature 1..20: note = chemically synthesized
  source 1..20: mol_type = other DNA
ttgcactccagccggggtga

SEQ ID NO: 22476 - DNA, 20 bp, synthetic construct
  misc_feature 1..20: note = chemically synthesized
  source 1..20: mol_type = other DNA
taaagtcagactgcatgatt

SEQ ID NO: 22477 - DNA, 20 bp, synthetic construct
  misc_feature 1..20: note = chemically synthesized
  source 1..20: mol_type = other DNA
aattccaactccaccatcac

SEQ ID NO: 22478 - DNA, 20 bp, synthetic construct
  misc_feature 1..20: note = chemically synthesized
  source 1..20: mol_type = other DNA
ttgtcataccagctttcact

SEQ ID NO: 22479 - DNA, 20 bp, synthetic construct
  misc_feature 1..20: note = chemically synthesized
  source 1..20: mol_type = other DNA
cataccagctttcactttga

SEQ ID NO: 22480 - DNA, 20 bp, synthetic construct
  misc_feature 1..20: note = chemically synthesized
  source 1..20: mol_type = other DNA
catcaatgttacttcaatca

SEQ ID NO: 22481 - DNA, 20 bp, synthetic construct
  misc_feature 1..20: note = chemically synthesized
  source 1..20: mol_type = other DNA
atcacgggatgcatagtaat

SEQ ID NO: 22482 - DNA, 20 bp, synthetic construct
  misc_feature 1..20: note = chemically synthesized
  source 1..20: mol_type = other DNA
tctttgccctaattactgat

SEQ ID NO: 22483 - DNA, 20 bp, synthetic construct
  misc_feature 1..20: note = chemically synthesized
  source 1..20: mol_type = other DNA
caggtggtcttgttcaaagt

SEQ ID NO: 22484 - DNA, 20 bp, synthetic construct
  misc_feature 1..20: note = chemically synthesized
  source 1..20: mol_type = other DNA
cagctgctttgattttaact

SEQ ID NO: 22485 - DNA, 20 bp, synthetic construct
  misc_feature 1..20: note = chemically synthesized
  source 1..20: mol_type = other DNA
gcaactgtgttttggaacag

SEQ ID NO: 22486 - DNA, 20 bp, synthetic construct
  misc_feature 1..20: note = chemically synthesized
  source 1..20: mol_type = other DNA
agtgttgccagatgacgact

SEQ ID NO: 22487 - DNA, 20 bp, synthetic construct
  misc_feature 1..20: note = chemically synthesized
  source 1..20: mol_type = other DNA
agtattttcttttttaatgt

SEQ ID NO: 22488 - DNA, 20 bp, synthetic construct
  misc_feature 1..20: note = chemically synthesized
  source 1..20: mol_type = other DNA
tatacctcaaatatgaaaat

SEQ ID NO: 22489 - DNA, 20 bp, synthetic construct
  misc_feature 1..20: note = chemically synthesized
  source 1..20: mol_type = other DNA
aaaaagggctaaaatggtgt

SEQ ID NO: 22490 - DNA, 20 bp, synthetic construct
  misc_feature 1..20: note = chemically synthesized
  source 1..20: mol_type = other DNA
taatgatcaagtcaggtatt

SEQ ID NO: 22491 - DNA, 20 bp, synthetic construct
  misc_feature 1..20: note = chemically synthesized
  source 1..20: mol_type = other DNA
atgattttatatttgtatgg

SEQ ID NO: 22492 - DNA, 20 bp, synthetic construct
  misc_feature 1..20: note = chemically synthesized
  source 1..20: mol_type = other DNA
gattccatatctttgctaat

SEQ ID NO: 22493 - DNA, 20 bp, synthetic construct
  misc_feature 1..20: note = chemically synthesized
  source 1..20: mol_type = other DNA
accagtatctgtttattatt

SEQ ID NO: 22494 - DNA, 20 bp, synthetic construct
  misc_feature 1..20: note = chemically synthesized
  source 1..20: mol_type = other DNA
ttattctgaattcttttcct

SEQ ID NO: 22495 - DNA, 20 bp, synthetic construct
  misc_feature 1..20: note = chemically synthesized
  source 1..20: mol_type = other DNA
aatacccagtaataagattg

SEQ ID NO: 22496 - DNA, 20 bp, synthetic construct
  misc_feature 1..20: note = chemically synthesized
  source 1..20: mol_type = other DNA
catgcttaccaatagtgcct

SEQ ID NO: 22497 - DNA, 20 bp, synthetic construct
  misc_feature 1..20: note = chemically synthesized
  source 1..20: mol_type = other DNA
gattatttgtttttccactg

SEQ ID NO: 22498 - DNA, 20 bp, synthetic construct
  misc_feature 1..20: note = chemically synthesized
  source 1..20: mol_type = other DNA
tttttccactgttgagttgt

SEQ ID NO: 22499 - DNA, 20 bp, synthetic construct
  misc_feature 1..20: note = chemically synthesized
  source 1..20: mol_type = other DNA
ttaagtctttaatccatctt

SEQ ID NO: 22500 - DNA, 20 bp, synthetic construct
  misc_feature 1..20: note = chemically synthesized
  source 1..20: mol_type = other DNA
cgttttatatggcaataaat

SEQ ID NO: 22501 - DNA, 20 bp, synthetic construct
  misc_feature 1..20: note = chemically synthesized
  source 1..20: mol_type = other DNA
atttttgcatctattgtaca

SEQ ID NO: 22502 - DNA, 20 bp, synthetic construct
  misc_feature 1..20: note = chemically synthesized
  source 1..20: mol_type = other DNA
tgcatctattgtacaagggg

SEQ ID NO: 22503 - DNA, 20 bp, synthetic construct
  misc_feature 1..20: note = chemically synthesized
  source 1..20: mol_type = other DNA
tggttgctgttggtgtatag

SEQ ID NO: 22504 - DNA, 20 bp, synthetic construct
  misc_feature 1..20: note = chemically synthesized
  source 1..20: mol_type = other DNA
tcttgtatctggaaactttg

SEQ ID NO: 22505 - DNA, 20 bp, synthetic construct
  misc_feature 1..20: note = chemically synthesized
  source 1..20: mol_type = other DNA
cagttctaggagctttctgg

SEQ ID NO: 22506 - DNA, 20 bp, synthetic construct
  misc_feature 1..20: note = chemically synthesized
  source 1..20: mol_type = other DNA
gagctttctggaggagtctt

SEQ ID NO: 22507 - DNA, 20 bp, synthetic construct
  misc_feature 1..20: note = chemically synthesized
  source 1..20: mol_type = other DNA
ttgacttcctctttactgat

SEQ ID NO: 22508 - DNA, 20 bp, synthetic construct
  misc_feature 1..20: note = chemically synthesized
  source 1..20: mol_type = other DNA
cttccagtactatgttgaag

SEQ ID NO: 22509 - DNA, 20 bp, synthetic construct
  misc_feature 1..20: note = chemically synthesized
  source 1..20: mol_type = other DNA
ctatgttgaagaggagtggt

SEQ ID NO: 22510 - DNA, 20 bp, synthetic construct
  misc_feature 1..20: note = chemically synthesized
  source 1..20: mol_type = other DNA
gtcttgttccagttctcaga

SEQ ID NO: 22511 - DNA, 20 bp, synthetic construct
  misc_feature 1..20: note = chemically synthesized
  source 1..20: mol_type = other DNA
cattcaatattatgttggct

SEQ ID NO: 22512 - DNA, 20 bp, synthetic construct
  misc_feature 1..20: note = chemically synthesized
  source 1..20: mol_type = other DNA
attttaatcataaatgtatg

SEQ ID NO: 22513 - DNA, 20 bp, synthetic construct
  misc_feature 1..20: note = chemically synthesized
  source 1..20: mol_type = other DNA
taaatgtatgctggattttg

SEQ ID NO: 22514 - DNA, 20 bp, synthetic construct
  misc_feature 1..20: note = chemically synthesized
  source 1..20: mol_type = other DNA
atggaacctgcttgatcatg

SEQ ID NO: 22515 - DNA, 20 bp, synthetic construct
  misc_feature 1..20: note = chemically synthesized
  source 1..20: mol_type = other DNA
attatctttttgttatgttg

SEQ ID NO: 22516 - DNA, 20 bp, synthetic construct
  misc_feature 1..20: note = chemically synthesized
  source 1..20: mol_type = other DNA
tggttatctagtattttgtt

SEQ ID NO: 22517 - DNA, 20 bp, synthetic construct
  misc_feature 1..20: note = chemically synthesized
  source 1..20: mol_type = other DNA
ttggtgtgatgctggcttca

SEQ ID NO: 22518 - DNA, 20 bp, synthetic construct
  misc_feature 1..20: note = chemically synthesized
  source 1..20: mol_type = other DNA
tgtgatgctggcttcataga

SEQ ID NO: 22519 - DNA, 20 bp, synthetic construct
  misc_feature 1..20: note = chemically synthesized
  source 1..20: mol_type = other DNA
ttccttctttatctgtcttg

SEQ ID NO: 22520 - DNA, 20 bp, synthetic construct
  misc_feature 1..20: note = chemically synthesized
  source 1..20: mol_type = other DNA
agatggggaccaattcctct

SEQ ID NO: 22521 - DNA, 20 bp, synthetic construct
  misc_feature 1..20: note = chemically synthesized
  source 1..20: mol_type = other DNA
attcctctttgaatgtctag

SEQ ID NO: 22522 - DNA, 20 bp, synthetic construct
  misc_feature 1..20: note = chemically synthesized
  source 1..20: mol_type = other DNA
atgtctagtagaattctgtt

SEQ ID NO: 22523 - DNA, 20 bp, synthetic construct
  misc_feature 1..20: note = chemically synthesized
  source 1..20: mol_type = other DNA
ggagaaatttccacgcgctg

SEQ ID NO: 22524 - DNA, 20 bp, synthetic construct
  misc_feature 1..20: note = chemically synthesized
  source 1..20: mol_type = other DNA
aatttccacgcgctgttgaa

SEQ ID NO: 22525 - DNA, 20 bp, synthetic construct
  misc_feature 1..20: note = chemically synthesized
  source 1..20: mol_type = other DNA
gaatgtgtgttctgtggtta

SEQ ID NO: 22526 - DNA, 20 bp, synthetic construct
  misc_feature 1..20: note = chemically synthesized
  source 1..20: mol_type = other DNA
aatgcctggctatgccaggc

SEQ ID NO: 22527 - DNA, 20 bp, synthetic construct
  misc_feature 1..20: note = chemically synthesized
  source 1..20: mol_type = other DNA
agaccttcagtttctccagt

SEQ ID NO: 22528 - DNA, 20 bp, synthetic construct
  misc_feature 1..20: note = chemically synthesized
  source 1..20: mol_type = other DNA
ggagtgtgtgtttaggagag

SEQ ID NO: 22529 - DNA, 20 bp, synthetic construct
  misc_feature 1..20: note = chemically synthesized
  source 1..20: mol_type = other DNA
gttggggcactcacagtatt

SEQ ID NO: 22530 - DNA, 20 bp, synthetic construct
  misc_feature 1..20: note = chemically synthesized
  source 1..20: mol_type = other DNA
cacagtatttggggtgtctc

SEQ ID NO: 22531 - DNA, 20 bp, synthetic construct
  misc_feature 1..20: note = chemically synthesized
  source 1..20: mol_type = other DNA
ggagcaatctacttccttca

SEQ ID NO: 22532 - DNA, 20 bp, synthetic construct
  misc_feature 1..20: note = chemically synthesized
  source 1..20: mol_type = other DNA
ctacttccttcagagggtct

SEQ ID NO: 22533 - DNA, 20 bp, synthetic construct
  misc_feature 1..20: note = chemically synthesized
  source 1..20: mol_type = other DNA
agagggtctgtgggtcctct

SEQ ID NO: 22534 - DNA, 20 bp, synthetic construct
  misc_feature 1..20: note = chemically synthesized
  source 1..20: mol_type = other DNA
ccacatgctgctctgtccat

SEQ ID NO: 22535 - DNA, 20 bp, synthetic construct
  misc_feature 1..20: note = chemically synthesized
  source 1..20: mol_type = other DNA
cgccaagatcctgagaagtt

SEQ ID NO: 22536 - DNA, 20 bp, synthetic construct
  misc_feature 1..20: note = chemically synthesized
  source 1..20: mol_type = other DNA
ccagttttattcttttgcac

SEQ ID NO: 22537 - DNA, 20 bp, synthetic construct
  misc_feature 1..20: note = chemically synthesized
  source 1..20: mol_type = other DNA
cttttgcacatggatatcca

SEQ ID NO: 22538 - DNA, 20 bp, synthetic construct
  misc_feature 1..20: note = chemically synthesized
  source 1..20: mol_type = other DNA
aatctgttggctataaatat

SEQ ID NO: 22539 - DNA, 20 bp, synthetic construct
  misc_feature 1..20: note = chemically synthesized
  source 1..20: mol_type = other DNA
ctagcattgttcttttttca

SEQ ID NO: 22540 - DNA, 20 bp, synthetic construct
  misc_feature 1..20: note = chemically synthesized
  source 1..20: mol_type = other DNA
ctattttgatagcggtcata

SEQ ID NO: 22541 - DNA, 20 bp, synthetic construct
  misc_feature 1..20: note = chemically synthesized
  source 1..20: mol_type = other DNA
tatagaatctgtagattgct

SEQ ID NO: 22542 - DNA, 20 bp, synthetic construct
  misc_feature 1..20: note = chemically synthesized
  source 1..20: mol_type = other DNA
atttttctgatccatgaaca

SEQ ID NO: 22543 - DNA, 20 bp, synthetic construct
  misc_feature 1..20: note = chemically synthesized
  source 1..20: mol_type = other DNA
tatcagtgttttgtagtttt

SEQ ID NO: 22544 - DNA, 20 bp, synthetic construct
  misc_feature 1..20: note = chemically synthesized
  source 1..20: mol_type = other DNA
tattttttagctattgtaaa

SEQ ID NO: 22545 - DNA, 20 bp, synthetic construct
  misc_feature 1..20: note = chemically synthesized
  source 1..20: mol_type = other DNA
ttttgtctcctgtaacttta

SEQ ID NO: 22546 - DNA, 20 bp, synthetic construct
  misc_feature 1..20: note = chemically synthesized
  source 1..20: mol_type = other DNA
tgaatttatttttcagcgct

SEQ ID NO: 22547 - DNA, 20 bp, synthetic construct
  misc_feature 1..20: note = chemically synthesized
  source 1..20: mol_type = other DNA
cagcgctaagagtgctttgg

SEQ ID NO: 22548 - DNA, 20 bp, synthetic construct
  misc_feature 1..20: note = chemically synthesized
  source 1..20: mol_type = other DNA
ctaggacttccagtattata

SEQ ID NO: 22549 - DNA, 20 bp, synthetic construct
  misc_feature 1..20: note = chemically synthesized
  source 1..20: mol_type = other DNA
cttccagtattatattgaat

SEQ ID NO: 22550 - DNA, 20 bp, synthetic construct
  misc_feature 1..20: note = chemically synthesized
  source 1..20: mol_type = other DNA
aattcagtatgatgttagct

SEQ ID NO: 22551 - DNA, 20 bp, synthetic construct
  misc_feature 1..20: note = chemically synthesized
  source 1..20: mol_type = other DNA
gcagatagtttttatcatga

SEQ ID NO: 22552 - DNA, 20 bp, synthetic construct
  misc_feature 1..20: note = chemically synthesized
  source 1..20: mol_type = other DNA
tgatcatggtgtattatctt

SEQ ID NO: 22553 - DNA, 20 bp, synthetic construct
  misc_feature 1..20: note = chemically synthesized
  source 1..20: mol_type = other DNA
attatcttttggatgtactg

SEQ ID NO: 22554 - DNA, 20 bp, synthetic construct
  misc_feature 1..20: note = chemically synthesized
  source 1..20: mol_type = other DNA
cagtttgctagtattttgtt

SEQ ID NO: 22555 - DNA, 20 bp, synthetic construct
  misc_feature 1..20: note = chemically synthesized
  source 1..20: mol_type = other DNA
tttcacacctatgttccatc

SEQ ID NO: 22556 - DNA, 20 bp, synthetic construct
  misc_feature 1..20: note = chemically synthesized
  source 1..20: mol_type = other DNA
cttgcatccttgtctggtta

SEQ ID NO: 22557 - DNA, 20 bp, synthetic construct
  misc_feature 1..20: note = chemically synthesized
  source 1..20: mol_type = other DNA
tccttgtctggttatggaat

SEQ ID NO: 22558 - DNA, 20 bp, synthetic construct
  misc_feature 1..20: note = chemically synthesized
  source 1..20: mol_type = other DNA
tcaggataatactggcctca

SEQ ID NO: 22559 - DNA, 20 bp, synthetic construct
  misc_feature 1..20: note = chemically synthesized
  source 1..20: mol_type = other DNA
gataatactggcctcagaga

SEQ ID NO: 22560 - DNA, 20 bp, synthetic construct
  misc_feature 1..20: note = chemically synthesized
  source 1..20: mol_type = other DNA
gcctcagagaatgagttagg

SEQ ID NO: 22561 - DNA, 20 bp, synthetic construct
  misc_feature 1..20: note = chemically synthesized
  source 1..20: mol_type = other DNA
ccttcctgtttaatttttaa

SEQ ID NO: 22562 - DNA, 20 bp, synthetic construct
  misc_feature 1..20: note = chemically synthesized
  source 1..20: mol_type = other DNA
tttctttccttctgctagtt

SEQ ID NO: 22563 - DNA, 20 bp, synthetic construct
  misc_feature 1..20: note = chemically synthesized
  source 1..20: mol_type = other DNA
ctaacatatggtgtatcctg

SEQ ID NO: 22564 - DNA, 20 bp, synthetic construct
  misc_feature 1..20: note = chemically synthesized
  source 1..20: mol_type = other DNA
ataaatatattctgtagctg

SEQ ID NO: 22565 - DNA, 20 bp, synthetic construct
  misc_feature 1..20: note = chemically synthesized
  source 1..20: mol_type = other DNA
gatctatctgatgctgagat

SEQ ID NO: 22566 - DNA, 20 bp, synthetic construct
  misc_feature 1..20: note = chemically synthesized
  source 1..20: mol_type = other DNA
aatccccaactattattgta

SEQ ID NO: 22567 - DNA, 20 bp, synthetic construct
  misc_feature 1..20: note = chemically synthesized
  source 1..20: mol_type = other DNA
ataacatttgctttacatat

SEQ ID NO: 22568 - DNA, 20 bp, synthetic construct
  misc_feature 1..20: note = chemically synthesized
  source 1..20: mol_type = other DNA
catatctggatgctctggtg

SEQ ID NO: 22569 - DNA, 20 bp, synthetic construct
  misc_feature 1..20: note = chemically synthesized
  source 1..20: mol_type = other DNA
tggatgctctggtgttgagt

SEQ ID NO: 22570 - DNA, 20 bp, synthetic construct
  misc_feature 1..20: note = chemically synthesized
  source 1..20: mol_type = other DNA
tggtgttgagtgtgaatgtt

SEQ ID NO: 22571 - DNA, 20 bp, synthetic construct
  misc_feature 1..20: note = chemically synthesized
  source 1..20: mol_type = other DNA
agaattgttatatactcttg

SEQ ID NO: 22572 - DNA, 20 bp, synthetic construct
  misc_feature 1..20: note = chemically synthesized
  source 1..20: mol_type = other DNA
ttcttataggcagcttacaa

SEQ ID NO: 22573 - DNA, 20 bp, synthetic construct
  misc_feature 1..20: note = chemically synthesized
  source 1..20: mol_type = other DNA
attttctgtagtggtaacgt

SEQ ID NO: 22574 - DNA, 20 bp, synthetic construct
  misc_feature 1..20: note = chemically synthesized
  source 1..20: mol_type = other DNA
gtaaagccagtctagtgata

SEQ ID NO: 22575 - DNA, 20 bp, synthetic construct
  misc_feature 1..20: note = chemically synthesized
  source 1..20: mol_type = other DNA
atttttgaagaacaatgttg

SEQ ID NO: 22576 - DNA, 20 bp, synthetic construct
  misc_feature 1..20: note = chemically synthesized
  source 1..20: mol_type = other DNA
catttttttctttcactatt

SEQ ID NO: 22577 - DNA, 20 bp, synthetic construct
  misc_feature 1..20: note = chemically synthesized
  source 1..20: mol_type = other DNA
agacattttgcttgctgttt

SEQ ID NO: 22578 - DNA, 20 bp, synthetic construct
  misc_feature 1..20: note = chemically synthesized
  source 1..20: mol_type = other DNA
ctttttgcattatattattt

SEQ ID NO: 22579 - DNA, 20 bp, synthetic construct
  misc_feature 1..20: note = chemically synthesized
  source 1..20: mol_type = other DNA
aatttctgattttcatttgt

SEQ ID NO: 22580 - DNA, 20 bp, synthetic construct
  misc_feature 1..20: note = chemically synthesized
  source 1..20: mol_type = other DNA
ccttctgggaaactgcaaat

SEQ ID NO: 22581 - DNA, 20 bp, synthetic construct
  misc_feature 1..20: note = chemically synthesized
  source 1..20: mol_type = other DNA
ctgatctattgttgaagttt

SEQ ID NO: 22582 - DNA, 20 bp, synthetic construct
  misc_feature 1..20: note = chemically synthesized
  source 1..20: mol_type = other DNA
ttcaataaactcttcagtta

SEQ ID NO: 22583 - DNA, 20 bp, synthetic construct
  misc_feature 1..20: note = chemically synthesized
  source 1..20: mol_type = other DNA
attcttgttgtatctatctc

SEQ ID NO: 22584 - DNA, 20 bp, synthetic construct
  misc_feature 1..20: note = chemically synthesized
  source 1..20: mol_type = other DNA
gtaaatttctcattcatatc

SEQ ID NO: 22585 - DNA, 20 bp, synthetic construct
  misc_feature 1..20: note = chemically synthesized
  source 1..20: mol_type = other DNA
gatttctttttattgtttat

SEQ ID NO: 22586 - DNA, 20 bp, synthetic construct
  misc_feature 1..20: note = chemically synthesized
  source 1..20: mol_type = other DNA
gcttccttaatatcaacatt

SEQ ID NO: 22587 - DNA, 20 bp, synthetic construct
  misc_feature 1..20: note = chemically synthesized
  source 1..20: mol_type = other DNA
acattttggattcttttttc

SEQ ID NO: 22588 - DNA, 20 bp, synthetic construct
  misc_feature 1..20: note = chemically synthesized
  source 1..20: mol_type = other DNA
tccactggcttatgttgctg

SEQ ID NO: 22589 - DNA, 20 bp, synthetic construct
  misc_feature 1..20: note = chemically synthesized
  source 1..20: mol_type = other DNA
aagatgtatcttggtgttga

SEQ ID NO: 22590 - DNA, 20 bp, synthetic construct
  misc_feature 1..20: note = chemically synthesized
  source 1..20: mol_type = other DNA
ctgtgattttttcagtggct

SEQ ID NO: 22591 - DNA, 20 bp, synthetic construct
  misc_feature 1..20: note = chemically synthesized
  source 1..20: mol_type = other DNA
gatgaggttgtgctggagac

SEQ ID NO: 22592 - DNA, 20 bp, synthetic construct
  misc_feature 1..20: note = chemically synthesized
  source 1..20: mol_type = other DNA
gtacattggcactgatggta

SEQ ID NO: 22593 - DNA, 20 bp, synthetic construct
  misc_feature 1..20: note = chemically synthesized
  source 1..20: mol_type = other DNA
actgatggtaatgagtctag

SEQ ID NO: 22594 - DNA, 20 bp, synthetic construct
  misc_feature 1..20: note = chemically synthesized
  source 1..20: mol_type = other DNA
ttggccttcaggcagtttgc

SEQ ID NO: 22595 - DNA, 20 bp, synthetic construct
  misc_feature 1..20: note = chemically synthesized
  source 1..20: mol_type = other DNA
atagtagactgggctggtgt

SEQ ID NO: 22596 - DNA, 20 bp, synthetic construct
  misc_feature 1..20: note = chemically synthesized
  source 1..20: mol_type = other DNA
ggtcctcaggcttctggaca

SEQ ID NO: 22597 - DNA, 20 bp, synthetic construct
  misc_feature 1..20: note = chemically synthesized
  source 1..20: mol_type = other DNA
ttctggacagtgggtgtggt

SEQ ID NO: 22598 - DNA, 20 bp, synthetic construct
  misc_feature 1..20: note = chemically synthesized
  source 1..20: mol_type = other DNA
gttggtggtggctgcaaggg

SEQ ID NO: 22599 - DNA, 20 bp, synthetic construct
  misc_feature 1..20: note = chemically synthesized
  source 1..20: mol_type = other DNA
gttgtgatggcagtggcaga

SEQ ID NO: 22600 - DNA, 20 bp, synthetic construct
  misc_feature 1..20: note = chemically synthesized
  source 1..20: mol_type = other DNA
gcccatcatcaggcttctgg

SEQ ID NO: 22601 - DNA, 20 bp, synthetic construct
  misc_feature 1..20: note = chemically synthesized
  source 1..20: mol_type = other DNA
ttgcttaggtaccagtcatg

SEQ ID NO: 22602 - DNA, 20 bp, synthetic construct
  misc_feature 1..20: note = chemically synthesized
  source 1..20: mol_type = other DNA
tggatggcacaaggctgtct

SEQ ID NO: 22603 - DNA, 20 bp, synthetic construct
  misc_feature 1..20: note = chemically synthesized
  source 1..20: mol_type = other DNA
ttgaggaaggcaaagccagg

SEQ ID NO: 22604 - DNA, 20 bp, synthetic construct
  misc_feature 1..20: note = chemically synthesized
  source 1..20: mol_type = other DNA
ggacaccggctatcataggc

SEQ ID NO: 22605 - DNA, 20 bp, synthetic construct
  misc_feature 1..20: note = chemically synthesized
  source 1..20: mol_type = other DNA
ccggctatcataggctggag

SEQ ID NO: 22606 - DNA, 20 bp, synthetic construct
  misc_feature 1..20: note = chemically synthesized
  source 1..20: mol_type = other DNA
agtgatcctcaggcccccag

SEQ ID NO: 22607 - DNA, 20 bp, synthetic construct
  misc_feature 1..20: note = chemically synthesized
  source 1..20: mol_type = other DNA
tcaggcccccagcagaatgc

SEQ ID NO: 22608 - DNA, 20 bp, synthetic construct
  misc_feature 1..20: note = chemically synthesized
  source 1..20: mol_type = other DNA
gcccccagcagaatgcctga

SEQ ID NO: 22609 - DNA, 20 bp, synthetic construct
  misc_feature 1..20: note = chemically synthesized
  source 1..20: mol_type = other DNA
cattgttgccctgctcttga

SEQ ID NO: 22610 - DNA, 20 bp, synthetic construct
  misc_feature 1..20: note = chemically synthesized
  source 1..20: mol_type = other DNA
gccctgctcttgaaggggtg

SEQ ID NO: 22611 - DNA, 20 bp, synthetic construct
  misc_feature 1..20: note = chemically synthesized
  source 1..20: mol_type = other DNA
ttcagtggcagcagctataa

SEQ ID NO: 22612 - DNA, 20 bp, synthetic construct
  misc_feature 1..20: note = chemically synthesized
  source 1..20: mol_type = other DNA
ccccagatggtggctgcaag

SEQ ID NO: 22613 - DNA, 20 bp, synthetic construct
  misc_feature 1..20: note = chemically synthesized
  source 1..20: mol_type = other DNA
tgtgtagcagccctgctact

SEQ ID NO: 22614 - DNA, 20 bp, synthetic construct
  misc_feature 1..20: note = chemically synthesized
  source 1..20: mol_type = other DNA
agccctgctactgggggtgg

SEQ ID NO: 22615 - DNA, 20 bp, synthetic construct
  misc_feature 1..20: note = chemically synthesized
  source 1..20: mol_type = other DNA
gccagcagtagcactcagct

SEQ ID NO: 22616 - DNA, 20 bp, synthetic construct
  misc_feature 1..20: note = chemically synthesized
  source 1..20: mol_type = other DNA
gtagcactcagctgtgggtg

SEQ ID NO: 22617 - DNA, 20 bp, synthetic construct
  misc_feature 1..20: note = chemically synthesized
  source 1..20: mol_type = other DNA
ggggatgtcagcagagcttc

SEQ ID NO: 22618 - DNA, 20 bp, synthetic construct
  misc_feature 1..20: note = chemically synthesized
  source 1..20: mol_type = other DNA
tgtagagatgcagatgatgt

SEQ ID NO: 22619 - DNA, 20 bp, synthetic construct
  misc_feature 1..20: note = chemically synthesized
  source 1..20: mol_type = other DNA
ctgaggaacgatgtcatctg

SEQ ID NO: 22620 - DNA, 20 bp, synthetic construct
  misc_feature 1..20: note = chemically synthesized
  source 1..20: mol_type = other DNA
gcaccttgctgctcagtaat

SEQ ID NO: 22621 - DNA, 20 bp, synthetic construct
  misc_feature 1..20: note = chemically synthesized
  source 1..20: mol_type = other DNA
tgctcagtaatggggatggc

SEQ ID NO: 22622 - DNA, 20 bp, synthetic construct
  misc_feature 1..20: note = chemically synthesized
  source 1..20: mol_type = other DNA
tcaagggactctcctgtggc

SEQ ID NO: 22623 - DNA, 20 bp, synthetic construct
  misc_feature 1..20: note = chemically synthesized
  source 1..20: mol_type = other DNA
tctcctgtggctaggattcc

SEQ ID NO: 22624 - DNA, 20 bp, synthetic construct
  misc_feature 1..20: note = chemically synthesized
  source 1..20: mol_type = other DNA
taatgcagatgtggaccact

SEQ ID NO: 22625 - DNA, 20 bp, synthetic construct
  misc_feature 1..20: note = chemically synthesized
  source 1..20: mol_type = other DNA
ggagcctctctggcctcaca

SEQ ID NO: 22626 - DNA, 20 bp, synthetic construct
  misc_feature 1..20: note = chemically synthesized
  source 1..20: mol_type = other DNA
ggcctcacagaggatcccta

SEQ ID NO: 22627 - DNA, 20 bp, synthetic construct
  misc_feature 1..20: note = chemically synthesized
  source 1..20: mol_type = other DNA
tgcttcctgtcacttctctg

SEQ ID NO: 22628 - DNA, 20 bp, synthetic construct
  misc_feature 1..20: note = chemically synthesized
  source 1..20: mol_type = other DNA
gtcacttctctgttgaattc

SEQ ID NO: 22629 - DNA, 20 bp, synthetic construct
  misc_feature 1..20: note = chemically synthesized
  source 1..20: mol_type = other DNA
ttccagaattctctcttatg

SEQ ID NO: 22630 - DNA, 20 bp, synthetic construct
  misc_feature 1..20: note = chemically synthesized
  source 1..20: mol_type = other DNA
tttggttctttgtggaggag

SEQ ID NO: 22631 - DNA, 20 bp, synthetic construct
  misc_feature 1..20: note = chemically synthesized
  source 1..20: mol_type = other DNA
ggactatctgaaggcctcag

SEQ ID NO: 22632 - DNA, 20 bp, synthetic construct
  misc_feature 1..20: note = chemically synthesized
  source 1..20: mol_type = other DNA
tcagatgagtaaaagaagta

SEQ ID NO: 22633 - DNA, 20 bp, synthetic construct
  misc_feature 1..20: note = chemically synthesized
  source 1..20: mol_type = other DNA
atcatttgtttcttcaaata

SEQ ID NO: 22634 - DNA, 20 bp, synthetic construct
  misc_feature 1..20: note = chemically synthesized
  source 1..20: mol_type = other DNA
ttgcatctaccaaagtgtat

SEQ ID NO: 22635 - DNA, 20 bp, synthetic construct
  misc_feature 1..20: note = chemically synthesized
  source 1..20: mol_type = other DNA
aaatacgtaatctaacaaac

SEQ ID NO: 22636 - DNA, 20 bp, synthetic construct
  misc_feature 1..20: note = chemically synthesized
  source 1..20: mol_type = other DNA
acaaggatgttttaagatct

SEQ ID NO: 22637 - DNA, 20 bp, synthetic construct
  misc_feature 1..20: note = chemically synthesized
  source 1..20: mol_type = other DNA
gatgcatagttgcaaataaa

SEQ ID NO: 22638 - DNA, 20 bp, synthetic construct
  misc_feature 1..20: note = chemically synthesized
  source 1..20: mol_type = other DNA
tgcaaataaaaggagttttc

SEQ ID NO: 22639 - DNA, 20 bp, synthetic construct
  misc_feature 1..20: note = chemically synthesized
  source 1..20: mol_type = other DNA
tttggaaattttgcattttt

SEQ ID NO: 22640 - DNA, 20 bp, synthetic construct
  misc_feature 1..20: note = chemically synthesized
  source 1..20: mol_type = other DNA
tgatggtttctaaaattgtc

SEQ ID NO: 22641 - DNA, 20 bp, synthetic construct
  misc_feature 1..20: note = chemically synthesized
  source 1..20: mol_type = other DNA
atgttaacttagatttattg

SEQ ID NO: 22642 - DNA, 20 bp, synthetic construct
  misc_feature 1..20: note = chemically synthesized
  source 1..20: mol_type = other DNA
tatgaaaattgcttgcattt

SEQ ID NO: 22643 - DNA, 20 bp, synthetic construct
  misc_feature 1..20: note = chemically synthesized
  source 1..20: mol_type = other DNA
ctcttctcctttataaatta

SEQ ID NO: 22644 - DNA, 20 bp, synthetic construct
  misc_feature 1..20: note = chemically synthesized
  source 1..20: mol_type = other DNA
ctatgtaaagtataagttac

SEQ ID NO: 22645 - DNA, 20 bp, synthetic construct
  misc_feature 1..20: note = chemically synthesized
  source 1..20: mol_type = other DNA
aaacctgtagtctgatgaaa

SEQ ID NO: 22646 - DNA, 20 bp, synthetic construct
  misc_feature 1..20: note = chemically synthesized
  source 1..20: mol_type = other DNA
aataaaattgctttttgcaa

SEQ ID NO: 22647 - DNA, 20 bp, synthetic construct
  misc_feature 1..20: note = chemically synthesized
  source 1..20: mol_type = other DNA
attgagttgaagattgatgc

SEQ ID NO: 22648 - DNA, 20 bp, synthetic construct
  misc_feature 1..20: note = chemically synthesized
  source 1..20: mol_type = other DNA
tgccaggatcttattacctc

SEQ ID NO: 22649 - DNA, 20 bp, synthetic construct
  misc_feature 1..20: note = chemically synthesized
  source 1..20: mol_type = other DNA
attacctccaggatttcaca

SEQ ID NO: 22650 - DNA, 20 bp, synthetic construct
  misc_feature 1..20: note = chemically synthesized
  source 1..20: mol_type = other DNA
aggatttcacaaaggatttc

SEQ ID NO: 22651 - DNA, 20 bp, synthetic construct
  misc_feature 1..20: note = chemically synthesized
  source 1..20: mol_type = other DNA
ttataaagacatacctgaga

SEQ ID NO: 22652 - DNA, 20 bp, synthetic construct
  misc_feature 1..20: note = chemically synthesized
  source 1..20: mol_type = other DNA
cactatcacgagaagagcat

SEQ ID NO: 22653 - DNA, 20 bp, synthetic construct
  misc_feature 1..20: note = chemically synthesized
  source 1..20: mol_type = other DNA
aaatccctcccacaacacgt

SEQ ID NO: 22654 - DNA, 20 bp, synthetic construct
  misc_feature 1..20: note = chemically synthesized
  source 1..20: mol_type = other DNA
actacaattcaagatgagat

SEQ ID NO: 22655 - DNA, 20 bp, synthetic construct
  misc_feature 1..20: note = chemically synthesized
  source 1..20: mol_type = other DNA
gggacacagtcaagctgtat

SEQ ID NO: 22656 - DNA, 20 bp, synthetic construct
  misc_feature 1..20: note = chemically synthesized
  source 1..20: mol_type = other DNA
agctgtatcagggtacaagc

SEQ ID NO: 22657 - DNA, 20 bp, synthetic construct
  misc_feature 1..20: note = chemically synthesized
  source 1..20: mol_type = other DNA
agtggaccatcacctgaaaa

SEQ ID NO: 22658 - DNA, 20 bp, synthetic construct
  misc_feature 1..20: note = chemically synthesized
  source 1..20: mol_type = other DNA
ctgtgtttgactttctgttt

SEQ ID NO: 22659 - DNA, 20 bp, synthetic construct
  misc_feature 1..20: note = chemically synthesized
  source 1..20: mol_type = other DNA
tgtttctgagttatttcact

SEQ ID NO: 22660 - DNA, 20 bp, synthetic construct
  misc_feature 1..20: note = chemically synthesized
  source 1..20: mol_type = other DNA
gatttcattcttttttatgg

SEQ ID NO: 22661 - DNA, 20 bp, synthetic construct
  misc_feature 1..20: note = chemically synthesized
  source 1..20: mol_type = other DNA
ttaatatgatctctttcact

SEQ ID NO: 22662 - DNA, 20 bp, synthetic construct
  misc_feature 1..20: note = chemically synthesized
  source 1..20: mol_type = other DNA
tttgggtccatacccagtag

SEQ ID NO: 22663 - DNA, 20 bp, synthetic construct
  misc_feature 1..20: note = chemically synthesized
  source 1..20: mol_type = other DNA
catacccagtagtgggattg

SEQ ID NO: 22664 - DNA, 20 bp, synthetic construct
  misc_feature 1..20: note = chemically synthesized
  source 1..20: mol_type = other DNA
ccagtagtgggattgcagga

SEQ ID NO: 22665 - DNA, 20 bp, synthetic construct
  misc_feature 1..20: note = chemically synthesized
  source 1..20: mol_type = other DNA
cctgagctcactgtatttgt

SEQ ID NO: 22666 - DNA, 20 bp, synthetic construct
  misc_feature 1..20: note = chemically synthesized
  source 1..20: mol_type = other DNA
atatagatttagatataaaa

SEQ ID NO: 22667 - DNA, 20 bp, synthetic construct
  misc_feature 1..20: note = chemically synthesized
  source 1..20: mol_type = other DNA
agtcccaaagctgaaggact

SEQ ID NO: 22668 - DNA, 20 bp, synthetic construct
  misc_feature 1..20: note = chemically synthesized
  source 1..20: mol_type = other DNA
gcttggaggctaagccagtc

SEQ ID NO: 22669 - DNA, 20 bp, synthetic construct
  misc_feature 1..20: note = chemically synthesized
  source 1..20: mol_type = other DNA
agatggtgcccacccagatt

SEQ ID NO: 22670 - DNA, 20 bp, synthetic construct
  misc_feature 1..20: note = chemically synthesized
  source 1..20: mol_type = other DNA
ggtgcccacccagattaagg

SEQ ID NO: 22671 - DNA, 20 bp, synthetic construct
  misc_feature 1..20: note = chemically synthesized
  source 1..20: mol_type = other DNA
aataccctcacagacacact

SEQ ID NO: 22672 - DNA, 20 bp, synthetic construct
  misc_feature 1..20: note = chemically synthesized
  source 1..20: mol_type = other DNA
tttttttttttttttcctgg

SEQ ID NO: 22673 - DNA, 20 bp, synthetic construct
  misc_feature 1..20: note = chemically synthesized
  source 1..20: mol_type = other DNA
cctttatttgtagtcctgcc

SEQ ID NO: 22674 - DNA, 20 bp, synthetic construct
  misc_feature 1..20: note = chemically synthesized
  source 1..20: mol_type = other DNA
taaaactaagagacacccta

SEQ ID NO: 22675 - DNA, 20 bp, synthetic construct
  misc_feature 1..20: note = chemically synthesized
  source 1..20: mol_type = other DNA
acgcttccttacctccattg

SEQ ID NO: 22676 - DNA, 20 bp, synthetic construct
  misc_feature 1..20: note = chemically synthesized
  source 1..20: mol_type = other DNA
actgatttcatcttgatagt

SEQ ID NO: 22677 - DNA, 20 bp, synthetic construct
  misc_feature 1..20: note = chemically synthesized
  source 1..20: mol_type = other DNA
aatcttaatttgcagtttaa

SEQ ID NO: 22678 - DNA, 20 bp, synthetic construct
  misc_feature 1..20: note = chemically synthesized
  source 1..20: mol_type = other DNA
aattttgctagtggaacact

SEQ ID NO: 22679 - DNA, 20 bp, synthetic construct
  misc_feature 1..20: note = chemically synthesized
  source 1..20: mol_type = other DNA
gtggaacactaggggtgatg

SEQ ID NO: 22680 - DNA, 20 bp, synthetic construct
  misc_feature 1..20: note = chemically synthesized
  source 1..20: mol_type = other DNA
accctttgattcctggaccc

SEQ ID NO: 22681 - DNA, 20 bp, synthetic construct
  misc_feature 1..20: note = chemically synthesized
  source 1..20: mol_type = other DNA
aggccattcaaaagctgctt

SEQ ID NO: 22682 - DNA, 20 bp, synthetic construct
  misc_feature 1..20: note = chemically synthesized
  source 1..20: mol_type = other DNA
aaaagctgcttcaggatgat

SEQ ID NO: 22683 - DNA, 20 bp, synthetic construct
  misc_feature 1..20: note = chemically synthesized
  source 1..20: mol_type = other DNA
cacacttctttagccataaa

SEQ ID NO: 22684 - DNA, 20 bp, synthetic construct
  misc_feature 1..20: note = chemically synthesized
  source 1..20: mol_type = other DNA
tggtcagaagcaatgctgtg

SEQ ID NO: 22685 - DNA, 20 bp, synthetic construct
  misc_feature 1..20: note = chemically synthesized
  source 1..20: mol_type = other DNA
ctgtgtggaataccatgaca

SEQ ID NO: 22686 - DNA, 20 bp, synthetic construct
  misc_feature 1..20: note = chemically synthesized
  source 1..20: mol_type = other DNA
atacggcattctgtgattcc

SEQ ID NO: 22687 - DNA, 20 bp, synthetic construct
  misc_feature 1..20: note = chemically synthesized
  source 1..20: mol_type = other DNA
tggtagtcttggcataagca

SEQ ID NO: 22688 - DNA, 20 bp, synthetic construct
  misc_feature 1..20: note = chemically synthesized
  source 1..20: mol_type = other DNA
cttggcataagcattgagtt

SEQ ID NO: 22689 - DNA, 20 bp, synthetic construct
  misc_feature 1..20: note = chemically synthesized
  source 1..20: mol_type = other DNA
aggattgggaaacccatatc

SEQ ID NO: 22690 - DNA, 20 bp, synthetic construct
  misc_feature 1..20: note = chemically synthesized
  source 1..20: mol_type = other DNA
gtagctggctgatcaccccg

SEQ ID NO: 22691 - DNA, 20 bp, synthetic construct
  misc_feature 1..20: note = chemically synthesized
  source 1..20: mol_type = other DNA
ctgtggccaggtcagctttg

SEQ ID NO: 22692 - DNA, 20 bp, synthetic construct
  misc_feature 1..20: note = chemically synthesized
  source 1..20: mol_type = other DNA
caactgtggccactttgttc

SEQ ID NO: 22693 - DNA, 20 bp, synthetic construct
  misc_feature 1..20: note = chemically synthesized
  source 1..20: mol_type = other DNA
tgggtccattggacgatgac

SEQ ID NO: 22694 - DNA, 20 bp, synthetic construct
  misc_feature 1..20: note = chemically synthesized
  source 1..20: mol_type = other DNA
atgagtggcctgggaaaagg

SEQ ID NO: 22695 - DNA, 20 bp, synthetic construct
  misc_feature 1..20: note = chemically synthesized
  source 1..20: mol_type = other DNA
aaaaggctgagtggtgtcca

SEQ ID NO: 22696 - DNA, 20 bp, synthetic construct
  misc_feature 1..20: note = chemically synthesized
  source 1..20: mol_type = other DNA
cccattggtgagcactcaca

SEQ ID NO: 22697 - DNA, 20 bp, synthetic construct
  misc_feature 1..20: note = chemically synthesized
  source 1..20: mol_type = other DNA
caaacctttggctacagccc

SEQ ID NO: 22698 - DNA, 20 bp, synthetic construct
  misc_feature 1..20: note = chemically synthesized
  source 1..20: mol_type = other DNA
tcccttcaccgttgtccttc

SEQ ID NO: 22699 - DNA, 20 bp, synthetic construct
  misc_feature 1..20: note = chemically synthesized
  source 1..20: mol_type = other DNA
agtgctgcggctgtccactt

SEQ ID NO: 22700 - DNA, 20 bp, synthetic construct
  misc_feature 1..20: note = chemically synthesized
  source 1..20: mol_type = other DNA
gggagagaaagcagtgtgtc

SEQ ID NO: 22701 - DNA, 20 bp, synthetic construct
  misc_feature 1..20: note = chemically synthesized
  source 1..20: mol_type = other DNA
atgtaacttactagtgcctt

SEQ ID NO: 22702 - DNA, 20 bp, synthetic construct
  misc_feature 1..20: note = chemically synthesized
  source 1..20: mol_type = other DNA
acagcccactttatggctag

SEQ ID NO: 22703 - DNA, 20 bp, synthetic construct
  misc_feature 1..20: note = chemically synthesized
  source 1..20: mol_type = other DNA
caagagctttctccctaaaa

SEQ ID NO: 22704 - DNA, 20 bp, synthetic construct
  misc_feature 1..20: note = chemically synthesized
  source 1..20: mol_type = other DNA
cactgacacctcaagcatca

SEQ ID NO: 22705 - DNA, 20 bp, synthetic construct
  misc_feature 1..20: note = chemically synthesized
  source 1..20: mol_type = other DNA
cactcaaaactggcagcctt

SEQ ID NO: 22706 - DNA, 20 bp, synthetic construct
  misc_feature 1..20: note = chemically synthesized
  source 1..20: mol_type = other DNA
ggatcactcgataaatgggc

SEQ ID NO: 22707 - DNA, 20 bp, synthetic construct
  misc_feature 1..20: note = chemically synthesized
  source 1..20: mol_type = other DNA
cagagtaacacacccaaatc

SEQ ID NO: 22708 - DNA, 20 bp, synthetic construct
  misc_feature 1..20: note = chemically synthesized
  source 1..20: mol_type = other DNA
tgtgcctatttcttggttgt

SEQ ID NO: 22709 - DNA, 20 bp, synthetic construct
  misc_feature 1..20: note = chemically synthesized
  source 1..20: mol_type = other DNA
aaattatccttcactttaga

SEQ ID NO: 22710 - DNA, 20 bp, synthetic construct
  misc_feature 1..20: note = chemically synthesized
  source 1..20: mol_type = other DNA
tttactgaggtagaaggtcc

SEQ ID NO: 22711 - DNA, 20 bp, synthetic construct
  misc_feature 1..20: note = chemically synthesized
  source 1..20: mol_type = other DNA
aagattatggcacaaagctg

SEQ ID NO: 22712 - DNA, 20 bp, synthetic construct
  misc_feature 1..20: note = chemically synthesized
  source 1..20: mol_type = other DNA
gctggagagttgatatactc

SEQ ID NO: 22713 - DNA, 20 bp, synthetic construct
  misc_feature 1..20: note = chemically synthesized
  source 1..20: mol_type = other DNA
ttccttgcctctcacaagcg

SEQ ID NO: 22714 - DNA, 20 bp, synthetic construct
  misc_feature 1..20: note = chemically synthesized
  source 1..20: mol_type = other DNA
cctctcacaagcgttgaatc

SEQ ID NO: 22715 - DNA, 20 bp, synthetic construct
  misc_feature 1..20: note = chemically synthesized
  source 1..20: mol_type = other DNA
ctctctaaacaattgatgcc

SEQ ID NO: 22716 - DNA, 20 bp, synthetic construct
  misc_feature 1..20: note = chemically synthesized
  source 1..20: mol_type = other DNA
gttctccataccattagaag

SEQ ID NO: 22717 - DNA, 20 bp, synthetic construct
  misc_feature 1..20: note = chemically synthesized
  source 1..20: mol_type = other DNA
aagaagagtccttagcatat

SEQ ID NO: 22718 - DNA, 20 bp, synthetic construct
  misc_feature 1..20: note = chemically synthesized
  source 1..20: mol_type = other DNA
cctggtaccaaaatctgtat

SEQ ID NO: 22719 - DNA, 20 bp, synthetic construct
  misc_feature 1..20: note = chemically synthesized
  source 1..20: mol_type = other DNA
attagggttctacagagaaa

SEQ ID NO: 22720 - DNA, 20 bp, synthetic construct
  misc_feature 1..20: note = chemically synthesized
  source 1..20: mol_type = other DNA
ctctatatctatatctatat

SEQ ID NO: 22721 - DNA, 20 bp, synthetic construct
  misc_feature 1..20: note = chemically synthesized
  source 1..20: mol_type = other DNA
tgaggaacaaggaagctagt

SEQ ID NO: 22722 - DNA, 20 bp, synthetic construct
  misc_feature 1..20: note = chemically synthesized
  source 1..20: mol_type = other DNA
agtcccaaagctgaagaacc

SEQ ID NO: 22723 - DNA, 20 bp, synthetic construct
  misc_feature 1..20: note = chemically synthesized
  source 1..20: mol_type = other DNA
gttcaatgttccagggcagg

SEQ ID NO: 22724 - DNA, 20 bp, synthetic construct
  misc_feature 1..20: note = chemically synthesized
  source 1..20: mol_type = other DNA
catgggagaaaaatgtaggc

SEQ ID NO: 22725 - DNA, 20 bp, synthetic construct
  misc_feature 1..20: note = chemically synthesized
  source 1..20: mol_type = other DNA
agatggtgcccacccagatt

SEQ ID NO: 22726 - DNA, 20 bp, synthetic construct
  misc_feature 1..20: note = chemically synthesized
  source 1..20: mol_type = other DNA
ggtgcccacccagattaagg

SEQ ID NO: 22727 - DNA, 20 bp, synthetic construct
  misc_feature 1..20: note = chemically synthesized
  source 1..20: mol_type = other DNA
tgaggttggtttttttgttg

SEQ ID NO: 22728 - DNA, 20 bp, synthetic construct
  misc_feature 1..20: note = chemically synthesized
  source 1..20: mol_type = other DNA
tactctccttaattttcccc

SEQ ID NO: 22729 - DNA, 20 bp, synthetic construct
  misc_feature 1..20: note = chemically synthesized
  source 1..20: mol_type = other DNA
gttttctagatgtggacttg

SEQ ID NO: 22730 - DNA, 20 bp, synthetic construct
  misc_feature 1..20: note = chemically synthesized
  source 1..20: mol_type = other DNA
gtagcagcaatattagagga

SEQ ID NO: 22731 - DNA, 20 bp, synthetic construct
  misc_feature 1..20: note = chemically synthesized
  source 1..20: mol_type = other DNA
catacaaaacccctcagaca

SEQ ID NO: 22732 - DNA, 20 bp, synthetic construct
  misc_feature 1..20: note = chemically synthesized
  source 1..20: mol_type = other DNA
atctccaacaaccaagctct

SEQ ID NO: 22733 - DNA, 20 bp, synthetic construct
  misc_feature 1..20: note = chemically synthesized
  source 1..20: mol_type = other DNA
ttaagggcttacaactctaa

SEQ ID NO: 22734 - DNA, 20 bp, synthetic construct
  misc_feature 1..20: note = chemically synthesized
  source 1..20: mol_type = other DNA
gggctgcatgcactggtcat

SEQ ID NO: 22735 - DNA, 20 bp, synthetic construct
  misc_feature 1..20: note = chemically synthesized
  source 1..20: mol_type = other DNA
agaatggaacagaacaggac

SEQ ID NO: 22736 - DNA, 20 bp, synthetic construct
  misc_feature 1..20: note = chemically synthesized
  source 1..20: mol_type = other DNA
ctgcttttccatacagtgtc

SEQ ID NO: 22737 - DNA, 20 bp, synthetic construct
  misc_feature 1..20: note = chemically synthesized
  source 1..20: mol_type = other DNA
ataacataactggccaggtc

SEQ ID NO: 22738 - DNA, 20 bp, synthetic construct
  misc_feature 1..20: note = chemically synthesized
  source 1..20: mol_type = other DNA
ggtctatctttaaccaggcc

SEQ ID NO: 22739 - DNA, 20 bp, synthetic construct
  misc_feature 1..20: note = chemically synthesized
  source 1..20: mol_type = other DNA
tggtctcaggctgtttgcct

SEQ ID NO: 22740 - DNA, 20 bp, synthetic construct
  misc_feature 1..20: note = chemically synthesized
  source 1..20: mol_type = other DNA
attgggcataaaacaatatg

SEQ ID NO: 22741 - DNA, 20 bp, synthetic construct
  misc_feature 1..20: note = chemically synthesized
  source 1..20: mol_type = other DNA
ggaagagagaaataccatgt

SEQ ID NO: 22742 - DNA, 20 bp, synthetic construct
  misc_feature 1..20: note = chemically synthesized
  source 1..20: mol_type = other DNA
tgaaatacgtatttgtgtta

SEQ ID NO: 22743 - DNA, 20 bp, synthetic construct
  misc_feature 1..20: note = chemically synthesized
  source 1..20: mol_type = other DNA
tgtgttattggatttgacat

SEQ ID NO: 22744 - DNA, 20 bp, synthetic construct
  misc_feature 1..20: note = chemically synthesized
  source 1..20: mol_type = other DNA
tgagggcatgtatgatgaca

SEQ ID NO: 22745 - DNA, 20 bp, synthetic construct
  misc_feature 1..20: note = chemically synthesized
  source 1..20: mol_type = other DNA
aagggactttaaaacatgca

SEQ ID NO: 22746 - DNA, 20 bp, synthetic construct
  misc_feature 1..20: note = chemically synthesized
  source 1..20: mol_type = other DNA
taaataaatccttgggctta

SEQ ID NO: 22747 - DNA, 20 bp, synthetic construct
  misc_feature 1..20: note = chemically synthesized
  source 1..20: mol_type = other DNA
actttaaacaaattgctaac

SEQ ID NO: 22748 - DNA, 20 bp, synthetic construct
  misc_feature 1..20: note = chemically synthesized
  source 1..20: mol_type = other DNA
aaaggccaaaacaacagcag

SEQ ID NO: 22749 - DNA, 20 bp, synthetic construct
  misc_feature 1..20: note = chemically synthesized
  source 1..20: mol_type = other DNA
tcagaagagcagtggacgca

SEQ ID NO: 22750 - DNA, 20 bp, synthetic construct
  misc_feature 1..20: note = chemically synthesized
  source 1..20: mol_type = other DNA
atgctcaaaatatggaccta

SEQ ID NO: 22751 - DNA, 20 bp, synthetic construct
  misc_feature 1..20: note = chemically synthesized
  source 1..20: mol_type = other DNA
aaagaggtcaaatacctcaa

SEQ ID NO: 22752 - DNA, 20 bp, synthetic construct
  misc_feature 1..20: note = chemically synthesized
  source 1..20: mol_type = other DNA
catcatacatgccctcagca

SEQ ID NO: 22753 - DNA, 20 bp, synthetic construct
  misc_feature 1..20: note = chemically synthesized
  source 1..20: mol_type = other DNA
ctgctgtggttttcaattat

SEQ ID NO: 22754 - DNA, 20 bp, synthetic construct
  misc_feature 1..20: note = chemically synthesized
  source 1..20: mol_type = other DNA
tatgcccaatttctgcctcc

SEQ ID NO: 22755 - DNA, 20 bp, synthetic construct
  misc_feature 1..20: note = chemically synthesized
  source 1..20: mol_type = other DNA
gaagaagtaaaaactaaaag

SEQ ID NO: 22756 - DNA, 20 bp, synthetic construct
  misc_feature 1..20: note = chemically synthesized
  source 1..20: mol_type = other DNA
atgcagcttgtcctgctaca

SEQ ID NO: 22757 - DNA, 20 bp, synthetic construct
  misc_feature 1..20: note = chemically synthesized
  source 1..20: mol_type = other DNA
tggatccagcaagtccacat

SEQ ID NO: 22758 - DNA, 20 bp, synthetic construct
  misc_feature 1..20: note = chemically synthesized
  source 1..20: mol_type = other DNA
agcattatgatggcaaaaaa

SEQ ID NO: 22759 - DNA, 20 bp, synthetic construct
  misc_feature 1..20: note = chemically synthesized
  source 1..20: mol_type = other DNA
aaattagatgtggcctaggc

SEQ ID NO: 22760 - DNA, 20 bp, synthetic construct
  misc_feature 1..20: note = chemically synthesized
  source 1..20: mol_type = other DNA
acagagtaaacggataacct

SEQ ID NO: 22761 - DNA, 20 bp, synthetic construct
  misc_feature 1..20: note = chemically synthesized
  source 1..20: mol_type = other DNA
taaacggataacctacagaa

SEQ ID NO: 22762 - DNA, 20 bp, synthetic construct
  misc_feature 1..20: note = chemically synthesized
  source 1..20: mol_type = other DNA
atgcaacaaaaggctaatat

SEQ ID NO: 22763 - DNA, 20 bp, synthetic construct
  misc_feature 1..20: note = chemically synthesized
  source 1..20: mol_type = other DNA
caacaaaaaaaccaacctca

SEQ ID NO: 22764 - DNA, 20 bp, synthetic construct
  misc_feature 1..20: note = chemically synthesized
  source 1..20: mol_type = other DNA
acagccaggatataaagcag

SEQ ID NO: 22765 - DNA, 20 bp, synthetic construct
  misc_feature 1..20: note = chemically synthesized
  source 1..20: mol_type = other DNA
ccaggagtggttctagagga

SEQ ID NO: 22766 - DNA, 20 bp, synthetic construct
  misc_feature 1..20: note = chemically synthesized
  source 1..20: mol_type = other DNA
taatacttttgactatatgt

SEQ ID NO: 22767 - DNA, 20 bp, synthetic construct
  misc_feature 1..20: note = chemically synthesized
  source 1..20: mol_type = other DNA
gttcgctggacaaagtgatg

SEQ ID NO: 22768 - DNA, 20 bp, synthetic construct
  misc_feature 1..20: note = chemically synthesized
  source 1..20: mol_type = other DNA
catttggccactcttacaac

SEQ ID NO: 22769 - DNA, 20 bp, synthetic construct
  misc_feature 1..20: note = chemically synthesized
  source 1..20: mol_type = other DNA
agataactactctcttttag

SEQ ID NO: 22770 - DNA, 20 bp, synthetic construct
  misc_feature 1..20: note = chemically synthesized
  source 1..20: mol_type = other DNA
gaaggcactagtaagttaca

SEQ ID NO: 22771 - DNA, 20 bp, synthetic construct
  misc_feature 1..20: note = chemically synthesized
  source 1..20: mol_type = other DNA
gttgtgcactttgcacagaa

SEQ ID NO: 22772 - DNA, 20 bp, synthetic construct
  misc_feature 1..20: note = chemically synthesized
  source 1..20: mol_type = other DNA
atgactggaaaattgatgac

SEQ ID NO: 22773 - DNA, 20 bp, synthetic construct
  misc_feature 1..20: note = chemically synthesized
  source 1..20: mol_type = other DNA
agactaccatccatggaatc

SEQ ID NO: 22774 - DNA, 20 bp, synthetic construct
  misc_feature 1..20: note = chemically synthesized
  source 1..20: mol_type = other DNA
ttgctgagggcaaagggaat

SEQ ID NO: 22775 - DNA, 20 bp, synthetic construct
  misc_feature 1..20: note = chemically synthesized
  source 1..20: mol_type = other DNA
gtgtctgtatacacttgtac

SEQ ID NO: 22776 - DNA, 20 bp, synthetic construct
  misc_feature 1..20: note = chemically synthesized
  source 1..20: mol_type = other DNA
gtggccaggatataaagcag

SEQ ID NO: 22777 - DNA, 20 bp, synthetic construct
  misc_feature 1..20: note = chemically synthesized
  source 1..20: mol_type = other DNA
gttcaacatcactaataatc

SEQ ID NO: 22778 - DNA, 20 bp, synthetic construct
  misc_feature 1..20: note = chemically synthesized
  source 1..20: mol_type = other DNA
atgatacctccttatgccag

SEQ ID NO: 22779 - DNA, 20 bp, synthetic construct
  misc_feature 1..20: note = chemically synthesized
  source 1..20: mol_type = other DNA
tgttggtgaggatgtggaga

SEQ ID NO: 22780 - DNA, 20 bp, synthetic construct
  misc_feature 1..20: note = chemically synthesized
  source 1..20: mol_type = other DNA
aaatgcttatacactgttgg

SEQ ID NO: 22781 - DNA, 20 bp, synthetic construct
  misc_feature 1..20: note = chemically synthesized
  source 1..20: mol_type = other DNA
catgaagatttcttaaagaa

SEQ ID NO: 22782 - DNA, 20 bp, synthetic construct
  misc_feature 1..20: note = chemically synthesized
  source 1..20: mol_type = other DNA
ctaccaatggacgattggat

SEQ ID NO: 22783 - DNA, 20 bp, synthetic construct
  misc_feature 1..20: note = chemically synthesized
  source 1..20: mol_type = other DNA
atatattactcagccataaa

SEQ ID NO: 22784 - DNA, 20 bp, synthetic construct
  misc_feature 1..20: note = chemically synthesized
  source 1..20: mol_type = other DNA
agaatgaaatcatgtcttct

SEQ ID NO: 22785 - DNA, 20 bp, synthetic construct
  misc_feature 1..20: note = chemically synthesized
  source 1..20: mol_type = other DNA
attatcctcagtgaaataac

SEQ ID NO: 22786 - DNA, 20 bp, synthetic construct
  misc_feature 1..20: note = chemically synthesized
  source 1..20: mol_type = other DNA
ctcagtgaaataactcagaa

SEQ ID NO: 22787 - DNA, 20 bp, synthetic construct
  misc_feature 1..20: note = chemically synthesized
  source 1..20: mol_type = other DNA
cgatgagtaagcatagacat

SEQ ID NO: 22788 - DNA, 20 bp, synthetic construct
  misc_feature 1..20: note = chemically synthesized
  source 1..20: mol_type = other DNA
aataatagacacttgagact

SEQ ID NO: 22789 - DNA, 20 bp, synthetic construct
  misc_feature 1..20: note = chemically synthesized
  source 1..20: mol_type = other DNA
aatggggtaattaaaagggt

SEQ ID NO: 22790 - DNA, 20 bp, synthetic construct
  misc_feature 1..20: note = chemically synthesized
  source 1..20: mol_type = other DNA
cactaaataataatcacatg

SEQ ID NO: 22791 - DNA, 20 bp, synthetic construct
  misc_feature 1..20: note = chemically synthesized
  source 1..20: mol_type = other DNA
gctagagcaaggggatgact

SEQ ID NO: 22792 - DNA, 20 bp, synthetic construct
  misc_feature 1..20: note = chemically synthesized
  source 1..20: mol_type = other DNA
ctacacaagctaattgtcct

SEQ ID NO: 22793 - DNA, 20 bp, synthetic construct
  misc_feature 1..20: note = chemically synthesized
  source 1..20: mol_type = other DNA
tcagatgttatgtgatgagg

SEQ ID NO: 22794 - DNA, 20 bp, synthetic construct
  misc_feature 1..20: note = chemically synthesized
  source 1..20: mol_type = other DNA
atagaacacatgaggaggaa

SEQ ID NO: 22795 - DNA, 20 bp, synthetic construct
  misc_feature 1..20: note = chemically synthesized
  source 1..20: mol_type = other DNA
tcctcaaattctggacaatt

SEQ ID NO: 22796 - DNA, 20 bp, synthetic construct
  misc_feature 1..20: note = chemically synthesized
  source 1..20: mol_type = other DNA
cacaaaaatgcaaaatttcc

SEQ ID NO: 22797 - DNA, 20 bp, synthetic construct
  misc_feature 1..20: note = chemically synthesized
  source 1..20: mol_type = other DNA
cttcatcttcatcttttcca

SEQ ID NO: 22798 - DNA, 20 bp, synthetic construct
  misc_feature 1..20: note = chemically synthesized
  source 1..20: mol_type = other DNA
gaaatagagattctttattt

SEQ ID NO: 22799 - DNA, 20 bp, synthetic construct
  misc_feature 1..20: note = chemically synthesized
  source 1..20: mol_type = other DNA
tgatttgggaaatgaaatga

SEQ ID NO: 22800 - DNA, 20 bp, synthetic construct
  misc_feature 1..20: note = chemically synthesized
  source 1..20: mol_type = other DNA
gattatgctctttcagtcta

SEQ ID NO: 22801 - DNA, 20 bp, synthetic construct
  misc_feature 1..20: note = chemically synthesized
  source 1..20: mol_type = other DNA
acaaagaaccaaaatagtaa

SEQ ID NO: 22802 - DNA, 20 bp, synthetic construct
  misc_feature 1..20: note = chemically synthesized
  source 1..20: mol_type = other DNA
agtagaaaatcccacataag

SEQ ID NO: 22803 - DNA, 20 bp, synthetic construct
  misc_feature 1..20: note = chemically synthesized
  source 1..20: mol_type = other DNA
ctacacatttataagctccc

SEQ ID NO: 22804 - DNA, 20 bp, synthetic construct
  misc_feature 1..20: note = chemically synthesized
  source 1..20: mol_type = other DNA
aagcaaactgcctgaaggcc

SEQ ID NO: 22805 - DNA, 20 bp, synthetic construct
  misc_feature 1..20: note = chemically synthesized
  source 1..20: mol_type = other DNA
gactatgctgctgtatgcac

SEQ ID NO: 22806 - DNA, 20 bp, synthetic construct
  misc_feature 1..20: note = chemically synthesized
  source 1..20: mol_type = other DNA
atcaacaccaagatacatct

SEQ ID NO: 22807 - DNA, 20 bp, synthetic construct
  misc_feature 1..20: note = chemically synthesized
  source 1..20: mol_type = other DNA
caaaataaacataaaaaggt

SEQ ID NO: 22808 - DNA, 20 bp, synthetic construct
  misc_feature 1..20: note = chemically synthesized
  source 1..20: mol_type = other DNA
catttataaaattctggaaa

SEQ ID NO: 22809 - DNA, 20 bp, synthetic construct
  misc_feature 1..20: note = chemically synthesized
  source 1..20: mol_type = other DNA
agaactcagataaacaataa

SEQ ID NO: 22810 - DNA, 20 bp, synthetic construct
  misc_feature 1..20: note = chemically synthesized
  source 1..20: mol_type = other DNA
agataaacaataaaaagaaa

SEQ ID NO: 22811 - DNA, 20 bp, synthetic construct
  misc_feature 1..20: note = chemically synthesized
  source 1..20: mol_type = other DNA
aaaacaattcaggatatgaa

SEQ ID NO: 22812 - DNA, 20 bp, synthetic construct
  misc_feature 1..20: note = chemically synthesized
  source 1..20: mol_type = other DNA
tacccaagagatagatacaa

SEQ ID NO: 22813 - DNA, 20 bp, synthetic construct
  misc_feature 1..20: note = chemically synthesized
  source 1..20: mol_type = other DNA
atacaacaagaatgaaccaa

SEQ ID NO: 22814 - DNA, 20 bp, synthetic construct
  misc_feature 1..20: note = chemically synthesized
  source 1..20: mol_type = other DNA
tgtaactgaagagtttattg

SEQ ID NO: 22815 - DNA, 20 bp, synthetic construct
  misc_feature 1..20: note = chemically synthesized
  source 1..20: mol_type = other DNA
acaatagatcagatcaagca

SEQ ID NO: 22816 - DNA, 20 bp, synthetic construct
  misc_feature 1..20: note = chemically synthesized
  source 1..20: mol_type = other DNA
taaaattagctggtcaaatg

SEQ ID NO: 22817 - DNA, 20 bp, synthetic construct
  misc_feature 1..20: note = chemically synthesized
  source 1..20: mol_type = other DNA
aaatgatagaaaggaaaaaa

SEQ ID NO: 22818 - DNA, 20 bp, synthetic construct
  misc_feature 1..20: note = chemically synthesized
  source 1..20: mol_type = other DNA
tgaaaacttgtcaagtctag

SEQ ID NO: 22819 - DNA, 20 bp, synthetic construct
  misc_feature 1..20: note = chemically synthesized
  source 1..20: mol_type = other DNA
gacatccagacaaatgaaaa

SEQ ID NO: 22820 - DNA, 20 bp, synthetic construct
  misc_feature 1..20: note = chemically synthesized
  source 1..20: mol_type = other DNA
gattaacagcagatttctca

SEQ ID NO: 22821 - DNA, 20 bp, synthetic construct
  misc_feature 1..20: note = chemically synthesized
  source 1..20: mol_type = other DNA
atgatatattcaaaatagtg

SEQ ID NO: 22822 - DNA, 20 bp, synthetic construct
  misc_feature 1..20: note = chemically synthesized
  source 1..20: mol_type = other DNA
taaataaaatcttttctggg

SEQ ID NO: 22823 - DNA, 20 bp, synthetic construct
  misc_feature 1..20: note = chemically synthesized
  source 1..20: mol_type = other DNA
ctatcactagactggcttta

SEQ ID NO: 22824 - DNA, 20 bp, synthetic construct
  misc_feature 1..20: note = chemically synthesized
  source 1..20: mol_type = other DNA
gagcaaaacacaaataaaga

SEQ ID NO: 22825 - DNA, 20 bp, synthetic construct
  misc_feature 1..20: note = chemically synthesized
  source 1..20: mol_type = other DNA
agaactcaaacgttaccact

SEQ ID NO: 22826 - DNA, 20 bp, synthetic construct
  misc_feature 1..20: note = chemically synthesized
  source 1..20: mol_type = other DNA
caaaccacaatcataaataa

SEQ ID NO: 22827 - DNA, 20 bp, synthetic construct
  misc_feature 1..20: note = chemically synthesized
  source 1..20: mol_type = other DNA
ccacaatcataaataataag

SEQ ID NO: 22828 - DNA, 20 bp, synthetic construct
  misc_feature 1..20: note = chemically synthesized
  source 1..20: mol_type = other DNA
aatcataaataataagaaag

SEQ ID NO: 22829 - DNA, 20 bp, synthetic construct
  misc_feature 1..20: note = chemically synthesized
  source 1..20: mol_type = other DNA
ataaataataagaaagaaag

SEQ ID NO: 22830 - DNA, 20 bp, synthetic construct
  misc_feature 1..20: note = chemically synthesized
  source 1..20: mol_type = other DNA
ataataagaaagaaagaaag

SEQ ID NO: 22831 - DNA, 20 bp, synthetic construct
  misc_feature 1..20: note = chemically synthesized
  source 1..20: mol_type = other DNA
agaaagaaagagagagagag

SEQ ID NO: 22832 - DNA, 20 bp, synthetic construct
  misc_feature 1..20: note = chemically synthesized
  source 1..20: mol_type = other DNA
agagagagagagagagaatg

SEQ ID NO: 22833 - DNA, 20 bp, synthetic construct
  misc_feature 1..20: note = chemically synthesized
  source 1..20: mol_type = other DNA
agagagagagagaatgaaag

SEQ ID NO: 22834 - DNA, 20 bp, synthetic construct
  misc_feature 1..20: note = chemically synthesized
  source 1..20: mol_type = other DNA
aagaaagaaaaggaaggaag

SEQ ID NO: 22835 - DNA, 20 bp, synthetic construct
  misc_feature 1..20: note = chemically synthesized
  source 1..20: mol_type = other DNA
acccagttgtaagctgccta

SEQ ID NO: 22836 - DNA, 20 bp, synthetic construct
  misc_feature 1..20: note = chemically synthesized
  source 1..20: mol_type = other DNA
atgaaagatcttccatacaa

SEQ ID NO: 22837 - DNA, 20 bp, synthetic construct
  misc_feature 1..20: note = chemically synthesized
  source 1..20: mol_type = other DNA
tattagatataaagggtgaa

SEQ ID NO: 22838 - DNA, 20 bp, synthetic construct
  misc_feature 1..20: note = chemically synthesized
  source 1..20: mol_type = other DNA
gcatcagatagatcatctag

SEQ ID NO: 22839 - DNA, 20 bp, synthetic construct
  misc_feature 1..20: note = chemically synthesized
  source 1..20: mol_type = other DNA
catctagacagaaaattaac

SEQ ID NO: 22840 - DNA, 20 bp, synthetic construct
  misc_feature 1..20: note = chemically synthesized
  source 1..20: mol_type = other DNA
caatatttcatccaacagct

SEQ ID NO: 22841 - DNA, 20 bp, synthetic construct
  misc_feature 1..20: note = chemically synthesized
  source 1..20: mol_type = other DNA
cagaccacaatggaataaaa

SEQ ID NO: 22842 - DNA, 20 bp, synthetic construct
  misc_feature 1..20: note = chemically synthesized
  source 1..20: mol_type = other DNA
ataaaactagaaatcaataa

SEQ ID NO: 22843 - DNA, 20 bp, synthetic construct
  misc_feature 1..20: note = chemically synthesized
  source 1..20: mol_type = other DNA
ctgaatgaacgttatgtcaa

SEQ ID NO: 22844 - DNA, 20 bp, synthetic construct
  misc_feature 1..20: note = chemically synthesized
  source 1..20: mol_type = other DNA
taaacacttaaattaaaaac

SEQ ID NO: 22845 - DNA, 20 bp, synthetic construct
  misc_feature 1..20: note = chemically synthesized
  source 1..20: mol_type = other DNA
taatcatgtacctcaacaag

SEQ ID NO: 22846 - DNA, 20 bp, synthetic construct
  misc_feature 1..20: note = chemically synthesized
  source 1..20: mol_type = other DNA
aacccaaaactagcagaagg

SEQ ID NO: 22847 - DNA, 20 bp, synthetic construct
  misc_feature 1..20: note = chemically synthesized
  source 1..20: mol_type = other DNA
acagaagaacttaatgaaat

SEQ ID NO: 22848 - DNA, 20 bp, synthetic construct
  misc_feature 1..20: note = chemically synthesized
  source 1..20: mol_type = other DNA
atagctctagctagactaac

SEQ ID NO: 22849 - DNA, 20 bp, synthetic construct
  misc_feature 1..20: note = chemically synthesized
  source 1..20: mol_type = other DNA
aaaagagaagagactgaaat

SEQ ID NO: 22850 - DNA, 20 bp, synthetic construct
  misc_feature 1..20: note = chemically synthesized
  source 1..20: mol_type = other DNA
agagactgaaataaagaaaa

SEQ ID NO: 22851 - DNA, 20 bp, synthetic construct
  misc_feature 1..20: note = chemically synthesized
  source 1..20: mol_type = other DNA
taaagaaaatcagaaataaa

SEQ ID NO: 22852 - DNA, 20 bp, synthetic construct
  misc_feature 1..20: note = chemically synthesized
  source 1..20: mol_type = other DNA
aatatattacaaccgatacc

SEQ ID NO: 22853 - DNA, 20 bp, synthetic construct
  misc_feature 1..20: note = chemically synthesized
  source 1..20: mol_type = other DNA
ttacaaccgataccacagaa

SEQ ID NO: 22854 - DNA, 20 bp, synthetic construct
  misc_feature 1..20: note = chemically synthesized
  source 1..20: mol_type = other DNA
accacctaccaagattgaat

SEQ ID NO: 22855 - DNA, 20 bp, synthetic construct
  misc_feature 1..20: note = chemically synthesized
  source 1..20: mol_type = other DNA
cctaccaagattgaattaag

SEQ ID NO: 22856 - DNA, 20 bp, synthetic construct
  misc_feature 1..20: note = chemically synthesized
  source 1..20: mol_type = other DNA
caagattgaattaagaaaga

SEQ ID NO: 22857 - DNA, 20 bp, synthetic construct
  misc_feature 1..20: note = chemically synthesized
  source 1..20: mol_type = other DNA
gtagtaaaaagtctcccaaa

SEQ ID NO: 22858 - DNA, 20 bp, synthetic construct
  misc_feature 1..20: note = chemically synthesized
  source 1..20: mol_type = other DNA
tcaaattttaccaaactttc

SEQ ID NO: 22859 - DNA, 20 bp, synthetic construct
  misc_feature 1..20: note = chemically synthesized
  source 1..20: mol_type = other DNA
atatgatcatctcaatagat

SEQ ID NO: 22860 - DNA, 20 bp, synthetic construct
  misc_feature 1..20: note = chemically synthesized
  source 1..20: mol_type = other DNA
ctagccacagctttcaggtc

SEQ ID NO: 22861 - DNA, 20 bp, synthetic construct
  misc_feature 1..20: note = chemically synthesized
  source 1..20: mol_type = other DNA
ccacagctttcaggtcagag

SEQ ID NO: 22862 - DNA, 20 bp, synthetic construct
  misc_feature 1..20: note = chemically synthesized
  source 1..20: mol_type = other DNA
agctttcaggtcagagaaag

SEQ ID NO: 22863 - DNA, 20 bp, synthetic construct
  misc_feature 1..20: note = chemically synthesized
  source 1..20: mol_type = other DNA
ttcaggtcagagaaagaaag

SEQ ID NO: 22864 - DNA, 20 bp, synthetic construct
  misc_feature 1..20: note = chemically synthesized
  source 1..20: mol_type = other DNA
cagatgacatgattttatac

SEQ ID NO: 22865 - DNA, 20 bp, synthetic construct
  misc_feature 1..20: note = chemically synthesized
  source 1..20: mol_type = other DNA
aaaactacaaaacactgata

SEQ ID NO: 22866 - DNA, 20 bp, synthetic construct
  misc_feature 1..20: note = chemically synthesized
  source 1..20: mol_type = other DNA
tgataaaagaattgaaaagg

SEQ ID NO: 22867 - DNA, 20 bp, synthetic construct
  misc_feature 1..20: note = chemically synthesized
  source 1..20: mol_type = other DNA
agatatcctatgttcatgga

SEQ ID NO: 22868 - DNA, 20 bp, synthetic construct
  misc_feature 1..20: note = chemically synthesized
  source 1..20: mol_type = other DNA
aaatagcaatgtcatttttc

SEQ ID NO: 22869 - DNA, 20 bp, synthetic construct
  misc_feature 1..20: note = chemically synthesized
  source 1..20: mol_type = other DNA
cagacacttagaccaatgga

SEQ ID NO: 22870 - DNA, 20 bp, synthetic construct
  misc_feature 1..20: note = chemically synthesized
  source 1..20: mol_type = other DNA
aatggaagagaatagagaac

SEQ ID NO: 22871 - DNA, 20 bp, synthetic construct
  misc_feature 1..20: note = chemically synthesized
  source 1..20: mol_type = other DNA
cagattttcaacaaaggtga

SEQ ID NO: 22872 - DNA, 20 bp, synthetic construct
  misc_feature 1..20: note = chemically synthesized
  source 1..20: mol_type = other DNA
tgaggaaaggacacagtgtt

SEQ ID NO: 22873 - DNA, 20 bp, synthetic construct
  misc_feature 1..20: note = chemically synthesized
  source 1..20: mol_type = other DNA
ccattggatatccatgtgca

SEQ ID NO: 22874 - DNA, 20 bp, synthetic construct
  misc_feature 1..20: note = chemically synthesized
  source 1..20: mol_type = other DNA
cctaaacacacactcccact

SEQ ID NO: 22875 - DNA, 20 bp, synthetic construct
  misc_feature 1..20: note = chemically synthesized
  source 1..20: mol_type = other DNA
tacaggtgtagaggaagcag

SEQ ID NO: 22876 - DNA, 20 bp, synthetic construct
  misc_feature 1..20: note = chemically synthesized
  source 1..20: mol_type = other DNA
agaacaattactaatagacc

SEQ ID NO: 22877 - DNA, 20 bp, synthetic construct
  misc_feature 1..20: note = chemically synthesized
  source 1..20: mol_type = other DNA
gcactagacagttcatcaag

SEQ ID NO: 22878 - DNA, 20 bp, synthetic construct
  misc_feature 1..20: note = chemically synthesized
  source 1..20: mol_type = other DNA
caggaccagatggattcaca

SEQ ID NO: 22879 - DNA, 20 bp, synthetic construct
  misc_feature 1..20: note = chemically synthesized
  source 1..20: mol_type = other DNA
cagggaaggacataaccaaa

SEQ ID NO: 22880 - DNA, 20 bp, synthetic construct
  misc_feature 1..20: note = chemically synthesized
  source 1..20: mol_type = other DNA
acatgatcatctcaatagat

SEQ ID NO: 22881 - DNA, 20 bp, synthetic construct
  misc_feature 1..20: note = chemically synthesized
  source 1..20: mol_type = other DNA
ccagggcaatcagacaaaac

SEQ ID NO: 22882 - DNA, 20 bp, synthetic construct
  misc_feature 1..20: note = chemically synthesized
  source 1..20: mol_type = other DNA
ttaaaaccctaaagactcct

SEQ ID NO: 22883 - DNA, 20 bp, synthetic construct
  misc_feature 1..20: note = chemically synthesized
  source 1..20: mol_type = other DNA
tacaccaacagcaaccaaat

SEQ ID NO: 22884 - DNA, 20 bp, synthetic construct
  misc_feature 1..20: note = chemically synthesized
  source 1..20: mol_type = other DNA
ttaaaactataaaactacta

SEQ ID NO: 22885 - DNA, 20 bp, synthetic construct
  misc_feature 1..20: note = chemically synthesized
  source 1..20: mol_type = other DNA
aagagacaagctgttgaatg

SEQ ID NO: 22886 - DNA, 20 bp, synthetic construct
  misc_feature 1..20: note = chemically synthesized
  source 1..20: mol_type = other DNA
atttgacaaggaattaatct

SEQ ID NO: 22887 - DNA, 20 bp, synthetic construct
  misc_feature 1..20: note = chemically synthesized
  source 1..20: mol_type = other DNA
gaattaatctccagaatata

SEQ ID NO: 22888 - DNA, 20 bp, synthetic construct
  misc_feature 1..20: note = chemically synthesized
  source 1..20: mol_type = other DNA
gctcaacattactaatcatc

SEQ ID NO: 22889 - DNA, 20 bp, synthetic construct
  misc_feature 1..20: note = chemically synthesized
  source 1..20: mol_type = other DNA
gagatatcatcttatgccag

SEQ ID NO: 22890 - DNA, 20 bp, synthetic construct
  misc_feature 1..20: note = chemically synthesized
  source 1..20: mol_type = other DNA
ctgggtatttatccaaagga

SEQ ID NO: 22891 - DNA, 20 bp, synthetic construct
  misc_feature 1..20: note = chemically synthesized
  source 1..20: mol_type = other DNA
tttatccaaaggaaaagaat

SEQ ID NO: 22892 - DNA, 20 bp, synthetic construct
  misc_feature 1..20: note = chemically synthesized
  source 1..20: mol_type = other DNA
gtgtccatcaatggatgaat

SEQ ID NO: 22893 - DNA, 20 bp, synthetic construct
  misc_feature 1..20: note = chemically synthesized
  source 1..20: mol_type = other DNA
ttaaacgaaataagccaggc

SEQ ID NO: 22894 - DNA, 20 bp, synthetic construct
  misc_feature 1..20: note = chemically synthesized
  source 1..20: mol_type = other DNA
taatatcatgtaggtagaga

SEQ ID NO: 22895 - DNA, 20 bp, synthetic construct
  misc_feature 1..20: note = chemically synthesized
  source 1..20: mol_type = other DNA
tgtaggtagagagtagaatg

SEQ ID NO: 22896 - DNA, 20 bp, synthetic construct
  misc_feature 1..20: note = chemically synthesized
  source 1..20: mol_type = other DNA
gaatgacagaaaccagaggt

SEQ ID NO: 22897 - DNA, 20 bp, synthetic construct
  misc_feature 1..20: note = chemically synthesized
  source 1..20: mol_type = other DNA
ttgtatatttcaaaatagta

SEQ ID NO: 22898 - DNA, 20 bp, synthetic construct
  misc_feature 1..20: note = chemically synthesized
  source 1..20: mol_type = other DNA
tcttgaaatgttcctaacac

SEQ ID NO: 22899 - DNA, 20 bp, synthetic construct
  misc_feature 1..20: note = chemically synthesized
  source 1..20: mol_type = other DNA
aaacacgtcatatatcaata

SEQ ID NO: 22900 - DNA, 20 bp, synthetic construct
  misc_feature 1..20: note = chemically synthesized
  source 1..20: mol_type = other DNA
caaacttctctcttaacaag

SEQ ID NO: 22901 - DNA, 20 bp, synthetic construct
  misc_feature 1..20: note = chemically synthesized
  source 1..20: mol_type = other DNA
ggttttattctgacattaaa

SEQ ID NO: 22902 - DNA, 20 bp, synthetic construct
  misc_feature 1..20: note = chemically synthesized
  source 1..20: mol_type = other DNA
agtatcacaactttcacctg

SEQ ID NO: 22903 - DNA, 20 bp, synthetic construct
  misc_feature 1..20: note = chemically synthesized
  source 1..20: mol_type = other DNA
aatcactatttcaaagaagt

SEQ ID NO: 22904 - DNA, 20 bp, synthetic construct
  misc_feature 1..20: note = chemically synthesized
  source 1..20: mol_type = other DNA
tatacatattatacacatat

SEQ ID NO: 22905 - DNA, 20 bp, synthetic construct
  misc_feature 1..20: note = chemically synthesized
  source 1..20: mol_type = other DNA
tccacatcagtaattagggc

SEQ ID NO: 22906 - DNA, 20 bp, synthetic construct
  misc_feature 1..20: note = chemically synthesized
  source 1..20: mol_type = other DNA
attttatgaataaattttat

SEQ ID NO: 22907 - DNA, 20 bp, synthetic construct
  misc_feature 1..20: note = chemically synthesized
  source 1..20: mol_type = other DNA
tacaggtagattttatatat

SEQ ID NO: 22908 - DNA, 20 bp, synthetic construct
  misc_feature 1..20: note = chemically synthesized
  source 1..20: mol_type = other DNA
gtgagcctccatggccagct

SEQ ID NO: 22909 - DNA, 20 bp, synthetic construct
  misc_feature 1..20: note = chemically synthesized
  source 1..20: mol_type = other DNA
gagaaattttttaaatttct

SEQ ID NO: 22910 - DNA, 20 bp, synthetic construct
  misc_feature 1..20: note = chemically synthesized
  source 1..20: mol_type = other DNA
tttaaaagtggtggggggta

SEQ ID NO: 22911 - DNA, 20 bp, synthetic construct
  misc_feature 1..20: note = chemically synthesized
  source 1..20: mol_type = other DNA
gatccttttcattttgctct

SEQ ID NO: 22912 - DNA, 20 bp, synthetic construct
  misc_feature 1..20: note = chemically synthesized
  source 1..20: mol_type = other DNA
aagtgtgaagtcctcttctc

SEQ ID NO: 22913 - DNA, 20 bp, synthetic construct
  misc_feature 1..20: note = chemically synthesized
  source 1..20: mol_type = other DNA
tagatataatttctgaaggt

SEQ ID NO: 22914 - DNA, 20 bp, synthetic construct
  misc_feature 1..20: note = chemically synthesized
  source 1..20: mol_type = other DNA
gttctgagcaagtgtgtgca

SEQ ID NO: 22915 - DNA, 20 bp, synthetic construct
  misc_feature 1..20: note = chemically synthesized
  source 1..20: mol_type = other DNA
agtacttcccactactgtgg

SEQ ID NO: 22916 - DNA, 20 bp, synthetic construct
  misc_feature 1..20: note = chemically synthesized
  source 1..20: mol_type = other DNA
caaacctctaggtaactagg

SEQ ID NO: 22917 - DNA, 20 bp, synthetic construct
  misc_feature 1..20: note = chemically synthesized
  source 1..20: mol_type = other DNA
atttgtcaattcttgaagat

SEQ ID NO: 22918 - DNA, 20 bp, synthetic construct
  misc_feature 1..20: note = chemically synthesized
  source 1..20: mol_type = other DNA
aaaaaggttattttgaagtc

SEQ ID NO: 22919 - DNA, 20 bp, synthetic construct
  misc_feature 1..20: note = chemically synthesized
  source 1..20: mol_type = other DNA
gcagcaagggattcttctcc

SEQ ID NO: 22920 - DNA, 20 bp, synthetic construct
  misc_feature 1..20: note = chemically synthesized
  source 1..20: mol_type = other DNA
tgaatacatttccttgtttg

SEQ ID NO: 22921 - DNA, 20 bp, synthetic construct
  misc_feature 1..20: note = chemically synthesized
  source 1..20: mol_type = other DNA
ataacattcattttattcat

SEQ ID NO: 22922 - DNA, 20 bp, synthetic construct
  misc_feature 1..20: note = chemically synthesized
  source 1..20: mol_type = other DNA
tcagtttaaggggttctttt

SEQ ID NO: 22923 - DNA, 20 bp, synthetic construct
  misc_feature 1..20: note = chemically synthesized
  source 1..20: mol_type = other DNA
gggttctttttcagaaagtt

SEQ ID NO: 22924 - DNA, 20 bp, synthetic construct
  misc_feature 1..20: note = chemically synthesized
  source 1..20: mol_type = other DNA
aaattcaaatcattaaattt

SEQ ID NO: 22925 - DNA, 20 bp, synthetic construct
  misc_feature 1..20: note = chemically synthesized
  source 1..20: mol_type = other DNA
ttccccttgaaagggaaatg

SEQ ID NO: 22926 - DNA, 20 bp, synthetic construct
  misc_feature 1..20: note = chemically synthesized
  source 1..20: mol_type = other DNA
cattaatgtttgttaaatga

SEQ ID NO: 22927 - DNA, 20 bp, synthetic construct
  misc_feature 1..20: note = chemically synthesized
  source 1..20: mol_type = other DNA
tgagctcctgcccactctct

SEQ ID NO: 22928 - DNA, 20 bp, synthetic construct
  misc_feature 1..20: note = chemically synthesized
  source 1..20: mol_type = other DNA
tggactggaaaaatttgtga

SEQ ID NO: 22929 - DNA, 20 bp, synthetic construct
  misc_feature 1..20: note = chemically synthesized
  source 1..20: mol_type = other DNA
aggataaagatctctgagga

SEQ ID NO: 22930 - DNA, 20 bp, synthetic construct
  misc_feature 1..20: note = chemically synthesized
  source 1..20: mol_type = other DNA
aagaatacaaaataatttaa

SEQ ID NO: 22931 - DNA, 20 bp, synthetic construct
  misc_feature 1..20: note = chemically synthesized
  source 1..20: mol_type = other DNA
aaataatttaaaaagaaaca

SEQ ID NO: 22932 - DNA, 20 bp, synthetic construct
  misc_feature 1..20: note = chemically synthesized
  source 1..20: mol_type = other DNA
attctttctcactaaactac

SEQ ID NO: 22933 - DNA, 20 bp, synthetic construct
  misc_feature 1..20: note = chemically synthesized
  source 1..20: mol_type = other DNA
ataaggtgaattctgatttt

SEQ ID NO: 22934 - DNA, 20 bp, synthetic construct
  misc_feature 1..20: note = chemically synthesized
  source 1..20: mol_type = other DNA
tcctacataagcatagcatt

SEQ ID NO: 22935 - DNA, 20 bp, synthetic construct
  misc_feature 1..20: note = chemically synthesized
  source 1..20: mol_type = other DNA
agcatttcatataattacta

SEQ ID NO: 22936 - DNA, 20 bp, synthetic construct
  misc_feature 1..20: note = chemically synthesized
  source 1..20: mol_type = other DNA
gtttaattatactattttgc

SEQ ID NO: 22937 - DNA, 20 bp, synthetic construct
  misc_feature 1..20: note = chemically synthesized
  source 1..20: mol_type = other DNA
tgaaatcttatgtgcttccc

SEQ ID NO: 22938 - DNA, 20 bp, synthetic construct
  misc_feature 1..20: note = chemically synthesized
  source 1..20: mol_type = other DNA
accgtcctcacaatacctgc

SEQ ID NO: 22939 - DNA, 20 bp, synthetic construct
  misc_feature 1..20: note = chemically synthesized
  source 1..20: mol_type = other DNA
acaatacctgcccagaaaga

SEQ ID NO: 22940 - DNA, 20 bp, synthetic construct
  misc_feature 1..20: note = chemically synthesized
  source 1..20: mol_type = other DNA
agaaagacgagaaagaggag

SEQ ID NO: 22941 - DNA, 20 bp, synthetic construct
  misc_feature 1..20: note = chemically synthesized
  source 1..20: mol_type = other DNA
ggagtctcggaggactgtaa

SEQ ID NO: 22942 - DNA, 20 bp, synthetic construct
  misc_feature 1..20: note = chemically synthesized
  source 1..20: mol_type = other DNA
cttgtgtatgtgttgaagag

SEQ ID NO: 22943 - DNA, 20 bp, synthetic construct
  misc_feature 1..20: note = chemically synthesized
  source 1..20: mol_type = other DNA
aaaatccatattatgacaac

SEQ ID NO: 22944 - DNA, 20 bp, synthetic construct
  misc_feature 1..20: note = chemically synthesized
  source 1..20: mol_type = other DNA
tagtaattatatgaaatgct

SEQ ID NO: 22945 - DNA, 20 bp, synthetic construct
  misc_feature 1..20: note = chemically synthesized
  source 1..20: mol_type = other DNA
ggcaaaatactgtgctcctt

SEQ ID NO: 22946 - DNA, 20 bp, synthetic construct
  misc_feature 1..20: note = chemically synthesized
  source 1..20: mol_type = other DNA
ttatgtaggaattataaaat

SEQ ID NO: 22947 - DNA, 20 bp, synthetic construct
  misc_feature 1..20: note = chemically synthesized
  source 1..20: mol_type = other DNA
actattgaaggaacattagc

SEQ ID NO: 22948 - DNA, 20 bp, synthetic construct
  misc_feature 1..20: note = chemically synthesized
  source 1..20: mol_type = other DNA
gctgagttcctcaagatctt

SEQ ID NO: 22949 - DNA, 20 bp, synthetic construct
  misc_feature 1..20: note = chemically synthesized
  source 1..20: mol_type = other DNA
taaaggatctgaaataataa

SEQ ID NO: 22950 - DNA, 20 bp, synthetic construct
  misc_feature 1..20: note = chemically synthesized
  source 1..20: mol_type = other DNA
atggcatgcattctgaaaaa

SEQ ID NO: 22951 - DNA, 20 bp, synthetic construct
  misc_feature 1..20: note = chemically synthesized
  source 1..20: mol_type = other DNA
ttttgcctatgtagaagtgg

SEQ ID NO: 22952 - DNA, 20 bp, synthetic construct
  misc_feature 1..20: note = chemically synthesized
  source 1..20: mol_type = other DNA
tcttattctctgtagtttag

SEQ ID NO: 22953 - DNA, 20 bp, synthetic construct
  misc_feature 1..20: note = chemically synthesized
  source 1..20: mol_type = other DNA
attctctgtagtttagtgag

SEQ ID NO: 22954 - DNA, 20 bp, synthetic construct
  misc_feature 1..20: note = chemically synthesized
  source 1..20: mol_type = other DNA
gtgagaaagaatctaggagg

SEQ ID NO: 22955 - DNA, 20 bp, synthetic construct
  misc_feature 1..20: note = chemically synthesized
  source 1..20: mol_type = other DNA
tctagaacagtgcctggtac

SEQ ID NO: 22956 - DNA, 20 bp, synthetic construct
  misc_feature 1..20: note = chemically synthesized
  source 1..20: mol_type = other DNA
ttcacttttttactattatg

SEQ ID NO: 22957 - DNA, 20 bp, synthetic construct
  misc_feature 1..20: note = chemically synthesized
  source 1..20: mol_type = other DNA
caaggaaatgtattcacatc

SEQ ID NO: 22958 - DNA, 20 bp, synthetic construct
  misc_feature 1..20: note = chemically synthesized
  source 1..20: mol_type = other DNA
aaacaaaaggtttcttagga

SEQ ID NO: 22959 - DNA, 20 bp, synthetic construct
  misc_feature 1..20: note = chemically synthesized
  source 1..20: mol_type = other DNA
aggagaagaatcccttgctg

SEQ ID NO: 22960 - DNA, 20 bp, synthetic construct
  misc_feature 1..20: note = chemically synthesized
  source 1..20: mol_type = other DNA
agaggcgagggagatagagt

SEQ ID NO: 22961 - DNA, 20 bp, synthetic construct
  misc_feature 1..20: note = chemically synthesized
  source 1..20: mol_type = other DNA
cagaactgattcttaatctt

SEQ ID NO: 22962 - DNA, 20 bp, synthetic construct
  misc_feature 1..20: note = chemically synthesized
  source 1..20: mol_type = other DNA
gaaggataaatagctaaagg

SEQ ID NO: 22963 - DNA, 20 bp, synthetic construct
  misc_feature 1..20: note = chemically synthesized
  source 1..20: mol_type = other DNA
ctcagaacattacaaactct

SEQ ID NO: 22964 - DNA, 20 bp, synthetic construct
  misc_feature 1..20: note = chemically synthesized
  source 1..20: mol_type = other DNA
acacataatgaaagttaatt

SEQ ID NO: 22965 - DNA, 20 bp, synthetic construct
  misc_feature 1..20: note = chemically synthesized
  source 1..20: mol_type = other DNA
tgcttccctcttaaaatgga

SEQ ID NO: 22966 - DNA, 20 bp, synthetic construct
  misc_feature 1..20: note = chemically synthesized
  source 1..20: mol_type = other DNA
catggtacaagtggcacagg

SEQ ID NO: 22967 - DNA, 20 bp, synthetic construct
  misc_feature 1..20: note = chemically synthesized
  source 1..20: mol_type = other DNA
caagtggcacagggaagaat

SEQ ID NO: 22968 - DNA, 20 bp, synthetic construct
  misc_feature 1..20: note = chemically synthesized
  source 1..20: mol_type = other DNA
ctagagtcaaagtggttatg

SEQ ID NO: 22969 - DNA, 20 bp, synthetic construct
  misc_feature 1..20: note = chemically synthesized
  source 1..20: mol_type = other DNA
ctcaaggagtttctaaacct

SEQ ID NO: 22970 - DNA, 20 bp, synthetic construct
  misc_feature 1..20: note = chemically synthesized
  source 1..20: mol_type = other DNA
cacttttcaaggctgaggtg

SEQ ID NO: 22971 - DNA, 20 bp, synthetic construct
  misc_feature 1..20: note = chemically synthesized
  source 1..20: mol_type = other DNA
catagggagaccctgtttct

SEQ ID NO: 22972 - DNA, 20 bp, synthetic construct
  misc_feature 1..20: note = chemically synthesized
  source 1..20: mol_type = other DNA
taataatgttgtgaaaatta

SEQ ID NO: 22973 - DNA, 20 bp, synthetic construct
  misc_feature 1..20: note = chemically synthesized
  source 1..20: mol_type = other DNA
ttgcatttttaaacacaaaa

SEQ ID NO: 22974 - DNA, 20 bp, synthetic construct
  misc_feature 1..20: note = chemically synthesized
  source 1..20: mol_type = other DNA
ctttgattttaactgaggat

SEQ ID NO: 22975 - DNA, 20 bp, synthetic construct
  misc_feature 1..20: note = chemically synthesized
  source 1..20: mol_type = other DNA
agagagagcgagagagaggc

SEQ ID NO: 22976 - DNA, 20 bp, synthetic construct
  misc_feature 1..20: note = chemically synthesized
  source 1..20: mol_type = other DNA
aagtattttcttttttaatg

SEQ ID NO: 22977 - DNA, 20 bp, synthetic construct
  misc_feature 1..20: note = chemically synthesized
  source 1..20: mol_type = other DNA
gctaaaatggtgttggaata

SEQ ID NO: 22978 - DNA, 20 bp, synthetic construct
  misc_feature 1..20: note = chemically synthesized
  source 1..20: mol_type = other DNA
tttggtgtgatgctggcttc

SEQ ID NO: 22979 - DNA, 20 bp, synthetic construct
  misc_feature 1..20: note = chemically synthesized
  source 1..20: mol_type = other DNA
gttccttctttatctgtctt

SEQ ID NO: 22980 - DNA, 20 bp, synthetic construct
  misc_feature 1..20: note = chemically synthesized
  source 1..20: mol_type = other DNA
aattcctctttgaatgtcta

SEQ ID NO: 22981 - DNA, 20 bp, synthetic construct
  misc_feature 1..20: note = chemically synthesized
  source 1..20: mol_type = other DNA
cctatcatatggtctacctt

SEQ ID NO: 22982 - DNA, 20 bp, synthetic construct
  misc_feature 1..20: note = chemically synthesized
  source 1..20: mol_type = other DNA
aaatttccacgcgctgttga

SEQ ID NO: 22983 - DNA, 20 bp, synthetic construct
  misc_feature 1..20: note = chemically synthesized
  source 1..20: mol_type = other DNA
taactcaactccaggtaagg

SEQ ID NO: 22984 - DNA, 20 bp, synthetic construct
  misc_feature 1..20: note = chemically synthesized
  source 1..20: mol_type = other DNA
gctattttgatagcggtcat

SEQ ID NO: 22985 - DNA, 20 bp, synthetic construct
  misc_feature 1..20: note = chemically synthesized
  source 1..20: mol_type = other DNA
agctagtttattattggtgt

SEQ ID NO: 22986 - DNA, 20 bp, synthetic construct
  misc_feature 1..20: note = chemically synthesized
  source 1..20: mol_type = other DNA
atcaggataatactggcctc

SEQ ID NO: 22987 - DNA, 20 bp, synthetic construct
  misc_feature 1..20: note = chemically synthesized
  source 1..20: mol_type = other DNA
ggcctcagagaatgagttag

SEQ ID NO: 22988 - DNA, 20 bp, synthetic construct
  misc_feature 1..20: note = chemically synthesized
  source 1..20: mol_type = other DNA
tccttcctgtttaattttta

SEQ ID NO: 22989 - DNA, 20 bp, synthetic construct
  misc_feature 1..20: note = chemically synthesized
  source 1..20: mol_type = other DNA
tcttggtaggtggtatgtgt

SEQ ID NO: 22990 - DNA, 20 bp, synthetic construct
  misc_feature 1..20: note = chemically synthesized
  source 1..20: mol_type = other DNA
tgatctatctgatgctgaga

SEQ ID NO: 22991 - DNA, 20 bp, synthetic construct
  misc_feature 1..20: note = chemically synthesized
  source 1..20: mol_type = other DNA
ctggtgttgagtgtgaatgt

SEQ ID NO: 22992 - DNA, 20 bp, synthetic construct
  misc_feature 1..20: note = chemically synthesized
  source 1..20: mol_type = other DNA
ttccttcaaatttttcttgc

SEQ ID NO: 22993 - DNA, 20 bp, synthetic construct
  misc_feature 1..20: note = chemically synthesized
  source 1..20: mol_type = other DNA
ctggcctgtgaggtttctgc

SEQ ID NO: 22994 - DNA, 20 bp, synthetic construct
  misc_feature 1..20: note = chemically synthesized
  source 1..20: mol_type = other DNA
tttcaataaactcttcagtt

SEQ ID NO: 22995 - DNA, 20 bp, synthetic construct
  misc_feature 1..20: note = chemically synthesized
  source 1..20: mol_type = other DNA
aacattttggattctttttt

SEQ ID NO: 22996 - DNA, 20 bp, synthetic construct
  misc_feature 1..20: note = chemically synthesized
  source 1..20: mol_type = other DNA
ttccactggcttatgttgct

SEQ ID NO: 22997 - DNA, 20 bp, synthetic construct
  misc_feature 1..20: note = chemically synthesized
  source 1..20: mol_type = other DNA
tgatgaggttgtgctggaga

SEQ ID NO: 22998 - DNA, 20 bp, synthetic construct
  misc_feature 1..20: note = chemically synthesized
  source 1..20: mol_type = other DNA
gagtgatcctcaggccccca

SEQ ID NO: 22999 - DNA, 20 bp, synthetic construct
  misc_feature 1..20: note = chemically synthesized
  source 1..20: mol_type = other DNA
tgtcacttctctgttgaatt

SEQ ID NO: 23000 - DNA, 20 bp, synthetic construct
  misc_feature 1..20: note = chemically synthesized
  source 1..20: mol_type = other DNA
aatcatttgtttcttcaaat

SEQ ID NO: 23001 - DNA, 20 bp, synthetic construct
  misc_feature 1..20: note = chemically synthesized
  source 1..20: mol_type = other DNA
catctaataaatgtgtacca

SEQ ID NO: 23002 - DNA, 20 bp, synthetic construct
  misc_feature 1..20: note = chemically synthesized
  source 1..20: mol_type = other DNA
ctcctggaaaagatgaagat

SEQ ID NO: 23003 - DNA, 20 bp, synthetic construct
  misc_feature 1..20: note = chemically synthesized
  source 1..20: mol_type = other DNA
gaaaataagtctacagaaga

SEQ ID NO: 23004 - DNA, 20 bp, synthetic construct
  misc_feature 1..20: note = chemically synthesized
  source 1..20: mol_type = other DNA
tttttgtggatagtggtttt

SEQ ID NO: 23005 - DNA, 20 bp, synthetic construct
  misc_feature 1..20: note = chemically synthesized
  source 1..20: mol_type = other DNA
agatgtgactcccacacttt

SEQ ID NO: 23006 - DNA, 20 bp, synthetic construct
  misc_feature 1..20: note = chemically synthesized
  source 1..20: mol_type = other DNA
ttgatggtttctaaaattgt

SEQ ID NO: 23007 - DNA, 20 bp, synthetic construct
  misc_feature 1..20: note = chemically synthesized
  source 1..20: mol_type = other DNA
agttactggaataatacatt

SEQ ID NO: 23008 - DNA, 20 bp, synthetic construct
  misc_feature 1..20: note = chemically synthesized
  source 1..20: mol_type = other DNA
aacttacaatcatggcagaa

SEQ ID NO: 23009 - DNA, 20 bp, synthetic construct
  misc_feature 1..20: note = chemically synthesized
  source 1..20: mol_type = other DNA
tagttctgtttctagttctt

SEQ ID NO: 23010 - DNA, 20 bp, synthetic construct
  misc_feature 1..20: note = chemically synthesized
  source 1..20: mol_type = other DNA
ggcaggaagcatccagcatg

SEQ ID NO: 23011 - DNA, 20 bp, synthetic construct
  misc_feature 1..20: note = chemically synthesized
  source 1..20: mol_type = other DNA
acccgtgaatcctgtctatg

SEQ ID NO: 23012 - DNA, 20 bp, synthetic construct
  misc_feature 1..20: note = chemically synthesized
  source 1..20: mol_type = other DNA
gaaaaggctgagtggtgtcc

SEQ ID NO: 23013 - DNA, 20 bp, synthetic construct
  misc_feature 1..20: note = chemically synthesized
  source 1..20: mol_type = other DNA
cgttgtccttcagggatgtc

SEQ ID NO: 23014 - DNA, 20 bp, synthetic construct
  misc_feature 1..20: note = chemically synthesized
  source 1..20: mol_type = other DNA
ccatcggtgcagtctcaggg

SEQ ID NO: 23015 - DNA, 20 bp, synthetic construct
  misc_feature 1..20: note = chemically synthesized
  source 1..20: mol_type = other DNA
ccactttatggctagatgga

SEQ ID NO: 23016 - DNA, 20 bp, synthetic construct
  misc_feature 1..20: note = chemically synthesized
  source 1..20: mol_type = other DNA
atcatattaagcagccaact

SEQ ID NO: 23017 - DNA, 20 bp, synthetic construct
  misc_feature 1..20: note = chemically synthesized
  source 1..20: mol_type = other DNA
aatctgtattagggttctac

SEQ ID NO: 23018 - DNA, 20 bp, synthetic construct
  misc_feature 1..20: note = chemically synthesized
  source 1..20: mol_type = other DNA
tattagggttctacagagaa

SEQ ID NO: 23019 - DNA, 20 bp, synthetic construct
  misc_feature 1..20: note = chemically synthesized
  source 1..20: mol_type = other DNA
agttcaatgttccagggcag

SEQ ID NO: 23020 - DNA, 20 bp, synthetic construct
  misc_feature 1..20: note = chemically synthesized
  source 1..20: mol_type = other DNA
ggcaggaagaatccagcatg

SEQ ID NO: 23021 - DNA, 20 bp, synthetic construct
  misc_feature 1..20: note = chemically synthesized
  source 1..20: mol_type = other DNA
ggtagcagcaatattagagg

SEQ ID NO: 23022 - DNA, 20 bp, synthetic construct
  misc_feature 1..20: note = chemically synthesized
  source 1..20: mol_type = other DNA
ggggctgcatgcactggtca

SEQ ID NO: 23023 - DNA, 20 bp, synthetic construct
  misc_feature 1..20: note = chemically synthesized
  source 1..20: mol_type = other DNA
tacttcttctttctttggag

SEQ ID NO: 23024 - DNA, 20 bp, synthetic construct
  misc_feature 1..20: note = chemically synthesized
  source 1..20: mol_type = other DNA
tctcctcccttactaggaag

SEQ ID NO: 23025 - DNA, 20 bp, synthetic construct
  misc_feature 1..20: note = chemically synthesized
  source 1..20: mol_type = other DNA
aggaagagagaaataccatg

SEQ ID NO: 23026 - DNA, 20 bp, synthetic construct
  misc_feature 1..20: note = chemically synthesized
  source 1..20: mol_type = other DNA
gaagggactttaaaacatgc

SEQ ID NO: 23027 - DNA, 20 bp, synthetic construct
  misc_feature 1..20: note = chemically synthesized
  source 1..20: mol_type = other DNA
aattgctaacctgaatgata

SEQ ID NO: 23028 - DNA, 20 bp, synthetic construct
  misc_feature 1..20: note = chemically synthesized
  source 1..20: mol_type = other DNA
cctccaaagaaagaagaagt

SEQ ID NO: 23029 - DNA, 20 bp, synthetic construct
  misc_feature 1..20: note = chemically synthesized
  source 1..20: mol_type = other DNA
aatattgctgctacctctat

SEQ ID NO: 23030 - DNA, 20 bp, synthetic construct
  misc_feature 1..20: note = chemically synthesized
  source 1..20: mol_type = other DNA
atccagcaagtccacatcta

SEQ ID NO: 23031 - DNA, 20 bp, synthetic construct
  misc_feature 1..20: note = chemically synthesized
  source 1..20: mol_type = other DNA
agaatttatgaccaagtcct

SEQ ID NO: 23032 - DNA, 20 bp, synthetic construct
  misc_feature 1..20: note = chemically synthesized
  source 1..20: mol_type = other DNA
tcctcaaaactaaacacaac

SEQ ID NO: 23033 - DNA, 20 bp, synthetic construct
  misc_feature 1..20: note = chemically synthesized
  source 1..20: mol_type = other DNA
aaactaaacacaacaaaaac

SEQ ID NO: 23034 - DNA, 20 bp, synthetic construct
  misc_feature 1..20: note = chemically synthesized
  source 1..20: mol_type = other DNA
tacaaggaactcaacaacaa

SEQ ID NO: 23035 - DNA, 20 bp, synthetic construct
  misc_feature 1..20: note = chemically synthesized
  source 1..20: mol_type = other DNA
atggacctctatgattagtc

SEQ ID NO: 23036 - DNA, 20 bp, synthetic construct
  misc_feature 1..20: note = chemically synthesized
  source 1..20: mol_type = other DNA
tatttcctccttcttttgtt

SEQ ID NO: 23037 - DNA, 20 bp, synthetic construct
  misc_feature 1..20: note = chemically synthesized
  source 1..20: mol_type = other DNA
ggatataaagcaggcagaaa

SEQ ID NO: 23038 - DNA, 20 bp, synthetic construct
  misc_feature 1..20: note = chemically synthesized
  source 1..20: mol_type = other DNA
aataatcagagaatgcaaat

SEQ ID NO: 23039 - DNA, 20 bp, synthetic construct
  misc_feature 1..20: note = chemically synthesized
  source 1..20: mol_type = other DNA
tggctatcattataaagttc

SEQ ID NO: 23040 - DNA, 20 bp, synthetic construct
  misc_feature 1..20: note = chemically synthesized
  source 1..20: mol_type = other DNA
taggagtatggtgaggactg

SEQ ID NO: 23041 - DNA, 20 bp, synthetic construct
  misc_feature 1..20: note = chemically synthesized
  source 1..20: mol_type = other DNA
catttttcactgctgtcttt

SEQ ID NO: 23042 - DNA, 20 bp, synthetic construct
  misc_feature 1..20: note = chemically synthesized
  source 1..20: mol_type = other DNA
aaatatatctaagctttctt

SEQ ID NO: 23043 - DNA, 20 bp, synthetic construct
  misc_feature 1..20: note = chemically synthesized
  source 1..20: mol_type = other DNA
tatttacattttttatcctt

SEQ ID NO: 23044 - DNA, 20 bp, synthetic construct
  misc_feature 1..20: note = chemically synthesized
  source 1..20: mol_type = other DNA
tgcatcttactcagagatct

SEQ ID NO: 23045 - DNA, 20 bp, synthetic construct
  misc_feature 1..20: note = chemically synthesized
  source 1..20: mol_type = other DNA
ttgggaaatgaaatgaaaag

SEQ ID NO: 23046 - DNA, 20 bp, synthetic construct
  misc_feature 1..20: note = chemically synthesized
  source 1..20: mol_type = other DNA
tctttcagtctattagaaat

SEQ ID NO: 23047 - DNA, 20 bp, synthetic construct
  misc_feature 1..20: note = chemically synthesized
  source 1..20: mol_type = other DNA
agaaaaaagtcttcccctac

SEQ ID NO: 23048 - DNA, 20 bp, synthetic construct
  misc_feature 1..20: note = chemically synthesized
  source 1..20: mol_type = other DNA
cccctacaaaaacaaattta

SEQ ID NO: 23049 - DNA, 20 bp, synthetic construct
  misc_feature 1..20: note = chemically synthesized
  source 1..20: mol_type = other DNA
aaacaataaaaagaaatcag

SEQ ID NO: 23050 - DNA, 20 bp, synthetic construct
  misc_feature 1..20: note = chemically synthesized
  source 1..20: mol_type = other DNA
aagaaatacaaaatacattc

SEQ ID NO: 23051 - DNA, 20 bp, synthetic construct
  misc_feature 1..20: note = chemically synthesized
  source 1..20: mol_type = other DNA
tacgtaacaacacaatagct

SEQ ID NO: 23052 - DNA, 20 bp, synthetic construct
  misc_feature 1..20: note = chemically synthesized
  source 1..20: mol_type = other DNA
aagccaaagagtaagaactc

SEQ ID NO: 23053 - DNA, 20 bp, synthetic construct
  misc_feature 1..20: note = chemically synthesized
  source 1..20: mol_type = other DNA
tatacaactaactggtagag

SEQ ID NO: 23054 - DNA, 20 bp, synthetic construct
  misc_feature 1..20: note = chemically synthesized
  source 1..20: mol_type = other DNA
gaaaaggaaggaaggaagaa

SEQ ID NO: 23055 - DNA, 20 bp, synthetic construct
  misc_feature 1..20: note = chemically synthesized
  source 1..20: mol_type = other DNA
aaggaaggaagaaaaaaaca

SEQ ID NO: 23056 - DNA, 20 bp, synthetic construct
  misc_feature 1..20: note = chemically synthesized
  source 1..20: mol_type = other DNA
caaaacaaacaaactaaaaa

SEQ ID NO: 23057 - DNA, 20 bp, synthetic construct
  misc_feature 1..20: note = chemically synthesized
  source 1..20: mol_type = other DNA
caaacaaactaaaaaaaaaa

SEQ ID NO: 23058 - DNA, 20 bp, synthetic construct
  misc_feature 1..20: note = chemically synthesized
  source 1..20: mol_type = other DNA
atagactggctaaatagatt

SEQ ID NO: 23059 - DNA, 20 bp, synthetic construct
  misc_feature 1..20: note = chemically synthesized
  source 1..20: mol_type = other DNA
gataaaattgactttaaata

SEQ ID NO: 23060 - DNA, 20 bp, synthetic construct
  misc_feature 1..20: note = chemically synthesized
  source 1..20: mol_type = other DNA
cttctcagaccacaatggaa

SEQ ID NO: 23061 - DNA, 20 bp, synthetic construct
  misc_feature 1..20: note = chemically synthesized
  source 1..20: mol_type = other DNA
aactagaaatcaataacaag

SEQ ID NO: 23062 - DNA, 20 bp, synthetic construct
  misc_feature 1..20: note = chemically synthesized
  source 1..20: mol_type = other DNA
atcaataacaagaaaaactt

SEQ ID NO: 23063 - DNA, 20 bp, synthetic construct
  misc_feature 1..20: note = chemically synthesized
  source 1..20: mol_type = other DNA
tatcaataaacacttaaatt

SEQ ID NO: 23064 - DNA, 20 bp, synthetic construct
  misc_feature 1..20: note = chemically synthesized
  source 1..20: mol_type = other DNA
acaagctagaaaagcaagaa

SEQ ID NO: 23065 - DNA, 20 bp, synthetic construct
  misc_feature 1..20: note = chemically synthesized
  source 1..20: mol_type = other DNA
agaaaagcaagaacaaaacc

SEQ ID NO: 23066 - DNA, 20 bp, synthetic construct
  misc_feature 1..20: note = chemically synthesized
  source 1..20: mol_type = other DNA
aagaacttaatgaaatagag

SEQ ID NO: 23067 - DNA, 20 bp, synthetic construct
  misc_feature 1..20: note = chemically synthesized
  source 1..20: mol_type = other DNA
ttatgaacaaccatacacta

SEQ ID NO: 23068 - DNA, 20 bp, synthetic construct
  misc_feature 1..20: note = chemically synthesized
  source 1..20: mol_type = other DNA
gattgaattaagaaagaata

SEQ ID NO: 23069 - DNA, 20 bp, synthetic construct
  misc_feature 1..20: note = chemically synthesized
  source 1..20: mol_type = other DNA
aattttaccaaactttcaaa

SEQ ID NO: 23070 - DNA, 20 bp, synthetic construct
  misc_feature 1..20: note = chemically synthesized
  source 1..20: mol_type = other DNA
gacaaggatgcaagtaaaaa

SEQ ID NO: 23071 - DNA, 20 bp, synthetic construct
  misc_feature 1..20: note = chemically synthesized
  source 1..20: mol_type = other DNA
atcacatcaacaaaaagaac

SEQ ID NO: 23072 - DNA, 20 bp, synthetic construct
  misc_feature 1..20: note = chemically synthesized
  source 1..20: mol_type = other DNA
atttaacattccttcatgat

SEQ ID NO: 23073 - DNA, 20 bp, synthetic construct
  misc_feature 1..20: note = chemically synthesized
  source 1..20: mol_type = other DNA
tgacatgattttatacctag

SEQ ID NO: 23074 - DNA, 20 bp, synthetic construct
  misc_feature 1..20: note = chemically synthesized
  source 1..20: mol_type = other DNA
taaatttaaccaaggaaccg

SEQ ID NO: 23075 - DNA, 20 bp, synthetic construct
  misc_feature 1..20: note = chemically synthesized
  source 1..20: mol_type = other DNA
aaccgaaaaacctctattcg

SEQ ID NO: 23076 - DNA, 20 bp, synthetic construct
  misc_feature 1..20: note = chemically synthesized
  source 1..20: mol_type = other DNA
aacctctattcggaaaacta

SEQ ID NO: 23077 - DNA, 20 bp, synthetic construct
  misc_feature 1..20: note = chemically synthesized
  source 1..20: mol_type = other DNA
gtcatttttcacagaaatgg

SEQ ID NO: 23078 - DNA, 20 bp, synthetic construct
  misc_feature 1..20: note = chemically synthesized
  source 1..20: mol_type = other DNA
gatatccatgtgcaaaagaa

SEQ ID NO: 23079 - DNA, 20 bp, synthetic construct
  misc_feature 1..20: note = chemically synthesized
  source 1..20: mol_type = other DNA
ggccaccaaaagtgagtagg

SEQ ID NO: 23080 - DNA, 20 bp, synthetic construct
  misc_feature 1..20: note = chemically synthesized
  source 1..20: mol_type = other DNA
ctatgaagccagcatcacac

SEQ ID NO: 23081 - DNA, 20 bp, synthetic construct
  misc_feature 1..20: note = chemically synthesized
  source 1..20: mol_type = other DNA
ggaaggacataaccaaaaaa

SEQ ID NO: 23082 - DNA, 20 bp, synthetic construct
  misc_feature 1..20: note = chemically synthesized
  source 1..20: mol_type = other DNA
tacaccacataaacagattt

SEQ ID NO: 23083 - DNA, 20 bp, synthetic construct
  misc_feature 1..20: note = chemically synthesized
  source 1..20: mol_type = other DNA
tcctagccagggcaatcaga

SEQ ID NO: 23084 - DNA, 20 bp, synthetic construct
  misc_feature 1..20: note = chemically synthesized
  source 1..20: mol_type = other DNA
atgatatgatcatttacctt

SEQ ID NO: 23085 - DNA, 20 bp, synthetic construct
  misc_feature 1..20: note = chemically synthesized
  source 1..20: mol_type = other DNA
aacccctatttattgccata

SEQ ID NO: 23086 - DNA, 20 bp, synthetic construct
  misc_feature 1..20: note = chemically synthesized
  source 1..20: mol_type = other DNA
atggattaaagacttaaata

SEQ ID NO: 23087 - DNA, 20 bp, synthetic construct
  misc_feature 1..20: note = chemically synthesized
  source 1..20: mol_type = other DNA
aaagacttaaatataaaact

SEQ ID NO: 23088 - DNA, 20 bp, synthetic construct
  misc_feature 1..20: note = chemically synthesized
  source 1..20: mol_type = other DNA
aaatataaaacttaaaacta

SEQ ID NO: 23089 - DNA, 20 bp, synthetic construct
  misc_feature 1..20: note = chemically synthesized
  source 1..20: mol_type = other DNA
aaactataaaactactaaaa

SEQ ID NO: 23090 - DNA, 20 bp, synthetic construct
  misc_feature 1..20: note = chemically synthesized
  source 1..20: mol_type = other DNA
ctcaaacaactcaacagtgg

SEQ ID NO: 23091 - DNA, 20 bp, synthetic construct
  misc_feature 1..20: note = chemically synthesized
  source 1..20: mol_type = other DNA
atcatcagagaaatgcaaat

SEQ ID NO: 23092 - DNA, 20 bp, synthetic construct
  misc_feature 1..20: note = chemically synthesized
  source 1..20: mol_type = other DNA
aaattagtatagccactatg

SEQ ID NO: 23093 - DNA, 20 bp, synthetic construct
  misc_feature 1..20: note = chemically synthesized
  source 1..20: mol_type = other DNA
aaagtagggtgattatagtt

SEQ ID NO: 23094 - DNA, 20 bp, synthetic construct
  misc_feature 1..20: note = chemically synthesized
  source 1..20: mol_type = other DNA
acatataacaatgaggtggt

SEQ ID NO: 23095 - DNA, 20 bp, synthetic construct
  misc_feature 1..20: note = chemically synthesized
  source 1..20: mol_type = other DNA
ctaatctcaccctcctgttc

SEQ ID NO: 23096 - DNA, 20 bp, synthetic construct
  misc_feature 1..20: note = chemically synthesized
  source 1..20: mol_type = other DNA
aggagaaaaagaggaagaac

SEQ ID NO: 23097 - DNA, 20 bp, synthetic construct
  misc_feature 1..20: note = chemically synthesized
  source 1..20: mol_type = other DNA
ctctagagaaaagccatttg

SEQ ID NO: 23098 - DNA, 20 bp, synthetic construct
  misc_feature 1..20: note = chemically synthesized
  source 1..20: mol_type = other DNA
ggaaaacttctgtgttaaca

SEQ ID NO: 23099 - DNA, 20 bp, synthetic construct
  misc_feature 1..20: note = chemically synthesized
  source 1..20: mol_type = other DNA
agcaatacgttggcttaggc

SEQ ID NO: 23100 - DNA, 20 bp, synthetic construct
  misc_feature 1..20: note = chemically synthesized
  source 1..20: mol_type = other DNA
atttttcccccacatttggg

SEQ ID NO: 23101 - DNA, 20 bp, synthetic construct
  misc_feature 1..20: note = chemically synthesized
  source 1..20: mol_type = other DNA
actggtaacagtgcttcttc

SEQ ID NO: 23102 - DNA, 20 bp, synthetic construct
  misc_feature 1..20: note = chemically synthesized
  source 1..20: mol_type = other DNA
cattgttcataccctggaga

SEQ ID NO: 23103 - DNA, 20 bp, synthetic construct
  misc_feature 1..20: note = chemically synthesized
  source 1..20: mol_type = other DNA
gaagtctgagaattagtacc

SEQ ID NO: 23104 - DNA, 20 bp, synthetic construct
  misc_feature 1..20: note = chemically synthesized
  source 1..20: mol_type = other DNA
atacatttccttgtttgcca

SEQ ID NO: 23105 - DNA, 20 bp, synthetic construct
  misc_feature 1..20: note = chemically synthesized
  source 1..20: mol_type = other DNA
atctataggacatttccttt

SEQ ID NO: 23106 - DNA, 20 bp, synthetic construct
  misc_feature 1..20: note = chemically synthesized
  source 1..20: mol_type = other DNA
cattgtggggacctctccac

SEQ ID NO: 23107 - DNA, 20 bp, synthetic construct
  misc_feature 1..20: note = chemically synthesized
  source 1..20: mol_type = other DNA
taaaggcagcttaggggttg

SEQ ID NO: 23108 - DNA, 20 bp, synthetic construct
  misc_feature 1..20: note = chemically synthesized
  source 1..20: mol_type = other DNA
gctcctgcccactctctaga

SEQ ID NO: 23109 - DNA, 20 bp, synthetic construct
  misc_feature 1..20: note = chemically synthesized
  source 1..20: mol_type = other DNA
caggaactttgggcatattt

SEQ ID NO: 23110 - DNA, 20 bp, synthetic construct
  misc_feature 1..20: note = chemically synthesized
  source 1..20: mol_type = other DNA
gtgactagaaaaaggacatt

SEQ ID NO: 23111 - DNA, 20 bp, synthetic construct
  misc_feature 1..20: note = chemically synthesized
  source 1..20: mol_type = other DNA
atcttgaggaactcagcctt

SEQ ID NO: 23112 - DNA, 20 bp, synthetic construct
  misc_feature 1..20: note = chemically synthesized
  source 1..20: mol_type = other DNA
cttttgagaagctcctgaat

SEQ ID NO: 23113 - DNA, 20 bp, synthetic construct
  misc_feature 1..20: note = chemically synthesized
  source 1..20: mol_type = other DNA
tattttgctgagaaaaattt

SEQ ID NO: 23114 - DNA, 20 bp, synthetic construct
  misc_feature 1..20: note = chemically synthesized
  source 1..20: mol_type = other DNA
aataaagaaaatcaaattga

SEQ ID NO: 23115 - DNA, 20 bp, synthetic construct
  misc_feature 1..20: note = chemically synthesized
  source 1..20: mol_type = other DNA
taaagacatctgtaaaatta

SEQ ID NO: 23116 - DNA, 20 bp, synthetic construct
  misc_feature 1..20: note = chemically synthesized
  source 1..20: mol_type = other DNA
ggacatagcttattggtgga

SEQ ID NO: 23117 - DNA, 20 bp, synthetic construct
  misc_feature 1..20: note = chemically synthesized
  source 1..20: mol_type = other DNA
attatgtaagaattaaatat

SEQ ID NO: 23118 - DNA, 20 bp, synthetic construct
  misc_feature 1..20: note = chemically synthesized
  source 1..20: mol_type = other DNA
ggaaatgtattcacatccaa

SEQ ID NO: 23119 - DNA, 20 bp, synthetic construct
  misc_feature 1..20: note = chemically synthesized
  source 1..20: mol_type = other DNA
ccatgaacaatggaaacgtg

SEQ ID NO: 23120 - DNA, 20 bp, synthetic construct
  misc_feature 1..20: note = chemically synthesized
  source 1..20: mol_type = other DNA
tagttacctagaggtttggg

SEQ ID NO: 23121 - DNA, 20 bp, synthetic construct
  misc_feature 1..20: note = chemically synthesized
  source 1..20: mol_type = other DNA
gtggcacagggaagaattca

SEQ ID NO: 23122 - DNA, 20 bp, synthetic construct
  misc_feature 1..20: note = chemically synthesized
  source 1..20: mol_type = other DNA
gtgaaacacacgatctatgt

SEQ ID NO: 23123 - DNA, 20 bp, synthetic construct
  misc_feature 1..20: note = chemically synthesized
  source 1..20: mol_type = other DNA
ttcaatgacctacgctgtgg

SEQ ID NO: 23124 - DNA, 20 bp, synthetic construct
  misc_feature 1..20: note = chemically synthesized
  source 1..20: mol_type = other DNA
tttcttttttaatgtcagaa

SEQ ID NO: 23125 - DNA, 20 bp, synthetic construct
  misc_feature 1..20: note = chemically synthesized
  source 1..20: mol_type = other DNA
aaatgtgctttataaatagt

SEQ ID NO: 23126 - DNA, 20 bp, synthetic construct
  misc_feature 1..20: note = chemically synthesized
  source 1..20: mol_type = other DNA
aagtgtgctatataaacagt

SEQ ID NO: 23127 - DNA, 20 bp, synthetic construct
  misc_feature 1..20: note = chemically synthesized
  source 1..20: mol_type = other DNA
tcaaggataaaaaatgtaaa

SEQ ID NO: 23128 - DNA, 20 bp, synthetic construct
  misc_feature 1..20: note = chemically synthesized
  source 1..20: mol_type = other DNA
aacttctttttgatacagta

SEQ ID NO: 23129 - DNA, 20 bp, synthetic construct
  misc_feature 1..20: note = chemically synthesized
  source 1..20: mol_type = other DNA
ttaagaaatatagtagctat

SEQ ID NO: 23130 - DNA, 20 bp, synthetic construct
  misc_feature 1..20: note = chemically synthesized
  source 1..20: mol_type = other DNA
gactgggtaatttataagga

SEQ ID NO: 23131 - DNA, 20 bp, synthetic construct
  misc_feature 1..20: note = chemically synthesized
  source 1..20: mol_type = other DNA
aaagggggaaaagccgctta

SEQ ID NO: 23132 - DNA, 20 bp, synthetic construct
  misc_feature 1..20: note = chemically synthesized
  source 1..20: mol_type = other DNA
cataattatgcctaacatac

SEQ ID NO: 23133 - DNA, 20 bp, synthetic construct
  misc_feature 1..20: note = chemically synthesized
  source 1..20: mol_type = other DNA
accttaattccaggacatgg

SEQ ID NO: 23134 - DNA, 20 bp, synthetic construct
  misc_feature 1..20: note = chemically synthesized
  source 1..20: mol_type = other DNA
cttctgttctggactccact

SEQ ID NO: 23135 - DNA, 20 bp, synthetic construct
  misc_feature 1..20: note = chemically synthesized
  source 1..20: mol_type = other DNA
gcagccaactccagaaaccc

SEQ ID NO: 23136 - DNA, 20 bp, synthetic construct
  misc_feature 1..20: note = chemically synthesized
  source 1..20: mol_type = other DNA
ctcacatgttcacaaggtcc

SEQ ID NO: 23137 - DNA, 20 bp, synthetic construct
  misc_feature 1..20: note = chemically synthesized
  source 1..20: mol_type = other DNA
gtagcaggacaagctgcata

SEQ ID NO: 23138 - DNA, 20 bp, synthetic construct
  misc_feature 1..20: note = chemically synthesized
  source 1..20: mol_type = other DNA
ttggaggcagaaattgggca

SEQ ID NO: 23139 - DNA, 20 bp, synthetic construct
  misc_feature 1..20: note = chemically synthesized
  source 1..20: mol_type = other DNA
taggagatttcttcataatt

SEQ ID NO: 23140 - DNA, 20 bp, synthetic construct
  misc_feature 1..20: note = chemically synthesized
  source 1..20: mol_type = other DNA
catgcacctagaagggactt

SEQ ID NO: 23141 - DNA, 20 bp, synthetic construct
  misc_feature 1..20: note = chemically synthesized
  source 1..20: mol_type = other DNA
actgtgattcagacaaaggc

SEQ ID NO: 23142 - DNA, 20 bp, synthetic construct
  misc_feature 1..20: note = chemically synthesized
  source 1..20: mol_type = other DNA
ttctctccccattcatctgc

SEQ ID NO: 23143 - DNA, 20 bp, synthetic construct
  misc_feature 1..20: note = chemically synthesized
  source 1..20: mol_type = other DNA
cctccaactgttaaaaggaa

SEQ ID NO: 23144 - DNA, 20 bp, synthetic construct
  misc_feature 1..20: note = chemically synthesized
  source 1..20: mol_type = other DNA
tattatcattcaggttagca

SEQ ID NO: 23145 - DNA, 20 bp, synthetic construct
  misc_feature 1..20: note = chemically synthesized
  source 1..20: mol_type = other DNA
taataagggatggaaatgag

SEQ ID NO: 23146 - DNA, 20 bp, synthetic construct
  misc_feature 1..20: note = chemically synthesized
  source 1..20: mol_type = other DNA
catttaggatccactaagcc

SEQ ID NO: 23147 - DNA, 20 bp, synthetic construct
  misc_feature 1..20: note = chemically synthesized
  source 1..20: mol_type = other DNA
aagggacaccaacgaatggt

SEQ ID NO: 23148 - DNA, 20 bp, synthetic construct
  misc_feature 1..20: note = chemically synthesized
  source 1..20: mol_type = other DNA
actgctttgttcaattctgt

SEQ ID NO: 23149 - DNA, 20 bp, synthetic construct
  misc_feature 1..20: note = chemically synthesized
  source 1..20: mol_type = other DNA
tatgttcaaataacagctgc

SEQ ID NO: 23150 - DNA, 20 bp, synthetic construct
  misc_feature 1..20: note = chemically synthesized
  source 1..20: mol_type = other DNA
agtaccttttgataaggaga

SEQ ID NO: 23151 - DNA, 20 bp, synthetic construct
  misc_feature 1..20: note = chemically synthesized
  source 1..20: mol_type = other DNA
tgcttatagatgttcataga

SEQ ID NO: 23152 - DNA, 20 bp, synthetic construct
  misc_feature 1..20: note = chemically synthesized
  source 1..20: mol_type = other DNA
agggaggagaccacccttca

SEQ ID NO: 23153 - DNA, 20 bp, synthetic construct
  misc_feature 1..20: note = chemically synthesized
  source 1..20: mol_type = other DNA
acctggccagttatgttatc

SEQ ID NO: 23154 - DNA, 20 bp, synthetic construct
  misc_feature 1..20: note = chemically synthesized
  source 1..20: mol_type = other DNA
ggacaggaattgctcactct

SEQ ID NO: 23155 - DNA, 20 bp, synthetic construct
  misc_feature 1..20: note = chemically synthesized
  source 1..20: mol_type = other DNA
cttctttaactcggtgtctg

SEQ ID NO: 23156 - DNA, 20 bp, synthetic construct
  misc_feature 1..20: note = chemically synthesized
  source 1..20: mol_type = other DNA
ggtgtctgaggggttttgta

SEQ ID NO: 23157 - DNA, 20 bp, synthetic construct
  misc_feature 1..20: note = chemically synthesized
  source 1..20: mol_type = other DNA
aattaaggagagtatgaaaa

SEQ ID NO: 23158 - DNA, 20 bp, synthetic construct
  misc_feature 1..20: note = chemically synthesized
  source 1..20: mol_type = other DNA
caaatgggggtaaaataata

SEQ ID NO: 23159 - DNA, 20 bp, synthetic construct
  misc_feature 1..20: note = chemically synthesized
  source 1..20: mol_type = other DNA
agggaaagacaggctctaaa

SEQ ID NO: 23160 - DNA, 20 bp, synthetic construct
  misc_feature 1..20: note = chemically synthesized
  source 1..20: mol_type = other DNA
aatgggacttaattaaacta

SEQ ID NO: 23161 - DNA, 20 bp, synthetic construct
  misc_feature 1..20: note = chemically synthesized
  source 1..20: mol_type = other DNA
atggttaatactgagtgtca

SEQ ID NO: 23162 - DNA, 20 bp, synthetic construct
  misc_feature 1..20: note = chemically synthesized
  source 1..20: mol_type = other DNA
gtctgtgagggtgttaccaa

SEQ ID NO: 23163 - DNA, 20 bp, synthetic construct
  misc_feature 1..20: note = chemically synthesized
  source 1..20: mol_type = other DNA
aggcagaaaaatgtgaaaag

SEQ ID NO: 23164 - DNA, 20 bp, synthetic construct
  misc_feature 1..20: note = chemically synthesized
  source 1..20: mol_type = other DNA
gaaaaatgtgaaaaggctag

SEQ ID NO: 23165 - DNA, 20 bp, synthetic construct
  misc_feature 1..20: note = chemically synthesized
  source 1..20: mol_type = other DNA
agcctacatttttctcccat

SEQ ID NO: 23166 - DNA, 20 bp, synthetic construct
  misc_feature 1..20: note = chemically synthesized
  source 1..20: mol_type = other DNA
gaacattgaactccaggttc

SEQ ID NO: 23167 - DNA, 20 bp, synthetic construct
  misc_feature 1..20: note = chemically synthesized
  source 1..20: mol_type = other DNA
tcttcagctttgggactccg

SEQ ID NO: 23168 - DNA, 20 bp, synthetic construct
  misc_feature 1..20: note = chemically synthesized
  source 1..20: mol_type = other DNA
tgttcctcagctggcagatg

SEQ ID NO: 23169 - DNA, 20 bp, synthetic construct
  misc_feature 1..20: note = chemically synthesized
  source 1..20: mol_type = other DNA
agatatatatctcctattaa

SEQ ID NO: 23170 - DNA, 20 bp, synthetic construct
  misc_feature 1..20: note = chemically synthesized
  source 1..20: mol_type = other DNA
gtttctctgtagaaccctaa

SEQ ID NO: 23171 - DNA, 20 bp, synthetic construct
  misc_feature 1..20: note = chemically synthesized
  source 1..20: mol_type = other DNA
attaaggatggagttctttc

SEQ ID NO: 23172 - DNA, 20 bp, synthetic construct
  misc_feature 1..20: note = chemically synthesized
  source 1..20: mol_type = other DNA
tggagttctttcattggttt

SEQ ID NO: 23173 - DNA, 20 bp, synthetic construct
  misc_feature 1..20: note = chemically synthesized
  source 1..20: mol_type = other DNA
gttttggggtttctggagtt

SEQ ID NO: 23174 - DNA, 20 bp, synthetic construct
  misc_feature 1..20: note = chemically synthesized
  source 1..20: mol_type = other DNA
tttctggagttggctgctta

SEQ ID NO: 23175 - DNA, 20 bp, synthetic construct
  misc_feature 1..20: note = chemically synthesized
  source 1..20: mol_type = other DNA
cactgataatccttggcatc

SEQ ID NO: 23176 - DNA, 20 bp, synthetic construct
  misc_feature 1..20: note = chemically synthesized
  source 1..20: mol_type = other DNA
aaaataaatgcatttgacac

SEQ ID NO: 23177 - DNA, 20 bp, synthetic construct
  misc_feature 1..20: note = chemically synthesized
  source 1..20: mol_type = other DNA
tgcatttgacactcttgatt

SEQ ID NO: 23178 - DNA, 20 bp, synthetic construct
  misc_feature 1..20: note = chemically synthesized
  source 1..20: mol_type = other DNA
ggaacatagtgaagttggtt

SEQ ID NO: 23179 - DNA, 20 bp, synthetic construct
  misc_feature 1..20: note = chemically synthesized
  source 1..20: mol_type = other DNA
actcaggagtatatcaactc

SEQ ID NO: 23180 - DNA, 20 bp, synthetic construct
  misc_feature 1..20: note = chemically synthesized
  source 1..20: mol_type = other DNA
gagcaagaagtagcaaacac

SEQ ID NO: 23181 - DNA, 20 bp, synthetic construct
  misc_feature 1..20: note = chemically synthesized
  source 1..20: mol_type = other DNA
ggacagaggatgggaaataa

SEQ ID NO: 23182 - DNA, 20 bp, synthetic construct
  misc_feature 1..20: note = chemically synthesized
  source 1..20: mol_type = other DNA
agtaaaatttataggggtcc

SEQ ID NO: 23183 - DNA, 20 bp, synthetic construct
  misc_feature 1..20: note = chemically synthesized
  source 1..20: mol_type = other DNA
cacaacgcctagtgggccta

SEQ ID NO: 23184 - DNA, 20 bp, synthetic construct
  misc_feature 1..20: note = chemically synthesized
  source 1..20: mol_type = other DNA
ggattttggaggcaacatat

SEQ ID NO: 23185 - DNA, 20 bp, synthetic construct
  misc_feature 1..20: note = chemically synthesized
  source 1..20: mol_type = other DNA
atcgagtgatccaaaaggct

SEQ ID NO: 23186 - DNA, 20 bp, synthetic construct
  misc_feature 1..20: note = chemically synthesized
  source 1..20: mol_type = other DNA
atatgacctagcagatccaa

SEQ ID NO: 23187 - DNA, 20 bp, synthetic construct
  misc_feature 1..20: note = chemically synthesized
  source 1..20: mol_type = other DNA
gtgtcagtgccagataggga

SEQ ID NO: 23188 - DNA, 20 bp, synthetic construct
  misc_feature 1..20: note = chemically synthesized
  source 1..20: mol_type = other DNA
ctgaatcacagcggaggcct

SEQ ID NO: 23189 - DNA, 20 bp, synthetic construct
  misc_feature 1..20: note = chemically synthesized
  source 1..20: mol_type = other DNA
agaaagctcttggcctgtta

SEQ ID NO: 23190 - DNA, 20 bp, synthetic construct
  misc_feature 1..20: note = chemically synthesized
  source 1..20: mol_type = other DNA
tgaactgcctatcatgaact

SEQ ID NO: 23191 - DNA, 20 bp, synthetic construct
  misc_feature 1..20: note = chemically synthesized
  source 1..20: mol_type = other DNA
agcaaatggaagtggtatat

SEQ ID NO: 23192 - DNA, 20 bp, synthetic construct
  misc_feature 1..20: note = chemically synthesized
  source 1..20: mol_type = other DNA
tggaagtggtatatatgcga

SEQ ID NO: 23193 - DNA, 20 bp, synthetic construct
  misc_feature 1..20: note = chemically synthesized
  source 1..20: mol_type = other DNA
catggtctccactcctgaca

SEQ ID NO: 23194 - DNA, 20 bp, synthetic construct
  misc_feature 1..20: note = chemically synthesized
  source 1..20: mol_type = other DNA
tttgcacagaaggagaaatg

SEQ ID NO: 23195 - DNA, 20 bp, synthetic construct
  misc_feature 1..20: note = chemically synthesized
  source 1..20: mol_type = other DNA
agaaggagaaatggccagat

SEQ ID NO: 23196 - DNA, 20 bp, synthetic construct
  misc_feature 1..20: note = chemically synthesized
  source 1..20: mol_type = other DNA
cttattcatgggctgtagcc

SEQ ID NO: 23197 - DNA, 20 bp, synthetic construct
  misc_feature 1..20: note = chemically synthesized
  source 1..20: mol_type = other DNA
agaggtatgtggatggacct

SEQ ID NO: 23198 - DNA, 20 bp, synthetic construct
  misc_feature 1..20: note = chemically synthesized
  source 1..20: mol_type = other DNA
caatgggtgacctcagcaga

SEQ ID NO: 23199 - DNA, 20 bp, synthetic construct
  misc_feature 1..20: note = chemically synthesized
  source 1..20: mol_type = other DNA
cacagttgcagggatggaag

SEQ ID NO: 23200 - DNA, 20 bp, synthetic construct
  misc_feature 1..20: note = chemically synthesized
  source 1..20: mol_type = other DNA
aaagctgacctggccacagc

SEQ ID NO: 23201 - DNA, 20 bp, synthetic construct
  misc_feature 1..20: note = chemically synthesized
  source 1..20: mol_type = other DNA
cagccagctacctggtggca

SEQ ID NO: 23202 - DNA, 20 bp, synthetic construct
  misc_feature 1..20: note = chemically synthesized
  source 1..20: mol_type = other DNA
tcttccatcatggaaagggc

SEQ ID NO: 23203 - DNA, 20 bp, synthetic construct
  misc_feature 1..20: note = chemically synthesized
  source 1..20: mol_type = other DNA
aatagacacttactctggat

SEQ ID NO: 23204 - DNA, 20 bp, synthetic construct
  misc_feature 1..20: note = chemically synthesized
  source 1..20: mol_type = other DNA
gggtttcccaatcctgaact

SEQ ID NO: 23205 - DNA, 20 bp, synthetic construct
  misc_feature 1..20: note = chemically synthesized
  source 1..20: mol_type = other DNA
tgtcatggtattccacacag

SEQ ID NO: 23206 - DNA, 20 bp, synthetic construct
  misc_feature 1..20: note = chemically synthesized
  source 1..20: mol_type = other DNA
catgatccctatcatcctga

SEQ ID NO: 23207 - DNA, 20 bp, synthetic construct
  misc_feature 1..20: note = chemically synthesized
  source 1..20: mol_type = other DNA
ttttgaatggccttttgaag

SEQ ID NO: 23208 - DNA, 20 bp, synthetic construct
  misc_feature 1..20: note = chemically synthesized
  source 1..20: mol_type = other DNA
aatcagtgtccaatatatgg

SEQ ID NO: 23209 - DNA, 20 bp, synthetic construct
  misc_feature 1..20: note = chemically synthesized
  source 1..20: mol_type = other DNA
tggtactgtttctcccatag

SEQ ID NO: 23210 - DNA, 20 bp, synthetic construct
  misc_feature 1..20: note = chemically synthesized
  source 1..20: mol_type = other DNA
tagtgttccactagcaaaat

SEQ ID NO: 23211 - DNA, 20 bp, synthetic construct
  misc_feature 1..20: note = chemically synthesized
  source 1..20: mol_type = other DNA
ttcccatggcattatgttct

SEQ ID NO: 23212 - DNA, 20 bp, synthetic construct
  misc_feature 1..20: note = chemically synthesized
  source 1..20: mol_type = other DNA
actgccgccaggtgacacaa

SEQ ID NO: 23213 - DNA, 20 bp, synthetic construct
  misc_feature 1..20: note = chemically synthesized
  source 1..20: mol_type = other DNA
tgattccattaaactgcaaa

SEQ ID NO: 23214 - DNA, 20 bp, synthetic construct
  misc_feature 1..20: note = chemically synthesized
  source 1..20: mol_type = other DNA
gagagttacagtgttggctg

SEQ ID NO: 23215 - DNA, 20 bp, synthetic construct
  misc_feature 1..20: note = chemically synthesized
  source 1..20: mol_type = other DNA
ggagatccattagggtgtct

SEQ ID NO: 23216 - DNA, 20 bp, synthetic construct
  misc_feature 1..20: note = chemically synthesized
  source 1..20: mol_type = other DNA
ttccaggcaggactacaaat

SEQ ID NO: 23217 - DNA, 20 bp, synthetic construct
  misc_feature 1..20: note = chemically synthesized
  source 1..20: mol_type = other DNA
aaaaaagacaagacctgctg

SEQ ID NO: 23218 - DNA, 20 bp, synthetic construct
  misc_feature 1..20: note = chemically synthesized
  source 1..20: mol_type = other DNA
tttttcctttatcatgtgac

SEQ ID NO: 23219 - DNA, 20 bp, synthetic construct
  misc_feature 1..20: note = chemically synthesized
  source 1..20: mol_type = other DNA
atatcagcatttaagtattg

SEQ ID NO: 23220 - DNA, 20 bp, synthetic construct
  misc_feature 1..20: note = chemically synthesized
  source 1..20: mol_type = other DNA
ttatgtaatagcatttgcaa

SEQ ID NO: 23221 - DNA, 20 bp, synthetic construct
  misc_feature 1..20: note = chemically synthesized
  source 1..20: mol_type = other DNA
gcattttcaattgcacgaag

SEQ ID NO: 23222 - DNA, 20 bp, synthetic construct
  misc_feature 1..20: note = chemically synthesized
  source 1..20: mol_type = other DNA
atggttaatactgagtgtca

SEQ ID NO: 23223 - DNA, 20 bp, synthetic construct
  misc_feature 1..20: note = chemically synthesized
  source 1..20: mol_type = other DNA
taatactgagtgtcaacttg

SEQ ID NO: 23224 - DNA, 20 bp, synthetic construct
  misc_feature 1..20: note = chemically synthesized
  source 1..20: mol_type = other DNA
gtctgtgagggtattgccaa

SEQ ID NO: 23225 - DNA, 20 bp, synthetic construct
  misc_feature 1..20: note = chemically synthesized
  source 1..20: mol_type = other DNA
aaaacatgtgaaaatcctgg

SEQ ID NO: 23226 - DNA, 20 bp, synthetic construct
  misc_feature 1..20: note = chemically synthesized
  source 1..20: mol_type = other DNA
ctacatctttctcccatgct

SEQ ID NO: 23227 - DNA, 20 bp, synthetic construct
  misc_feature 1..20: note = chemically synthesized
  source 1..20: mol_type = other DNA
aaacattggactccaagtcc

SEQ ID NO: 23228 - DNA, 20 bp, synthetic construct
  misc_feature 1..20: note = chemically synthesized
  source 1..20: mol_type = other DNA
ccttcagctttgggacttgg

SEQ ID NO: 23229 - DNA, 20 bp, synthetic construct
  misc_feature 1..20: note = chemically synthesized
  source 1..20: mol_type = other DNA
ttggactggcttccttgctc

SEQ ID NO: 23230 - DNA, 20 bp, synthetic construct
  misc_feature 1..20: note = chemically synthesized
  source 1..20: mol_type = other DNA
agatggcctattgtgggacc

SEQ ID NO: 23231 - DNA, 20 bp, synthetic construct
  misc_feature 1..20: note = chemically synthesized
  source 1..20: mol_type = other DNA
gtgaggatgtggagacaaga

SEQ ID NO: 23232 - DNA, 20 bp, synthetic construct
  misc_feature 1..20: note = chemically synthesized
  source 1..20: mol_type = other DNA
aaactttatggaagacagca

SEQ ID NO: 23233 - DNA, 20 bp, synthetic construct
  misc_feature 1..20: note = chemically synthesized
  source 1..20: mol_type = other DNA
caacctaaatgtctaccaat

SEQ ID NO: 23234 - DNA, 20 bp, synthetic construct
  misc_feature 1..20: note = chemically synthesized
  source 1..20: mol_type = other DNA
tatggtgaggactgaaaaac

SEQ ID NO: 23235 - DNA, 20 bp, synthetic construct
  misc_feature 1..20: note = chemically synthesized
  source 1..20: mol_type = other DNA
aacatacatatgtaaggaac

SEQ ID NO: 23236 - DNA, 20 bp, synthetic construct
  misc_feature 1..20: note = chemically synthesized
  source 1..20: mol_type = other DNA
aacccgagcttgtaccctga

SEQ ID NO: 23237 - DNA, 20 bp, synthetic construct
  misc_feature 1..20: note = chemically synthesized
  source 1..20: mol_type = other DNA
ataatcctcacgtgttgtgg

SEQ ID NO: 23238 - DNA, 20 bp, synthetic construct
  misc_feature 1..20: note = chemically synthesized
  source 1..20: mol_type = other DNA
agtgagttcttacaagatct

SEQ ID NO: 23239 - DNA, 20 bp, synthetic construct
  misc_feature 1..20: note = chemically synthesized
  source 1..20: mol_type = other DNA
caagatctgatggttttata

SEQ ID NO: 23240 - DNA, 20 bp, synthetic construct
  misc_feature 1..20: note = chemically synthesized
  source 1..20: mol_type = other DNA
ttataagcggcttttccccc

SEQ ID NO: 23241 - DNA, 20 bp, synthetic construct
  misc_feature 1..20: note = chemically synthesized
  source 1..20: mol_type = other DNA
ctgctgccatgtgaagaagg

SEQ ID NO: 23242 - DNA, 20 bp, synthetic construct
  misc_feature 1..20: note = chemically synthesized
  source 1..20: mol_type = other DNA
tgccatgtgaagaaggacat

SEQ ID NO: 23243 - DNA, 20 bp, synthetic construct
  misc_feature 1..20: note = chemically synthesized
  source 1..20: mol_type = other DNA
catgtttgtttcttcttctg

SEQ ID NO: 23244 - DNA, 20 bp, synthetic construct
  misc_feature 1..20: note = chemically synthesized
  source 1..20: mol_type = other DNA
tttcttcttctgccatgatt

SEQ ID NO: 23245 - DNA, 20 bp, synthetic construct
  misc_feature 1..20: note = chemically synthesized
  source 1..20: mol_type = other DNA
tgtggaactgtgagacaatt

SEQ ID NO: 23246 - DNA, 20 bp, synthetic construct
  misc_feature 1..20: note = chemically synthesized
  source 1..20: mol_type = other DNA
aaaaatataaaataaattag

SEQ ID NO: 23247 - DNA, 20 bp, synthetic construct
  misc_feature 1..20: note = chemically synthesized
  source 1..20: mol_type = other DNA
gagtgtgcaaggaaagagta

SEQ ID NO: 23248 - DNA, 20 bp, synthetic construct
  misc_feature 1..20: note = chemically synthesized
  source 1..20: mol_type = other DNA
gtgagaatacacaaataatc

SEQ ID NO: 23249 - DNA, 20 bp, synthetic construct
  misc_feature 1..20: note = chemically synthesized
  source 1..20: mol_type = other DNA
atattccatttcatcagact

SEQ ID NO: 23250 - DNA, 20 bp, synthetic construct
  misc_feature 1..20: note = chemically synthesized
  source 1..20: mol_type = other DNA
gatgctattatatggtacca

SEQ ID NO: 23251 - DNA, 20 bp, synthetic construct
  misc_feature 1..20: note = chemically synthesized
  source 1..20: mol_type = other DNA
taagaatttcatctttaagg

SEQ ID NO: 23252 - DNA, 20 bp, synthetic construct
  misc_feature 1..20: note = chemically synthesized
  source 1..20: mol_type = other DNA
agttttttactgtatcaaaa

SEQ ID NO: 23253 - DNA, 20 bp, synthetic construct
  misc_feature 1..20: note = chemically synthesized
  source 1..20: mol_type = other DNA
tctagactggacaagaacag

SEQ ID NO: 23254 - DNA, 20 bp, synthetic construct
  misc_feature 1..20: note = chemically synthesized
  source 1..20: mol_type = other DNA
agcaacatatttaaatatat

SEQ ID NO: 23255 - DNA, 20 bp, synthetic construct
  misc_feature 1..20: note = chemically synthesized
  source 1..20: mol_type = other DNA
cttttccaggagaatatacc

SEQ ID NO: 23256 - DNA, 20 bp, synthetic construct
  misc_feature 1..20: note = chemically synthesized
  source 1..20: mol_type = other DNA
tctgatggtacacatttatt

SEQ ID NO: 23257 - DNA, 20 bp, synthetic construct
  misc_feature 1..20: note = chemically synthesized
  source 1..20: mol_type = other DNA
actcagagatcttaaaacat

SEQ ID NO: 23258 - DNA, 20 bp, synthetic construct
  misc_feature 1..20: note = chemically synthesized
  source 1..20: mol_type = other DNA
atcttaaaacatccttgttt

SEQ ID NO: 23259 - DNA, 20 bp, synthetic construct
  misc_feature 1..20: note = chemically synthesized
  source 1..20: mol_type = other DNA
tgaagaacataagggggaaa

SEQ ID NO: 23260 - DNA, 20 bp, synthetic construct
  misc_feature 1..20: note = chemically synthesized
  source 1..20: mol_type = other DNA
gattctttatttgaagaaac

SEQ ID NO: 23261 - DNA, 20 bp, synthetic construct
  misc_feature 1..20: note = chemically synthesized
  source 1..20: mol_type = other DNA
tttatttgaagaaacaaatg

SEQ ID NO: 23262 - DNA, 20 bp, synthetic construct
  misc_feature 1..20: note = chemically synthesized
  source 1..20: mol_type = other DNA
tagtcccccatatagcctta

SEQ ID NO: 23263 - DNA, 20 bp, synthetic construct
  misc_feature 1..20: note = chemically synthesized
  source 1..20: mol_type = other DNA
atagccttagagtgtttaaa

SEQ ID NO: 23264 - DNA, 20 bp, synthetic construct
  misc_feature 1..20: note = chemically synthesized
  source 1..20: mol_type = other DNA
gtctattagaaataaaaaca

SEQ ID NO: 23265 - DNA, 20 bp, synthetic construct
  misc_feature 1..20: note = chemically synthesized
  source 1..20: mol_type = other DNA
gcttaaaaaatttcaaggga

SEQ ID NO: 23266 - DNA, 20 bp, synthetic construct
  misc_feature 1..20: note = chemically synthesized
  source 1..20: mol_type = other DNA
aaatttcaagggaaggggct

SEQ ID NO: 23267 - DNA, 20 bp, synthetic construct
  misc_feature 1..20: note = chemically synthesized
  source 1..20: mol_type = other DNA
ctgaggtcaggaacacccag

SEQ ID NO: 23268 - DNA, 20 bp, synthetic construct
  misc_feature 1..20: note = chemically synthesized
  source 1..20: mol_type = other DNA
ccaccaccaacaccagtgca

SEQ ID NO: 23269 - DNA, 20 bp, synthetic construct
  misc_feature 1..20: note = chemically synthesized
  source 1..20: mol_type = other DNA
aaacagaaattctgtaactg

SEQ ID NO: 23270 - DNA, 20 bp, synthetic construct
  misc_feature 1..20: note = chemically synthesized
  source 1..20: mol_type = other DNA
agtgaacaaatattcaaatt

SEQ ID NO: 23271 - DNA, 20 bp, synthetic construct
  misc_feature 1..20: note = chemically synthesized
  source 1..20: mol_type = other DNA
tcacttataagggaacttcc

SEQ ID NO: 23272 - DNA, 20 bp, synthetic construct
  misc_feature 1..20: note = chemically synthesized
  source 1..20: mol_type = other DNA
aagggaacttccacaagatt

SEQ ID NO: 23273 - DNA, 20 bp, synthetic construct
  misc_feature 1..20: note = chemically synthesized
  source 1..20: mol_type = other DNA
cacaagattaacagattaac

SEQ ID NO: 23274 - DNA, 20 bp, synthetic construct
  misc_feature 1..20: note = chemically synthesized
  source 1..20: mol_type = other DNA
aaggaattcactatcactag

SEQ ID NO: 23275 - DNA, 20 bp, synthetic construct
  misc_feature 1..20: note = chemically synthesized
  source 1..20: mol_type = other DNA
caataatagccttgcatgta

SEQ ID NO: 23276 - DNA, 20 bp, synthetic construct
  misc_feature 1..20: note = chemically synthesized
  source 1..20: mol_type = other DNA
tgaaagatatagactggcta

SEQ ID NO: 23277 - DNA, 20 bp, synthetic construct
  misc_feature 1..20: note = chemically synthesized
  source 1..20: mol_type = other DNA
gaatccaatacaataatagt

SEQ ID NO: 23278 - DNA, 20 bp, synthetic construct
  misc_feature 1..20: note = chemically synthesized
  source 1..20: mol_type = other DNA
cagaaaattaacaaagaaac

SEQ ID NO: 23279 - DNA, 20 bp, synthetic construct
  misc_feature 1..20: note = chemically synthesized
  source 1..20: mol_type = other DNA
agcaaaagcagtgctaagag

SEQ ID NO: 23280 - DNA, 20 bp, synthetic construct
  misc_feature 1..20: note = chemically synthesized
  source 1..20: mol_type = other DNA
acacttaaattaaaaacata

SEQ ID NO: 23281 - DNA, 20 bp, synthetic construct
  misc_feature 1..20: note = chemically synthesized
  source 1..20: mol_type = other DNA
aaatagagaaaaacaacaac

SEQ ID NO: 23282 - DNA, 20 bp, synthetic construct
  misc_feature 1..20: note = chemically synthesized
  source 1..20: mol_type = other DNA
aaccgataccacagaaatag

SEQ ID NO: 23283 - DNA, 20 bp, synthetic construct
  misc_feature 1..20: note = chemically synthesized
  source 1..20: mol_type = other DNA
ttctggacacataccaccta

SEQ ID NO: 23284 - DNA, 20 bp, synthetic construct
  misc_feature 1..20: note = chemically synthesized
  source 1..20: mol_type = other DNA
aaaagaaaatttcaagacca

SEQ ID NO: 23285 - DNA, 20 bp, synthetic construct
  misc_feature 1..20: note = chemically synthesized
  source 1..20: mol_type = other DNA
attctctgaggccagtatta

SEQ ID NO: 23286 - DNA, 20 bp, synthetic construct
  misc_feature 1..20: note = chemically synthesized
  source 1..20: mol_type = other DNA
agataatacaccatgatcaa

SEQ ID NO: 23287 - DNA, 20 bp, synthetic construct
  misc_feature 1..20: note = chemically synthesized
  source 1..20: mol_type = other DNA
ataatactggaagtcctagc

SEQ ID NO: 23288 - DNA, 20 bp, synthetic construct
  misc_feature 1..20: note = chemically synthesized
  source 1..20: mol_type = other DNA
actgtccatctttccagatg

SEQ ID NO: 23289 - DNA, 20 bp, synthetic construct
  misc_feature 1..20: note = chemically synthesized
  source 1..20: mol_type = other DNA
aaatcagcatatgaaacaag

SEQ ID NO: 23290 - DNA, 20 bp, synthetic construct
  misc_feature 1..20: note = chemically synthesized
  source 1..20: mol_type = other DNA
ccatactacccaaagcaatc

SEQ ID NO: 23291 - DNA, 20 bp, synthetic construct
  misc_feature 1..20: note = chemically synthesized
  source 1..20: mol_type = other DNA
aatgctagaggtatcatact

SEQ ID NO: 23292 - DNA, 20 bp, synthetic construct
  misc_feature 1..20: note = chemically synthesized
  source 1..20: mol_type = other DNA
gcatccacatatttatagcc

SEQ ID NO: 23293 - DNA, 20 bp, synthetic construct
  misc_feature 1..20: note = chemically synthesized
  source 1..20: mol_type = other DNA
gaataaaactggactgctga

SEQ ID NO: 23294 - DNA, 20 bp, synthetic construct
  misc_feature 1..20: note = chemically synthesized
  source 1..20: mol_type = other DNA
ctggactgctgatatggttt

SEQ ID NO: 23295 - DNA, 20 bp, synthetic construct
  misc_feature 1..20: note = chemically synthesized
  source 1..20: mol_type = other DNA
cttggcggatgggaggtagg

SEQ ID NO: 23296 - DNA, 20 bp, synthetic construct
  misc_feature 1..20: note = chemically synthesized
  source 1..20: mol_type = other DNA
cccacagaccctctgaagga

SEQ ID NO: 23297 - DNA, 20 bp, synthetic construct
  misc_feature 1..20: note = chemically synthesized
  source 1..20: mol_type = other DNA
tcccactggagaaactgaag

SEQ ID NO: 23298 - DNA, 20 bp, synthetic construct
  misc_feature 1..20: note = chemically synthesized
  source 1..20: mol_type = other DNA
actgaaggtctgtttgtggg

SEQ ID NO: 23299 - DNA, 20 bp, synthetic construct
  misc_feature 1..20: note = chemically synthesized
  source 1..20: mol_type = other DNA
cagaaagtcaacaaaaaaat

SEQ ID NO: 23300 - DNA, 20 bp, synthetic construct
  misc_feature 1..20: note = chemically synthesized
  source 1..20: mol_type = other DNA
taacagaccaataacaagca

SEQ ID NO: 23301 - DNA, 20 bp, synthetic construct
  misc_feature 1..20: note = chemically synthesized
  source 1..20: mol_type = other DNA
caaaaaaaagttcaggacca

SEQ ID NO: 23302 - DNA, 20 bp, synthetic construct
  misc_feature 1..20: note = chemically synthesized
  source 1..20: mol_type = other DNA
ttccatgccagggatgcagg

SEQ ID NO: 23303 - DNA, 20 bp, synthetic construct
  misc_feature 1..20: note = chemically synthesized
  source 1..20: mol_type = other DNA
taagtgtgatacaccacata

SEQ ID NO: 23304 - DNA, 20 bp, synthetic construct
  misc_feature 1..20: note = chemically synthesized
  source 1..20: mol_type = other DNA
caacaaaatccagcatacat

SEQ ID NO: 23305 - DNA, 20 bp, synthetic construct
  misc_feature 1..20: note = chemically synthesized
  source 1..20: mol_type = other DNA
taaagaggaagtcaaactgt

SEQ ID NO: 23306 - DNA, 20 bp, synthetic construct
  misc_feature 1..20: note = chemically synthesized
  source 1..20: mol_type = other DNA
gaactgataaaataattcag

SEQ ID NO: 23307 - DNA, 20 bp, synthetic construct
  misc_feature 1..20: note = chemically synthesized
  source 1..20: mol_type = other DNA
catataaaacgtactctcaa

SEQ ID NO: 23308 - DNA, 20 bp, synthetic construct
  misc_feature 1..20: note = chemically synthesized
  source 1..20: mol_type = other DNA
ataagggagacacttcaaga

SEQ ID NO: 23309 - DNA, 20 bp, synthetic construct
  misc_feature 1..20: note = chemically synthesized
  source 1..20: mol_type = other DNA
cttcaagacatggctttggg

SEQ ID NO: 23310 - DNA, 20 bp, synthetic construct
  misc_feature 1..20: note = chemically synthesized
  source 1..20: mol_type = other DNA
tcttatgccagttagaatca

SEQ ID NO: 23311 - DNA, 20 bp, synthetic construct
  misc_feature 1..20: note = chemically synthesized
  source 1..20: mol_type = other DNA
agccactatggaaaacaata

SEQ ID NO: 23312 - DNA, 20 bp, synthetic construct
  misc_feature 1..20: note = chemically synthesized
  source 1..20: mol_type = other DNA
ataaacagatactggtacca

SEQ ID NO: 23313 - DNA, 20 bp, synthetic construct
  misc_feature 1..20: note = chemically synthesized
  source 1..20: mol_type = other DNA
gtaccacactgtttattgca

SEQ ID NO: 23314 - DNA, 20 bp, synthetic construct
  misc_feature 1..20: note = chemically synthesized
  source 1..20: mol_type = other DNA
tgatgttcaatagcaaagta

SEQ ID NO: 23315 - DNA, 20 bp, synthetic construct
  misc_feature 1..20: note = chemically synthesized
  source 1..20: mol_type = other DNA
tcgatctcatattggttgag

SEQ ID NO: 23316 - DNA, 20 bp, synthetic construct
  misc_feature 1..20: note = chemically synthesized
  source 1..20: mol_type = other DNA
ccctgtactgtcttgctgtg

SEQ ID NO: 23317 - DNA, 20 bp, synthetic construct
  misc_feature 1..20: note = chemically synthesized
  source 1..20: mol_type = other DNA
tgtcctccccatatttttac

SEQ ID NO: 23318 - DNA, 20 bp, synthetic construct
  misc_feature 1..20: note = chemically synthesized
  source 1..20: mol_type = other DNA
catatttttacctcggtttt

SEQ ID NO: 23319 - DNA, 20 bp, synthetic construct
  misc_feature 1..20: note = chemically synthesized
  source 1..20: mol_type = other DNA
ttatatagcacactttgtgc

SEQ ID NO: 23320 - DNA, 20 bp, synthetic construct
  misc_feature 1..20: note = chemically synthesized
  source 1..20: mol_type = other DNA
cactttgtgctatagtttac

SEQ ID NO: 23321 - DNA, 20 bp, synthetic construct
  misc_feature 1..20: note = chemically synthesized
  source 1..20: mol_type = other DNA
catatttgaggtataaacca

SEQ ID NO: 23322 - DNA, 20 bp, synthetic construct
  misc_feature 1..20: note = chemically synthesized
  source 1..20: mol_type = other DNA
tatttttaaatctgcaaata

SEQ ID NO: 23323 - DNA, 20 bp, synthetic construct
  misc_feature 1..20: note = chemically synthesized
  source 1..20: mol_type = other DNA
acttaatatcattaatgaat

SEQ ID NO: 23324 - DNA, 20 bp, synthetic construct
  misc_feature 1..20: note = chemically synthesized
  source 1..20: mol_type = other DNA
ttcctggaacaacatggggg

SEQ ID NO: 23325 - DNA, 20 bp, synthetic construct
  misc_feature 1..20: note = chemically synthesized
  source 1..20: mol_type = other DNA
gagaaatttcactattttgt

SEQ ID NO: 23326 - DNA, 20 bp, synthetic construct
  misc_feature 1..20: note = chemically synthesized
  source 1..20: mol_type = other DNA
aggcagcaggtctggtagga

SEQ ID NO: 23327 - DNA, 20 bp, synthetic construct
  misc_feature 1..20: note = chemically synthesized
  source 1..20: mol_type = other DNA
tgaaaaggaagtgagtagac

SEQ ID NO: 23328 - DNA, 20 bp, synthetic construct
  misc_feature 1..20: note = chemically synthesized
  source 1..20: mol_type = other DNA
cttgaagctgtgcaaccaag

SEQ ID NO: 23329 - DNA, 20 bp, synthetic construct
  misc_feature 1..20: note = chemically synthesized
  source 1..20: mol_type = other DNA
gcatagtttttacatagatc

SEQ ID NO: 23330 - DNA, 20 bp, synthetic construct
  misc_feature 1..20: note = chemically synthesized
  source 1..20: mol_type = other DNA
tgtgtttcacatggtgtgat

SEQ ID NO: 23331 - DNA, 20 bp, synthetic construct
  misc_feature 1..20: note = chemically synthesized
  source 1..20: mol_type = other DNA
agatgccattgacatggccc

SEQ ID NO: 23332 - DNA, 20 bp, synthetic construct
  misc_feature 1..20: note = chemically synthesized
  source 1..20: mol_type = other DNA
aatcctaattactatgcatc

SEQ ID NO: 23333 - DNA, 20 bp, synthetic construct
  misc_feature 1..20: note = chemically synthesized
  source 1..20: mol_type = other DNA
ttttcctattatttctcttt

SEQ ID NO: 23334 - DNA, 20 bp, synthetic construct
  misc_feature 1..20: note = chemically synthesized
  source 1..20: mol_type = other DNA
gaaataagctaatacctaca

SEQ ID NO: 23335 - DNA, 20 bp, synthetic construct
  misc_feature 1..20: note = chemically synthesized
  source 1..20: mol_type = other DNA
taaatgctaggcacagttct

SEQ ID NO: 23336 - DNA, 20 bp, synthetic construct
  misc_feature 1..20: note = chemically synthesized
  source 1..20: mol_type = other DNA
attttcacaacattattaca

SEQ ID NO: 23337 - DNA, 20 bp, synthetic construct
  misc_feature 1..20: note = chemically synthesized
  source 1..20: mol_type = other DNA
agcaacaaattgatggatct

SEQ ID NO: 23338 - DNA, 20 bp, synthetic construct
  misc_feature 1..20: note = chemically synthesized
  source 1..20: mol_type = other DNA
aaattgatggatctttttgc

SEQ ID NO: 23339 - DNA, 20 bp, synthetic construct
  misc_feature 1..20: note = chemically synthesized
  source 1..20: mol_type = other DNA
tgatggatctttttgctttt

SEQ ID NO: 23340 - DNA, 20 bp, synthetic construct
  misc_feature 1..20: note = chemically synthesized
  source 1..20: mol_type = other DNA
ggatctttttgcttttgctt

SEQ ID NO: 23341 - DNA, 20 bp, synthetic construct
  misc_feature 1..20: note = chemically synthesized
  source 1..20: mol_type = other DNA
actgaagcctcactagaacg

SEQ ID NO: 23342 - DNA, 20 bp, synthetic construct
  misc_feature 1..20: note = chemically synthesized
  source 1..20: mol_type = other DNA
cgcctggattcaattgatcc

SEQ ID NO: 23343 - DNA, 20 bp, synthetic construct
  misc_feature 1..20: note = chemically synthesized
  source 1..20: mol_type = other DNA
cacctcagccttgaaaagtg

SEQ ID NO: 23344 - DNA, 20 bp, synthetic construct
  misc_feature 1..20: note = chemically synthesized
  source 1..20: mol_type = other DNA
aatttttagatataatttct

SEQ ID NO: 23345 - DNA, 20 bp, synthetic construct
  misc_feature 1..20: note = chemically synthesized
  source 1..20: mol_type = other DNA
tcttccataaccactttgac

SEQ ID NO: 23346 - DNA, 20 bp, synthetic construct
  misc_feature 1..20: note = chemically synthesized
  source 1..20: mol_type = other DNA
taaattatgtccagcaatac

SEQ ID NO: 23347 - DNA, 20 bp, synthetic construct
  misc_feature 1..20: note = chemically synthesized
  source 1..20: mol_type = other DNA
cgttggcttaggcaaaaaca

SEQ ID NO: 23348 - DNA, 20 bp, synthetic construct
  misc_feature 1..20: note = chemically synthesized
  source 1..20: mol_type = other DNA
ccttaacatgttaatttctc

SEQ ID NO: 23349 - DNA, 20 bp, synthetic construct
  misc_feature 1..20: note = chemically synthesized
  source 1..20: mol_type = other DNA
tgagcaagtgtgtgcagaag

SEQ ID NO: 23350 - DNA, 20 bp, synthetic construct
  misc_feature 1..20: note = chemically synthesized
  source 1..20: mol_type = other DNA
tcctctccctcaactggtaa

SEQ ID NO: 23351 - DNA, 20 bp, synthetic construct
  misc_feature 1..20: note = chemically synthesized
  source 1..20: mol_type = other DNA
cttaaggctattaactcccc

SEQ ID NO: 23352 - DNA, 20 bp, synthetic construct
  misc_feature 1..20: note = chemically synthesized
  source 1..20: mol_type = other DNA
atatatagttctctcacata

SEQ ID NO: 23353 - DNA, 20 bp, synthetic construct
  misc_feature 1..20: note = chemically synthesized
  source 1..20: mol_type = other DNA
ctcaaacatctcatcattag

SEQ ID NO: 23354 - DNA, 20 bp, synthetic construct
  misc_feature 1..20: note = chemically synthesized
  source 1..20: mol_type = other DNA
tctacaaatttgtcaattct

SEQ ID NO: 23355 - DNA, 20 bp, synthetic construct
  misc_feature 1..20: note = chemically synthesized
  source 1..20: mol_type = other DNA
gaatccttactgaataataa

SEQ ID NO: 23356 - DNA, 20 bp, synthetic construct
  misc_feature 1..20: note = chemically synthesized
  source 1..20: mol_type = other DNA
aactgtgactctctcatctg

SEQ ID NO: 23357 - DNA, 20 bp, synthetic construct
  misc_feature 1..20: note = chemically synthesized
  source 1..20: mol_type = other DNA
tctctcatctgttatgtttt

SEQ ID NO: 23358 - DNA, 20 bp, synthetic construct
  misc_feature 1..20: note = chemically synthesized
  source 1..20: mol_type = other DNA
atgggcaaaattctggcagc

SEQ ID NO: 23359 - DNA, 20 bp, synthetic construct
  misc_feature 1..20: note = chemically synthesized
  source 1..20: mol_type = other DNA
gattcttctcctaagaaacc

SEQ ID NO: 23360 - DNA, 20 bp, synthetic construct
  misc_feature 1..20: note = chemically synthesized
  source 1..20: mol_type = other DNA
tcttggatgtgaatacattt

SEQ ID NO: 23361 - DNA, 20 bp, synthetic construct
  misc_feature 1..20: note = chemically synthesized
  source 1..20: mol_type = other DNA
tattcatgaagaaactgtta

SEQ ID NO: 23362 - DNA, 20 bp, synthetic construct
  misc_feature 1..20: note = chemically synthesized
  source 1..20: mol_type = other DNA
gtttaaggggttctttttca

SEQ ID NO: 23363 - DNA, 20 bp, synthetic construct
  misc_feature 1..20: note = chemically synthesized
  source 1..20: mol_type = other DNA
aggacatttcctttgaaaac

SEQ ID NO: 23364 - DNA, 20 bp, synthetic construct
  misc_feature 1..20: note = chemically synthesized
  source 1..20: mol_type = other DNA
atcctggtcctaactctgcc

SEQ ID NO: 23365 - DNA, 20 bp, synthetic construct
  misc_feature 1..20: note = chemically synthesized
  source 1..20: mol_type = other DNA
ttgctctatgaactggagga

SEQ ID NO: 23366 - DNA, 20 bp, synthetic construct
  misc_feature 1..20: note = chemically synthesized
  source 1..20: mol_type = other DNA
gatagaaaataagtattaaa

SEQ ID NO: 23367 - DNA, 20 bp, synthetic construct
  misc_feature 1..20: note = chemically synthesized
  source 1..20: mol_type = other DNA
cctgagatcaacacacatgc

SEQ ID NO: 23368 - DNA, 20 bp, synthetic construct
  misc_feature 1..20: note = chemically synthesized
  source 1..20: mol_type = other DNA
ttataagatccataaaataa

SEQ ID NO: 23369 - DNA, 20 bp, synthetic construct
  misc_feature 1..20: note = chemically synthesized
  source 1..20: mol_type = other DNA
cccaggtaacagtgctccat

SEQ ID NO: 23370 - DNA, 20 bp, synthetic construct
  misc_feature 1..20: note = chemically synthesized
  source 1..20: mol_type = other DNA
acttgtgcagagatcttctg

SEQ ID NO: 23371 - DNA, 20 bp, synthetic construct
  misc_feature 1..20: note = chemically synthesized
  source 1..20: mol_type = other DNA
cccagtgctaacaagtccct

SEQ ID NO: 23372 - DNA, 20 bp, synthetic construct
  misc_feature 1..20: note = chemically synthesized
  source 1..20: mol_type = other DNA
cttttatttcaaggcatact

SEQ ID NO: 23373 - DNA, 20 bp, synthetic construct
  misc_feature 1..20: note = chemically synthesized
  source 1..20: mol_type = other DNA
aatacttcacttctctgtaa

SEQ ID NO: 23374 - DNA, 20 bp, synthetic construct
  misc_feature 1..20: note = chemically synthesized
  source 1..20: mol_type = other DNA
tgtaataaggtttctgtcct

SEQ ID NO: 23375 - DNA, 20 bp, synthetic construct
  misc_feature 1..20: note = chemically synthesized
  source 1..20: mol_type = other DNA
ctaaactacagagaataaga

SEQ ID NO: 23376 - DNA, 20 bp, synthetic construct
  misc_feature 1..20: note = chemically synthesized
  source 1..20: mol_type = other DNA
taggcaaaattgacttttaa

SEQ ID NO: 23377 - DNA, 20 bp, synthetic construct
  misc_feature 1..20: note = chemically synthesized
  source 1..20: mol_type = other DNA
aacagttagtataaggtgaa

SEQ ID NO: 23378 - DNA, 20 bp, synthetic construct
  misc_feature 1..20: note = chemically synthesized
  source 1..20: mol_type = other DNA
catatataatgcatttaatt

SEQ ID NO: 23379 - DNA, 20 bp, synthetic construct
  misc_feature 1..20: note = chemically synthesized
  source 1..20: mol_type = other DNA
taattttgagattatgctgg

SEQ ID NO: 23380 - DNA, 20 bp, synthetic construct
  misc_feature 1..20: note = chemically synthesized
  source 1..20: mol_type = other DNA
ctggttattatttcagatcc

SEQ ID NO: 23381 - DNA, 20 bp, synthetic construct
  misc_feature 1..20: note = chemically synthesized
  source 1..20: mol_type = other DNA
caacacatgacataatttca

SEQ ID NO: 23382 - DNA, 20 bp, synthetic construct
  misc_feature 1..20: note = chemically synthesized
  source 1..20: mol_type = other DNA
tgccatttacccagcaatca

SEQ ID NO: 23383 - DNA, 20 bp, synthetic construct
  misc_feature 1..20: note = chemically synthesized
  source 1..20: mol_type = other DNA
atttacccagcaatcagttg

SEQ ID NO: 23384 - DNA, 20 bp, synthetic construct
  misc_feature 1..20: note = chemically synthesized
  source 1..20: mol_type = other DNA
gagagtataaacccacaagg

SEQ ID NO: 23385 - DNA, 20 bp, synthetic construct
  misc_feature 1..20: note = chemically synthesized
  source 1..20: mol_type = other DNA
gaggttatacctcactcgca

SEQ ID NO: 23386 - DNA, 20 bp, synthetic construct
  misc_feature 1..20: note = chemically synthesized
  source 1..20: mol_type = other DNA
actcgcaaattgttttatca

SEQ ID NO: 23387 - DNA, 20 bp, synthetic construct
  misc_feature 1..20: note = chemically synthesized
  source 1..20: mol_type = other DNA
ttactaacagaatgtagagt

SEQ ID NO: 23388 - DNA, 20 bp, synthetic construct
  misc_feature 1..20: note = chemically synthesized
  source 1..20: mol_type = other DNA
atatacatcttcctaaaata

SEQ ID NO: 23389 - DNA, 20 bp, synthetic construct
  misc_feature 1..20: note = chemically synthesized
  source 1..20: mol_type = other DNA
ttatttctatgttgtcataa

SEQ ID NO: 23390 - DNA, 20 bp, synthetic construct
  misc_feature 1..20: note = chemically synthesized
  source 1..20: mol_type = other DNA
aaatgtagcctaaatatata

SEQ ID NO: 23391 - DNA, 20 bp, synthetic construct
  misc_feature 1..20: note = chemically synthesized
  source 1..20: mol_type = other DNA
cctaaatatatattccgttt

SEQ ID NO: 23392 - DNA, 20 bp, synthetic construct
  misc_feature 1..20: note = chemically synthesized
  source 1..20: mol_type = other DNA
cctccgagactcctttgaat

SEQ ID NO: 23393 - DNA, 20 bp, synthetic construct
  misc_feature 1..20: note = chemically synthesized
  source 1..20: mol_type = other DNA
agttagagttggtagagtta

SEQ ID NO: 23394 - DNA, 20 bp, synthetic construct
  misc_feature 1..20: note = chemically synthesized
  source 1..20: mol_type = other DNA
tggtagagttaccaggcttt

SEQ ID NO: 23395 - DNA, 20 bp, synthetic construct
  misc_feature 1..20: note = chemically synthesized
  source 1..20: mol_type = other DNA
aactagtagcatgaaatctt

SEQ ID NO: 23396 - DNA, 20 bp, synthetic construct
  misc_feature 1..20: note = chemically synthesized
  source 1..20: mol_type = other DNA
aggaattctgtgggaagcac

SEQ ID NO: 23397 - DNA, 20 bp, synthetic construct
  misc_feature 1..20: note = chemically synthesized
  source 1..20: mol_type = other DNA
agcacataagatttcatgct

SEQ ID NO: 23398 - DNA, 20 bp, synthetic construct
  misc_feature 1..20: note = chemically synthesized
  source 1..20: mol_type = other DNA
tgcctgtaagttctcttctc

SEQ ID NO: 23399 - DNA, 20 bp, synthetic construct
  misc_feature 1..20: note = chemically synthesized
  source 1..20: mol_type = other DNA
gtctcggaggactgtaagaa

SEQ ID NO: 23400 - DNA, 20 bp, synthetic construct
  misc_feature 1..20: note = chemically synthesized
  source 1..20: mol_type = other DNA
cctctctgtaacatccctgg

SEQ ID NO: 23401 - DNA, 20 bp, synthetic construct
  misc_feature 1..20: note = chemically synthesized
  source 1..20: mol_type = other DNA
gaggagttactgctctttga

SEQ ID NO: 23402 - DNA, 20 bp, synthetic construct
  misc_feature 1..20: note = chemically synthesized
  source 1..20: mol_type = other DNA
ttgcttgggaagtgaccaat

SEQ ID NO: 23403 - DNA, 20 bp, synthetic construct
  misc_feature 1..20: note = chemically synthesized
  source 1..20: mol_type = other DNA
aggtgactgaggaatgtaga

SEQ ID NO: 23404 - DNA, 20 bp, synthetic construct
  misc_feature 1..20: note = chemically synthesized
  source 1..20: mol_type = other DNA
aaaaagttaatatttacatt

SEQ ID NO: 23405 - DNA, 20 bp, synthetic construct
  misc_feature 1..20: note = chemically synthesized
  source 1..20: mol_type = other DNA
tttattttaggaagatgtat

SEQ ID NO: 23406 - DNA, 20 bp, synthetic construct
  misc_feature 1..20: note = chemically synthesized
  source 1..20: mol_type = other DNA
attctgttagtaattatatg

SEQ ID NO: 23407 - DNA, 20 bp, synthetic construct
  misc_feature 1..20: note = chemically synthesized
  source 1..20: mol_type = other DNA
taattatatgaaatgcttaa

SEQ ID NO: 23408 - DNA, 20 bp, synthetic construct
  misc_feature 1..20: note = chemically synthesized
  source 1..20: mol_type = other DNA
aagaatgtttcatattcaca

SEQ ID NO: 23409 - DNA, 20 bp, synthetic construct
  misc_feature 1..20: note = chemically synthesized
  source 1..20: mol_type = other DNA
attcacaattagcttggaat

SEQ ID NO: 23410 - DNA, 20 bp, synthetic construct
  misc_feature 1..20: note = chemically synthesized
  source 1..20: mol_type = other DNA
tggaattaatgttttaattc

SEQ ID NO: 23411 - DNA, 20 bp, synthetic construct
  misc_feature 1..20: note = chemically synthesized
  source 1..20: mol_type = other DNA
agtaatttttttcttcaatg

SEQ ID NO: 23412 - DNA, 20 bp, synthetic construct
  misc_feature 1..20: note = chemically synthesized
  source 1..20: mol_type = other DNA
aaggtagagaaccacaatgt

SEQ ID NO: 23413 - DNA, 20 bp, synthetic construct
  misc_feature 1..20: note = chemically synthesized
  source 1..20: mol_type = other DNA
aaattataaaacaattcctt

SEQ ID NO: 23414 - DNA, 20 bp, synthetic construct
  misc_feature 1..20: note = chemically synthesized
  source 1..20: mol_type = other DNA
ttccttgtgggtttatactc

SEQ ID NO: 23415 - DNA, 20 bp, synthetic construct
  misc_feature 1..20: note = chemically synthesized
  source 1..20: mol_type = other DNA
aacattagcaaagaaaaagt

SEQ ID NO: 23416 - DNA, 20 bp, synthetic construct
  misc_feature 1..20: note = chemically synthesized
  source 1..20: mol_type = other DNA
agatcttgaagaatcaagcc

SEQ ID NO: 23417 - DNA, 20 bp, synthetic construct
  misc_feature 1..20: note = chemically synthesized
  source 1..20: mol_type = other DNA
gtaaatggcagtgatgactt

SEQ ID NO: 23418 - DNA, 20 bp, synthetic construct
  misc_feature 1..20: note = chemically synthesized
  source 1..20: mol_type = other DNA
taacacatttatttttcatt

SEQ ID NO: 23419 - DNA, 20 bp, synthetic construct
  misc_feature 1..20: note = chemically synthesized
  source 1..20: mol_type = other DNA
caaagcacggtcttattctc

SEQ ID NO: 23420 - DNA, 20 bp, synthetic construct
  misc_feature 1..20: note = chemically synthesized
  source 1..20: mol_type = other DNA
aagtgaagtattttatgtgt

SEQ ID NO: 23421 - DNA, 20 bp, synthetic construct
  misc_feature 1..20: note = chemically synthesized
  source 1..20: mol_type = other DNA
attttatgtgtacctgtttc

SEQ ID NO: 23422 - DNA, 20 bp, synthetic construct
  misc_feature 1..20: note = chemically synthesized
  source 1..20: mol_type = other DNA
atctttatcctgaaatgagc

SEQ ID NO: 23423 - DNA, 20 bp, synthetic construct
  misc_feature 1..20: note = chemically synthesized
  source 1..20: mol_type = other DNA
ctagtcacaaatttttccag

SEQ ID NO: 23424 - DNA, 20 bp, synthetic construct
  misc_feature 1..20: note = chemically synthesized
  source 1..20: mol_type = other DNA
cccggagtatgccttgaaat

SEQ ID NO: 23425 - DNA, 20 bp, synthetic construct
  misc_feature 1..20: note = chemically synthesized
  source 1..20: mol_type = other DNA
agtgggcaggagctcaagga

SEQ ID NO: 23426 - DNA, 20 bp, synthetic construct
  misc_feature 1..20: note = chemically synthesized
  source 1..20: mol_type = other DNA
ctgcacctgagcagagcccc

SEQ ID NO: 23427 - DNA, 20 bp, synthetic construct
  misc_feature 1..20: note = chemically synthesized
  source 1..20: mol_type = other DNA
ctggtacatagaaaatgctc

SEQ ID NO: 23428 - DNA, 20 bp, synthetic construct
  misc_feature 1..20: note = chemically synthesized
  source 1..20: mol_type = other DNA
atggatttttttttgaaaaa

SEQ ID NO: 23429 - DNA, 20 bp, synthetic construct
  misc_feature 1..20: note = chemically synthesized
  source 1..20: mol_type = other DNA
ttccctttcaaggggaaggg

SEQ ID NO: 23430 - DNA, 20 bp, synthetic construct
  misc_feature 1..20: note = chemically synthesized
  source 1..20: mol_type = other DNA
tttgtggagaggtccccaca

SEQ ID NO: 23431 - DNA, 20 bp, synthetic construct
  misc_feature 1..20: note = chemically synthesized
  source 1..20: mol_type = other DNA
ttaatattatcatagcctgg

SEQ ID NO: 23432 - DNA, 20 bp, synthetic construct
  misc_feature 1..20: note = chemically synthesized
  source 1..20: mol_type = other DNA
ttatcatagcctggtatggt

SEQ ID NO: 23433 - DNA, 20 bp, synthetic construct
  misc_feature 1..20: note = chemically synthesized
  source 1..20: mol_type = other DNA
ttcatatagatggataatta

SEQ ID NO: 23434 - DNA, 20 bp, synthetic construct
  misc_feature 1..20: note = chemically synthesized
  source 1..20: mol_type = other DNA
tcctaataatacattgccac

SEQ ID NO: 23435 - DNA, 20 bp, synthetic construct
  misc_feature 1..20: note = chemically synthesized
  source 1..20: mol_type = other DNA
cactatagtttctttaaatt

SEQ ID NO: 23436 - DNA, 20 bp, synthetic construct
  misc_feature 1..20: note = chemically synthesized
  source 1..20: mol_type = other DNA
ctcctccagttcatagagca

SEQ ID NO: 23437 - DNA, 20 bp, synthetic construct
  misc_feature 1..20: note = chemically synthesized
  source 1..20: mol_type = other DNA
agcaaatggcagagttagga

SEQ ID NO: 23438 - DNA, 20 bp, synthetic construct
  misc_feature 1..20: note = chemically synthesized
  source 1..20: mol_type = other DNA
taagaattaaatattaaaac

SEQ ID NO: 23439 - DNA, 20 bp, synthetic construct
  misc_feature 1..20: note = chemically synthesized
  source 1..20: mol_type = other DNA
cagtacttgcagtcaaaggt

SEQ ID NO: 23440 - DNA, 20 bp, synthetic construct
  misc_feature 1..20: note = chemically synthesized
  source 1..20: mol_type = other DNA
aagaaccccttaaactgaat

SEQ ID NO: 23441 - DNA, 20 bp, synthetic construct
  misc_feature 1..20: note = chemically synthesized
  source 1..20: mol_type = other DNA
tatactctccagttatctta

SEQ ID NO: 23442 - DNA, 20 bp, synthetic construct
  misc_feature 1..20: note = chemically synthesized
  source 1..20: mol_type = other DNA
tattcacatccaagaaaaca

SEQ ID NO: 23443 - DNA, 20 bp, synthetic construct
  misc_feature 1..20: note = chemically synthesized
  source 1..20: mol_type = other DNA
taacagatgagagagtcaca

SEQ ID NO: 23444 - DNA, 20 bp, synthetic construct
  misc_feature 1..20: note = chemically synthesized
  source 1..20: mol_type = other DNA
ttaatattaaccttgaaatt

SEQ ID NO: 23445 - DNA, 20 bp, synthetic construct
  misc_feature 1..20: note = chemically synthesized
  source 1..20: mol_type = other DNA
taatccattttattattcag

SEQ ID NO: 23446 - DNA, 20 bp, synthetic construct
  misc_feature 1..20: note = chemically synthesized
  source 1..20: mol_type = other DNA
agatagagttaagaatacag

SEQ ID NO: 23447 - DNA, 20 bp, synthetic construct
  misc_feature 1..20: note = chemically synthesized
  source 1..20: mol_type = other DNA
cagtgtaccgtggaatgggg

SEQ ID NO: 23448 - DNA, 20 bp, synthetic construct
  misc_feature 1..20: note = chemically synthesized
  source 1..20: mol_type = other DNA
ggtttctaacctagttacct

SEQ ID NO: 23449 - DNA, 20 bp, synthetic construct
  misc_feature 1..20: note = chemically synthesized
  source 1..20: mol_type = other DNA
gaaaaacctctctaatgatg

SEQ ID NO: 23450 - DNA, 20 bp, synthetic construct
  misc_feature 1..20: note = chemically synthesized
  source 1..20: mol_type = other DNA
gatgggagagacctgcaggg

SEQ ID NO: 23451 - DNA, 20 bp, synthetic construct
  misc_feature 1..20: note = chemically synthesized
  source 1..20: mol_type = other DNA
agggggagttaatagcctta

SEQ ID NO: 23452 - DNA, 20 bp, synthetic construct
  misc_feature 1..20: note = chemically synthesized
  source 1..20: mol_type = other DNA
gggaagtactaagtagtcag

SEQ ID NO: 23453 - DNA, 20 bp, synthetic construct
  misc_feature 1..20: note = chemically synthesized
  source 1..20: mol_type = other DNA
ctgtggtgtgacccaggatg

SEQ ID NO: 23454 - DNA, 20 bp, synthetic construct
  misc_feature 1..20: note = chemically synthesized
  source 1..20: mol_type = other DNA
tttgcccaaatgtgggggaa

SEQ ID NO: 23455 - DNA, 20 bp, synthetic construct
  misc_feature 1..20: note = chemically synthesized
  source 1..20: mol_type = other DNA
aggatatttaggatcattaa

SEQ ID NO: 23456 - DNA, 20 bp, synthetic construct
  misc_feature 1..20: note = chemically synthesized
  source 1..20: mol_type = other DNA
gagcgatgtagtccctaaat

SEQ ID NO: 23457 - DNA, 20 bp, synthetic construct
  misc_feature 1..20: note = chemically synthesized
  source 1..20: mol_type = other DNA
cttaaaatggactagaaaca

SEQ ID NO: 23458 - DNA, 20 bp, synthetic construct
  misc_feature 1..20: note = chemically synthesized
  source 1..20: mol_type = other DNA
cgtattgctggacataattt

SEQ ID NO: 23459 - DNA, 20 bp, synthetic construct
  misc_feature 1..20: note = chemically synthesized
  source 1..20: mol_type = other DNA
ctttgatataagtgaactca

SEQ ID NO: 23460 - DNA, 20 bp, synthetic construct
  misc_feature 1..20: note = chemically synthesized
  source 1..20: mol_type = other DNA
gaagaggacttcacacttcc

SEQ ID NO: 23461 - DNA, 20 bp, synthetic construct
  misc_feature 1..20: note = chemically synthesized
  source 1..20: mol_type = other DNA
gccgtaaagaacaactgctc

SEQ ID NO: 23462 - DNA, 20 bp, synthetic construct
  misc_feature 1..20: note = chemically synthesized
  source 1..20: mol_type = other DNA
agtttaatactaggctactc

SEQ ID NO: 23463 - DNA, 20 bp, synthetic construct
  misc_feature 1..20: note = chemically synthesized
  source 1..20: mol_type = other DNA
cggctgttttttgttaacac

SEQ ID NO: 23464 - DNA, 20 bp, synthetic construct
  misc_feature 1..20: note = chemically synthesized
  source 1..20: mol_type = other DNA
gttaacacagaagttttcca

SEQ ID NO: 23465 - DNA, 20 bp, synthetic construct
  misc_feature 1..20: note = chemically synthesized
  source 1..20: mol_type = other DNA
ccatccttcccgagacctaa

SEQ ID NO: 23466 - DNA, 20 bp, synthetic construct
  misc_feature 1..20: note = chemically synthesized
  source 1..20: mol_type = other DNA
acgatgtttatctttcgtga

SEQ ID NO: 23467 - DNA, 20 bp, synthetic construct
  misc_feature 1..20: note = chemically synthesized
  source 1..20: mol_type = other DNA
agatccatcaaggcccagca

SEQ ID NO: 23468 - DNA, 20 bp, synthetic construct
  misc_feature 1..20: note = chemically synthesized
  source 1..20: mol_type = other DNA
tttcaaggctgaggtgggag

SEQ ID NO: 23469 - DNA, 20 bp, synthetic construct
  misc_feature 1..20: note = chemically synthesized
  source 1..20: mol_type = other DNA
gcctggggaacatagggaga

SEQ ID NO: 23470 - DNA, 20 bp, synthetic construct
  misc_feature 1..20: note = chemically synthesized
  source 1..20: mol_type = other DNA
attgaatccaggcgttctag

SEQ ID NO: 23471 - DNA, 20 bp, synthetic construct
  misc_feature 1..20: note = chemically synthesized
  source 1..20: mol_type = other DNA
ttctagtgaggcttcagtga

SEQ ID NO: 23472 - DNA, 20 bp, synthetic construct
  misc_feature 1..20: note = chemically synthesized
  source 1..20: mol_type = other DNA
gccggggtgacagagtgaga

SEQ ID NO: 23473 - DNA, 20 bp, synthetic construct
  misc_feature 1..20: note = chemically synthesized
  source 1..20: mol_type = other DNA
tctacagctaaagtcagact

SEQ ID NO: 23474 - DNA, 20 bp, synthetic construct
  misc_feature 1..20: note = chemically synthesized
  source 1..20: mol_type = other DNA
ccaccatcacctgggtaatg

SEQ ID NO: 23475 - DNA, 20 bp, synthetic construct
  misc_feature 1..20: note = chemically synthesized
  source 1..20: mol_type = other DNA
attacatagcatctctgtgc

SEQ ID NO: 23476 - DNA, 20 bp, synthetic construct
  misc_feature 1..20: note = chemically synthesized
  source 1..20: mol_type = other DNA
ttaataaacactctgtaggt

SEQ ID NO: 23477 - DNA, 20 bp, synthetic construct
  misc_feature 1..20: note = chemically synthesized
  source 1..20: mol_type = other DNA
gttagctcatgtattgtcat

SEQ ID NO: 23478 - DNA, 20 bp, synthetic construct
  misc_feature 1..20: note = chemically synthesized
  source 1..20: mol_type = other DNA
aatcacgggatgcatagtaa

SEQ ID NO: 23479 - DNA, 20 bp, synthetic construct
  misc_feature 1..20: note = chemically synthesized
  source 1..20: mol_type = other DNA
acacacgatctatgtaaaaa

SEQ ID NO: 23480 - DNA, 20 bp, synthetic construct
  misc_feature 1..20: note = chemically synthesized
  source 1..20: mol_type = other DNA
gtaaaaactatgcttggttg

SEQ ID NO: 23481 - DNA, 20 bp, synthetic construct
  misc_feature 1..20: note = chemically synthesized
  source 1..20: mol_type = other DNA
cctcccactgccaagactgc

SEQ ID NO: 23482 - DNA, 20 bp, synthetic construct
  misc_feature 1..20: note = chemically synthesized
  source 1..20: mol_type = other DNA
cactgccaagactgcagctg

SEQ ID NO: 23483 - DNA, 20 bp, synthetic construct
  misc_feature 1..20: note = chemically synthesized
  source 1..20: mol_type = other DNA
tctaagtgtataatgacttc

SEQ ID NO: 23484 - DNA, 20 bp, synthetic construct
  misc_feature 1..20: note = chemically synthesized
  source 1..20: mol_type = other DNA
gacttcctctgcttctgcaa

SEQ ID NO: 23485 - DNA, 20 bp, synthetic construct
  misc_feature 1..20: note = chemically synthesized
  source 1..20: mol_type = other DNA
ctgtgttttggaacaggagg

SEQ ID NO: 23486 - DNA, 20 bp, synthetic construct
  misc_feature 1..20: note = chemically synthesized
  source 1..20: mol_type = other DNA
tattctatacttctttgaaa

SEQ ID NO: 23487 - DNA, 20 bp, synthetic construct
  misc_feature 1..20: note = chemically synthesized
  source 1..20: mol_type = other DNA
agtgttgccagatgacgact

SEQ ID NO: 23488 - DNA, 20 bp, synthetic construct
  misc_feature 1..20: note = chemically synthesized
  source 1..20: mol_type = other DNA
agatcaataaaatacaaagt

SEQ ID NO: 23489 - DNA, 20 bp, synthetic construct
  misc_feature 1..20: note = chemically synthesized
  source 1..20: mol_type = other DNA
tcagaataaaaccatttatt

SEQ ID NO: 23490 - DNA, 20 bp, synthetic construct
  misc_feature 1..20: note = chemically synthesized
  source 1..20: mol_type = other DNA
tatatgtgtatgtaaatctc

SEQ ID NO: 23491 - DNA, 20 bp, synthetic construct
  misc_feature 1..20: note = chemically synthesized
  source 1..20: mol_type = other DNA
gctcttgcattcacttatat

SEQ ID NO: 23492 - DNA, 20 bp, synthetic construct
  misc_feature 1..20: note = chemically synthesized
  source 1..20: mol_type = other DNA
atattctagcttgttaagag

SEQ ID NO: 23493 - DNA, 20 bp, synthetic construct
  misc_feature 1..20: note = chemically synthesized
  source 1..20: mol_type = other DNA
agagagaagtttggggcaaa

SEQ ID NO: 23494 - DNA, 20 bp, synthetic construct
  misc_feature 1..20: note = chemically synthesized
  source 1..20: mol_type = other DNA
cagggaaatgtctggaggga

SEQ ID NO: 23495 - DNA, 20 bp, synthetic construct
  misc_feature 1..20: note = chemically synthesized
  source 1..20: mol_type = other DNA
ctttcttttattgatatatg

SEQ ID NO: 23496 - DNA, 20 bp, synthetic construct
  misc_feature 1..20: note = chemically synthesized
  source 1..20: mol_type = other DNA
tattcatcacctcaagtatt

SEQ ID NO: 23497 - DNA, 20 bp, synthetic construct
  misc_feature 1..20: note = chemically synthesized
  source 1..20: mol_type = other DNA
ctattttgaaatatacaata

SEQ ID NO: 23498 - DNA, 20 bp, synthetic construct
  misc_feature 1..20: note = chemically synthesized
  source 1..20: mol_type = other DNA
catattccttctatctaact

SEQ ID NO: 23499 - DNA, 20 bp, synthetic construct
  misc_feature 1..20: note = chemically synthesized
  source 1..20: mol_type = other DNA
cgtacacacctttctctacc

SEQ ID NO: 23500 - DNA, 20 bp, synthetic construct
  misc_feature 1..20: note = chemically synthesized
  source 1..20: mol_type = other DNA
gcaaaatttgtctttctatg

SEQ ID NO: 23501 - DNA, 20 bp, synthetic construct
  misc_feature 1..20: note = chemically synthesized
  source 1..20: mol_type = other DNA
gtctttctatgcctggctta

SEQ ID NO: 23502 - DNA, 20 bp, synthetic construct
  misc_feature 1..20: note = chemically synthesized
  source 1..20: mol_type = other DNA
tttcgtttaacataatgact

SEQ ID NO: 23503 - DNA, 20 bp, synthetic construct
  misc_feature 1..20: note = chemically synthesized
  source 1..20: mol_type = other DNA
catccatgttgctgcaaatg

SEQ ID NO: 23504 - DNA, 20 bp, synthetic construct
  misc_feature 1..20: note = chemically synthesized
  source 1..20: mol_type = other DNA
catccattgatggacactta

SEQ ID NO: 23505 - DNA, 20 bp, synthetic construct
  misc_feature 1..20: note = chemically synthesized
  source 1..20: mol_type = other DNA
ataaacagtgtggtaccagt

SEQ ID NO: 23506 - DNA, 20 bp, synthetic construct
  misc_feature 1..20: note = chemically synthesized
  source 1..20: mol_type = other DNA
ctttggataaatacccagta

SEQ ID NO: 23507 - DNA, 20 bp, synthetic construct
  misc_feature 1..20: note = chemically synthesized
  source 1..20: mol_type = other DNA
gatcttatgatagttcaatt

SEQ ID NO: 23508 - DNA, 20 bp, synthetic construct
  misc_feature 1..20: note = chemically synthesized
  source 1..20: mol_type = other DNA
agctttttggtaaatctaca

SEQ ID NO: 23509 - DNA, 20 bp, synthetic construct
  misc_feature 1..20: note = chemically synthesized
  source 1..20: mol_type = other DNA
catagtggctatactaattt

SEQ ID NO: 23510 - DNA, 20 bp, synthetic construct
  misc_feature 1..20: note = chemically synthesized
  source 1..20: mol_type = other DNA
ttattaatttatttaaatca

SEQ ID NO: 23511 - DNA, 20 bp, synthetic construct
  misc_feature 1..20: note = chemically synthesized
  source 1..20: mol_type = other DNA
ggcataagatgatatctcat

SEQ ID NO: 23512 - DNA, 20 bp, synthetic construct
  misc_feature 1..20: note = chemically synthesized
  source 1..20: mol_type = other DNA
aagatgatatctcattgtgg

SEQ ID NO: 23513 - DNA, 20 bp, synthetic construct
  misc_feature 1..20: note = chemically synthesized
  source 1..20: mol_type = other DNA
ggttttgatttgcatttctc

SEQ ID NO: 23514 - DNA, 20 bp, synthetic construct
  misc_feature 1..20: note = chemically synthesized
  source 1..20: mol_type = other DNA
tatcctttgccaatttttta

SEQ ID NO: 23515 - DNA, 20 bp, synthetic construct
  misc_feature 1..20: note = chemically synthesized
  source 1..20: mol_type = other DNA
gccaattttttaatgagatt

SEQ ID NO: 23516 - DNA, 20 bp, synthetic construct
  misc_feature 1..20: note = chemically synthesized
  source 1..20: mol_type = other DNA
tatttgtttttccactgttg

SEQ ID NO: 23517 - DNA, 20 bp, synthetic construct
  misc_feature 1..20: note = chemically synthesized
  source 1..20: mol_type = other DNA
tttttccactgttgagttgt

SEQ ID NO: 23518 - DNA, 20 bp, synthetic construct
  misc_feature 1..20: note = chemically synthesized
  source 1..20: mol_type = other DNA
tttgagtttcttatatattc

SEQ ID NO: 23519 - DNA, 20 bp, synthetic construct
  misc_feature 1..20: note = chemically synthesized
  source 1..20: mol_type = other DNA
gcaaatattttctcgcattc

SEQ ID NO: 23520 - DNA, 20 bp, synthetic construct
  misc_feature 1..20: note = chemically synthesized
  source 1..20: mol_type = other DNA
aacagcttgtctcttcactg

SEQ ID NO: 23521 - DNA, 20 bp, synthetic construct
  misc_feature 1..20: note = chemically synthesized
  source 1..20: mol_type = other DNA
gcttgtctcttcactgtgtt

SEQ ID NO: 23522 - DNA, 20 bp, synthetic construct
  misc_feature 1..20: note = chemically synthesized
  source 1..20: mol_type = other DNA
cctttactgtgcagatgtat

SEQ ID NO: 23523 - DNA, 20 bp, synthetic construct
  misc_feature 1..20: note = chemically synthesized
  source 1..20: mol_type = other DNA
atatagtcccatttgtctat

SEQ ID NO: 23524 - DNA, 20 bp, synthetic construct
  misc_feature 1..20: note = chemically synthesized
  source 1..20: mol_type = other DNA
tctatttttgcttttgttgc

SEQ ID NO: 23525 - DNA, 20 bp, synthetic construct
  misc_feature 1..20: note = chemically synthesized
  source 1..20: mol_type = other DNA
catgtcttgaagtgtctccc

SEQ ID NO: 23526 - DNA, 20 bp, synthetic construct
  misc_feature 1..20: note = chemically synthesized
  source 1..20: mol_type = other DNA
tctcccttatgttttctttt

SEQ ID NO: 23527 - DNA, 20 bp, synthetic construct
  misc_feature 1..20: note = chemically synthesized
  source 1..20: mol_type = other DNA
atgttttcttttagtagttt

SEQ ID NO: 23528 - DNA, 20 bp, synthetic construct
  misc_feature 1..20: note = chemically synthesized
  source 1..20: mol_type = other DNA
cttttagtagttttatagtt

SEQ ID NO: 23529 - DNA, 20 bp, synthetic construct
  misc_feature 1..20: note = chemically synthesized
  source 1..20: mol_type = other DNA
gtctttaatccatcttgaga

SEQ ID NO: 23530 - DNA, 20 bp, synthetic construct
  misc_feature 1..20: note = chemically synthesized
  source 1..20: mol_type = other DNA
tattgtacaaggggttgagt

SEQ ID NO: 23531 - DNA, 20 bp, synthetic construct
  misc_feature 1..20: note = chemically synthesized
  source 1..20: mol_type = other DNA
tacaaggggttgagttcttg

SEQ ID NO: 23532 - DNA, 20 bp, synthetic construct
  misc_feature 1..20: note = chemically synthesized
  source 1..20: mol_type = other DNA
ctgttggtgtatagaagagt

SEQ ID NO: 23533 - DNA, 20 bp, synthetic construct
  misc_feature 1..20: note = chemically synthesized
  source 1..20: mol_type = other DNA
tgaattattttatcagttct

SEQ ID NO: 23534 - DNA, 20 bp, synthetic construct
  misc_feature 1..20: note = chemically synthesized
  source 1..20: mol_type = other DNA
gagctttctggaggagtctt

SEQ ID NO: 23535 - DNA, 20 bp, synthetic construct
  misc_feature 1..20: note = chemically synthesized
  source 1..20: mol_type = other DNA
tcatatcatcagcaaacagt

SEQ ID NO: 23536 - DNA, 20 bp, synthetic construct
  misc_feature 1..20: note = chemically synthesized
  source 1..20: mol_type = other DNA
tgacagtttgacttcctctt

SEQ ID NO: 23537 - DNA, 20 bp, synthetic construct
  misc_feature 1..20: note = chemically synthesized
  source 1..20: mol_type = other DNA
gatttgaatgccctttattt

SEQ ID NO: 23538 - DNA, 20 bp, synthetic construct
  misc_feature 1..20: note = chemically synthesized
  source 1..20: mol_type = other DNA
gccctttatttctttgtttt

SEQ ID NO: 23539 - DNA, 20 bp, synthetic construct
  misc_feature 1..20: note = chemically synthesized
  source 1..20: mol_type = other DNA
cttgttccagttctcagagg

SEQ ID NO: 23540 - DNA, 20 bp, synthetic construct
  misc_feature 1..20: note = chemically synthesized
  source 1..20: mol_type = other DNA
cattcaatattatgttggct

SEQ ID NO: 23541 - DNA, 20 bp, synthetic construct
  misc_feature 1..20: note = chemically synthesized
  source 1..20: mol_type = other DNA
ttggctgtgggtttgtcaca

SEQ ID NO: 23542 - DNA, 20 bp, synthetic construct
  misc_feature 1..20: note = chemically synthesized
  source 1..20: mol_type = other DNA
actgaggtatgtctcttgta

SEQ ID NO: 23543 - DNA, 20 bp, synthetic construct
  misc_feature 1..20: note = chemically synthesized
  source 1..20: mol_type = other DNA
cattttaatcataaatgtat

SEQ ID NO: 23544 - DNA, 20 bp, synthetic construct
  misc_feature 1..20: note = chemically synthesized
  source 1..20: mol_type = other DNA
aatgtatgctggattttgtt

SEQ ID NO: 23545 - DNA, 20 bp, synthetic construct
  misc_feature 1..20: note = chemically synthesized
  source 1..20: mol_type = other DNA
tattgagatgatcatgtaat

SEQ ID NO: 23546 - DNA, 20 bp, synthetic construct
  misc_feature 1..20: note = chemically synthesized
  source 1..20: mol_type = other DNA
catgtaatttttgtttttaa

SEQ ID NO: 23547 - DNA, 20 bp, synthetic construct
  misc_feature 1..20: note = chemically synthesized
  source 1..20: mol_type = other DNA
ccctgcatccctggcatgga

SEQ ID NO: 23548 - DNA, 20 bp, synthetic construct
  misc_feature 1..20: note = chemically synthesized
  source 1..20: mol_type = other DNA
catggaacctgcttgatcat

SEQ ID NO: 23549 - DNA, 20 bp, synthetic construct
  misc_feature 1..20: note = chemically synthesized
  source 1..20: mol_type = other DNA
ttggttatctagtattttgt

SEQ ID NO: 23550 - DNA, 20 bp, synthetic construct
  misc_feature 1..20: note = chemically synthesized
  source 1..20: mol_type = other DNA
gttcatcaaggctatcagtc

SEQ ID NO: 23551 - DNA, 20 bp, synthetic construct
  misc_feature 1..20: note = chemically synthesized
  source 1..20: mol_type = other DNA
cttttttggttatgtccttc

SEQ ID NO: 23552 - DNA, 20 bp, synthetic construct
  misc_feature 1..20: note = chemically synthesized
  source 1..20: mol_type = other DNA
ttccctggttttggtgtgat

SEQ ID NO: 23553 - DNA, 20 bp, synthetic construct
  misc_feature 1..20: note = chemically synthesized
  source 1..20: mol_type = other DNA
tttaattaccaattaaatct

SEQ ID NO: 23554 - DNA, 20 bp, synthetic construct
  misc_feature 1..20: note = chemically synthesized
  source 1..20: mol_type = other DNA
agctccagtgttaggtgcat

SEQ ID NO: 23555 - DNA, 20 bp, synthetic construct
  misc_feature 1..20: note = chemically synthesized
  source 1..20: mol_type = other DNA
agtgttaggtgcatatatgt

SEQ ID NO: 23556 - DNA, 20 bp, synthetic construct
  misc_feature 1..20: note = chemically synthesized
  source 1..20: mol_type = other DNA
tctttgtctcttttaactgc

SEQ ID NO: 23557 - DNA, 20 bp, synthetic construct
  misc_feature 1..20: note = chemically synthesized
  source 1..20: mol_type = other DNA
tcttttaactgctgttgctt

SEQ ID NO: 23558 - DNA, 20 bp, synthetic construct
  misc_feature 1..20: note = chemically synthesized
  source 1..20: mol_type = other DNA
ttaactgctgttgctttaaa

SEQ ID NO: 23559 - DNA, 20 bp, synthetic construct
  misc_feature 1..20: note = chemically synthesized
  source 1..20: mol_type = other DNA
tgagctcccagggcctttct

SEQ ID NO: 23560 - DNA, 20 bp, synthetic construct
  misc_feature 1..20: note = chemically synthesized
  source 1..20: mol_type = other DNA
acttctcccacaaacagacc

SEQ ID NO: 23561 - DNA, 20 bp, synthetic construct
  misc_feature 1..20: note = chemically synthesized
  source 1..20: mol_type = other DNA
tcagtttctccagtgggagt

SEQ ID NO: 23562 - DNA, 20 bp, synthetic construct
  misc_feature 1..20: note = chemically synthesized
  source 1..20: mol_type = other DNA
cagagggtctgtgggtcctc

SEQ ID NO: 23563 - DNA, 20 bp, synthetic construct
  misc_feature 1..20: note = chemically synthesized
  source 1..20: mol_type = other DNA
ctgtgggtcctctcaggatt

SEQ ID NO: 23564 - DNA, 20 bp, synthetic construct
  misc_feature 1..20: note = chemically synthesized
  source 1..20: mol_type = other DNA
ccgccaagatcctgagaagt

SEQ ID NO: 23565 - DNA, 20 bp, synthetic construct
  misc_feature 1..20: note = chemically synthesized
  source 1..20: mol_type = other DNA
gttggggattatatttcaac

SEQ ID NO: 23566 - DNA, 20 bp, synthetic construct
  misc_feature 1..20: note = chemically synthesized
  source 1..20: mol_type = other DNA
catccaaaccatatcagcag

SEQ ID NO: 23567 - DNA, 20 bp, synthetic construct
  misc_feature 1..20: note = chemically synthesized
  source 1..20: mol_type = other DNA
ctgttctaatgtcagtatca

SEQ ID NO: 23568 - DNA, 20 bp, synthetic construct
  misc_feature 1..20: note = chemically synthesized
  source 1..20: mol_type = other DNA
ttttttaatttcatacaaat

SEQ ID NO: 23569 - DNA, 20 bp, synthetic construct
  misc_feature 1..20: note = chemically synthesized
  source 1..20: mol_type = other DNA
taatttcatacaaattttag

SEQ ID NO: 23570 - DNA, 20 bp, synthetic construct
  misc_feature 1..20: note = chemically synthesized
  source 1..20: mol_type = other DNA
gatagcggtcatatagaatc

SEQ ID NO: 23571 - DNA, 20 bp, synthetic construct
  misc_feature 1..20: note = chemically synthesized
  source 1..20: mol_type = other DNA
gcggtcatatagaatctgta

SEQ ID NO: 23572 - DNA, 20 bp, synthetic construct
  misc_feature 1..20: note = chemically synthesized
  source 1..20: mol_type = other DNA
tgaacataggatatctctcc

SEQ ID NO: 23573 - DNA, 20 bp, synthetic construct
  misc_feature 1..20: note = chemically synthesized
  source 1..20: mol_type = other DNA
gtccttttcaattcttttat

SEQ ID NO: 23574 - DNA, 20 bp, synthetic construct
  misc_feature 1..20: note = chemically synthesized
  source 1..20: mol_type = other DNA
caattcttttatcagtgttt

SEQ ID NO: 23575 - DNA, 20 bp, synthetic construct
  misc_feature 1..20: note = chemically synthesized
  source 1..20: mol_type = other DNA
tgttttgtagttttccgaat

SEQ ID NO: 23576 - DNA, 20 bp, synthetic construct
  misc_feature 1..20: note = chemically synthesized
  source 1..20: mol_type = other DNA
ttattttttagctattgtaa

SEQ ID NO: 23577 - DNA, 20 bp, synthetic construct
  misc_feature 1..20: note = chemically synthesized
  source 1..20: mol_type = other DNA
ccttcttaatttccttctca

SEQ ID NO: 23578 - DNA, 20 bp, synthetic construct
  misc_feature 1..20: note = chemically synthesized
  source 1..20: mol_type = other DNA
ttattattggtgtgtagaaa

SEQ ID NO: 23579 - DNA, 20 bp, synthetic construct
  misc_feature 1..20: note = chemically synthesized
  source 1..20: mol_type = other DNA
tattggtgtgtagaaacatt

SEQ ID NO: 23580 - DNA, 20 bp, synthetic construct
  misc_feature 1..20: note = chemically synthesized
  source 1..20: mol_type = other DNA
gaaacattgcttgtttcata

SEQ ID NO: 23581 - DNA, 20 bp, synthetic construct
  misc_feature 1..20: note = chemically synthesized
  source 1..20: mol_type = other DNA
aatttatttttcagcgctaa

SEQ ID NO: 23582 - DNA, 20 bp, synthetic construct
  misc_feature 1..20: note = chemically synthesized
  source 1..20: mol_type = other DNA
taagagtgctttggtggagt

SEQ ID NO: 23583 - DNA, 20 bp, synthetic construct
  misc_feature 1..20: note = chemically synthesized
  source 1..20: mol_type = other DNA
tcatgtcatctggaaagatg

SEQ ID NO: 23584 - DNA, 20 bp, synthetic construct
  misc_feature 1..20: note = chemically synthesized
  source 1..20: mol_type = other DNA
gatggaagtgggcatcctta

SEQ ID NO: 23585 - DNA, 20 bp, synthetic construct
  misc_feature 1..20: note = chemically synthesized
  source 1..20: mol_type = other DNA
tttgtttcagttcttagagg

SEQ ID NO: 23586 - DNA, 20 bp, synthetic construct
  misc_feature 1..20: note = chemically synthesized
  source 1..20: mol_type = other DNA
cagttcttagaggaaaggct

SEQ ID NO: 23587 - DNA, 20 bp, synthetic construct
  misc_feature 1..20: note = chemically synthesized
  source 1..20: mol_type = other DNA
aattcagtatgatgttagct

SEQ ID NO: 23588 - DNA, 20 bp, synthetic construct
  misc_feature 1..20: note = chemically synthesized
  source 1..20: mol_type = other DNA
tatattgagatatgttcctt

SEQ ID NO: 23589 - DNA, 20 bp, synthetic construct
  misc_feature 1..20: note = chemically synthesized
  source 1..20: mol_type = other DNA
tccttctatgattggctgca

SEQ ID NO: 23590 - DNA, 20 bp, synthetic construct
  misc_feature 1..20: note = chemically synthesized
  source 1..20: mol_type = other DNA
tgtatctattgagatgatca

SEQ ID NO: 23591 - DNA, 20 bp, synthetic construct
  misc_feature 1..20: note = chemically synthesized
  source 1..20: mol_type = other DNA
ttgatgtgatgtatcacatt

SEQ ID NO: 23592 - DNA, 20 bp, synthetic construct
  misc_feature 1..20: note = chemically synthesized
  source 1..20: mol_type = other DNA
tattatcttttggatgtact

SEQ ID NO: 23593 - DNA, 20 bp, synthetic construct
  misc_feature 1..20: note = chemically synthesized
  source 1..20: mol_type = other DNA
cttttggatgtactgttgga

SEQ ID NO: 23594 - DNA, 20 bp, synthetic construct
  misc_feature 1..20: note = chemically synthesized
  source 1..20: mol_type = other DNA
tcagtttgctagtattttgt

SEQ ID NO: 23595 - DNA, 20 bp, synthetic construct
  misc_feature 1..20: note = chemically synthesized
  source 1..20: mol_type = other DNA
ttccatcagggatattgacc

SEQ ID NO: 23596 - DNA, 20 bp, synthetic construct
  misc_feature 1..20: note = chemically synthesized
  source 1..20: mol_type = other DNA
atgagttagggagaattcct

SEQ ID NO: 23597 - DNA, 20 bp, synthetic construct
  misc_feature 1..20: note = chemically synthesized
  source 1..20: mol_type = other DNA
aaaagaatttaaggagactt

SEQ ID NO: 23598 - DNA, 20 bp, synthetic construct
  misc_feature 1..20: note = chemically synthesized
  source 1..20: mol_type = other DNA
gagacttgttagttttcttt

SEQ ID NO: 23599 - DNA, 20 bp, synthetic construct
  misc_feature 1..20: note = chemically synthesized
  source 1..20: mol_type = other DNA
ttttttgggagactttttac

SEQ ID NO: 23600 - DNA, 20 bp, synthetic construct
  misc_feature 1..20: note = chemically synthesized
  source 1..20: mol_type = other DNA
attattcattactggtctgt

SEQ ID NO: 23601 - DNA, 20 bp, synthetic construct
  misc_feature 1..20: note = chemically synthesized
  source 1..20: mol_type = other DNA
ccagaaatttattaatttcc

SEQ ID NO: 23602 - DNA, 20 bp, synthetic construct
  misc_feature 1..20: note = chemically synthesized
  source 1..20: mol_type = other DNA
tattaatttcctctagattt

SEQ ID NO: 23603 - DNA, 20 bp, synthetic construct
  misc_feature 1..20: note = chemically synthesized
  source 1..20: mol_type = other DNA
taatatattttcttttttat

SEQ ID NO: 23604 - DNA, 20 bp, synthetic construct
  misc_feature 1..20: note = chemically synthesized
  source 1..20: mol_type = other DNA
tcattttgctaatcccttgt

SEQ ID NO: 23605 - DNA, 20 bp, synthetic construct
  misc_feature 1..20: note = chemically synthesized
  source 1..20: mol_type = other DNA
ttcattttttctttccttct

SEQ ID NO: 23606 - DNA, 20 bp, synthetic construct
  misc_feature 1..20: note = chemically synthesized
  source 1..20: mol_type = other DNA
tttctttccttctgctagtt

SEQ ID NO: 23607 - DNA, 20 bp, synthetic construct
  misc_feature 1..20: note = chemically synthesized
  source 1..20: mol_type = other DNA
ctgctagttttgggttttgt

SEQ ID NO: 23608 - DNA, 20 bp, synthetic construct
  misc_feature 1..20: note = chemically synthesized
  source 1..20: mol_type = other DNA
ttgggttttgttcttgcttt

SEQ ID NO: 23609 - DNA, 20 bp, synthetic construct
  misc_feature 1..20: note = chemically synthesized
  source 1..20: mol_type = other DNA
cttttctagcttgttgaggt

SEQ ID NO: 23610 - DNA, 20 bp, synthetic construct
  misc_feature 1..20: note = chemically synthesized
  source 1..20: mol_type = other DNA
ctagcttgttgaggtacatg

SEQ ID NO: 23611 - DNA, 20 bp, synthetic construct
  misc_feature 1..20: note = chemically synthesized
  source 1..20: mol_type = other DNA
attatatatttgaaatcttt

SEQ ID NO: 23612 - DNA, 20 bp, synthetic construct
  misc_feature 1..20: note = chemically synthesized
  source 1..20: mol_type = other DNA
tctttctatgtttttaattt

SEQ ID NO: 23613 - DNA, 20 bp, synthetic construct
  misc_feature 1..20: note = chemically synthesized
  source 1..20: mol_type = other DNA
tttaatttaagtgtttattg

SEQ ID NO: 23614 - DNA, 20 bp, synthetic construct
  misc_feature 1..20: note = chemically synthesized
  source 1..20: mol_type = other DNA
ttgataagcttctctcttag

SEQ ID NO: 23615 - DNA, 20 bp, synthetic construct
  misc_feature 1..20: note = chemically synthesized
  source 1..20: mol_type = other DNA
gcactgcttttgctgtatcc

SEQ ID NO: 23616 - DNA, 20 bp, synthetic construct
  misc_feature 1..20: note = chemically synthesized
  source 1..20: mol_type = other DNA
tatgttgtatttcaattttc

SEQ ID NO: 23617 - DNA, 20 bp, synthetic construct
  misc_feature 1..20: note = chemically synthesized
  source 1..20: mol_type = other DNA
tttcatttgtttcaaaaaat

SEQ ID NO: 23618 - DNA, 20 bp, synthetic construct
  misc_feature 1..20: note = chemically synthesized
  source 1..20: mol_type = other DNA
ataacgttcattcaggagca

SEQ ID NO: 23619 - DNA, 20 bp, synthetic construct
  misc_feature 1..20: note = chemically synthesized
  source 1..20: mol_type = other DNA
tttaatttccatgtatttgt

SEQ ID NO: 23620 - DNA, 20 bp, synthetic construct
  misc_feature 1..20: note = chemically synthesized
  source 1..20: mol_type = other DNA
ccatgtatttgtataggttt

SEQ ID NO: 23621 - DNA, 20 bp, synthetic construct
  misc_feature 1..20: note = chemically synthesized
  source 1..20: mol_type = other DNA
ggttttaaagtttttcttgt

SEQ ID NO: 23622 - DNA, 20 bp, synthetic construct
  misc_feature 1..20: note = chemically synthesized
  source 1..20: mol_type = other DNA
agtttttcttgttattgatt

SEQ ID NO: 23623 - DNA, 20 bp, synthetic construct
  misc_feature 1..20: note = chemically synthesized
  source 1..20: mol_type = other DNA
tattccattgtggtctgaga

SEQ ID NO: 23624 - DNA, 20 bp, synthetic construct
  misc_feature 1..20: note = chemically synthesized
  source 1..20: mol_type = other DNA
gtggtctgagaagatgctta

SEQ ID NO: 23625 - DNA, 20 bp, synthetic construct
  misc_feature 1..20: note = chemically synthesized
  source 1..20: mol_type = other DNA
tagatccatttggtctaaag

SEQ ID NO: 23626 - DNA, 20 bp, synthetic construct
  misc_feature 1..20: note = chemically synthesized
  source 1..20: mol_type = other DNA
tctaaagtcaagtttaaatc

SEQ ID NO: 23627 - DNA, 20 bp, synthetic construct
  misc_feature 1..20: note = chemically synthesized
  source 1..20: mol_type = other DNA
tctagatgatctatctgatg

SEQ ID NO: 23628 - DNA, 20 bp, synthetic construct
  misc_feature 1..20: note = chemically synthesized
  source 1..20: mol_type = other DNA
aaatccccaactattattgt

SEQ ID NO: 23629 - DNA, 20 bp, synthetic construct
  misc_feature 1..20: note = chemically synthesized
  source 1..20: mol_type = other DNA
caccctttatatctaataac

SEQ ID NO: 23630 - DNA, 20 bp, synthetic construct
  misc_feature 1..20: note = chemically synthesized
  source 1..20: mol_type = other DNA
gatgctctggtgttgagtgt

SEQ ID NO: 23631 - DNA, 20 bp, synthetic construct
  misc_feature 1..20: note = chemically synthesized
  source 1..20: mol_type = other DNA
atgtaatgacttttgtctct

SEQ ID NO: 23632 - DNA, 20 bp, synthetic construct
  misc_feature 1..20: note = chemically synthesized
  source 1..20: mol_type = other DNA
tataactacttttgctcatt

SEQ ID NO: 23633 - DNA, 20 bp, synthetic construct
  misc_feature 1..20: note = chemically synthesized
  source 1..20: mol_type = other DNA
tatttatctttacaagtgag

SEQ ID NO: 23634 - DNA, 20 bp, synthetic construct
  misc_feature 1..20: note = chemically synthesized
  source 1..20: mol_type = other DNA
agtgagataagtttcttata

SEQ ID NO: 23635 - DNA, 20 bp, synthetic construct
  misc_feature 1..20: note = chemically synthesized
  source 1..20: mol_type = other DNA
agcttacaactgggtcatat

SEQ ID NO: 23636 - DNA, 20 bp, synthetic construct
  misc_feature 1..20: note = chemically synthesized
  source 1..20: mol_type = other DNA
caaggctattattgacatgt

SEQ ID NO: 23637 - DNA, 20 bp, synthetic construct
  misc_feature 1..20: note = chemically synthesized
  source 1..20: mol_type = other DNA
cttattcctgccattttgtt

SEQ ID NO: 23638 - DNA, 20 bp, synthetic construct
  misc_feature 1..20: note = chemically synthesized
  source 1..20: mol_type = other DNA
cattttgttaattgattcct

SEQ ID NO: 23639 - DNA, 20 bp, synthetic construct
  misc_feature 1..20: note = chemically synthesized
  source 1..20: mol_type = other DNA
tgttaattgattcctggttg

SEQ ID NO: 23640 - DNA, 20 bp, synthetic construct
  misc_feature 1..20: note = chemically synthesized
  source 1..20: mol_type = other DNA
cctggttgttttgttttttt

SEQ ID NO: 23641 - DNA, 20 bp, synthetic construct
  misc_feature 1..20: note = chemically synthesized
  source 1..20: mol_type = other DNA
gttgttttgtttttttttta

SEQ ID NO: 23642 - DNA, 20 bp, synthetic construct
  misc_feature 1..20: note = chemically synthesized
  source 1..20: mol_type = other DNA
ttttgttttttttttagttt

SEQ ID NO: 23643 - DNA, 20 bp, synthetic construct
  misc_feature 1..20: note = chemically synthesized
  source 1..20: mol_type = other DNA
ttttttttagtttgtttgtt

SEQ ID NO: 23644 - DNA, 20 bp, synthetic construct
  misc_feature 1..20: note = chemically synthesized
  source 1..20: mol_type = other DNA
ctttctttctttcttattat

SEQ ID NO: 23645 - DNA, 20 bp, synthetic construct
  misc_feature 1..20: note = chemically synthesized
  source 1..20: mol_type = other DNA
tctttcttattatttatgat

SEQ ID NO: 23646 - DNA, 20 bp, synthetic construct
  misc_feature 1..20: note = chemically synthesized
  source 1..20: mol_type = other DNA
tattatttatgattgtggtt

SEQ ID NO: 23647 - DNA, 20 bp, synthetic construct
  misc_feature 1..20: note = chemically synthesized
  source 1..20: mol_type = other DNA
ttggtgattttctgtagtgg

SEQ ID NO: 23648 - DNA, 20 bp, synthetic construct
  misc_feature 1..20: note = chemically synthesized
  source 1..20: mol_type = other DNA
gagttctttctcttctttat

SEQ ID NO: 23649 - DNA, 20 bp, synthetic construct
  misc_feature 1..20: note = chemically synthesized
  source 1..20: mol_type = other DNA
ttcaaatttttcttgcccag

SEQ ID NO: 23650 - DNA, 20 bp, synthetic construct
  misc_feature 1..20: note = chemically synthesized
  source 1..20: mol_type = other DNA
tcccatcttctcctggcctg

SEQ ID NO: 23651 - DNA, 20 bp, synthetic construct
  misc_feature 1..20: note = chemically synthesized
  source 1..20: mol_type = other DNA
cccttataagtgactagaca

SEQ ID NO: 23652 - DNA, 20 bp, synthetic construct
  misc_feature 1..20: note = chemically synthesized
  source 1..20: mol_type = other DNA
aagtgactagacattttgct

SEQ ID NO: 23653 - DNA, 20 bp, synthetic construct
  misc_feature 1..20: note = chemically synthesized
  source 1..20: mol_type = other DNA
ctgttttagagttcttactc

SEQ ID NO: 23654 - DNA, 20 bp, synthetic construct
  misc_feature 1..20: note = chemically synthesized
  source 1..20: mol_type = other DNA
gttcttactctttggctttt

SEQ ID NO: 23655 - DNA, 20 bp, synthetic construct
  misc_feature 1..20: note = chemically synthesized
  source 1..20: mol_type = other DNA
gactataatgtgctgtggag

SEQ ID NO: 23656 - DNA, 20 bp, synthetic construct
  misc_feature 1..20: note = chemically synthesized
  source 1..20: mol_type = other DNA
gcattatattatttgggaat

SEQ ID NO: 23657 - DNA, 20 bp, synthetic construct
  misc_feature 1..20: note = chemically synthesized
  source 1..20: mol_type = other DNA
tacatttcttgctagacttg

SEQ ID NO: 23658 - DNA, 20 bp, synthetic construct
  misc_feature 1..20: note = chemically synthesized
  source 1..20: mol_type = other DNA
ttcagctattgtgttgttac

SEQ ID NO: 23659 - DNA, 20 bp, synthetic construct
  misc_feature 1..20: note = chemically synthesized
  source 1..20: mol_type = other DNA
ttcaagttctgaaatttttc

SEQ ID NO: 23660 - DNA, 20 bp, synthetic construct
  misc_feature 1..20: note = chemically synthesized
  source 1..20: mol_type = other DNA
tgcttgatctgatctattgt

SEQ ID NO: 23661 - DNA, 20 bp, synthetic construct
  misc_feature 1..20: note = chemically synthesized
  source 1..20: mol_type = other DNA
aaactcttcagttacagaat

SEQ ID NO: 23662 - DNA, 20 bp, synthetic construct
  misc_feature 1..20: note = chemically synthesized
  source 1..20: mol_type = other DNA
aatttctcattcatatcctg

SEQ ID NO: 23663 - DNA, 20 bp, synthetic construct
  misc_feature 1..20: note = chemically synthesized
  source 1..20: mol_type = other DNA
attcatatcctgaattgttt

SEQ ID NO: 23664 - DNA, 20 bp, synthetic construct
  misc_feature 1..20: note = chemically synthesized
  source 1..20: mol_type = other DNA
ttgtttttctgatttctttt

SEQ ID NO: 23665 - DNA, 20 bp, synthetic construct
  misc_feature 1..20: note = chemically synthesized
  source 1..20: mol_type = other DNA
ctgagttctcttgtgtctca

SEQ ID NO: 23666 - DNA, 20 bp, synthetic construct
  misc_feature 1..20: note = chemically synthesized
  source 1..20: mol_type = other DNA
agcttccttaatatcaacat

SEQ ID NO: 23667 - DNA, 20 bp, synthetic construct
  misc_feature 1..20: note = chemically synthesized
  source 1..20: mol_type = other DNA
tataaatgtcttttttttcc

SEQ ID NO: 23668 - DNA, 20 bp, synthetic construct
  misc_feature 1..20: note = chemically synthesized
  source 1..20: mol_type = other DNA
tgtcatatttcttcaccttt

SEQ ID NO: 23669 - DNA, 20 bp, synthetic construct
  misc_feature 1..20: note = chemically synthesized
  source 1..20: mol_type = other DNA
tgatatctctgcatctggtg

SEQ ID NO: 23670 - DNA, 20 bp, synthetic construct
  misc_feature 1..20: note = chemically synthesized
  source 1..20: mol_type = other DNA
tctgcatctggtgtaatgat

SEQ ID NO: 23671 - DNA, 20 bp, synthetic construct
  misc_feature 1..20: note = chemically synthesized
  source 1..20: mol_type = other DNA
ctggtgtaatgattgctgct

SEQ ID NO: 23672 - DNA, 20 bp, synthetic construct
  misc_feature 1..20: note = chemically synthesized
  source 1..20: mol_type = other DNA
tgctgcttccagttttgtaa

SEQ ID NO: 23673 - DNA, 20 bp, synthetic construct
  misc_feature 1..20: note = chemically synthesized
  source 1..20: mol_type = other DNA
tttctgaagatgtatcttgg

SEQ ID NO: 23674 - DNA, 20 bp, synthetic construct
  misc_feature 1..20: note = chemically synthesized
  source 1..20: mol_type = other DNA
ggtgttgattgagtagggca

SEQ ID NO: 23675 - DNA, 20 bp, synthetic construct
  misc_feature 1..20: note = chemically synthesized
  source 1..20: mol_type = other DNA
gattgagtagggcactttga

SEQ ID NO: 23676 - DNA, 20 bp, synthetic construct
  misc_feature 1..20: note = chemically synthesized
  source 1..20: mol_type = other DNA
gccaacagtatcatcagtgt

SEQ ID NO: 23677 - DNA, 20 bp, synthetic construct
  misc_feature 1..20: note = chemically synthesized
  source 1..20: mol_type = other DNA
tcagtgtctgtgattttttc

SEQ ID NO: 23678 - DNA, 20 bp, synthetic construct
  misc_feature 1..20: note = chemically synthesized
  source 1..20: mol_type = other DNA
gatggtaatgagtctagttg

SEQ ID NO: 23679 - DNA, 20 bp, synthetic construct
  misc_feature 1..20: note = chemically synthesized
  source 1..20: mol_type = other DNA
ggttgattctttggccttca

SEQ ID NO: 23680 - DNA, 20 bp, synthetic construct
  misc_feature 1..20: note = chemically synthesized
  source 1..20: mol_type = other DNA
gattctttggccttcaggca

SEQ ID NO: 23681 - DNA, 20 bp, synthetic construct
  misc_feature 1..20: note = chemically synthesized
  source 1..20: mol_type = other DNA
ctgggctggtgtgtgggtcc

SEQ ID NO: 23682 - DNA, 20 bp, synthetic construct
  misc_feature 1..20: note = chemically synthesized
  source 1..20: mol_type = other DNA
gtgccagttgtgatggcagt

SEQ ID NO: 23683 - DNA, 20 bp, synthetic construct
  misc_feature 1..20: note = chemically synthesized
  source 1..20: mol_type = other DNA
cagattgggtaggcccatca

SEQ ID NO: 23684 - DNA, 20 bp, synthetic construct
  misc_feature 1..20: note = chemically synthesized
  source 1..20: mol_type = other DNA
catcatcaggcttctgggag

SEQ ID NO: 23685 - DNA, 20 bp, synthetic construct
  misc_feature 1..20: note = chemically synthesized
  source 1..20: mol_type = other DNA
tgtctctgggttcccagaca

SEQ ID NO: 23686 - DNA, 20 bp, synthetic construct
  misc_feature 1..20: note = chemically synthesized
  source 1..20: mol_type = other DNA
tcttgaaggggtgcggggtg

SEQ ID NO: 23687 - DNA, 20 bp, synthetic construct
  misc_feature 1..20: note = chemically synthesized
  source 1..20: mol_type = other DNA
taaatgggttgctggtgggc

SEQ ID NO: 23688 - DNA, 20 bp, synthetic construct
  misc_feature 1..20: note = chemically synthesized
  source 1..20: mol_type = other DNA
agtggggtagcattttctta

SEQ ID NO: 23689 - DNA, 20 bp, synthetic construct
  misc_feature 1..20: note = chemically synthesized
  source 1..20: mol_type = other DNA
ctgtgggtgggggatgtcag

SEQ ID NO: 23690 - DNA, 20 bp, synthetic construct
  misc_feature 1..20: note = chemically synthesized
  source 1..20: mol_type = other DNA
ttctctggagcaatgccttt

SEQ ID NO: 23691 - DNA, 20 bp, synthetic construct
  misc_feature 1..20: note = chemically synthesized
  source 1..20: mol_type = other DNA
gtcaagggactctcctgtgg

SEQ ID NO: 23692 - DNA, 20 bp, synthetic construct
  misc_feature 1..20: note = chemically synthesized
  source 1..20: mol_type = other DNA
tcacagaggatccctactgg

SEQ ID NO: 23693 - DNA, 20 bp, synthetic construct
  misc_feature 1..20: note = chemically synthesized
  source 1..20: mol_type = other DNA
gatccctactgggtaggctt

SEQ ID NO: 23694 - DNA, 20 bp, synthetic construct
  misc_feature 1..20: note = chemically synthesized
  source 1..20: mol_type = other DNA
tccctccccttcattgcctt

SEQ ID NO: 23695 - DNA, 20 bp, synthetic construct
  misc_feature 1..20: note = chemically synthesized
  source 1..20: mol_type = other DNA
attccagaattctctcttat

SEQ ID NO: 23696 - DNA, 20 bp, synthetic construct
  misc_feature 1..20: note = chemically synthesized
  source 1..20: mol_type = other DNA
gccccttcccttgaaatttt

SEQ ID NO: 23697 - DNA, 20 bp, synthetic construct
  misc_feature 1..20: note = chemically synthesized
  source 1..20: mol_type = other DNA
cccttgaaattttttaagct

SEQ ID NO: 23698 - DNA, 20 bp, synthetic construct
  misc_feature 1..20: note = chemically synthesized
  source 1..20: mol_type = other DNA
agaagtagcgaattagttaa

SEQ ID NO: 23699 - DNA, 20 bp, synthetic construct
  misc_feature 1..20: note = chemically synthesized
  source 1..20: mol_type = other DNA
ttcatttcccaaatcaaatc

SEQ ID NO: 23700 - DNA, 20 bp, synthetic construct
  misc_feature 1..20: note = chemically synthesized
  source 1..20: mol_type = other DNA
ttatgttcttcagcaaataa

SEQ ID NO: 23701 - DNA, 20 bp, synthetic construct
  misc_feature 1..20: note = chemically synthesized
  source 1..20: mol_type = other DNA
atacgtaatctaacaaacaa

SEQ ID NO: 23702 - DNA, 20 bp, synthetic construct
  misc_feature 1..20: note = chemically synthesized
  source 1..20: mol_type = other DNA
gatgcatagttgcaaataaa

SEQ ID NO: 23703 - DNA, 20 bp, synthetic construct
  misc_feature 1..20: note = chemically synthesized
  source 1..20: mol_type = other DNA
aattttgcatttttgtggat

SEQ ID NO: 23704 - DNA, 20 bp, synthetic construct
  misc_feature 1..20: note = chemically synthesized
  source 1..20: mol_type = other DNA
ttgtggatagtggttttgaa

SEQ ID NO: 23705 - DNA, 20 bp, synthetic construct
  misc_feature 1..20: note = chemically synthesized
  source 1..20: mol_type = other DNA
tagttgcccttgcaaattgg

SEQ ID NO: 23706 - DNA, 20 bp, synthetic construct
  misc_feature 1..20: note = chemically synthesized
  source 1..20: mol_type = other DNA
tttcctcaacaaataatttt

SEQ ID NO: 23707 - DNA, 20 bp, synthetic construct
  misc_feature 1..20: note = chemically synthesized
  source 1..20: mol_type = other DNA
atgacatcaatttatgttaa

SEQ ID NO: 23708 - DNA, 20 bp, synthetic construct
  misc_feature 1..20: note = chemically synthesized
  source 1..20: mol_type = other DNA
tgtctgttcttgtccagtct

SEQ ID NO: 23709 - DNA, 20 bp, synthetic construct
  misc_feature 1..20: note = chemically synthesized
  source 1..20: mol_type = other DNA
ttcttgtccagtctagaagt

SEQ ID NO: 23710 - DNA, 20 bp, synthetic construct
  misc_feature 1..20: note = chemically synthesized
  source 1..20: mol_type = other DNA
ctcatcacataacatctgaa

SEQ ID NO: 23711 - DNA, 20 bp, synthetic construct
  misc_feature 1..20: note = chemically synthesized
  source 1..20: mol_type = other DNA
attatcagactctgctcaat

SEQ ID NO: 23712 - DNA, 20 bp, synthetic construct
  misc_feature 1..20: note = chemically synthesized
  source 1..20: mol_type = other DNA
agatgaaattcttaaggaca

SEQ ID NO: 23713 - DNA, 20 bp, synthetic construct
  misc_feature 1..20: note = chemically synthesized
  source 1..20: mol_type = other DNA
cttgtgtagactcatatgaa

SEQ ID NO: 23714 - DNA, 20 bp, synthetic construct
  misc_feature 1..20: note = chemically synthesized
  source 1..20: mol_type = other DNA
atgaagttctactttgtgac

SEQ ID NO: 23715 - DNA, 20 bp, synthetic construct
  misc_feature 1..20: note = chemically synthesized
  source 1..20: mol_type = other DNA
accattgattgtgactattg

SEQ ID NO: 23716 - DNA, 20 bp, synthetic construct
  misc_feature 1..20: note = chemically synthesized
  source 1..20: mol_type = other DNA
ctgtagtctgatgaaatgga

SEQ ID NO: 23717 - DNA, 20 bp, synthetic construct
  misc_feature 1..20: note = chemically synthesized
  source 1..20: mol_type = other DNA
aagtaatatataagtaataa

SEQ ID NO: 23718 - DNA, 20 bp, synthetic construct
  misc_feature 1..20: note = chemically synthesized
  source 1..20: mol_type = other DNA
attgctttttgcaattgagt

SEQ ID NO: 23719 - DNA, 20 bp, synthetic construct
  misc_feature 1..20: note = chemically synthesized
  source 1..20: mol_type = other DNA
atgccaggatcttattacct

SEQ ID NO: 23720 - DNA, 20 bp, synthetic construct
  misc_feature 1..20: note = chemically synthesized
  source 1..20: mol_type = other DNA
tattacctccaggatttcac

SEQ ID NO: 23721 - DNA, 20 bp, synthetic construct
  misc_feature 1..20: note = chemically synthesized
  source 1..20: mol_type = other DNA
aaagtattgctcaagtaatc

SEQ ID NO: 23722 - DNA, 20 bp, synthetic construct
  misc_feature 1..20: note = chemically synthesized
  source 1..20: mol_type = other DNA
gattatttgtgtattctcac

SEQ ID NO: 23723 - DNA, 20 bp, synthetic construct
  misc_feature 1..20: note = chemically synthesized
  source 1..20: mol_type = other DNA
tgtcacgggaaatatcctgc

SEQ ID NO: 23724 - DNA, 20 bp, synthetic construct
  misc_feature 1..20: note = chemically synthesized
  source 1..20: mol_type = other DNA
tctttccttgcacactctac

SEQ ID NO: 23725 - DNA, 20 bp, synthetic construct
  misc_feature 1..20: note = chemically synthesized
  source 1..20: mol_type = other DNA
aattaccccattaagtgata

SEQ ID NO: 23726 - DNA, 20 bp, synthetic construct
  misc_feature 1..20: note = chemically synthesized
  source 1..20: mol_type = other DNA
tatgtactagttcgttatca

SEQ ID NO: 23727 - DNA, 20 bp, synthetic construct
  misc_feature 1..20: note = chemically synthesized
  source 1..20: mol_type = other DNA
ctgggtaatttataaggaaa

SEQ ID NO: 23728 - DNA, 20 bp, synthetic construct
  misc_feature 1..20: note = chemically synthesized
  source 1..20: mol_type = other DNA
tgccaagcaaaagggggaaa

SEQ ID NO: 23729 - DNA, 20 bp, synthetic construct
  misc_feature 1..20: note = chemically synthesized
  source 1..20: mol_type = other DNA
gagcatgagagtaacctcct

SEQ ID NO: 23730 - DNA, 20 bp, synthetic construct
  misc_feature 1..20: note = chemically synthesized
  source 1..20: mol_type = other DNA
caaatccctcccacaacacg

SEQ ID NO: 23731 - DNA, 20 bp, synthetic construct
  misc_feature 1..20: note = chemically synthesized
  source 1..20: mol_type = other DNA
tatgggaactacaattcaag

SEQ ID NO: 23732 - DNA, 20 bp, synthetic construct
  misc_feature 1..20: note = chemically synthesized
  source 1..20: mol_type = other DNA
atgttgcatagtggtgaagt

SEQ ID NO: 23733 - DNA, 20 bp, synthetic construct
  misc_feature 1..20: note = chemically synthesized
  source 1..20: mol_type = other DNA
agtgaatgttgtatccaatc

SEQ ID NO: 23734 - DNA, 20 bp, synthetic construct
  misc_feature 1..20: note = chemically synthesized
  source 1..20: mol_type = other DNA
tattatttcattctatatgt

SEQ ID NO: 23735 - DNA, 20 bp, synthetic construct
  misc_feature 1..20: note = chemically synthesized
  source 1..20: mol_type = other DNA
tctatatgtctatgcttact

SEQ ID NO: 23736 - DNA, 20 bp, synthetic construct
  misc_feature 1..20: note = chemically synthesized
  source 1..20: mol_type = other DNA
tctcactaaatgagaacata

SEQ ID NO: 23737 - DNA, 20 bp, synthetic construct
  misc_feature 1..20: note = chemically synthesized
  source 1..20: mol_type = other DNA
agaacatactgtgtttgact

SEQ ID NO: 23738 - DNA, 20 bp, synthetic construct
  misc_feature 1..20: note = chemically synthesized
  source 1..20: mol_type = other DNA
ataatgtcctccagttctaa

SEQ ID NO: 23739 - DNA, 20 bp, synthetic construct
  misc_feature 1..20: note = chemically synthesized
  source 1..20: mol_type = other DNA
taaccatgtttctagagaag

SEQ ID NO: 23740 - DNA, 20 bp, synthetic construct
  misc_feature 1..20: note = chemically synthesized
  source 1..20: mol_type = other DNA
cgtccattggtagacattta

SEQ ID NO: 23741 - DNA, 20 bp, synthetic construct
  misc_feature 1..20: note = chemically synthesized
  source 1..20: mol_type = other DNA
ctttgggtccatacccagta

SEQ ID NO: 23742 - DNA, 20 bp, synthetic construct
  misc_feature 1..20: note = chemically synthesized
  source 1..20: mol_type = other DNA
ccatacccagtagtgggatt

SEQ ID NO: 23743 - DNA, 20 bp, synthetic construct
  misc_feature 1..20: note = chemically synthesized
  source 1..20: mol_type = other DNA
attgcaggattgaatggtag

SEQ ID NO: 23744 - DNA, 20 bp, synthetic construct
  misc_feature 1..20: note = chemically synthesized
  source 1..20: mol_type = other DNA
aatcttcatgctgtcttcca

SEQ ID NO: 23745 - DNA, 20 bp, synthetic construct
  misc_feature 1..20: note = chemically synthesized
  source 1..20: mol_type = other DNA
tccacatcctcaccaacatc

SEQ ID NO: 23746 - DNA, 20 bp, synthetic construct
  misc_feature 1..20: note = chemically synthesized
  source 1..20: mol_type = other DNA
ggcataaggaggtatcatat

SEQ ID NO: 23747 - DNA, 20 bp, synthetic construct
  misc_feature 1..20: note = chemically synthesized
  source 1..20: mol_type = other DNA
tggtggttttaatttgcatt

SEQ ID NO: 23748 - DNA, 20 bp, synthetic construct
  misc_feature 1..20: note = chemically synthesized
  source 1..20: mol_type = other DNA
agtgatgttgaacttttttt

SEQ ID NO: 23749 - DNA, 20 bp, synthetic construct
  misc_feature 1..20: note = chemically synthesized
  source 1..20: mol_type = other DNA
tagatagatagatagataga

SEQ ID NO: 23750 - DNA, 20 bp, synthetic construct
  misc_feature 1..20: note = chemically synthesized
  source 1..20: mol_type = other DNA
atatagatttagatataaaa

SEQ ID NO: 23751 - DNA, 20 bp, synthetic construct
  misc_feature 1..20: note = chemically synthesized
  source 1..20: mol_type = other DNA
aagctgaaggacttggagtc

SEQ ID NO: 23752 - DNA, 20 bp, synthetic construct
  misc_feature 1..20: note = chemically synthesized
  source 1..20: mol_type = other DNA
atccagcatgggagaaagat

SEQ ID NO: 23753 - DNA, 20 bp, synthetic construct
  misc_feature 1..20: note = chemically synthesized
  source 1..20: mol_type = other DNA
ggcttggaggctaagccagt

SEQ ID NO: 23754 - DNA, 20 bp, synthetic construct
  misc_feature 1..20: note = chemically synthesized
  source 1..20: mol_type = other DNA
taagccagtccaggattttc

SEQ ID NO: 23755 - DNA, 20 bp, synthetic construct
  misc_feature 1..20: note = chemically synthesized
  source 1..20: mol_type = other DNA
ttttcacatgttttttttct

SEQ ID NO: 23756 - DNA, 20 bp, synthetic construct
  misc_feature 1..20: note = chemically synthesized
  source 1..20: mol_type = other DNA
tatatcctggccacactggc

SEQ ID NO: 23757 - DNA, 20 bp, synthetic construct
  misc_feature 1..20: note = chemically synthesized
  source 1..20: mol_type = other DNA
aactgattagatggtgccca

SEQ ID NO: 23758 - DNA, 20 bp, synthetic construct
  misc_feature 1..20: note = chemically synthesized
  source 1..20: mol_type = other DNA
agtattaaccatcacaagtc

SEQ ID NO: 23759 - DNA, 20 bp, synthetic construct
  misc_feature 1..20: note = chemically synthesized
  source 1..20: mol_type = other DNA
acaagtgtatacagacacga

SEQ ID NO: 23760 - DNA, 20 bp, synthetic construct
  misc_feature 1..20: note = chemically synthesized
  source 1..20: mol_type = other DNA
tcctgcctggaatggcctgt

SEQ ID NO: 23761 - DNA, 20 bp, synthetic construct
  misc_feature 1..20: note = chemically synthesized
  source 1..20: mol_type = other DNA
ggatctcctatattccatgc

SEQ ID NO: 23762 - DNA, 20 bp, synthetic construct
  misc_feature 1..20: note = chemically synthesized
  source 1..20: mol_type = other DNA
acctccattgtggagttgta

SEQ ID NO: 23763 - DNA, 20 bp, synthetic construct
  misc_feature 1..20: note = chemically synthesized
  source 1..20: mol_type = other DNA
tccaggtggcaatcttaatt

SEQ ID NO: 23764 - DNA, 20 bp, synthetic construct
  misc_feature 1..20: note = chemically synthesized
  source 1..20: mol_type = other DNA
cttccacttccacttccacc

SEQ ID NO: 23765 - DNA, 20 bp, synthetic construct
  misc_feature 1..20: note = chemically synthesized
  source 1..20: mol_type = other DNA
aaacagtaccatatattgga

SEQ ID NO: 23766 - DNA, 20 bp, synthetic construct
  misc_feature 1..20: note = chemically synthesized
  source 1..20: mol_type = other DNA
acttcaaaaggccattcaaa

SEQ ID NO: 23767 - DNA, 20 bp, synthetic construct
  misc_feature 1..20: note = chemically synthesized
  source 1..20: mol_type = other DNA
acttctttagccataaagtg

SEQ ID NO: 23768 - DNA, 20 bp, synthetic construct
  misc_feature 1..20: note = chemically synthesized
  source 1..20: mol_type = other DNA
atgacagtggatacggcatt

SEQ ID NO: 23769 - DNA, 20 bp, synthetic construct
  misc_feature 1..20: note = chemically synthesized
  source 1..20: mol_type = other DNA
tcttggcataagcattgagt

SEQ ID NO: 23770 - DNA, 20 bp, synthetic construct
  misc_feature 1..20: note = chemically synthesized
  source 1..20: mol_type = other DNA
ccgaggaatggtgccatatc

SEQ ID NO: 23771 - DNA, 20 bp, synthetic construct
  misc_feature 1..20: note = chemically synthesized
  source 1..20: mol_type = other DNA
caagcagtggctgtggccag

SEQ ID NO: 23772 - DNA, 20 bp, synthetic construct
  misc_feature 1..20: note = chemically synthesized
  source 1..20: mol_type = other DNA
cagaattgatcatcctatcc

SEQ ID NO: 23773 - DNA, 20 bp, synthetic construct
  misc_feature 1..20: note = chemically synthesized
  source 1..20: mol_type = other DNA
acatgggatgaaaatatctt

SEQ ID NO: 23774 - DNA, 20 bp, synthetic construct
  misc_feature 1..20: note = chemically synthesized
  source 1..20: mol_type = other DNA
ctttgtcatcaattttccag

SEQ ID NO: 23775 - DNA, 20 bp, synthetic construct
  misc_feature 1..20: note = chemically synthesized
  source 1..20: mol_type = other DNA
gctcaaagttctgccaacta

SEQ ID NO: 23776 - DNA, 20 bp, synthetic construct
  misc_feature 1..20: note = chemically synthesized
  source 1..20: mol_type = other DNA
tgatgactcatagtcaaata

SEQ ID NO: 23777 - DNA, 20 bp, synthetic construct
  misc_feature 1..20: note = chemically synthesized
  source 1..20: mol_type = other DNA
ccaaagcccagtaacaggcc

SEQ ID NO: 23778 - DNA, 20 bp, synthetic construct
  misc_feature 1..20: note = chemically synthesized
  source 1..20: mol_type = other DNA
caaaatcctagaggcctccg

SEQ ID NO: 23779 - DNA, 20 bp, synthetic construct
  misc_feature 1..20: note = chemically synthesized
  source 1..20: mol_type = other DNA
tcatatggcccaagtggcat

SEQ ID NO: 23780 - DNA, 20 bp, synthetic construct
  misc_feature 1..20: note = chemically synthesized
  source 1..20: mol_type = other DNA
gtagaaggtccctgaattta

SEQ ID NO: 23781 - DNA, 20 bp, synthetic construct
  misc_feature 1..20: note = chemically synthesized
  source 1..20: mol_type = other DNA
atgtctcatcaataaatcca

SEQ ID NO: 23782 - DNA, 20 bp, synthetic construct
  misc_feature 1..20: note = chemically synthesized
  source 1..20: mol_type = other DNA
ggtgagcaagttctctccaa

SEQ ID NO: 23783 - DNA, 20 bp, synthetic construct
  misc_feature 1..20: note = chemically synthesized
  source 1..20: mol_type = other DNA
ccaaccaacttcactatgtt

SEQ ID NO: 23784 - DNA, 20 bp, synthetic construct
  misc_feature 1..20: note = chemically synthesized
  source 1..20: mol_type = other DNA
actctctaaacaattgatgc

SEQ ID NO: 23785 - DNA, 20 bp, synthetic construct
  misc_feature 1..20: note = chemically synthesized
  source 1..20: mol_type = other DNA
ctctatatctatatctatat

SEQ ID NO: 23786 - DNA, 20 bp, synthetic construct
  misc_feature 1..20: note = chemically synthesized
  source 1..20: mol_type = other DNA
tagccttttcacatttttct

SEQ ID NO: 23787 - DNA, 20 bp, synthetic construct
  misc_feature 1..20: note = chemically synthesized
  source 1..20: mol_type = other DNA
tatatcctggctgtgctggc

SEQ ID NO: 23788 - DNA, 20 bp, synthetic construct
  misc_feature 1..20: note = chemically synthesized
  source 1..20: mol_type = other DNA
aactgattagatggtgccca

SEQ ID NO: 23789 - DNA, 20 bp, synthetic construct
  misc_feature 1..20: note = chemically synthesized
  source 1..20: mol_type = other DNA
cacagtcactttctaatgag

SEQ ID NO: 23790 - DNA, 20 bp, synthetic construct
  misc_feature 1..20: note = chemically synthesized
  source 1..20: mol_type = other DNA
ttttttgttgttgagttcct

SEQ ID NO: 23791 - DNA, 20 bp, synthetic construct
  misc_feature 1..20: note = chemically synthesized
  source 1..20: mol_type = other DNA
tattagccttttgttgcatt

SEQ ID NO: 23792 - DNA, 20 bp, synthetic construct
  misc_feature 1..20: note = chemically synthesized
  source 1..20: mol_type = other DNA
tttttctcattctgtaggtt

SEQ ID NO: 23793 - DNA, 20 bp, synthetic construct
  misc_feature 1..20: note = chemically synthesized
  source 1..20: mol_type = other DNA
tgtaggttatccgtttactc

SEQ ID NO: 23794 - DNA, 20 bp, synthetic construct
  misc_feature 1..20: note = chemically synthesized
  source 1..20: mol_type = other DNA
cttttgcggtgcagaagcat

SEQ ID NO: 23795 - DNA, 20 bp, synthetic construct
  misc_feature 1..20: note = chemically synthesized
  source 1..20: mol_type = other DNA
agtttaattaagtcccattt

SEQ ID NO: 23796 - DNA, 20 bp, synthetic construct
  misc_feature 1..20: note = chemically synthesized
  source 1..20: mol_type = other DNA
attaagtcccatttgtctgt

SEQ ID NO: 23797 - DNA, 20 bp, synthetic construct
  misc_feature 1..20: note = chemically synthesized
  source 1..20: mol_type = other DNA
tttgtctgtttttgtttttg

SEQ ID NO: 23798 - DNA, 20 bp, synthetic construct
  misc_feature 1..20: note = chemically synthesized
  source 1..20: mol_type = other DNA
ctgtttttgtttttgttgtg

SEQ ID NO: 23799 - DNA, 20 bp, synthetic construct
  misc_feature 1..20: note = chemically synthesized
  source 1..20: mol_type = other DNA
aagttgactagttcagtgta

SEQ ID NO: 23800 - DNA, 20 bp, synthetic construct
  misc_feature 1..20: note = chemically synthesized
  source 1..20: mol_type = other DNA
tttctaattttttgccatca

SEQ ID NO: 23801 - DNA, 20 bp, synthetic construct
  misc_feature 1..20: note = chemically synthesized
  source 1..20: mol_type = other DNA
tctccttaattttcccccag

SEQ ID NO: 23802 - DNA, 20 bp, synthetic construct
  misc_feature 1..20: note = chemically synthesized
  source 1..20: mol_type = other DNA
ttccaaatgtatccatatat

SEQ ID NO: 23803 - DNA, 20 bp, synthetic construct
  misc_feature 1..20: note = chemically synthesized
  source 1..20: mol_type = other DNA
tgtatccatatattgtggct

SEQ ID NO: 23804 - DNA, 20 bp, synthetic construct
  misc_feature 1..20: note = chemically synthesized
  source 1..20: mol_type = other DNA
tattagaggagagaattaag

SEQ ID NO: 23805 - DNA, 20 bp, synthetic construct
  misc_feature 1..20: note = chemically synthesized
  source 1..20: mol_type = other DNA
agacaccgagttaaagaagg

SEQ ID NO: 23806 - DNA, 20 bp, synthetic construct
  misc_feature 1..20: note = chemically synthesized
  source 1..20: mol_type = other DNA
aggaagggctttattcggct

SEQ ID NO: 23807 - DNA, 20 bp, synthetic construct
  misc_feature 1..20: note = chemically synthesized
  source 1..20: mol_type = other DNA
gagcaattcctgtccctttt

SEQ ID NO: 23808 - DNA, 20 bp, synthetic construct
  misc_feature 1..20: note = chemically synthesized
  source 1..20: mol_type = other DNA
cagaatggaacagaacagga

SEQ ID NO: 23809 - DNA, 20 bp, synthetic construct
  misc_feature 1..20: note = chemically synthesized
  source 1..20: mol_type = other DNA
gaacaggacagggattttca

SEQ ID NO: 23810 - DNA, 20 bp, synthetic construct
  misc_feature 1..20: note = chemically synthesized
  source 1..20: mol_type = other DNA
aggcccaggatgtggtctca

SEQ ID NO: 23811 - DNA, 20 bp, synthetic construct
  misc_feature 1..20: note = chemically synthesized
  source 1..20: mol_type = other DNA
gtggtctcaggctgtttgcc

SEQ ID NO: 23812 - DNA, 20 bp, synthetic construct
  misc_feature 1..20: note = chemically synthesized
  source 1..20: mol_type = other DNA
tgtggatttcatttctgcct

SEQ ID NO: 23813 - DNA, 20 bp, synthetic construct
  misc_feature 1..20: note = chemically synthesized
  source 1..20: mol_type = other DNA
atgaaatacgtatttgtgtt

SEQ ID NO: 23814 - DNA, 20 bp, synthetic construct
  misc_feature 1..20: note = chemically synthesized
  source 1..20: mol_type = other DNA
gttctccttatcaaaaggta

SEQ ID NO: 23815 - DNA, 20 bp, synthetic construct
  misc_feature 1..20: note = chemically synthesized
  source 1..20: mol_type = other DNA
ttatcaaaaggtactttgct

SEQ ID NO: 23816 - DNA, 20 bp, synthetic construct
  misc_feature 1..20: note = chemically synthesized
  source 1..20: mol_type = other DNA
ctttaaaagataaatgacta

SEQ ID NO: 23817 - DNA, 20 bp, synthetic construct
  misc_feature 1..20: note = chemically synthesized
  source 1..20: mol_type = other DNA
gataaatgactatgtagctt

SEQ ID NO: 23818 - DNA, 20 bp, synthetic construct
  misc_feature 1..20: note = chemically synthesized
  source 1..20: mol_type = other DNA
agaaggaggaagagaggtga

SEQ ID NO: 23819 - DNA, 20 bp, synthetic construct
  misc_feature 1..20: note = chemically synthesized
  source 1..20: mol_type = other DNA
ctttgacactacaaagtgac

SEQ ID NO: 23820 - DNA, 20 bp, synthetic construct
  misc_feature 1..20: note = chemically synthesized
  source 1..20: mol_type = other DNA
tttgaaaggtaaataaatcc

SEQ ID NO: 23821 - DNA, 20 bp, synthetic construct
  misc_feature 1..20: note = chemically synthesized
  source 1..20: mol_type = other DNA
aacagttggaggcatctata

SEQ ID NO: 23822 - DNA, 22 bp, synthetic construct
  misc_feature 1..22: note = chemically synthesized
  source 1..22: mol_type = other DNA
gcagccatgcttattcattgcg

SEQ ID NO: 23823 - DNA, 22 bp, synthetic construct
  misc_feature 1..22: note = chemically synthesized
  source 1..22: mol_type = other DNA
attcattgcgtccactgctctt

SEQ ID NO: 23824 - DNA, 22 bp, synthetic construct
  misc_feature 1..22: note = chemically synthesized
  source 1..22: mol_type = other DNA
ttcattgcgtccactgctcttc

SEQ ID NO: 23825 - DNA, 22 bp, synthetic construct
  misc_feature 1..22: note = chemically synthesized
  source 1..22: mol_type = other DNA
attgcgtccactgctcttctga

SEQ ID NO: 23826 - DNA, 22 bp, synthetic construct
  misc_feature 1..22: note = chemically synthesized
  source 1..22: mol_type = other DNA
cgtccactgctcttctgacagc

SEQ ID NO: 23827 - DNA, 22 bp, synthetic construct
  misc_feature 1..22: note = chemically synthesized
  source 1..22: mol_type = other DNA
ctcttctgacagcatcatttac

SEQ ID NO: 23828 - DNA, 22 bp, synthetic construct
  misc_feature 1..22: note = chemically synthesized
  source 1..22: mol_type = other DNA
ttctgacagcatcatttacagg

SEQ ID NO: 23829 - DNA, 22 bp, synthetic construct
  misc_feature 1..22: note = chemically synthesized
  source 1..22: mol_type = other DNA
ctgacagcatcatttacaggtt

SEQ ID NO: 23830 - DNA, 22 bp, synthetic construct
  misc_feature 1..22: note = chemically synthesized
  source 1..22: mol_type = other DNA
tgacagcatcatttacaggttc

SEQ ID NO: 23831 - DNA, 22 bp, synthetic construct
  misc_feature 1..22: note = chemically synthesized
  source 1..22: mol_type = other DNA
acagcatcatttacaggttcac

SEQ ID NO: 23832 - DNA, 22 bp, synthetic construct
  misc_feature 1..22: note = chemically synthesized
  source 1..22: mol_type = other DNA
acaggttcacactgttccacct

SEQ ID NO: 23833 - DNA, 22 bp, synthetic construct
  misc_feature 1..22: note = chemically synthesized
  source 1..22: mol_type = other DNA
caggttcacactgttccacctg

SEQ ID NO: 23834 - DNA, 22 bp, synthetic construct
  misc_feature 1..22: note = chemically synthesized
  source 1..22: mol_type = other DNA
acactgttccacctgagtcttc

SEQ ID NO: 23835 - DNA, 22 bp, synthetic construct
  misc_feature 1..22: note = chemically synthesized
  source 1..22: mol_type = other DNA
ttccacctgagtcttcatatta

SEQ ID NO: 23836 - DNA, 22 bp, synthetic construct
  misc_feature 1..22: note = chemically synthesized
  source 1..22: mol_type = other DNA
cacctgagtcttcatattatgc

SEQ ID NO: 23837 - DNA, 22 bp, synthetic construct
  misc_feature 1..22: note = chemically synthesized
  source 1..22: mol_type = other DNA
agtcttcatattatgctcaaaa

SEQ ID NO: 23838 - DNA, 22 bp, synthetic construct
  misc_feature 1..22: note = chemically synthesized
  source 1..22: mol_type = other DNA
catattatgctcaaaatatgga

SEQ ID NO: 23839 - DNA, 22 bp, synthetic construct
  misc_feature 1..22: note = chemically synthesized
  source 1..22: mol_type = other DNA
atattatgctcaaaatatggac

SEQ ID NO: 23840 - DNA, 22 bp, synthetic construct
  misc_feature 1..22: note = chemically synthesized
  source 1..22: mol_type = other DNA
tgctcaaaatatggacctatca

SEQ ID NO: 23841 - DNA, 22 bp, synthetic construct
  misc_feature 1..22: note = chemically synthesized
  source 1..22: mol_type = other DNA
aaaatatggacctatcagaaaa

SEQ ID NO: 23842 - DNA, 22 bp, synthetic construct
  misc_feature 1..22: note = chemically synthesized
  source 1..22: mol_type = other DNA
tcagaaaatagttctctcccca

SEQ ID NO: 23843 - DNA, 22 bp, synthetic construct
  misc_feature 1..22: note = chemically synthesized
  source 1..22: mol_type = other DNA
tctccccattcatctgctgttg

SEQ ID NO: 23844 - DNA, 22 bp, synthetic construct
  misc_feature 1..22: note = chemically synthesized
  source 1..22: mol_type = other DNA
tccccattcatctgctgttgtt

SEQ ID NO: 23845 - DNA, 22 bp, synthetic construct
  misc_feature 1..22: note = chemically synthesized
  source 1..22: mol_type = other DNA
cccattcatctgctgttgtttt

SEQ ID NO: 23846 - DNA, 22 bp, synthetic construct
  misc_feature 1..22: note = chemically synthesized
  source 1..22: mol_type = other DNA
atctgctgttgttttggccttt

SEQ ID NO: 23847 - DNA, 22 bp, synthetic construct
  misc_feature 1..22: note = chemically synthesized
  source 1..22: mol_type = other DNA
ctgttgttttggcctttgtctg

SEQ ID NO: 23848 - DNA, 22 bp, synthetic construct
  misc_feature 1..22: note = chemically synthesized
  source 1..22: mol_type = other DNA
ttgttttggcctttgtctgaat

SEQ ID NO: 23849 - DNA, 22 bp, synthetic construct
  misc_feature 1..22: note = chemically synthesized
  source 1..22: mol_type = other DNA
ttttggcctttgtctgaatcac

SEQ ID NO: 23850 - DNA, 22 bp, synthetic construct
  misc_feature 1..22: note = chemically synthesized
  source 1..22: mol_type = other DNA
tggcctttgtctgaatcacagt

SEQ ID NO: 23851 - DNA, 22 bp, synthetic construct
  misc_feature 1..22: note = chemically synthesized
  source 1..22: mol_type = other DNA
ggcctttgtctgaatcacagta

SEQ ID NO: 23852 - DNA, 22 bp, synthetic construct
  misc_feature 1..22: note = chemically synthesized
  source 1..22: mol_type = other DNA
gcctttgtctgaatcacagtat

SEQ ID NO: 23853 - DNA, 22 bp, synthetic construct
  misc_feature 1..22: note = chemically synthesized
  source 1..22: mol_type = other DNA
tgtctgaatcacagtatagatg

SEQ ID NO: 23854 - DNA, 22 bp, synthetic construct
  misc_feature 1..22: note = chemically synthesized
  source 1..22: mol_type = other DNA
gtctgaatcacagtatagatgc

SEQ ID NO: 23855 - DNA, 22 bp, synthetic construct
  misc_feature 1..22: note = chemically synthesized
  source 1..22: mol_type = other DNA
tctgaatcacagtatagatgcc

SEQ ID NO: 23856 - DNA, 22 bp, synthetic construct
  misc_feature 1..22: note = chemically synthesized
  source 1..22: mol_type = other DNA
aatcacagtatagatgcctcca

SEQ ID NO: 23857 - DNA, 22 bp, synthetic construct
  misc_feature 1..22: note = chemically synthesized
  source 1..22: mol_type = other DNA
caactgttaaaaggaaaaaagt

SEQ ID NO: 23858 - DNA, 22 bp, synthetic construct
  misc_feature 1..22: note = chemically synthesized
  source 1..22: mol_type = other DNA
ttaaaaggaaaaaagtttctat

SEQ ID NO: 23859 - DNA, 22 bp, synthetic construct
  misc_feature 1..22: note = chemically synthesized
  source 1..22: mol_type = other DNA
aaaggaaaaaagtttctattat

SEQ ID NO: 23860 - DNA, 22 bp, synthetic construct
  misc_feature 1..22: note = chemically synthesized
  source 1..22: mol_type = other DNA
ctattatcattcaggttagcaa

SEQ ID NO: 23861 - DNA, 22 bp, synthetic construct
  misc_feature 1..22: note = chemically synthesized
  source 1..22: mol_type = other DNA
tattatcattcaggttagcaat

SEQ ID NO: 23862 - DNA, 22 bp, synthetic construct
  misc_feature 1..22: note = chemically synthesized
  source 1..22: mol_type = other DNA
ttatcattcaggttagcaattt

SEQ ID NO: 23863 - DNA, 22 bp, synthetic construct
  misc_feature 1..22: note = chemically synthesized
  source 1..22: mol_type = other DNA
tcattcaggttagcaatttgtt

SEQ ID NO: 23864 - DNA, 22 bp, synthetic construct
  misc_feature 1..22: note = chemically synthesized
  source 1..22: mol_type = other DNA
aggttagcaatttgtttaaagt

SEQ ID NO: 23865 - DNA, 22 bp, synthetic construct
  misc_feature 1..22: note = chemically synthesized
  source 1..22: mol_type = other DNA
gcaatttgtttaaagtaataag

SEQ ID NO: 23866 - DNA, 22 bp, synthetic construct
  misc_feature 1..22: note = chemically synthesized
  source 1..22: mol_type = other DNA
gtttaaagtaataagggatgga

SEQ ID NO: 23867 - DNA, 22 bp, synthetic construct
  misc_feature 1..22: note = chemically synthesized
  source 1..22: mol_type = other DNA
tttaaagtaataagggatggaa

SEQ ID NO: 23868 - DNA, 22 bp, synthetic construct
  misc_feature 1..22: note = chemically synthesized
  source 1..22: mol_type = other DNA
aaagtaataagggatggaaatg

SEQ ID NO: 23869 - DNA, 22 bp, synthetic construct
  misc_feature 1..22: note = chemically synthesized
  source 1..22: mol_type = other DNA
aagtaataagggatggaaatga

SEQ ID NO: 23870 - DNA, 22 bp, synthetic construct
  misc_feature 1..22: note = chemically synthesized
  source 1..22: mol_type = other DNA
agatttttaaattagcatttag

SEQ ID NO: 23871 - DNA, 22 bp, synthetic construct
  misc_feature 1..22: note = chemically synthesized
  source 1..22: mol_type = other DNA
ttaaattagcatttaggatcca

SEQ ID NO: 23872 - DNA, 22 bp, synthetic construct
  misc_feature 1..22: note = chemically synthesized
  source 1..22: mol_type = other DNA
taaattagcatttaggatccac

SEQ ID NO: 23873 - DNA, 22 bp, synthetic construct
  misc_feature 1..22: note = chemically synthesized
  source 1..22: mol_type = other DNA
aaattagcatttaggatccact

SEQ ID NO: 23874 - DNA, 22 bp, synthetic construct
  misc_feature 1..22: note = chemically synthesized
  source 1..22: mol_type = other DNA
aattagcatttaggatccacta

SEQ ID NO: 23875 - DNA, 22 bp, synthetic construct
  misc_feature 1..22: note = chemically synthesized
  source 1..22: mol_type = other DNA
gcatttaggatccactaagccc

SEQ ID NO: 23876 - DNA, 22 bp, synthetic construct
  misc_feature 1..22: note = chemically synthesized
  source 1..22: mol_type = other DNA
aggatccactaagcccaaggat

SEQ ID NO: 23877 - DNA, 22 bp, synthetic construct
  misc_feature 1..22: note = chemically synthesized
  source 1..22: mol_type = other DNA
ggatccactaagcccaaggatt

SEQ ID NO: 23878 - DNA, 22 bp, synthetic construct
  misc_feature 1..22: note = chemically synthesized
  source 1..22: mol_type = other DNA
agcccaaggatttatttacctt

SEQ ID NO: 23879 - DNA, 22 bp, synthetic construct
  misc_feature 1..22: note = chemically synthesized
  source 1..22: mol_type = other DNA
atttacctttcaaaaataatag

SEQ ID NO: 23880 - DNA, 22 bp, synthetic construct
  misc_feature 1..22: note = chemically synthesized
  source 1..22: mol_type = other DNA
tttacctttcaaaaataatagt

SEQ ID NO: 23881 - DNA, 22 bp, synthetic construct
  misc_feature 1..22: note = chemically synthesized
  source 1..22: mol_type = other DNA
acctttcaaaaataatagtatt

SEQ ID NO: 23882 - DNA, 22 bp, synthetic construct
  misc_feature 1..22: note = chemically synthesized
  source 1..22: mol_type = other DNA
cctttcaaaaataatagtattt

SEQ ID NO: 23883 - DNA, 22 bp, synthetic construct
  misc_feature 1..22: note = chemically synthesized
  source 1..22: mol_type = other DNA
tcaaaaataatagtatttgaca

SEQ ID NO: 23884 - DNA, 22 bp, synthetic construct
  misc_feature 1..22: note = chemically synthesized
  source 1..22: mol_type = other DNA
caaaaataatagtatttgacat

SEQ ID NO: 23885 - DNA, 22 bp, synthetic construct
  misc_feature 1..22: note = chemically synthesized
  source 1..22: mol_type = other DNA
aaaaataatagtatttgacata

SEQ ID NO: 23886 - DNA, 22 bp, synthetic construct
  misc_feature 1..22: note = chemically synthesized
  source 1..22: mol_type = other DNA
gacatattgttaagggacacca

SEQ ID NO: 23887 - DNA, 22 bp, synthetic construct
  misc_feature 1..22: note = chemically synthesized
  source 1..22: mol_type = other DNA
acatattgttaagggacaccaa

SEQ ID NO: 23888 - DNA, 22 bp, synthetic construct
  misc_feature 1..22: note = chemically synthesized
  source 1..22: mol_type = other DNA
ttaagggacaccaacgaatggt

SEQ ID NO: 23889 - DNA, 22 bp, synthetic construct
  misc_feature 1..22: note = chemically synthesized
  source 1..22: mol_type = other DNA
agggacaccaacgaatggttac

SEQ ID NO: 23890 - DNA, 22 bp, synthetic construct
  misc_feature 1..22: note = chemically synthesized
  source 1..22: mol_type = other DNA
ctgctttgttcaattctgtgca

SEQ ID NO: 23891 - DNA, 22 bp, synthetic construct
  misc_feature 1..22: note = chemically synthesized
  source 1..22: mol_type = other DNA
ctttgttcaattctgtgcatgt

SEQ ID NO: 23892 - DNA, 22 bp, synthetic construct
  misc_feature 1..22: note = chemically synthesized
  source 1..22: mol_type = other DNA
tgttcaattctgtgcatgtttt

SEQ ID NO: 23893 - DNA, 22 bp, synthetic construct
  misc_feature 1..22: note = chemically synthesized
  source 1..22: mol_type = other DNA
gttcaattctgtgcatgtttta

SEQ ID NO: 23894 - DNA, 22 bp, synthetic construct
  misc_feature 1..22: note = chemically synthesized
  source 1..22: mol_type = other DNA
ttcaattctgtgcatgttttaa

SEQ ID NO: 23895 - DNA, 22 bp, synthetic construct
  misc_feature 1..22: note = chemically synthesized
  source 1..22: mol_type = other DNA
aattctgtgcatgttttaaagt

SEQ ID NO: 23896 - DNA, 22 bp, synthetic construct
  misc_feature 1..22: note = chemically synthesized
  source 1..22: mol_type = other DNA
tgtgcatgttttaaagtccctt

SEQ ID NO: 23897 - DNA, 22 bp, synthetic construct
  misc_feature 1..22: note = chemically synthesized
  source 1..22: mol_type = other DNA
tgcatgttttaaagtcccttct

SEQ ID NO: 23898 - DNA, 22 bp, synthetic construct
  misc_feature 1..22: note = chemically synthesized
  source 1..22: mol_type = other DNA
taaagtcccttctaggtgcatg

SEQ ID NO: 23899 - DNA, 22 bp, synthetic construct
  misc_feature 1..22: note = chemically synthesized
  source 1..22: mol_type = other DNA
aaagtcccttctaggtgcatgt

SEQ ID NO: 23900 - DNA, 22 bp, synthetic construct
  misc_feature 1..22: note = chemically synthesized
  source 1..22: mol_type = other DNA
aagtcccttctaggtgcatgtg

SEQ ID NO: 23901 - DNA, 22 bp, synthetic construct
  misc_feature 1..22: note = chemically synthesized
  source 1..22: mol_type = other DNA
ctaggtgcatgtgaaatagcag

SEQ ID NO: 23902 - DNA, 22 bp, synthetic construct
  misc_feature 1..22: note = chemically synthesized
  source 1..22: mol_type = other DNA
taggtgcatgtgaaatagcagc

SEQ ID NO: 23903 - DNA, 22 bp, synthetic construct
  misc_feature 1..22: note = chemically synthesized
  source 1..22: mol_type = other DNA
ggtgcatgtgaaatagcagcag

SEQ ID NO: 23904 - DNA, 22 bp, synthetic construct
  misc_feature 1..22: note = chemically synthesized
  source 1..22: mol_type = other DNA
atgccgcaaagaggtcaaatac

SEQ ID NO: 23905 - DNA, 22 bp, synthetic construct
  misc_feature 1..22: note = chemically synthesized
  source 1..22: mol_type = other DNA
aaaaagaaagagtctgaaaaga

SEQ ID NO: 23906 - DNA, 22 bp, synthetic construct
  misc_feature 1..22: note = chemically synthesized
  source 1..22: mol_type = other DNA
aaaagacaattggagtaactac

SEQ ID NO: 23907 - DNA, 22 bp, synthetic construct
  misc_feature 1..22: note = chemically synthesized
  source 1..22: mol_type = other DNA
gagtaactacttgcctaaagct

SEQ ID NO: 23908 - DNA, 22 bp, synthetic construct
  misc_feature 1..22: note = chemically synthesized
  source 1..22: mol_type = other DNA
cttgcctaaagctccagtcact

SEQ ID NO: 23909 - DNA, 22 bp, synthetic construct
  misc_feature 1..22: note = chemically synthesized
  source 1..22: mol_type = other DNA
gcctaaagctccagtcactttg

SEQ ID NO: 23910 - DNA, 22 bp, synthetic construct
  misc_feature 1..22: note = chemically synthesized
  source 1..22: mol_type = other DNA
cctaaagctccagtcactttgt

SEQ ID NO: 23911 - DNA, 22 bp, synthetic construct
  misc_feature 1..22: note = chemically synthesized
  source 1..22: mol_type = other DNA
aagctccagtcactttgtagtg

SEQ ID NO: 23912 - DNA, 22 bp, synthetic construct
  misc_feature 1..22: note = chemically synthesized
  source 1..22: mol_type = other DNA
cagtcactttgtagtgtcaaag

SEQ ID NO: 23913 - DNA, 22 bp, synthetic construct
  misc_feature 1..22: note = chemically synthesized
  source 1..22: mol_type = other DNA
tgtagtgtcaaagttaggacaa

SEQ ID NO: 23914 - DNA, 22 bp, synthetic construct
  misc_feature 1..22: note = chemically synthesized
  source 1..22: mol_type = other DNA
gtagtgtcaaagttaggacaaa

SEQ ID NO: 23915 - DNA, 22 bp, synthetic construct
  misc_feature 1..22: note = chemically synthesized
  source 1..22: mol_type = other DNA
tagtgtcaaagttaggacaaat

SEQ ID NO: 23916 - DNA, 22 bp, synthetic construct
  misc_feature 1..22: note = chemically synthesized
  source 1..22: mol_type = other DNA
ggacaaatacccattgtcatca

SEQ ID NO: 23917 - DNA, 22 bp, synthetic construct
  misc_feature 1..22: note = chemically synthesized
  source 1..22: mol_type = other DNA
tcatcatacatgccctcagcag

SEQ ID NO: 23918 - DNA, 22 bp, synthetic construct
  misc_feature 1..22: note = chemically synthesized
  source 1..22: mol_type = other DNA
agcagcagaaatcactttcacc

SEQ ID NO: 23919 - DNA, 22 bp, synthetic construct
  misc_feature 1..22: note = chemically synthesized
  source 1..22: mol_type = other DNA
tcacctctcttcctccttctcc

SEQ ID NO: 23920 - DNA, 22 bp, synthetic construct
  misc_feature 1..22: note = chemically synthesized
  source 1..22: mol_type = other DNA
cacctctcttcctccttctcct

SEQ ID NO: 23921 - DNA, 22 bp, synthetic construct
  misc_feature 1..22: note = chemically synthesized
  source 1..22: mol_type = other DNA
acctctcttcctccttctccta

SEQ ID NO: 23922 - DNA, 22 bp, synthetic construct
  misc_feature 1..22: note = chemically synthesized
  source 1..22: mol_type = other DNA
tcttcctccttctcctacagtg

SEQ ID NO: 23923 - DNA, 22 bp, synthetic construct
  misc_feature 1..22: note = chemically synthesized
  source 1..22: mol_type = other DNA
ttcctccttctcctacagtggt

SEQ ID NO: 23924 - DNA, 22 bp, synthetic construct
  misc_feature 1..22: note = chemically synthesized
  source 1..22: mol_type = other DNA
cctccttctcctacagtggtcc

SEQ ID NO: 23925 - DNA, 22 bp, synthetic construct
  misc_feature 1..22: note = chemically synthesized
  source 1..22: mol_type = other DNA
ctccttctcctacagtggtcca

SEQ ID NO: 23926 - DNA, 22 bp, synthetic construct
  misc_feature 1..22: note = chemically synthesized
  source 1..22: mol_type = other DNA
cttctcctacagtggtccagaa

SEQ ID NO: 23927 - DNA, 22 bp, synthetic construct
  misc_feature 1..22: note = chemically synthesized
  source 1..22: mol_type = other DNA
ctcctacagtggtccagaaggg

SEQ ID NO: 23928 - DNA, 22 bp, synthetic construct
  misc_feature 1..22: note = chemically synthesized
  source 1..22: mol_type = other DNA
tcctacagtggtccagaagggg

SEQ ID NO: 23929 - DNA, 22 bp, synthetic construct
  misc_feature 1..22: note = chemically synthesized
  source 1..22: mol_type = other DNA
ctacagtggtccagaaggggct

SEQ ID NO: 23930 - DNA, 22 bp, synthetic construct
  misc_feature 1..22: note = chemically synthesized
  source 1..22: mol_type = other DNA
cagtggtccagaaggggctcag

SEQ ID NO: 23931 - DNA, 22 bp, synthetic construct
  misc_feature 1..22: note = chemically synthesized
  source 1..22: mol_type = other DNA
aggtatgttcaaataacagctg

SEQ ID NO: 23932 - DNA, 22 bp, synthetic construct
  misc_feature 1..22: note = chemically synthesized
  source 1..22: mol_type = other DNA
aaataacagctgctgtggtttt

SEQ ID NO: 23933 - DNA, 22 bp, synthetic construct
  misc_feature 1..22: note = chemically synthesized
  source 1..22: mol_type = other DNA
ctgtggttttcaattatgaaga

SEQ ID NO: 23934 - DNA, 22 bp, synthetic construct
  misc_feature 1..22: note = chemically synthesized
  source 1..22: mol_type = other DNA
tggttttcaattatgaagaaat

SEQ ID NO: 23935 - DNA, 22 bp, synthetic construct
  misc_feature 1..22: note = chemically synthesized
  source 1..22: mol_type = other DNA
tcaattatgaagaaatctccta

SEQ ID NO: 23936 - DNA, 22 bp, synthetic construct
  misc_feature 1..22: note = chemically synthesized
  source 1..22: mol_type = other DNA
caattatgaagaaatctcctaa

SEQ ID NO: 23937 - DNA, 22 bp, synthetic construct
  misc_feature 1..22: note = chemically synthesized
  source 1..22: mol_type = other DNA
aattatgaagaaatctcctaag

SEQ ID NO: 23938 - DNA, 22 bp, synthetic construct
  misc_feature 1..22: note = chemically synthesized
  source 1..22: mol_type = other DNA
tgaagaaatctcctaagctaca

SEQ ID NO: 23939 - DNA, 22 bp, synthetic construct
  misc_feature 1..22: note = chemically synthesized
  source 1..22: mol_type = other DNA
ctaagctacatagtcatttatc

SEQ ID NO: 23940 - DNA, 22 bp, synthetic construct
  misc_feature 1..22: note = chemically synthesized
  source 1..22: mol_type = other DNA
agctacatagtcatttatcttt

SEQ ID NO: 23941 - DNA, 22 bp, synthetic construct
  misc_feature 1..22: note = chemically synthesized
  source 1..22: mol_type = other DNA
catagtcatttatcttttaaag

SEQ ID NO: 23942 - DNA, 22 bp, synthetic construct
  misc_feature 1..22: note = chemically synthesized
  source 1..22: mol_type = other DNA
atcttttaaagcaccaagcaaa

SEQ ID NO: 23943 - DNA, 22 bp, synthetic construct
  misc_feature 1..22: note = chemically synthesized
  source 1..22: mol_type = other DNA
tcttttaaagcaccaagcaaag

SEQ ID NO: 23944 - DNA, 22 bp, synthetic construct
  misc_feature 1..22: note = chemically synthesized
  source 1..22: mol_type = other DNA
ttaaagcaccaagcaaagtacc

SEQ ID NO: 23945 - DNA, 22 bp, synthetic construct
  misc_feature 1..22: note = chemically synthesized
  source 1..22: mol_type = other DNA
taaagcaccaagcaaagtacct

SEQ ID NO: 23946 - DNA, 22 bp, synthetic construct
  misc_feature 1..22: note = chemically synthesized
  source 1..22: mol_type = other DNA
aaagcaccaagcaaagtacctt

SEQ ID NO: 23947 - DNA, 22 bp, synthetic construct
  misc_feature 1..22: note = chemically synthesized
  source 1..22: mol_type = other DNA
aagcaccaagcaaagtaccttt

SEQ ID NO: 23948 - DNA, 22 bp, synthetic construct
  misc_feature 1..22: note = chemically synthesized
  source 1..22: mol_type = other DNA
ttgataaggagaacgtgcttat

SEQ ID NO: 23949 - DNA, 22 bp, synthetic construct
  misc_feature 1..22: note = chemically synthesized
  source 1..22: mol_type = other DNA
tgataaggagaacgtgcttata

SEQ ID NO: 23950 - DNA, 22 bp, synthetic construct
  misc_feature 1..22: note = chemically synthesized
  source 1..22: mol_type = other DNA
gataaggagaacgtgcttatag

SEQ ID NO: 23951 - DNA, 22 bp, synthetic construct
  misc_feature 1..22: note = chemically synthesized
  source 1..22: mol_type = other DNA
ataaggagaacgtgcttataga

SEQ ID NO: 23952 - DNA, 22 bp, synthetic construct
  misc_feature 1..22: note = chemically synthesized
  source 1..22: mol_type = other DNA
atagatgttcatagaagatgct

SEQ ID NO: 23953 - DNA, 22 bp, synthetic construct
  misc_feature 1..22: note = chemically synthesized
  source 1..22: mol_type = other DNA
tagatgttcatagaagatgctt

SEQ ID NO: 23954 - DNA, 22 bp, synthetic construct
  misc_feature 1..22: note = chemically synthesized
  source 1..22: mol_type = other DNA
atagaagatgcttggtccaacc

SEQ ID NO: 23955 - DNA, 22 bp, synthetic construct
  misc_feature 1..22: note = chemically synthesized
  source 1..22: mol_type = other DNA
ggtccaaccccgatgtcaaatc

SEQ ID NO: 23956 - DNA, 22 bp, synthetic construct
  misc_feature 1..22: note = chemically synthesized
  source 1..22: mol_type = other DNA
gtccaaccccgatgtcaaatcc

SEQ ID NO: 23957 - DNA, 22 bp, synthetic construct
  misc_feature 1..22: note = chemically synthesized
  source 1..22: mol_type = other DNA
cattctcacatggtatttctct

SEQ ID NO: 23958 - DNA, 22 bp, synthetic construct
  misc_feature 1..22: note = chemically synthesized
  source 1..22: mol_type = other DNA
attctcacatggtatttctctc

SEQ ID NO: 23959 - DNA, 22 bp, synthetic construct
  misc_feature 1..22: note = chemically synthesized
  source 1..22: mol_type = other DNA
tcacatggtatttctctcttcc

SEQ ID NO: 23960 - DNA, 22 bp, synthetic construct
  misc_feature 1..22: note = chemically synthesized
  source 1..22: mol_type = other DNA
acatggtatttctctcttccta

SEQ ID NO: 23961 - DNA, 22 bp, synthetic construct
  misc_feature 1..22: note = chemically synthesized
  source 1..22: mol_type = other DNA
ctctcttcctagtaagggagga

SEQ ID NO: 23962 - DNA, 22 bp, synthetic construct
  misc_feature 1..22: note = chemically synthesized
  source 1..22: mol_type = other DNA
tctcttcctagtaagggaggag

SEQ ID NO: 23963 - DNA, 22 bp, synthetic construct
  misc_feature 1..22: note = chemically synthesized
  source 1..22: mol_type = other DNA
tcttcctagtaagggaggagac

SEQ ID NO: 23964 - DNA, 22 bp, synthetic construct
  misc_feature 1..22: note = chemically synthesized
  source 1..22: mol_type = other DNA
ttcctagtaagggaggagacca

SEQ ID NO: 23965 - DNA, 22 bp, synthetic construct
  misc_feature 1..22: note = chemically synthesized
  source 1..22: mol_type = other DNA
cctagtaagggaggagaccacc

SEQ ID NO: 23966 - DNA, 22 bp, synthetic construct
  misc_feature 1..22: note = chemically synthesized
  source 1..22: mol_type = other DNA
ctagtaagggaggagaccaccc

SEQ ID NO: 23967 - DNA, 22 bp, synthetic construct
  misc_feature 1..22: note = chemically synthesized
  source 1..22: mol_type = other DNA
gtaagggaggagaccacccttc

SEQ ID NO: 23968 - DNA, 22 bp, synthetic construct
  misc_feature 1..22: note = chemically synthesized
  source 1..22: mol_type = other DNA
catattgttttatgcccaattt

SEQ ID NO: 23969 - DNA, 22 bp, synthetic construct
  misc_feature 1..22: note = chemically synthesized
  source 1..22: mol_type = other DNA
atattgttttatgcccaatttc

SEQ ID NO: 23970 - DNA, 22 bp, synthetic construct
  misc_feature 1..22: note = chemically synthesized
  source 1..22: mol_type = other DNA
ttttatgcccaatttctgcctc

SEQ ID NO: 23971 - DNA, 22 bp, synthetic construct
  misc_feature 1..22: note = chemically synthesized
  source 1..22: mol_type = other DNA
tatgcccaatttctgcctccaa

SEQ ID NO: 23972 - DNA, 22 bp, synthetic construct
  misc_feature 1..22: note = chemically synthesized
  source 1..22: mol_type = other DNA
atgcccaatttctgcctccaaa

SEQ ID NO: 23973 - DNA, 22 bp, synthetic construct
  misc_feature 1..22: note = chemically synthesized
  source 1..22: mol_type = other DNA
tgcccaatttctgcctccaaag

SEQ ID NO: 23974 - DNA, 22 bp, synthetic construct
  misc_feature 1..22: note = chemically synthesized
  source 1..22: mol_type = other DNA
ctgcctccaaagaaagaagaag

SEQ ID NO: 23975 - DNA, 22 bp, synthetic construct
  misc_feature 1..22: note = chemically synthesized
  source 1..22: mol_type = other DNA
tgcctccaaagaaagaagaagt

SEQ ID NO: 23976 - DNA, 22 bp, synthetic construct
  misc_feature 1..22: note = chemically synthesized
  source 1..22: mol_type = other DNA
cctccaaagaaagaagaagtaa

SEQ ID NO: 23977 - DNA, 22 bp, synthetic construct
  misc_feature 1..22: note = chemically synthesized
  source 1..22: mol_type = other DNA
caaagaaagaagaagtaaaaac

SEQ ID NO: 23978 - DNA, 22 bp, synthetic construct
  misc_feature 1..22: note = chemically synthesized
  source 1..22: mol_type = other DNA
aaaggcagaaatgaaatccaca

SEQ ID NO: 23979 - DNA, 22 bp, synthetic construct
  misc_feature 1..22: note = chemically synthesized
  source 1..22: mol_type = other DNA
agaccacatcctgggcctggtt

SEQ ID NO: 23980 - DNA, 22 bp, synthetic construct
  misc_feature 1..22: note = chemically synthesized
  source 1..22: mol_type = other DNA
ggcctggttaaagatagacccc

SEQ ID NO: 23981 - DNA, 22 bp, synthetic construct
  misc_feature 1..22: note = chemically synthesized
  source 1..22: mol_type = other DNA
gttaaagatagacccctgacct

SEQ ID NO: 23982 - DNA, 22 bp, synthetic construct
  misc_feature 1..22: note = chemically synthesized
  source 1..22: mol_type = other DNA
aagatagacccctgacctggcc

SEQ ID NO: 23983 - DNA, 22 bp, synthetic construct
  misc_feature 1..22: note = chemically synthesized
  source 1..22: mol_type = other DNA
acctggccagttatgttatcta

SEQ ID NO: 23984 - DNA, 22 bp, synthetic construct
  misc_feature 1..22: note = chemically synthesized
  source 1..22: mol_type = other DNA
gccagttatgttatctatagat

SEQ ID NO: 23985 - DNA, 22 bp, synthetic construct
  misc_feature 1..22: note = chemically synthesized
  source 1..22: mol_type = other DNA
tgttatctatagattccagaca

SEQ ID NO: 23986 - DNA, 22 bp, synthetic construct
  misc_feature 1..22: note = chemically synthesized
  source 1..22: mol_type = other DNA
tctatagattccagacactgta

SEQ ID NO: 23987 - DNA, 22 bp, synthetic construct
  misc_feature 1..22: note = chemically synthesized
  source 1..22: mol_type = other DNA
tagattccagacactgtatgga

SEQ ID NO: 23988 - DNA, 22 bp, synthetic construct
  misc_feature 1..22: note = chemically synthesized
  source 1..22: mol_type = other DNA
cagacactgtatggaaaagcag

SEQ ID NO: 23989 - DNA, 22 bp, synthetic construct
  misc_feature 1..22: note = chemically synthesized
  source 1..22: mol_type = other DNA
tatggaaaagcagtgtgaaaat

SEQ ID NO: 23990 - DNA, 22 bp, synthetic construct
  misc_feature 1..22: note = chemically synthesized
  source 1..22: mol_type = other DNA
tcctgttctgttccattctgat

SEQ ID NO: 23991 - DNA, 22 bp, synthetic construct
  misc_feature 1..22: note = chemically synthesized
  source 1..22: mol_type = other DNA
ttctgttccattctgatgacca

SEQ ID NO: 23992 - DNA, 22 bp, synthetic construct
  misc_feature 1..22: note = chemically synthesized
  source 1..22: mol_type = other DNA
tgttccattctgatgaccagtg

SEQ ID NO: 23993 - DNA, 22 bp, synthetic construct
  misc_feature 1..22: note = chemically synthesized
  source 1..22: mol_type = other DNA
ttccattctgatgaccagtgca

SEQ ID NO: 23994 - DNA, 22 bp, synthetic construct
  misc_feature 1..22: note = chemically synthesized
  source 1..22: mol_type = other DNA
cattctgatgaccagtgcatgc

SEQ ID NO: 23995 - DNA, 22 bp, synthetic construct
  misc_feature 1..22: note = chemically synthesized
  source 1..22: mol_type = other DNA
tgatgaccagtgcatgcagccc

SEQ ID NO: 23996 - DNA, 22 bp, synthetic construct
  misc_feature 1..22: note = chemically synthesized
  source 1..22: mol_type = other DNA
atgaccagtgcatgcagccccc

SEQ ID NO: 23997 - DNA, 22 bp, synthetic construct
  misc_feature 1..22: note = chemically synthesized
  source 1..22: mol_type = other DNA
agagttgtaagcccttaaaagg

SEQ ID NO: 23998 - DNA, 22 bp, synthetic construct
  misc_feature 1..22: note = chemically synthesized
  source 1..22: mol_type = other DNA
gagttgtaagcccttaaaaggg

SEQ ID NO: 23999 - DNA, 22 bp, synthetic construct
  misc_feature 1..22: note = chemically synthesized
  source 1..22: mol_type = other DNA
taagcccttaaaagggacagga

SEQ ID NO: 24000 - DNA, 22 bp, synthetic construct
  misc_feature 1..22: note = chemically synthesized
  source 1..22: mol_type = other DNA
aaaagggacaggaattgctcac

SEQ ID NO: 24001 - DNA, 22 bp, synthetic construct
  misc_feature 1..22: note = chemically synthesized
  source 1..22: mol_type = other DNA
aaagggacaggaattgctcact

SEQ ID NO: 24002 - DNA, 22 bp, synthetic construct
  misc_feature 1..22: note = chemically synthesized
  source 1..22: mol_type = other DNA
ctcactctgagagcttggttgt

SEQ ID NO: 24003 - DNA, 22 bp, synthetic construct
  misc_feature 1..22: note = chemically synthesized
  source 1..22: mol_type = other DNA
actctgagagcttggttgttgg

SEQ ID NO: 24004 - DNA, 22 bp, synthetic construct
  misc_feature 1..22: note = chemically synthesized
  source 1..22: mol_type = other DNA
tgagagcttggttgttggagat

SEQ ID NO: 24005 - DNA, 22 bp, synthetic construct
  misc_feature 1..22: note = chemically synthesized
  source 1..22: mol_type = other DNA
agagcttggttgttggagatgt

SEQ ID NO: 24006 - DNA, 22 bp, synthetic construct
  misc_feature 1..22: note = chemically synthesized
  source 1..22: mol_type = other DNA
ggttgttggagatgtgagtctt

SEQ ID NO: 24007 - DNA, 22 bp, synthetic construct
  misc_feature 1..22: note = chemically synthesized
  source 1..22: mol_type = other DNA
gttgttggagatgtgagtcttg

SEQ ID NO: 24008 - DNA, 22 bp, synthetic construct
  misc_feature 1..22: note = chemically synthesized
  source 1..22: mol_type = other DNA
ttggagatgtgagtcttgccca

SEQ ID NO: 24009 - DNA, 22 bp, synthetic construct
  misc_feature 1..22: note = chemically synthesized
  source 1..22: mol_type = other DNA
gagatgtgagtcttgcccaagc

SEQ ID NO: 24010 - DNA, 22 bp, synthetic construct
  misc_feature 1..22: note = chemically synthesized
  source 1..22: mol_type = other DNA
gcccaagctcccagccgaataa

SEQ ID NO: 24011 - DNA, 22 bp, synthetic construct
  misc_feature 1..22: note = chemically synthesized
  source 1..22: mol_type = other DNA
cccaagctcccagccgaataaa

SEQ ID NO: 24012 - DNA, 22 bp, synthetic construct
  misc_feature 1..22: note = chemically synthesized
  source 1..22: mol_type = other DNA
ccagccgaataaagcccttcct

SEQ ID NO: 24013 - DNA, 22 bp, synthetic construct
  misc_feature 1..22: note = chemically synthesized
  source 1..22: mol_type = other DNA
ccttctttaactcggtgtctga

SEQ ID NO: 24014 - DNA, 22 bp, synthetic construct
  misc_feature 1..22: note = chemically synthesized
  source 1..22: mol_type = other DNA
cttctttaactcggtgtctgag

SEQ ID NO: 24015 - DNA, 22 bp, synthetic construct
  misc_feature 1..22: note = chemically synthesized
  source 1..22: mol_type = other DNA
ctttaactcggtgtctgagggg

SEQ ID NO: 24016 - DNA, 22 bp, synthetic construct
  misc_feature 1..22: note = chemically synthesized
  source 1..22: mol_type = other DNA
tttaactcggtgtctgaggggt

SEQ ID NO: 24017 - DNA, 22 bp, synthetic construct
  misc_feature 1..22: note = chemically synthesized
  source 1..22: mol_type = other DNA
taactcggtgtctgaggggttt

SEQ ID NO: 24018 - DNA, 22 bp, synthetic construct
  misc_feature 1..22: note = chemically synthesized
  source 1..22: mol_type = other DNA
aactcggtgtctgaggggtttt

SEQ ID NO: 24019 - DNA, 22 bp, synthetic construct
  misc_feature 1..22: note = chemically synthesized
  source 1..22: mol_type = other DNA
actcggtgtctgaggggttttg

SEQ ID NO: 24020 - DNA, 22 bp, synthetic construct
  misc_feature 1..22: note = chemically synthesized
  source 1..22: mol_type = other DNA
ggtgtctgaggggttttgtatg

SEQ ID NO: 24021 - DNA, 22 bp, synthetic construct
  misc_feature 1..22: note = chemically synthesized
  source 1..22: mol_type = other DNA
aggggttttgtatgcagcttgt

SEQ ID NO: 24022 - DNA, 22 bp, synthetic construct
  misc_feature 1..22: note = chemically synthesized
  source 1..22: mol_type = other DNA
tgtatgcagcttgtcctgctac

SEQ ID NO: 24023 - DNA, 22 bp, synthetic construct
  misc_feature 1..22: note = chemically synthesized
  source 1..22: mol_type = other DNA
gtatgcagcttgtcctgctaca

SEQ ID NO: 24024 - DNA, 22 bp, synthetic construct
  misc_feature 1..22: note = chemically synthesized
  source 1..22: mol_type = other DNA
tatgcagcttgtcctgctacac

SEQ ID NO: 24025 - DNA, 22 bp, synthetic construct
  misc_feature 1..22: note = chemically synthesized
  source 1..22: mol_type = other DNA
gtcctgctacactagaatcgtt

SEQ ID NO: 24026 - DNA, 22 bp, synthetic construct
  misc_feature 1..22: note = chemically synthesized
  source 1..22: mol_type = other DNA
tcctgctacactagaatcgttc

SEQ ID NO: 24027 - DNA, 22 bp, synthetic construct
  misc_feature 1..22: note = chemically synthesized
  source 1..22: mol_type = other DNA
ctacactagaatcgttccttaa

SEQ ID NO: 24028 - DNA, 22 bp, synthetic construct
  misc_feature 1..22: note = chemically synthesized
  source 1..22: mol_type = other DNA
cactagaatcgttccttaattc

SEQ ID NO: 24029 - DNA, 22 bp, synthetic construct
  misc_feature 1..22: note = chemically synthesized
  source 1..22: mol_type = other DNA
gaatcgttccttaattctctcc

SEQ ID NO: 24030 - DNA, 22 bp, synthetic construct
  misc_feature 1..22: note = chemically synthesized
  source 1..22: mol_type = other DNA
cttaattctctcctctaatatt

SEQ ID NO: 24031 - DNA, 22 bp, synthetic construct
  misc_feature 1..22: note = chemically synthesized
  source 1..22: mol_type = other DNA
aattctctcctctaatattgct

SEQ ID NO: 24032 - DNA, 22 bp, synthetic construct
  misc_feature 1..22: note = chemically synthesized
  source 1..22: mol_type = other DNA
attctctcctctaatattgctg

SEQ ID NO: 24033 - DNA, 22 bp, synthetic construct
  misc_feature 1..22: note = chemically synthesized
  source 1..22: mol_type = other DNA
tctcctctaatattgctgctac

SEQ ID NO: 24034 - DNA, 22 bp, synthetic construct
  misc_feature 1..22: note = chemically synthesized
  source 1..22: mol_type = other DNA
tcctctaatattgctgctacct

SEQ ID NO: 24035 - DNA, 22 bp, synthetic construct
  misc_feature 1..22: note = chemically synthesized
  source 1..22: mol_type = other DNA
ctctaatattgctgctacctct

SEQ ID NO: 24036 - DNA, 22 bp, synthetic construct
  misc_feature 1..22: note = chemically synthesized
  source 1..22: mol_type = other DNA
taatattgctgctacctctatt

SEQ ID NO: 24037 - DNA, 22 bp, synthetic construct
  misc_feature 1..22: note = chemically synthesized
  source 1..22: mol_type = other DNA
atattgctgctacctctattaa

SEQ ID NO: 24038 - DNA, 22 bp, synthetic construct
  misc_feature 1..22: note = chemically synthesized
  source 1..22: mol_type = other DNA
ctgctacctctattaaaacaca

SEQ ID NO: 24039 - DNA, 22 bp, synthetic construct
  misc_feature 1..22: note = chemically synthesized
  source 1..22: mol_type = other DNA
ctacctctattaaaacacaaag

SEQ ID NO: 24040 - DNA, 22 bp, synthetic construct
  misc_feature 1..22: note = chemically synthesized
  source 1..22: mol_type = other DNA
cctctattaaaacacaaagcca

SEQ ID NO: 24041 - DNA, 22 bp, synthetic construct
  misc_feature 1..22: note = chemically synthesized
  source 1..22: mol_type = other DNA
tattaaaacacaaagccacaat

SEQ ID NO: 24042 - DNA, 22 bp, synthetic construct
  misc_feature 1..22: note = chemically synthesized
  source 1..22: mol_type = other DNA
ttaaaacacaaagccacaatat

SEQ ID NO: 24043 - DNA, 22 bp, synthetic construct
  misc_feature 1..22: note = chemically synthesized
  source 1..22: mol_type = other DNA
aaacacaaagccacaatatatg

SEQ ID NO: 24044 - DNA, 22 bp, synthetic construct
  misc_feature 1..22: note = chemically synthesized
  source 1..22: mol_type = other DNA
ggaaaatatgcacactttggat

SEQ ID NO: 24045 - DNA, 22 bp, synthetic construct
  misc_feature 1..22: note = chemically synthesized
  source 1..22: mol_type = other DNA
gaaaatatgcacactttggatc

SEQ ID NO: 24046 - DNA, 22 bp, synthetic construct
  misc_feature 1..22: note = chemically synthesized
  source 1..22: mol_type = other DNA
tggatccagcaagtccacatct

SEQ ID NO: 24047 - DNA, 22 bp, synthetic construct
  misc_feature 1..22: note = chemically synthesized
  source 1..22: mol_type = other DNA
ggatccagcaagtccacatcta

SEQ ID NO: 24048 - DNA, 22 bp, synthetic construct
  misc_feature 1..22: note = chemically synthesized
  source 1..22: mol_type = other DNA
gatccagcaagtccacatctag

SEQ ID NO: 24049 - DNA, 22 bp, synthetic construct
  misc_feature 1..22: note = chemically synthesized
  source 1..22: mol_type = other DNA
gaaaaccatcctgggggaaaat

SEQ ID NO: 24050 - DNA, 22 bp, synthetic construct
  misc_feature 1..22: note = chemically synthesized
  source 1..22: mol_type = other DNA
ggggaaaattaaggagagtatg

SEQ ID NO: 24051 - DNA, 22 bp, synthetic construct
  misc_feature 1..22: note = chemically synthesized
  source 1..22: mol_type = other DNA
aggagagtatgaaaaggatgtt

SEQ ID NO: 24052 - DNA, 22 bp, synthetic construct
  misc_feature 1..22: note = chemically synthesized
  source 1..22: mol_type = other DNA
actaaagcattatgatggcaaa

SEQ ID NO: 24053 - DNA, 22 bp, synthetic construct
  misc_feature 1..22: note = chemically synthesized
  source 1..22: mol_type = other DNA
ctaaagcattatgatggcaaaa

SEQ ID NO: 24054 - DNA, 22 bp, synthetic construct
  misc_feature 1..22: note = chemically synthesized
  source 1..22: mol_type = other DNA
aagcattatgatggcaaaaaat

SEQ ID NO: 24055 - DNA, 22 bp, synthetic construct
  misc_feature 1..22: note = chemically synthesized
  source 1..22: mol_type = other DNA
tgatggcaaaaaattagaaaca

SEQ ID NO: 24056 - DNA, 22 bp, synthetic construct
  misc_feature 1..22: note = chemically synthesized
  source 1..22: mol_type = other DNA
gaaacaacttacactgaactag

SEQ ID NO: 24057 - DNA, 22 bp, synthetic construct
  misc_feature 1..22: note = chemically synthesized
  source 1..22: mol_type = other DNA
acactgaactagtcaacttact

SEQ ID NO: 24058 - DNA, 22 bp, synthetic construct
  misc_feature 1..22: note = chemically synthesized
  source 1..22: mol_type = other DNA
cactgaactagtcaacttactt

SEQ ID NO: 24059 - DNA, 22 bp, synthetic construct
  misc_feature 1..22: note = chemically synthesized
  source 1..22: mol_type = other DNA
aactagtcaacttacttaacag

SEQ ID NO: 24060 - DNA, 22 bp, synthetic construct
  misc_feature 1..22: note = chemically synthesized
  source 1..22: mol_type = other DNA
gtcaacttacttaacagacaga

SEQ ID NO: 24061 - DNA, 22 bp, synthetic construct
  misc_feature 1..22: note = chemically synthesized
  source 1..22: mol_type = other DNA
acttaacagacagaaggctcaa

SEQ ID NO: 24062 - DNA, 22 bp, synthetic construct
  misc_feature 1..22: note = chemically synthesized
  source 1..22: mol_type = other DNA
cttaacagacagaaggctcaat

SEQ ID NO: 24063 - DNA, 22 bp, synthetic construct
  misc_feature 1..22: note = chemically synthesized
  source 1..22: mol_type = other DNA
aacagacagaaggctcaattag

SEQ ID NO: 24064 - DNA, 22 bp, synthetic construct
  misc_feature 1..22: note = chemically synthesized
  source 1..22: mol_type = other DNA
acagacagaaggctcaattagc

SEQ ID NO: 24065 - DNA, 22 bp, synthetic construct
  misc_feature 1..22: note = chemically synthesized
  source 1..22: mol_type = other DNA
aattagctcatgtgtcaaatgg

SEQ ID NO: 24066 - DNA, 22 bp, synthetic construct
  misc_feature 1..22: note = chemically synthesized
  source 1..22: mol_type = other DNA
gctcatgtgtcaaatgggggta

SEQ ID NO: 24067 - DNA, 22 bp, synthetic construct
  misc_feature 1..22: note = chemically synthesized
  source 1..22: mol_type = other DNA
atgtgtcaaatgggggtaaaat

SEQ ID NO: 24068 - DNA, 22 bp, synthetic construct
  misc_feature 1..22: note = chemically synthesized
  source 1..22: mol_type = other DNA
agtttggagggaaagacaggct

SEQ ID NO: 24069 - DNA, 22 bp, synthetic construct
  misc_feature 1..22: note = chemically synthesized
  source 1..22: mol_type = other DNA
gtttggagggaaagacaggctc

SEQ ID NO: 24070 - DNA, 22 bp, synthetic construct
  misc_feature 1..22: note = chemically synthesized
  source 1..22: mol_type = other DNA
ggagggaaagacaggctctaaa

SEQ ID NO: 24071 - DNA, 22 bp, synthetic construct
  misc_feature 1..22: note = chemically synthesized
  source 1..22: mol_type = other DNA
gagggaaagacaggctctaaaa

SEQ ID NO: 24072 - DNA, 22 bp, synthetic construct
  misc_feature 1..22: note = chemically synthesized
  source 1..22: mol_type = other DNA
taaaagaggattaaaaattaga

SEQ ID NO: 24073 - DNA, 22 bp, synthetic construct
  misc_feature 1..22: note = chemically synthesized
  source 1..22: mol_type = other DNA
aaagaggattaaaaattagatg

SEQ ID NO: 24074 - DNA, 22 bp, synthetic construct
  misc_feature 1..22: note = chemically synthesized
  source 1..22: mol_type = other DNA
aaaattagatgtggcctaggca

SEQ ID NO: 24075 - DNA, 22 bp, synthetic construct
  misc_feature 1..22: note = chemically synthesized
  source 1..22: mol_type = other DNA
gatgtggcctaggcaaagaatt

SEQ ID NO: 24076 - DNA, 22 bp, synthetic construct
  misc_feature 1..22: note = chemically synthesized
  source 1..22: mol_type = other DNA
ggcaaagaatttatgaccaagt

SEQ ID NO: 24077 - DNA, 22 bp, synthetic construct
  misc_feature 1..22: note = chemically synthesized
  source 1..22: mol_type = other DNA
atgaccaagtcctcaaaactaa

SEQ ID NO: 24078 - DNA, 22 bp, synthetic construct
  misc_feature 1..22: note = chemically synthesized
  source 1..22: mol_type = other DNA
tgaccaagtcctcaaaactaaa

SEQ ID NO: 24079 - DNA, 22 bp, synthetic construct
  misc_feature 1..22: note = chemically synthesized
  source 1..22: mol_type = other DNA
aaaactaaacacaacaaaaaca

SEQ ID NO: 24080 - DNA, 22 bp, synthetic construct
  misc_feature 1..22: note = chemically synthesized
  source 1..22: mol_type = other DNA
aacacaacaaaaacaaaaacag

SEQ ID NO: 24081 - DNA, 22 bp, synthetic construct
  misc_feature 1..22: note = chemically synthesized
  source 1..22: mol_type = other DNA
aattaaactaaaatgcttctgc

SEQ ID NO: 24082 - DNA, 22 bp, synthetic construct
  misc_feature 1..22: note = chemically synthesized
  source 1..22: mol_type = other DNA
attaaactaaaatgcttctgca

SEQ ID NO: 24083 - DNA, 22 bp, synthetic construct
  misc_feature 1..22: note = chemically synthesized
  source 1..22: mol_type = other DNA
aactaaaatgcttctgcaccgc

SEQ ID NO: 24084 - DNA, 22 bp, synthetic construct
  misc_feature 1..22: note = chemically synthesized
  source 1..22: mol_type = other DNA
aaatgcttctgcaccgcaaaag

SEQ ID NO: 24085 - DNA, 22 bp, synthetic construct
  misc_feature 1..22: note = chemically synthesized
  source 1..22: mol_type = other DNA
ctgcaccgcaaaagaccgaatc

SEQ ID NO: 24086 - DNA, 22 bp, synthetic construct
  misc_feature 1..22: note = chemically synthesized
  source 1..22: mol_type = other DNA
tgcaccgcaaaagaccgaatca

SEQ ID NO: 24087 - DNA, 22 bp, synthetic construct
  misc_feature 1..22: note = chemically synthesized
  source 1..22: mol_type = other DNA
caccgcaaaagaccgaatcaac

SEQ ID NO: 24088 - DNA, 22 bp, synthetic construct
  misc_feature 1..22: note = chemically synthesized
  source 1..22: mol_type = other DNA
cagaatgagaaaaaaaaattgc

SEQ ID NO: 24089 - DNA, 22 bp, synthetic construct
  misc_feature 1..22: note = chemically synthesized
  source 1..22: mol_type = other DNA
caaactatgaatgcaacaaaag

SEQ ID NO: 24090 - DNA, 22 bp, synthetic construct
  misc_feature 1..22: note = chemically synthesized
  source 1..22: mol_type = other DNA
tgaatgcaacaaaaggctaata

SEQ ID NO: 24091 - DNA, 22 bp, synthetic construct
  misc_feature 1..22: note = chemically synthesized
  source 1..22: mol_type = other DNA
atatacagaatctacaaggaac

SEQ ID NO: 24092 - DNA, 22 bp, synthetic construct
  misc_feature 1..22: note = chemically synthesized
  source 1..22: mol_type = other DNA
caaggaactcaacaacaaaaaa

SEQ ID NO: 24093 - DNA, 22 bp, synthetic construct
  misc_feature 1..22: note = chemically synthesized
  source 1..22: mol_type = other DNA
aacaacaaaaaaaccaacctca

SEQ ID NO: 24094 - DNA, 22 bp, synthetic construct
  misc_feature 1..22: note = chemically synthesized
  source 1..22: mol_type = other DNA
attagaaagtgactgtgatggt

SEQ ID NO: 24095 - DNA, 22 bp, synthetic construct
  misc_feature 1..22: note = chemically synthesized
  source 1..22: mol_type = other DNA
gaaagtgactgtgatggttaat

SEQ ID NO: 24096 - DNA, 22 bp, synthetic construct
  misc_feature 1..22: note = chemically synthesized
  source 1..22: mol_type = other DNA
tgatggttaatactgagtgtca

SEQ ID NO: 24097 - DNA, 22 bp, synthetic construct
  misc_feature 1..22: note = chemically synthesized
  source 1..22: mol_type = other DNA
atactgagtgtcaacttgattg

SEQ ID NO: 24098 - DNA, 22 bp, synthetic construct
  misc_feature 1..22: note = chemically synthesized
  source 1..22: mol_type = other DNA
agtgtcaacttgattggactga

SEQ ID NO: 24099 - DNA, 22 bp, synthetic construct
  misc_feature 1..22: note = chemically synthesized
  source 1..22: mol_type = other DNA
gattggactgaaggatgcaaag

SEQ ID NO: 24100 - DNA, 22 bp, synthetic construct
  misc_feature 1..22: note = chemically synthesized
  source 1..22: mol_type = other DNA
attggactgaaggatgcaaagt

SEQ ID NO: 24101 - DNA, 22 bp, synthetic construct
  misc_feature 1..22: note = chemically synthesized
  source 1..22: mol_type = other DNA
gactgaaggatgcaaagtaatg

SEQ ID NO: 24102 - DNA, 22 bp, synthetic construct
  misc_feature 1..22: note = chemically synthesized
  source 1..22: mol_type = other DNA
aaggatgcaaagtaatgatctt

SEQ ID NO: 24103 - DNA, 22 bp, synthetic construct
  misc_feature 1..22: note = chemically synthesized
  source 1..22: mol_type = other DNA
gggtgtgtctgtgagggtgtta

SEQ ID NO: 24104 - DNA, 22 bp, synthetic construct
  misc_feature 1..22: note = chemically synthesized
  source 1..22: mol_type = other DNA
ggtgtgtctgtgagggtgttac

SEQ ID NO: 24105 - DNA, 22 bp, synthetic construct
  misc_feature 1..22: note = chemically synthesized
  source 1..22: mol_type = other DNA
tgagggtgttaccaaaggagat

SEQ ID NO: 24106 - DNA, 22 bp, synthetic construct
  misc_feature 1..22: note = chemically synthesized
  source 1..22: mol_type = other DNA
ccaaaggagattaatatttcag

SEQ ID NO: 24107 - DNA, 22 bp, synthetic construct
  misc_feature 1..22: note = chemically synthesized
  source 1..22: mol_type = other DNA
atatttcagtcagtgggctggg

SEQ ID NO: 24108 - DNA, 22 bp, synthetic construct
  misc_feature 1..22: note = chemically synthesized
  source 1..22: mol_type = other DNA
cagtcagtgggctggggaaggc

SEQ ID NO: 24109 - DNA, 22 bp, synthetic construct
  misc_feature 1..22: note = chemically synthesized
  source 1..22: mol_type = other DNA
agtcagtgggctggggaaggca

SEQ ID NO: 24110 - DNA, 22 bp, synthetic construct
  misc_feature 1..22: note = chemically synthesized
  source 1..22: mol_type = other DNA
gggaaggcagacccacccttaa

SEQ ID NO: 24111 - DNA, 22 bp, synthetic construct
  misc_feature 1..22: note = chemically synthesized
  source 1..22: mol_type = other DNA
aatctgggtgggcaccatctaa

SEQ ID NO: 24112 - DNA, 22 bp, synthetic construct
  misc_feature 1..22: note = chemically synthesized
  source 1..22: mol_type = other DNA
atctgggtgggcaccatctaat

SEQ ID NO: 24113 - DNA, 22 bp, synthetic construct
  misc_feature 1..22: note = chemically synthesized
  source 1..22: mol_type = other DNA
ggtgggcaccatctaatcagtt

SEQ ID NO: 24114 - DNA, 22 bp, synthetic construct
  misc_feature 1..22: note = chemically synthesized
  source 1..22: mol_type = other DNA
atcagttgccagcacagccagg

SEQ ID NO: 24115 - DNA, 22 bp, synthetic construct
  misc_feature 1..22: note = chemically synthesized
  source 1..22: mol_type = other DNA
ccagcacagccaggatataaag

SEQ ID NO: 24116 - DNA, 22 bp, synthetic construct
  misc_feature 1..22: note = chemically synthesized
  source 1..22: mol_type = other DNA
gattggcttggcatcccagcct

SEQ ID NO: 24117 - DNA, 22 bp, synthetic construct
  misc_feature 1..22: note = chemically synthesized
  source 1..22: mol_type = other DNA
gcttggcatcccagcctacatt

SEQ ID NO: 24118 - DNA, 22 bp, synthetic construct
  misc_feature 1..22: note = chemically synthesized
  source 1..22: mol_type = other DNA
ggcatcccagcctacatttttc

SEQ ID NO: 24119 - DNA, 22 bp, synthetic construct
  misc_feature 1..22: note = chemically synthesized
  source 1..22: mol_type = other DNA
gcatcccagcctacatttttct

SEQ ID NO: 24120 - DNA, 22 bp, synthetic construct
  misc_feature 1..22: note = chemically synthesized
  source 1..22: mol_type = other DNA
catttttctcccatgctggatt

SEQ ID NO: 24121 - DNA, 22 bp, synthetic construct
  misc_feature 1..22: note = chemically synthesized
  source 1..22: mol_type = other DNA
ttctcccatgctggattcttcc

SEQ ID NO: 24122 - DNA, 22 bp, synthetic construct
  misc_feature 1..22: note = chemically synthesized
  source 1..22: mol_type = other DNA
tctcccatgctggattcttcct

SEQ ID NO: 24123 - DNA, 22 bp, synthetic construct
  misc_feature 1..22: note = chemically synthesized
  source 1..22: mol_type = other DNA
ctcccatgctggattcttcctg

SEQ ID NO: 24124 - DNA, 22 bp, synthetic construct
  misc_feature 1..22: note = chemically synthesized
  source 1..22: mol_type = other DNA
tcccatgctggattcttcctgc

SEQ ID NO: 24125 - DNA, 22 bp, synthetic construct
  misc_feature 1..22: note = chemically synthesized
  source 1..22: mol_type = other DNA
ccatgctggattcttcctgccc

SEQ ID NO: 24126 - DNA, 22 bp, synthetic construct
  misc_feature 1..22: note = chemically synthesized
  source 1..22: mol_type = other DNA
gattcttcctgccctggaacat

SEQ ID NO: 24127 - DNA, 22 bp, synthetic construct
  misc_feature 1..22: note = chemically synthesized
  source 1..22: mol_type = other DNA
ttcctgccctggaacattgaac

SEQ ID NO: 24128 - DNA, 22 bp, synthetic construct
  misc_feature 1..22: note = chemically synthesized
  source 1..22: mol_type = other DNA
cctgccctggaacattgaactc

SEQ ID NO: 24129 - DNA, 22 bp, synthetic construct
  misc_feature 1..22: note = chemically synthesized
  source 1..22: mol_type = other DNA
ctgccctggaacattgaactcc

SEQ ID NO: 24130 - DNA, 22 bp, synthetic construct
  misc_feature 1..22: note = chemically synthesized
  source 1..22: mol_type = other DNA
ccctggaacattgaactccagg

SEQ ID NO: 24131 - DNA, 22 bp, synthetic construct
  misc_feature 1..22: note = chemically synthesized
  source 1..22: mol_type = other DNA
gaacattgaactccaggttctt

SEQ ID NO: 24132 - DNA, 22 bp, synthetic construct
  misc_feature 1..22: note = chemically synthesized
  source 1..22: mol_type = other DNA
aactccaggttcttcagctttg

SEQ ID NO: 24133 - DNA, 22 bp, synthetic construct
  misc_feature 1..22: note = chemically synthesized
  source 1..22: mol_type = other DNA
caggttcttcagctttgggact

SEQ ID NO: 24134 - DNA, 22 bp, synthetic construct
  misc_feature 1..22: note = chemically synthesized
  source 1..22: mol_type = other DNA
ttcagctttgggactccgacta

SEQ ID NO: 24135 - DNA, 22 bp, synthetic construct
  misc_feature 1..22: note = chemically synthesized
  source 1..22: mol_type = other DNA
cagctttgggactccgactagc

SEQ ID NO: 24136 - DNA, 22 bp, synthetic construct
  misc_feature 1..22: note = chemically synthesized
  source 1..22: mol_type = other DNA
agctttgggactccgactagct

SEQ ID NO: 24137 - DNA, 22 bp, synthetic construct
  misc_feature 1..22: note = chemically synthesized
  source 1..22: mol_type = other DNA
tgggactccgactagcttcctt

SEQ ID NO: 24138 - DNA, 22 bp, synthetic construct
  misc_feature 1..22: note = chemically synthesized
  source 1..22: mol_type = other DNA
gggactccgactagcttccttg

SEQ ID NO: 24139 - DNA, 22 bp, synthetic construct
  misc_feature 1..22: note = chemically synthesized
  source 1..22: mol_type = other DNA
ggactccgactagcttccttgt

SEQ ID NO: 24140 - DNA, 22 bp, synthetic construct
  misc_feature 1..22: note = chemically synthesized
  source 1..22: mol_type = other DNA
cgactagcttccttgttcctca

SEQ ID NO: 24141 - DNA, 22 bp, synthetic construct
  misc_feature 1..22: note = chemically synthesized
  source 1..22: mol_type = other DNA
gcttccttgttcctcagctggc

SEQ ID NO: 24142 - DNA, 22 bp, synthetic construct
  misc_feature 1..22: note = chemically synthesized
  source 1..22: mol_type = other DNA
ccttgttcctcagctggcagat

SEQ ID NO: 24143 - DNA, 22 bp, synthetic construct
  misc_feature 1..22: note = chemically synthesized
  source 1..22: mol_type = other DNA
cttgttcctcagctggcagatg

SEQ ID NO: 24144 - DNA, 22 bp, synthetic construct
  misc_feature 1..22: note = chemically synthesized
  source 1..22: mol_type = other DNA
gttcctcagctggcagatggcc

SEQ ID NO: 24145 - DNA, 22 bp, synthetic construct
  misc_feature 1..22: note = chemically synthesized
  source 1..22: mol_type = other DNA
ttcctcagctggcagatggcct

SEQ ID NO: 24146 - DNA, 22 bp, synthetic construct
  misc_feature 1..22: note = chemically synthesized
  source 1..22: mol_type = other DNA
ctcagctggcagatggcctgtt

SEQ ID NO: 24147 - DNA, 22 bp, synthetic construct
  misc_feature 1..22: note = chemically synthesized
  source 1..22: mol_type = other DNA
agctggcagatggcctgttttg

SEQ ID NO: 24148 - DNA, 22 bp, synthetic construct
  misc_feature 1..22: note = chemically synthesized
  source 1..22: mol_type = other DNA
gcagatggcctgttttgggacc

SEQ ID NO: 24149 - DNA, 22 bp, synthetic construct
  misc_feature 1..22: note = chemically synthesized
  source 1..22: mol_type = other DNA
ttttgggaccttgtgaacatgt

SEQ ID NO: 24150 - DNA, 22 bp, synthetic construct
  misc_feature 1..22: note = chemically synthesized
  source 1..22: mol_type = other DNA
tgggaccttgtgaacatgtgag

SEQ ID NO: 24151 - DNA, 22 bp, synthetic construct
  misc_feature 1..22: note = chemically synthesized
  source 1..22: mol_type = other DNA
gggaccttgtgaacatgtgagt

SEQ ID NO: 24152 - DNA, 22 bp, synthetic construct
  misc_feature 1..22: note = chemically synthesized
  source 1..22: mol_type = other DNA
ggaccttgtgaacatgtgagtc

SEQ ID NO: 24153 - DNA, 22 bp, synthetic construct
  misc_feature 1..22: note = chemically synthesized
  source 1..22: mol_type = other DNA
gtgaacatgtgagtcaatacta

SEQ ID NO: 24154 - DNA, 22 bp, synthetic construct
  misc_feature 1..22: note = chemically synthesized
  source 1..22: mol_type = other DNA
tgaacatgtgagtcaatactac

SEQ ID NO: 24155 - DNA, 22 bp, synthetic construct
  misc_feature 1..22: note = chemically synthesized
  source 1..22: mol_type = other DNA
cataataaactctcatatagat

SEQ ID NO: 24156 - DNA, 22 bp, synthetic construct
  misc_feature 1..22: note = chemically synthesized
  source 1..22: mol_type = other DNA
tcatatagatatagatatagag

SEQ ID NO: 24157 - DNA, 22 bp, synthetic construct
  misc_feature 1..22: note = chemically synthesized
  source 1..22: mol_type = other DNA
atatagatatagatatagagat

SEQ ID NO: 24158 - DNA, 22 bp, synthetic construct
  misc_feature 1..22: note = chemically synthesized
  source 1..22: mol_type = other DNA
ctattaattctgtttctctgta

SEQ ID NO: 24159 - DNA, 22 bp, synthetic construct
  misc_feature 1..22: note = chemically synthesized
  source 1..22: mol_type = other DNA
ttaattctgtttctctgtagaa

SEQ ID NO: 24160 - DNA, 22 bp, synthetic construct
  misc_feature 1..22: note = chemically synthesized
  source 1..22: mol_type = other DNA
attctgtttctctgtagaaccc

SEQ ID NO: 24161 - DNA, 22 bp, synthetic construct
  misc_feature 1..22: note = chemically synthesized
  source 1..22: mol_type = other DNA
tgtttctctgtagaaccctaat

SEQ ID NO: 24162 - DNA, 22 bp, synthetic construct
  misc_feature 1..22: note = chemically synthesized
  source 1..22: mol_type = other DNA
tttctctgtagaaccctaatac

SEQ ID NO: 24163 - DNA, 22 bp, synthetic construct
  misc_feature 1..22: note = chemically synthesized
  source 1..22: mol_type = other DNA
ctctgtagaaccctaatacaga

SEQ ID NO: 24164 - DNA, 22 bp, synthetic construct
  misc_feature 1..22: note = chemically synthesized
  source 1..22: mol_type = other DNA
tctgtagaaccctaatacagat

SEQ ID NO: 24165 - DNA, 22 bp, synthetic construct
  misc_feature 1..22: note = chemically synthesized
  source 1..22: mol_type = other DNA
tgtagaaccctaatacagattt

SEQ ID NO: 24166 - DNA, 22 bp, synthetic construct
  misc_feature 1..22: note = chemically synthesized
  source 1..22: mol_type = other DNA
tagaaccctaatacagattttg

SEQ ID NO: 24167 - DNA, 22 bp, synthetic construct
  misc_feature 1..22: note = chemically synthesized
  source 1..22: mol_type = other DNA
atacagattttggtaccaggag

SEQ ID NO: 24168 - DNA, 22 bp, synthetic construct
  misc_feature 1..22: note = chemically synthesized
  source 1..22: mol_type = other DNA
tggtaccaggagtggttctaga

SEQ ID NO: 24169 - DNA, 22 bp, synthetic construct
  misc_feature 1..22: note = chemically synthesized
  source 1..22: mol_type = other DNA
ggtaccaggagtggttctagag

SEQ ID NO: 24170 - DNA, 22 bp, synthetic construct
  misc_feature 1..22: note = chemically synthesized
  source 1..22: mol_type = other DNA
gtaccaggagtggttctagagg

SEQ ID NO: 24171 - DNA, 22 bp, synthetic construct
  misc_feature 1..22: note = chemically synthesized
  source 1..22: mol_type = other DNA
tagaggaacagaatattaagga

SEQ ID NO: 24172 - DNA, 22 bp, synthetic construct
  misc_feature 1..22: note = chemically synthesized
  source 1..22: mol_type = other DNA
gaggaacagaatattaaggatg

SEQ ID NO: 24173 - DNA, 22 bp, synthetic construct
  misc_feature 1..22: note = chemically synthesized
  source 1..22: mol_type = other DNA
aggatggagttctttcattggt

SEQ ID NO: 24174 - DNA, 22 bp, synthetic construct
  misc_feature 1..22: note = chemically synthesized
  source 1..22: mol_type = other DNA
tttcattggttttggggtttct

SEQ ID NO: 24175 - DNA, 22 bp, synthetic construct
  misc_feature 1..22: note = chemically synthesized
  source 1..22: mol_type = other DNA
tcattggttttggggtttctgg

SEQ ID NO: 24176 - DNA, 22 bp, synthetic construct
  misc_feature 1..22: note = chemically synthesized
  source 1..22: mol_type = other DNA
cattggttttggggtttctgga

SEQ ID NO: 24177 - DNA, 22 bp, synthetic construct
  misc_feature 1..22: note = chemically synthesized
  source 1..22: mol_type = other DNA
attggttttggggtttctggag

SEQ ID NO: 24178 - DNA, 22 bp, synthetic construct
  misc_feature 1..22: note = chemically synthesized
  source 1..22: mol_type = other DNA
gttttggggtttctggagttgg

SEQ ID NO: 24179 - DNA, 22 bp, synthetic construct
  misc_feature 1..22: note = chemically synthesized
  source 1..22: mol_type = other DNA
tggggtttctggagttggctgc

SEQ ID NO: 24180 - DNA, 22 bp, synthetic construct
  misc_feature 1..22: note = chemically synthesized
  source 1..22: mol_type = other DNA
ggggtttctggagttggctgct

SEQ ID NO: 24181 - DNA, 22 bp, synthetic construct
  misc_feature 1..22: note = chemically synthesized
  source 1..22: mol_type = other DNA
gggtttctggagttggctgctt

SEQ ID NO: 24182 - DNA, 22 bp, synthetic construct
  misc_feature 1..22: note = chemically synthesized
  source 1..22: mol_type = other DNA
ctggagttggctgcttaatatg

SEQ ID NO: 24183 - DNA, 22 bp, synthetic construct
  misc_feature 1..22: note = chemically synthesized
  source 1..22: mol_type = other DNA
tggagttggctgcttaatatga

SEQ ID NO: 24184 - DNA, 22 bp, synthetic construct
  misc_feature 1..22: note = chemically synthesized
  source 1..22: mol_type = other DNA
gagttggctgcttaatatgatt

SEQ ID NO: 24185 - DNA, 22 bp, synthetic construct
  misc_feature 1..22: note = chemically synthesized
  source 1..22: mol_type = other DNA
gctgcttaatatgattagaccc

SEQ ID NO: 24186 - DNA, 22 bp, synthetic construct
  misc_feature 1..22: note = chemically synthesized
  source 1..22: mol_type = other DNA
cttaatatgattagacccaaat

SEQ ID NO: 24187 - DNA, 22 bp, synthetic construct
  misc_feature 1..22: note = chemically synthesized
  source 1..22: mol_type = other DNA
aatatgattagacccaaatatg

SEQ ID NO: 24188 - DNA, 22 bp, synthetic construct
  misc_feature 1..22: note = chemically synthesized
  source 1..22: mol_type = other DNA
atatgattagacccaaatatgc

SEQ ID NO: 24189 - DNA, 22 bp, synthetic construct
  misc_feature 1..22: note = chemically synthesized
  source 1..22: mol_type = other DNA
gacccaaatatgctaaggactc

SEQ ID NO: 24190 - DNA, 22 bp, synthetic construct
  misc_feature 1..22: note = chemically synthesized
  source 1..22: mol_type = other DNA
aggactcttcttctaatggtat

SEQ ID NO: 24191 - DNA, 22 bp, synthetic construct
  misc_feature 1..22: note = chemically synthesized
  source 1..22: mol_type = other DNA
ttcttctaatggtatggagaac

SEQ ID NO: 24192 - DNA, 22 bp, synthetic construct
  misc_feature 1..22: note = chemically synthesized
  source 1..22: mol_type = other DNA
cttctaatggtatggagaacac

SEQ ID NO: 24193 - DNA, 22 bp, synthetic construct
  misc_feature 1..22: note = chemically synthesized
  source 1..22: mol_type = other DNA
ttctaatggtatggagaacact

SEQ ID NO: 24194 - DNA, 22 bp, synthetic construct
  misc_feature 1..22: note = chemically synthesized
  source 1..22: mol_type = other DNA
ctaatggtatggagaacactga

SEQ ID NO: 24195 - DNA, 22 bp, synthetic construct
  misc_feature 1..22: note = chemically synthesized
  source 1..22: mol_type = other DNA
taatggtatggagaacactgat

SEQ ID NO: 24196 - DNA, 22 bp, synthetic construct
  misc_feature 1..22: note = chemically synthesized
  source 1..22: mol_type = other DNA
atggtatggagaacactgataa

SEQ ID NO: 24197 - DNA, 22 bp, synthetic construct
  misc_feature 1..22: note = chemically synthesized
  source 1..22: mol_type = other DNA
ataatccttggcatcaattgtt

SEQ ID NO: 24198 - DNA, 22 bp, synthetic construct
  misc_feature 1..22: note = chemically synthesized
  source 1..22: mol_type = other DNA
ggcatcaattgtttagagagtt

SEQ ID NO: 24199 - DNA, 22 bp, synthetic construct
  misc_feature 1..22: note = chemically synthesized
  source 1..22: mol_type = other DNA
gcatcaattgtttagagagtta

SEQ ID NO: 24200 - DNA, 22 bp, synthetic construct
  misc_feature 1..22: note = chemically synthesized
  source 1..22: mol_type = other DNA
tttagagagttatgcaaaataa

SEQ ID NO: 24201 - DNA, 22 bp, synthetic construct
  misc_feature 1..22: note = chemically synthesized
  source 1..22: mol_type = other DNA
agagagttatgcaaaataaatg

SEQ ID NO: 24202 - DNA, 22 bp, synthetic construct
  misc_feature 1..22: note = chemically synthesized
  source 1..22: mol_type = other DNA
gagagttatgcaaaataaatgc

SEQ ID NO: 24203 - DNA, 22 bp, synthetic construct
  misc_feature 1..22: note = chemically synthesized
  source 1..22: mol_type = other DNA
tgcaaaataaatgcatttgaca

SEQ ID NO: 24204 - DNA, 22 bp, synthetic construct
  misc_feature 1..22: note = chemically synthesized
  source 1..22: mol_type = other DNA
gacactcttgattcaacgcttg

SEQ ID NO: 24205 - DNA, 22 bp, synthetic construct
  misc_feature 1..22: note = chemically synthesized
  source 1..22: mol_type = other DNA
acactcttgattcaacgcttgt

SEQ ID NO: 24206 - DNA, 22 bp, synthetic construct
  misc_feature 1..22: note = chemically synthesized
  source 1..22: mol_type = other DNA
ttgattcaacgcttgtgagagg

SEQ ID NO: 24207 - DNA, 22 bp, synthetic construct
  misc_feature 1..22: note = chemically synthesized
  source 1..22: mol_type = other DNA
gattcaacgcttgtgagaggca

SEQ ID NO: 24208 - DNA, 22 bp, synthetic construct
  misc_feature 1..22: note = chemically synthesized
  source 1..22: mol_type = other DNA
attcaacgcttgtgagaggcaa

SEQ ID NO: 24209 - DNA, 22 bp, synthetic construct
  misc_feature 1..22: note = chemically synthesized
  source 1..22: mol_type = other DNA
aacgcttgtgagaggcaaggaa

SEQ ID NO: 24210 - DNA, 22 bp, synthetic construct
  misc_feature 1..22: note = chemically synthesized
  source 1..22: mol_type = other DNA
gtgagaggcaaggaatttagct

SEQ ID NO: 24211 - DNA, 22 bp, synthetic construct
  misc_feature 1..22: note = chemically synthesized
  source 1..22: mol_type = other DNA
tgagaggcaaggaatttagcta

SEQ ID NO: 24212 - DNA, 22 bp, synthetic construct
  misc_feature 1..22: note = chemically synthesized
  source 1..22: mol_type = other DNA
agctactgtatacataatactt

SEQ ID NO: 24213 - DNA, 22 bp, synthetic construct
  misc_feature 1..22: note = chemically synthesized
  source 1..22: mol_type = other DNA
gctactgtatacataatacttt

SEQ ID NO: 24214 - DNA, 22 bp, synthetic construct
  misc_feature 1..22: note = chemically synthesized
  source 1..22: mol_type = other DNA
ctgtatacataatacttttgac

SEQ ID NO: 24215 - DNA, 22 bp, synthetic construct
  misc_feature 1..22: note = chemically synthesized
  source 1..22: mol_type = other DNA
tatacataatacttttgactat

SEQ ID NO: 24216 - DNA, 22 bp, synthetic construct
  misc_feature 1..22: note = chemically synthesized
  source 1..22: mol_type = other DNA
ttgactatatgtggagaatcaa

SEQ ID NO: 24217 - DNA, 22 bp, synthetic construct
  misc_feature 1..22: note = chemically synthesized
  source 1..22: mol_type = other DNA
tgactatatgtggagaatcaag

SEQ ID NO: 24218 - DNA, 22 bp, synthetic construct
  misc_feature 1..22: note = chemically synthesized
  source 1..22: mol_type = other DNA
gactatatgtggagaatcaagg

SEQ ID NO: 24219 - DNA, 22 bp, synthetic construct
  misc_feature 1..22: note = chemically synthesized
  source 1..22: mol_type = other DNA
actatatgtggagaatcaagga

SEQ ID NO: 24220 - DNA, 22 bp, synthetic construct
  misc_feature 1..22: note = chemically synthesized
  source 1..22: mol_type = other DNA
tatgtggagaatcaaggaacat

SEQ ID NO: 24221 - DNA, 22 bp, synthetic construct
  misc_feature 1..22: note = chemically synthesized
  source 1..22: mol_type = other DNA
gttggttgcttgtaagttcgct

SEQ ID NO: 24222 - DNA, 22 bp, synthetic construct
  misc_feature 1..22: note = chemically synthesized
  source 1..22: mol_type = other DNA
gttgcttgtaagttcgctggac

SEQ ID NO: 24223 - DNA, 22 bp, synthetic construct
  misc_feature 1..22: note = chemically synthesized
  source 1..22: mol_type = other DNA
cttgtaagttcgctggacaaag

SEQ ID NO: 24224 - DNA, 22 bp, synthetic construct
  misc_feature 1..22: note = chemically synthesized
  source 1..22: mol_type = other DNA
gtaagttcgctggacaaagtga

SEQ ID NO: 24225 - DNA, 22 bp, synthetic construct
  misc_feature 1..22: note = chemically synthesized
  source 1..22: mol_type = other DNA
taagttcgctggacaaagtgat

SEQ ID NO: 24226 - DNA, 22 bp, synthetic construct
  misc_feature 1..22: note = chemically synthesized
  source 1..22: mol_type = other DNA
gctggacaaagtgatgaaagaa

SEQ ID NO: 24227 - DNA, 22 bp, synthetic construct
  misc_feature 1..22: note = chemically synthesized
  source 1..22: mol_type = other DNA
gacaaagtgatgaaagaaaatg

SEQ ID NO: 24228 - DNA, 22 bp, synthetic construct
  misc_feature 1..22: note = chemically synthesized
  source 1..22: mol_type = other DNA
aggagtatatcaactctccagc

SEQ ID NO: 24229 - DNA, 22 bp, synthetic construct
  misc_feature 1..22: note = chemically synthesized
  source 1..22: mol_type = other DNA
tccagctttgtgccataatctt

SEQ ID NO: 24230 - DNA, 22 bp, synthetic construct
  misc_feature 1..22: note = chemically synthesized
  source 1..22: mol_type = other DNA
cagctttgtgccataatcttat

SEQ ID NO: 24231 - DNA, 22 bp, synthetic construct
  misc_feature 1..22: note = chemically synthesized
  source 1..22: mol_type = other DNA
tgtgccataatcttatttggag

SEQ ID NO: 24232 - DNA, 22 bp, synthetic construct
  misc_feature 1..22: note = chemically synthesized
  source 1..22: mol_type = other DNA
gtgccataatcttatttggaga

SEQ ID NO: 24233 - DNA, 22 bp, synthetic construct
  misc_feature 1..22: note = chemically synthesized
  source 1..22: mol_type = other DNA
tgccataatcttatttggagag

SEQ ID NO: 24234 - DNA, 22 bp, synthetic construct
  misc_feature 1..22: note = chemically synthesized
  source 1..22: mol_type = other DNA
atttggagagaacttgctcacc

SEQ ID NO: 24235 - DNA, 22 bp, synthetic construct
  misc_feature 1..22: note = chemically synthesized
  source 1..22: mol_type = other DNA
tttggagagaacttgctcacct

SEQ ID NO: 24236 - DNA, 22 bp, synthetic construct
  misc_feature 1..22: note = chemically synthesized
  source 1..22: mol_type = other DNA
ggagagaacttgctcacctttc

SEQ ID NO: 24237 - DNA, 22 bp, synthetic construct
  misc_feature 1..22: note = chemically synthesized
  source 1..22: mol_type = other DNA
gagagaacttgctcacctttca

SEQ ID NO: 24238 - DNA, 22 bp, synthetic construct
  misc_feature 1..22: note = chemically synthesized
  source 1..22: mol_type = other DNA
gctcacctttcacttccacaag

SEQ ID NO: 24239 - DNA, 22 bp, synthetic construct
  misc_feature 1..22: note = chemically synthesized
  source 1..22: mol_type = other DNA
ctcacctttcacttccacaaga

SEQ ID NO: 24240 - DNA, 22 bp, synthetic construct
  misc_feature 1..22: note = chemically synthesized
  source 1..22: mol_type = other DNA
acctttcacttccacaagatat

SEQ ID NO: 24241 - DNA, 22 bp, synthetic construct
  misc_feature 1..22: note = chemically synthesized
  source 1..22: mol_type = other DNA
tcacttccacaagatatcacag

SEQ ID NO: 24242 - DNA, 22 bp, synthetic construct
  misc_feature 1..22: note = chemically synthesized
  source 1..22: mol_type = other DNA
cacttccacaagatatcacagt

SEQ ID NO: 24243 - DNA, 22 bp, synthetic construct
  misc_feature 1..22: note = chemically synthesized
  source 1..22: mol_type = other DNA
acttccacaagatatcacagtg

SEQ ID NO: 24244 - DNA, 22 bp, synthetic construct
  misc_feature 1..22: note = chemically synthesized
  source 1..22: mol_type = other DNA
ccacaagatatcacagtggtcc

SEQ ID NO: 24245 - DNA, 22 bp, synthetic construct
  misc_feature 1..22: note = chemically synthesized
  source 1..22: mol_type = other DNA
cacaagatatcacagtggtcca

SEQ ID NO: 24246 - DNA, 22 bp, synthetic construct
  misc_feature 1..22: note = chemically synthesized
  source 1..22: mol_type = other DNA
cattgatgacatgctgactgga

SEQ ID NO: 24247 - DNA, 22 bp, synthetic construct
  misc_feature 1..22: note = chemically synthesized
  source 1..22: mol_type = other DNA
atgacatgctgactggaactag

SEQ ID NO: 24248 - DNA, 22 bp, synthetic construct
  misc_feature 1..22: note = chemically synthesized
  source 1..22: mol_type = other DNA
actggaactagtgagcaagaag

SEQ ID NO: 24249 - DNA, 22 bp, synthetic construct
  misc_feature 1..22: note = chemically synthesized
  source 1..22: mol_type = other DNA
gaactagtgagcaagaagtagc

SEQ ID NO: 24250 - DNA, 22 bp, synthetic construct
  misc_feature 1..22: note = chemically synthesized
  source 1..22: mol_type = other DNA
gtgagcaagaagtagcaaacac

SEQ ID NO: 24251 - DNA, 22 bp, synthetic construct
  misc_feature 1..22: note = chemically synthesized
  source 1..22: mol_type = other DNA
gatttattgatgagacatttgt

SEQ ID NO: 24252 - DNA, 22 bp, synthetic construct
  misc_feature 1..22: note = chemically synthesized
  source 1..22: mol_type = other DNA
attgatgagacatttgtgggac

SEQ ID NO: 24253 - DNA, 22 bp, synthetic construct
  misc_feature 1..22: note = chemically synthesized
  source 1..22: mol_type = other DNA
ttgatgagacatttgtgggaca

SEQ ID NO: 24254 - DNA, 22 bp, synthetic construct
  misc_feature 1..22: note = chemically synthesized
  source 1..22: mol_type = other DNA
atgagacatttgtgggacagag

SEQ ID NO: 24255 - DNA, 22 bp, synthetic construct
  misc_feature 1..22: note = chemically synthesized
  source 1..22: mol_type = other DNA
gtgggacagaggatgggaaata

SEQ ID NO: 24256 - DNA, 22 bp, synthetic construct
  misc_feature 1..22: note = chemically synthesized
  source 1..22: mol_type = other DNA
tgggacagaggatgggaaataa

SEQ ID NO: 24257 - DNA, 22 bp, synthetic construct
  misc_feature 1..22: note = chemically synthesized
  source 1..22: mol_type = other DNA
attaaattcagggaccttctac

SEQ ID NO: 24258 - DNA, 22 bp, synthetic construct
  misc_feature 1..22: note = chemically synthesized
  source 1..22: mol_type = other DNA
aattcagggaccttctacctca

SEQ ID NO: 24259 - DNA, 22 bp, synthetic construct
  misc_feature 1..22: note = chemically synthesized
  source 1..22: mol_type = other DNA
agggaccttctacctcagtaaa

SEQ ID NO: 24260 - DNA, 22 bp, synthetic construct
  misc_feature 1..22: note = chemically synthesized
  source 1..22: mol_type = other DNA
ctacctcagtaaaatttatagg

SEQ ID NO: 24261 - DNA, 22 bp, synthetic construct
  misc_feature 1..22: note = chemically synthesized
  source 1..22: mol_type = other DNA
tacctcagtaaaatttataggg

SEQ ID NO: 24262 - DNA, 22 bp, synthetic construct
  misc_feature 1..22: note = chemically synthesized
  source 1..22: mol_type = other DNA
cctcagtaaaatttataggggt

SEQ ID NO: 24263 - DNA, 22 bp, synthetic construct
  misc_feature 1..22: note = chemically synthesized
  source 1..22: mol_type = other DNA
agtaaaatttataggggtccaa

SEQ ID NO: 24264 - DNA, 22 bp, synthetic construct
  misc_feature 1..22: note = chemically synthesized
  source 1..22: mol_type = other DNA
ataggggtccaatggtttgggg

SEQ ID NO: 24265 - DNA, 22 bp, synthetic construct
  misc_feature 1..22: note = chemically synthesized
  source 1..22: mol_type = other DNA
taggggtccaatggtttggggc

SEQ ID NO: 24266 - DNA, 22 bp, synthetic construct
  misc_feature 1..22: note = chemically synthesized
  source 1..22: mol_type = other DNA
ggggctctttgagatattcctt

SEQ ID NO: 24267 - DNA, 22 bp, synthetic construct
  misc_feature 1..22: note = chemically synthesized
  source 1..22: mol_type = other DNA
gggctctttgagatattccttc

SEQ ID NO: 24268 - DNA, 22 bp, synthetic construct
  misc_feature 1..22: note = chemically synthesized
  source 1..22: mol_type = other DNA
tttgagatattccttctaaagt

SEQ ID NO: 24269 - DNA, 22 bp, synthetic construct
  misc_feature 1..22: note = chemically synthesized
  source 1..22: mol_type = other DNA
tgagatattccttctaaagtga

SEQ ID NO: 24270 - DNA, 22 bp, synthetic construct
  misc_feature 1..22: note = chemically synthesized
  source 1..22: mol_type = other DNA
gagatattccttctaaagtgaa

SEQ ID NO: 24271 - DNA, 22 bp, synthetic construct
  misc_feature 1..22: note = chemically synthesized
  source 1..22: mol_type = other DNA
agatattccttctaaagtgaag

SEQ ID NO: 24272 - DNA, 22 bp, synthetic construct
  misc_feature 1..22: note = chemically synthesized
  source 1..22: mol_type = other DNA
cttctaaagtgaaggataattt

SEQ ID NO: 24273 - DNA, 22 bp, synthetic construct
  misc_feature 1..22: note = chemically synthesized
  source 1..22: mol_type = other DNA
ctaaagtgaaggataatttgct

SEQ ID NO: 24274 - DNA, 22 bp, synthetic construct
  misc_feature 1..22: note = chemically synthesized
  source 1..22: mol_type = other DNA
taaagtgaaggataatttgctg

SEQ ID NO: 24275 - DNA, 22 bp, synthetic construct
  misc_feature 1..22: note = chemically synthesized
  source 1..22: mol_type = other DNA
aagtgaaggataatttgctgca

SEQ ID NO: 24276 - DNA, 22 bp, synthetic construct
  misc_feature 1..22: note = chemically synthesized
  source 1..22: mol_type = other DNA
gctgcatttggccactcttaca

SEQ ID NO: 24277 - DNA, 22 bp, synthetic construct
  misc_feature 1..22: note = chemically synthesized
  source 1..22: mol_type = other DNA
ctgcatttggccactcttacaa

SEQ ID NO: 24278 - DNA, 22 bp, synthetic construct
  misc_feature 1..22: note = chemically synthesized
  source 1..22: mol_type = other DNA
catttggccactcttacaacca

SEQ ID NO: 24279 - DNA, 22 bp, synthetic construct
  misc_feature 1..22: note = chemically synthesized
  source 1..22: mol_type = other DNA
ggccactcttacaaccaagaaa

SEQ ID NO: 24280 - DNA, 22 bp, synthetic construct
  misc_feature 1..22: note = chemically synthesized
  source 1..22: mol_type = other DNA
gccactcttacaaccaagaaat

SEQ ID NO: 24281 - DNA, 22 bp, synthetic construct
  misc_feature 1..22: note = chemically synthesized
  source 1..22: mol_type = other DNA
ttacaaccaagaaataggcaca

SEQ ID NO: 24282 - DNA, 22 bp, synthetic construct
  misc_feature 1..22: note = chemically synthesized
  source 1..22: mol_type = other DNA
acaaccaagaaataggcacaac

SEQ ID NO: 24283 - DNA, 22 bp, synthetic construct
  misc_feature 1..22: note = chemically synthesized
  source 1..22: mol_type = other DNA
caaccaagaaataggcacaacg

SEQ ID NO: 24284 - DNA, 22 bp, synthetic construct
  misc_feature 1..22: note = chemically synthesized
  source 1..22: mol_type = other DNA
gtgggcctatttggattttgga

SEQ ID NO: 24285 - DNA, 22 bp, synthetic construct
  misc_feature 1..22: note = chemically synthesized
  source 1..22: mol_type = other DNA
tttggattttggaggcaacata

SEQ ID NO: 24286 - DNA, 22 bp, synthetic construct
  misc_feature 1..22: note = chemically synthesized
  source 1..22: mol_type = other DNA
ggattttggaggcaacatattc

SEQ ID NO: 24287 - DNA, 22 bp, synthetic construct
  misc_feature 1..22: note = chemically synthesized
  source 1..22: mol_type = other DNA
gattttggaggcaacatattcc

SEQ ID NO: 24288 - DNA, 22 bp, synthetic construct
  misc_feature 1..22: note = chemically synthesized
  source 1..22: mol_type = other DNA
tggaggcaacatattcctgatt

SEQ ID NO: 24289 - DNA, 22 bp, synthetic construct
  misc_feature 1..22: note = chemically synthesized
  source 1..22: mol_type = other DNA
ggaggcaacatattcctgattt

SEQ ID NO: 24290 - DNA, 22 bp, synthetic construct
  misc_feature 1..22: note = chemically synthesized
  source 1..22: mol_type = other DNA
gaggcaacatattcctgatttg

SEQ ID NO: 24291 - DNA, 22 bp, synthetic construct
  misc_feature 1..22: note = chemically synthesized
  source 1..22: mol_type = other DNA
ctgatttgggtgtgttactctg

SEQ ID NO: 24292 - DNA, 22 bp, synthetic construct
  misc_feature 1..22: note = chemically synthesized
  source 1..22: mol_type = other DNA
atttgggtgtgttactctggcc

SEQ ID NO: 24293 - DNA, 22 bp, synthetic construct
  misc_feature 1..22: note = chemically synthesized
  source 1..22: mol_type = other DNA
gggtgtgttactctggcccatt

SEQ ID NO: 24294 - DNA, 22 bp, synthetic construct
  misc_feature 1..22: note = chemically synthesized
  source 1..22: mol_type = other DNA
ggtgtgttactctggcccattt

SEQ ID NO: 24295 - DNA, 22 bp, synthetic construct
  misc_feature 1..22: note = chemically synthesized
  source 1..22: mol_type = other DNA
ctctggcccatttatcgagtga

SEQ ID NO: 24296 - DNA, 22 bp, synthetic construct
  misc_feature 1..22: note = chemically synthesized
  source 1..22: mol_type = other DNA
tggcccatttatcgagtgatcc

SEQ ID NO: 24297 - DNA, 22 bp, synthetic construct
  misc_feature 1..22: note = chemically synthesized
  source 1..22: mol_type = other DNA
gcccatttatcgagtgatccaa

SEQ ID NO: 24298 - DNA, 22 bp, synthetic construct
  misc_feature 1..22: note = chemically synthesized
  source 1..22: mol_type = other DNA
atcgagtgatccaaaaggctgc

SEQ ID NO: 24299 - DNA, 22 bp, synthetic construct
  misc_feature 1..22: note = chemically synthesized
  source 1..22: mol_type = other DNA
tcgagtgatccaaaaggctgcc

SEQ ID NO: 24300 - DNA, 22 bp, synthetic construct
  misc_feature 1..22: note = chemically synthesized
  source 1..22: mol_type = other DNA
ccagttttgagtggagtccaga

SEQ ID NO: 24301 - DNA, 22 bp, synthetic construct
  misc_feature 1..22: note = chemically synthesized
  source 1..22: mol_type = other DNA
tgagtggagtccagaacagaag

SEQ ID NO: 24302 - DNA, 22 bp, synthetic construct
  misc_feature 1..22: note = chemically synthesized
  source 1..22: mol_type = other DNA
gagtggagtccagaacagaagg

SEQ ID NO: 24303 - DNA, 22 bp, synthetic construct
  misc_feature 1..22: note = chemically synthesized
  source 1..22: mol_type = other DNA
agtggagtccagaacagaaggc

SEQ ID NO: 24304 - DNA, 22 bp, synthetic construct
  misc_feature 1..22: note = chemically synthesized
  source 1..22: mol_type = other DNA
tgccacaggtccaggctgctgt

SEQ ID NO: 24305 - DNA, 22 bp, synthetic construct
  misc_feature 1..22: note = chemically synthesized
  source 1..22: mol_type = other DNA
ccacaggtccaggctgctgtgc

SEQ ID NO: 24306 - DNA, 22 bp, synthetic construct
  misc_feature 1..22: note = chemically synthesized
  source 1..22: mol_type = other DNA
ctgtgcaagctgctatgccact

SEQ ID NO: 24307 - DNA, 22 bp, synthetic construct
  misc_feature 1..22: note = chemically synthesized
  source 1..22: mol_type = other DNA
tgcaagctgctatgccacttgg

SEQ ID NO: 24308 - DNA, 22 bp, synthetic construct
  misc_feature 1..22: note = chemically synthesized
  source 1..22: mol_type = other DNA
ctatgccacttgggccatatga

SEQ ID NO: 24309 - DNA, 22 bp, synthetic construct
  misc_feature 1..22: note = chemically synthesized
  source 1..22: mol_type = other DNA
tgccacttgggccatatgacct

SEQ ID NO: 24310 - DNA, 22 bp, synthetic construct
  misc_feature 1..22: note = chemically synthesized
  source 1..22: mol_type = other DNA
gggccatatgacctagcagatc

SEQ ID NO: 24311 - DNA, 22 bp, synthetic construct
  misc_feature 1..22: note = chemically synthesized
  source 1..22: mol_type = other DNA
ggccatatgacctagcagatcc

SEQ ID NO: 24312 - DNA, 22 bp, synthetic construct
  misc_feature 1..22: note = chemically synthesized
  source 1..22: mol_type = other DNA
gcagatccaatgatgcttgagg

SEQ ID NO: 24313 - DNA, 22 bp, synthetic construct
  misc_feature 1..22: note = chemically synthesized
  source 1..22: mol_type = other DNA
gaggtgtcagtgccagataggg

SEQ ID NO: 24314 - DNA, 22 bp, synthetic construct
  misc_feature 1..22: note = chemically synthesized
  source 1..22: mol_type = other DNA
aggtgtcagtgccagataggga

SEQ ID NO: 24315 - DNA, 22 bp, synthetic construct
  misc_feature 1..22: note = chemically synthesized
  source 1..22: mol_type = other DNA
tttggagcatttggcaggctga

SEQ ID NO: 24316 - DNA, 22 bp, synthetic construct
  misc_feature 1..22: note = chemically synthesized
  source 1..22: mol_type = other DNA
ggagcatttggcaggctgaatc

SEQ ID NO: 24317 - DNA, 22 bp, synthetic construct
  misc_feature 1..22: note = chemically synthesized
  source 1..22: mol_type = other DNA
gagcatttggcaggctgaatca

SEQ ID NO: 24318 - DNA, 22 bp, synthetic construct
  misc_feature 1..22: note = chemically synthesized
  source 1..22: mol_type = other DNA
ggcaggctgaatcacagcggag

SEQ ID NO: 24319 - DNA, 22 bp, synthetic construct
  misc_feature 1..22: note = chemically synthesized
  source 1..22: mol_type = other DNA
gcaggctgaatcacagcggagg

SEQ ID NO: 24320 - DNA, 22 bp, synthetic construct
  misc_feature 1..22: note = chemically synthesized
  source 1..22: mol_type = other DNA
aatcacagcggaggcctctagg

SEQ ID NO: 24321 - DNA, 22 bp, synthetic construct
  misc_feature 1..22: note = chemically synthesized
  source 1..22: mol_type = other DNA
taggattttggagcaaggccct

SEQ ID NO: 24322 - DNA, 22 bp, synthetic construct
  misc_feature 1..22: note = chemically synthesized
  source 1..22: mol_type = other DNA
ggattttggagcaaggccctgc

SEQ ID NO: 24323 - DNA, 22 bp, synthetic construct
  misc_feature 1..22: note = chemically synthesized
  source 1..22: mol_type = other DNA
tggagcaaggccctgccatctt

SEQ ID NO: 24324 - DNA, 22 bp, synthetic construct
  misc_feature 1..22: note = chemically synthesized
  source 1..22: mol_type = other DNA
ggagcaaggccctgccatcttc

SEQ ID NO: 24325 - DNA, 22 bp, synthetic construct
  misc_feature 1..22: note = chemically synthesized
  source 1..22: mol_type = other DNA
gagcaaggccctgccatcttct

SEQ ID NO: 24326 - DNA, 22 bp, synthetic construct
  misc_feature 1..22: note = chemically synthesized
  source 1..22: mol_type = other DNA
ccatcttctgcagataactact

SEQ ID NO: 24327 - DNA, 22 bp, synthetic construct
  misc_feature 1..22: note = chemically synthesized
  source 1..22: mol_type = other DNA
ctgcagataactactctctttt

SEQ ID NO: 24328 - DNA, 22 bp, synthetic construct
  misc_feature 1..22: note = chemically synthesized
  source 1..22: mol_type = other DNA
tgcagataactactctctttta

SEQ ID NO: 24329 - DNA, 22 bp, synthetic construct
  misc_feature 1..22: note = chemically synthesized
  source 1..22: mol_type = other DNA
cagataactactctcttttagg

SEQ ID NO: 24330 - DNA, 22 bp, synthetic construct
  misc_feature 1..22: note = chemically synthesized
  source 1..22: mol_type = other DNA
ctctcttttagggagaaagctc

SEQ ID NO: 24331 - DNA, 22 bp, synthetic construct
  misc_feature 1..22: note = chemically synthesized
  source 1..22: mol_type = other DNA
tcttttagggagaaagctcttg

SEQ ID NO: 24332 - DNA, 22 bp, synthetic construct
  misc_feature 1..22: note = chemically synthesized
  source 1..22: mol_type = other DNA
ttttagggagaaagctcttggc

SEQ ID NO: 24333 - DNA, 22 bp, synthetic construct
  misc_feature 1..22: note = chemically synthesized
  source 1..22: mol_type = other DNA
ttagggagaaagctcttggcct

SEQ ID NO: 24334 - DNA, 22 bp, synthetic construct
  misc_feature 1..22: note = chemically synthesized
  source 1..22: mol_type = other DNA
tagggagaaagctcttggcctg

SEQ ID NO: 24335 - DNA, 22 bp, synthetic construct
  misc_feature 1..22: note = chemically synthesized
  source 1..22: mol_type = other DNA
agggagaaagctcttggcctgt

SEQ ID NO: 24336 - DNA, 22 bp, synthetic construct
  misc_feature 1..22: note = chemically synthesized
  source 1..22: mol_type = other DNA
gggagaaagctcttggcctgtt

SEQ ID NO: 24337 - DNA, 22 bp, synthetic construct
  misc_feature 1..22: note = chemically synthesized
  source 1..22: mol_type = other DNA
ttggcctgttactgggctttgg

SEQ ID NO: 24338 - DNA, 22 bp, synthetic construct
  misc_feature 1..22: note = chemically synthesized
  source 1..22: mol_type = other DNA
ggcctgttactgggctttggtg

SEQ ID NO: 24339 - DNA, 22 bp, synthetic construct
  misc_feature 1..22: note = chemically synthesized
  source 1..22: mol_type = other DNA
gcctgttactgggctttggtgg

SEQ ID NO: 24340 - DNA, 22 bp, synthetic construct
  misc_feature 1..22: note = chemically synthesized
  source 1..22: mol_type = other DNA
ttactgggctttggtggaaacg

SEQ ID NO: 24341 - DNA, 22 bp, synthetic construct
  misc_feature 1..22: note = chemically synthesized
  source 1..22: mol_type = other DNA
ctgggctttggtggaaacgaaa

SEQ ID NO: 24342 - DNA, 22 bp, synthetic construct
  misc_feature 1..22: note = chemically synthesized
  source 1..22: mol_type = other DNA
ggctttggtggaaacgaaatat

SEQ ID NO: 24343 - DNA, 22 bp, synthetic construct
  misc_feature 1..22: note = chemically synthesized
  source 1..22: mol_type = other DNA
tggtggaaacgaaatatttgac

SEQ ID NO: 24344 - DNA, 22 bp, synthetic construct
  misc_feature 1..22: note = chemically synthesized
  source 1..22: mol_type = other DNA
ggtggaaacgaaatatttgact

SEQ ID NO: 24345 - DNA, 22 bp, synthetic construct
  misc_feature 1..22: note = chemically synthesized
  source 1..22: mol_type = other DNA
gtggaaacgaaatatttgacta

SEQ ID NO: 24346 - DNA, 22 bp, synthetic construct
  misc_feature 1..22: note = chemically synthesized
  source 1..22: mol_type = other DNA
gactatgagtcatcaagtcacc

SEQ ID NO: 24347 - DNA, 22 bp, synthetic construct
  misc_feature 1..22: note = chemically synthesized
  source 1..22: mol_type = other DNA
actatgagtcatcaagtcacca

SEQ ID NO: 24348 - DNA, 22 bp, synthetic construct
  misc_feature 1..22: note = chemically synthesized
  source 1..22: mol_type = other DNA
tgagtcatcaagtcaccatgtg

SEQ ID NO: 24349 - DNA, 22 bp, synthetic construct
  misc_feature 1..22: note = chemically synthesized
  source 1..22: mol_type = other DNA
aactgcctatcatgaactgggt

SEQ ID NO: 24350 - DNA, 22 bp, synthetic construct
  misc_feature 1..22: note = chemically synthesized
  source 1..22: mol_type = other DNA
cctatcatgaactgggtgcttt

SEQ ID NO: 24351 - DNA, 22 bp, synthetic construct
  misc_feature 1..22: note = chemically synthesized
  source 1..22: mol_type = other DNA
tcatgaactgggtgctttctga

SEQ ID NO: 24352 - DNA, 22 bp, synthetic construct
  misc_feature 1..22: note = chemically synthesized
  source 1..22: mol_type = other DNA
ggtgctttctgatccatctagc

SEQ ID NO: 24353 - DNA, 22 bp, synthetic construct
  misc_feature 1..22: note = chemically synthesized
  source 1..22: mol_type = other DNA
tctgatccatctagccataaag

SEQ ID NO: 24354 - DNA, 22 bp, synthetic construct
  misc_feature 1..22: note = chemically synthesized
  source 1..22: mol_type = other DNA
ctgatccatctagccataaagt

SEQ ID NO: 24355 - DNA, 22 bp, synthetic construct
  misc_feature 1..22: note = chemically synthesized
  source 1..22: mol_type = other DNA
tgatccatctagccataaagtg

SEQ ID NO: 24356 - DNA, 22 bp, synthetic construct
  misc_feature 1..22: note = chemically synthesized
  source 1..22: mol_type = other DNA
atccatctagccataaagtggg

SEQ ID NO: 24357 - DNA, 22 bp, synthetic construct
  misc_feature 1..22: note = chemically synthesized
  source 1..22: mol_type = other DNA
gccataaagtgggctgtgcaca

SEQ ID NO: 24358 - DNA, 22 bp, synthetic construct
  misc_feature 1..22: note = chemically synthesized
  source 1..22: mol_type = other DNA
tgcacagcagcattgcatcagc

SEQ ID NO: 24359 - DNA, 22 bp, synthetic construct
  misc_feature 1..22: note = chemically synthesized
  source 1..22: mol_type = other DNA
catcagcaaatggaagtggtat

SEQ ID NO: 24360 - DNA, 22 bp, synthetic construct
  misc_feature 1..22: note = chemically synthesized
  source 1..22: mol_type = other DNA
ggcttgagcagatcctgaaggc

SEQ ID NO: 24361 - DNA, 22 bp, synthetic construct
  misc_feature 1..22: note = chemically synthesized
  source 1..22: mol_type = other DNA
gagcagatcctgaaggcactag

SEQ ID NO: 24362 - DNA, 22 bp, synthetic construct
  misc_feature 1..22: note = chemically synthesized
  source 1..22: mol_type = other DNA
agcagatcctgaaggcactagt

SEQ ID NO: 24363 - DNA, 22 bp, synthetic construct
  misc_feature 1..22: note = chemically synthesized
  source 1..22: mol_type = other DNA
aaggcactagtaagttacatga

SEQ ID NO: 24364 - DNA, 22 bp, synthetic construct
  misc_feature 1..22: note = chemically synthesized
  source 1..22: mol_type = other DNA
gtaagttacatgagaaaggggc

SEQ ID NO: 24365 - DNA, 22 bp, synthetic construct
  misc_feature 1..22: note = chemically synthesized
  source 1..22: mol_type = other DNA
catgagaaaggggctcaaatgc

SEQ ID NO: 24366 - DNA, 22 bp, synthetic construct
  misc_feature 1..22: note = chemically synthesized
  source 1..22: mol_type = other DNA
aaatgcccatggtctccactcc

SEQ ID NO: 24367 - DNA, 22 bp, synthetic construct
  misc_feature 1..22: note = chemically synthesized
  source 1..22: mol_type = other DNA
cactcctgacacactgctttct

SEQ ID NO: 24368 - DNA, 22 bp, synthetic construct
  misc_feature 1..22: note = chemically synthesized
  source 1..22: mol_type = other DNA
ctgacacactgctttctctccc

SEQ ID NO: 24369 - DNA, 22 bp, synthetic construct
  misc_feature 1..22: note = chemically synthesized
  source 1..22: mol_type = other DNA
acacactgctttctctccctga

SEQ ID NO: 24370 - DNA, 22 bp, synthetic construct
  misc_feature 1..22: note = chemically synthesized
  source 1..22: mol_type = other DNA
ctttctctccctgagactgcac

SEQ ID NO: 24371 - DNA, 22 bp, synthetic construct
  misc_feature 1..22: note = chemically synthesized
  source 1..22: mol_type = other DNA
tctctccctgagactgcaccga

SEQ ID NO: 24372 - DNA, 22 bp, synthetic construct
  misc_feature 1..22: note = chemically synthesized
  source 1..22: mol_type = other DNA
ctctccctgagactgcaccgat

SEQ ID NO: 24373 - DNA, 22 bp, synthetic construct
  misc_feature 1..22: note = chemically synthesized
  source 1..22: mol_type = other DNA
tctccctgagactgcaccgatg

SEQ ID NO: 24374 - DNA, 22 bp, synthetic construct
  misc_feature 1..22: note = chemically synthesized
  source 1..22: mol_type = other DNA
tccctgagactgcaccgatggt

SEQ ID NO: 24375 - DNA, 22 bp, synthetic construct
  misc_feature 1..22: note = chemically synthesized
  source 1..22: mol_type = other DNA
cctgagactgcaccgatggtct

SEQ ID NO: 24376 - DNA, 22 bp, synthetic construct
  misc_feature 1..22: note = chemically synthesized
  source 1..22: mol_type = other DNA
agactgcaccgatggtctcatg

SEQ ID NO: 24377 - DNA, 22 bp, synthetic construct
  misc_feature 1..22: note = chemically synthesized
  source 1..22: mol_type = other DNA
caccgatggtctcatggggagt

SEQ ID NO: 24378 - DNA, 22 bp, synthetic construct
  misc_feature 1..22: note = chemically synthesized
  source 1..22: mol_type = other DNA
atggggagttccctatgatcag

SEQ ID NO: 24379 - DNA, 22 bp, synthetic construct
  misc_feature 1..22: note = chemically synthesized
  source 1..22: mol_type = other DNA
cctatgatcagctgacagagga

SEQ ID NO: 24380 - DNA, 22 bp, synthetic construct
  misc_feature 1..22: note = chemically synthesized
  source 1..22: mol_type = other DNA
tgatcagctgacagaggaagag

SEQ ID NO: 24381 - DNA, 22 bp, synthetic construct
  misc_feature 1..22: note = chemically synthesized
  source 1..22: mol_type = other DNA
acagaggaagagaagactaggt

SEQ ID NO: 24382 - DNA, 22 bp, synthetic construct
  misc_feature 1..22: note = chemically synthesized
  source 1..22: mol_type = other DNA
ggtcctggttcacagatagttc

SEQ ID NO: 24383 - DNA, 22 bp, synthetic construct
  misc_feature 1..22: note = chemically synthesized
  source 1..22: mol_type = other DNA
gttcacagatagttctgcacga

SEQ ID NO: 24384 - DNA, 22 bp, synthetic construct
  misc_feature 1..22: note = chemically synthesized
  source 1..22: mol_type = other DNA
acagatagttctgcacgatatg

SEQ ID NO: 24385 - DNA, 22 bp, synthetic construct
  misc_feature 1..22: note = chemically synthesized
  source 1..22: mol_type = other DNA
tgcacgatatgcaggcaccacc

SEQ ID NO: 24386 - DNA, 22 bp, synthetic construct
  misc_feature 1..22: note = chemically synthesized
  source 1..22: mol_type = other DNA
cacgatatgcaggcaccaccca

SEQ ID NO: 24387 - DNA, 22 bp, synthetic construct
  misc_feature 1..22: note = chemically synthesized
  source 1..22: mol_type = other DNA
cagcccctttctaggacatccc

SEQ ID NO: 24388 - DNA, 22 bp, synthetic construct
  misc_feature 1..22: note = chemically synthesized
  source 1..22: mol_type = other DNA
tctaggacatccctgaaggaca

SEQ ID NO: 24389 - DNA, 22 bp, synthetic construct
  misc_feature 1..22: note = chemically synthesized
  source 1..22: mol_type = other DNA
ctaggacatccctgaaggacaa

SEQ ID NO: 24390 - DNA, 22 bp, synthetic construct
  misc_feature 1..22: note = chemically synthesized
  source 1..22: mol_type = other DNA
taggacatccctgaaggacaac

SEQ ID NO: 24391 - DNA, 22 bp, synthetic construct
  misc_feature 1..22: note = chemically synthesized
  source 1..22: mol_type = other DNA
ggacatccctgaaggacaacgg

SEQ ID NO: 24392 - DNA, 22 bp, synthetic construct
  misc_feature 1..22: note = chemically synthesized
  source 1..22: mol_type = other DNA
aaggacaacggtgaagggaaat

SEQ ID NO: 24393 - DNA, 22 bp, synthetic construct
  misc_feature 1..22: note = chemically synthesized
  source 1..22: mol_type = other DNA
cctagttggcagaactttgagc

SEQ ID NO: 24394 - DNA, 22 bp, synthetic construct
  misc_feature 1..22: note = chemically synthesized
  source 1..22: mol_type = other DNA
ctagttggcagaactttgagca

SEQ ID NO: 24395 - DNA, 22 bp, synthetic construct
  misc_feature 1..22: note = chemically synthesized
  source 1..22: mol_type = other DNA
gttggcagaactttgagcagtg

SEQ ID NO: 24396 - DNA, 22 bp, synthetic construct
  misc_feature 1..22: note = chemically synthesized
  source 1..22: mol_type = other DNA
gcagaactttgagcagtgtgcc

SEQ ID NO: 24397 - DNA, 22 bp, synthetic construct
  misc_feature 1..22: note = chemically synthesized
  source 1..22: mol_type = other DNA
tgagcagtgtgcctggttgtgc

SEQ ID NO: 24398 - DNA, 22 bp, synthetic construct
  misc_feature 1..22: note = chemically synthesized
  source 1..22: mol_type = other DNA
gagcagtgtgcctggttgtgca

SEQ ID NO: 24399 - DNA, 22 bp, synthetic construct
  misc_feature 1..22: note = chemically synthesized
  source 1..22: mol_type = other DNA
agcagtgtgcctggttgtgcac

SEQ ID NO: 24400 - DNA, 22 bp, synthetic construct
  misc_feature 1..22: note = chemically synthesized
  source 1..22: mol_type = other DNA
gttgtgcactttgcacagaagg

SEQ ID NO: 24401 - DNA, 22 bp, synthetic construct
  misc_feature 1..22: note = chemically synthesized
  source 1..22: mol_type = other DNA
tgcactttgcacagaaggagaa

SEQ ID NO: 24402 - DNA, 22 bp, synthetic construct
  misc_feature 1..22: note = chemically synthesized
  source 1..22: mol_type = other DNA
tgcacagaaggagaaatggcca

SEQ ID NO: 24403 - DNA, 22 bp, synthetic construct
  misc_feature 1..22: note = chemically synthesized
  source 1..22: mol_type = other DNA
gcacagaaggagaaatggccag

SEQ ID NO: 24404 - DNA, 22 bp, synthetic construct
  misc_feature 1..22: note = chemically synthesized
  source 1..22: mol_type = other DNA
cacagaaggagaaatggccaga

SEQ ID NO: 24405 - DNA, 22 bp, synthetic construct
  misc_feature 1..22: note = chemically synthesized
  source 1..22: mol_type = other DNA
gcgattatatacttattcatgg

SEQ ID NO: 24406 - DNA, 22 bp, synthetic construct
  misc_feature 1..22: note = chemically synthesized
  source 1..22: mol_type = other DNA
cgattatatacttattcatggg

SEQ ID NO: 24407 - DNA, 22 bp, synthetic construct
  misc_feature 1..22: note = chemically synthesized
  source 1..22: mol_type = other DNA
tatacttattcatgggctgtag

SEQ ID NO: 24408 - DNA, 22 bp, synthetic construct
  misc_feature 1..22: note = chemically synthesized
  source 1..22: mol_type = other DNA
attcatgggctgtagccaaagg

SEQ ID NO: 24409 - DNA, 22 bp, synthetic construct
  misc_feature 1..22: note = chemically synthesized
  source 1..22: mol_type = other DNA
ttcatgggctgtagccaaaggt

SEQ ID NO: 24410 - DNA, 22 bp, synthetic construct
  misc_feature 1..22: note = chemically synthesized
  source 1..22: mol_type = other DNA
atgggctgtagccaaaggtttg

SEQ ID NO: 24411 - DNA, 22 bp, synthetic construct
  misc_feature 1..22: note = chemically synthesized
  source 1..22: mol_type = other DNA
tagccaaaggtttggctagatg

SEQ ID NO: 24412 - DNA, 22 bp, synthetic construct
  misc_feature 1..22: note = chemically synthesized
  source 1..22: mol_type = other DNA
ggctagatggtcagggacttgg

SEQ ID NO: 24413 - DNA, 22 bp, synthetic construct
  misc_feature 1..22: note = chemically synthesized
  source 1..22: mol_type = other DNA
gctagatggtcagggacttgga

SEQ ID NO: 24414 - DNA, 22 bp, synthetic construct
  misc_feature 1..22: note = chemically synthesized
  source 1..22: mol_type = other DNA
gatggtcagggacttggaaaaa

SEQ ID NO: 24415 - DNA, 22 bp, synthetic construct
  misc_feature 1..22: note = chemically synthesized
  source 1..22: mol_type = other DNA
ggaaaaagcatgactggaaaat

SEQ ID NO: 24416 - DNA, 22 bp, synthetic construct
  misc_feature 1..22: note = chemically synthesized
  source 1..22: mol_type = other DNA
gaaaaagcatgactggaaaatt

SEQ ID NO: 24417 - DNA, 22 bp, synthetic construct
  misc_feature 1..22: note = chemically synthesized
  source 1..22: mol_type = other DNA
gaaaattgatgacaaagaaatt

SEQ ID NO: 24418 - DNA, 22 bp, synthetic construct
  misc_feature 1..22: note = chemically synthesized
  source 1..22: mol_type = other DNA
atgacaaagaaatttggggaag

SEQ ID NO: 24419 - DNA, 22 bp, synthetic construct
  misc_feature 1..22: note = chemically synthesized
  source 1..22: mol_type = other DNA
ggggaagaggtatgtggatgga

SEQ ID NO: 24420 - DNA, 22 bp, synthetic construct
  misc_feature 1..22: note = chemically synthesized
  source 1..22: mol_type = other DNA
gggaagaggtatgtggatggac

SEQ ID NO: 24421 - DNA, 22 bp, synthetic construct
  misc_feature 1..22: note = chemically synthesized
  source 1..22: mol_type = other DNA
tatgattagtcaaaaactacaa

SEQ ID NO: 24422 - DNA, 22 bp, synthetic construct
  misc_feature 1..22: note = chemically synthesized
  source 1..22: mol_type = other DNA
tgattagtcaaaaactacaaag

SEQ ID NO: 24423 - DNA, 22 bp, synthetic construct
  misc_feature 1..22: note = chemically synthesized
  source 1..22: mol_type = other DNA
gtcaaaaactacaaagatattt

SEQ ID NO: 24424 - DNA, 22 bp, synthetic construct
  misc_feature 1..22: note = chemically synthesized
  source 1..22: mol_type = other DNA
caaagatattttcatcccatgt

SEQ ID NO: 24425 - DNA, 22 bp, synthetic construct
  misc_feature 1..22: note = chemically synthesized
  source 1..22: mol_type = other DNA
tcatcccatgtgagtgctcacc

SEQ ID NO: 24426 - DNA, 22 bp, synthetic construct
  misc_feature 1..22: note = chemically synthesized
  source 1..22: mol_type = other DNA
catcccatgtgagtgctcacca

SEQ ID NO: 24427 - DNA, 22 bp, synthetic construct
  misc_feature 1..22: note = chemically synthesized
  source 1..22: mol_type = other DNA
atcccatgtgagtgctcaccaa

SEQ ID NO: 24428 - DNA, 22 bp, synthetic construct
  misc_feature 1..22: note = chemically synthesized
  source 1..22: mol_type = other DNA
accaatgggtgacctcagcaga

SEQ ID NO: 24429 - DNA, 22 bp, synthetic construct
  misc_feature 1..22: note = chemically synthesized
  source 1..22: mol_type = other DNA
agcagaagaggattttaataat

SEQ ID NO: 24430 - DNA, 22 bp, synthetic construct
  misc_feature 1..22: note = chemically synthesized
  source 1..22: mol_type = other DNA
taataatcaagtggataggatg

SEQ ID NO: 24431 - DNA, 22 bp, synthetic construct
  misc_feature 1..22: note = chemically synthesized
  source 1..22: mol_type = other DNA
aataatcaagtggataggatga

SEQ ID NO: 24432 - DNA, 22 bp, synthetic construct
  misc_feature 1..22: note = chemically synthesized
  source 1..22: mol_type = other DNA
ataatcaagtggataggatgat

SEQ ID NO: 24433 - DNA, 22 bp, synthetic construct
  misc_feature 1..22: note = chemically synthesized
  source 1..22: mol_type = other DNA
tgtggacaccactcagcctttt

SEQ ID NO: 24434 - DNA, 22 bp, synthetic construct
  misc_feature 1..22: note = chemically synthesized
  source 1..22: mol_type = other DNA
tggacaccactcagccttttcc

SEQ ID NO: 24435 - DNA, 22 bp, synthetic construct
  misc_feature 1..22: note = chemically synthesized
  source 1..22: mol_type = other DNA
agccttttcccaggccactcat

SEQ ID NO: 24436 - DNA, 22 bp, synthetic construct
  misc_feature 1..22: note = chemically synthesized
  source 1..22: mol_type = other DNA
ttcccaggccactcatgtcatc

SEQ ID NO: 24437 - DNA, 22 bp, synthetic construct
  misc_feature 1..22: note = chemically synthesized
  source 1..22: mol_type = other DNA
tcccaggccactcatgtcatcg

SEQ ID NO: 24438 - DNA, 22 bp, synthetic construct
  misc_feature 1..22: note = chemically synthesized
  source 1..22: mol_type = other DNA
cccaggccactcatgtcatcgt

SEQ ID NO: 24439 - DNA, 22 bp, synthetic construct
  misc_feature 1..22: note = chemically synthesized
  source 1..22: mol_type = other DNA
ccaggccactcatgtcatcgtc

SEQ ID NO: 24440 - DNA, 22 bp, synthetic construct
  misc_feature 1..22: note = chemically synthesized
  source 1..22: mol_type = other DNA
atgtcatcgtccaatggaccca

SEQ ID NO: 24441 - DNA, 22 bp, synthetic construct
  misc_feature 1..22: note = chemically synthesized
  source 1..22: mol_type = other DNA
cagggatggaagttatgcttgg

SEQ ID NO: 24442 - DNA, 22 bp, synthetic construct
  misc_feature 1..22: note = chemically synthesized
  source 1..22: mol_type = other DNA
tgcttgggctcagcaacatgga

SEQ ID NO: 24443 - DNA, 22 bp, synthetic construct
  misc_feature 1..22: note = chemically synthesized
  source 1..22: mol_type = other DNA
gggctcagcaacatggacttcc

SEQ ID NO: 24444 - DNA, 22 bp, synthetic construct
  misc_feature 1..22: note = chemically synthesized
  source 1..22: mol_type = other DNA
ggctcagcaacatggacttcca

SEQ ID NO: 24445 - DNA, 22 bp, synthetic construct
  misc_feature 1..22: note = chemically synthesized
  source 1..22: mol_type = other DNA
agcaacatggacttccactcac

SEQ ID NO: 24446 - DNA, 22 bp, synthetic construct
  misc_feature 1..22: note = chemically synthesized
  source 1..22: mol_type = other DNA
ccactcaccaaagctgacctgg

SEQ ID NO: 24447 - DNA, 22 bp, synthetic construct
  misc_feature 1..22: note = chemically synthesized
  source 1..22: mol_type = other DNA
cactcaccaaagctgacctggc

SEQ ID NO: 24448 - DNA, 22 bp, synthetic construct
  misc_feature 1..22: note = chemically synthesized
  source 1..22: mol_type = other DNA
accaaagctgacctggccacag

SEQ ID NO: 24449 - DNA, 22 bp, synthetic construct
  misc_feature 1..22: note = chemically synthesized
  source 1..22: mol_type = other DNA
acctggccacagccactgcttg

SEQ ID NO: 24450 - DNA, 22 bp, synthetic construct
  misc_feature 1..22: note = chemically synthesized
  source 1..22: mol_type = other DNA
gccacagccactgcttgccagc

SEQ ID NO: 24451 - DNA, 22 bp, synthetic construct
  misc_feature 1..22: note = chemically synthesized
  source 1..22: mol_type = other DNA
cttgccagcatcagagaccaac

SEQ ID NO: 24452 - DNA, 22 bp, synthetic construct
  misc_feature 1..22: note = chemically synthesized
  source 1..22: mol_type = other DNA
gccagcatcagagaccaacact

SEQ ID NO: 24453 - DNA, 22 bp, synthetic construct
  misc_feature 1..22: note = chemically synthesized
  source 1..22: mol_type = other DNA
ccagcatcagagaccaacacta

SEQ ID NO: 24454 - DNA, 22 bp, synthetic construct
  misc_feature 1..22: note = chemically synthesized
  source 1..22: mol_type = other DNA
agcccttgatatggcaccattc

SEQ ID NO: 24455 - DNA, 22 bp, synthetic construct
  misc_feature 1..22: note = chemically synthesized
  source 1..22: mol_type = other DNA
gatatggcaccattcctcgggg

SEQ ID NO: 24456 - DNA, 22 bp, synthetic construct
  misc_feature 1..22: note = chemically synthesized
  source 1..22: mol_type = other DNA
atatggcaccattcctcggggt

SEQ ID NO: 24457 - DNA, 22 bp, synthetic construct
  misc_feature 1..22: note = chemically synthesized
  source 1..22: mol_type = other DNA
ctcggggtgatcagccagctac

SEQ ID NO: 24458 - DNA, 22 bp, synthetic construct
  misc_feature 1..22: note = chemically synthesized
  source 1..22: mol_type = other DNA
ggggtgatcagccagctacctg

SEQ ID NO: 24459 - DNA, 22 bp, synthetic construct
  misc_feature 1..22: note = chemically synthesized
  source 1..22: mol_type = other DNA
cctggtggcaggttgattatat

SEQ ID NO: 24460 - DNA, 22 bp, synthetic construct
  misc_feature 1..22: note = chemically synthesized
  source 1..22: mol_type = other DNA
gtggcaggttgattatattgga

SEQ ID NO: 24461 - DNA, 22 bp, synthetic construct
  misc_feature 1..22: note = chemically synthesized
  source 1..22: mol_type = other DNA
attatattggacctcttccatc

SEQ ID NO: 24462 - DNA, 22 bp, synthetic construct
  misc_feature 1..22: note = chemically synthesized
  source 1..22: mol_type = other DNA
tattggacctcttccatcatgg

SEQ ID NO: 24463 - DNA, 22 bp, synthetic construct
  misc_feature 1..22: note = chemically synthesized
  source 1..22: mol_type = other DNA
gacctcttccatcatggaaagg

SEQ ID NO: 24464 - DNA, 22 bp, synthetic construct
  misc_feature 1..22: note = chemically synthesized
  source 1..22: mol_type = other DNA
ttccatcatggaaagggcagag

SEQ ID NO: 24465 - DNA, 22 bp, synthetic construct
  misc_feature 1..22: note = chemically synthesized
  source 1..22: mol_type = other DNA
ccatcatggaaagggcagaggc

SEQ ID NO: 24466 - DNA, 22 bp, synthetic construct
  misc_feature 1..22: note = chemically synthesized
  source 1..22: mol_type = other DNA
catcatggaaagggcagaggct

SEQ ID NO: 24467 - DNA, 22 bp, synthetic construct
  misc_feature 1..22: note = chemically synthesized
  source 1..22: mol_type = other DNA
gtcctcactggaatagacactt

SEQ ID NO: 24468 - DNA, 22 bp, synthetic construct
  misc_feature 1..22: note = chemically synthesized
  source 1..22: mol_type = other DNA
tcctcactggaatagacactta

SEQ ID NO: 24469 - DNA, 22 bp, synthetic construct
  misc_feature 1..22: note = chemically synthesized
  source 1..22: mol_type = other DNA
actggaatagacacttactctg

SEQ ID NO: 24470 - DNA, 22 bp, synthetic construct
  misc_feature 1..22: note = chemically synthesized
  source 1..22: mol_type = other DNA
gaatagacacttactctggata

SEQ ID NO: 24471 - DNA, 22 bp, synthetic construct
  misc_feature 1..22: note = chemically synthesized
  source 1..22: mol_type = other DNA
actctggatatgggtttcccaa

SEQ ID NO: 24472 - DNA, 22 bp, synthetic construct
  misc_feature 1..22: note = chemically synthesized
  source 1..22: mol_type = other DNA
ctctggatatgggtttcccaat

SEQ ID NO: 24473 - DNA, 22 bp, synthetic construct
  misc_feature 1..22: note = chemically synthesized
  source 1..22: mol_type = other DNA
tggatatgggtttcccaatcct

SEQ ID NO: 24474 - DNA, 22 bp, synthetic construct
  misc_feature 1..22: note = chemically synthesized
  source 1..22: mol_type = other DNA
gatatgggtttcccaatcctga

SEQ ID NO: 24475 - DNA, 22 bp, synthetic construct
  misc_feature 1..22: note = chemically synthesized
  source 1..22: mol_type = other DNA
cccaatcctgaactcaatgctt

SEQ ID NO: 24476 - DNA, 22 bp, synthetic construct
  misc_feature 1..22: note = chemically synthesized
  source 1..22: mol_type = other DNA
ccaatcctgaactcaatgctta

SEQ ID NO: 24477 - DNA, 22 bp, synthetic construct
  misc_feature 1..22: note = chemically synthesized
  source 1..22: mol_type = other DNA
aactcaatgcttatgccaagac

SEQ ID NO: 24478 - DNA, 22 bp, synthetic construct
  misc_feature 1..22: note = chemically synthesized
  source 1..22: mol_type = other DNA
aatgcttatgccaagactacca

SEQ ID NO: 24479 - DNA, 22 bp, synthetic construct
  misc_feature 1..22: note = chemically synthesized
  source 1..22: mol_type = other DNA
atgccaagactaccatccatgg

SEQ ID NO: 24480 - DNA, 22 bp, synthetic construct
  misc_feature 1..22: note = chemically synthesized
  source 1..22: mol_type = other DNA
tgccaagactaccatccatgga

SEQ ID NO: 24481 - DNA, 22 bp, synthetic construct
  misc_feature 1..22: note = chemically synthesized
  source 1..22: mol_type = other DNA
ccatccatggaatcacagaatg

SEQ ID NO: 24482 - DNA, 22 bp, synthetic construct
  misc_feature 1..22: note = chemically synthesized
  source 1..22: mol_type = other DNA
tcatggtattccacacagcatt

SEQ ID NO: 24483 - DNA, 22 bp, synthetic construct
  misc_feature 1..22: note = chemically synthesized
  source 1..22: mol_type = other DNA
cacacagcattgcttctgacca

SEQ ID NO: 24484 - DNA, 22 bp, synthetic construct
  misc_feature 1..22: note = chemically synthesized
  source 1..22: mol_type = other DNA
cttctgaccaagccactcactt

SEQ ID NO: 24485 - DNA, 22 bp, synthetic construct
  misc_feature 1..22: note = chemically synthesized
  source 1..22: mol_type = other DNA
ctgaccaagccactcactttat

SEQ ID NO: 24486 - DNA, 22 bp, synthetic construct
  misc_feature 1..22: note = chemically synthesized
  source 1..22: mol_type = other DNA
tgaccaagccactcactttatg

SEQ ID NO: 24487 - DNA, 22 bp, synthetic construct
  misc_feature 1..22: note = chemically synthesized
  source 1..22: mol_type = other DNA
accaagccactcactttatggc

SEQ ID NO: 24488 - DNA, 22 bp, synthetic construct
  misc_feature 1..22: note = chemically synthesized
  source 1..22: mol_type = other DNA
actttatggctaaagaagtgtg

SEQ ID NO: 24489 - DNA, 22 bp, synthetic construct
  misc_feature 1..22: note = chemically synthesized
  source 1..22: mol_type = other DNA
tatggctaaagaagtgtgacag

SEQ ID NO: 24490 - DNA, 22 bp, synthetic construct
  misc_feature 1..22: note = chemically synthesized
  source 1..22: mol_type = other DNA
atggctaaagaagtgtgacagt

SEQ ID NO: 24491 - DNA, 22 bp, synthetic construct
  misc_feature 1..22: note = chemically synthesized
  source 1..22: mol_type = other DNA
tggctaaagaagtgtgacagtg

SEQ ID NO: 24492 - DNA, 22 bp, synthetic construct
  misc_feature 1..22: note = chemically synthesized
  source 1..22: mol_type = other DNA
aagaagtgtgacagtgggctca

SEQ ID NO: 24493 - DNA, 22 bp, synthetic construct
  misc_feature 1..22: note = chemically synthesized
  source 1..22: mol_type = other DNA
atgctcatggaatttactggtc

SEQ ID NO: 24494 - DNA, 22 bp, synthetic construct
  misc_feature 1..22: note = chemically synthesized
  source 1..22: mol_type = other DNA
atggaatttactggtcttacca

SEQ ID NO: 24495 - DNA, 22 bp, synthetic construct
  misc_feature 1..22: note = chemically synthesized
  source 1..22: mol_type = other DNA
actggtcttaccatgatcccta

SEQ ID NO: 24496 - DNA, 22 bp, synthetic construct
  misc_feature 1..22: note = chemically synthesized
  source 1..22: mol_type = other DNA
ctggtcttaccatgatccctat

SEQ ID NO: 24497 - DNA, 22 bp, synthetic construct
  misc_feature 1..22: note = chemically synthesized
  source 1..22: mol_type = other DNA
gtcttaccatgatccctatcat

SEQ ID NO: 24498 - DNA, 22 bp, synthetic construct
  misc_feature 1..22: note = chemically synthesized
  source 1..22: mol_type = other DNA
accatgatccctatcatcctga

SEQ ID NO: 24499 - DNA, 22 bp, synthetic construct
  misc_feature 1..22: note = chemically synthesized
  source 1..22: mol_type = other DNA
ccatgatccctatcatcctgaa

SEQ ID NO: 24500 - DNA, 22 bp, synthetic construct
  misc_feature 1..22: note = chemically synthesized
  source 1..22: mol_type = other DNA
tcatcctgaagcagcttttgaa

SEQ ID NO: 24501 - DNA, 22 bp, synthetic construct
  misc_feature 1..22: note = chemically synthesized
  source 1..22: mol_type = other DNA
aagcagcttttgaatggccttt

SEQ ID NO: 24502 - DNA, 22 bp, synthetic construct
  misc_feature 1..22: note = chemically synthesized
  source 1..22: mol_type = other DNA
ttgaatggccttttgaagtcac

SEQ ID NO: 24503 - DNA, 22 bp, synthetic construct
  misc_feature 1..22: note = chemically synthesized
  source 1..22: mol_type = other DNA
tgaatggccttttgaagtcacg

SEQ ID NO: 24504 - DNA, 22 bp, synthetic construct
  misc_feature 1..22: note = chemically synthesized
  source 1..22: mol_type = other DNA
gaatggccttttgaagtcacga

SEQ ID NO: 24505 - DNA, 22 bp, synthetic construct
  misc_feature 1..22: note = chemically synthesized
  source 1..22: mol_type = other DNA
aatggccttttgaagtcacgat

SEQ ID NO: 24506 - DNA, 22 bp, synthetic construct
  misc_feature 1..22: note = chemically synthesized
  source 1..22: mol_type = other DNA
ttgaagtcacgattacaatgcc

SEQ ID NO: 24507 - DNA, 22 bp, synthetic construct
  misc_feature 1..22: note = chemically synthesized
  source 1..22: mol_type = other DNA
tgaagtcacgattacaatgcca

SEQ ID NO: 24508 - DNA, 22 bp, synthetic construct
  misc_feature 1..22: note = chemically synthesized
  source 1..22: mol_type = other DNA
gaagtcacgattacaatgccaa

SEQ ID NO: 24509 - DNA, 22 bp, synthetic construct
  misc_feature 1..22: note = chemically synthesized
  source 1..22: mol_type = other DNA
aagtcacgattacaatgccaac

SEQ ID NO: 24510 - DNA, 22 bp, synthetic construct
  misc_feature 1..22: note = chemically synthesized
  source 1..22: mol_type = other DNA
caatgccaactaggtgacaata

SEQ ID NO: 24511 - DNA, 22 bp, synthetic construct
  misc_feature 1..22: note = chemically synthesized
  source 1..22: mol_type = other DNA
ggtgacaatactttgcaggcct

SEQ ID NO: 24512 - DNA, 22 bp, synthetic construct
  misc_feature 1..22: note = chemically synthesized
  source 1..22: mol_type = other DNA
tgcaggcctggggcaaagttct

SEQ ID NO: 24513 - DNA, 22 bp, synthetic construct
  misc_feature 1..22: note = chemically synthesized
  source 1..22: mol_type = other DNA
gcaggcctggggcaaagttctc

SEQ ID NO: 24514 - DNA, 22 bp, synthetic construct
  misc_feature 1..22: note = chemically synthesized
  source 1..22: mol_type = other DNA
caggcctggggcaaagttctcc

SEQ ID NO: 24515 - DNA, 22 bp, synthetic construct
  misc_feature 1..22: note = chemically synthesized
  source 1..22: mol_type = other DNA
gggcaaagttctccagaaggct

SEQ ID NO: 24516 - DNA, 22 bp, synthetic construct
  misc_feature 1..22: note = chemically synthesized
  source 1..22: mol_type = other DNA
tccagaaggctgtgtatgctct

SEQ ID NO: 24517 - DNA, 22 bp, synthetic construct
  misc_feature 1..22: note = chemically synthesized
  source 1..22: mol_type = other DNA
cagaaggctgtgtatgctctga

SEQ ID NO: 24518 - DNA, 22 bp, synthetic construct
  misc_feature 1..22: note = chemically synthesized
  source 1..22: mol_type = other DNA
tgtatgctctgaatcagtgtcc

SEQ ID NO: 24519 - DNA, 22 bp, synthetic construct
  misc_feature 1..22: note = chemically synthesized
  source 1..22: mol_type = other DNA
tgaatcagtgtccaatatatgg

SEQ ID NO: 24520 - DNA, 22 bp, synthetic construct
  misc_feature 1..22: note = chemically synthesized
  source 1..22: mol_type = other DNA
aatcagtgtccaatatatggta

SEQ ID NO: 24521 - DNA, 22 bp, synthetic construct
  misc_feature 1..22: note = chemically synthesized
  source 1..22: mol_type = other DNA
tttctcccatagacaggattca

SEQ ID NO: 24522 - DNA, 22 bp, synthetic construct
  misc_feature 1..22: note = chemically synthesized
  source 1..22: mol_type = other DNA
ctcccatagacaggattcacgg

SEQ ID NO: 24523 - DNA, 22 bp, synthetic construct
  misc_feature 1..22: note = chemically synthesized
  source 1..22: mol_type = other DNA
tcccatagacaggattcacggg

SEQ ID NO: 24524 - DNA, 22 bp, synthetic construct
  misc_feature 1..22: note = chemically synthesized
  source 1..22: mol_type = other DNA
ccatagacaggattcacgggtc

SEQ ID NO: 24525 - DNA, 22 bp, synthetic construct
  misc_feature 1..22: note = chemically synthesized
  source 1..22: mol_type = other DNA
acgggtccaggaatcaaagggt

SEQ ID NO: 24526 - DNA, 22 bp, synthetic construct
  misc_feature 1..22: note = chemically synthesized
  source 1..22: mol_type = other DNA
accatcacccctagtgttccac

SEQ ID NO: 24527 - DNA, 22 bp, synthetic construct
  misc_feature 1..22: note = chemically synthesized
  source 1..22: mol_type = other DNA
gtgttccactagcaaaattttt

SEQ ID NO: 24528 - DNA, 22 bp, synthetic construct
  misc_feature 1..22: note = chemically synthesized
  source 1..22: mol_type = other DNA
cactagcaaaatttttgcttcc

SEQ ID NO: 24529 - DNA, 22 bp, synthetic construct
  misc_feature 1..22: note = chemically synthesized
  source 1..22: mol_type = other DNA
gcaaaatttttgcttcctgttc

SEQ ID NO: 24530 - DNA, 22 bp, synthetic construct
  misc_feature 1..22: note = chemically synthesized
  source 1..22: mol_type = other DNA
ttgcttcctgttcccatggcat

SEQ ID NO: 24531 - DNA, 22 bp, synthetic construct
  misc_feature 1..22: note = chemically synthesized
  source 1..22: mol_type = other DNA
tgcttcctgttcccatggcatt

SEQ ID NO: 24532 - DNA, 22 bp, synthetic construct
  misc_feature 1..22: note = chemically synthesized
  source 1..22: mol_type = other DNA
gcttcctgttcccatggcatta

SEQ ID NO: 24533 - DNA, 22 bp, synthetic construct
  misc_feature 1..22: note = chemically synthesized
  source 1..22: mol_type = other DNA
cttcctgttcccatggcattat

SEQ ID NO: 24534 - DNA, 22 bp, synthetic construct
  misc_feature 1..22: note = chemically synthesized
  source 1..22: mol_type = other DNA
cctgttcccatggcattatgtt

SEQ ID NO: 24535 - DNA, 22 bp, synthetic construct
  misc_feature 1..22: note = chemically synthesized
  source 1..22: mol_type = other DNA
ctgttcccatggcattatgttc

SEQ ID NO: 24536 - DNA, 22 bp, synthetic construct
  misc_feature 1..22: note = chemically synthesized
  source 1..22: mol_type = other DNA
ttcccatggcattatgttctgc

SEQ ID NO: 24537 - DNA, 22 bp, synthetic construct
  misc_feature 1..22: note = chemically synthesized
  source 1..22: mol_type = other DNA
ccatggcattatgttctgctgg

SEQ ID NO: 24538 - DNA, 22 bp, synthetic construct
  misc_feature 1..22: note = chemically synthesized
  source 1..22: mol_type = other DNA
tgttctgctggcttagaggtct

SEQ ID NO: 24539 - DNA, 22 bp, synthetic construct
  misc_feature 1..22: note = chemically synthesized
  source 1..22: mol_type = other DNA
tgctggcttagaggtcttagtt

SEQ ID NO: 24540 - DNA, 22 bp, synthetic construct
  misc_feature 1..22: note = chemically synthesized
  source 1..22: mol_type = other DNA
ctggcttagaggtcttagttcc

SEQ ID NO: 24541 - DNA, 22 bp, synthetic construct
  misc_feature 1..22: note = chemically synthesized
  source 1..22: mol_type = other DNA
gcttagaggtcttagttccaga

SEQ ID NO: 24542 - DNA, 22 bp, synthetic construct
  misc_feature 1..22: note = chemically synthesized
  source 1..22: mol_type = other DNA
agaggtcttagttccagaggga

SEQ ID NO: 24543 - DNA, 22 bp, synthetic construct
  misc_feature 1..22: note = chemically synthesized
  source 1..22: mol_type = other DNA
gaggtcttagttccagagggag

SEQ ID NO: 24544 - DNA, 22 bp, synthetic construct
  misc_feature 1..22: note = chemically synthesized
  source 1..22: mol_type = other DNA
agttccagagggaggaacactg

SEQ ID NO: 24545 - DNA, 22 bp, synthetic construct
  misc_feature 1..22: note = chemically synthesized
  source 1..22: mol_type = other DNA
gttccagagggaggaacactgc

SEQ ID NO: 24546 - DNA, 22 bp, synthetic construct
  misc_feature 1..22: note = chemically synthesized
  source 1..22: mol_type = other DNA
cagagggaggaacactgccgcc

SEQ ID NO: 24547 - DNA, 22 bp, synthetic construct
  misc_feature 1..22: note = chemically synthesized
  source 1..22: mol_type = other DNA
ccgccaggtgacacaataatga

SEQ ID NO: 24548 - DNA, 22 bp, synthetic construct
  misc_feature 1..22: note = chemically synthesized
  source 1..22: mol_type = other DNA
cattaaactgcaaattaagatt

SEQ ID NO: 24549 - DNA, 22 bp, synthetic construct
  misc_feature 1..22: note = chemically synthesized
  source 1..22: mol_type = other DNA
aactgcaaattaagattgccac

SEQ ID NO: 24550 - DNA, 22 bp, synthetic construct
  misc_feature 1..22: note = chemically synthesized
  source 1..22: mol_type = other DNA
caaattaagattgccacctgga

SEQ ID NO: 24551 - DNA, 22 bp, synthetic construct
  misc_feature 1..22: note = chemically synthesized
  source 1..22: mol_type = other DNA
agattgccacctggacactttg

SEQ ID NO: 24552 - DNA, 22 bp, synthetic construct
  misc_feature 1..22: note = chemically synthesized
  source 1..22: mol_type = other DNA
ccacctggacactttgggctcc

SEQ ID NO: 24553 - DNA, 22 bp, synthetic construct
  misc_feature 1..22: note = chemically synthesized
  source 1..22: mol_type = other DNA
gacactttgggctcctcccacc

SEQ ID NO: 24554 - DNA, 22 bp, synthetic construct
  misc_feature 1..22: note = chemically synthesized
  source 1..22: mol_type = other DNA
tgggctcctcccacctttaagt

SEQ ID NO: 24555 - DNA, 22 bp, synthetic construct
  misc_feature 1..22: note = chemically synthesized
  source 1..22: mol_type = other DNA
gggctcctcccacctttaagtc

SEQ ID NO: 24556 - DNA, 22 bp, synthetic construct
  misc_feature 1..22: note = chemically synthesized
  source 1..22: mol_type = other DNA
ggctcctcccacctttaagtca

SEQ ID NO: 24557 - DNA, 22 bp, synthetic construct
  misc_feature 1..22: note = chemically synthesized
  source 1..22: mol_type = other DNA
ctcccacctttaagtcaacagg

SEQ ID NO: 24558 - DNA, 22 bp, synthetic construct
  misc_feature 1..22: note = chemically synthesized
  source 1..22: mol_type = other DNA
ccacctttaagtcaacaggcta

SEQ ID NO: 24559 - DNA, 22 bp, synthetic construct
  misc_feature 1..22: note = chemically synthesized
  source 1..22: mol_type = other DNA
taagtcaacaggctaagaagag

SEQ ID NO: 24560 - DNA, 22 bp, synthetic construct
  misc_feature 1..22: note = chemically synthesized
  source 1..22: mol_type = other DNA
aagtcaacaggctaagaagaga

SEQ ID NO: 24561 - DNA, 22 bp, synthetic construct
  misc_feature 1..22: note = chemically synthesized
  source 1..22: mol_type = other DNA
agtcaacaggctaagaagagag

SEQ ID NO: 24562 - DNA, 22 bp, synthetic construct
  misc_feature 1..22: note = chemically synthesized
  source 1..22: mol_type = other DNA
agaagagagttacagtgttggc

SEQ ID NO: 24563 - DNA, 22 bp, synthetic construct
  misc_feature 1..22: note = chemically synthesized
  source 1..22: mol_type = other DNA
cagtgttggctgcggtgattaa

SEQ ID NO: 24564 - DNA, 22 bp, synthetic construct
  misc_feature 1..22: note = chemically synthesized
  source 1..22: mol_type = other DNA
gctgcggtgattaacccagact

SEQ ID NO: 24565 - DNA, 22 bp, synthetic construct
  misc_feature 1..22: note = chemically synthesized
  source 1..22: mol_type = other DNA
cggtgattaacccagactatca

SEQ ID NO: 24566 - DNA, 22 bp, synthetic construct
  misc_feature 1..22: note = chemically synthesized
  source 1..22: mol_type = other DNA
acccagactatcaagatgaaat

SEQ ID NO: 24567 - DNA, 22 bp, synthetic construct
  misc_feature 1..22: note = chemically synthesized
  source 1..22: mol_type = other DNA
tcaagatgaaatcagtctacaa

SEQ ID NO: 24568 - DNA, 22 bp, synthetic construct
  misc_feature 1..22: note = chemically synthesized
  source 1..22: mol_type = other DNA
caactccacaatggaggtaagg

SEQ ID NO: 24569 - DNA, 22 bp, synthetic construct
  misc_feature 1..22: note = chemically synthesized
  source 1..22: mol_type = other DNA
cacaatggaggtaaggaagcgt

SEQ ID NO: 24570 - DNA, 22 bp, synthetic construct
  misc_feature 1..22: note = chemically synthesized
  source 1..22: mol_type = other DNA
gggtgtctcttagttttaccat

SEQ ID NO: 24571 - DNA, 22 bp, synthetic construct
  misc_feature 1..22: note = chemically synthesized
  source 1..22: mol_type = other DNA
ttagttttaccatgtcctggaa

SEQ ID NO: 24572 - DNA, 22 bp, synthetic construct
  misc_feature 1..22: note = chemically synthesized
  source 1..22: mol_type = other DNA
agttttaccatgtcctggaatt

SEQ ID NO: 24573 - DNA, 22 bp, synthetic construct
  misc_feature 1..22: note = chemically synthesized
  source 1..22: mol_type = other DNA
gttttaccatgtcctggaatta

SEQ ID NO: 24574 - DNA, 22 bp, synthetic construct
  misc_feature 1..22: note = chemically synthesized
  source 1..22: mol_type = other DNA
taccatgtcctggaattaaggt

SEQ ID NO: 24575 - DNA, 22 bp, synthetic construct
  misc_feature 1..22: note = chemically synthesized
  source 1..22: mol_type = other DNA
accatgtcctggaattaaggtc

SEQ ID NO: 24576 - DNA, 22 bp, synthetic construct
  misc_feature 1..22: note = chemically synthesized
  source 1..22: mol_type = other DNA
ccatgtcctggaattaaggtca

SEQ ID NO: 24577 - DNA, 22 bp, synthetic construct
  misc_feature 1..22: note = chemically synthesized
  source 1..22: mol_type = other DNA
gaattaaggtcagtgggaaact

SEQ ID NO: 24578 - DNA, 22 bp, synthetic construct
  misc_feature 1..22: note = chemically synthesized
  source 1..22: mol_type = other DNA
aggtcagtgggaaactactaca

SEQ ID NO: 24579 - DNA, 22 bp, synthetic construct
  misc_feature 1..22: note = chemically synthesized
  source 1..22: mol_type = other DNA
ctacaggccattccaggcagga

SEQ ID NO: 24580 - DNA, 22 bp, synthetic construct
  misc_feature 1..22: note = chemically synthesized
  source 1..22: mol_type = other DNA
caggccattccaggcaggacta

SEQ ID NO: 24581 - DNA, 22 bp, synthetic construct
  misc_feature 1..22: note = chemically synthesized
  source 1..22: mol_type = other DNA
caggcaggactacaaataaagg

SEQ ID NO: 24582 - DNA, 22 bp, synthetic construct
  misc_feature 1..22: note = chemically synthesized
  source 1..22: mol_type = other DNA
caaataaaggtttgggtcactc

SEQ ID NO: 24583 - DNA, 22 bp, synthetic construct
  misc_feature 1..22: note = chemically synthesized
  source 1..22: mol_type = other DNA
gggtcactccaccaggaaaaaa

SEQ ID NO: 24584 - DNA, 22 bp, synthetic construct
  misc_feature 1..22: note = chemically synthesized
  source 1..22: mol_type = other DNA
ggtcactccaccaggaaaaaaa

SEQ ID NO: 24585 - DNA, 22 bp, synthetic construct
  misc_feature 1..22: note = chemically synthesized
  source 1..22: mol_type = other DNA
caccaggaaaaaaaaaaaaaaa

SEQ ID NO: 24586 - DNA, 22 bp, synthetic construct
  misc_feature 1..22: note = chemically synthesized
  source 1..22: mol_type = other DNA
ctgaggtgcttgctgagggcaa

SEQ ID NO: 24587 - DNA, 22 bp, synthetic construct
  misc_feature 1..22: note = chemically synthesized
  source 1..22: mol_type = other DNA
aggtgcttgctgagggcaaagg

SEQ ID NO: 24588 - DNA, 22 bp, synthetic construct
  misc_feature 1..22: note = chemically synthesized
  source 1..22: mol_type = other DNA
gctgagggcaaagggaatacag

SEQ ID NO: 24589 - DNA, 22 bp, synthetic construct
  misc_feature 1..22: note = chemically synthesized
  source 1..22: mol_type = other DNA
ctgagggcaaagggaatacaga

SEQ ID NO: 24590 - DNA, 22 bp, synthetic construct
  misc_feature 1..22: note = chemically synthesized
  source 1..22: mol_type = other DNA
agggcaaagggaatacagaata

SEQ ID NO: 24591 - DNA, 22 bp, synthetic construct
  misc_feature 1..22: note = chemically synthesized
  source 1..22: mol_type = other DNA
cgatcacgtgaccaattgcaga

SEQ ID NO: 24592 - DNA, 22 bp, synthetic construct
  misc_feature 1..22: note = chemically synthesized
  source 1..22: mol_type = other DNA
cagatacaaggactgtaattgt

SEQ ID NO: 24593 - DNA, 22 bp, synthetic construct
  misc_feature 1..22: note = chemically synthesized
  source 1..22: mol_type = other DNA
taattgtcatgagtatttcctc

SEQ ID NO: 24594 - DNA, 22 bp, synthetic construct
  misc_feature 1..22: note = chemically synthesized
  source 1..22: mol_type = other DNA
tcatgagtatttcctccttctt

SEQ ID NO: 24595 - DNA, 22 bp, synthetic construct
  misc_feature 1..22: note = chemically synthesized
  source 1..22: mol_type = other DNA
cctccttcttttgttaaaaaca

SEQ ID NO: 24596 - DNA, 22 bp, synthetic construct
  misc_feature 1..22: note = chemically synthesized
  source 1..22: mol_type = other DNA
ctccttcttttgttaaaaacac

SEQ ID NO: 24597 - DNA, 22 bp, synthetic construct
  misc_feature 1..22: note = chemically synthesized
  source 1..22: mol_type = other DNA
cttcttttgttaaaaacacctt

SEQ ID NO: 24598 - DNA, 22 bp, synthetic construct
  misc_feature 1..22: note = chemically synthesized
  source 1..22: mol_type = other DNA
cttttgttaaaaacaccttcgt

SEQ ID NO: 24599 - DNA, 22 bp, synthetic construct
  misc_feature 1..22: note = chemically synthesized
  source 1..22: mol_type = other DNA
ttttgttaaaaacaccttcgtg

SEQ ID NO: 24600 - DNA, 22 bp, synthetic construct
  misc_feature 1..22: note = chemically synthesized
  source 1..22: mol_type = other DNA
ttgttaaaaacaccttcgtgtc

SEQ ID NO: 24601 - DNA, 22 bp, synthetic construct
  misc_feature 1..22: note = chemically synthesized
  source 1..22: mol_type = other DNA
tgttaaaaacaccttcgtgtct

SEQ ID NO: 24602 - DNA, 22 bp, synthetic construct
  misc_feature 1..22: note = chemically synthesized
  source 1..22: mol_type = other DNA
gttaaaaacaccttcgtgtctg

SEQ ID NO: 24603 - DNA, 22 bp, synthetic construct
  misc_feature 1..22: note = chemically synthesized
  source 1..22: mol_type = other DNA
ttaaaaacaccttcgtgtctgt

SEQ ID NO: 24604 - DNA, 22 bp, synthetic construct
  misc_feature 1..22: note = chemically synthesized
  source 1..22: mol_type = other DNA
aaaacaccttcgtgtctgtata

SEQ ID NO: 24605 - DNA, 22 bp, synthetic construct
  misc_feature 1..22: note = chemically synthesized
  source 1..22: mol_type = other DNA
cgtgtctgtatacacttgtact

SEQ ID NO: 24606 - DNA, 22 bp, synthetic construct
  misc_feature 1..22: note = chemically synthesized
  source 1..22: mol_type = other DNA
gtgtctgtatacacttgtacta

SEQ ID NO: 24607 - DNA, 22 bp, synthetic construct
  misc_feature 1..22: note = chemically synthesized
  source 1..22: mol_type = other DNA
tatacacttgtactaagaaaat

SEQ ID NO: 24608 - DNA, 22 bp, synthetic construct
  misc_feature 1..22: note = chemically synthesized
  source 1..22: mol_type = other DNA
gtactaagaaaatatatacatt

SEQ ID NO: 24609 - DNA, 22 bp, synthetic construct
  misc_feature 1..22: note = chemically synthesized
  source 1..22: mol_type = other DNA
tactaagaaaatatatacattt

SEQ ID NO: 24610 - DNA, 22 bp, synthetic construct
  misc_feature 1..22: note = chemically synthesized
  source 1..22: mol_type = other DNA
agaaaatatatacattttactt

SEQ ID NO: 24611 - DNA, 22 bp, synthetic construct
  misc_feature 1..22: note = chemically synthesized
  source 1..22: mol_type = other DNA
tacttcctttttcctttatcat

SEQ ID NO: 24612 - DNA, 22 bp, synthetic construct
  misc_feature 1..22: note = chemically synthesized
  source 1..22: mol_type = other DNA
acttcctttttcctttatcatg

SEQ ID NO: 24613 - DNA, 22 bp, synthetic construct
  misc_feature 1..22: note = chemically synthesized
  source 1..22: mol_type = other DNA
cttcctttttcctttatcatgt

SEQ ID NO: 24614 - DNA, 22 bp, synthetic construct
  misc_feature 1..22: note = chemically synthesized
  source 1..22: mol_type = other DNA
cctttttcctttatcatgtgac

SEQ ID NO: 24615 - DNA, 22 bp, synthetic construct
  misc_feature 1..22: note = chemically synthesized
  source 1..22: mol_type = other DNA
ctttttcctttatcatgtgaca

SEQ ID NO: 24616 - DNA, 22 bp, synthetic construct
  misc_feature 1..22: note = chemically synthesized
  source 1..22: mol_type = other DNA
tttcctttatcatgtgacataa

SEQ ID NO: 24617 - DNA, 22 bp, synthetic construct
  misc_feature 1..22: note = chemically synthesized
  source 1..22: mol_type = other DNA
ttcctttatcatgtgacataag

SEQ ID NO: 24618 - DNA, 22 bp, synthetic construct
  misc_feature 1..22: note = chemically synthesized
  source 1..22: mol_type = other DNA
tcctttatcatgtgacataaga

SEQ ID NO: 24619 - DNA, 22 bp, synthetic construct
  misc_feature 1..22: note = chemically synthesized
  source 1..22: mol_type = other DNA
cctttatcatgtgacataagat

SEQ ID NO: 24620 - DNA, 22 bp, synthetic construct
  misc_feature 1..22: note = chemically synthesized
  source 1..22: mol_type = other DNA
ctttatcatgtgacataagatt

SEQ ID NO: 24621 - DNA, 22 bp, synthetic construct
  misc_feature 1..22: note = chemically synthesized
  source 1..22: mol_type = other DNA
tatcatgtgacataagatttat

SEQ ID NO: 24622 - DNA, 22 bp, synthetic construct
  misc_feature 1..22: note = chemically synthesized
  source 1..22: mol_type = other DNA
atcatgtgacataagatttatt

SEQ ID NO: 24623 - DNA, 22 bp, synthetic construct
  misc_feature 1..22: note = chemically synthesized
  source 1..22: mol_type = other DNA
tcatgtgacataagatttattg

SEQ ID NO: 24624 - DNA, 22 bp, synthetic construct
  misc_feature 1..22: note = chemically synthesized
  source 1..22: mol_type = other DNA
attgacttcatatcagcattta

SEQ ID NO: 24625 - DNA, 22 bp, synthetic construct
  misc_feature 1..22: note = chemically synthesized
  source 1..22: mol_type = other DNA
ttgacttcatatcagcatttaa

SEQ ID NO: 24626 - DNA, 22 bp, synthetic construct
  misc_feature 1..22: note = chemically synthesized
  source 1..22: mol_type = other DNA
acttcatatcagcatttaagta

SEQ ID NO: 24627 - DNA, 22 bp, synthetic construct
  misc_feature 1..22: note = chemically synthesized
  source 1..22: mol_type = other DNA
catatcagcatttaagtattgt

SEQ ID NO: 24628 - DNA, 22 bp, synthetic construct
  misc_feature 1..22: note = chemically synthesized
  source 1..22: mol_type = other DNA
atatcagcatttaagtattgtt

SEQ ID NO: 24629 - DNA, 22 bp, synthetic construct
  misc_feature 1..22: note = chemically synthesized
  source 1..22: mol_type = other DNA
aagtattgttaagtttatgtaa

SEQ ID NO: 24630 - DNA, 22 bp, synthetic construct
  misc_feature 1..22: note = chemically synthesized
  source 1..22: mol_type = other DNA
agtattgttaagtttatgtaat

SEQ ID NO: 24631 - DNA, 22 bp, synthetic construct
  misc_feature 1..22: note = chemically synthesized
  source 1..22: mol_type = other DNA
ttaagtttatgtaatagcattt

SEQ ID NO: 24632 - DNA, 22 bp, synthetic construct
  misc_feature 1..22: note = chemically synthesized
  source 1..22: mol_type = other DNA
agtttatgtaatagcatttgca

SEQ ID NO: 24633 - DNA, 22 bp, synthetic construct
  misc_feature 1..22: note = chemically synthesized
  source 1..22: mol_type = other DNA
atgtaatagcatttgcaatggg

SEQ ID NO: 24634 - DNA, 22 bp, synthetic construct
  misc_feature 1..22: note = chemically synthesized
  source 1..22: mol_type = other DNA
tgtaatagcatttgcaatgggg

SEQ ID NO: 24635 - DNA, 22 bp, synthetic construct
  misc_feature 1..22: note = chemically synthesized
  source 1..22: mol_type = other DNA
gcaatggggattggtgcatttt

SEQ ID NO: 24636 - DNA, 22 bp, synthetic construct
  misc_feature 1..22: note = chemically synthesized
  source 1..22: mol_type = other DNA
caatggggattggtgcattttc

SEQ ID NO: 24637 - DNA, 22 bp, synthetic construct
  misc_feature 1..22: note = chemically synthesized
  source 1..22: mol_type = other DNA
gtgcattttcaattgcacgaag

SEQ ID NO: 24638 - DNA, 22 bp, synthetic construct
  misc_feature 1..22: note = chemically synthesized
  source 1..22: mol_type = other DNA
tcaattgcacgaaggatagttt

SEQ ID NO: 24639 - DNA, 22 bp, synthetic construct
  misc_feature 1..22: note = chemically synthesized
  source 1..22: mol_type = other DNA
caattgcacgaaggatagtttt

SEQ ID NO: 24640 - DNA, 22 bp, synthetic construct
  misc_feature 1..22: note = chemically synthesized
  source 1..22: mol_type = other DNA
aattgcacgaaggatagtttta

SEQ ID NO: 24641 - DNA, 22 bp, synthetic construct
  misc_feature 1..22: note = chemically synthesized
  source 1..22: mol_type = other DNA
cacgaaggatagttttagtatg

SEQ ID NO: 24642 - DNA, 22 bp, synthetic construct
  misc_feature 1..22: note = chemically synthesized
  source 1..22: mol_type = other DNA
tagtatgttaggcataattatg

SEQ ID NO: 24643 - DNA, 22 bp, synthetic construct
  misc_feature 1..22: note = chemically synthesized
  source 1..22: mol_type = other DNA
agtatgttaggcataattatga

SEQ ID NO: 24644 - DNA, 22 bp, synthetic construct
  misc_feature 1..22: note = chemically synthesized
  source 1..22: mol_type = other DNA
gtatgttaggcataattatgac

SEQ ID NO: 24645 - DNA, 22 bp, synthetic construct
  misc_feature 1..22: note = chemically synthesized
  source 1..22: mol_type = other DNA
ggcataattatgacttattgtt

SEQ ID NO: 24646 - DNA, 22 bp, synthetic construct
  misc_feature 1..22: note = chemically synthesized
  source 1..22: mol_type = other DNA
tgacttattgttgtctttattt

SEQ ID NO: 24647 - DNA, 22 bp, synthetic construct
  misc_feature 1..22: note = chemically synthesized
  source 1..22: mol_type = other DNA
attgttgtctttatttgaagat

SEQ ID NO: 24648 - DNA, 22 bp, synthetic construct
  misc_feature 1..22: note = chemically synthesized
  source 1..22: mol_type = other DNA
ttgttgtctttatttgaagata

SEQ ID NO: 24649 - DNA, 22 bp, synthetic construct
  misc_feature 1..22: note = chemically synthesized
  source 1..22: mol_type = other DNA
ttgtctttatttgaagataatg

SEQ ID NO: 24650 - DNA, 22 bp, synthetic construct
  misc_feature 1..22: note = chemically synthesized
  source 1..22: mol_type = other DNA
tctttatttgaagataatgtat

SEQ ID NO: 24651 - DNA, 22 bp, synthetic construct
  misc_feature 1..22: note = chemically synthesized
  source 1..22: mol_type = other DNA
tatttgaagataatgtatgacc

SEQ ID NO: 24652 - DNA, 22 bp, synthetic construct
  misc_feature 1..22: note = chemically synthesized
  source 1..22: mol_type = other DNA
atttgaagataatgtatgacct

SEQ ID NO: 24653 - DNA, 22 bp, synthetic construct
  misc_feature 1..22: note = chemically synthesized
  source 1..22: mol_type = other DNA
tttgaagataatgtatgacctc

SEQ ID NO: 24654 - DNA, 22 bp, synthetic construct
  misc_feature 1..22: note = chemically synthesized
  source 1..22: mol_type = other DNA
gaagataatgtatgacctcagg

SEQ ID NO: 24655 - DNA, 22 bp, synthetic construct
  misc_feature 1..22: note = chemically synthesized
  source 1..22: mol_type = other DNA
aagataatgtatgacctcaggg

SEQ ID NO: 24656 - DNA, 22 bp, synthetic construct
  misc_feature 1..22: note = chemically synthesized
  source 1..22: mol_type = other DNA
aggggatgtgtataggctcaag

SEQ ID NO: 24657 - DNA, 22 bp, synthetic construct
  misc_feature 1..22: note = chemically synthesized
  source 1..22: mol_type = other DNA
aagttgacaagcgatggacttg

SEQ ID NO: 24658 - DNA, 22 bp, synthetic construct
  misc_feature 1..22: note = chemically synthesized
  source 1..22: mol_type = other DNA
acaagcgatggacttgtgatgg

SEQ ID NO: 24659 - DNA, 22 bp, synthetic construct
  misc_feature 1..22: note = chemically synthesized
  source 1..22: mol_type = other DNA
gtgatggttaatactgagtgtc

SEQ ID NO: 24660 - DNA, 22 bp, synthetic construct
  misc_feature 1..22: note = chemically synthesized
  source 1..22: mol_type = other DNA
tgatggttaatactgagtgtca

SEQ ID NO: 24661 - DNA, 22 bp, synthetic construct
  misc_feature 1..22: note = chemically synthesized
  source 1..22: mol_type = other DNA
atactgagtgtcaacttgattg

SEQ ID NO: 24662 - DNA, 22 bp, synthetic construct
  misc_feature 1..22: note = chemically synthesized
  source 1..22: mol_type = other DNA
agtgtcaacttgattggattga

SEQ ID NO: 24663 - DNA, 22 bp, synthetic construct
  misc_feature 1..22: note = chemically synthesized
  source 1..22: mol_type = other DNA
gattggattgaagtgtgcaaag

SEQ ID NO: 24664 - DNA, 22 bp, synthetic construct
  misc_feature 1..22: note = chemically synthesized
  source 1..22: mol_type = other DNA
attggattgaagtgtgcaaagt

SEQ ID NO: 24665 - DNA, 22 bp, synthetic construct
  misc_feature 1..22: note = chemically synthesized
  source 1..22: mol_type = other DNA
gattgaagtgtgcaaagtattg

SEQ ID NO: 24666 - DNA, 22 bp, synthetic construct
  misc_feature 1..22: note = chemically synthesized
  source 1..22: mol_type = other DNA
aagtgtgcaaagtattgatcct

SEQ ID NO: 24667 - DNA, 22 bp, synthetic construct
  misc_feature 1..22: note = chemically synthesized
  source 1..22: mol_type = other DNA
atcctgagtgtgtctgtgaggg

SEQ ID NO: 24668 - DNA, 22 bp, synthetic construct
  misc_feature 1..22: note = chemically synthesized
  source 1..22: mol_type = other DNA
agtgtgtctgtgagggtattgc

SEQ ID NO: 24669 - DNA, 22 bp, synthetic construct
  misc_feature 1..22: note = chemically synthesized
  source 1..22: mol_type = other DNA
tgagggtattgccaaaggagat

SEQ ID NO: 24670 - DNA, 22 bp, synthetic construct
  misc_feature 1..22: note = chemically synthesized
  source 1..22: mol_type = other DNA
ccaaaggagattaacattttag

SEQ ID NO: 24671 - DNA, 22 bp, synthetic construct
  misc_feature 1..22: note = chemically synthesized
  source 1..22: mol_type = other DNA
acattttagtcagtgggctggg

SEQ ID NO: 24672 - DNA, 22 bp, synthetic construct
  misc_feature 1..22: note = chemically synthesized
  source 1..22: mol_type = other DNA
tagtcagtgggctgggaaaggc

SEQ ID NO: 24673 - DNA, 22 bp, synthetic construct
  misc_feature 1..22: note = chemically synthesized
  source 1..22: mol_type = other DNA
agtcagtgggctgggaaaggca

SEQ ID NO: 24674 - DNA, 22 bp, synthetic construct
  misc_feature 1..22: note = chemically synthesized
  source 1..22: mol_type = other DNA
gtcagtgggctgggaaaggcag

SEQ ID NO: 24675 - DNA, 22 bp, synthetic construct
  misc_feature 1..22: note = chemically synthesized
  source 1..22: mol_type = other DNA
ggaaaggcagacccacccttaa

SEQ ID NO: 24676 - DNA, 22 bp, synthetic construct
  misc_feature 1..22: note = chemically synthesized
  source 1..22: mol_type = other DNA
aatctgggtgggcaccatctaa

SEQ ID NO: 24677 - DNA, 22 bp, synthetic construct
  misc_feature 1..22: note = chemically synthesized
  source 1..22: mol_type = other DNA
atctgggtgggcaccatctaat

SEQ ID NO: 24678 - DNA, 22 bp, synthetic construct
  misc_feature 1..22: note = chemically synthesized
  source 1..22: mol_type = other DNA
ggtgggcaccatctaatcagtt

SEQ ID NO: 24679 - DNA, 22 bp, synthetic construct
  misc_feature 1..22: note = chemically synthesized
  source 1..22: mol_type = other DNA
atcagttgccagtgtggccagg

SEQ ID NO: 24680 - DNA, 22 bp, synthetic construct
  misc_feature 1..22: note = chemically synthesized
  source 1..22: mol_type = other DNA
ccagtgtggccaggatataaag

SEQ ID NO: 24681 - DNA, 22 bp, synthetic construct
  misc_feature 1..22: note = chemically synthesized
  source 1..22: mol_type = other DNA
gactggcttagcctccaagcct

SEQ ID NO: 24682 - DNA, 22 bp, synthetic construct
  misc_feature 1..22: note = chemically synthesized
  source 1..22: mol_type = other DNA
gcttagcctccaagcctacatc

SEQ ID NO: 24683 - DNA, 22 bp, synthetic construct
  misc_feature 1..22: note = chemically synthesized
  source 1..22: mol_type = other DNA
agcctccaagcctacatctttc

SEQ ID NO: 24684 - DNA, 22 bp, synthetic construct
  misc_feature 1..22: note = chemically synthesized
  source 1..22: mol_type = other DNA
gcctccaagcctacatctttct

SEQ ID NO: 24685 - DNA, 22 bp, synthetic construct
  misc_feature 1..22: note = chemically synthesized
  source 1..22: mol_type = other DNA
caagcctacatctttctcccat

SEQ ID NO: 24686 - DNA, 22 bp, synthetic construct
  misc_feature 1..22: note = chemically synthesized
  source 1..22: mol_type = other DNA
catctttctcccatgctggatg

SEQ ID NO: 24687 - DNA, 22 bp, synthetic construct
  misc_feature 1..22: note = chemically synthesized
  source 1..22: mol_type = other DNA
tctcccatgctggatgcttcct

SEQ ID NO: 24688 - DNA, 22 bp, synthetic construct
  misc_feature 1..22: note = chemically synthesized
  source 1..22: mol_type = other DNA
ctcccatgctggatgcttcctg

SEQ ID NO: 24689 - DNA, 22 bp, synthetic construct
  misc_feature 1..22: note = chemically synthesized
  source 1..22: mol_type = other DNA
tcccatgctggatgcttcctgc

SEQ ID NO: 24690 - DNA, 22 bp, synthetic construct
  misc_feature 1..22: note = chemically synthesized
  source 1..22: mol_type = other DNA
ccatgctggatgcttcctgccc

SEQ ID NO: 24691 - DNA, 22 bp, synthetic construct
  misc_feature 1..22: note = chemically synthesized
  source 1..22: mol_type = other DNA
gatgcttcctgccctcaaacat

SEQ ID NO: 24692 - DNA, 22 bp, synthetic construct
  misc_feature 1..22: note = chemically synthesized
  source 1..22: mol_type = other DNA
cctgccctcaaacattggactc

SEQ ID NO: 24693 - DNA, 22 bp, synthetic construct
  misc_feature 1..22: note = chemically synthesized
  source 1..22: mol_type = other DNA
ctgccctcaaacattggactcc

SEQ ID NO: 24694 - DNA, 22 bp, synthetic construct
  misc_feature 1..22: note = chemically synthesized
  source 1..22: mol_type = other DNA
ccctcaaacattggactccaag

SEQ ID NO: 24695 - DNA, 22 bp, synthetic construct
  misc_feature 1..22: note = chemically synthesized
  source 1..22: mol_type = other DNA
aaacattggactccaagtcctt

SEQ ID NO: 24696 - DNA, 22 bp, synthetic construct
  misc_feature 1..22: note = chemically synthesized
  source 1..22: mol_type = other DNA
gactccaagtccttcagctttg

SEQ ID NO: 24697 - DNA, 22 bp, synthetic construct
  misc_feature 1..22: note = chemically synthesized
  source 1..22: mol_type = other DNA
caagtccttcagctttgggact

SEQ ID NO: 24698 - DNA, 22 bp, synthetic construct
  misc_feature 1..22: note = chemically synthesized
  source 1..22: mol_type = other DNA
cagctttgggacttggactggc

SEQ ID NO: 24699 - DNA, 22 bp, synthetic construct
  misc_feature 1..22: note = chemically synthesized
  source 1..22: mol_type = other DNA
agctttgggacttggactggct

SEQ ID NO: 24700 - DNA, 22 bp, synthetic construct
  misc_feature 1..22: note = chemically synthesized
  source 1..22: mol_type = other DNA
tgggacttggactggcttcctt

SEQ ID NO: 24701 - DNA, 22 bp, synthetic construct
  misc_feature 1..22: note = chemically synthesized
  source 1..22: mol_type = other DNA
gggacttggactggcttccttg

SEQ ID NO: 24702 - DNA, 22 bp, synthetic construct
  misc_feature 1..22: note = chemically synthesized
  source 1..22: mol_type = other DNA
ggacttggactggcttccttgc

SEQ ID NO: 24703 - DNA, 22 bp, synthetic construct
  misc_feature 1..22: note = chemically synthesized
  source 1..22: mol_type = other DNA
ggactggcttccttgctcctct

SEQ ID NO: 24704 - DNA, 22 bp, synthetic construct
  misc_feature 1..22: note = chemically synthesized
  source 1..22: mol_type = other DNA
gactggcttccttgctcctctg

SEQ ID NO: 24705 - DNA, 22 bp, synthetic construct
  misc_feature 1..22: note = chemically synthesized
  source 1..22: mol_type = other DNA
gcttccttgctcctctgcttgc

SEQ ID NO: 24706 - DNA, 22 bp, synthetic construct
  misc_feature 1..22: note = chemically synthesized
  source 1..22: mol_type = other DNA
ccttgctcctctgcttgcagat

SEQ ID NO: 24707 - DNA, 22 bp, synthetic construct
  misc_feature 1..22: note = chemically synthesized
  source 1..22: mol_type = other DNA
cttgctcctctgcttgcagatg

SEQ ID NO: 24708 - DNA, 22 bp, synthetic construct
  misc_feature 1..22: note = chemically synthesized
  source 1..22: mol_type = other DNA
gctcctctgcttgcagatggcc

SEQ ID NO: 24709 - DNA, 22 bp, synthetic construct
  misc_feature 1..22: note = chemically synthesized
  source 1..22: mol_type = other DNA
ctcctctgcttgcagatggcct

SEQ ID NO: 24710 - DNA, 22 bp, synthetic construct
  misc_feature 1..22: note = chemically synthesized
  source 1..22: mol_type = other DNA
ctctgcttgcagatggcctatt

SEQ ID NO: 24711 - DNA, 22 bp, synthetic construct
  misc_feature 1..22: note = chemically synthesized
  source 1..22: mol_type = other DNA
tgcttgcagatggcctattgtg

SEQ ID NO: 24712 - DNA, 22 bp, synthetic construct
  misc_feature 1..22: note = chemically synthesized
  source 1..22: mol_type = other DNA
cttgcagatggcctattgtggg

SEQ ID NO: 24713 - DNA, 22 bp, synthetic construct
  misc_feature 1..22: note = chemically synthesized
  source 1..22: mol_type = other DNA
gcagatggcctattgtgggacc

SEQ ID NO: 24714 - DNA, 22 bp, synthetic construct
  misc_feature 1..22: note = chemically synthesized
  source 1..22: mol_type = other DNA
cagatggcctattgtgggacct

SEQ ID NO: 24715 - DNA, 22 bp, synthetic construct
  misc_feature 1..22: note = chemically synthesized
  source 1..22: mol_type = other DNA
ttgtgggaccttgtgattgtgt

SEQ ID NO: 24716 - DNA, 22 bp, synthetic construct
  misc_feature 1..22: note = chemically synthesized
  source 1..22: mol_type = other DNA
tgggaccttgtgattgtgtaag

SEQ ID NO: 24717 - DNA, 22 bp, synthetic construct
  misc_feature 1..22: note = chemically synthesized
  source 1..22: mol_type = other DNA
gtgattgtgtaagttaacacta

SEQ ID NO: 24718 - DNA, 22 bp, synthetic construct
  misc_feature 1..22: note = chemically synthesized
  source 1..22: mol_type = other DNA
tgattgtgtaagttaacactac

SEQ ID NO: 24719 - DNA, 22 bp, synthetic construct
  misc_feature 1..22: note = chemically synthesized
  source 1..22: mol_type = other DNA
tgtaagttaacactacttaata

SEQ ID NO: 24720 - DNA, 22 bp, synthetic construct
  misc_feature 1..22: note = chemically synthesized
  source 1..22: mol_type = other DNA
acactacttaataaactccctt

SEQ ID NO: 24721 - DNA, 22 bp, synthetic construct
  misc_feature 1..22: note = chemically synthesized
  source 1..22: mol_type = other DNA
cttaataaactcccttttatat

SEQ ID NO: 24722 - DNA, 22 bp, synthetic construct
  misc_feature 1..22: note = chemically synthesized
  source 1..22: mol_type = other DNA
aataaactcccttttatatcta

SEQ ID NO: 24723 - DNA, 22 bp, synthetic construct
  misc_feature 1..22: note = chemically synthesized
  source 1..22: mol_type = other DNA
ataaactcccttttatatctaa

SEQ ID NO: 24724 - DNA, 22 bp, synthetic construct
  misc_feature 1..22: note = chemically synthesized
  source 1..22: mol_type = other DNA
ccttttatatctaaatctatat

SEQ ID NO: 24725 - DNA, 22 bp, synthetic construct
  misc_feature 1..22: note = chemically synthesized
  source 1..22: mol_type = other DNA
ttatatctaaatctatatctat

SEQ ID NO: 24726 - DNA, 22 bp, synthetic construct
  misc_feature 1..22: note = chemically synthesized
  source 1..22: mol_type = other DNA
tatatctaaatctatatctatc

SEQ ID NO: 24727 - DNA, 22 bp, synthetic construct
  misc_feature 1..22: note = chemically synthesized
  source 1..22: mol_type = other DNA
atatctaaatctatatctatct

SEQ ID NO: 24728 - DNA, 22 bp, synthetic construct
  misc_feature 1..22: note = chemically synthesized
  source 1..22: mol_type = other DNA
tatctaaatctatatctatcta

SEQ ID NO: 24729 - DNA, 22 bp, synthetic construct
  misc_feature 1..22: note = chemically synthesized
  source 1..22: mol_type = other DNA
aatctatatctatctatctatc

SEQ ID NO: 24730 - DNA, 22 bp, synthetic construct
  misc_feature 1..22: note = chemically synthesized
  source 1..22: mol_type = other DNA
tatctatctatctatctatcta

SEQ ID NO: 24731 - DNA, 22 bp, synthetic construct
  misc_feature 1..22: note = chemically synthesized
  source 1..22: mol_type = other DNA
tctatctatctatctatctatc

SEQ ID NO: 24732 - DNA, 22 bp, synthetic construct
  misc_feature 1..22: note = chemically synthesized
  source 1..22: mol_type = other DNA
tctatctatctatctatctatc

SEQ ID NO: 24733 - DNA, 22 bp, synthetic construct
  misc_feature 1..22: note = chemically synthesized
  source 1..22: mol_type = other DNA
tctatctatctatctatctatc

SEQ ID NO: 24734 - DNA, 22 bp, synthetic construct
  misc_feature 1..22: note = chemically synthesized
  source 1..22: mol_type = other DNA
tctatctatctatctatctatc

SEQ ID NO: 24735 - DNA, 22 bp, synthetic construct
  misc_feature 1..22: note = chemically synthesized
  source 1..22: mol_type = other DNA
tctatctatctatctatctatc

SEQ ID NO: 24736 - DNA, 22 bp, synthetic construct
  misc_feature 1..22: note = chemically synthesized
  source 1..22: mol_type = other DNA
tctatctatctatctatctcct

SEQ ID NO: 24737 - DNA, 22 bp, synthetic construct
  misc_feature 1..22: note = chemically synthesized
  source 1..22: mol_type = other DNA
tctatctatctatctcctatta

SEQ ID NO: 24738 - DNA, 22 bp, synthetic construct
  misc_feature 1..22: note = chemically synthesized
  source 1..22: mol_type = other DNA
tctatctatctcctattagttc

SEQ ID NO: 24739 - DNA, 22 bp, synthetic construct
  misc_feature 1..22: note = chemically synthesized
  source 1..22: mol_type = other DNA
tctatctcctattagttctgtc

SEQ ID NO: 24740 - DNA, 22 bp, synthetic construct
  misc_feature 1..22: note = chemically synthesized
  source 1..22: mol_type = other DNA
tctcctattagttctgtctctc

SEQ ID NO: 24741 - DNA, 22 bp, synthetic construct
  misc_feature 1..22: note = chemically synthesized
  source 1..22: mol_type = other DNA
ctattagttctgtctctctagg

SEQ ID NO: 24742 - DNA, 22 bp, synthetic construct
  misc_feature 1..22: note = chemically synthesized
  source 1..22: mol_type = other DNA
ttagttctgtctctctagggaa

SEQ ID NO: 24743 - DNA, 22 bp, synthetic construct
  misc_feature 1..22: note = chemically synthesized
  source 1..22: mol_type = other DNA
gttctgtctctctagggaaccc

SEQ ID NO: 24744 - DNA, 22 bp, synthetic construct
  misc_feature 1..22: note = chemically synthesized
  source 1..22: mol_type = other DNA
tgtctctctagggaaccctgac

SEQ ID NO: 24745 - DNA, 22 bp, synthetic construct
  misc_feature 1..22: note = chemically synthesized
  source 1..22: mol_type = other DNA
tctctctagggaaccctgacaa

SEQ ID NO: 24746 - DNA, 22 bp, synthetic construct
  misc_feature 1..22: note = chemically synthesized
  source 1..22: mol_type = other DNA
tctagggaaccctgacaaatac

SEQ ID NO: 24747 - DNA, 22 bp, synthetic construct
  misc_feature 1..22: note = chemically synthesized
  source 1..22: mol_type = other DNA
tagggaaccctgacaaatacag

SEQ ID NO: 24748 - DNA, 22 bp, synthetic construct
  misc_feature 1..22: note = chemically synthesized
  source 1..22: mol_type = other DNA
gggaaccctgacaaatacagtg

SEQ ID NO: 24749 - DNA, 22 bp, synthetic construct
  misc_feature 1..22: note = chemically synthesized
  source 1..22: mol_type = other DNA
acaaatacagtgagctcaggtc

SEQ ID NO: 24750 - DNA, 22 bp, synthetic construct
  misc_feature 1..22: note = chemically synthesized
  source 1..22: mol_type = other DNA
aggtcctgagcagacattttcc

SEQ ID NO: 24751 - DNA, 22 bp, synthetic construct
  misc_feature 1..22: note = chemically synthesized
  source 1..22: mol_type = other DNA
agcagacattttccaaaagaag

SEQ ID NO: 24752 - DNA, 22 bp, synthetic construct
  misc_feature 1..22: note = chemically synthesized
  source 1..22: mol_type = other DNA
tccaaaagaagacatacaagtg

SEQ ID NO: 24753 - DNA, 22 bp, synthetic construct
  misc_feature 1..22: note = chemically synthesized
  source 1..22: mol_type = other DNA
ccaaaagaagacatacaagtgg

SEQ ID NO: 24754 - DNA, 22 bp, synthetic construct
  misc_feature 1..22: note = chemically synthesized
  source 1..22: mol_type = other DNA
caaaagaagacatacaagtggc

SEQ ID NO: 24755 - DNA, 22 bp, synthetic construct
  misc_feature 1..22: note = chemically synthesized
  source 1..22: mol_type = other DNA
aacatcactaataatcagagaa

SEQ ID NO: 24756 - DNA, 22 bp, synthetic construct
  misc_feature 1..22: note = chemically synthesized
  source 1..22: mol_type = other DNA
ataatcagagaatgcaaattaa

SEQ ID NO: 24757 - DNA, 22 bp, synthetic construct
  misc_feature 1..22: note = chemically synthesized
  source 1..22: mol_type = other DNA
aaaccaccatatgatacctcct

SEQ ID NO: 24758 - DNA, 22 bp, synthetic construct
  misc_feature 1..22: note = chemically synthesized
  source 1..22: mol_type = other DNA
cttatgccagtcagaatggcta

SEQ ID NO: 24759 - DNA, 22 bp, synthetic construct
  misc_feature 1..22: note = chemically synthesized
  source 1..22: mol_type = other DNA
atgccagtcagaatggctatca

SEQ ID NO: 24760 - DNA, 22 bp, synthetic construct
  misc_feature 1..22: note = chemically synthesized
  source 1..22: mol_type = other DNA
tgccagtcagaatggctatcat

SEQ ID NO: 24761 - DNA, 22 bp, synthetic construct
  misc_feature 1..22: note = chemically synthesized
  source 1..22: mol_type = other DNA
tcattataaagttcaaaaacag

SEQ ID NO: 24762 - DNA, 22 bp, synthetic construct
  misc_feature 1..22: note = chemically synthesized
  source 1..22: mol_type = other DNA
taaagttcaaaaacagcagatg

SEQ ID NO: 24763 - DNA, 22 bp, synthetic construct
  misc_feature 1..22: note = chemically synthesized
  source 1..22: mol_type = other DNA
aaaaacagcagatgttggtgag

SEQ ID NO: 24764 - DNA, 22 bp, synthetic construct
  misc_feature 1..22: note = chemically synthesized
  source 1..22: mol_type = other DNA
gtgaggatgtggagacaagaaa

SEQ ID NO: 24765 - DNA, 22 bp, synthetic construct
  misc_feature 1..22: note = chemically synthesized
  source 1..22: mol_type = other DNA
atacactgttggtaagaatgta

SEQ ID NO: 24766 - DNA, 22 bp, synthetic construct
  misc_feature 1..22: note = chemically synthesized
  source 1..22: mol_type = other DNA
tacactgttggtaagaatgtaa

SEQ ID NO: 24767 - DNA, 22 bp, synthetic construct
  misc_feature 1..22: note = chemically synthesized
  source 1..22: mol_type = other DNA
ttggtaagaatgtaaattagta

SEQ ID NO: 24768 - DNA, 22 bp, synthetic construct
  misc_feature 1..22: note = chemically synthesized
  source 1..22: mol_type = other DNA
gtaagaatgtaaattagtacaa

SEQ ID NO: 24769 - DNA, 22 bp, synthetic construct
  misc_feature 1..22: note = chemically synthesized
  source 1..22: mol_type = other DNA
gtacaaactttatggaagacag

SEQ ID NO: 24770 - DNA, 22 bp, synthetic construct
  misc_feature 1..22: note = chemically synthesized
  source 1..22: mol_type = other DNA
tatggaagacagcatgaagatt

SEQ ID NO: 24771 - DNA, 22 bp, synthetic construct
  misc_feature 1..22: note = chemically synthesized
  source 1..22: mol_type = other DNA
atggaagacagcatgaagattt

SEQ ID NO: 24772 - DNA, 22 bp, synthetic construct
  misc_feature 1..22: note = chemically synthesized
  source 1..22: mol_type = other DNA
tggaagacagcatgaagatttc

SEQ ID NO: 24773 - DNA, 22 bp, synthetic construct
  misc_feature 1..22: note = chemically synthesized
  source 1..22: mol_type = other DNA
cttaaagaactagaaacagaac

SEQ ID NO: 24774 - DNA, 22 bp, synthetic construct
  misc_feature 1..22: note = chemically synthesized
  source 1..22: mol_type = other DNA
ttaaagaactagaaacagaact

SEQ ID NO: 24775 - DNA, 22 bp, synthetic construct
  misc_feature 1..22: note = chemically synthesized
  source 1..22: mol_type = other DNA
aaagaactagaaacagaactac

SEQ ID NO: 24776 - DNA, 22 bp, synthetic construct
  misc_feature 1..22: note = chemically synthesized
  source 1..22: mol_type = other DNA
aagaactagaaacagaactacc

SEQ ID NO: 24777 - DNA, 22 bp, synthetic construct
  misc_feature 1..22: note = chemically synthesized
  source 1..22: mol_type = other DNA
gaaacagaactaccattcaatc

SEQ ID NO: 24778 - DNA, 22 bp, synthetic construct
  misc_feature 1..22: note = chemically synthesized
  source 1..22: mol_type = other DNA
ccattcaatcctgcaatcccac

SEQ ID NO: 24779 - DNA, 22 bp, synthetic construct
  misc_feature 1..22: note = chemically synthesized
  source 1..22: mol_type = other DNA
aatcctgcaatcccactactgg

SEQ ID NO: 24780 - DNA, 22 bp, synthetic construct
  misc_feature 1..22: note = chemically synthesized
  source 1..22: mol_type = other DNA
caatcccactactgggtatgga

SEQ ID NO: 24781 - DNA, 22 bp, synthetic construct
  misc_feature 1..22: note = chemically synthesized
  source 1..22: mol_type = other DNA
ctgggtatggacccaaagtgaa

SEQ ID NO: 24782 - DNA, 22 bp, synthetic construct
  misc_feature 1..22: note = chemically synthesized
  source 1..22: mol_type = other DNA
ggtatggacccaaagtgaaaga

SEQ ID NO: 24783 - DNA, 22 bp, synthetic construct
  misc_feature 1..22: note = chemically synthesized
  source 1..22: mol_type = other DNA
aaaaagatatctgcattagtat

SEQ ID NO: 24784 - DNA, 22 bp, synthetic construct
  misc_feature 1..22: note = chemically synthesized
  source 1..22: mol_type = other DNA
cattagtatgttcaaagtagca

SEQ ID NO: 24785 - DNA, 22 bp, synthetic construct
  misc_feature 1..22: note = chemically synthesized
  source 1..22: mol_type = other DNA
gtatgttcaaagtagcactgtt

SEQ ID NO: 24786 - DNA, 22 bp, synthetic construct
  misc_feature 1..22: note = chemically synthesized
  source 1..22: mol_type = other DNA
aaagtagcactgttcccaatag

SEQ ID NO: 24787 - DNA, 22 bp, synthetic construct
  misc_feature 1..22: note = chemically synthesized
  source 1..22: mol_type = other DNA
ttcccaatagcaaagatatgga

SEQ ID NO: 24788 - DNA, 22 bp, synthetic construct
  misc_feature 1..22: note = chemically synthesized
  source 1..22: mol_type = other DNA
ccaatagcaaagatatggaatc

SEQ ID NO: 24789 - DNA, 22 bp, synthetic construct
  misc_feature 1..22: note = chemically synthesized
  source 1..22: mol_type = other DNA
aatgtctaccaatggacgattg

SEQ ID NO: 24790 - DNA, 22 bp, synthetic construct
  misc_feature 1..22: note = chemically synthesized
  source 1..22: mol_type = other DNA
ccaatggacgattggataaaga

SEQ ID NO: 24791 - DNA, 22 bp, synthetic construct
  misc_feature 1..22: note = chemically synthesized
  source 1..22: mol_type = other DNA
gataaagaaaatgtggtgtata

SEQ ID NO: 24792 - DNA, 22 bp, synthetic construct
  misc_feature 1..22: note = chemically synthesized
  source 1..22: mol_type = other DNA
atatacatatatattactcagc

SEQ ID NO: 24793 - DNA, 22 bp, synthetic construct
  misc_feature 1..22: note = chemically synthesized
  source 1..22: mol_type = other DNA
tatacatatatattactcagcc

SEQ ID NO: 24794 - DNA, 22 bp, synthetic construct
  misc_feature 1..22: note = chemically synthesized
  source 1..22: mol_type = other DNA
ctcagccataaaaaagaatgaa

SEQ ID NO: 24795 - DNA, 22 bp, synthetic construct
  misc_feature 1..22: note = chemically synthesized
  source 1..22: mol_type = other DNA
agccataaaaaagaatgaaatc

SEQ ID NO: 24796 - DNA, 22 bp, synthetic construct
  misc_feature 1..22: note = chemically synthesized
  source 1..22: mol_type = other DNA
ctctagaaacatggttagaact

SEQ ID NO: 24797 - DNA, 22 bp, synthetic construct
  misc_feature 1..22: note = chemically synthesized
  source 1..22: mol_type = other DNA
tctagaaacatggttagaactg

SEQ ID NO: 24798 - DNA, 22 bp, synthetic construct
  misc_feature 1..22: note = chemically synthesized
  source 1..22: mol_type = other DNA
tagaaacatggttagaactgga

SEQ ID NO: 24799 - DNA, 22 bp, synthetic construct
  misc_feature 1..22: note = chemically synthesized
  source 1..22: mol_type = other DNA
gaaacatggttagaactggagg

SEQ ID NO: 24800 - DNA, 22 bp, synthetic construct
  misc_feature 1..22: note = chemically synthesized
  source 1..22: mol_type = other DNA
gaactggaggacattatcctca

SEQ ID NO: 24801 - DNA, 22 bp, synthetic construct
  misc_feature 1..22: note = chemically synthesized
  source 1..22: mol_type = other DNA
gaggacattatcctcagtgaaa

SEQ ID NO: 24802 - DNA, 22 bp, synthetic construct
  misc_feature 1..22: note = chemically synthesized
  source 1..22: mol_type = other DNA
tcctcagtgaaataactcagaa

SEQ ID NO: 24803 - DNA, 22 bp, synthetic construct
  misc_feature 1..22: note = chemically synthesized
  source 1..22: mol_type = other DNA
agtgaaataactcagaaacaga

SEQ ID NO: 24804 - DNA, 22 bp, synthetic construct
  misc_feature 1..22: note = chemically synthesized
  source 1..22: mol_type = other DNA
agaaacagaaagtcaaacacag

SEQ ID NO: 24805 - DNA, 22 bp, synthetic construct
  misc_feature 1..22: note = chemically synthesized
  source 1..22: mol_type = other DNA
tcatttagtgagagccaagtgg

SEQ ID NO: 24806 - DNA, 22 bp, synthetic construct
  misc_feature 1..22: note = chemically synthesized
  source 1..22: mol_type = other DNA
atttagtgagagccaagtggga

SEQ ID NO: 24807 - DNA, 22 bp, synthetic construct
  misc_feature 1..22: note = chemically synthesized
  source 1..22: mol_type = other DNA
agtgagagccaagtgggagcta

SEQ ID NO: 24808 - DNA, 22 bp, synthetic construct
  misc_feature 1..22: note = chemically synthesized
  source 1..22: mol_type = other DNA
gtgagagccaagtgggagctaa

SEQ ID NO: 24809 - DNA, 22 bp, synthetic construct
  misc_feature 1..22: note = chemically synthesized
  source 1..22: mol_type = other DNA
aacgatgagtaagcatagacat

SEQ ID NO: 24810 - DNA, 22 bp, synthetic construct
  misc_feature 1..22: note = chemically synthesized
  source 1..22: mol_type = other DNA
gagactagagaaaggtgggagg

SEQ ID NO: 24811 - DNA, 22 bp, synthetic construct
  misc_feature 1..22: note = chemically synthesized
  source 1..22: mol_type = other DNA
agactagagaaaggtgggagga

SEQ ID NO: 24812 - DNA, 22 bp, synthetic construct
  misc_feature 1..22: note = chemically synthesized
  source 1..22: mol_type = other DNA
gagaaaggtgggaggataggag

SEQ ID NO: 24813 - DNA, 22 bp, synthetic construct
  misc_feature 1..22: note = chemically synthesized
  source 1..22: mol_type = other DNA
aaaaactacggattggatacaa

SEQ ID NO: 24814 - DNA, 22 bp, synthetic construct
  misc_feature 1..22: note = chemically synthesized
  source 1..22: mol_type = other DNA
cggattggatacaacattcact

SEQ ID NO: 24815 - DNA, 22 bp, synthetic construct
  misc_feature 1..22: note = chemically synthesized
  source 1..22: mol_type = other DNA
gatacaacattcacttttcagg

SEQ ID NO: 24816 - DNA, 22 bp, synthetic construct
  misc_feature 1..22: note = chemically synthesized
  source 1..22: mol_type = other DNA
acttttcaggtgatggtccact

SEQ ID NO: 24817 - DNA, 22 bp, synthetic construct
  misc_feature 1..22: note = chemically synthesized
  source 1..22: mol_type = other DNA
ttcaggtgatggtccactaaaa

SEQ ID NO: 24818 - DNA, 22 bp, synthetic construct
  misc_feature 1..22: note = chemically synthesized
  source 1..22: mol_type = other DNA
tcaggtgatggtccactaaaag

SEQ ID NO: 24819 - DNA, 22 bp, synthetic construct
  misc_feature 1..22: note = chemically synthesized
  source 1..22: mol_type = other DNA
caggtgatggtccactaaaagc

SEQ ID NO: 24820 - DNA, 22 bp, synthetic construct
  misc_feature 1..22: note = chemically synthesized
  source 1..22: mol_type = other DNA
aggtgatggtccactaaaagct

SEQ ID NO: 24821 - DNA, 22 bp, synthetic construct
  misc_feature 1..22: note = chemically synthesized
  source 1..22: mol_type = other DNA
aaagctcagacttcaccactat

SEQ ID NO: 24822 - DNA, 22 bp, synthetic construct
  misc_feature 1..22: note = chemically synthesized
  source 1..22: mol_type = other DNA
agacttcaccactatgcaacat

SEQ ID NO: 24823 - DNA, 22 bp, synthetic construct
  misc_feature 1..22: note = chemically synthesized
  source 1..22: mol_type = other DNA
caccactatgcaacatacatat

SEQ ID NO: 24824 - DNA, 22 bp, synthetic construct
  misc_feature 1..22: note = chemically synthesized
  source 1..22: mol_type = other DNA
accactatgcaacatacatatg

SEQ ID NO: 24825 - DNA, 22 bp, synthetic construct
  misc_feature 1..22: note = chemically synthesized
  source 1..22: mol_type = other DNA
tgcaacatacatatgtaaggaa

SEQ ID NO: 24826 - DNA, 22 bp, synthetic construct
  misc_feature 1..22: note = chemically synthesized
  source 1..22: mol_type = other DNA
gtaccctgatacagcttgactg

SEQ ID NO: 24827 - DNA, 22 bp, synthetic construct
  misc_feature 1..22: note = chemically synthesized
  source 1..22: mol_type = other DNA
taccctgatacagcttgactgt

SEQ ID NO: 24828 - DNA, 22 bp, synthetic construct
  misc_feature 1..22: note = chemically synthesized
  source 1..22: mol_type = other DNA
atacagcttgactgtgtcccca

SEQ ID NO: 24829 - DNA, 22 bp, synthetic construct
  misc_feature 1..22: note = chemically synthesized
  source 1..22: mol_type = other DNA
gactgtgtccccacccaaatct

SEQ ID NO: 24830 - DNA, 22 bp, synthetic construct
  misc_feature 1..22: note = chemically synthesized
  source 1..22: mol_type = other DNA
actgtgtccccacccaaatctc

SEQ ID NO: 24831 - DNA, 22 bp, synthetic construct
  misc_feature 1..22: note = chemically synthesized
  source 1..22: mol_type = other DNA
tgtccccacccaaatctcatct

SEQ ID NO: 24832 - DNA, 22 bp, synthetic construct
  misc_feature 1..22: note = chemically synthesized
  source 1..22: mol_type = other DNA
atcttgaattgtagttcccata

SEQ ID NO: 24833 - DNA, 22 bp, synthetic construct
  misc_feature 1..22: note = chemically synthesized
  source 1..22: mol_type = other DNA
gaattgtagttcccataatcct

SEQ ID NO: 24834 - DNA, 22 bp, synthetic construct
  misc_feature 1..22: note = chemically synthesized
  source 1..22: mol_type = other DNA
aattgtagttcccataatcctc

SEQ ID NO: 24835 - DNA, 22 bp, synthetic construct
  misc_feature 1..22: note = chemically synthesized
  source 1..22: mol_type = other DNA
tagttcccataatcctcacgtg

SEQ ID NO: 24836 - DNA, 22 bp, synthetic construct
  misc_feature 1..22: note = chemically synthesized
  source 1..22: mol_type = other DNA
ccataatcctcacgtgttgtgg

SEQ ID NO: 24837 - DNA, 22 bp, synthetic construct
  misc_feature 1..22: note = chemically synthesized
  source 1..22: mol_type = other DNA
acgtgttgtgggagggatttgg

SEQ ID NO: 24838 - DNA, 22 bp, synthetic construct
  misc_feature 1..22: note = chemically synthesized
  source 1..22: mol_type = other DNA
tgggagggatttggagggaggt

SEQ ID NO: 24839 - DNA, 22 bp, synthetic construct
  misc_feature 1..22: note = chemically synthesized
  source 1..22: mol_type = other DNA
ggagggaggtaattgaatcata

SEQ ID NO: 24840 - DNA, 22 bp, synthetic construct
  misc_feature 1..22: note = chemically synthesized
  source 1..22: mol_type = other DNA
gagggaggtaattgaatcatag

SEQ ID NO: 24841 - DNA, 22 bp, synthetic construct
  misc_feature 1..22: note = chemically synthesized
  source 1..22: mol_type = other DNA
aatcatagaggaggttactctc

SEQ ID NO: 24842 - DNA, 22 bp, synthetic construct
  misc_feature 1..22: note = chemically synthesized
  source 1..22: mol_type = other DNA
ctctcatgctcttctcgtgata

SEQ ID NO: 24843 - DNA, 22 bp, synthetic construct
  misc_feature 1..22: note = chemically synthesized
  source 1..22: mol_type = other DNA
tcatgctcttctcgtgatagtg

SEQ ID NO: 24844 - DNA, 22 bp, synthetic construct
  misc_feature 1..22: note = chemically synthesized
  source 1..22: mol_type = other DNA
atgctcttctcgtgatagtgag

SEQ ID NO: 24845 - DNA, 22 bp, synthetic construct
  misc_feature 1..22: note = chemically synthesized
  source 1..22: mol_type = other DNA
ttctcgtgatagtgagttctta

SEQ ID NO: 24846 - DNA, 22 bp, synthetic construct
  misc_feature 1..22: note = chemically synthesized
  source 1..22: mol_type = other DNA
ctcgtgatagtgagttcttaca

SEQ ID NO: 24847 - DNA, 22 bp, synthetic construct
  misc_feature 1..22: note = chemically synthesized
  source 1..22: mol_type = other DNA
tcgtgatagtgagttcttacaa

SEQ ID NO: 24848 - DNA, 22 bp, synthetic construct
  misc_feature 1..22: note = chemically synthesized
  source 1..22: mol_type = other DNA
gtgatagtgagttcttacaaga

SEQ ID NO: 24849 - DNA, 22 bp, synthetic construct
  misc_feature 1..22: note = chemically synthesized
  source 1..22: mol_type = other DNA
ttacaagatctgatggttttat

SEQ ID NO: 24850 - DNA, 22 bp, synthetic construct
  misc_feature 1..22: note = chemically synthesized
  source 1..22: mol_type = other DNA
acaagatctgatggttttataa

SEQ ID NO: 24851 - DNA, 22 bp, synthetic construct
  misc_feature 1..22: note = chemically synthesized
  source 1..22: mol_type = other DNA
caagatctgatggttttataag

SEQ ID NO: 24852 - DNA, 22 bp, synthetic construct
  misc_feature 1..22: note = chemically synthesized
  source 1..22: mol_type = other DNA
atggttttataagcggcttttc

SEQ ID NO: 24853 - DNA, 22 bp, synthetic construct
  misc_feature 1..22: note = chemically synthesized
  source 1..22: mol_type = other DNA
tataagcggcttttcccccttt

SEQ ID NO: 24854 - DNA, 22 bp, synthetic construct
  misc_feature 1..22: note = chemically synthesized
  source 1..22: mol_type = other DNA
ataagcggcttttccccctttt

SEQ ID NO: 24855 - DNA, 22 bp, synthetic construct
  misc_feature 1..22: note = chemically synthesized
  source 1..22: mol_type = other DNA
taagcggcttttcccccttttg

SEQ ID NO: 24856 - DNA, 22 bp, synthetic construct
  misc_feature 1..22: note = chemically synthesized
  source 1..22: mol_type = other DNA
ttcccccttttgcttggcactt

SEQ ID NO: 24857 - DNA, 22 bp, synthetic construct
  misc_feature 1..22: note = chemically synthesized
  source 1..22: mol_type = other DNA
tcccccttttgcttggcacttc

SEQ ID NO: 24858 - DNA, 22 bp, synthetic construct
  misc_feature 1..22: note = chemically synthesized
  source 1..22: mol_type = other DNA
cccccttttgcttggcacttct

SEQ ID NO: 24859 - DNA, 22 bp, synthetic construct
  misc_feature 1..22: note = chemically synthesized
  source 1..22: mol_type = other DNA
ccccttttgcttggcacttcta

SEQ ID NO: 24860 - DNA, 22 bp, synthetic construct
  misc_feature 1..22: note = chemically synthesized
  source 1..22: mol_type = other DNA
ttgcttggcacttctacttgct

SEQ ID NO: 24861 - DNA, 22 bp, synthetic construct
  misc_feature 1..22: note = chemically synthesized
  source 1..22: mol_type = other DNA
tgcttggcacttctacttgctg

SEQ ID NO: 24862 - DNA, 22 bp, synthetic construct
  misc_feature 1..22: note = chemically synthesized
  source 1..22: mol_type = other DNA
gcttggcacttctacttgctgc

SEQ ID NO: 24863 - DNA, 22 bp, synthetic construct
  misc_feature 1..22: note = chemically synthesized
  source 1..22: mol_type = other DNA
cttggcacttctacttgctgct

SEQ ID NO: 24864 - DNA, 22 bp, synthetic construct
  misc_feature 1..22: note = chemically synthesized
  source 1..22: mol_type = other DNA
ggcacttctacttgctgctgcc

SEQ ID NO: 24865 - DNA, 22 bp, synthetic construct
  misc_feature 1..22: note = chemically synthesized
  source 1..22: mol_type = other DNA
gcacttctacttgctgctgcca

SEQ ID NO: 24866 - DNA, 22 bp, synthetic construct
  misc_feature 1..22: note = chemically synthesized
  source 1..22: mol_type = other DNA
ctacttgctgctgccatgtgaa

SEQ ID NO: 24867 - DNA, 22 bp, synthetic construct
  misc_feature 1..22: note = chemically synthesized
  source 1..22: mol_type = other DNA
tacttgctgctgccatgtgaag

SEQ ID NO: 24868 - DNA, 22 bp, synthetic construct
  misc_feature 1..22: note = chemically synthesized
  source 1..22: mol_type = other DNA
cttgctgctgccatgtgaagaa

SEQ ID NO: 24869 - DNA, 22 bp, synthetic construct
  misc_feature 1..22: note = chemically synthesized
  source 1..22: mol_type = other DNA
gctgctgccatgtgaagaagga

SEQ ID NO: 24870 - DNA, 22 bp, synthetic construct
  misc_feature 1..22: note = chemically synthesized
  source 1..22: mol_type = other DNA
ctgctgccatgtgaagaaggac

SEQ ID NO: 24871 - DNA, 22 bp, synthetic construct
  misc_feature 1..22: note = chemically synthesized
  source 1..22: mol_type = other DNA
ctgccatgtgaagaaggacatg

SEQ ID NO: 24872 - DNA, 22 bp, synthetic construct
  misc_feature 1..22: note = chemically synthesized
  source 1..22: mol_type = other DNA
ccatgtgaagaaggacatgttt

SEQ ID NO: 24873 - DNA, 22 bp, synthetic construct
  misc_feature 1..22: note = chemically synthesized
  source 1..22: mol_type = other DNA
gtttcttcttctgccatgattg

SEQ ID NO: 24874 - DNA, 22 bp, synthetic construct
  misc_feature 1..22: note = chemically synthesized
  source 1..22: mol_type = other DNA
tttcttcttctgccatgattgt

SEQ ID NO: 24875 - DNA, 22 bp, synthetic construct
  misc_feature 1..22: note = chemically synthesized
  source 1..22: mol_type = other DNA
cttcttctgccatgattgtaag

SEQ ID NO: 24876 - DNA, 22 bp, synthetic construct
  misc_feature 1..22: note = chemically synthesized
  source 1..22: mol_type = other DNA
ttcttctgccatgattgtaagt

SEQ ID NO: 24877 - DNA, 22 bp, synthetic construct
  misc_feature 1..22: note = chemically synthesized
  source 1..22: mol_type = other DNA
cttctgccatgattgtaagttt

SEQ ID NO: 24878 - DNA, 22 bp, synthetic construct
  misc_feature 1..22: note = chemically synthesized
  source 1..22: mol_type = other DNA
ttctgccatgattgtaagtttc

SEQ ID NO: 24879 - DNA, 22 bp, synthetic construct
  misc_feature 1..22: note = chemically synthesized
  source 1..22: mol_type = other DNA
ctgccatgattgtaagtttccc

SEQ ID NO: 24880 - DNA, 22 bp, synthetic construct
  misc_feature 1..22: note = chemically synthesized
  source 1..22: mol_type = other DNA
tgccatgattgtaagtttcccg

SEQ ID NO: 24881 - DNA, 22 bp, synthetic construct
  misc_feature 1..22: note = chemically synthesized
  source 1..22: mol_type = other DNA
ccatgattgtaagtttcccgag

SEQ ID NO: 24882 - DNA, 22 bp, synthetic construct
  misc_feature 1..22: note = chemically synthesized
  source 1..22: mol_type = other DNA
taagtttcccgaggcctcccca

SEQ ID NO: 24883 - DNA, 22 bp, synthetic construct
  misc_feature 1..22: note = chemically synthesized
  source 1..22: mol_type = other DNA
cccgaggcctccccagccctgt

SEQ ID NO: 24884 - DNA, 22 bp, synthetic construct
  misc_feature 1..22: note = chemically synthesized
  source 1..22: mol_type = other DNA
ccgaggcctccccagccctgtg

SEQ ID NO: 24885 - DNA, 22 bp, synthetic construct
  misc_feature 1..22: note = chemically synthesized
  source 1..22: mol_type = other DNA
cccagccctgtggaactgtgag

SEQ ID NO: 24886 - DNA, 22 bp, synthetic construct
  misc_feature 1..22: note = chemically synthesized
  source 1..22: mol_type = other DNA
tggaactgtgagacaattaaac

SEQ ID NO: 24887 - DNA, 22 bp, synthetic construct
  misc_feature 1..22: note = chemically synthesized
  source 1..22: mol_type = other DNA
tgagacaattaaacgttttttc

SEQ ID NO: 24888 - DNA, 22 bp, synthetic construct
  misc_feature 1..22: note = chemically synthesized
  source 1..22: mol_type = other DNA
aacgttttttccttataaatta

SEQ ID NO: 24889 - DNA, 22 bp, synthetic construct
  misc_feature 1..22: note = chemically synthesized
  source 1..22: mol_type = other DNA
tttccttataaattacccagtc

SEQ ID NO: 24890 - DNA, 22 bp, synthetic construct
  misc_feature 1..22: note = chemically synthesized
  source 1..22: mol_type = other DNA
ttccttataaattacccagtct

SEQ ID NO: 24891 - DNA, 22 bp, synthetic construct
  misc_feature 1..22: note = chemically synthesized
  source 1..22: mol_type = other DNA
tccttataaattacccagtctc

SEQ ID NO: 24892 - DNA, 22 bp, synthetic construct
  misc_feature 1..22: note = chemically synthesized
  source 1..22: mol_type = other DNA
ccttataaattacccagtctca

SEQ ID NO: 24893 - DNA, 22 bp, synthetic construct
  misc_feature 1..22: note = chemically synthesized
  source 1..22: mol_type = other DNA
cttataaattacccagtctcag

SEQ ID NO: 24894 - DNA, 22 bp, synthetic construct
  misc_feature 1..22: note = chemically synthesized
  source 1..22: mol_type = other DNA
ataaattacccagtctcaggta

SEQ ID NO: 24895 - DNA, 22 bp, synthetic construct
  misc_feature 1..22: note = chemically synthesized
  source 1..22: mol_type = other DNA
taaattacccagtctcaggtat

SEQ ID NO: 24896 - DNA, 22 bp, synthetic construct
  misc_feature 1..22: note = chemically synthesized
  source 1..22: mol_type = other DNA
cccagtctcaggtatgtcttta

SEQ ID NO: 24897 - DNA, 22 bp, synthetic construct
  misc_feature 1..22: note = chemically synthesized
  source 1..22: mol_type = other DNA
aggtatgtctttataagcagca

SEQ ID NO: 24898 - DNA, 22 bp, synthetic construct
  misc_feature 1..22: note = chemically synthesized
  source 1..22: mol_type = other DNA
tataagcagcatgataacgaac

SEQ ID NO: 24899 - DNA, 22 bp, synthetic construct
  misc_feature 1..22: note = chemically synthesized
  source 1..22: mol_type = other DNA
ataagcagcatgataacgaact

SEQ ID NO: 24900 - DNA, 22 bp, synthetic construct
  misc_feature 1..22: note = chemically synthesized
  source 1..22: mol_type = other DNA
taagcagcatgataacgaacta

SEQ ID NO: 24901 - DNA, 22 bp, synthetic construct
  misc_feature 1..22: note = chemically synthesized
  source 1..22: mol_type = other DNA
gtacataccttctaaatatata

SEQ ID NO: 24902 - DNA, 22 bp, synthetic construct
  misc_feature 1..22: note = chemically synthesized
  source 1..22: mol_type = other DNA
ctaaatatatataaataaattt

SEQ ID NO: 24903 - DNA, 22 bp, synthetic construct
  misc_feature 1..22: note = chemically synthesized
  source 1..22: mol_type = other DNA
taaatatatataaataaatttt

SEQ ID NO: 24904 - DNA, 22 bp, synthetic construct
  misc_feature 1..22: note = chemically synthesized
  source 1..22: mol_type = other DNA
aatatatataaataaattttaa

SEQ ID NO: 24905 - DNA, 22 bp, synthetic construct
  misc_feature 1..22: note = chemically synthesized
  source 1..22: mol_type = other DNA
taaaaatataaaataaattaga

SEQ ID NO: 24906 - DNA, 22 bp, synthetic construct
  misc_feature 1..22: note = chemically synthesized
  source 1..22: mol_type = other DNA
aaaaatataaaataaattagat

SEQ ID NO: 24907 - DNA, 22 bp, synthetic construct
  misc_feature 1..22: note = chemically synthesized
  source 1..22: mol_type = other DNA
aaaatataaaataaattagatc

SEQ ID NO: 24908 - DNA, 22 bp, synthetic construct
  misc_feature 1..22: note = chemically synthesized
  source 1..22: mol_type = other DNA
gatctgattgaaaaggcaaaaa

SEQ ID NO: 24909 - DNA, 22 bp, synthetic construct
  misc_feature 1..22: note = chemically synthesized
  source 1..22: mol_type = other DNA
attgaaaaggcaaaaattgagc

SEQ ID NO: 24910 - DNA, 22 bp, synthetic construct
  misc_feature 1..22: note = chemically synthesized
  source 1..22: mol_type = other DNA
aaaaggcaaaaattgagcaagc

SEQ ID NO: 24911 - DNA, 22 bp, synthetic construct
  misc_feature 1..22: note = chemically synthesized
  source 1..22: mol_type = other DNA
agcaagcaaaatatcacttaat

SEQ ID NO: 24912 - DNA, 22 bp, synthetic construct
  misc_feature 1..22: note = chemically synthesized
  source 1..22: mol_type = other DNA
aatggggtaattaaaagggtga

SEQ ID NO: 24913 - DNA, 22 bp, synthetic construct
  misc_feature 1..22: note = chemically synthesized
  source 1..22: mol_type = other DNA
atggggtaattaaaagggtgaa

SEQ ID NO: 24914 - DNA, 22 bp, synthetic construct
  misc_feature 1..22: note = chemically synthesized
  source 1..22: mol_type = other DNA
aaagggtgaagaaattgggcaa

SEQ ID NO: 24915 - DNA, 22 bp, synthetic construct
  misc_feature 1..22: note = chemically synthesized
  source 1..22: mol_type = other DNA
ggcaaatggatgtcatgaggag

SEQ ID NO: 24916 - DNA, 22 bp, synthetic construct
  misc_feature 1..22: note = chemically synthesized
  source 1..22: mol_type = other DNA
ttaggcagaggtaatggtcaga

SEQ ID NO: 24917 - DNA, 22 bp, synthetic construct
  misc_feature 1..22: note = chemically synthesized
  source 1..22: mol_type = other DNA
taggcagaggtaatggtcagag

SEQ ID NO: 24918 - DNA, 22 bp, synthetic construct
  misc_feature 1..22: note = chemically synthesized
  source 1..22: mol_type = other DNA
aggcagaggtaatggtcagagc

SEQ ID NO: 24919 - DNA, 22 bp, synthetic construct
  misc_feature 1..22: note = chemically synthesized
  source 1..22: mol_type = other DNA
ggcagaggtaatggtcagagcc

SEQ ID NO: 24920 - DNA, 22 bp, synthetic construct
  misc_feature 1..22: note = chemically synthesized
  source 1..22: mol_type = other DNA
agctggagtagagtgtgcaagg

SEQ ID NO: 24921 - DNA, 22 bp, synthetic construct
  misc_feature 1..22: note = chemically synthesized
  source 1..22: mol_type = other DNA
gagtagagtgtgcaaggaaaga

SEQ ID NO: 24922 - DNA, 22 bp, synthetic construct
  misc_feature 1..22: note = chemically synthesized
  source 1..22: mol_type = other DNA
aaaaggataaccaggtaggagg

SEQ ID NO: 24923 - DNA, 22 bp, synthetic construct
  misc_feature 1..22: note = chemically synthesized
  source 1..22: mol_type = other DNA
cagtaaacttaggcaggatatt

SEQ ID NO: 24924 - DNA, 22 bp, synthetic construct
  misc_feature 1..22: note = chemically synthesized
  source 1..22: mol_type = other DNA
aggcaggatatttcccgtgaca

SEQ ID NO: 24925 - DNA, 22 bp, synthetic construct
  misc_feature 1..22: note = chemically synthesized
  source 1..22: mol_type = other DNA
ggcaggatatttcccgtgacag

SEQ ID NO: 24926 - DNA, 22 bp, synthetic construct
  misc_feature 1..22: note = chemically synthesized
  source 1..22: mol_type = other DNA
cccgtgacagcactaaataata

SEQ ID NO: 24927 - DNA, 22 bp, synthetic construct
  misc_feature 1..22: note = chemically synthesized
  source 1..22: mol_type = other DNA
ccgtgacagcactaaataataa

SEQ ID NO: 24928 - DNA, 22 bp, synthetic construct
  misc_feature 1..22: note = chemically synthesized
  source 1..22: mol_type = other DNA
aataataatcacatgtgagaat

SEQ ID NO: 24929 - DNA, 22 bp, synthetic construct
  misc_feature 1..22: note = chemically synthesized
  source 1..22: mol_type = other DNA
tcgattacttgagcaatacttt

SEQ ID NO: 24930 - DNA, 22 bp, synthetic construct
  misc_feature 1..22: note = chemically synthesized
  source 1..22: mol_type = other DNA
cttgagcaatactttgttcatg

SEQ ID NO: 24931 - DNA, 22 bp, synthetic construct
  misc_feature 1..22: note = chemically synthesized
  source 1..22: mol_type = other DNA
gagcaatactttgttcatgagc

SEQ ID NO: 24932 - DNA, 22 bp, synthetic construct
  misc_feature 1..22: note = chemically synthesized
  source 1..22: mol_type = other DNA
agcaatactttgttcatgagct

SEQ ID NO: 24933 - DNA, 22 bp, synthetic construct
  misc_feature 1..22: note = chemically synthesized
  source 1..22: mol_type = other DNA
tgttcatgagctagagcaaggg

SEQ ID NO: 24934 - DNA, 22 bp, synthetic construct
  misc_feature 1..22: note = chemically synthesized
  source 1..22: mol_type = other DNA
gttcatgagctagagcaagggg

SEQ ID NO: 24935 - DNA, 22 bp, synthetic construct
  misc_feature 1..22: note = chemically synthesized
  source 1..22: mol_type = other DNA
ttcatgagctagagcaagggga

SEQ ID NO: 24936 - DNA, 22 bp, synthetic construct
  misc_feature 1..22: note = chemically synthesized
  source 1..22: mol_type = other DNA
atgagctagagcaaggggatga

SEQ ID NO: 24937 - DNA, 22 bp, synthetic construct
  misc_feature 1..22: note = chemically synthesized
  source 1..22: mol_type = other DNA
gagcaaggggatgactcaagaa

SEQ ID NO: 24938 - DNA, 22 bp, synthetic construct
  misc_feature 1..22: note = chemically synthesized
  source 1..22: mol_type = other DNA
aagaaatcctttgtgaaatcct

SEQ ID NO: 24939 - DNA, 22 bp, synthetic construct
  misc_feature 1..22: note = chemically synthesized
  source 1..22: mol_type = other DNA
tgtgaaatcctggaggtaataa

SEQ ID NO: 24940 - DNA, 22 bp, synthetic construct
  misc_feature 1..22: note = chemically synthesized
  source 1..22: mol_type = other DNA
gtgaaatcctggaggtaataag

SEQ ID NO: 24941 - DNA, 22 bp, synthetic construct
  misc_feature 1..22: note = chemically synthesized
  source 1..22: mol_type = other DNA
tgaaatcctggaggtaataaga

SEQ ID NO: 24942 - DNA, 22 bp, synthetic construct
  misc_feature 1..22: note = chemically synthesized
  source 1..22: mol_type = other DNA
gaggtaataagatcctggcatc

SEQ ID NO: 24943 - DNA, 22 bp, synthetic construct
  misc_feature 1..22: note = chemically synthesized
  source 1..22: mol_type = other DNA
gcatcaatcttcaactcaattg

SEQ ID NO: 24944 - DNA, 22 bp, synthetic construct
  misc_feature 1..22: note = chemically synthesized
  source 1..22: mol_type = other DNA
caactcaattgcaaaaagcaat

SEQ ID NO: 24945 - DNA, 22 bp, synthetic construct
  misc_feature 1..22: note = chemically synthesized
  source 1..22: mol_type = other DNA
aactcaattgcaaaaagcaatt

SEQ ID NO: 24946 - DNA, 22 bp, synthetic construct
  misc_feature 1..22: note = chemically synthesized
  source 1..22: mol_type = other DNA
aattgcaaaaagcaattttatt

SEQ ID NO: 24947 - DNA, 22 bp, synthetic construct
  misc_feature 1..22: note = chemically synthesized
  source 1..22: mol_type = other DNA
caaaaagcaattttattactta

SEQ ID NO: 24948 - DNA, 22 bp, synthetic construct
  misc_feature 1..22: note = chemically synthesized
  source 1..22: mol_type = other DNA
tattacttatatattacttctc

SEQ ID NO: 24949 - DNA, 22 bp, synthetic construct
  misc_feature 1..22: note = chemically synthesized
  source 1..22: mol_type = other DNA
attacttatatattacttctca

SEQ ID NO: 24950 - DNA, 22 bp, synthetic construct
  misc_feature 1..22: note = chemically synthesized
  source 1..22: mol_type = other DNA
ttacttatatattacttctcat

SEQ ID NO: 24951 - DNA, 22 bp, synthetic construct
  misc_feature 1..22: note = chemically synthesized
  source 1..22: mol_type = other DNA
cttatatattacttctcatttt

SEQ ID NO: 24952 - DNA, 22 bp, synthetic construct
  misc_feature 1..22: note = chemically synthesized
  source 1..22: mol_type = other DNA
atatattacttctcatttttca

SEQ ID NO: 24953 - DNA, 22 bp, synthetic construct
  misc_feature 1..22: note = chemically synthesized
  source 1..22: mol_type = other DNA
tatattacttctcatttttcac

SEQ ID NO: 24954 - DNA, 22 bp, synthetic construct
  misc_feature 1..22: note = chemically synthesized
  source 1..22: mol_type = other DNA
cttctcatttttcactgctgtc

SEQ ID NO: 24955 - DNA, 22 bp, synthetic construct
  misc_feature 1..22: note = chemically synthesized
  source 1..22: mol_type = other DNA
ctcatttttcactgctgtcttt

SEQ ID NO: 24956 - DNA, 22 bp, synthetic construct
  misc_feature 1..22: note = chemically synthesized
  source 1..22: mol_type = other DNA
tcatttttcactgctgtctttc

SEQ ID NO: 24957 - DNA, 22 bp, synthetic construct
  misc_feature 1..22: note = chemically synthesized
  source 1..22: mol_type = other DNA
atttttcactgctgtctttcaa

SEQ ID NO: 24958 - DNA, 22 bp, synthetic construct
  misc_feature 1..22: note = chemically synthesized
  source 1..22: mol_type = other DNA
ttcactgctgtctttcaaaaca

SEQ ID NO: 24959 - DNA, 22 bp, synthetic construct
  misc_feature 1..22: note = chemically synthesized
  source 1..22: mol_type = other DNA
tcactgctgtctttcaaaacat

SEQ ID NO: 24960 - DNA, 22 bp, synthetic construct
  misc_feature 1..22: note = chemically synthesized
  source 1..22: mol_type = other DNA
cactgctgtctttcaaaacata

SEQ ID NO: 24961 - DNA, 22 bp, synthetic construct
  misc_feature 1..22: note = chemically synthesized
  source 1..22: mol_type = other DNA
actgctgtctttcaaaacatat

SEQ ID NO: 24962 - DNA, 22 bp, synthetic construct
  misc_feature 1..22: note = chemically synthesized
  source 1..22: mol_type = other DNA
ctgtctttcaaaacatattcca

SEQ ID NO: 24963 - DNA, 22 bp, synthetic construct
  misc_feature 1..22: note = chemically synthesized
  source 1..22: mol_type = other DNA
tctttcaaaacatattccattt

SEQ ID NO: 24964 - DNA, 22 bp, synthetic construct
  misc_feature 1..22: note = chemically synthesized
  source 1..22: mol_type = other DNA
tcaaaacatattccatttcatc

SEQ ID NO: 24965 - DNA, 22 bp, synthetic construct
  misc_feature 1..22: note = chemically synthesized
  source 1..22: mol_type = other DNA
caaaacatattccatttcatca

SEQ ID NO: 24966 - DNA, 22 bp, synthetic construct
  misc_feature 1..22: note = chemically synthesized
  source 1..22: mol_type = other DNA
aaaacatattccatttcatcag

SEQ ID NO: 24967 - DNA, 22 bp, synthetic construct
  misc_feature 1..22: note = chemically synthesized
  source 1..22: mol_type = other DNA
catttcatcagactacaggttt

SEQ ID NO: 24968 - DNA, 22 bp, synthetic construct
  misc_feature 1..22: note = chemically synthesized
  source 1..22: mol_type = other DNA
catcagactacaggttttaata

SEQ ID NO: 24969 - DNA, 22 bp, synthetic construct
  misc_feature 1..22: note = chemically synthesized
  source 1..22: mol_type = other DNA
atcagactacaggttttaatag

SEQ ID NO: 24970 - DNA, 22 bp, synthetic construct
  misc_feature 1..22: note = chemically synthesized
  source 1..22: mol_type = other DNA
caggttttaatagctactatat

SEQ ID NO: 24971 - DNA, 22 bp, synthetic construct
  misc_feature 1..22: note = chemically synthesized
  source 1..22: mol_type = other DNA
taatagctactatatttcttaa

SEQ ID NO: 24972 - DNA, 22 bp, synthetic construct
  misc_feature 1..22: note = chemically synthesized
  source 1..22: mol_type = other DNA
aatagctactatatttcttaaa

SEQ ID NO: 24973 - DNA, 22 bp, synthetic construct
  misc_feature 1..22: note = chemically synthesized
  source 1..22: mol_type = other DNA
atagctactatatttcttaaat

SEQ ID NO: 24974 - DNA, 22 bp, synthetic construct
  misc_feature 1..22: note = chemically synthesized
  source 1..22: mol_type = other DNA
ctatatttcttaaatgtattat

SEQ ID NO: 24975 - DNA, 22 bp, synthetic construct
  misc_feature 1..22: note = chemically synthesized
  source 1..22: mol_type = other DNA
tatttcttaaatgtattattcc

SEQ ID NO: 24976 - DNA, 22 bp, synthetic construct
  misc_feature 1..22: note = chemically synthesized
  source 1..22: mol_type = other DNA
cttaaatgtattattccagtaa

SEQ ID NO: 24977 - DNA, 22 bp, synthetic construct
  misc_feature 1..22: note = chemically synthesized
  source 1..22: mol_type = other DNA
ttaaatgtattattccagtaac

SEQ ID NO: 24978 - DNA, 22 bp, synthetic construct
  misc_feature 1..22: note = chemically synthesized
  source 1..22: mol_type = other DNA
aaatgtattattccagtaactt

SEQ ID NO: 24979 - DNA, 22 bp, synthetic construct
  misc_feature 1..22: note = chemically synthesized
  source 1..22: mol_type = other DNA
aatgtattattccagtaactta

SEQ ID NO: 24980 - DNA, 22 bp, synthetic construct
  misc_feature 1..22: note = chemically synthesized
  source 1..22: mol_type = other DNA
ttccagtaacttatactttaca

SEQ ID NO: 24981 - DNA, 22 bp, synthetic construct
  misc_feature 1..22: note = chemically synthesized
  source 1..22: mol_type = other DNA
cagtaacttatactttacatag

SEQ ID NO: 24982 - DNA, 22 bp, synthetic construct
  misc_feature 1..22: note = chemically synthesized
  source 1..22: mol_type = other DNA
atactttacatagtaaatctta

SEQ ID NO: 24983 - DNA, 22 bp, synthetic construct
  misc_feature 1..22: note = chemically synthesized
  source 1..22: mol_type = other DNA
tactttacatagtaaatcttat

SEQ ID NO: 24984 - DNA, 22 bp, synthetic construct
  misc_feature 1..22: note = chemically synthesized
  source 1..22: mol_type = other DNA
tacatagtaaatcttatcaata

SEQ ID NO: 24985 - DNA, 22 bp, synthetic construct
  misc_feature 1..22: note = chemically synthesized
  source 1..22: mol_type = other DNA
acatagtaaatcttatcaatag

SEQ ID NO: 24986 - DNA, 22 bp, synthetic construct
  misc_feature 1..22: note = chemically synthesized
  source 1..22: mol_type = other DNA
catagtaaatcttatcaatagt

SEQ ID NO: 24987 - DNA, 22 bp, synthetic construct
  misc_feature 1..22: note = chemically synthesized
  source 1..22: mol_type = other DNA
atcaatagtcacaatcaatggt

SEQ ID NO: 24988 - DNA, 22 bp, synthetic construct
  misc_feature 1..22: note = chemically synthesized
  source 1..22: mol_type = other DNA
tcaatagtcacaatcaatggtc

SEQ ID NO: 24989 - DNA, 22 bp, synthetic construct
  misc_feature 1..22: note = chemically synthesized
  source 1..22: mol_type = other DNA
catctggagacattacttttag

SEQ ID NO: 24990 - DNA, 22 bp, synthetic construct
  misc_feature 1..22: note = chemically synthesized
  source 1..22: mol_type = other DNA
atctggagacattacttttagc

SEQ ID NO: 24991 - DNA, 22 bp, synthetic construct
  misc_feature 1..22: note = chemically synthesized
  source 1..22: mol_type = other DNA
gagacattacttttagcctgag

SEQ ID NO: 24992 - DNA, 22 bp, synthetic construct
  misc_feature 1..22: note = chemically synthesized
  source 1..22: mol_type = other DNA
cttttagcctgagccatgcaaa

SEQ ID NO: 24993 - DNA, 22 bp, synthetic construct
  misc_feature 1..22: note = chemically synthesized
  source 1..22: mol_type = other DNA
ttagcctgagccatgcaaaata

SEQ ID NO: 24994 - DNA, 22 bp, synthetic construct
  misc_feature 1..22: note = chemically synthesized
  source 1..22: mol_type = other DNA
tagcctgagccatgcaaaatat

SEQ ID NO: 24995 - DNA, 22 bp, synthetic construct
  misc_feature 1..22: note = chemically synthesized
  source 1..22: mol_type = other DNA
agcctgagccatgcaaaatata

SEQ ID NO: 24996 - DNA, 22 bp, synthetic construct
  misc_feature 1..22: note = chemically synthesized
  source 1..22: mol_type = other DNA
gcctgagccatgcaaaatatac

SEQ ID NO: 24997 - DNA, 22 bp, synthetic construct
  misc_feature 1..22: note = chemically synthesized
  source 1..22: mol_type = other DNA
agccatgcaaaatatacttttt

SEQ ID NO: 24998 - DNA, 22 bp, synthetic construct
  misc_feature 1..22: note = chemically synthesized
  source 1..22: mol_type = other DNA
tttggaaaattgccctttgaaa

SEQ ID NO: 24999 - DNA, 22 bp, synthetic construct
  misc_feature 1..22: note = chemically synthesized
  source 1..22: mol_type = other DNA
ttggaaaattgccctttgaaag

SEQ ID NO: 25000 - DNA, 22 bp, synthetic construct
  misc_feature 1..22: note = chemically synthesized
  source 1..22: mol_type = other DNA
tggaaaattgccctttgaaagg

SEQ ID NO: 25001 - DNA, 22 bp, synthetic construct
  misc_feature 1..22: note = chemically synthesized
  source 1..22: mol_type = other DNA
ggaaaattgccctttgaaaggc

SEQ ID NO: 25002 - DNA, 22 bp, synthetic construct
  misc_feature 1..22: note = chemically synthesized
  source 1..22: mol_type = other DNA
gaaaattgccctttgaaaggcg

SEQ ID NO: 25003 - DNA, 22 bp, synthetic construct
  misc_feature 1..22: note = chemically synthesized
  source 1..22: mol_type = other DNA
ccctttgaaaggcgagacacaa

SEQ ID NO: 25004 - DNA, 22 bp, synthetic construct
  misc_feature 1..22: note = chemically synthesized
  source 1..22: mol_type = other DNA
tgaaaggcgagacacaaaaggc

SEQ ID NO: 25005 - DNA, 22 bp, synthetic construct
  misc_feature 1..22: note = chemically synthesized
  source 1..22: mol_type = other DNA
gaaaggcgagacacaaaaggca

SEQ ID NO: 25006 - DNA, 22 bp, synthetic construct
  misc_feature 1..22: note = chemically synthesized
  source 1..22: mol_type = other DNA
aaaggcgagacacaaaaggcaa

SEQ ID NO: 25007 - DNA, 22 bp, synthetic construct
  misc_feature 1..22: note = chemically synthesized
  source 1..22: mol_type = other DNA
atgctattatatggtaccaata

SEQ ID NO: 25008 - DNA, 22 bp, synthetic construct
  misc_feature 1..22: note = chemically synthesized
  source 1..22: mol_type = other DNA
ttatatggtaccaataggattc

SEQ ID NO: 25009 - DNA, 22 bp, synthetic construct
  misc_feature 1..22: note = chemically synthesized
  source 1..22: mol_type = other DNA
tatggtaccaataggattcatt

SEQ ID NO: 25010 - DNA, 22 bp, synthetic construct
  misc_feature 1..22: note = chemically synthesized
  source 1..22: mol_type = other DNA
attaatttataaaggagaagag

SEQ ID NO: 25011 - DNA, 22 bp, synthetic construct
  misc_feature 1..22: note = chemically synthesized
  source 1..22: mol_type = other DNA
atttataaaggagaagagctaa

SEQ ID NO: 25012 - DNA, 22 bp, synthetic construct
  misc_feature 1..22: note = chemically synthesized
  source 1..22: mol_type = other DNA
ataaaggagaagagctaatgta

SEQ ID NO: 25013 - DNA, 22 bp, synthetic construct
  misc_feature 1..22: note = chemically synthesized
  source 1..22: mol_type = other DNA
taaaggagaagagctaatgtaa

SEQ ID NO: 25014 - DNA, 22 bp, synthetic construct
  misc_feature 1..22: note = chemically synthesized
  source 1..22: mol_type = other DNA
atgtaactccaaaatgcaagca

SEQ ID NO: 25015 - DNA, 22 bp, synthetic construct
  misc_feature 1..22: note = chemically synthesized
  source 1..22: mol_type = other DNA
caaaatgcaagcaattttcata

SEQ ID NO: 25016 - DNA, 22 bp, synthetic construct
  misc_feature 1..22: note = chemically synthesized
  source 1..22: mol_type = other DNA
tcatatgagtctacacaagcta

SEQ ID NO: 25017 - DNA, 22 bp, synthetic construct
  misc_feature 1..22: note = chemically synthesized
  source 1..22: mol_type = other DNA
catatgagtctacacaagctaa

SEQ ID NO: 25018 - DNA, 22 bp, synthetic construct
  misc_feature 1..22: note = chemically synthesized
  source 1..22: mol_type = other DNA
atatgagtctacacaagctaat

SEQ ID NO: 25019 - DNA, 22 bp, synthetic construct
  misc_feature 1..22: note = chemically synthesized
  source 1..22: mol_type = other DNA
cacaagctaattgtccttaaga

SEQ ID NO: 25020 - DNA, 22 bp, synthetic construct
  misc_feature 1..22: note = chemically synthesized
  source 1..22: mol_type = other DNA
attgtccttaagaatttcatct

SEQ ID NO: 25021 - DNA, 22 bp, synthetic construct
  misc_feature 1..22: note = chemically synthesized
  source 1..22: mol_type = other DNA
tccttaagaatttcatctttaa

SEQ ID NO: 25022 - DNA, 22 bp, synthetic construct
  misc_feature 1..22: note = chemically synthesized
  source 1..22: mol_type = other DNA
aagaatttcatctttaaggaaa

SEQ ID NO: 25023 - DNA, 22 bp, synthetic construct
  misc_feature 1..22: note = chemically synthesized
  source 1..22: mol_type = other DNA
agaatttcatctttaaggaaaa

SEQ ID NO: 25024 - DNA, 22 bp, synthetic construct
  misc_feature 1..22: note = chemically synthesized
  source 1..22: mol_type = other DNA
catctttaaggaaaagtttttt

SEQ ID NO: 25025 - DNA, 22 bp, synthetic construct
  misc_feature 1..22: note = chemically synthesized
  source 1..22: mol_type = other DNA
atctttaaggaaaagtttttta

SEQ ID NO: 25026 - DNA, 22 bp, synthetic construct
  misc_feature 1..22: note = chemically synthesized
  source 1..22: mol_type = other DNA
taaggaaaagttttttactgta

SEQ ID NO: 25027 - DNA, 22 bp, synthetic construct
  misc_feature 1..22: note = chemically synthesized
  source 1..22: mol_type = other DNA
aaggaaaagttttttactgtat

SEQ ID NO: 25028 - DNA, 22 bp, synthetic construct
  misc_feature 1..22: note = chemically synthesized
  source 1..22: mol_type = other DNA
aggaaaagttttttactgtatc

SEQ ID NO: 25029 - DNA, 22 bp, synthetic construct
  misc_feature 1..22: note = chemically synthesized
  source 1..22: mol_type = other DNA
tttactgtatcaaaaagaagtt

SEQ ID NO: 25030 - DNA, 22 bp, synthetic construct
  misc_feature 1..22: note = chemically synthesized
  source 1..22: mol_type = other DNA
ttactgtatcaaaaagaagttt

SEQ ID NO: 25031 - DNA, 22 bp, synthetic construct
  misc_feature 1..22: note = chemically synthesized
  source 1..22: mol_type = other DNA
tactgtatcaaaaagaagttta

SEQ ID NO: 25032 - DNA, 22 bp, synthetic construct
  misc_feature 1..22: note = chemically synthesized
  source 1..22: mol_type = other DNA
actgtatcaaaaagaagtttaa

SEQ ID NO: 25033 - DNA, 22 bp, synthetic construct
  misc_feature 1..22: note = chemically synthesized
  source 1..22: mol_type = other DNA
ctgtatcaaaaagaagtttaaa

SEQ ID NO: 25034 - DNA, 22 bp, synthetic construct
  misc_feature 1..22: note = chemically synthesized
  source 1..22: mol_type = other DNA
tatcaaaaagaagtttaaactg

SEQ ID NO: 25035 - DNA, 22 bp, synthetic construct
  misc_feature 1..22: note = chemically synthesized
  source 1..22: mol_type = other DNA
aaactgtcattgagcagagtct

SEQ ID NO: 25036 - DNA, 22 bp, synthetic construct
  misc_feature 1..22: note = chemically synthesized
  source 1..22: mol_type = other DNA
aactgtcattgagcagagtctg

SEQ ID NO: 25037 - DNA, 22 bp, synthetic construct
  misc_feature 1..22: note = chemically synthesized
  source 1..22: mol_type = other DNA
tcattgagcagagtctgataat

SEQ ID NO: 25038 - DNA, 22 bp, synthetic construct
  misc_feature 1..22: note = chemically synthesized
  source 1..22: mol_type = other DNA
agcagagtctgataataaggac

SEQ ID NO: 25039 - DNA, 22 bp, synthetic construct
  misc_feature 1..22: note = chemically synthesized
  source 1..22: mol_type = other DNA
ataataaggacactgtcaaatc

SEQ ID NO: 25040 - DNA, 22 bp, synthetic construct
  misc_feature 1..22: note = chemically synthesized
  source 1..22: mol_type = other DNA
tcaaatcacagttcagatgtta

SEQ ID NO: 25041 - DNA, 22 bp, synthetic construct
  misc_feature 1..22: note = chemically synthesized
  source 1..22: mol_type = other DNA
agatgttatgtgatgaggacag

SEQ ID NO: 25042 - DNA, 22 bp, synthetic construct
  misc_feature 1..22: note = chemically synthesized
  source 1..22: mol_type = other DNA
tgtgatgaggacagaatagaac

SEQ ID NO: 25043 - DNA, 22 bp, synthetic construct
  misc_feature 1..22: note = chemically synthesized
  source 1..22: mol_type = other DNA
ctagactggacaagaacagaca

SEQ ID NO: 25044 - DNA, 22 bp, synthetic construct
  misc_feature 1..22: note = chemically synthesized
  source 1..22: mol_type = other DNA
tagactggacaagaacagacat

SEQ ID NO: 25045 - DNA, 22 bp, synthetic construct
  misc_feature 1..22: note = chemically synthesized
  source 1..22: mol_type = other DNA
gactggacaagaacagacatga

SEQ ID NO: 25046 - DNA, 22 bp, synthetic construct
  misc_feature 1..22: note = chemically synthesized
  source 1..22: mol_type = other DNA
gacaagaacagacatgattaac

SEQ ID NO: 25047 - DNA, 22 bp, synthetic construct
  misc_feature 1..22: note = chemically synthesized
  source 1..22: mol_type = other DNA
acttaaccatccaacaataaat

SEQ ID NO: 25048 - DNA, 22 bp, synthetic construct
  misc_feature 1..22: note = chemically synthesized
  source 1..22: mol_type = other DNA
aaccatccaacaataaatctaa

SEQ ID NO: 25049 - DNA, 22 bp, synthetic construct
  misc_feature 1..22: note = chemically synthesized
  source 1..22: mol_type = other DNA
accatccaacaataaatctaag

SEQ ID NO: 25050 - DNA, 22 bp, synthetic construct
  misc_feature 1..22: note = chemically synthesized
  source 1..22: mol_type = other DNA
agttaacataaattgatgtcat

SEQ ID NO: 25051 - DNA, 22 bp, synthetic construct
  misc_feature 1..22: note = chemically synthesized
  source 1..22: mol_type = other DNA
acataaattgatgtcatctact

SEQ ID NO: 25052 - DNA, 22 bp, synthetic construct
  misc_feature 1..22: note = chemically synthesized
  source 1..22: mol_type = other DNA
atgtcatctactacatctaagt

SEQ ID NO: 25053 - DNA, 22 bp, synthetic construct
  misc_feature 1..22: note = chemically synthesized
  source 1..22: mol_type = other DNA
ctacatctaagtatttcctcaa

SEQ ID NO: 25054 - DNA, 22 bp, synthetic construct
  misc_feature 1..22: note = chemically synthesized
  source 1..22: mol_type = other DNA
catctaagtatttcctcaaatt

SEQ ID NO: 25055 - DNA, 22 bp, synthetic construct
  misc_feature 1..22: note = chemically synthesized
  source 1..22: mol_type = other DNA
agtatttcctcaaattctggac

SEQ ID NO: 25056 - DNA, 22 bp, synthetic construct
  misc_feature 1..22: note = chemically synthesized
  source 1..22: mol_type = other DNA
cctcaaattctggacaatttta

SEQ ID NO: 25057 - DNA, 22 bp, synthetic construct
  misc_feature 1..22: note = chemically synthesized
  source 1..22: mol_type = other DNA
ctcaaattctggacaattttag

SEQ ID NO: 25058 - DNA, 22 bp, synthetic construct
  misc_feature 1..22: note = chemically synthesized
  source 1..22: mol_type = other DNA
aaattctggacaattttagaaa

SEQ ID NO: 25059 - DNA, 22 bp, synthetic construct
  misc_feature 1..22: note = chemically synthesized
  source 1..22: mol_type = other DNA
tggacaattttagaaaccatca

SEQ ID NO: 25060 - DNA, 22 bp, synthetic construct
  misc_feature 1..22: note = chemically synthesized
  source 1..22: mol_type = other DNA
gacaattttagaaaccatcaaa

SEQ ID NO: 25061 - DNA, 22 bp, synthetic construct
  misc_feature 1..22: note = chemically synthesized
  source 1..22: mol_type = other DNA
tagaaaccatcaaaattatttg

SEQ ID NO: 25062 - DNA, 22 bp, synthetic construct
  misc_feature 1..22: note = chemically synthesized
  source 1..22: mol_type = other DNA
agaaaccatcaaaattatttgt

SEQ ID NO: 25063 - DNA, 22 bp, synthetic construct
  misc_feature 1..22: note = chemically synthesized
  source 1..22: mol_type = other DNA
gaaaccatcaaaattatttgtt

SEQ ID NO: 25064 - DNA, 22 bp, synthetic construct
  misc_feature 1..22: note = chemically synthesized
  source 1..22: mol_type = other DNA
tttgttgaggaaaaataaactt

SEQ ID NO: 25065 - DNA, 22 bp, synthetic construct
  misc_feature 1..22: note = chemically synthesized
  source 1..22: mol_type = other DNA
gttgaggaaaaataaacttagc

SEQ ID NO: 25066 - DNA, 22 bp, synthetic construct
  misc_feature 1..22: note = chemically synthesized
  source 1..22: mol_type = other DNA
ttgaggaaaaataaacttagcc

SEQ ID NO: 25067 - DNA, 22 bp, synthetic construct
  misc_feature 1..22: note = chemically synthesized
  source 1..22: mol_type = other DNA
aggaaaaataaacttagccaat

SEQ ID NO: 25068 - DNA, 22 bp, synthetic construct
  misc_feature 1..22: note = chemically synthesized
  source 1..22: mol_type = other DNA
agccaatttgcaagggcaacta

SEQ ID NO: 25069 - DNA, 22 bp, synthetic construct
  misc_feature 1..22: note = chemically synthesized
  source 1..22: mol_type = other DNA
gccaatttgcaagggcaactaa

SEQ ID NO: 25070 - DNA, 22 bp, synthetic construct
  misc_feature 1..22: note = chemically synthesized
  source 1..22: mol_type = other DNA
gcaagggcaactaaaatgaaga

SEQ ID NO: 25071 - DNA, 22 bp, synthetic construct
  misc_feature 1..22: note = chemically synthesized
  source 1..22: mol_type = other DNA
caagggcaactaaaatgaagaa

SEQ ID NO: 25072 - DNA, 22 bp, synthetic construct
  misc_feature 1..22: note = chemically synthesized
  source 1..22: mol_type = other DNA
aaatgaagaacttttctttaaa

SEQ ID NO: 25073 - DNA, 22 bp, synthetic construct
  misc_feature 1..22: note = chemically synthesized
  source 1..22: mol_type = other DNA
ttctttaaagtgtgggagtcac

SEQ ID NO: 25074 - DNA, 22 bp, synthetic construct
  misc_feature 1..22: note = chemically synthesized
  source 1..22: mol_type = other DNA
tctttaaagtgtgggagtcaca

SEQ ID NO: 25075 - DNA, 22 bp, synthetic construct
  misc_feature 1..22: note = chemically synthesized
  source 1..22: mol_type = other DNA
ctttaaagtgtgggagtcacat

SEQ ID NO: 25076 - DNA, 22 bp, synthetic construct
  misc_feature 1..22: note = chemically synthesized
  source 1..22: mol_type = other DNA
tttaaagtgtgggagtcacatc

SEQ ID NO: 25077 - DNA, 22 bp, synthetic construct
  misc_feature 1..22: note = chemically synthesized
  source 1..22: mol_type = other DNA
taaagtgtgggagtcacatctt

SEQ ID NO: 25078 - DNA, 22 bp, synthetic construct
  misc_feature 1..22: note = chemically synthesized
  source 1..22: mol_type = other DNA
aaagtgtgggagtcacatctta

SEQ ID NO: 25079 - DNA, 22 bp, synthetic construct
  misc_feature 1..22: note = chemically synthesized
  source 1..22: mol_type = other DNA
aagtgtgggagtcacatcttag

SEQ ID NO: 25080 - DNA, 22 bp, synthetic construct
  misc_feature 1..22: note = chemically synthesized
  source 1..22: mol_type = other DNA
agcaacatatttaaatatatct

SEQ ID NO: 25081 - DNA, 22 bp, synthetic construct
  misc_feature 1..22: note = chemically synthesized
  source 1..22: mol_type = other DNA
gcaacatatttaaatatatcta

SEQ ID NO: 25082 - DNA, 22 bp, synthetic construct
  misc_feature 1..22: note = chemically synthesized
  source 1..22: mol_type = other DNA
aaatatatctaagctttcttca

SEQ ID NO: 25083 - DNA, 22 bp, synthetic construct
  misc_feature 1..22: note = chemically synthesized
  source 1..22: mol_type = other DNA
aatatatctaagctttcttcaa

SEQ ID NO: 25084 - DNA, 22 bp, synthetic construct
  misc_feature 1..22: note = chemically synthesized
  source 1..22: mol_type = other DNA
agctttcttcaaaaccactatc

SEQ ID NO: 25085 - DNA, 22 bp, synthetic construct
  misc_feature 1..22: note = chemically synthesized
  source 1..22: mol_type = other DNA
tcttcaaaaccactatccacaa

SEQ ID NO: 25086 - DNA, 22 bp, synthetic construct
  misc_feature 1..22: note = chemically synthesized
  source 1..22: mol_type = other DNA
cttcaaaaccactatccacaaa

SEQ ID NO: 25087 - DNA, 22 bp, synthetic construct
  misc_feature 1..22: note = chemically synthesized
  source 1..22: mol_type = other DNA
ttcaaaaccactatccacaaaa

SEQ ID NO: 25088 - DNA, 22 bp, synthetic construct
  misc_feature 1..22: note = chemically synthesized
  source 1..22: mol_type = other DNA
caaaaccactatccacaaaaat

SEQ ID NO: 25089 - DNA, 22 bp, synthetic construct
  misc_feature 1..22: note = chemically synthesized
  source 1..22: mol_type = other DNA
aaaaccactatccacaaaaatg

SEQ ID NO: 25090 - DNA, 22 bp, synthetic construct
  misc_feature 1..22: note = chemically synthesized
  source 1..22: mol_type = other DNA
tccacaaaaatgcaaaatttcc

SEQ ID NO: 25091 - DNA, 22 bp, synthetic construct
  misc_feature 1..22: note = chemically synthesized
  source 1..22: mol_type = other DNA
ccaaagaatttctcctcttctg

SEQ ID NO: 25092 - DNA, 22 bp, synthetic construct
  misc_feature 1..22: note = chemically synthesized
  source 1..22: mol_type = other DNA
caaagaatttctcctcttctgt

SEQ ID NO: 25093 - DNA, 22 bp, synthetic construct
  misc_feature 1..22: note = chemically synthesized
  source 1..22: mol_type = other DNA
ctcctcttctgtagacttattt

SEQ ID NO: 25094 - DNA, 22 bp, synthetic construct
  misc_feature 1..22: note = chemically synthesized
  source 1..22: mol_type = other DNA
tcctcttctgtagacttatttt

SEQ ID NO: 25095 - DNA, 22 bp, synthetic construct
  misc_feature 1..22: note = chemically synthesized
  source 1..22: mol_type = other DNA
ctcttctgtagacttattttct

SEQ ID NO: 25096 - DNA, 22 bp, synthetic construct
  misc_feature 1..22: note = chemically synthesized
  source 1..22: mol_type = other DNA
ttctgtagacttattttcttca

SEQ ID NO: 25097 - DNA, 22 bp, synthetic construct
  misc_feature 1..22: note = chemically synthesized
  source 1..22: mol_type = other DNA
ctgtagacttattttcttcatc

SEQ ID NO: 25098 - DNA, 22 bp, synthetic construct
  misc_feature 1..22: note = chemically synthesized
  source 1..22: mol_type = other DNA
tgtagacttattttcttcatct

SEQ ID NO: 25099 - DNA, 22 bp, synthetic construct
  misc_feature 1..22: note = chemically synthesized
  source 1..22: mol_type = other DNA
tagacttattttcttcatcttc

SEQ ID NO: 25100 - DNA, 22 bp, synthetic construct
  misc_feature 1..22: note = chemically synthesized
  source 1..22: mol_type = other DNA
attttcttcatcttcatctttt

SEQ ID NO: 25101 - DNA, 22 bp, synthetic construct
  misc_feature 1..22: note = chemically synthesized
  source 1..22: mol_type = other DNA
ttttcttcatcttcatcttttc

SEQ ID NO: 25102 - DNA, 22 bp, synthetic construct
  misc_feature 1..22: note = chemically synthesized
  source 1..22: mol_type = other DNA
tcttcatcttcatcttttccag

SEQ ID NO: 25103 - DNA, 22 bp, synthetic construct
  misc_feature 1..22: note = chemically synthesized
  source 1..22: mol_type = other DNA
cttcatcttcatcttttccagg

SEQ ID NO: 25104 - DNA, 22 bp, synthetic construct
  misc_feature 1..22: note = chemically synthesized
  source 1..22: mol_type = other DNA
ttcatcttcatcttttccagga

SEQ ID NO: 25105 - DNA, 22 bp, synthetic construct
  misc_feature 1..22: note = chemically synthesized
  source 1..22: mol_type = other DNA
catcttcatcttttccaggaga

SEQ ID NO: 25106 - DNA, 22 bp, synthetic construct
  misc_feature 1..22: note = chemically synthesized
  source 1..22: mol_type = other DNA
atcttcatcttttccaggagaa

SEQ ID NO: 25107 - DNA, 22 bp, synthetic construct
  misc_feature 1..22: note = chemically synthesized
  source 1..22: mol_type = other DNA
catcttttccaggagaatatac

SEQ ID NO: 25108 - DNA, 22 bp, synthetic construct
  misc_feature 1..22: note = chemically synthesized
  source 1..22: mol_type = other DNA
atcttttccaggagaatatacc

SEQ ID NO: 25109 - DNA, 22 bp, synthetic construct
  misc_feature 1..22: note = chemically synthesized
  source 1..22: mol_type = other DNA
ttccaggagaatataccataag

SEQ ID NO: 25110 - DNA, 22 bp, synthetic construct
  misc_feature 1..22: note = chemically synthesized
  source 1..22: mol_type = other DNA
tccaggagaatataccataagt

SEQ ID NO: 25111 - DNA, 22 bp, synthetic construct
  misc_feature 1..22: note = chemically synthesized
  source 1..22: mol_type = other DNA
ccaggagaatataccataagtt

SEQ ID NO: 25112 - DNA, 22 bp, synthetic construct
  misc_feature 1..22: note = chemically synthesized
  source 1..22: mol_type = other DNA
caggagaatataccataagttt

SEQ ID NO: 25113 - DNA, 22 bp, synthetic construct
  misc_feature 1..22: note = chemically synthesized
  source 1..22: mol_type = other DNA
ctgatggtacacatttattaga

SEQ ID NO: 25114 - DNA, 22 bp, synthetic construct
  misc_feature 1..22: note = chemically synthesized
  source 1..22: mol_type = other DNA
tgatggtacacatttattagat

SEQ ID NO: 25115 - DNA, 22 bp, synthetic construct
  misc_feature 1..22: note = chemically synthesized
  source 1..22: mol_type = other DNA
atggtacacatttattagatgt

SEQ ID NO: 25116 - DNA, 22 bp, synthetic construct
  misc_feature 1..22: note = chemically synthesized
  source 1..22: mol_type = other DNA
attagatgttttatttacattt

SEQ ID NO: 25117 - DNA, 22 bp, synthetic construct
  misc_feature 1..22: note = chemically synthesized
  source 1..22: mol_type = other DNA
ttagatgttttatttacatttt

SEQ ID NO: 25118 - DNA, 22 bp, synthetic construct
  misc_feature 1..22: note = chemically synthesized
  source 1..22: mol_type = other DNA
gatgttttatttacatttttta

SEQ ID NO: 25119 - DNA, 22 bp, synthetic construct
  misc_feature 1..22: note = chemically synthesized
  source 1..22: mol_type = other DNA
tatttacattttttatccttga

SEQ ID NO: 25120 - DNA, 22 bp, synthetic construct
  misc_feature 1..22: note = chemically synthesized
  source 1..22: mol_type = other DNA
atttacattttttatccttgaa

SEQ ID NO: 25121 - DNA, 22 bp, synthetic construct
  misc_feature 1..22: note = chemically synthesized
  source 1..22: mol_type = other DNA
tttacattttttatccttgaaa

SEQ ID NO: 25122 - DNA, 22 bp, synthetic construct
  misc_feature 1..22: note = chemically synthesized
  source 1..22: mol_type = other DNA
acattttttatccttgaaaact

SEQ ID NO: 25123 - DNA, 22 bp, synthetic construct
  misc_feature 1..22: note = chemically synthesized
  source 1..22: mol_type = other DNA
cattttttatccttgaaaactc

SEQ ID NO: 25124 - DNA, 22 bp, synthetic construct
  misc_feature 1..22: note = chemically synthesized
  source 1..22: mol_type = other DNA
tttatccttgaaaactcctttt

SEQ ID NO: 25125 - DNA, 22 bp, synthetic construct
  misc_feature 1..22: note = chemically synthesized
  source 1..22: mol_type = other DNA
ttatccttgaaaactcctttta

SEQ ID NO: 25126 - DNA, 22 bp, synthetic construct
  misc_feature 1..22: note = chemically synthesized
  source 1..22: mol_type = other DNA
tatccttgaaaactccttttat

SEQ ID NO: 25127 - DNA, 22 bp, synthetic construct
  misc_feature 1..22: note = chemically synthesized
  source 1..22: mol_type = other DNA
atccttgaaaactccttttatt

SEQ ID NO: 25128 - DNA, 22 bp, synthetic construct
  misc_feature 1..22: note = chemically synthesized
  source 1..22: mol_type = other DNA
tccttgaaaactccttttattt

SEQ ID NO: 25129 - DNA, 22 bp, synthetic construct
  misc_feature 1..22: note = chemically synthesized
  source 1..22: mol_type = other DNA
gaaaactccttttatttgcaac

SEQ ID NO: 25130 - DNA, 22 bp, synthetic construct
  misc_feature 1..22: note = chemically synthesized
  source 1..22: mol_type = other DNA
aaaactccttttatttgcaact

SEQ ID NO: 25131 - DNA, 22 bp, synthetic construct
  misc_feature 1..22: note = chemically synthesized
  source 1..22: mol_type = other DNA
cttttatttgcaactatgcatc

SEQ ID NO: 25132 - DNA, 22 bp, synthetic construct
  misc_feature 1..22: note = chemically synthesized
  source 1..22: mol_type = other DNA
ttatttgcaactatgcatctta

SEQ ID NO: 25133 - DNA, 22 bp, synthetic construct
  misc_feature 1..22: note = chemically synthesized
  source 1..22: mol_type = other DNA
tatttgcaactatgcatcttac

SEQ ID NO: 25134 - DNA, 22 bp, synthetic construct
  misc_feature 1..22: note = chemically synthesized
  source 1..22: mol_type = other DNA
atttgcaactatgcatcttact

SEQ ID NO: 25135 - DNA, 22 bp, synthetic construct
  misc_feature 1..22: note = chemically synthesized
  source 1..22: mol_type = other DNA
tttgcaactatgcatcttactc

SEQ ID NO: 25136 - DNA, 22 bp, synthetic construct
  misc_feature 1..22: note = chemically synthesized
  source 1..22: mol_type = other DNA
gcaactatgcatcttactcaga

SEQ ID NO: 25137 - DNA, 22 bp, synthetic construct
  misc_feature 1..22: note = chemically synthesized
  source 1..22: mol_type = other DNA
caactatgcatcttactcagag

SEQ ID NO: 25138 - DNA, 22 bp, synthetic construct
  misc_feature 1..22: note = chemically synthesized
  source 1..22: mol_type = other DNA
tgcatcttactcagagatctta

SEQ ID NO: 25139 - DNA, 22 bp, synthetic construct
  misc_feature 1..22: note = chemically synthesized
  source 1..22: mol_type = other DNA
actcagagatcttaaaacatcc

SEQ ID NO: 25140 - DNA, 22 bp, synthetic construct
  misc_feature 1..22: note = chemically synthesized
  source 1..22: mol_type = other DNA
ctcagagatcttaaaacatcct

SEQ ID NO: 25141 - DNA, 22 bp, synthetic construct
  misc_feature 1..22: note = chemically synthesized
  source 1..22: mol_type = other DNA
agagatcttaaaacatccttgt

SEQ ID NO: 25142 - DNA, 22 bp, synthetic construct
  misc_feature 1..22: note = chemically synthesized
  source 1..22: mol_type = other DNA
aaaacatccttgtttgttagat

SEQ ID NO: 25143 - DNA, 22 bp, synthetic construct
  misc_feature 1..22: note = chemically synthesized
  source 1..22: mol_type = other DNA
aaacatccttgtttgttagatt

SEQ ID NO: 25144 - DNA, 22 bp, synthetic construct
  misc_feature 1..22: note = chemically synthesized
  source 1..22: mol_type = other DNA
gtttgttagattacgtatttca

SEQ ID NO: 25145 - DNA, 22 bp, synthetic construct
  misc_feature 1..22: note = chemically synthesized
  source 1..22: mol_type = other DNA
tttgttagattacgtatttcaa

SEQ ID NO: 25146 - DNA, 22 bp, synthetic construct
  misc_feature 1..22: note = chemically synthesized
  source 1..22: mol_type = other DNA
gttagattacgtatttcaaatt

SEQ ID NO: 25147 - DNA, 22 bp, synthetic construct
  misc_feature 1..22: note = chemically synthesized
  source 1..22: mol_type = other DNA
ttagattacgtatttcaaattc

SEQ ID NO: 25148 - DNA, 22 bp, synthetic construct
  misc_feature 1..22: note = chemically synthesized
  source 1..22: mol_type = other DNA
gattacgtatttcaaattcata

SEQ ID NO: 25149 - DNA, 22 bp, synthetic construct
  misc_feature 1..22: note = chemically synthesized
  source 1..22: mol_type = other DNA
cgtatttcaaattcatatacac

SEQ ID NO: 25150 - DNA, 22 bp, synthetic construct
  misc_feature 1..22: note = chemically synthesized
  source 1..22: mol_type = other DNA
caaattcatatacactttggta

SEQ ID NO: 25151 - DNA, 22 bp, synthetic construct
  misc_feature 1..22: note = chemically synthesized
  source 1..22: mol_type = other DNA
aaattcatatacactttggtag

SEQ ID NO: 25152 - DNA, 22 bp, synthetic construct
  misc_feature 1..22: note = chemically synthesized
  source 1..22: mol_type = other DNA
atatacactttggtagatgcaa

SEQ ID NO: 25153 - DNA, 22 bp, synthetic construct
  misc_feature 1..22: note = chemically synthesized
  source 1..22: mol_type = other DNA
tggtagatgcaaacatttttat

SEQ ID NO: 25154 - DNA, 22 bp, synthetic construct
  misc_feature 1..22: note = chemically synthesized
  source 1..22: mol_type = other DNA
ggtagatgcaaacatttttatt

SEQ ID NO: 25155 - DNA, 22 bp, synthetic construct
  misc_feature 1..22: note = chemically synthesized
  source 1..22: mol_type = other DNA
gtagatgcaaacatttttattt

SEQ ID NO: 25156 - DNA, 22 bp, synthetic construct
  misc_feature 1..22: note = chemically synthesized
  source 1..22: mol_type = other DNA
ttatttgctgaagaacataagg

SEQ ID NO: 25157 - DNA, 22 bp, synthetic construct
  misc_feature 1..22: note = chemically synthesized
  source 1..22: mol_type = other DNA
tatttgctgaagaacataaggg

SEQ ID NO: 25158 - DNA, 22 bp, synthetic construct
  misc_feature 1..22: note = chemically synthesized
  source 1..22: mol_type = other DNA
atttgctgaagaacataagggg

SEQ ID NO: 25159 - DNA, 22 bp, synthetic construct
  misc_feature 1..22: note = chemically synthesized
  source 1..22: mol_type = other DNA
tttgctgaagaacataaggggg

SEQ ID NO: 25160 - DNA, 22 bp, synthetic construct
  misc_feature 1..22: note = chemically synthesized
  source 1..22: mol_type = other DNA
gctgaagaacataagggggaaa

SEQ ID NO: 25161 - DNA, 22 bp, synthetic construct
  misc_feature 1..22: note = chemically synthesized
  source 1..22: mol_type = other DNA
ctgaagaacataagggggaaat

SEQ ID NO: 25162 - DNA, 22 bp, synthetic construct
  misc_feature 1..22: note = chemically synthesized
  source 1..22: mol_type = other DNA
aagaacataagggggaaataga

SEQ ID NO: 25163 - DNA, 22 bp, synthetic construct
  misc_feature 1..22: note = chemically synthesized
  source 1..22: mol_type = other DNA
tttatttgaagaaacaaatgat

SEQ ID NO: 25164 - DNA, 22 bp, synthetic construct
  misc_feature 1..22: note = chemically synthesized
  source 1..22: mol_type = other DNA
tatttgaagaaacaaatgattt

SEQ ID NO: 25165 - DNA, 22 bp, synthetic construct
  misc_feature 1..22: note = chemically synthesized
  source 1..22: mol_type = other DNA
atttgaagaaacaaatgatttg

SEQ ID NO: 25166 - DNA, 22 bp, synthetic construct
  misc_feature 1..22: note = chemically synthesized
  source 1..22: mol_type = other DNA
tttgaagaaacaaatgatttga

SEQ ID NO: 25167 - DNA, 22 bp, synthetic construct
  misc_feature 1..22: note = chemically synthesized
  source 1..22: mol_type = other DNA
gaagaaacaaatgatttgattt

SEQ ID NO: 25168 - DNA, 22 bp, synthetic construct
  misc_feature 1..22: note = chemically synthesized
  source 1..22: mol_type = other DNA
aagaaacaaatgatttgatttg

SEQ ID NO: 25169 - DNA, 22 bp, synthetic construct
  misc_feature 1..22: note = chemically synthesized
  source 1..22: mol_type = other DNA
gatttgggaaatgaaatgaaaa

SEQ ID NO: 25170 - DNA, 22 bp, synthetic construct
  misc_feature 1..22: note = chemically synthesized
  source 1..22: mol_type = other DNA
atttgggaaatgaaatgaaaag

SEQ ID NO: 25171 - DNA, 22 bp, synthetic construct
  misc_feature 1..22: note = chemically synthesized
  source 1..22: mol_type = other DNA
gggaaatgaaatgaaaagaaaa

SEQ ID NO: 25172 - DNA, 22 bp, synthetic construct
  misc_feature 1..22: note = chemically synthesized
  source 1..22: mol_type = other DNA
ggaaatgaaatgaaaagaaaaa

SEQ ID NO: 25173 - DNA, 22 bp, synthetic construct
  misc_feature 1..22: note = chemically synthesized
  source 1..22: mol_type = other DNA
actaattcgctacttcttttac

SEQ ID NO: 25174 - DNA, 22 bp, synthetic construct
  misc_feature 1..22: note = chemically synthesized
  source 1..22: mol_type = other DNA
attcgctacttcttttactcat

SEQ ID NO: 25175 - DNA, 22 bp, synthetic construct
  misc_feature 1..22: note = chemically synthesized
  source 1..22: mol_type = other DNA
gctacttcttttactcatctga

SEQ ID NO: 25176 - DNA, 22 bp, synthetic construct
  misc_feature 1..22: note = chemically synthesized
  source 1..22: mol_type = other DNA
cttcttttactcatctgaggcc

SEQ ID NO: 25177 - DNA, 22 bp, synthetic construct
  misc_feature 1..22: note = chemically synthesized
  source 1..22: mol_type = other DNA
cttttactcatctgaggccttc

SEQ ID NO: 25178 - DNA, 22 bp, synthetic construct
  misc_feature 1..22: note = chemically synthesized
  source 1..22: mol_type = other DNA
ttttactcatctgaggccttca

SEQ ID NO: 25179 - DNA, 22 bp, synthetic construct
  misc_feature 1..22: note = chemically synthesized
  source 1..22: mol_type = other DNA
ttactcatctgaggccttcaga

SEQ ID NO: 25180 - DNA, 22 bp, synthetic construct
  misc_feature 1..22: note = chemically synthesized
  source 1..22: mol_type = other DNA
tactcatctgaggccttcagat

SEQ ID NO: 25181 - DNA, 22 bp, synthetic construct
  misc_feature 1..22: note = chemically synthesized
  source 1..22: mol_type = other DNA
actcatctgaggccttcagata

SEQ ID NO: 25182 - DNA, 22 bp, synthetic construct
  misc_feature 1..22: note = chemically synthesized
  source 1..22: mol_type = other DNA
ctcatctgaggccttcagatag

SEQ ID NO: 25183 - DNA, 22 bp, synthetic construct
  misc_feature 1..22: note = chemically synthesized
  source 1..22: mol_type = other DNA
atctgaggccttcagatagtcc

SEQ ID NO: 25184 - DNA, 22 bp, synthetic construct
  misc_feature 1..22: note = chemically synthesized
  source 1..22: mol_type = other DNA
aggccttcagatagtcccccat

SEQ ID NO: 25185 - DNA, 22 bp, synthetic construct
  misc_feature 1..22: note = chemically synthesized
  source 1..22: mol_type = other DNA
cagatagtcccccatatagcct

SEQ ID NO: 25186 - DNA, 22 bp, synthetic construct
  misc_feature 1..22: note = chemically synthesized
  source 1..22: mol_type = other DNA
agatagtcccccatatagcctt

SEQ ID NO: 25187 - DNA, 22 bp, synthetic construct
  misc_feature 1..22: note = chemically synthesized
  source 1..22: mol_type = other DNA
agagtgtttaaaatatgattat

SEQ ID NO: 25188 - DNA, 22 bp, synthetic construct
  misc_feature 1..22: note = chemically synthesized
  source 1..22: mol_type = other DNA
gagtgtttaaaatatgattatg

SEQ ID NO: 25189 - DNA, 22 bp, synthetic construct
  misc_feature 1..22: note = chemically synthesized
  source 1..22: mol_type = other DNA
aaaatatgattatgctctttca

SEQ ID NO: 25190 - DNA, 22 bp, synthetic construct
  misc_feature 1..22: note = chemically synthesized
  source 1..22: mol_type = other DNA
aaatatgattatgctctttcag

SEQ ID NO: 25191 - DNA, 22 bp, synthetic construct
  misc_feature 1..22: note = chemically synthesized
  source 1..22: mol_type = other DNA
tgctctttcagtctattagaaa

SEQ ID NO: 25192 - DNA, 22 bp, synthetic construct
  misc_feature 1..22: note = chemically synthesized
  source 1..22: mol_type = other DNA
tttcagtctattagaaataaaa

SEQ ID NO: 25193 - DNA, 22 bp, synthetic construct
  misc_feature 1..22: note = chemically synthesized
  source 1..22: mol_type = other DNA
tcagtctattagaaataaaaac

SEQ ID NO: 25194 - DNA, 22 bp, synthetic construct
  misc_feature 1..22: note = chemically synthesized
  source 1..22: mol_type = other DNA
cagtctattagaaataaaaaca

SEQ ID NO: 25195 - DNA, 22 bp, synthetic construct
  misc_feature 1..22: note = chemically synthesized
  source 1..22: mol_type = other DNA
agtctattagaaataaaaacat

SEQ ID NO: 25196 - DNA, 22 bp, synthetic construct
  misc_feature 1..22: note = chemically synthesized
  source 1..22: mol_type = other DNA
ttagaaataaaaacataaagct

SEQ ID NO: 25197 - DNA, 22 bp, synthetic construct
  misc_feature 1..22: note = chemically synthesized
  source 1..22: mol_type = other DNA
gaaataaaaacataaagcttaa

SEQ ID NO: 25198 - DNA, 22 bp, synthetic construct
  misc_feature 1..22: note = chemically synthesized
  source 1..22: mol_type = other DNA
aaaaaatttcaagggaaggggc

SEQ ID NO: 25199 - DNA, 22 bp, synthetic construct
  misc_feature 1..22: note = chemically synthesized
  source 1..22: mol_type = other DNA
aaaaatttcaagggaaggggct

SEQ ID NO: 25200 - DNA, 22 bp, synthetic construct
  misc_feature 1..22: note = chemically synthesized
  source 1..22: mol_type = other DNA
caagggaaggggcttgaagatt

SEQ ID NO: 25201 - DNA, 22 bp, synthetic construct
  misc_feature 1..22: note = chemically synthesized
  source 1..22: mol_type = other DNA
aagggaaggggcttgaagatta

SEQ ID NO: 25202 - DNA, 22 bp, synthetic construct
  misc_feature 1..22: note = chemically synthesized
  source 1..22: mol_type = other DNA
gaagattactgactaagggcag

SEQ ID NO: 25203 - DNA, 22 bp, synthetic construct
  misc_feature 1..22: note = chemically synthesized
  source 1..22: mol_type = other DNA
aagattactgactaagggcagc

SEQ ID NO: 25204 - DNA, 22 bp, synthetic construct
  misc_feature 1..22: note = chemically synthesized
  source 1..22: mol_type = other DNA
ctgactaagggcagctgacact

SEQ ID NO: 25205 - DNA, 22 bp, synthetic construct
  misc_feature 1..22: note = chemically synthesized
  source 1..22: mol_type = other DNA
actaagggcagctgacactcac

SEQ ID NO: 25206 - DNA, 22 bp, synthetic construct
  misc_feature 1..22: note = chemically synthesized
  source 1..22: mol_type = other DNA
agggcagctgacactcacctcc

SEQ ID NO: 25207 - DNA, 22 bp, synthetic construct
  misc_feature 1..22: note = chemically synthesized
  source 1..22: mol_type = other DNA
acactcacctcctccacaaaga

SEQ ID NO: 25208 - DNA, 22 bp, synthetic construct
  misc_feature 1..22: note = chemically synthesized
  source 1..22: mol_type = other DNA
acctcctccacaaagaaccaaa

SEQ ID NO: 25209 - DNA, 22 bp, synthetic construct
  misc_feature 1..22: note = chemically synthesized
  source 1..22: mol_type = other DNA
ctccacaaagaaccaaaatagt

SEQ ID NO: 25210 - DNA, 22 bp, synthetic construct
  misc_feature 1..22: note = chemically synthesized
  source 1..22: mol_type = other DNA
cacaaagaaccaaaatagtaag

SEQ ID NO: 25211 - DNA, 22 bp, synthetic construct
  misc_feature 1..22: note = chemically synthesized
  source 1..22: mol_type = other DNA
tggaattcaacagagaagtgac

SEQ ID NO: 25212 - DNA, 22 bp, synthetic construct
  misc_feature 1..22: note = chemically synthesized
  source 1..22: mol_type = other DNA
gaattcaacagagaagtgacag

SEQ ID NO: 25213 - DNA, 22 bp, synthetic construct
  misc_feature 1..22: note = chemically synthesized
  source 1..22: mol_type = other DNA
aacagagaagtgacaggaagca

SEQ ID NO: 25214 - DNA, 22 bp, synthetic construct
  misc_feature 1..22: note = chemically synthesized
  source 1..22: mol_type = other DNA
aggcaatgaaggggagggaagc

SEQ ID NO: 25215 - DNA, 22 bp, synthetic construct
  misc_feature 1..22: note = chemically synthesized
  source 1..22: mol_type = other DNA
cccagtagggatcctctgtgag

SEQ ID NO: 25216 - DNA, 22 bp, synthetic construct
  misc_feature 1..22: note = chemically synthesized
  source 1..22: mol_type = other DNA
tgtgaggccagagaggctcccc

SEQ ID NO: 25217 - DNA, 22 bp, synthetic construct
  misc_feature 1..22: note = chemically synthesized
  source 1..22: mol_type = other DNA
tgaggccagagaggctccccag

SEQ ID NO: 25218 - DNA, 22 bp, synthetic construct
  misc_feature 1..22: note = chemically synthesized
  source 1..22: mol_type = other DNA
cccagtgcatcgaaagttaagt

SEQ ID NO: 25219 - DNA, 22 bp, synthetic construct
  misc_feature 1..22: note = chemically synthesized
  source 1..22: mol_type = other DNA
agtgactgactcccagtggtcc

SEQ ID NO: 25220 - DNA, 22 bp, synthetic construct
  misc_feature 1..22: note = chemically synthesized
  source 1..22: mol_type = other DNA
actcccagtggtccacatctgc

SEQ ID NO: 25221 - DNA, 22 bp, synthetic construct
  misc_feature 1..22: note = chemically synthesized
  source 1..22: mol_type = other DNA
ccagtggtccacatctgcatta

SEQ ID NO: 25222 - DNA, 22 bp, synthetic construct
  misc_feature 1..22: note = chemically synthesized
  source 1..22: mol_type = other DNA
cattatggactccaggaatcct

SEQ ID NO: 25223 - DNA, 22 bp, synthetic construct
  misc_feature 1..22: note = chemically synthesized
  source 1..22: mol_type = other DNA
tggactccaggaatcctagcca

SEQ ID NO: 25224 - DNA, 22 bp, synthetic construct
  misc_feature 1..22: note = chemically synthesized
  source 1..22: mol_type = other DNA
caggaatcctagccacaggaga

SEQ ID NO: 25225 - DNA, 22 bp, synthetic construct
  misc_feature 1..22: note = chemically synthesized
  source 1..22: mol_type = other DNA
gccacaggagagtcccttgacc

SEQ ID NO: 25226 - DNA, 22 bp, synthetic construct
  misc_feature 1..22: note = chemically synthesized
  source 1..22: mol_type = other DNA
gaccatgcaggccttgagacta

SEQ ID NO: 25227 - DNA, 22 bp, synthetic construct
  misc_feature 1..22: note = chemically synthesized
  source 1..22: mol_type = other DNA
accatgcaggccttgagactat

SEQ ID NO: 25228 - DNA, 22 bp, synthetic construct
  misc_feature 1..22: note = chemically synthesized
  source 1..22: mol_type = other DNA
gagactatcataaggaactgcc

SEQ ID NO: 25229 - DNA, 22 bp, synthetic construct
  misc_feature 1..22: note = chemically synthesized
  source 1..22: mol_type = other DNA
agactatcataaggaactgccc

SEQ ID NO: 25230 - DNA, 22 bp, synthetic construct
  misc_feature 1..22: note = chemically synthesized
  source 1..22: mol_type = other DNA
tcataaggaactgcccagcaat

SEQ ID NO: 25231 - DNA, 22 bp, synthetic construct
  misc_feature 1..22: note = chemically synthesized
  source 1..22: mol_type = other DNA
cccagcaatcgcacaaaggcat

SEQ ID NO: 25232 - DNA, 22 bp, synthetic construct
  misc_feature 1..22: note = chemically synthesized
  source 1..22: mol_type = other DNA
ctccagagaaggagctctcact

SEQ ID NO: 25233 - DNA, 22 bp, synthetic construct
  misc_feature 1..22: note = chemically synthesized
  source 1..22: mol_type = other DNA
cagagaaggagctctcactggg

SEQ ID NO: 25234 - DNA, 22 bp, synthetic construct
  misc_feature 1..22: note = chemically synthesized
  source 1..22: mol_type = other DNA
tcactgggtcccacccctgcca

SEQ ID NO: 25235 - DNA, 22 bp, synthetic construct
  misc_feature 1..22: note = chemically synthesized
  source 1..22: mol_type = other DNA
actgggtcccacccctgccatc

SEQ ID NO: 25236 - DNA, 22 bp, synthetic construct
  misc_feature 1..22: note = chemically synthesized
  source 1..22: mol_type = other DNA
ggtcccacccctgccatcccca

SEQ ID NO: 25237 - DNA, 22 bp, synthetic construct
  misc_feature 1..22: note = chemically synthesized
  source 1..22: mol_type = other DNA
ccatccccattactgagcagca

SEQ ID NO: 25238 - DNA, 22 bp, synthetic construct
  misc_feature 1..22: note = chemically synthesized
  source 1..22: mol_type = other DNA
ctgagcagcaaggtgccatttt

SEQ ID NO: 25239 - DNA, 22 bp, synthetic construct
  misc_feature 1..22: note = chemically synthesized
  source 1..22: mol_type = other DNA
agcagcaaggtgccattttgag

SEQ ID NO: 25240 - DNA, 22 bp, synthetic construct
  misc_feature 1..22: note = chemically synthesized
  source 1..22: mol_type = other DNA
tgagagcccaacacccaccaga

SEQ ID NO: 25241 - DNA, 22 bp, synthetic construct
  misc_feature 1..22: note = chemically synthesized
  source 1..22: mol_type = other DNA
gagagcccaacacccaccagat

SEQ ID NO: 25242 - DNA, 22 bp, synthetic construct
  misc_feature 1..22: note = chemically synthesized
  source 1..22: mol_type = other DNA
agagcccaacacccaccagatg

SEQ ID NO: 25243 - DNA, 22 bp, synthetic construct
  misc_feature 1..22: note = chemically synthesized
  source 1..22: mol_type = other DNA
ctcagaccccaacatcatctgc

SEQ ID NO: 25244 - DNA, 22 bp, synthetic construct
  misc_feature 1..22: note = chemically synthesized
  source 1..22: mol_type = other DNA
agaccccaacatcatctgcatc

SEQ ID NO: 25245 - DNA, 22 bp, synthetic construct
  misc_feature 1..22: note = chemically synthesized
  source 1..22: mol_type = other DNA
catctctacatccctgaagctc

SEQ ID NO: 25246 - DNA, 22 bp, synthetic construct
  misc_feature 1..22: note = chemically synthesized
  source 1..22: mol_type = other DNA
tacatccctgaagctctgctga

SEQ ID NO: 25247 - DNA, 22 bp, synthetic construct
  misc_feature 1..22: note = chemically synthesized
  source 1..22: mol_type = other DNA
catccctgaagctctgctgaca

SEQ ID NO: 25248 - DNA, 22 bp, synthetic construct
  misc_feature 1..22: note = chemically synthesized
  source 1..22: mol_type = other DNA
aagctctgctgacatcccccac

SEQ ID NO: 25249 - DNA, 22 bp, synthetic construct
  misc_feature 1..22: note = chemically synthesized
  source 1..22: mol_type = other DNA
tgctgacatcccccacccacag

SEQ ID NO: 25250 - DNA, 22 bp, synthetic construct
  misc_feature 1..22: note = chemically synthesized
  source 1..22: mol_type = other DNA
ctgacatcccccacccacagct

SEQ ID NO: 25251 - DNA, 22 bp, synthetic construct
  misc_feature 1..22: note = chemically synthesized
  source 1..22: mol_type = other DNA
acatcccccacccacagctgag

SEQ ID NO: 25252 - DNA, 22 bp, synthetic construct
  misc_feature 1..22: note = chemically synthesized
  source 1..22: mol_type = other DNA
agtgctactgctggctgctgtc

SEQ ID NO: 25253 - DNA, 22 bp, synthetic construct
  misc_feature 1..22: note = chemically synthesized
  source 1..22: mol_type = other DNA
ctgctggctgctgtcaccaggg

SEQ ID NO: 25254 - DNA, 22 bp, synthetic construct
  misc_feature 1..22: note = chemically synthesized
  source 1..22: mol_type = other DNA
ctggctgctgtcaccagggata

SEQ ID NO: 25255 - DNA, 22 bp, synthetic construct
  misc_feature 1..22: note = chemically synthesized
  source 1..22: mol_type = other DNA
gctgctgtcaccagggataaag

SEQ ID NO: 25256 - DNA, 22 bp, synthetic construct
  misc_feature 1..22: note = chemically synthesized
  source 1..22: mol_type = other DNA
ctgtcaccagggataaagtgtg

SEQ ID NO: 25257 - DNA, 22 bp, synthetic construct
  misc_feature 1..22: note = chemically synthesized
  source 1..22: mol_type = other DNA
tcaccagggataaagtgtgtca

SEQ ID NO: 25258 - DNA, 22 bp, synthetic construct
  misc_feature 1..22: note = chemically synthesized
  source 1..22: mol_type = other DNA
gaagtggactcccccaccccca

SEQ ID NO: 25259 - DNA, 22 bp, synthetic construct
  misc_feature 1..22: note = chemically synthesized
  source 1..22: mol_type = other DNA
ccccacccccagtagcagggct

SEQ ID NO: 25260 - DNA, 22 bp, synthetic construct
  misc_feature 1..22: note = chemically synthesized
  source 1..22: mol_type = other DNA
ctacacatttataagctcccta

SEQ ID NO: 25261 - DNA, 22 bp, synthetic construct
  misc_feature 1..22: note = chemically synthesized
  source 1..22: mol_type = other DNA
cacatttataagctccctaaga

SEQ ID NO: 25262 - DNA, 22 bp, synthetic construct
  misc_feature 1..22: note = chemically synthesized
  source 1..22: mol_type = other DNA
ataagctccctaagaaaatgct

SEQ ID NO: 25263 - DNA, 22 bp, synthetic construct
  misc_feature 1..22: note = chemically synthesized
  source 1..22: mol_type = other DNA
taagctccctaagaaaatgcta

SEQ ID NO: 25264 - DNA, 22 bp, synthetic construct
  misc_feature 1..22: note = chemically synthesized
  source 1..22: mol_type = other DNA
cctaagaaaatgctaccccact

SEQ ID NO: 25265 - DNA, 22 bp, synthetic construct
  misc_feature 1..22: note = chemically synthesized
  source 1..22: mol_type = other DNA
agaaaatgctaccccacttgca

SEQ ID NO: 25266 - DNA, 22 bp, synthetic construct
  misc_feature 1..22: note = chemically synthesized
  source 1..22: mol_type = other DNA
ccccacttgcagccaccatctg

SEQ ID NO: 25267 - DNA, 22 bp, synthetic construct
  misc_feature 1..22: note = chemically synthesized
  source 1..22: mol_type = other DNA
gcagccaccatctggggctgaa

SEQ ID NO: 25268 - DNA, 22 bp, synthetic construct
  misc_feature 1..22: note = chemically synthesized
  source 1..22: mol_type = other DNA
cagccaccatctggggctgaaa

SEQ ID NO: 25269 - DNA, 22 bp, synthetic construct
  misc_feature 1..22: note = chemically synthesized
  source 1..22: mol_type = other DNA
gggctgaaacacatgcccacca

SEQ ID NO: 25270 - DNA, 22 bp, synthetic construct
  misc_feature 1..22: note = chemically synthesized
  source 1..22: mol_type = other DNA
aaacacatgcccaccagcaacc

SEQ ID NO: 25271 - DNA, 22 bp, synthetic construct
  misc_feature 1..22: note = chemically synthesized
  source 1..22: mol_type = other DNA
atagctgctgccactgaaagca

SEQ ID NO: 25272 - DNA, 22 bp, synthetic construct
  misc_feature 1..22: note = chemically synthesized
  source 1..22: mol_type = other DNA
tagctgctgccactgaaagcaa

SEQ ID NO: 25273 - DNA, 22 bp, synthetic construct
  misc_feature 1..22: note = chemically synthesized
  source 1..22: mol_type = other DNA
ctgccactgaaagcaacacacc

SEQ ID NO: 25274 - DNA, 22 bp, synthetic construct
  misc_feature 1..22: note = chemically synthesized
  source 1..22: mol_type = other DNA
ccactgaaagcaacacaccccg

SEQ ID NO: 25275 - DNA, 22 bp, synthetic construct
  misc_feature 1..22: note = chemically synthesized
  source 1..22: mol_type = other DNA
aaagcaacacaccccgcacccc

SEQ ID NO: 25276 - DNA, 22 bp, synthetic construct
  misc_feature 1..22: note = chemically synthesized
  source 1..22: mol_type = other DNA
caagagcagggcaacaatgcag

SEQ ID NO: 25277 - DNA, 22 bp, synthetic construct
  misc_feature 1..22: note = chemically synthesized
  source 1..22: mol_type = other DNA
aagagcagggcaacaatgcagt

SEQ ID NO: 25278 - DNA, 22 bp, synthetic construct
  misc_feature 1..22: note = chemically synthesized
  source 1..22: mol_type = other DNA
ctaattcactcaggcattctgc

SEQ ID NO: 25279 - DNA, 22 bp, synthetic construct
  misc_feature 1..22: note = chemically synthesized
  source 1..22: mol_type = other DNA
attcactcaggcattctgctgg

SEQ ID NO: 25280 - DNA, 22 bp, synthetic construct
  misc_feature 1..22: note = chemically synthesized
  source 1..22: mol_type = other DNA
actcaggcattctgctgggggc

SEQ ID NO: 25281 - DNA, 22 bp, synthetic construct
  misc_feature 1..22: note = chemically synthesized
  source 1..22: mol_type = other DNA
aggcattctgctgggggcctga

SEQ ID NO: 25282 - DNA, 22 bp, synthetic construct
  misc_feature 1..22: note = chemically synthesized
  source 1..22: mol_type = other DNA
tgctgggggcctgaggatcact

SEQ ID NO: 25283 - DNA, 22 bp, synthetic construct
  misc_feature 1..22: note = chemically synthesized
  source 1..22: mol_type = other DNA
ctgggggcctgaggatcactcc

SEQ ID NO: 25284 - DNA, 22 bp, synthetic construct
  misc_feature 1..22: note = chemically synthesized
  source 1..22: mol_type = other DNA
ggggcctgaggatcactccact

SEQ ID NO: 25285 - DNA, 22 bp, synthetic construct
  misc_feature 1..22: note = chemically synthesized
  source 1..22: mol_type = other DNA
aggatcactccactccagccta

SEQ ID NO: 25286 - DNA, 22 bp, synthetic construct
  misc_feature 1..22: note = chemically synthesized
  source 1..22: mol_type = other DNA
cactccagcctatgatagccgg

SEQ ID NO: 25287 - DNA, 22 bp, synthetic construct
  misc_feature 1..22: note = chemically synthesized
  source 1..22: mol_type = other DNA
cagcctatgatagccggtgtcc

SEQ ID NO: 25288 - DNA, 22 bp, synthetic construct
  misc_feature 1..22: note = chemically synthesized
  source 1..22: mol_type = other DNA
tgatagccggtgtccacacaca

SEQ ID NO: 25289 - DNA, 22 bp, synthetic construct
  misc_feature 1..22: note = chemically synthesized
  source 1..22: mol_type = other DNA
agtggcctgaggtcaggaacac

SEQ ID NO: 25290 - DNA, 22 bp, synthetic construct
  misc_feature 1..22: note = chemically synthesized
  source 1..22: mol_type = other DNA
aggtcaggaacacccagcctgg

SEQ ID NO: 25291 - DNA, 22 bp, synthetic construct
  misc_feature 1..22: note = chemically synthesized
  source 1..22: mol_type = other DNA
gctttgccttcctcaatgccta

SEQ ID NO: 25292 - DNA, 22 bp, synthetic construct
  misc_feature 1..22: note = chemically synthesized
  source 1..22: mol_type = other DNA
tgccttcctcaatgcctaagca

SEQ ID NO: 25293 - DNA, 22 bp, synthetic construct
  misc_feature 1..22: note = chemically synthesized
  source 1..22: mol_type = other DNA
gccttcctcaatgcctaagcaa

SEQ ID NO: 25294 - DNA, 22 bp, synthetic construct
  misc_feature 1..22: note = chemically synthesized
  source 1..22: mol_type = other DNA
ccttcctcaatgcctaagcaag

SEQ ID NO: 25295 - DNA, 22 bp, synthetic construct
  misc_feature 1..22: note = chemically synthesized
  source 1..22: mol_type = other DNA
cctcaatgcctaagcaagttgt

SEQ ID NO: 25296 - DNA, 22 bp, synthetic construct
  misc_feature 1..22: note = chemically synthesized
  source 1..22: mol_type = other DNA
ctcaatgcctaagcaagttgtc

SEQ ID NO: 25297 - DNA, 22 bp, synthetic construct
  misc_feature 1..22: note = chemically synthesized
  source 1..22: mol_type = other DNA
aatgcctaagcaagttgtctgg

SEQ ID NO: 25298 - DNA, 22 bp, synthetic construct
  misc_feature 1..22: note = chemically synthesized
  source 1..22: mol_type = other DNA
agcaagttgtctgggaacccag

SEQ ID NO: 25299 - DNA, 22 bp, synthetic construct
  misc_feature 1..22: note = chemically synthesized
  source 1..22: mol_type = other DNA
tctgggaacccagagacagcct

SEQ ID NO: 25300 - DNA, 22 bp, synthetic construct
  misc_feature 1..22: note = chemically synthesized
  source 1..22: mol_type = other DNA
ggaacccagagacagccttgtg

SEQ ID NO: 25301 - DNA, 22 bp, synthetic construct
  misc_feature 1..22: note = chemically synthesized
  source 1..22: mol_type = other DNA
gtgccatccaccatgactggta

SEQ ID NO: 25302 - DNA, 22 bp, synthetic construct
  misc_feature 1..22: note = chemically synthesized
  source 1..22: mol_type = other DNA
tgccatccaccatgactggtac

SEQ ID NO: 25303 - DNA, 22 bp, synthetic construct
  misc_feature 1..22: note = chemically synthesized
  source 1..22: mol_type = other DNA
gtacctaagcaaccctcccaga

SEQ ID NO: 25304 - DNA, 22 bp, synthetic construct
  misc_feature 1..22: note = chemically synthesized
  source 1..22: mol_type = other DNA
agcaaccctcccagaagcctga

SEQ ID NO: 25305 - DNA, 22 bp, synthetic construct
  misc_feature 1..22: note = chemically synthesized
  source 1..22: mol_type = other DNA
ccagaagcctgatgatgggcct

SEQ ID NO: 25306 - DNA, 22 bp, synthetic construct
  misc_feature 1..22: note = chemically synthesized
  source 1..22: mol_type = other DNA
atgatgggcctacccaatctgc

SEQ ID NO: 25307 - DNA, 22 bp, synthetic construct
  misc_feature 1..22: note = chemically synthesized
  source 1..22: mol_type = other DNA
cccaatctgccactgccatcac

SEQ ID NO: 25308 - DNA, 22 bp, synthetic construct
  misc_feature 1..22: note = chemically synthesized
  source 1..22: mol_type = other DNA
ccactgccatcacaactggcac

SEQ ID NO: 25309 - DNA, 22 bp, synthetic construct
  misc_feature 1..22: note = chemically synthesized
  source 1..22: mol_type = other DNA
ccatcacaactggcacctcctg

SEQ ID NO: 25310 - DNA, 22 bp, synthetic construct
  misc_feature 1..22: note = chemically synthesized
  source 1..22: mol_type = other DNA
gcacctcctgcatgtgccacct

SEQ ID NO: 25311 - DNA, 22 bp, synthetic construct
  misc_feature 1..22: note = chemically synthesized
  source 1..22: mol_type = other DNA
ctgcatgtgccacctgtgggtc

SEQ ID NO: 25312 - DNA, 22 bp, synthetic construct
  misc_feature 1..22: note = chemically synthesized
  source 1..22: mol_type = other DNA
catgtgccacctgtgggtctga

SEQ ID NO: 25313 - DNA, 22 bp, synthetic construct
  misc_feature 1..22: note = chemically synthesized
  source 1..22: mol_type = other DNA
tgggtctgaagactggctcatt

SEQ ID NO: 25314 - DNA, 22 bp, synthetic construct
  misc_feature 1..22: note = chemically synthesized
  source 1..22: mol_type = other DNA
aagactggctcattcagccctt

SEQ ID NO: 25315 - DNA, 22 bp, synthetic construct
  misc_feature 1..22: note = chemically synthesized
  source 1..22: mol_type = other DNA
gctcattcagcccttgcagcca

SEQ ID NO: 25316 - DNA, 22 bp, synthetic construct
  misc_feature 1..22: note = chemically synthesized
  source 1..22: mol_type = other DNA
attcagcccttgcagccaccac

SEQ ID NO: 25317 - DNA, 22 bp, synthetic construct
  misc_feature 1..22: note = chemically synthesized
  source 1..22: mol_type = other DNA
agcccttgcagccaccaccaac

SEQ ID NO: 25318 - DNA, 22 bp, synthetic construct
  misc_feature 1..22: note = chemically synthesized
  source 1..22: mol_type = other DNA
gcagccaccaccaacaccagtg

SEQ ID NO: 25319 - DNA, 22 bp, synthetic construct
  misc_feature 1..22: note = chemically synthesized
  source 1..22: mol_type = other DNA
cagccaccaccaacaccagtgc

SEQ ID NO: 25320 - DNA, 22 bp, synthetic construct
  misc_feature 1..22: note = chemically synthesized
  source 1..22: mol_type = other DNA
cttgggagccagagggttgtcc

SEQ ID NO: 25321 - DNA, 22 bp, synthetic construct
  misc_feature 1..22: note = chemically synthesized
  source 1..22: mol_type = other DNA
gggagccagagggttgtcctgc

SEQ ID NO: 25322 - DNA, 22 bp, synthetic construct
  misc_feature 1..22: note = chemically synthesized
  source 1..22: mol_type = other DNA
ggagccagagggttgtcctgca

SEQ ID NO: 25323 - DNA, 22 bp, synthetic construct
  misc_feature 1..22: note = chemically synthesized
  source 1..22: mol_type = other DNA
tcctgcagttgctacagccatc

SEQ ID NO: 25324 - DNA, 22 bp, synthetic construct
  misc_feature 1..22: note = chemically synthesized
  source 1..22: mol_type = other DNA
cagttgctacagccatcaccca

SEQ ID NO: 25325 - DNA, 22 bp, synthetic construct
  misc_feature 1..22: note = chemically synthesized
  source 1..22: mol_type = other DNA
ctacagccatcacccacaccac

SEQ ID NO: 25326 - DNA, 22 bp, synthetic construct
  misc_feature 1..22: note = chemically synthesized
  source 1..22: mol_type = other DNA
cagccatcacccacaccacacc

SEQ ID NO: 25327 - DNA, 22 bp, synthetic construct
  misc_feature 1..22: note = chemically synthesized
  source 1..22: mol_type = other DNA
tccagaagcctgaggacccaca

SEQ ID NO: 25328 - DNA, 22 bp, synthetic construct
  misc_feature 1..22: note = chemically synthesized
  source 1..22: mol_type = other DNA
aggacccacacaccagcccagt

SEQ ID NO: 25329 - DNA, 22 bp, synthetic construct
  misc_feature 1..22: note = chemically synthesized
  source 1..22: mol_type = other DNA
ctatggccactactgacaccca

SEQ ID NO: 25330 - DNA, 22 bp, synthetic construct
  misc_feature 1..22: note = chemically synthesized
  source 1..22: mol_type = other DNA
tggccactactgacacccaagc

SEQ ID NO: 25331 - DNA, 22 bp, synthetic construct
  misc_feature 1..22: note = chemically synthesized
  source 1..22: mol_type = other DNA
ctgacacccaagcaaactgcct

SEQ ID NO: 25332 - DNA, 22 bp, synthetic construct
  misc_feature 1..22: note = chemically synthesized
  source 1..22: mol_type = other DNA
acacccaagcaaactgcctgaa

SEQ ID NO: 25333 - DNA, 22 bp, synthetic construct
  misc_feature 1..22: note = chemically synthesized
  source 1..22: mol_type = other DNA
cctgaaggccaaagaatcaacc

SEQ ID NO: 25334 - DNA, 22 bp, synthetic construct
  misc_feature 1..22: note = chemically synthesized
  source 1..22: mol_type = other DNA
aaggccaaagaatcaacccaac

SEQ ID NO: 25335 - DNA, 22 bp, synthetic construct
  misc_feature 1..22: note = chemically synthesized
  source 1..22: mol_type = other DNA
gactcattaccatcagtgccaa

SEQ ID NO: 25336 - DNA, 22 bp, synthetic construct
  misc_feature 1..22: note = chemically synthesized
  source 1..22: mol_type = other DNA
attaccatcagtgccaatgtac

SEQ ID NO: 25337 - DNA, 22 bp, synthetic construct
  misc_feature 1..22: note = chemically synthesized
  source 1..22: mol_type = other DNA
ccatcagtgccaatgtacacag

SEQ ID NO: 25338 - DNA, 22 bp, synthetic construct
  misc_feature 1..22: note = chemically synthesized
  source 1..22: mol_type = other DNA
ggcccaccaccaccactggggc

SEQ ID NO: 25339 - DNA, 22 bp, synthetic construct
  misc_feature 1..22: note = chemically synthesized
  source 1..22: mol_type = other DNA
gggccaaggactggcccacttg

SEQ ID NO: 25340 - DNA, 22 bp, synthetic construct
  misc_feature 1..22: note = chemically synthesized
  source 1..22: mol_type = other DNA
gcccacttgatattcttgtctc

SEQ ID NO: 25341 - DNA, 22 bp, synthetic construct
  misc_feature 1..22: note = chemically synthesized
  source 1..22: mol_type = other DNA
gatattcttgtctccagcacaa

SEQ ID NO: 25342 - DNA, 22 bp, synthetic construct
  misc_feature 1..22: note = chemically synthesized
  source 1..22: mol_type = other DNA
atattcttgtctccagcacaac

SEQ ID NO: 25343 - DNA, 22 bp, synthetic construct
  misc_feature 1..22: note = chemically synthesized
  source 1..22: mol_type = other DNA
ttgtctccagcacaacctcatc

SEQ ID NO: 25344 - DNA, 22 bp, synthetic construct
  misc_feature 1..22: note = chemically synthesized
  source 1..22: mol_type = other DNA
gtctccagcacaacctcatcac

SEQ ID NO: 25345 - DNA, 22 bp, synthetic construct
  misc_feature 1..22: note = chemically synthesized
  source 1..22: mol_type = other DNA
tctccagcacaacctcatcacc

SEQ ID NO: 25346 - DNA, 22 bp, synthetic construct
  misc_feature 1..22: note = chemically synthesized
  source 1..22: mol_type = other DNA
cagcacaacctcatcaccacct

SEQ ID NO: 25347 - DNA, 22 bp, synthetic construct
  misc_feature 1..22: note = chemically synthesized
  source 1..22: mol_type = other DNA
atcaccaccttcactaacaaat

SEQ ID NO: 25348 - DNA, 22 bp, synthetic construct
  misc_feature 1..22: note = chemically synthesized
  source 1..22: mol_type = other DNA
cactaacaaatgcaccctaagc

SEQ ID NO: 25349 - DNA, 22 bp, synthetic construct
  misc_feature 1..22: note = chemically synthesized
  source 1..22: mol_type = other DNA
actaacaaatgcaccctaagcc

SEQ ID NO: 25350 - DNA, 22 bp, synthetic construct
  misc_feature 1..22: note = chemically synthesized
  source 1..22: mol_type = other DNA
acaaatgcaccctaagccactg

SEQ ID NO: 25351 - DNA, 22 bp, synthetic construct
  misc_feature 1..22: note = chemically synthesized
  source 1..22: mol_type = other DNA
agccactgaaaaaatcacagac

SEQ ID NO: 25352 - DNA, 22 bp, synthetic construct
  misc_feature 1..22: note = chemically synthesized
  source 1..22: mol_type = other DNA
aaaaaatcacagacactgatga

SEQ ID NO: 25353 - DNA, 22 bp, synthetic construct
  misc_feature 1..22: note = chemically synthesized
  source 1..22: mol_type = other DNA
atgatactgttggcagctgaaa

SEQ ID NO: 25354 - DNA, 22 bp, synthetic construct
  misc_feature 1..22: note = chemically synthesized
  source 1..22: mol_type = other DNA
ttggcagctgaaaaaaaataat

SEQ ID NO: 25355 - DNA, 22 bp, synthetic construct
  misc_feature 1..22: note = chemically synthesized
  source 1..22: mol_type = other DNA
gcagctgaaaaaaaataatatg

SEQ ID NO: 25356 - DNA, 22 bp, synthetic construct
  misc_feature 1..22: note = chemically synthesized
  source 1..22: mol_type = other DNA
aaaaaaaataatatgaagacta

SEQ ID NO: 25357 - DNA, 22 bp, synthetic construct
  misc_feature 1..22: note = chemically synthesized
  source 1..22: mol_type = other DNA
tgctgctgtatgcacctagaaa

SEQ ID NO: 25358 - DNA, 22 bp, synthetic construct
  misc_feature 1..22: note = chemically synthesized
  source 1..22: mol_type = other DNA
ctgtatgcacctagaaatcaaa

SEQ ID NO: 25359 - DNA, 22 bp, synthetic construct
  misc_feature 1..22: note = chemically synthesized
  source 1..22: mol_type = other DNA
tatgcacctagaaatcaaaatc

SEQ ID NO: 25360 - DNA, 22 bp, synthetic construct
  misc_feature 1..22: note = chemically synthesized
  source 1..22: mol_type = other DNA
gaaatcaaaatcaaagtgccct

SEQ ID NO: 25361 - DNA, 22 bp, synthetic construct
  misc_feature 1..22: note = chemically synthesized
  source 1..22: mol_type = other DNA
ctcaatcaacaccaagatacat

SEQ ID NO: 25362 - DNA, 22 bp, synthetic construct
  misc_feature 1..22: note = chemically synthesized
  source 1..22: mol_type = other DNA
aatcaacaccaagatacatctt

SEQ ID NO: 25363 - DNA, 22 bp, synthetic construct
  misc_feature 1..22: note = chemically synthesized
  source 1..22: mol_type = other DNA
cagaaaaaagtcttcccctaca

SEQ ID NO: 25364 - DNA, 22 bp, synthetic construct
  misc_feature 1..22: note = chemically synthesized
  source 1..22: mol_type = other DNA
agaaaaaagtcttcccctacaa

SEQ ID NO: 25365 - DNA, 22 bp, synthetic construct
  misc_feature 1..22: note = chemically synthesized
  source 1..22: mol_type = other DNA
cccctacaaaaacaaatttaca

SEQ ID NO: 25366 - DNA, 22 bp, synthetic construct
  misc_feature 1..22: note = chemically synthesized
  source 1..22: mol_type = other DNA
ccctacaaaaacaaatttacaa

SEQ ID NO: 25367 - DNA, 22 bp, synthetic construct
  misc_feature 1..22: note = chemically synthesized
  source 1..22: mol_type = other DNA
caaaaacaaatttacaaaactg

SEQ ID NO: 25368 - DNA, 22 bp, synthetic construct
  misc_feature 1..22: note = chemically synthesized
  source 1..22: mol_type = other DNA
acaaaactggaagcagcaatca

SEQ ID NO: 25369 - DNA, 22 bp, synthetic construct
  misc_feature 1..22: note = chemically synthesized
  source 1..22: mol_type = other DNA
caaaactggaagcagcaatcat

SEQ ID NO: 25370 - DNA, 22 bp, synthetic construct
  misc_feature 1..22: note = chemically synthesized
  source 1..22: mol_type = other DNA
gaagcagcaatcattacaccag

SEQ ID NO: 25371 - DNA, 22 bp, synthetic construct
  misc_feature 1..22: note = chemically synthesized
  source 1..22: mol_type = other DNA
caccagatgcagagatatcaat

SEQ ID NO: 25372 - DNA, 22 bp, synthetic construct
  misc_feature 1..22: note = chemically synthesized
  source 1..22: mol_type = other DNA
ccaaaggaatttaataattctt

SEQ ID NO: 25373 - DNA, 22 bp, synthetic construct
  misc_feature 1..22: note = chemically synthesized
  source 1..22: mol_type = other DNA
caaaggaatttaataattcttc

SEQ ID NO: 25374 - DNA, 22 bp, synthetic construct
  misc_feature 1..22: note = chemically synthesized
  source 1..22: mol_type = other DNA
aataattcttcagcaacataag

SEQ ID NO: 25375 - DNA, 22 bp, synthetic construct
  misc_feature 1..22: note = chemically synthesized
  source 1..22: mol_type = other DNA
ataattcttcagcaacataagc

SEQ ID NO: 25376 - DNA, 22 bp, synthetic construct
  misc_feature 1..22: note = chemically synthesized
  source 1..22: mol_type = other DNA
ttcagcaacataagccagtgga

SEQ ID NO: 25377 - DNA, 22 bp, synthetic construct
  misc_feature 1..22: note = chemically synthesized
  source 1..22: mol_type = other DNA
cagcaacataagccagtggaaa

SEQ ID NO: 25378 - DNA, 22 bp, synthetic construct
  misc_feature 1..22: note = chemically synthesized
  source 1..22: mol_type = other DNA
agcaacataagccagtggaaaa

SEQ ID NO: 25379 - DNA, 22 bp, synthetic construct
  misc_feature 1..22: note = chemically synthesized
  source 1..22: mol_type = other DNA
ataaaattctggaaaaaagaat

SEQ ID NO: 25380 - DNA, 22 bp, synthetic construct
  misc_feature 1..22: note = chemically synthesized
  source 1..22: mol_type = other DNA
taaaattctggaaaaaagaatc

SEQ ID NO: 25381 - DNA, 22 bp, synthetic construct
  misc_feature 1..22: note = chemically synthesized
  source 1..22: mol_type = other DNA
tggaaaaaagaatccaaaatgt

SEQ ID NO: 25382 - DNA, 22 bp, synthetic construct
  misc_feature 1..22: note = chemically synthesized
  source 1..22: mol_type = other DNA
gaaaaaagaatccaaaatgttg

SEQ ID NO: 25383 - DNA, 22 bp, synthetic construct
  misc_feature 1..22: note = chemically synthesized
  source 1..22: mol_type = other DNA
atattaaggaagctcagtgaga

SEQ ID NO: 25384 - DNA, 22 bp, synthetic construct
  misc_feature 1..22: note = chemically synthesized
  source 1..22: mol_type = other DNA
aggaagctcagtgagacacaag

SEQ ID NO: 25385 - DNA, 22 bp, synthetic construct
  misc_feature 1..22: note = chemically synthesized
  source 1..22: mol_type = other DNA
agtgagacacaagagaactcag

SEQ ID NO: 25386 - DNA, 22 bp, synthetic construct
  misc_feature 1..22: note = chemically synthesized
  source 1..22: mol_type = other DNA
agataaacaataaaaagaaatc

SEQ ID NO: 25387 - DNA, 22 bp, synthetic construct
  misc_feature 1..22: note = chemically synthesized
  source 1..22: mol_type = other DNA
aggatatgaatgagaaatttac

SEQ ID NO: 25388 - DNA, 22 bp, synthetic construct
  misc_feature 1..22: note = chemically synthesized
  source 1..22: mol_type = other DNA
acccaagagatagatacaacaa

SEQ ID NO: 25389 - DNA, 22 bp, synthetic construct
  misc_feature 1..22: note = chemically synthesized
  source 1..22: mol_type = other DNA
cccaagagatagatacaacaag

SEQ ID NO: 25390 - DNA, 22 bp, synthetic construct
  misc_feature 1..22: note = chemically synthesized
  source 1..22: mol_type = other DNA
tgtaactgaagagtttattgaa

SEQ ID NO: 25391 - DNA, 22 bp, synthetic construct
  misc_feature 1..22: note = chemically synthesized
  source 1..22: mol_type = other DNA
taactgaagagtttattgaaag

SEQ ID NO: 25392 - DNA, 22 bp, synthetic construct
  misc_feature 1..22: note = chemically synthesized
  source 1..22: mol_type = other DNA
aagagtttattgaaagaaatac

SEQ ID NO: 25393 - DNA, 22 bp, synthetic construct
  misc_feature 1..22: note = chemically synthesized
  source 1..22: mol_type = other DNA
attgaaagaaatacaaaataca

SEQ ID NO: 25394 - DNA, 22 bp, synthetic construct
  misc_feature 1..22: note = chemically synthesized
  source 1..22: mol_type = other DNA
ttgaaagaaatacaaaatacat

SEQ ID NO: 25395 - DNA, 22 bp, synthetic construct
  misc_feature 1..22: note = chemically synthesized
  source 1..22: mol_type = other DNA
aaagaaatacaaaatacattca

SEQ ID NO: 25396 - DNA, 22 bp, synthetic construct
  misc_feature 1..22: note = chemically synthesized
  source 1..22: mol_type = other DNA
aaaaacttcaacaatagatcag

SEQ ID NO: 25397 - DNA, 22 bp, synthetic construct
  misc_feature 1..22: note = chemically synthesized
  source 1..22: mol_type = other DNA
caacaatagatcagatcaagca

SEQ ID NO: 25398 - DNA, 22 bp, synthetic construct
  misc_feature 1..22: note = chemically synthesized
  source 1..22: mol_type = other DNA
aacaatagatcagatcaagcag

SEQ ID NO: 25399 - DNA, 22 bp, synthetic construct
  misc_feature 1..22: note = chemically synthesized
  source 1..22: mol_type = other DNA
cagaacttgaagacaggtcttt

SEQ ID NO: 25400 - DNA, 22 bp, synthetic construct
  misc_feature 1..22: note = chemically synthesized
  source 1..22: mol_type = other DNA
agaacttgaagacaggtctttt

SEQ ID NO: 25401 - DNA, 22 bp, synthetic construct
  misc_feature 1..22: note = chemically synthesized
  source 1..22: mol_type = other DNA
gaagacaggtcttttaaaatta

SEQ ID NO: 25402 - DNA, 22 bp, synthetic construct
  misc_feature 1..22: note = chemically synthesized
  source 1..22: mol_type = other DNA
aagacaggtcttttaaaattag

SEQ ID NO: 25403 - DNA, 22 bp, synthetic construct
  misc_feature 1..22: note = chemically synthesized
  source 1..22: mol_type = other DNA
ttaaaattagctggtcaaatga

SEQ ID NO: 25404 - DNA, 22 bp, synthetic construct
  misc_feature 1..22: note = chemically synthesized
  source 1..22: mol_type = other DNA
taaaattagctggtcaaatgat

SEQ ID NO: 25405 - DNA, 22 bp, synthetic construct
  misc_feature 1..22: note = chemically synthesized
  source 1..22: mol_type = other DNA
aaaattagctggtcaaatgata

SEQ ID NO: 25406 - DNA, 22 bp, synthetic construct
  misc_feature 1..22: note = chemically synthesized
  source 1..22: mol_type = other DNA
aaattagctggtcaaatgatag

SEQ ID NO: 25407 - DNA, 22 bp, synthetic construct
  misc_feature 1..22: note = chemically synthesized
  source 1..22: mol_type = other DNA
gctggtcaaatgatagaaagga

SEQ ID NO: 25408 - DNA, 22 bp, synthetic construct
  misc_feature 1..22: note = chemically synthesized
  source 1..22: mol_type = other DNA
gtcaaatgatagaaaggaaaaa

SEQ ID NO: 25409 - DNA, 22 bp, synthetic construct
  misc_feature 1..22: note = chemically synthesized
  source 1..22: mol_type = other DNA
taaagtgaacaaatattcaaat

SEQ ID NO: 25410 - DNA, 22 bp, synthetic construct
  misc_feature 1..22: note = chemically synthesized
  source 1..22: mol_type = other DNA
aaatttgcagtttcccagaagg

SEQ ID NO: 25411 - DNA, 22 bp, synthetic construct
  misc_feature 1..22: note = chemically synthesized
  source 1..22: mol_type = other DNA
gcagtttcccagaaggtaaaga

SEQ ID NO: 25412 - DNA, 22 bp, synthetic construct
  misc_feature 1..22: note = chemically synthesized
  source 1..22: mol_type = other DNA
cagtttcccagaaggtaaagag

SEQ ID NO: 25413 - DNA, 22 bp, synthetic construct
  misc_feature 1..22: note = chemically synthesized
  source 1..22: mol_type = other DNA
cccagaaggtaaagagaacatg

SEQ ID NO: 25414 - DNA, 22 bp, synthetic construct
  misc_feature 1..22: note = chemically synthesized
  source 1..22: mol_type = other DNA
ccagaaggtaaagagaacatga

SEQ ID NO: 25415 - DNA, 22 bp, synthetic construct
  misc_feature 1..22: note = chemically synthesized
  source 1..22: mol_type = other DNA
cgtaacaacacaatagctgaaa

SEQ ID NO: 25416 - DNA, 22 bp, synthetic construct
  misc_feature 1..22: note = chemically synthesized
  source 1..22: mol_type = other DNA
aaaacttgtcaagtctagcaag

SEQ ID NO: 25417 - DNA, 22 bp, synthetic construct
  misc_feature 1..22: note = chemically synthesized
  source 1..22: mol_type = other DNA
gtcaagtctagcaagaaatgta

SEQ ID NO: 25418 - DNA, 22 bp, synthetic construct
  misc_feature 1..22: note = chemically synthesized
  source 1..22: mol_type = other DNA
tcaagtctagcaagaaatgtag

SEQ ID NO: 25419 - DNA, 22 bp, synthetic construct
  misc_feature 1..22: note = chemically synthesized
  source 1..22: mol_type = other DNA
gcaagaaatgtagacatccaga

SEQ ID NO: 25420 - DNA, 22 bp, synthetic construct
  misc_feature 1..22: note = chemically synthesized
  source 1..22: mol_type = other DNA
ccaaataatataatgcaaaaag

SEQ ID NO: 25421 - DNA, 22 bp, synthetic construct
  misc_feature 1..22: note = chemically synthesized
  source 1..22: mol_type = other DNA
ttctccacagcacattatagtc

SEQ ID NO: 25422 - DNA, 22 bp, synthetic construct
  misc_feature 1..22: note = chemically synthesized
  source 1..22: mol_type = other DNA
ctccacagcacattatagtcaa

SEQ ID NO: 25423 - DNA, 22 bp, synthetic construct
  misc_feature 1..22: note = chemically synthesized
  source 1..22: mol_type = other DNA
tccacagcacattatagtcaaa

SEQ ID NO: 25424 - DNA, 22 bp, synthetic construct
  misc_feature 1..22: note = chemically synthesized
  source 1..22: mol_type = other DNA
cacagcacattatagtcaaact

SEQ ID NO: 25425 - DNA, 22 bp, synthetic construct
  misc_feature 1..22: note = chemically synthesized
  source 1..22: mol_type = other DNA
tagtcaaactgtcaaaagccaa

SEQ ID NO: 25426 - DNA, 22 bp, synthetic construct
  misc_feature 1..22: note = chemically synthesized
  source 1..22: mol_type = other DNA
tcaaaagccaaagagtaagaac

SEQ ID NO: 25427 - DNA, 22 bp, synthetic construct
  misc_feature 1..22: note = chemically synthesized
  source 1..22: mol_type = other DNA
taaaacagcaagcaaaatgtct

SEQ ID NO: 25428 - DNA, 22 bp, synthetic construct
  misc_feature 1..22: note = chemically synthesized
  source 1..22: mol_type = other DNA
aaacagcaagcaaaatgtctag

SEQ ID NO: 25429 - DNA, 22 bp, synthetic construct
  misc_feature 1..22: note = chemically synthesized
  source 1..22: mol_type = other DNA
gtcacttataagggaacttcca

SEQ ID NO: 25430 - DNA, 22 bp, synthetic construct
  misc_feature 1..22: note = chemically synthesized
  source 1..22: mol_type = other DNA
ataagggaacttccacaagatt

SEQ ID NO: 25431 - DNA, 22 bp, synthetic construct
  misc_feature 1..22: note = chemically synthesized
  source 1..22: mol_type = other DNA
taagggaacttccacaagatta

SEQ ID NO: 25432 - DNA, 22 bp, synthetic construct
  misc_feature 1..22: note = chemically synthesized
  source 1..22: mol_type = other DNA
ccacaagattaacagattaaca

SEQ ID NO: 25433 - DNA, 22 bp, synthetic construct
  misc_feature 1..22: note = chemically synthesized
  source 1..22: mol_type = other DNA
cacaagattaacagattaacag

SEQ ID NO: 25434 - DNA, 22 bp, synthetic construct
  misc_feature 1..22: note = chemically synthesized
  source 1..22: mol_type = other DNA
acagattaacagcagatttctc

SEQ ID NO: 25435 - DNA, 22 bp, synthetic construct
  misc_feature 1..22: note = chemically synthesized
  source 1..22: mol_type = other DNA
acagcagatttctcagcagaaa

SEQ ID NO: 25436 - DNA, 22 bp, synthetic construct
  misc_feature 1..22: note = chemically synthesized
  source 1..22: mol_type = other DNA
ctcagcagaaacctcacaggcc

SEQ ID NO: 25437 - DNA, 22 bp, synthetic construct
  misc_feature 1..22: note = chemically synthesized
  source 1..22: mol_type = other DNA
tcagcagaaacctcacaggcca

SEQ ID NO: 25438 - DNA, 22 bp, synthetic construct
  misc_feature 1..22: note = chemically synthesized
  source 1..22: mol_type = other DNA
agcagaaacctcacaggccagg

SEQ ID NO: 25439 - DNA, 22 bp, synthetic construct
  misc_feature 1..22: note = chemically synthesized
  source 1..22: mol_type = other DNA
acaggccaggagaagatgggat

SEQ ID NO: 25440 - DNA, 22 bp, synthetic construct
  misc_feature 1..22: note = chemically synthesized
  source 1..22: mol_type = other DNA
aaaatagtgaaagaaaaaaatg

SEQ ID NO: 25441 - DNA, 22 bp, synthetic construct
  misc_feature 1..22: note = chemically synthesized
  source 1..22: mol_type = other DNA
tacccagcaacattgttcttca

SEQ ID NO: 25442 - DNA, 22 bp, synthetic construct
  misc_feature 1..22: note = chemically synthesized
  source 1..22: mol_type = other DNA
ttcttcaaaaatgaaggataaa

SEQ ID NO: 25443 - DNA, 22 bp, synthetic construct
  misc_feature 1..22: note = chemically synthesized
  source 1..22: mol_type = other DNA
ttcaaaaatgaaggataaataa

SEQ ID NO: 25444 - DNA, 22 bp, synthetic construct
  misc_feature 1..22: note = chemically synthesized
  source 1..22: mol_type = other DNA
caaaaatgaaggataaataaaa

SEQ ID NO: 25445 - DNA, 22 bp, synthetic construct
  misc_feature 1..22: note = chemically synthesized
  source 1..22: mol_type = other DNA
aaaaatgaaggataaataaaat

SEQ ID NO: 25446 - DNA, 22 bp, synthetic construct
  misc_feature 1..22: note = chemically synthesized
  source 1..22: mol_type = other DNA
ttctgggcaagaaaaatttgaa

SEQ ID NO: 25447 - DNA, 22 bp, synthetic construct
  misc_feature 1..22: note = chemically synthesized
  source 1..22: mol_type = other DNA
tctgggcaagaaaaatttgaag

SEQ ID NO: 25448 - DNA, 22 bp, synthetic construct
  misc_feature 1..22: note = chemically synthesized
  source 1..22: mol_type = other DNA
ctgggcaagaaaaatttgaagg

SEQ ID NO: 25449 - DNA, 22 bp, synthetic construct
  misc_feature 1..22: note = chemically synthesized
  source 1..22: mol_type = other DNA
tgggcaagaaaaatttgaagga

SEQ ID NO: 25450 - DNA, 22 bp, synthetic construct
  misc_feature 1..22: note = chemically synthesized
  source 1..22: mol_type = other DNA
ggcaagaaaaatttgaaggaat

SEQ ID NO: 25451 - DNA, 22 bp, synthetic construct
  misc_feature 1..22: note = chemically synthesized
  source 1..22: mol_type = other DNA
gaaggaattcactatcactaga

SEQ ID NO: 25452 - DNA, 22 bp, synthetic construct
  misc_feature 1..22: note = chemically synthesized
  source 1..22: mol_type = other DNA
aaggaattcactatcactagac

SEQ ID NO: 25453 - DNA, 22 bp, synthetic construct
  misc_feature 1..22: note = chemically synthesized
  source 1..22: mol_type = other DNA
actatcactagactggctttac

SEQ ID NO: 25454 - DNA, 22 bp, synthetic construct
  misc_feature 1..22: note = chemically synthesized
  source 1..22: mol_type = other DNA
tcactagactggctttacaaga

SEQ ID NO: 25455 - DNA, 22 bp, synthetic construct
  misc_feature 1..22: note = chemically synthesized
  source 1..22: mol_type = other DNA
gactggctttacaagaaatatt

SEQ ID NO: 25456 - DNA, 22 bp, synthetic construct
  misc_feature 1..22: note = chemically synthesized
  source 1..22: mol_type = other DNA
gctttacaagaaatatttaagg

SEQ ID NO: 25457 - DNA, 22 bp, synthetic construct
  misc_feature 1..22: note = chemically synthesized
  source 1..22: mol_type = other DNA
tacaagaaatatttaagggagt

SEQ ID NO: 25458 - DNA, 22 bp, synthetic construct
  misc_feature 1..22: note = chemically synthesized
  source 1..22: mol_type = other DNA
acaagaaatatttaagggagtc

SEQ ID NO: 25459 - DNA, 22 bp, synthetic construct
  misc_feature 1..22: note = chemically synthesized
  source 1..22: mol_type = other DNA
caagaaatatttaagggagtcc

SEQ ID NO: 25460 - DNA, 22 bp, synthetic construct
  misc_feature 1..22: note = chemically synthesized
  source 1..22: mol_type = other DNA
aagggagtcctacacatgaaag

SEQ ID NO: 25461 - DNA, 22 bp, synthetic construct
  misc_feature 1..22: note = chemically synthesized
  source 1..22: mol_type = other DNA
agggagtcctacacatgaaagt

SEQ ID NO: 25462 - DNA, 22 bp, synthetic construct
  misc_feature 1..22: note = chemically synthesized
  source 1..22: mol_type = other DNA
cacatgaaagtgacaggacact

SEQ ID NO: 25463 - DNA, 22 bp, synthetic construct
  misc_feature 1..22: note = chemically synthesized
  source 1..22: mol_type = other DNA
ccattatgaagacacacaaagg

SEQ ID NO: 25464 - DNA, 22 bp, synthetic construct
  misc_feature 1..22: note = chemically synthesized
  source 1..22: mol_type = other DNA
tgaagacacacaaaggtataca

SEQ ID NO: 25465 - DNA, 22 bp, synthetic construct
  misc_feature 1..22: note = chemically synthesized
  source 1..22: mol_type = other DNA
actggtagagcaaaacacaaat

SEQ ID NO: 25466 - DNA, 22 bp, synthetic construct
  misc_feature 1..22: note = chemically synthesized
  source 1..22: mol_type = other DNA
gtagagcaaaacacaaataaag

SEQ ID NO: 25467 - DNA, 22 bp, synthetic construct
  misc_feature 1..22: note = chemically synthesized
  source 1..22: mol_type = other DNA
aaacgttaccactacagaaaat

SEQ ID NO: 25468 - DNA, 22 bp, synthetic construct
  misc_feature 1..22: note = chemically synthesized
  source 1..22: mol_type = other DNA
ccactacagaaaatcaccaaac

SEQ ID NO: 25469 - DNA, 22 bp, synthetic construct
  misc_feature 1..22: note = chemically synthesized
  source 1..22: mol_type = other DNA
cagaaaatcaccaaaccacaat

SEQ ID NO: 25470 - DNA, 22 bp, synthetic construct
  misc_feature 1..22: note = chemically synthesized
  source 1..22: mol_type = other DNA
aaaaaaaaacaaaacaaccagg

SEQ ID NO: 25471 - DNA, 22 bp, synthetic construct
  misc_feature 1..22: note = chemically synthesized
  source 1..22: mol_type = other DNA
acaaaatggcaggaataagctc

SEQ ID NO: 25472 - DNA, 22 bp, synthetic construct
  misc_feature 1..22: note = chemically synthesized
  source 1..22: mol_type = other DNA
tcacatgtcaataatagccttg

SEQ ID NO: 25473 - DNA, 22 bp, synthetic construct
  misc_feature 1..22: note = chemically synthesized
  source 1..22: mol_type = other DNA
acatgtcaataatagccttgca

SEQ ID NO: 25474 - DNA, 22 bp, synthetic construct
  misc_feature 1..22: note = chemically synthesized
  source 1..22: mol_type = other DNA
gcatgtaaatggattaaattgt

SEQ ID NO: 25475 - DNA, 22 bp, synthetic construct
  misc_feature 1..22: note = chemically synthesized
  source 1..22: mol_type = other DNA
catgtaaatggattaaattgtt

SEQ ID NO: 25476 - DNA, 22 bp, synthetic construct
  misc_feature 1..22: note = chemically synthesized
  source 1..22: mol_type = other DNA
aattgttacttgaaagatatag

SEQ ID NO: 25477 - DNA, 22 bp, synthetic construct
  misc_feature 1..22: note = chemically synthesized
  source 1..22: mol_type = other DNA
ttacttgaaagatatagactgg

SEQ ID NO: 25478 - DNA, 22 bp, synthetic construct
  misc_feature 1..22: note = chemically synthesized
  source 1..22: mol_type = other DNA
cttgaaagatatagactggcta

SEQ ID NO: 25479 - DNA, 22 bp, synthetic construct
  misc_feature 1..22: note = chemically synthesized
  source 1..22: mol_type = other DNA
gaaagatatagactggctaaat

SEQ ID NO: 25480 - DNA, 22 bp, synthetic construct
  misc_feature 1..22: note = chemically synthesized
  source 1..22: mol_type = other DNA
aaagatatagactggctaaata

SEQ ID NO: 25481 - DNA, 22 bp, synthetic construct
  misc_feature 1..22: note = chemically synthesized
  source 1..22: mol_type = other DNA
gctaaatagatttaaaacaaaa

SEQ ID NO: 25482 - DNA, 22 bp, synthetic construct
  misc_feature 1..22: note = chemically synthesized
  source 1..22: mol_type = other DNA
aatagatttaaaacaaaaatat

SEQ ID NO: 25483 - DNA, 22 bp, synthetic construct
  misc_feature 1..22: note = chemically synthesized
  source 1..22: mol_type = other DNA
aaaacaaaaatatgacccagtt

SEQ ID NO: 25484 - DNA, 22 bp, synthetic construct
  misc_feature 1..22: note = chemically synthesized
  source 1..22: mol_type = other DNA
aaacaaaaatatgacccagttg

SEQ ID NO: 25485 - DNA, 22 bp, synthetic construct
  misc_feature 1..22: note = chemically synthesized
  source 1..22: mol_type = other DNA
taagctgcctataagaaactta

SEQ ID NO: 25486 - DNA, 22 bp, synthetic construct
  misc_feature 1..22: note = chemically synthesized
  source 1..22: mol_type = other DNA
cctataagaaacttatctcact

SEQ ID NO: 25487 - DNA, 22 bp, synthetic construct
  misc_feature 1..22: note = chemically synthesized
  source 1..22: mol_type = other DNA
taagaaacttatctcacttgta

SEQ ID NO: 25488 - DNA, 22 bp, synthetic construct
  misc_feature 1..22: note = chemically synthesized
  source 1..22: mol_type = other DNA
atctcacttgtaaagataaata

SEQ ID NO: 25489 - DNA, 22 bp, synthetic construct
  misc_feature 1..22: note = chemically synthesized
  source 1..22: mol_type = other DNA
tctcacttgtaaagataaatat

SEQ ID NO: 25490 - DNA, 22 bp, synthetic construct
  misc_feature 1..22: note = chemically synthesized
  source 1..22: mol_type = other DNA
acttgtaaagataaatatagac

SEQ ID NO: 25491 - DNA, 22 bp, synthetic construct
  misc_feature 1..22: note = chemically synthesized
  source 1..22: mol_type = other DNA
gtaaagataaatatagactgaa

SEQ ID NO: 25492 - DNA, 22 bp, synthetic construct
  misc_feature 1..22: note = chemically synthesized
  source 1..22: mol_type = other DNA
taaagataaatatagactgaaa

SEQ ID NO: 25493 - DNA, 22 bp, synthetic construct
  misc_feature 1..22: note = chemically synthesized
  source 1..22: mol_type = other DNA
aaagtaaaaagatgaaagatct

SEQ ID NO: 25494 - DNA, 22 bp, synthetic construct
  misc_feature 1..22: note = chemically synthesized
  source 1..22: mol_type = other DNA
ccatacaaagagaaaccaaaaa

SEQ ID NO: 25495 - DNA, 22 bp, synthetic construct
  misc_feature 1..22: note = chemically synthesized
  source 1..22: mol_type = other DNA
catacaaagagaaaccaaaaat

SEQ ID NO: 25496 - DNA, 22 bp, synthetic construct
  misc_feature 1..22: note = chemically synthesized
  source 1..22: mol_type = other DNA
tacctataacagataaaattga

SEQ ID NO: 25497 - DNA, 22 bp, synthetic construct
  misc_feature 1..22: note = chemically synthesized
  source 1..22: mol_type = other DNA
taacagataaaattgactttaa

SEQ ID NO: 25498 - DNA, 22 bp, synthetic construct
  misc_feature 1..22: note = chemically synthesized
  source 1..22: mol_type = other DNA
actttaaataaaaaacactaag

SEQ ID NO: 25499 - DNA, 22 bp, synthetic construct
  misc_feature 1..22: note = chemically synthesized
  source 1..22: mol_type = other DNA
taaataaaaaacactaagagac

SEQ ID NO: 25500 - DNA, 22 bp, synthetic construct
  misc_feature 1..22: note = chemically synthesized
  source 1..22: mol_type = other DNA
aaataaaaaacactaagagaca

SEQ ID NO: 25501 - DNA, 22 bp, synthetic construct
  misc_feature 1..22: note = chemically synthesized
  source 1..22: mol_type = other DNA
aataaaaaacactaagagacaa

SEQ ID NO: 25502 - DNA, 22 bp, synthetic construct
  misc_feature 1..22: note = chemically synthesized
  source 1..22: mol_type = other DNA
agagacaaaagtcattacataa

SEQ ID NO: 25503 - DNA, 22 bp, synthetic construct
  misc_feature 1..22: note = chemically synthesized
  source 1..22: mol_type = other DNA
cataatgataaaaggaacaatt

SEQ ID NO: 25504 - DNA, 22 bp, synthetic construct
  misc_feature 1..22: note = chemically synthesized
  source 1..22: mol_type = other DNA
agcaagagtatataacaattct

SEQ ID NO: 25505 - DNA, 22 bp, synthetic construct
  misc_feature 1..22: note = chemically synthesized
  source 1..22: mol_type = other DNA
taaacattcacactcaacacca

SEQ ID NO: 25506 - DNA, 22 bp, synthetic construct
  misc_feature 1..22: note = chemically synthesized
  source 1..22: mol_type = other DNA
aacattcacactcaacaccaga

SEQ ID NO: 25507 - DNA, 22 bp, synthetic construct
  misc_feature 1..22: note = chemically synthesized
  source 1..22: mol_type = other DNA
acactcaacaccagagcatcca

SEQ ID NO: 25508 - DNA, 22 bp, synthetic construct
  misc_feature 1..22: note = chemically synthesized
  source 1..22: mol_type = other DNA
aacaccagagcatccagatatg

SEQ ID NO: 25509 - DNA, 22 bp, synthetic construct
  misc_feature 1..22: note = chemically synthesized
  source 1..22: mol_type = other DNA
ttagatataaagggtgaaatag

SEQ ID NO: 25510 - DNA, 22 bp, synthetic construct
  misc_feature 1..22: note = chemically synthesized
  source 1..22: mol_type = other DNA
gatataaagggtgaaatagaat

SEQ ID NO: 25511 - DNA, 22 bp, synthetic construct
  misc_feature 1..22: note = chemically synthesized
  source 1..22: mol_type = other DNA
gggatttcaacattctaatctc

SEQ ID NO: 25512 - DNA, 22 bp, synthetic construct
  misc_feature 1..22: note = chemically synthesized
  source 1..22: mol_type = other DNA
caacattctaatctcagcatca

SEQ ID NO: 25513 - DNA, 22 bp, synthetic construct
  misc_feature 1..22: note = chemically synthesized
  source 1..22: mol_type = other DNA
aacattctaatctcagcatcag

SEQ ID NO: 25514 - DNA, 22 bp, synthetic construct
  misc_feature 1..22: note = chemically synthesized
  source 1..22: mol_type = other DNA
taatctcagcatcagatagatc

SEQ ID NO: 25515 - DNA, 22 bp, synthetic construct
  misc_feature 1..22: note = chemically synthesized
  source 1..22: mol_type = other DNA
atctcagcatcagatagatcat

SEQ ID NO: 25516 - DNA, 22 bp, synthetic construct
  misc_feature 1..22: note = chemically synthesized
  source 1..22: mol_type = other DNA
agcatcagatagatcatctaga

SEQ ID NO: 25517 - DNA, 22 bp, synthetic construct
  misc_feature 1..22: note = chemically synthesized
  source 1..22: mol_type = other DNA
gacagaaaattaacaaagaaac

SEQ ID NO: 25518 - DNA, 22 bp, synthetic construct
  misc_feature 1..22: note = chemically synthesized
  source 1..22: mol_type = other DNA
acaaagaaacattggatttaaa

SEQ ID NO: 25519 - DNA, 22 bp, synthetic construct
  misc_feature 1..22: note = chemically synthesized
  source 1..22: mol_type = other DNA
gatttaaacttgactttagacc

SEQ ID NO: 25520 - DNA, 22 bp, synthetic construct
  misc_feature 1..22: note = chemically synthesized
  source 1..22: mol_type = other DNA
aaacttgactttagaccaaatg

SEQ ID NO: 25521 - DNA, 22 bp, synthetic construct
  misc_feature 1..22: note = chemically synthesized
  source 1..22: mol_type = other DNA
aacttgactttagaccaaatgg

SEQ ID NO: 25522 - DNA, 22 bp, synthetic construct
  misc_feature 1..22: note = chemically synthesized
  source 1..22: mol_type = other DNA
gactttagaccaaatggatcta

SEQ ID NO: 25523 - DNA, 22 bp, synthetic construct
  misc_feature 1..22: note = chemically synthesized
  source 1..22: mol_type = other DNA
actttagaccaaatggatctaa

SEQ ID NO: 25524 - DNA, 22 bp, synthetic construct
  misc_feature 1..22: note = chemically synthesized
  source 1..22: mol_type = other DNA
tagaccaaatggatctaacatt

SEQ ID NO: 25525 - DNA, 22 bp, synthetic construct
  misc_feature 1..22: note = chemically synthesized
  source 1..22: mol_type = other DNA
agaccaaatggatctaacattt

SEQ ID NO: 25526 - DNA, 22 bp, synthetic construct
  misc_feature 1..22: note = chemically synthesized
  source 1..22: mol_type = other DNA
gaccaaatggatctaacattta

SEQ ID NO: 25527 - DNA, 22 bp, synthetic construct
  misc_feature 1..22: note = chemically synthesized
  source 1..22: mol_type = other DNA
acatttacacaatatttcatcc

SEQ ID NO: 25528 - DNA, 22 bp, synthetic construct
  misc_feature 1..22: note = chemically synthesized
  source 1..22: mol_type = other DNA
acacaatatttcatccaacagc

SEQ ID NO: 25529 - DNA, 22 bp, synthetic construct
  misc_feature 1..22: note = chemically synthesized
  source 1..22: mol_type = other DNA
cacaatatttcatccaacagct

SEQ ID NO: 25530 - DNA, 22 bp, synthetic construct
  misc_feature 1..22: note = chemically synthesized
  source 1..22: mol_type = other DNA
catccaacagctacagaatata

SEQ ID NO: 25531 - DNA, 22 bp, synthetic construct
  misc_feature 1..22: note = chemically synthesized
  source 1..22: mol_type = other DNA
atccaacagctacagaatatat

SEQ ID NO: 25532 - DNA, 22 bp, synthetic construct
  misc_feature 1..22: note = chemically synthesized
  source 1..22: mol_type = other DNA
cagaatatatttatctcatcag

SEQ ID NO: 25533 - DNA, 22 bp, synthetic construct
  misc_feature 1..22: note = chemically synthesized
  source 1..22: mol_type = other DNA
atctcatcagcacatgacgcat

SEQ ID NO: 25534 - DNA, 22 bp, synthetic construct
  misc_feature 1..22: note = chemically synthesized
  source 1..22: mol_type = other DNA
tctcatcagcacatgacgcatt

SEQ ID NO: 25535 - DNA, 22 bp, synthetic construct
  misc_feature 1..22: note = chemically synthesized
  source 1..22: mol_type = other DNA
atcagcacatgacgcattcccc

SEQ ID NO: 25536 - DNA, 22 bp, synthetic construct
  misc_feature 1..22: note = chemically synthesized
  source 1..22: mol_type = other DNA
cccaggatacaccatatgttag

SEQ ID NO: 25537 - DNA, 22 bp, synthetic construct
  misc_feature 1..22: note = chemically synthesized
  source 1..22: mol_type = other DNA
gaacacaaaagaagtctcaact

SEQ ID NO: 25538 - DNA, 22 bp, synthetic construct
  misc_feature 1..22: note = chemically synthesized
  source 1..22: mol_type = other DNA
aactaatttgaaatatttgaaa

SEQ ID NO: 25539 - DNA, 22 bp, synthetic construct
  misc_feature 1..22: note = chemically synthesized
  source 1..22: mol_type = other DNA
atttgaaatatttgaaatcata

SEQ ID NO: 25540 - DNA, 22 bp, synthetic construct
  misc_feature 1..22: note = chemically synthesized
  source 1..22: mol_type = other DNA
gaaatatttgaaatcatattaa

SEQ ID NO: 25541 - DNA, 22 bp, synthetic construct
  misc_feature 1..22: note = chemically synthesized
  source 1..22: mol_type = other DNA
aaatatttgaaatcatattaag

SEQ ID NO: 25542 - DNA, 22 bp, synthetic construct
  misc_feature 1..22: note = chemically synthesized
  source 1..22: mol_type = other DNA
gaaatcatattaagcatcttct

SEQ ID NO: 25543 - DNA, 22 bp, synthetic construct
  misc_feature 1..22: note = chemically synthesized
  source 1..22: mol_type = other DNA
aaatcatattaagcatcttctc

SEQ ID NO: 25544 - DNA, 22 bp, synthetic construct
  misc_feature 1..22: note = chemically synthesized
  source 1..22: mol_type = other DNA
agcatcttctcagaccacaatg

SEQ ID NO: 25545 - DNA, 22 bp, synthetic construct
  misc_feature 1..22: note = chemically synthesized
  source 1..22: mol_type = other DNA
ctcagaccacaatggaataaaa

SEQ ID NO: 25546 - DNA, 22 bp, synthetic construct
  misc_feature 1..22: note = chemically synthesized
  source 1..22: mol_type = other DNA
tcagaccacaatggaataaaac

SEQ ID NO: 25547 - DNA, 22 bp, synthetic construct
  misc_feature 1..22: note = chemically synthesized
  source 1..22: mol_type = other DNA
agaccacaatggaataaaacta

SEQ ID NO: 25548 - DNA, 22 bp, synthetic construct
  misc_feature 1..22: note = chemically synthesized
  source 1..22: mol_type = other DNA
gaaatcaataacaagaaaaact

SEQ ID NO: 25549 - DNA, 22 bp, synthetic construct
  misc_feature 1..22: note = chemically synthesized
  source 1..22: mol_type = other DNA
taaaacctatacaaatacatgg

SEQ ID NO: 25550 - DNA, 22 bp, synthetic construct
  misc_feature 1..22: note = chemically synthesized
  source 1..22: mol_type = other DNA
aaaacctatacaaatacatgga

SEQ ID NO: 25551 - DNA, 22 bp, synthetic construct
  misc_feature 1..22: note = chemically synthesized
  source 1..22: mol_type = other DNA
aaacctatacaaatacatggaa

SEQ ID NO: 25552 - DNA, 22 bp, synthetic construct
  misc_feature 1..22: note = chemically synthesized
  source 1..22: mol_type = other DNA
tacaaatacatggaaattaaac

SEQ ID NO: 25553 - DNA, 22 bp, synthetic construct
  misc_feature 1..22: note = chemically synthesized
  source 1..22: mol_type = other DNA
aacaacatgctcctgaatgaac

SEQ ID NO: 25554 - DNA, 22 bp, synthetic construct
  misc_feature 1..22: note = chemically synthesized
  source 1..22: mol_type = other DNA
ctgaatgaacgttatgtcaaga

SEQ ID NO: 25555 - DNA, 22 bp, synthetic construct
  misc_feature 1..22: note = chemically synthesized
  source 1..22: mol_type = other DNA
aatgaacgttatgtcaagaaga

SEQ ID NO: 25556 - DNA, 22 bp, synthetic construct
  misc_feature 1..22: note = chemically synthesized
  source 1..22: mol_type = other DNA
tgtcaagaagaaaattaagaag

SEQ ID NO: 25557 - DNA, 22 bp, synthetic construct
  misc_feature 1..22: note = chemically synthesized
  source 1..22: mol_type = other DNA
agaaggaaatcaaaaatttttt

SEQ ID NO: 25558 - DNA, 22 bp, synthetic construct
  misc_feature 1..22: note = chemically synthesized
  source 1..22: mol_type = other DNA
tttgaaacaaatgaaaattgaa

SEQ ID NO: 25559 - DNA, 22 bp, synthetic construct
  misc_feature 1..22: note = chemically synthesized
  source 1..22: mol_type = other DNA
ttgaaacaaatgaaaattgaaa

SEQ ID NO: 25560 - DNA, 22 bp, synthetic construct
  misc_feature 1..22: note = chemically synthesized
  source 1..22: mol_type = other DNA
tgaaacaaatgaaaattgaaat

SEQ ID NO: 25561 - DNA, 22 bp, synthetic construct
  misc_feature 1..22: note = chemically synthesized
  source 1..22: mol_type = other DNA
gaaacaaatgaaaattgaaata

SEQ ID NO: 25562 - DNA, 22 bp, synthetic construct
  misc_feature 1..22: note = chemically synthesized
  source 1..22: mol_type = other DNA
aaacaaatgaaaattgaaatac

SEQ ID NO: 25563 - DNA, 22 bp, synthetic construct
  misc_feature 1..22: note = chemically synthesized
  source 1..22: mol_type = other DNA
aaatacaacataggaaaagcca

SEQ ID NO: 25564 - DNA, 22 bp, synthetic construct
  misc_feature 1..22: note = chemically synthesized
  source 1..22: mol_type = other DNA
agagagaagcttatcaataaac

SEQ ID NO: 25565 - DNA, 22 bp, synthetic construct
  misc_feature 1..22: note = chemically synthesized
  source 1..22: mol_type = other DNA
atcaataaacacttaaattaaa

SEQ ID NO: 25566 - DNA, 22 bp, synthetic construct
  misc_feature 1..22: note = chemically synthesized
  source 1..22: mol_type = other DNA
tcaataaacacttaaattaaaa

SEQ ID NO: 25567 - DNA, 22 bp, synthetic construct
  misc_feature 1..22: note = chemically synthesized
  source 1..22: mol_type = other DNA
aaattaaaaacatagaaagatt

SEQ ID NO: 25568 - DNA, 22 bp, synthetic construct
  misc_feature 1..22: note = chemically synthesized
  source 1..22: mol_type = other DNA
aattaaaaacatagaaagattt

SEQ ID NO: 25569 - DNA, 22 bp, synthetic construct
  misc_feature 1..22: note = chemically synthesized
  source 1..22: mol_type = other DNA
aaaacatagaaagatttcaaat

SEQ ID NO: 25570 - DNA, 22 bp, synthetic construct
  misc_feature 1..22: note = chemically synthesized
  source 1..22: mol_type = other DNA
caaatatataatctaatcatgt

SEQ ID NO: 25571 - DNA, 22 bp, synthetic construct
  misc_feature 1..22: note = chemically synthesized
  source 1..22: mol_type = other DNA
aaatatataatctaatcatgta

SEQ ID NO: 25572 - DNA, 22 bp, synthetic construct
  misc_feature 1..22: note = chemically synthesized
  source 1..22: mol_type = other DNA
atcatgtacctcaacaagctag

SEQ ID NO: 25573 - DNA, 22 bp, synthetic construct
  misc_feature 1..22: note = chemically synthesized
  source 1..22: mol_type = other DNA
aacaagctagaaaagcaagaac

SEQ ID NO: 25574 - DNA, 22 bp, synthetic construct
  misc_feature 1..22: note = chemically synthesized
  source 1..22: mol_type = other DNA
gaaaagcaagaacaaaacccaa

SEQ ID NO: 25575 - DNA, 22 bp, synthetic construct
  misc_feature 1..22: note = chemically synthesized
  source 1..22: mol_type = other DNA
gcagaaggaaagaaaaaatgaa

SEQ ID NO: 25576 - DNA, 22 bp, synthetic construct
  misc_feature 1..22: note = chemically synthesized
  source 1..22: mol_type = other DNA
aatgaaatagagaaaaacaaca

SEQ ID NO: 25577 - DNA, 22 bp, synthetic construct
  misc_feature 1..22: note = chemically synthesized
  source 1..22: mol_type = other DNA
atgaaatagagaaaaacaacaa

SEQ ID NO: 25578 - DNA, 22 bp, synthetic construct
  misc_feature 1..22: note = chemically synthesized
  source 1..22: mol_type = other DNA
gcaaaatgaaaagttgttattt

SEQ ID NO: 25579 - DNA, 22 bp, synthetic construct
  misc_feature 1..22: note = chemically synthesized
  source 1..22: mol_type = other DNA
ttatttaaaaaagataaaatgg

SEQ ID NO: 25580 - DNA, 22 bp, synthetic construct
  misc_feature 1..22: note = chemically synthesized
  source 1..22: mol_type = other DNA
tttaaaaaagataaaatggata

SEQ ID NO: 25581 - DNA, 22 bp, synthetic construct
  misc_feature 1..22: note = chemically synthesized
  source 1..22: mol_type = other DNA
aaaaaagataaaatggatatag

SEQ ID NO: 25582 - DNA, 22 bp, synthetic construct
  misc_feature 1..22: note = chemically synthesized
  source 1..22: mol_type = other DNA
aaaaagataaaatggatatagc

SEQ ID NO: 25583 - DNA, 22 bp, synthetic construct
  misc_feature 1..22: note = chemically synthesized
  source 1..22: mol_type = other DNA
tagctagactaaccaagaaaaa

SEQ ID NO: 25584 - DNA, 22 bp, synthetic construct
  misc_feature 1..22: note = chemically synthesized
  source 1..22: mol_type = other DNA
gctagactaaccaagaaaaaga

SEQ ID NO: 25585 - DNA, 22 bp, synthetic construct
  misc_feature 1..22: note = chemically synthesized
  source 1..22: mol_type = other DNA
gactaaccaagaaaaagagaag

SEQ ID NO: 25586 - DNA, 22 bp, synthetic construct
  misc_feature 1..22: note = chemically synthesized
  source 1..22: mol_type = other DNA
accaagaaaaagagaagagact

SEQ ID NO: 25587 - DNA, 22 bp, synthetic construct
  misc_feature 1..22: note = chemically synthesized
  source 1..22: mol_type = other DNA
aaataaagaaaatcagaaataa

SEQ ID NO: 25588 - DNA, 22 bp, synthetic construct
  misc_feature 1..22: note = chemically synthesized
  source 1..22: mol_type = other DNA
caaccgataccacagaaataga

SEQ ID NO: 25589 - DNA, 22 bp, synthetic construct
  misc_feature 1..22: note = chemically synthesized
  source 1..22: mol_type = other DNA
tcagagactattatgaacaacc

SEQ ID NO: 25590 - DNA, 22 bp, synthetic construct
  misc_feature 1..22: note = chemically synthesized
  source 1..22: mol_type = other DNA
ttatgaacaaccatacactaaa

SEQ ID NO: 25591 - DNA, 22 bp, synthetic construct
  misc_feature 1..22: note = chemically synthesized
  source 1..22: mol_type = other DNA
tgaacaaccatacactaaaaaa

SEQ ID NO: 25592 - DNA, 22 bp, synthetic construct
  misc_feature 1..22: note = chemically synthesized
  source 1..22: mol_type = other DNA
aaaaactgaaaaatctagagga

SEQ ID NO: 25593 - DNA, 22 bp, synthetic construct
  misc_feature 1..22: note = chemically synthesized
  source 1..22: mol_type = other DNA
aaaaatctagaggaaattaata

SEQ ID NO: 25594 - DNA, 22 bp, synthetic construct
  misc_feature 1..22: note = chemically synthesized
  source 1..22: mol_type = other DNA
gaggaaattaataaatttctgg

SEQ ID NO: 25595 - DNA, 22 bp, synthetic construct
  misc_feature 1..22: note = chemically synthesized
  source 1..22: mol_type = other DNA
ataaatttctggacacatacca

SEQ ID NO: 25596 - DNA, 22 bp, synthetic construct
  misc_feature 1..22: note = chemically synthesized
  source 1..22: mol_type = other DNA
ctggacacataccacctaccaa

SEQ ID NO: 25597 - DNA, 22 bp, synthetic construct
  misc_feature 1..22: note = chemically synthesized
  source 1..22: mol_type = other DNA
tggacacataccacctaccaag

SEQ ID NO: 25598 - DNA, 22 bp, synthetic construct
  misc_feature 1..22: note = chemically synthesized
  source 1..22: mol_type = other DNA
gacacataccacctaccaagat

SEQ ID NO: 25599 - DNA, 22 bp, synthetic construct
  misc_feature 1..22: note = chemically synthesized
  source 1..22: mol_type = other DNA
ccaagattgaattaagaaagaa

SEQ ID NO: 25600 - DNA, 22 bp, synthetic construct
  misc_feature 1..22: note = chemically synthesized
  source 1..22: mol_type = other DNA
aattaagaaagaatagaaaacc

SEQ ID NO: 25601 - DNA, 22 bp, synthetic construct
  misc_feature 1..22: note = chemically synthesized
  source 1..22: mol_type = other DNA
agaaagaatagaaaacctgaac

SEQ ID NO: 25602 - DNA, 22 bp, synthetic construct
  misc_feature 1..22: note = chemically synthesized
  source 1..22: mol_type = other DNA
aacagaccagtaatgaataatg

SEQ ID NO: 25603 - DNA, 22 bp, synthetic construct
  misc_feature 1..22: note = chemically synthesized
  source 1..22: mol_type = other DNA
aatcagtagtaaaaagtctccc

SEQ ID NO: 25604 - DNA, 22 bp, synthetic construct
  misc_feature 1..22: note = chemically synthesized
  source 1..22: mol_type = other DNA
ccaaaaaagaaaatttcaagac

SEQ ID NO: 25605 - DNA, 22 bp, synthetic construct
  misc_feature 1..22: note = chemically synthesized
  source 1..22: mol_type = other DNA
caagaccagatggctttactgt

SEQ ID NO: 25606 - DNA, 22 bp, synthetic construct
  misc_feature 1..22: note = chemically synthesized
  source 1..22: mol_type = other DNA
aagaccagatggctttactgtc

SEQ ID NO: 25607 - DNA, 22 bp, synthetic construct
  misc_feature 1..22: note = chemically synthesized
  source 1..22: mol_type = other DNA
tactgtcaaattttaccaaact

SEQ ID NO: 25608 - DNA, 22 bp, synthetic construct
  misc_feature 1..22: note = chemically synthesized
  source 1..22: mol_type = other DNA
actgtcaaattttaccaaactt

SEQ ID NO: 25609 - DNA, 22 bp, synthetic construct
  misc_feature 1..22: note = chemically synthesized
  source 1..22: mol_type = other DNA
ctgtcaaattttaccaaacttt

SEQ ID NO: 25610 - DNA, 22 bp, synthetic construct
  misc_feature 1..22: note = chemically synthesized
  source 1..22: mol_type = other DNA
tcaaattttaccaaactttcaa

SEQ ID NO: 25611 - DNA, 22 bp, synthetic construct
  misc_feature 1..22: note = chemically synthesized
  source 1..22: mol_type = other DNA
taccaaactttcaaagaaaact

SEQ ID NO: 25612 - DNA, 22 bp, synthetic construct
  misc_feature 1..22: note = chemically synthesized
  source 1..22: mol_type = other DNA
accaaactttcaaagaaaacta

SEQ ID NO: 25613 - DNA, 22 bp, synthetic construct
  misc_feature 1..22: note = chemically synthesized
  source 1..22: mol_type = other DNA
ccaaactttcaaagaaaactaa

SEQ ID NO: 25614 - DNA, 22 bp, synthetic construct
  misc_feature 1..22: note = chemically synthesized
  source 1..22: mol_type = other DNA
tcaaagaaaactaacaagtctc

SEQ ID NO: 25615 - DNA, 22 bp, synthetic construct
  misc_feature 1..22: note = chemically synthesized
  source 1..22: mol_type = other DNA
caaagaaaactaacaagtctcc

SEQ ID NO: 25616 - DNA, 22 bp, synthetic construct
  misc_feature 1..22: note = chemically synthesized
  source 1..22: mol_type = other DNA
aaagaaaactaacaagtctcct

SEQ ID NO: 25617 - DNA, 22 bp, synthetic construct
  misc_feature 1..22: note = chemically synthesized
  source 1..22: mol_type = other DNA
acaagtctccttaaattctttt

SEQ ID NO: 25618 - DNA, 22 bp, synthetic construct
  misc_feature 1..22: note = chemically synthesized
  source 1..22: mol_type = other DNA
cttaaattcttttaaaaattaa

SEQ ID NO: 25619 - DNA, 22 bp, synthetic construct
  misc_feature 1..22: note = chemically synthesized
  source 1..22: mol_type = other DNA
aaattcttttaaaaattaaaca

SEQ ID NO: 25620 - DNA, 22 bp, synthetic construct
  misc_feature 1..22: note = chemically synthesized
  source 1..22: mol_type = other DNA
aattcttttaaaaattaaacag

SEQ ID NO: 25621 - DNA, 22 bp, synthetic construct
  misc_feature 1..22: note = chemically synthesized
  source 1..22: mol_type = other DNA
ttttaaaaattaaacaggaagg

SEQ ID NO: 25622 - DNA, 22 bp, synthetic construct
  misc_feature 1..22: note = chemically synthesized
  source 1..22: mol_type = other DNA
ttaaaaattaaacaggaaggaa

SEQ ID NO: 25623 - DNA, 22 bp, synthetic construct
  misc_feature 1..22: note = chemically synthesized
  source 1..22: mol_type = other DNA
taaaaattaaacaggaaggaat

SEQ ID NO: 25624 - DNA, 22 bp, synthetic construct
  misc_feature 1..22: note = chemically synthesized
  source 1..22: mol_type = other DNA
aaaaattaaacaggaaggaatt

SEQ ID NO: 25625 - DNA, 22 bp, synthetic construct
  misc_feature 1..22: note = chemically synthesized
  source 1..22: mol_type = other DNA
aaaattaaacaggaaggaattc

SEQ ID NO: 25626 - DNA, 22 bp, synthetic construct
  misc_feature 1..22: note = chemically synthesized
  source 1..22: mol_type = other DNA
aacaggaaggaattctccctaa

SEQ ID NO: 25627 - DNA, 22 bp, synthetic construct
  misc_feature 1..22: note = chemically synthesized
  source 1..22: mol_type = other DNA
tccctaactcattctctgaggc

SEQ ID NO: 25628 - DNA, 22 bp, synthetic construct
  misc_feature 1..22: note = chemically synthesized
  source 1..22: mol_type = other DNA
cctaactcattctctgaggcca

SEQ ID NO: 25629 - DNA, 22 bp, synthetic construct
  misc_feature 1..22: note = chemically synthesized
  source 1..22: mol_type = other DNA
actcattctctgaggccagtat

SEQ ID NO: 25630 - DNA, 22 bp, synthetic construct
  misc_feature 1..22: note = chemically synthesized
  source 1..22: mol_type = other DNA
attctctgaggccagtattatc

SEQ ID NO: 25631 - DNA, 22 bp, synthetic construct
  misc_feature 1..22: note = chemically synthesized
  source 1..22: mol_type = other DNA
tctgaggccagtattatcctga

SEQ ID NO: 25632 - DNA, 22 bp, synthetic construct
  misc_feature 1..22: note = chemically synthesized
  source 1..22: mol_type = other DNA
tgaggccagtattatcctgatt

SEQ ID NO: 25633 - DNA, 22 bp, synthetic construct
  misc_feature 1..22: note = chemically synthesized
  source 1..22: mol_type = other DNA
aggccagtattatcctgattcc

SEQ ID NO: 25634 - DNA, 22 bp, synthetic construct
  misc_feature 1..22: note = chemically synthesized
  source 1..22: mol_type = other DNA
tcctgattccataaccagacaa

SEQ ID NO: 25635 - DNA, 22 bp, synthetic construct
  misc_feature 1..22: note = chemically synthesized
  source 1..22: mol_type = other DNA
attccataaccagacaaggatg

SEQ ID NO: 25636 - DNA, 22 bp, synthetic construct
  misc_feature 1..22: note = chemically synthesized
  source 1..22: mol_type = other DNA
cataaccagacaaggatgcaag

SEQ ID NO: 25637 - DNA, 22 bp, synthetic construct
  misc_feature 1..22: note = chemically synthesized
  source 1..22: mol_type = other DNA
caggtcaatatccctgatggaa

SEQ ID NO: 25638 - DNA, 22 bp, synthetic construct
  misc_feature 1..22: note = chemically synthesized
  source 1..22: mol_type = other DNA
atggaacataggtgtgaaaatc

SEQ ID NO: 25639 - DNA, 22 bp, synthetic construct
  misc_feature 1..22: note = chemically synthesized
  source 1..22: mol_type = other DNA
aacaaaatactagcaaactgaa

SEQ ID NO: 25640 - DNA, 22 bp, synthetic construct
  misc_feature 1..22: note = chemically synthesized
  source 1..22: mol_type = other DNA
gcaaactgaatccaacagtaca

SEQ ID NO: 25641 - DNA, 22 bp, synthetic construct
  misc_feature 1..22: note = chemically synthesized
  source 1..22: mol_type = other DNA
aatccaacagtacatccaaaag

SEQ ID NO: 25642 - DNA, 22 bp, synthetic construct
  misc_feature 1..22: note = chemically synthesized
  source 1..22: mol_type = other DNA
atactagggttgcaagaacagt

SEQ ID NO: 25643 - DNA, 22 bp, synthetic construct
  misc_feature 1..22: note = chemically synthesized
  source 1..22: mol_type = other DNA
tactagggttgcaagaacagtt

SEQ ID NO: 25644 - DNA, 22 bp, synthetic construct
  misc_feature 1..22: note = chemically synthesized
  source 1..22: mol_type = other DNA
gggttgcaagaacagttcaaat

SEQ ID NO: 25645 - DNA, 22 bp, synthetic construct
  misc_feature 1..22: note = chemically synthesized
  source 1..22: mol_type = other DNA
caagaacagttcaaatcaataa

SEQ ID NO: 25646 - DNA, 22 bp, synthetic construct
  misc_feature 1..22: note = chemically synthesized
  source 1..22: mol_type = other DNA
aaatcaataaatgtgatacatc

SEQ ID NO: 25647 - DNA, 22 bp, synthetic construct
  misc_feature 1..22: note = chemically synthesized
  source 1..22: mol_type = other DNA
aatagatacagaaaaagtattt

SEQ ID NO: 25648 - DNA, 22 bp, synthetic construct
  misc_feature 1..22: note = chemically synthesized
  source 1..22: mol_type = other DNA
gataaaatttaacattccttca

SEQ ID NO: 25649 - DNA, 22 bp, synthetic construct
  misc_feature 1..22: note = chemically synthesized
  source 1..22: mol_type = other DNA
ataaaatttaacattccttcat

SEQ ID NO: 25650 - DNA, 22 bp, synthetic construct
  misc_feature 1..22: note = chemically synthesized
  source 1..22: mol_type = other DNA
aacattccttcatgataaaaac

SEQ ID NO: 25651 - DNA, 22 bp, synthetic construct
  misc_feature 1..22: note = chemically synthesized
  source 1..22: mol_type = other DNA
acattccttcatgataaaaact

SEQ ID NO: 25652 - DNA, 22 bp, synthetic construct
  misc_feature 1..22: note = chemically synthesized
  source 1..22: mol_type = other DNA
cttcatgataaaaactatctgc

SEQ ID NO: 25653 - DNA, 22 bp, synthetic construct
  misc_feature 1..22: note = chemically synthesized
  source 1..22: mol_type = other DNA
catgataaaaactatctgcagc

SEQ ID NO: 25654 - DNA, 22 bp, synthetic construct
  misc_feature 1..22: note = chemically synthesized
  source 1..22: mol_type = other DNA
atgataaaaactatctgcagcc

SEQ ID NO: 25655 - DNA, 22 bp, synthetic construct
  misc_feature 1..22: note = chemically synthesized
  source 1..22: mol_type = other DNA
tctgcagccaatcatagaagga

SEQ ID NO: 25656 - DNA, 22 bp, synthetic construct
  misc_feature 1..22: note = chemically synthesized
  source 1..22: mol_type = other DNA
cagccaatcatagaaggaacat

SEQ ID NO: 25657 - DNA, 22 bp, synthetic construct
  misc_feature 1..22: note = chemically synthesized
  source 1..22: mol_type = other DNA
aatataataaaagtcatatatg

SEQ ID NO: 25658 - DNA, 22 bp, synthetic construct
  misc_feature 1..22: note = chemically synthesized
  source 1..22: mol_type = other DNA
acatcatactgaattgggaaaa

SEQ ID NO: 25659 - DNA, 22 bp, synthetic construct
  misc_feature 1..22: note = chemically synthesized
  source 1..22: mol_type = other DNA
aattgggaaaagctggaagcct

SEQ ID NO: 25660 - DNA, 22 bp, synthetic construct
  misc_feature 1..22: note = chemically synthesized
  source 1..22: mol_type = other DNA
ggaaaagctggaagcctttcct

SEQ ID NO: 25661 - DNA, 22 bp, synthetic construct
  misc_feature 1..22: note = chemically synthesized
  source 1..22: mol_type = other DNA
gaagcctttcctctaagaactg

SEQ ID NO: 25662 - DNA, 22 bp, synthetic construct
  misc_feature 1..22: note = chemically synthesized
  source 1..22: mol_type = other DNA
tcctctaagaactgaaacaaaa

SEQ ID NO: 25663 - DNA, 22 bp, synthetic construct
  misc_feature 1..22: note = chemically synthesized
  source 1..22: mol_type = other DNA
cctctaagaactgaaacaaaat

SEQ ID NO: 25664 - DNA, 22 bp, synthetic construct
  misc_feature 1..22: note = chemically synthesized
  source 1..22: mol_type = other DNA
ctctaagaactgaaacaaaata

SEQ ID NO: 25665 - DNA, 22 bp, synthetic construct
  misc_feature 1..22: note = chemically synthesized
  source 1..22: mol_type = other DNA
taagaactgaaacaaaataagg

SEQ ID NO: 25666 - DNA, 22 bp, synthetic construct
  misc_feature 1..22: note = chemically synthesized
  source 1..22: mol_type = other DNA
agaactgaaacaaaataaggat

SEQ ID NO: 25667 - DNA, 22 bp, synthetic construct
  misc_feature 1..22: note = chemically synthesized
  source 1..22: mol_type = other DNA
aaacaaaataaggatgcccact

SEQ ID NO: 25668 - DNA, 22 bp, synthetic construct
  misc_feature 1..22: note = chemically synthesized
  source 1..22: mol_type = other DNA
ccatcactcctattcaatataa

SEQ ID NO: 25669 - DNA, 22 bp, synthetic construct
  misc_feature 1..22: note = chemically synthesized
  source 1..22: mol_type = other DNA
catcactcctattcaatataat

SEQ ID NO: 25670 - DNA, 22 bp, synthetic construct
  misc_feature 1..22: note = chemically synthesized
  source 1..22: mol_type = other DNA
ctattcaatataatactggaag

SEQ ID NO: 25671 - DNA, 22 bp, synthetic construct
  misc_feature 1..22: note = chemically synthesized
  source 1..22: mol_type = other DNA
ttcaatataatactggaagtcc

SEQ ID NO: 25672 - DNA, 22 bp, synthetic construct
  misc_feature 1..22: note = chemically synthesized
  source 1..22: mol_type = other DNA
aatataatactggaagtcctag

SEQ ID NO: 25673 - DNA, 22 bp, synthetic construct
  misc_feature 1..22: note = chemically synthesized
  source 1..22: mol_type = other DNA
gaagtcctagccacagctttca

SEQ ID NO: 25674 - DNA, 22 bp, synthetic construct
  misc_feature 1..22: note = chemically synthesized
  source 1..22: mol_type = other DNA
gccacagctttcaggtcagaga

SEQ ID NO: 25675 - DNA, 22 bp, synthetic construct
  misc_feature 1..22: note = chemically synthesized
  source 1..22: mol_type = other DNA
tcaggtcagagaaagaaagaaa

SEQ ID NO: 25676 - DNA, 22 bp, synthetic construct
  misc_feature 1..22: note = chemically synthesized
  source 1..22: mol_type = other DNA
caggtcagagaaagaaagaaag

SEQ ID NO: 25677 - DNA, 22 bp, synthetic construct
  misc_feature 1..22: note = chemically synthesized
  source 1..22: mol_type = other DNA
aggtcagagaaagaaagaaaga

SEQ ID NO: 25678 - DNA, 22 bp, synthetic construct
  misc_feature 1..22: note = chemically synthesized
  source 1..22: mol_type = other DNA
tccatctttccagatgacatga

SEQ ID NO: 25679 - DNA, 22 bp, synthetic construct
  misc_feature 1..22: note = chemically synthesized
  source 1..22: mol_type = other DNA
tccagatgacatgattttatac

SEQ ID NO: 25680 - DNA, 22 bp, synthetic construct
  misc_feature 1..22: note = chemically synthesized
  source 1..22: mol_type = other DNA
ccagatgacatgattttatacc

SEQ ID NO: 25681 - DNA, 22 bp, synthetic construct
  misc_feature 1..22: note = chemically synthesized
  source 1..22: mol_type = other DNA
cagatgacatgattttatacct

SEQ ID NO: 25682 - DNA, 22 bp, synthetic construct
  misc_feature 1..22: note = chemically synthesized
  source 1..22: mol_type = other DNA
tatacctagaaaaaccaagact

SEQ ID NO: 25683 - DNA, 22 bp, synthetic construct
  misc_feature 1..22: note = chemically synthesized
  source 1..22: mol_type = other DNA
atacctagaaaaaccaagactc

SEQ ID NO: 25684 - DNA, 22 bp, synthetic construct
  misc_feature 1..22: note = chemically synthesized
  source 1..22: mol_type = other DNA
tacctagaaaaaccaagactcc

SEQ ID NO: 25685 - DNA, 22 bp, synthetic construct
  misc_feature 1..22: note = chemically synthesized
  source 1..22: mol_type = other DNA
gaaaaaccaagactccaccaaa

SEQ ID NO: 25686 - DNA, 22 bp, synthetic construct
  misc_feature 1..22: note = chemically synthesized
  source 1..22: mol_type = other DNA
caccaaagcactcttagcgctg

SEQ ID NO: 25687 - DNA, 22 bp, synthetic construct
  misc_feature 1..22: note = chemically synthesized
  source 1..22: mol_type = other DNA
ttagcgctgaaaaataaattca

SEQ ID NO: 25688 - DNA, 22 bp, synthetic construct
  misc_feature 1..22: note = chemically synthesized
  source 1..22: mol_type = other DNA
agcgctgaaaaataaattcagt

SEQ ID NO: 25689 - DNA, 22 bp, synthetic construct
  misc_feature 1..22: note = chemically synthesized
  source 1..22: mol_type = other DNA
gcgctgaaaaataaattcagta

SEQ ID NO: 25690 - DNA, 22 bp, synthetic construct
  misc_feature 1..22: note = chemically synthesized
  source 1..22: mol_type = other DNA
aaaaataaattcagtaaagtta

SEQ ID NO: 25691 - DNA, 22 bp, synthetic construct
  misc_feature 1..22: note = chemically synthesized
  source 1..22: mol_type = other DNA
agtaaagttacaggagacaaaa

SEQ ID NO: 25692 - DNA, 22 bp, synthetic construct
  misc_feature 1..22: note = chemically synthesized
  source 1..22: mol_type = other DNA
caggagacaaaatcagcatatg

SEQ ID NO: 25693 - DNA, 22 bp, synthetic construct
  misc_feature 1..22: note = chemically synthesized
  source 1..22: mol_type = other DNA
ctacacaccaataataaactag

SEQ ID NO: 25694 - DNA, 22 bp, synthetic construct
  misc_feature 1..22: note = chemically synthesized
  source 1..22: mol_type = other DNA
tacacaccaataataaactagc

SEQ ID NO: 25695 - DNA, 22 bp, synthetic construct
  misc_feature 1..22: note = chemically synthesized
  source 1..22: mol_type = other DNA
cacaccaataataaactagctg

SEQ ID NO: 25696 - DNA, 22 bp, synthetic construct
  misc_feature 1..22: note = chemically synthesized
  source 1..22: mol_type = other DNA
gctgagaaggaaattaagaagg

SEQ ID NO: 25697 - DNA, 22 bp, synthetic construct
  misc_feature 1..22: note = chemically synthesized
  source 1..22: mol_type = other DNA
agaaggaaattaagaaggcaat

SEQ ID NO: 25698 - DNA, 22 bp, synthetic construct
  misc_feature 1..22: note = chemically synthesized
  source 1..22: mol_type = other DNA
agaaggcaatcccatttacaat

SEQ ID NO: 25699 - DNA, 22 bp, synthetic construct
  misc_feature 1..22: note = chemically synthesized
  source 1..22: mol_type = other DNA
acaatagctaaaaaataaaata

SEQ ID NO: 25700 - DNA, 22 bp, synthetic construct
  misc_feature 1..22: note = chemically synthesized
  source 1..22: mol_type = other DNA
caatagctaaaaaataaaatat

SEQ ID NO: 25701 - DNA, 22 bp, synthetic construct
  misc_feature 1..22: note = chemically synthesized
  source 1..22: mol_type = other DNA
aaaaataaaatatttagggata

SEQ ID NO: 25702 - DNA, 22 bp, synthetic construct
  misc_feature 1..22: note = chemically synthesized
  source 1..22: mol_type = other DNA
agggataaatttaaccaaggaa

SEQ ID NO: 25703 - DNA, 22 bp, synthetic construct
  misc_feature 1..22: note = chemically synthesized
  source 1..22: mol_type = other DNA
gggataaatttaaccaaggaac

SEQ ID NO: 25704 - DNA, 22 bp, synthetic construct
  misc_feature 1..22: note = chemically synthesized
  source 1..22: mol_type = other DNA
aaccaaggaaccgaaaaacctc

SEQ ID NO: 25705 - DNA, 22 bp, synthetic construct
  misc_feature 1..22: note = chemically synthesized
  source 1..22: mol_type = other DNA
accaaggaaccgaaaaacctct

SEQ ID NO: 25706 - DNA, 22 bp, synthetic construct
  misc_feature 1..22: note = chemically synthesized
  source 1..22: mol_type = other DNA
tattcggaaaactacaaaacac

SEQ ID NO: 25707 - DNA, 22 bp, synthetic construct
  misc_feature 1..22: note = chemically synthesized
  source 1..22: mol_type = other DNA
ttcggaaaactacaaaacactg

SEQ ID NO: 25708 - DNA, 22 bp, synthetic construct
  misc_feature 1..22: note = chemically synthesized
  source 1..22: mol_type = other DNA
ggaaaactacaaaacactgata

SEQ ID NO: 25709 - DNA, 22 bp, synthetic construct
  misc_feature 1..22: note = chemically synthesized
  source 1..22: mol_type = other DNA
caaaacactgataaaagaattg

SEQ ID NO: 25710 - DNA, 22 bp, synthetic construct
  misc_feature 1..22: note = chemically synthesized
  source 1..22: mol_type = other DNA
ataaaagaattgaaaaggacag

SEQ ID NO: 25711 - DNA, 22 bp, synthetic construct
  misc_feature 1..22: note = chemically synthesized
  source 1..22: mol_type = other DNA
aaaaggacagaaacaaatggag

SEQ ID NO: 25712 - DNA, 22 bp, synthetic construct
  misc_feature 1..22: note = chemically synthesized
  source 1..22: mol_type = other DNA
tgttcatggatcagaaaaatta

SEQ ID NO: 25713 - DNA, 22 bp, synthetic construct
  misc_feature 1..22: note = chemically synthesized
  source 1..22: mol_type = other DNA
atggatcagaaaaattaatatt

SEQ ID NO: 25714 - DNA, 22 bp, synthetic construct
  misc_feature 1..22: note = chemically synthesized
  source 1..22: mol_type = other DNA
atattgttaaaatggccatact

SEQ ID NO: 25715 - DNA, 22 bp, synthetic construct
  misc_feature 1..22: note = chemically synthesized
  source 1..22: mol_type = other DNA
ttaaaatggccatactacccaa

SEQ ID NO: 25716 - DNA, 22 bp, synthetic construct
  misc_feature 1..22: note = chemically synthesized
  source 1..22: mol_type = other DNA
aaatggccatactacccaaagc

SEQ ID NO: 25717 - DNA, 22 bp, synthetic construct
  misc_feature 1..22: note = chemically synthesized
  source 1..22: mol_type = other DNA
cccaaagcaatctacagattct

SEQ ID NO: 25718 - DNA, 22 bp, synthetic construct
  misc_feature 1..22: note = chemically synthesized
  source 1..22: mol_type = other DNA
cagattctatatgaccgctatc

SEQ ID NO: 25719 - DNA, 22 bp, synthetic construct
  misc_feature 1..22: note = chemically synthesized
  source 1..22: mol_type = other DNA
tatatgaccgctatcaaaatag

SEQ ID NO: 25720 - DNA, 22 bp, synthetic construct
  misc_feature 1..22: note = chemically synthesized
  source 1..22: mol_type = other DNA
tatgaccgctatcaaaatagca

SEQ ID NO: 25721 - DNA, 22 bp, synthetic construct
  misc_feature 1..22: note = chemically synthesized
  source 1..22: mol_type = other DNA
tcaaaatagcaatgtcattttt

SEQ ID NO: 25722 - DNA, 22 bp, synthetic construct
  misc_feature 1..22: note = chemically synthesized
  source 1..22: mol_type = other DNA
ttcacagaaatggaaaaaccaa

SEQ ID NO: 25723 - DNA, 22 bp, synthetic construct
  misc_feature 1..22: note = chemically synthesized
  source 1..22: mol_type = other DNA
tcacagaaatggaaaaaccaat

SEQ ID NO: 25724 - DNA, 22 bp, synthetic construct
  misc_feature 1..22: note = chemically synthesized
  source 1..22: mol_type = other DNA
cacagaaatggaaaaaccaatc

SEQ ID NO: 25725 - DNA, 22 bp, synthetic construct
  misc_feature 1..22: note = chemically synthesized
  source 1..22: mol_type = other DNA
acagaaatggaaaaaccaatct

SEQ ID NO: 25726 - DNA, 22 bp, synthetic construct
  misc_feature 1..22: note = chemically synthesized
  source 1..22: mol_type = other DNA
aaatttgtatgaaattaaaaaa

SEQ ID NO: 25727 - DNA, 22 bp, synthetic construct
  misc_feature 1..22: note = chemically synthesized
  source 1..22: mol_type = other DNA
gtatgaaattaaaaaatagctc

SEQ ID NO: 25728 - DNA, 22 bp, synthetic construct
  misc_feature 1..22: note = chemically synthesized
  source 1..22: mol_type = other DNA
tatgaaattaaaaaatagctcc

SEQ ID NO: 25729 - DNA, 22 bp, synthetic construct
  misc_feature 1..22: note = chemically synthesized
  source 1..22: mol_type = other DNA
aaaaatagctccagtagccaaa

SEQ ID NO: 25730 - DNA, 22 bp, synthetic construct
  misc_feature 1..22: note = chemically synthesized
  source 1..22: mol_type = other DNA
cagtagccaaagtcatcctgtg

SEQ ID NO: 25731 - DNA, 22 bp, synthetic construct
  misc_feature 1..22: note = chemically synthesized
  source 1..22: mol_type = other DNA
tgaaaaaagaacaatgctagag

SEQ ID NO: 25732 - DNA, 22 bp, synthetic construct
  misc_feature 1..22: note = chemically synthesized
  source 1..22: mol_type = other DNA
gaggtatcatactacctgattt

SEQ ID NO: 25733 - DNA, 22 bp, synthetic construct
  misc_feature 1..22: note = chemically synthesized
  source 1..22: mol_type = other DNA
cctgatttcaaagtatattaca

SEQ ID NO: 25734 - DNA, 22 bp, synthetic construct
  misc_feature 1..22: note = chemically synthesized
  source 1..22: mol_type = other DNA
atttcaaagtatattacaaaag

SEQ ID NO: 25735 - DNA, 22 bp, synthetic construct
  misc_feature 1..22: note = chemically synthesized
  source 1..22: mol_type = other DNA
caaagtatattacaaaagtata

SEQ ID NO: 25736 - DNA, 22 bp, synthetic construct
  misc_feature 1..22: note = chemically synthesized
  source 1..22: mol_type = other DNA
aaagtatattacaaaagtatag

SEQ ID NO: 25737 - DNA, 22 bp, synthetic construct
  misc_feature 1..22: note = chemically synthesized
  source 1..22: mol_type = other DNA
caaaagtataggaacctaaaca

SEQ ID NO: 25738 - DNA, 22 bp, synthetic construct
  misc_feature 1..22: note = chemically synthesized
  source 1..22: mol_type = other DNA
aacagcatgatactgacattag

SEQ ID NO: 25739 - DNA, 22 bp, synthetic construct
  misc_feature 1..22: note = chemically synthesized
  source 1..22: mol_type = other DNA
acattagaacagacacttagac

SEQ ID NO: 25740 - DNA, 22 bp, synthetic construct
  misc_feature 1..22: note = chemically synthesized
  source 1..22: mol_type = other DNA
gaacagacacttagaccaatgg

SEQ ID NO: 25741 - DNA, 22 bp, synthetic construct
  misc_feature 1..22: note = chemically synthesized
  source 1..22: mol_type = other DNA
agaccaatggaagagaatagag

SEQ ID NO: 25742 - DNA, 22 bp, synthetic construct
  misc_feature 1..22: note = chemically synthesized
  source 1..22: mol_type = other DNA
gaccaatggaagagaatagaga

SEQ ID NO: 25743 - DNA, 22 bp, synthetic construct
  misc_feature 1..22: note = chemically synthesized
  source 1..22: mol_type = other DNA
gaaatgcatccacatatttata

SEQ ID NO: 25744 - DNA, 22 bp, synthetic construct
  misc_feature 1..22: note = chemically synthesized
  source 1..22: mol_type = other DNA
atagccaacagattttcaacaa

SEQ ID NO: 25745 - DNA, 22 bp, synthetic construct
  misc_feature 1..22: note = chemically synthesized
  source 1..22: mol_type = other DNA
tagccaacagattttcaacaaa

SEQ ID NO: 25746 - DNA, 22 bp, synthetic construct
  misc_feature 1..22: note = chemically synthesized
  source 1..22: mol_type = other DNA
tcaacaaaggtgacaagaatat

SEQ ID NO: 25747 - DNA, 22 bp, synthetic construct
  misc_feature 1..22: note = chemically synthesized
  source 1..22: mol_type = other DNA
caacaaaggtgacaagaatata

SEQ ID NO: 25748 - DNA, 22 bp, synthetic construct
  misc_feature 1..22: note = chemically synthesized
  source 1..22: mol_type = other DNA
aacaaaggtgacaagaatatac

SEQ ID NO: 25749 - DNA, 22 bp, synthetic construct
  misc_feature 1..22: note = chemically synthesized
  source 1..22: mol_type = other DNA
aggaaaggacacagtgttcaag

SEQ ID NO: 25750 - DNA, 22 bp, synthetic construct
  misc_feature 1..22: note = chemically synthesized
  source 1..22: mol_type = other DNA
aagaaatggtgctgaaaaaatt

SEQ ID NO: 25751 - DNA, 22 bp, synthetic construct
  misc_feature 1..22: note = chemically synthesized
  source 1..22: mol_type = other DNA
aaaaaattggatatccattgga

SEQ ID NO: 25752 - DNA, 22 bp, synthetic construct
  misc_feature 1..22: note = chemically synthesized
  source 1..22: mol_type = other DNA
gatatccattggatatccatgt

SEQ ID NO: 25753 - DNA, 22 bp, synthetic construct
  misc_feature 1..22: note = chemically synthesized
  source 1..22: mol_type = other DNA
gatatccatgtgcaaaagaata

SEQ ID NO: 25754 - DNA, 22 bp, synthetic construct
  misc_feature 1..22: note = chemically synthesized
  source 1..22: mol_type = other DNA
gactgctgatatggtttggatg

SEQ ID NO: 25755 - DNA, 22 bp, synthetic construct
  misc_feature 1..22: note = chemically synthesized
  source 1..22: mol_type = other DNA
ctgatatggtttggatgtttgt

SEQ ID NO: 25756 - DNA, 22 bp, synthetic construct
  misc_feature 1..22: note = chemically synthesized
  source 1..22: mol_type = other DNA
atatggtttggatgtttgttcc

SEQ ID NO: 25757 - DNA, 22 bp, synthetic construct
  misc_feature 1..22: note = chemically synthesized
  source 1..22: mol_type = other DNA
ggatgtttgttccctccaaatc

SEQ ID NO: 25758 - DNA, 22 bp, synthetic construct
  misc_feature 1..22: note = chemically synthesized
  source 1..22: mol_type = other DNA
gatgtttgttccctccaaatct

SEQ ID NO: 25759 - DNA, 22 bp, synthetic construct
  misc_feature 1..22: note = chemically synthesized
  source 1..22: mol_type = other DNA
gttccctccaaatctcatgttg

SEQ ID NO: 25760 - DNA, 22 bp, synthetic construct
  misc_feature 1..22: note = chemically synthesized
  source 1..22: mol_type = other DNA
ttccctccaaatctcatgttga

SEQ ID NO: 25761 - DNA, 22 bp, synthetic construct
  misc_feature 1..22: note = chemically synthesized
  source 1..22: mol_type = other DNA
cctccaaatctcatgttgaaat

SEQ ID NO: 25762 - DNA, 22 bp, synthetic construct
  misc_feature 1..22: note = chemically synthesized
  source 1..22: mol_type = other DNA
caaatctcatgttgaaatataa

SEQ ID NO: 25763 - DNA, 22 bp, synthetic construct
  misc_feature 1..22: note = chemically synthesized
  source 1..22: mol_type = other DNA
atgttgaaatataatccccaac

SEQ ID NO: 25764 - DNA, 22 bp, synthetic construct
  misc_feature 1..22: note = chemically synthesized
  source 1..22: mol_type = other DNA
aaatataatccccaacttctca

SEQ ID NO: 25765 - DNA, 22 bp, synthetic construct
  misc_feature 1..22: note = chemically synthesized
  source 1..22: mol_type = other DNA
ctcaggatcttggcggatggga

SEQ ID NO: 25766 - DNA, 22 bp, synthetic construct
  misc_feature 1..22: note = chemically synthesized
  source 1..22: mol_type = other DNA
tcaggatcttggcggatgggag

SEQ ID NO: 25767 - DNA, 22 bp, synthetic construct
  misc_feature 1..22: note = chemically synthesized
  source 1..22: mol_type = other DNA
aggatcttggcggatgggaggt

SEQ ID NO: 25768 - DNA, 22 bp, synthetic construct
  misc_feature 1..22: note = chemically synthesized
  source 1..22: mol_type = other DNA
ggcggatgggaggtaggcctag

SEQ ID NO: 25769 - DNA, 22 bp, synthetic construct
  misc_feature 1..22: note = chemically synthesized
  source 1..22: mol_type = other DNA
gcggatgggaggtaggcctaga

SEQ ID NO: 25770 - DNA, 22 bp, synthetic construct
  misc_feature 1..22: note = chemically synthesized
  source 1..22: mol_type = other DNA
gattgcagctccaactcagatg

SEQ ID NO: 25771 - DNA, 22 bp, synthetic construct
  misc_feature 1..22: note = chemically synthesized
  source 1..22: mol_type = other DNA
cagctccaactcagatggacag

SEQ ID NO: 25772 - DNA, 22 bp, synthetic construct
  misc_feature 1..22: note = chemically synthesized
  source 1..22: mol_type = other DNA
caactcagatggacagagcagc

SEQ ID NO: 25773 - DNA, 22 bp, synthetic construct
  misc_feature 1..22: note = chemically synthesized
  source 1..22: mol_type = other DNA
agatggacagagcagcatgtgg

SEQ ID NO: 25774 - DNA, 22 bp, synthetic construct
  misc_feature 1..22: note = chemically synthesized
  source 1..22: mol_type = other DNA
gcattgtgaattttagctgcag

SEQ ID NO: 25775 - DNA, 22 bp, synthetic construct
  misc_feature 1..22: note = chemically synthesized
  source 1..22: mol_type = other DNA
tgaattttagctgcagatagac

SEQ ID NO: 25776 - DNA, 22 bp, synthetic construct
  misc_feature 1..22: note = chemically synthesized
  source 1..22: mol_type = other DNA
tagctgcagatagactgcaaga

SEQ ID NO: 25777 - DNA, 22 bp, synthetic construct
  misc_feature 1..22: note = chemically synthesized
  source 1..22: mol_type = other DNA
agctgcagatagactgcaagaa

SEQ ID NO: 25778 - DNA, 22 bp, synthetic construct
  misc_feature 1..22: note = chemically synthesized
  source 1..22: mol_type = other DNA
gctgcagatagactgcaagaac

SEQ ID NO: 25779 - DNA, 22 bp, synthetic construct
  misc_feature 1..22: note = chemically synthesized
  source 1..22: mol_type = other DNA
cagatagactgcaagaacaaac

SEQ ID NO: 25780 - DNA, 22 bp, synthetic construct
  misc_feature 1..22: note = chemically synthesized
  source 1..22: mol_type = other DNA
caagaacaaaccagcaatcctg

SEQ ID NO: 25781 - DNA, 22 bp, synthetic construct
  misc_feature 1..22: note = chemically synthesized
  source 1..22: mol_type = other DNA
agaggacccacagaccctctga

SEQ ID NO: 25782 - DNA, 22 bp, synthetic construct
  misc_feature 1..22: note = chemically synthesized
  source 1..22: mol_type = other DNA
tgaaggaagtagattgctcctg

SEQ ID NO: 25783 - DNA, 22 bp, synthetic construct
  misc_feature 1..22: note = chemically synthesized
  source 1..22: mol_type = other DNA
aaggaagtagattgctcctgca

SEQ ID NO: 25784 - DNA, 22 bp, synthetic construct
  misc_feature 1..22: note = chemically synthesized
  source 1..22: mol_type = other DNA
ctcctgcaggacccaggagaca

SEQ ID NO: 25785 - DNA, 22 bp, synthetic construct
  misc_feature 1..22: note = chemically synthesized
  source 1..22: mol_type = other DNA
ctgcaggacccaggagacaccc

SEQ ID NO: 25786 - DNA, 22 bp, synthetic construct
  misc_feature 1..22: note = chemically synthesized
  source 1..22: mol_type = other DNA
caggacccaggagacaccccaa

SEQ ID NO: 25787 - DNA, 22 bp, synthetic construct
  misc_feature 1..22: note = chemically synthesized
  source 1..22: mol_type = other DNA
tgagtgccccaactgcggaagt

SEQ ID NO: 25788 - DNA, 22 bp, synthetic construct
  misc_feature 1..22: note = chemically synthesized
  source 1..22: mol_type = other DNA
cggaagtgggaaagggagatcc

SEQ ID NO: 25789 - DNA, 22 bp, synthetic construct
  misc_feature 1..22: note = chemically synthesized
  source 1..22: mol_type = other DNA
ctctcctaaacacacactccca

SEQ ID NO: 25790 - DNA, 22 bp, synthetic construct
  misc_feature 1..22: note = chemically synthesized
  source 1..22: mol_type = other DNA
tcctaaacacacactcccactg

SEQ ID NO: 25791 - DNA, 22 bp, synthetic construct
  misc_feature 1..22: note = chemically synthesized
  source 1..22: mol_type = other DNA
ctaaacacacactcccactgga

SEQ ID NO: 25792 - DNA, 22 bp, synthetic construct
  misc_feature 1..22: note = chemically synthesized
  source 1..22: mol_type = other DNA
aacacacactcccactggagaa

SEQ ID NO: 25793 - DNA, 22 bp, synthetic construct
  misc_feature 1..22: note = chemically synthesized
  source 1..22: mol_type = other DNA
ccactggagaaactgaaggtct

SEQ ID NO: 25794 - DNA, 22 bp, synthetic construct
  misc_feature 1..22: note = chemically synthesized
  source 1..22: mol_type = other DNA
gagaaactgaaggtctgtttgt

SEQ ID NO: 25795 - DNA, 22 bp, synthetic construct
  misc_feature 1..22: note = chemically synthesized
  source 1..22: mol_type = other DNA
aaggtctgtttgtgggagaagt

SEQ ID NO: 25796 - DNA, 22 bp, synthetic construct
  misc_feature 1..22: note = chemically synthesized
  source 1..22: mol_type = other DNA
tttgtgggagaagtttctgacc

SEQ ID NO: 25797 - DNA, 22 bp, synthetic construct
  misc_feature 1..22: note = chemically synthesized
  source 1..22: mol_type = other DNA
gtgggagaagtttctgacctta

SEQ ID NO: 25798 - DNA, 22 bp, synthetic construct
  misc_feature 1..22: note = chemically synthesized
  source 1..22: mol_type = other DNA
tgggagaagtttctgaccttac

SEQ ID NO: 25799 - DNA, 22 bp, synthetic construct
  misc_feature 1..22: note = chemically synthesized
  source 1..22: mol_type = other DNA
ctgaccttacctggagttgagt

SEQ ID NO: 25800 - DNA, 22 bp, synthetic construct
  misc_feature 1..22: note = chemically synthesized
  source 1..22: mol_type = other DNA
tgaccttacctggagttgagtt

SEQ ID NO: 25801 - DNA, 22 bp, synthetic construct
  misc_feature 1..22: note = chemically synthesized
  source 1..22: mol_type = other DNA
accttacctggagttgagttaa

SEQ ID NO: 25802 - DNA, 22 bp, synthetic construct
  misc_feature 1..22: note = chemically synthesized
  source 1..22: mol_type = other DNA
acctggagttgagttaacttag

SEQ ID NO: 25803 - DNA, 22 bp, synthetic construct
  misc_feature 1..22: note = chemically synthesized
  source 1..22: mol_type = other DNA
cctggagttgagttaacttaga

SEQ ID NO: 25804 - DNA, 22 bp, synthetic construct
  misc_feature 1..22: note = chemically synthesized
  source 1..22: mol_type = other DNA
gagttgagttaacttagagagc

SEQ ID NO: 25805 - DNA, 22 bp, synthetic construct
  misc_feature 1..22: note = chemically synthesized
  source 1..22: mol_type = other DNA
agttaacttagagagctgagca

SEQ ID NO: 25806 - DNA, 22 bp, synthetic construct
  misc_feature 1..22: note = chemically synthesized
  source 1..22: mol_type = other DNA
acttagagagctgagcaaaata

SEQ ID NO: 25807 - DNA, 22 bp, synthetic construct
  misc_feature 1..22: note = chemically synthesized
  source 1..22: mol_type = other DNA
agagagctgagcaaaatacagg

SEQ ID NO: 25808 - DNA, 22 bp, synthetic construct
  misc_feature 1..22: note = chemically synthesized
  source 1..22: mol_type = other DNA
gagagctgagcaaaatacaggt

SEQ ID NO: 25809 - DNA, 22 bp, synthetic construct
  misc_feature 1..22: note = chemically synthesized
  source 1..22: mol_type = other DNA
agcaaaatacaggtgtagagga

SEQ ID NO: 25810 - DNA, 22 bp, synthetic construct
  misc_feature 1..22: note = chemically synthesized
  source 1..22: mol_type = other DNA
ggagctcactgggtccctgagc

SEQ ID NO: 25811 - DNA, 22 bp, synthetic construct
  misc_feature 1..22: note = chemically synthesized
  source 1..22: mol_type = other DNA
actgggtccctgagcaggccat

SEQ ID NO: 25812 - DNA, 22 bp, synthetic construct
  misc_feature 1..22: note = chemically synthesized
  source 1..22: mol_type = other DNA
ggtccctgagcaggccattcct

SEQ ID NO: 25813 - DNA, 22 bp, synthetic construct
  misc_feature 1..22: note = chemically synthesized
  source 1..22: mol_type = other DNA
agcaggccattcctgcctggca

SEQ ID NO: 25814 - DNA, 22 bp, synthetic construct
  misc_feature 1..22: note = chemically synthesized
  source 1..22: mol_type = other DNA
ctgcctggcatagccaggcatt

SEQ ID NO: 25815 - DNA, 22 bp, synthetic construct
  misc_feature 1..22: note = chemically synthesized
  source 1..22: mol_type = other DNA
cctggcatagccaggcatttac

SEQ ID NO: 25816 - DNA, 22 bp, synthetic construct
  misc_feature 1..22: note = chemically synthesized
  source 1..22: mol_type = other DNA
gcatagccaggcatttacatta

SEQ ID NO: 25817 - DNA, 22 bp, synthetic construct
  misc_feature 1..22: note = chemically synthesized
  source 1..22: mol_type = other DNA
acattactaacattgaatgtaa

SEQ ID NO: 25818 - DNA, 22 bp, synthetic construct
  misc_feature 1..22: note = chemically synthesized
  source 1..22: mol_type = other DNA
cattactaacattgaatgtaaa

SEQ ID NO: 25819 - DNA, 22 bp, synthetic construct
  misc_feature 1..22: note = chemically synthesized
  source 1..22: mol_type = other DNA
ctaacattgaatgtaaatggcc

SEQ ID NO: 25820 - DNA, 22 bp, synthetic construct
  misc_feature 1..22: note = chemically synthesized
  source 1..22: mol_type = other DNA
acattgaatgtaaatggcctaa

SEQ ID NO: 25821 - DNA, 22 bp, synthetic construct
  misc_feature 1..22: note = chemically synthesized
  source 1..22: mol_type = other DNA
aatgtaaatggcctaaatgctc

SEQ ID NO: 25822 - DNA, 22 bp, synthetic construct
  misc_feature 1..22: note = chemically synthesized
  source 1..22: mol_type = other DNA
aatgctccacttaaaagggtga

SEQ ID NO: 25823 - DNA, 22 bp, synthetic construct
  misc_feature 1..22: note = chemically synthesized
  source 1..22: mol_type = other DNA
cacttaaaagggtgaaaaaggt

SEQ ID NO: 25824 - DNA, 22 bp, synthetic construct
  misc_feature 1..22: note = chemically synthesized
  source 1..22: mol_type = other DNA
aaaagggtgaaaaaggtatttc

SEQ ID NO: 25825 - DNA, 22 bp, synthetic construct
  misc_feature 1..22: note = chemically synthesized
  source 1..22: mol_type = other DNA
aaagggtgaaaaaggtatttca

SEQ ID NO: 25826 - DNA, 22 bp, synthetic construct
  misc_feature 1..22: note = chemically synthesized
  source 1..22: mol_type = other DNA
catgcaaatggccaccaaaagt

SEQ ID NO: 25827 - DNA, 22 bp, synthetic construct
  misc_feature 1..22: note = chemically synthesized
  source 1..22: mol_type = other DNA
atgcaaatggccaccaaaagtg

SEQ ID NO: 25828 - DNA, 22 bp, synthetic construct
  misc_feature 1..22: note = chemically synthesized
  source 1..22: mol_type = other DNA
taaagcaacagcagttaaaaga

SEQ ID NO: 25829 - DNA, 22 bp, synthetic construct
  misc_feature 1..22: note = chemically synthesized
  source 1..22: mol_type = other DNA
aaagcaacagcagttaaaagag

SEQ ID NO: 25830 - DNA, 22 bp, synthetic construct
  misc_feature 1..22: note = chemically synthesized
  source 1..22: mol_type = other DNA
aagcaacagcagttaaaagaga

SEQ ID NO: 25831 - DNA, 22 bp, synthetic construct
  misc_feature 1..22: note = chemically synthesized
  source 1..22: mol_type = other DNA
aaagagacaaagagggacatta

SEQ ID NO: 25832 - DNA, 22 bp, synthetic construct
  misc_feature 1..22: note = chemically synthesized
  source 1..22: mol_type = other DNA
tataatggtaaaaggccttgtc

SEQ ID NO: 25833 - DNA, 22 bp, synthetic construct
  misc_feature 1..22: note = chemically synthesized
  source 1..22: mol_type = other DNA
gtccaacaggaaaatatcacaa

SEQ ID NO: 25834 - DNA, 22 bp, synthetic construct
  misc_feature 1..22: note = chemically synthesized
  source 1..22: mol_type = other DNA
tccaacaggaaaatatcacaat

SEQ ID NO: 25835 - DNA, 22 bp, synthetic construct
  misc_feature 1..22: note = chemically synthesized
  source 1..22: mol_type = other DNA
aaacatatatgcacctaacact

SEQ ID NO: 25836 - DNA, 22 bp, synthetic construct
  misc_feature 1..22: note = chemically synthesized
  source 1..22: mol_type = other DNA
aacatatatgcacctaacactg

SEQ ID NO: 25837 - DNA, 22 bp, synthetic construct
  misc_feature 1..22: note = chemically synthesized
  source 1..22: mol_type = other DNA
acactggagctcccaaatttat

SEQ ID NO: 25838 - DNA, 22 bp, synthetic construct
  misc_feature 1..22: note = chemically synthesized
  source 1..22: mol_type = other DNA
gagctcccaaatttatagaaca

SEQ ID NO: 25839 - DNA, 22 bp, synthetic construct
  misc_feature 1..22: note = chemically synthesized
  source 1..22: mol_type = other DNA
ccaaatttatagaacaattact

SEQ ID NO: 25840 - DNA, 22 bp, synthetic construct
  misc_feature 1..22: note = chemically synthesized
  source 1..22: mol_type = other DNA
atagaacaattactaatagacc

SEQ ID NO: 25841 - DNA, 22 bp, synthetic construct
  misc_feature 1..22: note = chemically synthesized
  source 1..22: mol_type = other DNA
tagaacaattactaatagacct

SEQ ID NO: 25842 - DNA, 22 bp, synthetic construct
  misc_feature 1..22: note = chemically synthesized
  source 1..22: mol_type = other DNA
ctaatagacctaagaaatgaga

SEQ ID NO: 25843 - DNA, 22 bp, synthetic construct
  misc_feature 1..22: note = chemically synthesized
  source 1..22: mol_type = other DNA
atagacctaagaaatgagatag

SEQ ID NO: 25844 - DNA, 22 bp, synthetic construct
  misc_feature 1..22: note = chemically synthesized
  source 1..22: mol_type = other DNA
agaaatgagatagacagcaaca

SEQ ID NO: 25845 - DNA, 22 bp, synthetic construct
  misc_feature 1..22: note = chemically synthesized
  source 1..22: mol_type = other DNA
caatacttcattgacagcacta

SEQ ID NO: 25846 - DNA, 22 bp, synthetic construct
  misc_feature 1..22: note = chemically synthesized
  source 1..22: mol_type = other DNA
aatacttcattgacagcactag

SEQ ID NO: 25847 - DNA, 22 bp, synthetic construct
  misc_feature 1..22: note = chemically synthesized
  source 1..22: mol_type = other DNA
cattgacagcactagacagttc

SEQ ID NO: 25848 - DNA, 22 bp, synthetic construct
  misc_feature 1..22: note = chemically synthesized
  source 1..22: mol_type = other DNA
attgacagcactagacagttca

SEQ ID NO: 25849 - DNA, 22 bp, synthetic construct
  misc_feature 1..22: note = chemically synthesized
  source 1..22: mol_type = other DNA
acagcactagacagttcatcaa

SEQ ID NO: 25850 - DNA, 22 bp, synthetic construct
  misc_feature 1..22: note = chemically synthesized
  source 1..22: mol_type = other DNA
gacagttcatcaagacagaaag

SEQ ID NO: 25851 - DNA, 22 bp, synthetic construct
  misc_feature 1..22: note = chemically synthesized
  source 1..22: mol_type = other DNA
atcaagacagaaagtcaacaaa

SEQ ID NO: 25852 - DNA, 22 bp, synthetic construct
  misc_feature 1..22: note = chemically synthesized
  source 1..22: mol_type = other DNA
aaattataccttagaacaaatg

SEQ ID NO: 25853 - DNA, 22 bp, synthetic construct
  misc_feature 1..22: note = chemically synthesized
  source 1..22: mol_type = other DNA
aattataccttagaacaaatgg

SEQ ID NO: 25854 - DNA, 22 bp, synthetic construct
  misc_feature 1..22: note = chemically synthesized
  source 1..22: mol_type = other DNA
taccttagaacaaatggactta

SEQ ID NO: 25855 - DNA, 22 bp, synthetic construct
  misc_feature 1..22: note = chemically synthesized
  source 1..22: mol_type = other DNA
agaacaaatggacttaacagtt

SEQ ID NO: 25856 - DNA, 22 bp, synthetic construct
  misc_feature 1..22: note = chemically synthesized
  source 1..22: mol_type = other DNA
gaacaaatggacttaacagtta

SEQ ID NO: 25857 - DNA, 22 bp, synthetic construct
  misc_feature 1..22: note = chemically synthesized
  source 1..22: mol_type = other DNA
aacagttatatacagaacattt

SEQ ID NO: 25858 - DNA, 22 bp, synthetic construct
  misc_feature 1..22: note = chemically synthesized
  source 1..22: mol_type = other DNA
acagttatatacagaacatttc

SEQ ID NO: 25859 - DNA, 22 bp, synthetic construct
  misc_feature 1..22: note = chemically synthesized
  source 1..22: mol_type = other DNA
tatacagaacatttcatccaat

SEQ ID NO: 25860 - DNA, 22 bp, synthetic construct
  misc_feature 1..22: note = chemically synthesized
  source 1..22: mol_type = other DNA
catccaataaccacagaacaca

SEQ ID NO: 25861 - DNA, 22 bp, synthetic construct
  misc_feature 1..22: note = chemically synthesized
  source 1..22: mol_type = other DNA
atccaataaccacagaacacac

SEQ ID NO: 25862 - DNA, 22 bp, synthetic construct
  misc_feature 1..22: note = chemically synthesized
  source 1..22: mol_type = other DNA
tattcaacagcgcgtggaaatt

SEQ ID NO: 25863 - DNA, 22 bp, synthetic construct
  misc_feature 1..22: note = chemically synthesized
  source 1..22: mol_type = other DNA
ttcaacagcgcgtggaaatttc

SEQ ID NO: 25864 - DNA, 22 bp, synthetic construct
  misc_feature 1..22: note = chemically synthesized
  source 1..22: mol_type = other DNA
aacagcgcgtggaaatttctcc

SEQ ID NO: 25865 - DNA, 22 bp, synthetic construct
  misc_feature 1..22: note = chemically synthesized
  source 1..22: mol_type = other DNA
ctccaaggtagaccatatgata

SEQ ID NO: 25866 - DNA, 22 bp, synthetic construct
  misc_feature 1..22: note = chemically synthesized
  source 1..22: mol_type = other DNA
tccaaggtagaccatatgatag

SEQ ID NO: 25867 - DNA, 22 bp, synthetic construct
  misc_feature 1..22: note = chemically synthesized
  source 1..22: mol_type = other DNA
caaggtagaccatatgataggc

SEQ ID NO: 25868 - DNA, 22 bp, synthetic construct
  misc_feature 1..22: note = chemically synthesized
  source 1..22: mol_type = other DNA
aataaatttactaacagaccaa

SEQ ID NO: 25869 - DNA, 22 bp, synthetic construct
  misc_feature 1..22: note = chemically synthesized
  source 1..22: mol_type = other DNA
actaacagaccaataacaagca

SEQ ID NO: 25870 - DNA, 22 bp, synthetic construct
  misc_feature 1..22: note = chemically synthesized
  source 1..22: mol_type = other DNA
ctaacagaccaataacaagcag

SEQ ID NO: 25871 - DNA, 22 bp, synthetic construct
  misc_feature 1..22: note = chemically synthesized
  source 1..22: mol_type = other DNA
acagaccaataacaagcagtga

SEQ ID NO: 25872 - DNA, 22 bp, synthetic construct
  misc_feature 1..22: note = chemically synthesized
  source 1..22: mol_type = other DNA
aattggtaattaaaaaattacc

SEQ ID NO: 25873 - DNA, 22 bp, synthetic construct
  misc_feature 1..22: note = chemically synthesized
  source 1..22: mol_type = other DNA
attggtaattaaaaaattacca

SEQ ID NO: 25874 - DNA, 22 bp, synthetic construct
  misc_feature 1..22: note = chemically synthesized
  source 1..22: mol_type = other DNA
gtaattaaaaaattaccaacca

SEQ ID NO: 25875 - DNA, 22 bp, synthetic construct
  misc_feature 1..22: note = chemically synthesized
  source 1..22: mol_type = other DNA
aaaaattaccaaccaaaaaaaa

SEQ ID NO: 25876 - DNA, 22 bp, synthetic construct
  misc_feature 1..22: note = chemically synthesized
  source 1..22: mol_type = other DNA
ccaaccaaaaaaaagttcagga

SEQ ID NO: 25877 - DNA, 22 bp, synthetic construct
  misc_feature 1..22: note = chemically synthesized
  source 1..22: mol_type = other DNA
aggaccagatggattcacaaca

SEQ ID NO: 25878 - DNA, 22 bp, synthetic construct
  misc_feature 1..22: note = chemically synthesized
  source 1..22: mol_type = other DNA
acaacagaattctactagacat

SEQ ID NO: 25879 - DNA, 22 bp, synthetic construct
  misc_feature 1..22: note = chemically synthesized
  source 1..22: mol_type = other DNA
tactagacattcaaagaggaat

SEQ ID NO: 25880 - DNA, 22 bp, synthetic construct
  misc_feature 1..22: note = chemically synthesized
  source 1..22: mol_type = other DNA
ctagacattcaaagaggaattg

SEQ ID NO: 25881 - DNA, 22 bp, synthetic construct
  misc_feature 1..22: note = chemically synthesized
  source 1..22: mol_type = other DNA
gacattcaaagaggaattggtc

SEQ ID NO: 25882 - DNA, 22 bp, synthetic construct
  misc_feature 1..22: note = chemically synthesized
  source 1..22: mol_type = other DNA
aaagaggaattggtccccatct

SEQ ID NO: 25883 - DNA, 22 bp, synthetic construct
  misc_feature 1..22: note = chemically synthesized
  source 1..22: mol_type = other DNA
gtccccatctttttgacactat

SEQ ID NO: 25884 - DNA, 22 bp, synthetic construct
  misc_feature 1..22: note = chemically synthesized
  source 1..22: mol_type = other DNA
tttgacactattctacaagaca

SEQ ID NO: 25885 - DNA, 22 bp, synthetic construct
  misc_feature 1..22: note = chemically synthesized
  source 1..22: mol_type = other DNA
ttgacactattctacaagacag

SEQ ID NO: 25886 - DNA, 22 bp, synthetic construct
  misc_feature 1..22: note = chemically synthesized
  source 1..22: mol_type = other DNA
tgacactattctacaagacaga

SEQ ID NO: 25887 - DNA, 22 bp, synthetic construct
  misc_feature 1..22: note = chemically synthesized
  source 1..22: mol_type = other DNA
gacactattctacaagacagat

SEQ ID NO: 25888 - DNA, 22 bp, synthetic construct
  misc_feature 1..22: note = chemically synthesized
  source 1..22: mol_type = other DNA
acactattctacaagacagata

SEQ ID NO: 25889 - DNA, 22 bp, synthetic construct
  misc_feature 1..22: note = chemically synthesized
  source 1..22: mol_type = other DNA
ttctacaagacagataaagaag

SEQ ID NO: 25890 - DNA, 22 bp, synthetic construct
  misc_feature 1..22: note = chemically synthesized
  source 1..22: mol_type = other DNA
tacaagacagataaagaaggaa

SEQ ID NO: 25891 - DNA, 22 bp, synthetic construct
  misc_feature 1..22: note = chemically synthesized
  source 1..22: mol_type = other DNA
caagacagataaagaaggaacc

SEQ ID NO: 25892 - DNA, 22 bp, synthetic construct
  misc_feature 1..22: note = chemically synthesized
  source 1..22: mol_type = other DNA
ccctaattcattctatgaagcc

SEQ ID NO: 25893 - DNA, 22 bp, synthetic construct
  misc_feature 1..22: note = chemically synthesized
  source 1..22: mol_type = other DNA
attcattctatgaagccagcat

SEQ ID NO: 25894 - DNA, 22 bp, synthetic construct
  misc_feature 1..22: note = chemically synthesized
  source 1..22: mol_type = other DNA
attctatgaagccagcatcaca

SEQ ID NO: 25895 - DNA, 22 bp, synthetic construct
  misc_feature 1..22: note = chemically synthesized
  source 1..22: mol_type = other DNA
tatgaagccagcatcacaccaa

SEQ ID NO: 25896 - DNA, 22 bp, synthetic construct
  misc_feature 1..22: note = chemically synthesized
  source 1..22: mol_type = other DNA
tgaagccagcatcacaccaaaa

SEQ ID NO: 25897 - DNA, 22 bp, synthetic construct
  misc_feature 1..22: note = chemically synthesized
  source 1..22: mol_type = other DNA
cagactgatagccttgatgaac

SEQ ID NO: 25898 - DNA, 22 bp, synthetic construct
  misc_feature 1..22: note = chemically synthesized
  source 1..22: mol_type = other DNA
atagccttgatgaacatagatg

SEQ ID NO: 25899 - DNA, 22 bp, synthetic construct
  misc_feature 1..22: note = chemically synthesized
  source 1..22: mol_type = other DNA
gatgaacatagatgctaaaatc

SEQ ID NO: 25900 - DNA, 22 bp, synthetic construct
  misc_feature 1..22: note = chemically synthesized
  source 1..22: mol_type = other DNA
atgaacatagatgctaaaatcc

SEQ ID NO: 25901 - DNA, 22 bp, synthetic construct
  misc_feature 1..22: note = chemically synthesized
  source 1..22: mol_type = other DNA
aaatccttaacaaaatactaga

SEQ ID NO: 25902 - DNA, 22 bp, synthetic construct
  misc_feature 1..22: note = chemically synthesized
  source 1..22: mol_type = other DNA
aacaaaatactagataaccaaa

SEQ ID NO: 25903 - DNA, 22 bp, synthetic construct
  misc_feature 1..22: note = chemically synthesized
  source 1..22: mol_type = other DNA
acaaaatactagataaccaaat

SEQ ID NO: 25904 - DNA, 22 bp, synthetic construct
  misc_feature 1..22: note = chemically synthesized
  source 1..22: mol_type = other DNA
gataaccaaattcaacaacata

SEQ ID NO: 25905 - DNA, 22 bp, synthetic construct
  misc_feature 1..22: note = chemically synthesized
  source 1..22: mol_type = other DNA
aacaacataacaaaaagataat

SEQ ID NO: 25906 - DNA, 22 bp, synthetic construct
  misc_feature 1..22: note = chemically synthesized
  source 1..22: mol_type = other DNA
catgccagggatgcagggttgg

SEQ ID NO: 25907 - DNA, 22 bp, synthetic construct
  misc_feature 1..22: note = chemically synthesized
  source 1..22: mol_type = other DNA
gtttgacatctgcaagtcaata

SEQ ID NO: 25908 - DNA, 22 bp, synthetic construct
  misc_feature 1..22: note = chemically synthesized
  source 1..22: mol_type = other DNA
gacatctgcaagtcaataagtg

SEQ ID NO: 25909 - DNA, 22 bp, synthetic construct
  misc_feature 1..22: note = chemically synthesized
  source 1..22: mol_type = other DNA
acatctgcaagtcaataagtgt

SEQ ID NO: 25910 - DNA, 22 bp, synthetic construct
  misc_feature 1..22: note = chemically synthesized
  source 1..22: mol_type = other DNA
caagtcaataagtgtgatacac

SEQ ID NO: 25911 - DNA, 22 bp, synthetic construct
  misc_feature 1..22: note = chemically synthesized
  source 1..22: mol_type = other DNA
aaaaacaaaaattacatgatca

SEQ ID NO: 25912 - DNA, 22 bp, synthetic construct
  misc_feature 1..22: note = chemically synthesized
  source 1..22: mol_type = other DNA
aaaacaaaaattacatgatcat

SEQ ID NO: 25913 - DNA, 22 bp, synthetic construct
  misc_feature 1..22: note = chemically synthesized
  source 1..22: mol_type = other DNA
catgatcatctcaatagatgca

SEQ ID NO: 25914 - DNA, 22 bp, synthetic construct
  misc_feature 1..22: note = chemically synthesized
  source 1..22: mol_type = other DNA
aatagatgcagaaaaagcattc

SEQ ID NO: 25915 - DNA, 22 bp, synthetic construct
  misc_feature 1..22: note = chemically synthesized
  source 1..22: mol_type = other DNA
aacaaaatccagcatacattta

SEQ ID NO: 25916 - DNA, 22 bp, synthetic construct
  misc_feature 1..22: note = chemically synthesized
  source 1..22: mol_type = other DNA
atgattaaaatgctcagcaaaa

SEQ ID NO: 25917 - DNA, 22 bp, synthetic construct
  misc_feature 1..22: note = chemically synthesized
  source 1..22: mol_type = other DNA
tgattaaaatgctcagcaaaat

SEQ ID NO: 25918 - DNA, 22 bp, synthetic construct
  misc_feature 1..22: note = chemically synthesized
  source 1..22: mol_type = other DNA
aaatgctcagcaaaatcagcat

SEQ ID NO: 25919 - DNA, 22 bp, synthetic construct
  misc_feature 1..22: note = chemically synthesized
  source 1..22: mol_type = other DNA
agcaaaatcagcatacaagaga

SEQ ID NO: 25920 - DNA, 22 bp, synthetic construct
  misc_feature 1..22: note = chemically synthesized
  source 1..22: mol_type = other DNA
agtgtaataaaagccatctgtg

SEQ ID NO: 25921 - DNA, 22 bp, synthetic construct
  misc_feature 1..22: note = chemically synthesized
  source 1..22: mol_type = other DNA
tgacaaacccacagccaacata

SEQ ID NO: 25922 - DNA, 22 bp, synthetic construct
  misc_feature 1..22: note = chemically synthesized
  source 1..22: mol_type = other DNA
aatggggaaaagttgaaagcat

SEQ ID NO: 25923 - DNA, 22 bp, synthetic construct
  misc_feature 1..22: note = chemically synthesized
  source 1..22: mol_type = other DNA
aaagcattccctctgagaactg

SEQ ID NO: 25924 - DNA, 22 bp, synthetic construct
  misc_feature 1..22: note = chemically synthesized
  source 1..22: mol_type = other DNA
cctctgagaactggaacaagac

SEQ ID NO: 25925 - DNA, 22 bp, synthetic construct
  misc_feature 1..22: note = chemically synthesized
  source 1..22: mol_type = other DNA
tgagaactggaacaagacaagg

SEQ ID NO: 25926 - DNA, 22 bp, synthetic construct
  misc_feature 1..22: note = chemically synthesized
  source 1..22: mol_type = other DNA
agaactggaacaagacaaggat

SEQ ID NO: 25927 - DNA, 22 bp, synthetic construct
  misc_feature 1..22: note = chemically synthesized
  source 1..22: mol_type = other DNA
gaacaagacaaggatgcccact

SEQ ID NO: 25928 - DNA, 22 bp, synthetic construct
  misc_feature 1..22: note = chemically synthesized
  source 1..22: mol_type = other DNA
tcaccactcctcttcaacatag

SEQ ID NO: 25929 - DNA, 22 bp, synthetic construct
  misc_feature 1..22: note = chemically synthesized
  source 1..22: mol_type = other DNA
accactcctcttcaacatagta

SEQ ID NO: 25930 - DNA, 22 bp, synthetic construct
  misc_feature 1..22: note = chemically synthesized
  source 1..22: mol_type = other DNA
ctcttcaacatagtactggaag

SEQ ID NO: 25931 - DNA, 22 bp, synthetic construct
  misc_feature 1..22: note = chemically synthesized
  source 1..22: mol_type = other DNA
ttcaacatagtactggaagtcc

SEQ ID NO: 25932 - DNA, 22 bp, synthetic construct
  misc_feature 1..22: note = chemically synthesized
  source 1..22: mol_type = other DNA
caacatagtactggaagtccta

SEQ ID NO: 25933 - DNA, 22 bp, synthetic construct
  misc_feature 1..22: note = chemically synthesized
  source 1..22: mol_type = other DNA
aacatagtactggaagtcctag

SEQ ID NO: 25934 - DNA, 22 bp, synthetic construct
  misc_feature 1..22: note = chemically synthesized
  source 1..22: mol_type = other DNA
gaagtcctagccagggcaatca

SEQ ID NO: 25935 - DNA, 22 bp, synthetic construct
  misc_feature 1..22: note = chemically synthesized
  source 1..22: mol_type = other DNA
gccagggcaatcagacaaaaca

SEQ ID NO: 25936 - DNA, 22 bp, synthetic construct
  misc_feature 1..22: note = chemically synthesized
  source 1..22: mol_type = other DNA
aaatcagtaaagaggaagtcaa

SEQ ID NO: 25937 - DNA, 22 bp, synthetic construct
  misc_feature 1..22: note = chemically synthesized
  source 1..22: mol_type = other DNA
tcactgtttgctgatgatatga

SEQ ID NO: 25938 - DNA, 22 bp, synthetic construct
  misc_feature 1..22: note = chemically synthesized
  source 1..22: mol_type = other DNA
tttgctgatgatatgatcattt

SEQ ID NO: 25939 - DNA, 22 bp, synthetic construct
  misc_feature 1..22: note = chemically synthesized
  source 1..22: mol_type = other DNA
gctgatgatatgatcatttacc

SEQ ID NO: 25940 - DNA, 22 bp, synthetic construct
  misc_feature 1..22: note = chemically synthesized
  source 1..22: mol_type = other DNA
ctgatgatatgatcatttacct

SEQ ID NO: 25941 - DNA, 22 bp, synthetic construct
  misc_feature 1..22: note = chemically synthesized
  source 1..22: mol_type = other DNA
atgatatgatcatttaccttta

SEQ ID NO: 25942 - DNA, 22 bp, synthetic construct
  misc_feature 1..22: note = chemically synthesized
  source 1..22: mol_type = other DNA
acctttaaaaccctaaagactc

SEQ ID NO: 25943 - DNA, 22 bp, synthetic construct
  misc_feature 1..22: note = chemically synthesized
  source 1..22: mol_type = other DNA
cctttaaaaccctaaagactcc

SEQ ID NO: 25944 - DNA, 22 bp, synthetic construct
  misc_feature 1..22: note = chemically synthesized
  source 1..22: mol_type = other DNA
taaaaccctaaagactcctcca

SEQ ID NO: 25945 - DNA, 22 bp, synthetic construct
  misc_feature 1..22: note = chemically synthesized
  source 1..22: mol_type = other DNA
aaaaccctaaagactcctccag

SEQ ID NO: 25946 - DNA, 22 bp, synthetic construct
  misc_feature 1..22: note = chemically synthesized
  source 1..22: mol_type = other DNA
aaaccctaaagactcctccaga

SEQ ID NO: 25947 - DNA, 22 bp, synthetic construct
  misc_feature 1..22: note = chemically synthesized
  source 1..22: mol_type = other DNA
aagactcctccagaaagctcct

SEQ ID NO: 25948 - DNA, 22 bp, synthetic construct
  misc_feature 1..22: note = chemically synthesized
  source 1..22: mol_type = other DNA
ctccagaaagctcctagaactg

SEQ ID NO: 25949 - DNA, 22 bp, synthetic construct
  misc_feature 1..22: note = chemically synthesized
  source 1..22: mol_type = other DNA
cagaaagctcctagaactgata

SEQ ID NO: 25950 - DNA, 22 bp, synthetic construct
  misc_feature 1..22: note = chemically synthesized
  source 1..22: mol_type = other DNA
ctagaactgataaaataattca

SEQ ID NO: 25951 - DNA, 22 bp, synthetic construct
  misc_feature 1..22: note = chemically synthesized
  source 1..22: mol_type = other DNA
gaactgataaaataattcagca

SEQ ID NO: 25952 - DNA, 22 bp, synthetic construct
  misc_feature 1..22: note = chemically synthesized
  source 1..22: mol_type = other DNA
ataaaataattcagcaaagttt

SEQ ID NO: 25953 - DNA, 22 bp, synthetic construct
  misc_feature 1..22: note = chemically synthesized
  source 1..22: mol_type = other DNA
agcaaagtttccagatacaaga

SEQ ID NO: 25954 - DNA, 22 bp, synthetic construct
  misc_feature 1..22: note = chemically synthesized
  source 1..22: mol_type = other DNA
ccagatacaagatgaatgcaca

SEQ ID NO: 25955 - DNA, 22 bp, synthetic construct
  misc_feature 1..22: note = chemically synthesized
  source 1..22: mol_type = other DNA
cagatacaagatgaatgcacac

SEQ ID NO: 25956 - DNA, 22 bp, synthetic construct
  misc_feature 1..22: note = chemically synthesized
  source 1..22: mol_type = other DNA
ttctatacaccaacagcaacca

SEQ ID NO: 25957 - DNA, 22 bp, synthetic construct
  misc_feature 1..22: note = chemically synthesized
  source 1..22: mol_type = other DNA
ctatacaccaacagcaaccaaa

SEQ ID NO: 25958 - DNA, 22 bp, synthetic construct
  misc_feature 1..22: note = chemically synthesized
  source 1..22: mol_type = other DNA
tatacaccaacagcaaccaaat

SEQ ID NO: 25959 - DNA, 22 bp, synthetic construct
  misc_feature 1..22: note = chemically synthesized
  source 1..22: mol_type = other DNA
tacaccaacagcaaccaaatgg

SEQ ID NO: 25960 - DNA, 22 bp, synthetic construct
  misc_feature 1..22: note = chemically synthesized
  source 1..22: mol_type = other DNA
aaccccttgtacaatagatgca

SEQ ID NO: 25961 - DNA, 22 bp, synthetic construct
  misc_feature 1..22: note = chemically synthesized
  source 1..22: mol_type = other DNA
gtacaatagatgcaaaaatggc

SEQ ID NO: 25962 - DNA, 22 bp, synthetic construct
  misc_feature 1..22: note = chemically synthesized
  source 1..22: mol_type = other DNA
tacaatagatgcaaaaatggcc

SEQ ID NO: 25963 - DNA, 22 bp, synthetic construct
  misc_feature 1..22: note = chemically synthesized
  source 1..22: mol_type = other DNA
atacaacccctatttattgcca

SEQ ID NO: 25964 - DNA, 22 bp, synthetic construct
  misc_feature 1..22: note = chemically synthesized
  source 1..22: mol_type = other DNA
tttattgccatataaaacgtac

SEQ ID NO: 25965 - DNA, 22 bp, synthetic construct
  misc_feature 1..22: note = chemically synthesized
  source 1..22: mol_type = other DNA
attgccatataaaacgtactct

SEQ ID NO: 25966 - DNA, 22 bp, synthetic construct
  misc_feature 1..22: note = chemically synthesized
  source 1..22: mol_type = other DNA
ttgccatataaaacgtactctc

SEQ ID NO: 25967 - DNA, 22 bp, synthetic construct
  misc_feature 1..22: note = chemically synthesized
  source 1..22: mol_type = other DNA
ccatataaaacgtactctcaag

SEQ ID NO: 25968 - DNA, 22 bp, synthetic construct
  misc_feature 1..22: note = chemically synthesized
  source 1..22: mol_type = other DNA
tcaagatggattaaagacttaa

SEQ ID NO: 25969 - DNA, 22 bp, synthetic construct
  misc_feature 1..22: note = chemically synthesized
  source 1..22: mol_type = other DNA
aagatggattaaagacttaaat

SEQ ID NO: 25970 - DNA, 22 bp, synthetic construct
  misc_feature 1..22: note = chemically synthesized
  source 1..22: mol_type = other DNA
aagacttaaatataaaacttaa

SEQ ID NO: 25971 - DNA, 22 bp, synthetic construct
  misc_feature 1..22: note = chemically synthesized
  source 1..22: mol_type = other DNA
aaatataaaacttaaaactata

SEQ ID NO: 25972 - DNA, 22 bp, synthetic construct
  misc_feature 1..22: note = chemically synthesized
  source 1..22: mol_type = other DNA
aatataaaacttaaaactataa

SEQ ID NO: 25973 - DNA, 22 bp, synthetic construct
  misc_feature 1..22: note = chemically synthesized
  source 1..22: mol_type = other DNA
aaaactataaaactactaaaag

SEQ ID NO: 25974 - DNA, 22 bp, synthetic construct
  misc_feature 1..22: note = chemically synthesized
  source 1..22: mol_type = other DNA
aaactataaaactactaaaaga

SEQ ID NO: 25975 - DNA, 22 bp, synthetic construct
  misc_feature 1..22: note = chemically synthesized
  source 1..22: mol_type = other DNA
taaaactactaaaagaaaacat

SEQ ID NO: 25976 - DNA, 22 bp, synthetic construct
  misc_feature 1..22: note = chemically synthesized
  source 1..22: mol_type = other DNA
ctaaaagaaaacataagggaga

SEQ ID NO: 25977 - DNA, 22 bp, synthetic construct
  misc_feature 1..22: note = chemically synthesized
  source 1..22: mol_type = other DNA
aaagaaaacataagggagacac

SEQ ID NO: 25978 - DNA, 22 bp, synthetic construct
  misc_feature 1..22: note = chemically synthesized
  source 1..22: mol_type = other DNA
caagacatggctttgggcaaag

SEQ ID NO: 25979 - DNA, 22 bp, synthetic construct
  misc_feature 1..22: note = chemically synthesized
  source 1..22: mol_type = other DNA
aagacatggctttgggcaaaga

SEQ ID NO: 25980 - DNA, 22 bp, synthetic construct
  misc_feature 1..22: note = chemically synthesized
  source 1..22: mol_type = other DNA
tgggcaaagattttatggccaa

SEQ ID NO: 25981 - DNA, 22 bp, synthetic construct
  misc_feature 1..22: note = chemically synthesized
  source 1..22: mol_type = other DNA
gggcaaagattttatggccaag

SEQ ID NO: 25982 - DNA, 22 bp, synthetic construct
  misc_feature 1..22: note = chemically synthesized
  source 1..22: mol_type = other DNA
ggcaaagattttatggccaaga

SEQ ID NO: 25983 - DNA, 22 bp, synthetic construct
  misc_feature 1..22: note = chemically synthesized
  source 1..22: mol_type = other DNA
tatggccaagacctcaaaagca

SEQ ID NO: 25984 - DNA, 22 bp, synthetic construct
  misc_feature 1..22: note = chemically synthesized
  source 1..22: mol_type = other DNA
atggccaagacctcaaaagcac

SEQ ID NO: 25985 - DNA, 22 bp, synthetic construct
  misc_feature 1..22: note = chemically synthesized
  source 1..22: mol_type = other DNA
tggccaagacctcaaaagcaca

SEQ ID NO: 25986 - DNA, 22 bp, synthetic construct
  misc_feature 1..22: note = chemically synthesized
  source 1..22: mol_type = other DNA
aaaagcacaggcaacaaaagca

SEQ ID NO: 25987 - DNA, 22 bp, synthetic construct
  misc_feature 1..22: note = chemically synthesized
  source 1..22: mol_type = other DNA
tattaagctaaaatacatctgc

SEQ ID NO: 25988 - DNA, 22 bp, synthetic construct
  misc_feature 1..22: note = chemically synthesized
  source 1..22: mol_type = other DNA
agctaaaatacatctgcacagt

SEQ ID NO: 25989 - DNA, 22 bp, synthetic construct
  misc_feature 1..22: note = chemically synthesized
  source 1..22: mol_type = other DNA
aaatacatctgcacagtaaagg

SEQ ID NO: 25990 - DNA, 22 bp, synthetic construct
  misc_feature 1..22: note = chemically synthesized
  source 1..22: mol_type = other DNA
cacagtaaaggaaacaatcaac

SEQ ID NO: 25991 - DNA, 22 bp, synthetic construct
  misc_feature 1..22: note = chemically synthesized
  source 1..22: mol_type = other DNA
ttgaatgcgagaaaatatttgc

SEQ ID NO: 25992 - DNA, 22 bp, synthetic construct
  misc_feature 1..22: note = chemically synthesized
  source 1..22: mol_type = other DNA
aatgcgagaaaatatttgcata

SEQ ID NO: 25993 - DNA, 22 bp, synthetic construct
  misc_feature 1..22: note = chemically synthesized
  source 1..22: mol_type = other DNA
gcatacatttgacaaggaatta

SEQ ID NO: 25994 - DNA, 22 bp, synthetic construct
  misc_feature 1..22: note = chemically synthesized
  source 1..22: mol_type = other DNA
catacatttgacaaggaattaa

SEQ ID NO: 25995 - DNA, 22 bp, synthetic construct
  misc_feature 1..22: note = chemically synthesized
  source 1..22: mol_type = other DNA
gacaaggaattaatctccagaa

SEQ ID NO: 25996 - DNA, 22 bp, synthetic construct
  misc_feature 1..22: note = chemically synthesized
  source 1..22: mol_type = other DNA
acaaggaattaatctccagaat

SEQ ID NO: 25997 - DNA, 22 bp, synthetic construct
  misc_feature 1..22: note = chemically synthesized
  source 1..22: mol_type = other DNA
atctccagaatatataagaaac

SEQ ID NO: 25998 - DNA, 22 bp, synthetic construct
  misc_feature 1..22: note = chemically synthesized
  source 1..22: mol_type = other DNA
cagaatatataagaaactcaaa

SEQ ID NO: 25999 - DNA, 22 bp, synthetic construct
  misc_feature 1..22: note = chemically synthesized
  source 1..22: mol_type = other DNA
aaacaactcaacagtggaaaaa

SEQ ID NO: 26000 - DNA, 22 bp, synthetic construct
  misc_feature 1..22: note = chemically synthesized
  source 1..22: mol_type = other DNA
aacagtggaaaaacaaataatc

SEQ ID NO: 26001 - DNA, 22 bp, synthetic construct
  misc_feature 1..22: note = chemically synthesized
  source 1..22: mol_type = other DNA
attaaaaaattggcaaaggata

SEQ ID NO: 26002 - DNA, 22 bp, synthetic construct
  misc_feature 1..22: note = chemically synthesized
  source 1..22: mol_type = other DNA
aaaaattggcaaaggatatttt

SEQ ID NO: 26003 - DNA, 22 bp, synthetic construct
  misc_feature 1..22: note = chemically synthesized
  source 1..22: mol_type = other DNA
gcaaaggatatttttcaaaaga

SEQ ID NO: 26004 - DNA, 22 bp, synthetic construct
  misc_feature 1..22: note = chemically synthesized
  source 1..22: mol_type = other DNA
ttcaaaagaagacatacaaatg

SEQ ID NO: 26005 - DNA, 22 bp, synthetic construct
  misc_feature 1..22: note = chemically synthesized
  source 1..22: mol_type = other DNA
tcaaaagaagacatacaaatgc

SEQ ID NO: 26006 - DNA, 22 bp, synthetic construct
  misc_feature 1..22: note = chemically synthesized
  source 1..22: mol_type = other DNA
caaaagaagacatacaaatgca

SEQ ID NO: 26007 - DNA, 22 bp, synthetic construct
  misc_feature 1..22: note = chemically synthesized
  source 1..22: mol_type = other DNA
aaaagaagacatacaaatgcac

SEQ ID NO: 26008 - DNA, 22 bp, synthetic construct
  misc_feature 1..22: note = chemically synthesized
  source 1..22: mol_type = other DNA
ctcaacattactaatcatcaga

SEQ ID NO: 26009 - DNA, 22 bp, synthetic construct
  misc_feature 1..22: note = chemically synthesized
  source 1..22: mol_type = other DNA
aacattactaatcatcagagaa

SEQ ID NO: 26010 - DNA, 22 bp, synthetic construct
  misc_feature 1..22: note = chemically synthesized
  source 1..22: mol_type = other DNA
ctaatcatcagagaaatgcaaa

SEQ ID NO: 26011 - DNA, 22 bp, synthetic construct
  misc_feature 1..22: note = chemically synthesized
  source 1..22: mol_type = other DNA
atcatcagagaaatgcaaatca

SEQ ID NO: 26012 - DNA, 22 bp, synthetic construct
  misc_feature 1..22: note = chemically synthesized
  source 1..22: mol_type = other DNA
atgccagttagaatcatcatga

SEQ ID NO: 26013 - DNA, 22 bp, synthetic construct
  misc_feature 1..22: note = chemically synthesized
  source 1..22: mol_type = other DNA
tgccagttagaatcatcatgat

SEQ ID NO: 26014 - DNA, 22 bp, synthetic construct
  misc_feature 1..22: note = chemically synthesized
  source 1..22: mol_type = other DNA
gaatcatcatgatttaaataaa

SEQ ID NO: 26015 - DNA, 22 bp, synthetic construct
  misc_feature 1..22: note = chemically synthesized
  source 1..22: mol_type = other DNA
aaataaattaataaataaataa

SEQ ID NO: 26016 - DNA, 22 bp, synthetic construct
  misc_feature 1..22: note = chemically synthesized
  source 1..22: mol_type = other DNA
aataaattaataaataaataac

SEQ ID NO: 26017 - DNA, 22 bp, synthetic construct
  misc_feature 1..22: note = chemically synthesized
  source 1..22: mol_type = other DNA
ataaataaataacacatgctgg

SEQ ID NO: 26018 - DNA, 22 bp, synthetic construct
  misc_feature 1..22: note = chemically synthesized
  source 1..22: mol_type = other DNA
gcaaggatgtgaaggaaaaggc

SEQ ID NO: 26019 - DNA, 22 bp, synthetic construct
  misc_feature 1..22: note = chemically synthesized
  source 1..22: mol_type = other DNA
gtaggcactattggtaagcatg

SEQ ID NO: 26020 - DNA, 22 bp, synthetic construct
  misc_feature 1..22: note = chemically synthesized
  source 1..22: mol_type = other DNA
ttggtaagcatgcaaattagta

SEQ ID NO: 26021 - DNA, 22 bp, synthetic construct
  misc_feature 1..22: note = chemically synthesized
  source 1..22: mol_type = other DNA
gtaagcatgcaaattagtatag

SEQ ID NO: 26022 - DNA, 22 bp, synthetic construct
  misc_feature 1..22: note = chemically synthesized
  source 1..22: mol_type = other DNA
gtatagccactatggaaaacaa

SEQ ID NO: 26023 - DNA, 22 bp, synthetic construct
  misc_feature 1..22: note = chemically synthesized
  source 1..22: mol_type = other DNA
tggaaaacaatatgtagattta

SEQ ID NO: 26024 - DNA, 22 bp, synthetic construct
  misc_feature 1..22: note = chemically synthesized
  source 1..22: mol_type = other DNA
accaaaaagctaaaaattgaac

SEQ ID NO: 26025 - DNA, 22 bp, synthetic construct
  misc_feature 1..22: note = chemically synthesized
  source 1..22: mol_type = other DNA
ccaaaaagctaaaaattgaact

SEQ ID NO: 26026 - DNA, 22 bp, synthetic construct
  misc_feature 1..22: note = chemically synthesized
  source 1..22: mol_type = other DNA
aaaattgaactatcataagatc

SEQ ID NO: 26027 - DNA, 22 bp, synthetic construct
  misc_feature 1..22: note = chemically synthesized
  source 1..22: mol_type = other DNA
aactatcataagatccagcaat

SEQ ID NO: 26028 - DNA, 22 bp, synthetic construct
  misc_feature 1..22: note = chemically synthesized
  source 1..22: mol_type = other DNA
tcataagatccagcaatcttat

SEQ ID NO: 26029 - DNA, 22 bp, synthetic construct
  misc_feature 1..22: note = chemically synthesized
  source 1..22: mol_type = other DNA
attactgggtatttatccaaag

SEQ ID NO: 26030 - DNA, 22 bp, synthetic construct
  misc_feature 1..22: note = chemically synthesized
  source 1..22: mol_type = other DNA
ttactgggtatttatccaaagg

SEQ ID NO: 26031 - DNA, 22 bp, synthetic construct
  misc_feature 1..22: note = chemically synthesized
  source 1..22: mol_type = other DNA
ctgggtatttatccaaaggaaa

SEQ ID NO: 26032 - DNA, 22 bp, synthetic construct
  misc_feature 1..22: note = chemically synthesized
  source 1..22: mol_type = other DNA
ggtatttatccaaaggaaaaga

SEQ ID NO: 26033 - DNA, 22 bp, synthetic construct
  misc_feature 1..22: note = chemically synthesized
  source 1..22: mol_type = other DNA
atccaaaggaaaagaattcaga

SEQ ID NO: 26034 - DNA, 22 bp, synthetic construct
  misc_feature 1..22: note = chemically synthesized
  source 1..22: mol_type = other DNA
tccaaaggaaaagaattcagaa

SEQ ID NO: 26035 - DNA, 22 bp, synthetic construct
  misc_feature 1..22: note = chemically synthesized
  source 1..22: mol_type = other DNA
agaataataaacagatactggt

SEQ ID NO: 26036 - DNA, 22 bp, synthetic construct
  misc_feature 1..22: note = chemically synthesized
  source 1..22: mol_type = other DNA
gtaccacactgtttattgcagc

SEQ ID NO: 26037 - DNA, 22 bp, synthetic construct
  misc_feature 1..22: note = chemically synthesized
  source 1..22: mol_type = other DNA
tttattgcagcacgattcacat

SEQ ID NO: 26038 - DNA, 22 bp, synthetic construct
  misc_feature 1..22: note = chemically synthesized
  source 1..22: mol_type = other DNA
attgcagcacgattcacattag

SEQ ID NO: 26039 - DNA, 22 bp, synthetic construct
  misc_feature 1..22: note = chemically synthesized
  source 1..22: mol_type = other DNA
ttgcagcacgattcacattagc

SEQ ID NO: 26040 - DNA, 22 bp, synthetic construct
  misc_feature 1..22: note = chemically synthesized
  source 1..22: mol_type = other DNA
cagcacgattcacattagcaaa

SEQ ID NO: 26041 - DNA, 22 bp, synthetic construct
  misc_feature 1..22: note = chemically synthesized
  source 1..22: mol_type = other DNA
acattagcaaagatatggaatc

SEQ ID NO: 26042 - DNA, 22 bp, synthetic construct
  misc_feature 1..22: note = chemically synthesized
  source 1..22: mol_type = other DNA
gcaaagatatggaatcaaccta

SEQ ID NO: 26043 - DNA, 22 bp, synthetic construct
  misc_feature 1..22: note = chemically synthesized
  source 1..22: mol_type = other DNA
agtgtccatcaatggatgaatg

SEQ ID NO: 26044 - DNA, 22 bp, synthetic construct
  misc_feature 1..22: note = chemically synthesized
  source 1..22: mol_type = other DNA
aatattattcaaccatacaaat

SEQ ID NO: 26045 - DNA, 22 bp, synthetic construct
  misc_feature 1..22: note = chemically synthesized
  source 1..22: mol_type = other DNA
ttcaaccatacaaatataaaat

SEQ ID NO: 26046 - DNA, 22 bp, synthetic construct
  misc_feature 1..22: note = chemically synthesized
  source 1..22: mol_type = other DNA
aaccatacaaatataaaatcat

SEQ ID NO: 26047 - DNA, 22 bp, synthetic construct
  misc_feature 1..22: note = chemically synthesized
  source 1..22: mol_type = other DNA
catttgcagcaacatggatgaa

SEQ ID NO: 26048 - DNA, 22 bp, synthetic construct
  misc_feature 1..22: note = chemically synthesized
  source 1..22: mol_type = other DNA
atttgcagcaacatggatgaaa

SEQ ID NO: 26049 - DNA, 22 bp, synthetic construct
  misc_feature 1..22: note = chemically synthesized
  source 1..22: mol_type = other DNA
gcagcaacatggatgaaactgg

SEQ ID NO: 26050 - DNA, 22 bp, synthetic construct
  misc_feature 1..22: note = chemically synthesized
  source 1..22: mol_type = other DNA
cagcaacatggatgaaactgga

SEQ ID NO: 26051 - DNA, 22 bp, synthetic construct
  misc_feature 1..22: note = chemically synthesized
  source 1..22: mol_type = other DNA
gaagtcattatgttaaacgaaa

SEQ ID NO: 26052 - DNA, 22 bp, synthetic construct
  misc_feature 1..22: note = chemically synthesized
  source 1..22: mol_type = other DNA
tgttaaacgaaataagccaggc

SEQ ID NO: 26053 - DNA, 22 bp, synthetic construct
  misc_feature 1..22: note = chemically synthesized
  source 1..22: mol_type = other DNA
aacgaaataagccaggcataga

SEQ ID NO: 26054 - DNA, 22 bp, synthetic construct
  misc_feature 1..22: note = chemically synthesized
  source 1..22: mol_type = other DNA
tgcatgttctcactgatatgtg

SEQ ID NO: 26055 - DNA, 22 bp, synthetic construct
  misc_feature 1..22: note = chemically synthesized
  source 1..22: mol_type = other DNA
gcatgttctcactgatatgtgg

SEQ ID NO: 26056 - DNA, 22 bp, synthetic construct
  misc_feature 1..22: note = chemically synthesized
  source 1..22: mol_type = other DNA
catgttctcactgatatgtggg

SEQ ID NO: 26057 - DNA, 22 bp, synthetic construct
  misc_feature 1..22: note = chemically synthesized
  source 1..22: mol_type = other DNA
tcactgatatgtgggagctaaa

SEQ ID NO: 26058 - DNA, 22 bp, synthetic construct
  misc_feature 1..22: note = chemically synthesized
  source 1..22: mol_type = other DNA
actgatatgtgggagctaaaaa

SEQ ID NO: 26059 - DNA, 22 bp, synthetic construct
  misc_feature 1..22: note = chemically synthesized
  source 1..22: mol_type = other DNA
atatgtgggagctaaaaaagtt

SEQ ID NO: 26060 - DNA, 22 bp, synthetic construct
  misc_feature 1..22: note = chemically synthesized
  source 1..22: mol_type = other DNA
aaaaagttaatatcatgtaggt

SEQ ID NO: 26061 - DNA, 22 bp, synthetic construct
  misc_feature 1..22: note = chemically synthesized
  source 1..22: mol_type = other DNA
atatcatgtaggtagagagtag

SEQ ID NO: 26062 - DNA, 22 bp, synthetic construct
  misc_feature 1..22: note = chemically synthesized
  source 1..22: mol_type = other DNA
tgggaggaagggagacgaagag

SEQ ID NO: 26063 - DNA, 22 bp, synthetic construct
  misc_feature 1..22: note = chemically synthesized
  source 1..22: mol_type = other DNA
gttaatggaaacaggcagttag

SEQ ID NO: 26064 - DNA, 22 bp, synthetic construct
  misc_feature 1..22: note = chemically synthesized
  source 1..22: mol_type = other DNA
atggaaacaggcagttagatag

SEQ ID NO: 26065 - DNA, 22 bp, synthetic construct
  misc_feature 1..22: note = chemically synthesized
  source 1..22: mol_type = other DNA
gatagaaggaatatgttctgat

SEQ ID NO: 26066 - DNA, 22 bp, synthetic construct
  misc_feature 1..22: note = chemically synthesized
  source 1..22: mol_type = other DNA
tgatgttcaatagcaaagtagg

SEQ ID NO: 26067 - DNA, 22 bp, synthetic construct
  misc_feature 1..22: note = chemically synthesized
  source 1..22: mol_type = other DNA
atgttcaatagcaaagtagggt

SEQ ID NO: 26068 - DNA, 22 bp, synthetic construct
  misc_feature 1..22: note = chemically synthesized
  source 1..22: mol_type = other DNA
aatagcaaagtagggtgattat

SEQ ID NO: 26069 - DNA, 22 bp, synthetic construct
  misc_feature 1..22: note = chemically synthesized
  source 1..22: mol_type = other DNA
tagttaaaaacaatatattgta

SEQ ID NO: 26070 - DNA, 22 bp, synthetic construct
  misc_feature 1..22: note = chemically synthesized
  source 1..22: mol_type = other DNA
aaaacaatatattgtatatttc

SEQ ID NO: 26071 - DNA, 22 bp, synthetic construct
  misc_feature 1..22: note = chemically synthesized
  source 1..22: mol_type = other DNA
tatatttcaaaatagtagaaga

SEQ ID NO: 26072 - DNA, 22 bp, synthetic construct
  misc_feature 1..22: note = chemically synthesized
  source 1..22: mol_type = other DNA
caaaatagtagaagaaaggtct

SEQ ID NO: 26073 - DNA, 22 bp, synthetic construct
  misc_feature 1..22: note = chemically synthesized
  source 1..22: mol_type = other DNA
aaaatagtagaagaaaggtctt

SEQ ID NO: 26074 - DNA, 22 bp, synthetic construct
  misc_feature 1..22: note = chemically synthesized
  source 1..22: mol_type = other DNA
gaaatgttcctaacacatagaa

SEQ ID NO: 26075 - DNA, 22 bp, synthetic construct
  misc_feature 1..22: note = chemically synthesized
  source 1..22: mol_type = other DNA
aaatgttcctaacacatagaaa

SEQ ID NO: 26076 - DNA, 22 bp, synthetic construct
  misc_feature 1..22: note = chemically synthesized
  source 1..22: mol_type = other DNA
ctaacacatagaaacgataaat

SEQ ID NO: 26077 - DNA, 22 bp, synthetic construct
  misc_feature 1..22: note = chemically synthesized
  source 1..22: mol_type = other DNA
acacatagaaacgataaatact

SEQ ID NO: 26078 - DNA, 22 bp, synthetic construct
  misc_feature 1..22: note = chemically synthesized
  source 1..22: mol_type = other DNA
gaggtgatgaataccccaaata

SEQ ID NO: 26079 - DNA, 22 bp, synthetic construct
  misc_feature 1..22: note = chemically synthesized
  source 1..22: mol_type = other DNA
aggtgatgaataccccaaatac

SEQ ID NO: 26080 - DNA, 22 bp, synthetic construct
  misc_feature 1..22: note = chemically synthesized
  source 1..22: mol_type = other DNA
acttgatcattatacattatat

SEQ ID NO: 26081 - DNA, 22 bp, synthetic construct
  misc_feature 1..22: note = chemically synthesized
  source 1..22: mol_type = other DNA
gatcattatacattatatgcat

SEQ ID NO: 26082 - DNA, 22 bp, synthetic construct
  misc_feature 1..22: note = chemically synthesized
  source 1..22: mol_type = other DNA
atcattatacattatatgcatg

SEQ ID NO: 26083 - DNA, 22 bp, synthetic construct
  misc_feature 1..22: note = chemically synthesized
  source 1..22: mol_type = other DNA
tacattatatgcatgtaacaaa

SEQ ID NO: 26084 - DNA, 22 bp, synthetic construct
  misc_feature 1..22: note = chemically synthesized
  source 1..22: mol_type = other DNA
tatgcatgtaacaaaatgtcac

SEQ ID NO: 26085 - DNA, 22 bp, synthetic construct
  misc_feature 1..22: note = chemically synthesized
  source 1..22: mol_type = other DNA
atacatataaacacgtcatata

SEQ ID NO: 26086 - DNA, 22 bp, synthetic construct
  misc_feature 1..22: note = chemically synthesized
  source 1..22: mol_type = other DNA
atattggttgaggcctgattgt

SEQ ID NO: 26087 - DNA, 22 bp, synthetic construct
  misc_feature 1..22: note = chemically synthesized
  source 1..22: mol_type = other DNA
gttgaggcctgattgtaagtaa

SEQ ID NO: 26088 - DNA, 22 bp, synthetic construct
  misc_feature 1..22: note = chemically synthesized
  source 1..22: mol_type = other DNA
aggcctgattgtaagtaaatct

SEQ ID NO: 26089 - DNA, 22 bp, synthetic construct
  misc_feature 1..22: note = chemically synthesized
  source 1..22: mol_type = other DNA
attgtaagtaaatctttgtccc

SEQ ID NO: 26090 - DNA, 22 bp, synthetic construct
  misc_feature 1..22: note = chemically synthesized
  source 1..22: mol_type = other DNA
taagtaaatctttgtccctcca

SEQ ID NO: 26091 - DNA, 22 bp, synthetic construct
  misc_feature 1..22: note = chemically synthesized
  source 1..22: mol_type = other DNA
tgtccctccagacatttccctg

SEQ ID NO: 26092 - DNA, 22 bp, synthetic construct
  misc_feature 1..22: note = chemically synthesized
  source 1..22: mol_type = other DNA
gtccctccagacatttccctgt

SEQ ID NO: 26093 - DNA, 22 bp, synthetic construct
  misc_feature 1..22: note = chemically synthesized
  source 1..22: mol_type = other DNA
tccctccagacatttccctgta

SEQ ID NO: 26094 - DNA, 22 bp, synthetic construct
  misc_feature 1..22: note = chemically synthesized
  source 1..22: mol_type = other DNA
cagacatttccctgtactgtct

SEQ ID NO: 26095 - DNA, 22 bp, synthetic construct
  misc_feature 1..22: note = chemically synthesized
  source 1..22: mol_type = other DNA
ccctgtactgtcttgctgtgag

SEQ ID NO: 26096 - DNA, 22 bp, synthetic construct
  misc_feature 1..22: note = chemically synthesized
  source 1..22: mol_type = other DNA
cctgtactgtcttgctgtgagg

SEQ ID NO: 26097 - DNA, 22 bp, synthetic construct
  misc_feature 1..22: note = chemically synthesized
  source 1..22: mol_type = other DNA
tactgtcttgctgtgaggagct

SEQ ID NO: 26098 - DNA, 22 bp, synthetic construct
  misc_feature 1..22: note = chemically synthesized
  source 1..22: mol_type = other DNA
tcttgctgtgaggagcttcttt

SEQ ID NO: 26099 - DNA, 22 bp, synthetic construct
  misc_feature 1..22: note = chemically synthesized
  source 1..22: mol_type = other DNA
gctgtgaggagcttcttttact

SEQ ID NO: 26100 - DNA, 22 bp, synthetic construct
  misc_feature 1..22: note = chemically synthesized
  source 1..22: mol_type = other DNA
ctgtgaggagcttcttttactg

SEQ ID NO: 26101 - DNA, 22 bp, synthetic construct
  misc_feature 1..22: note = chemically synthesized
  source 1..22: mol_type = other DNA
tgaggagcttcttttactgcta

SEQ ID NO: 26102 - DNA, 22 bp, synthetic construct
  misc_feature 1..22: note = chemically synthesized
  source 1..22: mol_type = other DNA
cttttactgctatttcttatat

SEQ ID NO: 26103 - DNA, 22 bp, synthetic construct
  misc_feature 1..22: note = chemically synthesized
  source 1..22: mol_type = other DNA
ttttactgctatttcttatatt

SEQ ID NO: 26104 - DNA, 22 bp, synthetic construct
  misc_feature 1..22: note = chemically synthesized
  source 1..22: mol_type = other DNA
ttactgctatttcttatattcc

SEQ ID NO: 26105 - DNA, 22 bp, synthetic construct
  misc_feature 1..22: note = chemically synthesized
  source 1..22: mol_type = other DNA
tactgctatttcttatattcca

SEQ ID NO: 26106 - DNA, 22 bp, synthetic construct
  misc_feature 1..22: note = chemically synthesized
  source 1..22: mol_type = other DNA
actgctatttcttatattccaa

SEQ ID NO: 26107 - DNA, 22 bp, synthetic construct
  misc_feature 1..22: note = chemically synthesized
  source 1..22: mol_type = other DNA
ctgctatttcttatattccaac

SEQ ID NO: 26108 - DNA, 22 bp, synthetic construct
  misc_feature 1..22: note = chemically synthesized
  source 1..22: mol_type = other DNA
ctatttcttatattccaacacc

SEQ ID NO: 26109 - DNA, 22 bp, synthetic construct
  misc_feature 1..22: note = chemically synthesized
  source 1..22: mol_type = other DNA
tttcttatattccaacaccatt

SEQ ID NO: 26110 - DNA, 22 bp, synthetic construct
  misc_feature 1..22: note = chemically synthesized
  source 1..22: mol_type = other DNA
cttatattccaacaccatttta

SEQ ID NO: 26111 - DNA, 22 bp, synthetic construct
  misc_feature 1..22: note = chemically synthesized
  source 1..22: mol_type = other DNA
ttatattccaacaccattttag

SEQ ID NO: 26112 - DNA, 22 bp, synthetic construct
  misc_feature 1..22: note = chemically synthesized
  source 1..22: mol_type = other DNA
atattccaacaccattttagcc

SEQ ID NO: 26113 - DNA, 22 bp, synthetic construct
  misc_feature 1..22: note = chemically synthesized
  source 1..22: mol_type = other DNA
tattccaacaccattttagccc

SEQ ID NO: 26114 - DNA, 22 bp, synthetic construct
  misc_feature 1..22: note = chemically synthesized
  source 1..22: mol_type = other DNA
caacaccattttagcccttttt

SEQ ID NO: 26115 - DNA, 22 bp, synthetic construct
  misc_feature 1..22: note = chemically synthesized
  source 1..22: mol_type = other DNA
tagcccttttttgtcctcccca

SEQ ID NO: 26116 - DNA, 22 bp, synthetic construct
  misc_feature 1..22: note = chemically synthesized
  source 1..22: mol_type = other DNA
agcccttttttgtcctccccat

SEQ ID NO: 26117 - DNA, 22 bp, synthetic construct
  misc_feature 1..22: note = chemically synthesized
  source 1..22: mol_type = other DNA
gcccttttttgtcctccccata

SEQ ID NO: 26118 - DNA, 22 bp, synthetic construct
  misc_feature 1..22: note = chemically synthesized
  source 1..22: mol_type = other DNA
ttttgtcctccccatattttta

SEQ ID NO: 26119 - DNA, 22 bp, synthetic construct
  misc_feature 1..22: note = chemically synthesized
  source 1..22: mol_type = other DNA
tttgtcctccccatatttttac

SEQ ID NO: 26120 - DNA, 22 bp, synthetic construct
  misc_feature 1..22: note = chemically synthesized
  source 1..22: mol_type = other DNA
ttgtcctccccatatttttacc

SEQ ID NO: 26121 - DNA, 22 bp, synthetic construct
  misc_feature 1..22: note = chemically synthesized
  source 1..22: mol_type = other DNA
tgtcctccccatatttttacct

SEQ ID NO: 26122 - DNA, 22 bp, synthetic construct
  misc_feature 1..22: note = chemically synthesized
  source 1..22: mol_type = other DNA
gtcctccccatatttttacctc

SEQ ID NO: 26123 - DNA, 22 bp, synthetic construct
  misc_feature 1..22: note = chemically synthesized
  source 1..22: mol_type = other DNA
tcctccccatatttttacctcg

SEQ ID NO: 26124 - DNA, 22 bp, synthetic construct
  misc_feature 1..22: note = chemically synthesized
  source 1..22: mol_type = other DNA
cccatatttttacctcggtttt

SEQ ID NO: 26125 - DNA, 22 bp, synthetic construct
  misc_feature 1..22: note = chemically synthesized
  source 1..22: mol_type = other DNA
ttacctcggtttttactgttta

SEQ ID NO: 26126 - DNA, 22 bp, synthetic construct
  misc_feature 1..22: note = chemically synthesized
  source 1..22: mol_type = other DNA
tacctcggtttttactgtttat

SEQ ID NO: 26127 - DNA, 22 bp, synthetic construct
  misc_feature 1..22: note = chemically synthesized
  source 1..22: mol_type = other DNA
acctcggtttttactgtttata

SEQ ID NO: 26128 - DNA, 22 bp, synthetic construct
  misc_feature 1..22: note = chemically synthesized
  source 1..22: mol_type = other DNA
cctcggtttttactgtttatat

SEQ ID NO: 26129 - DNA, 22 bp, synthetic construct
  misc_feature 1..22: note = chemically synthesized
  source 1..22: mol_type = other DNA
ggtttttactgtttatatagca

SEQ ID NO: 26130 - DNA, 22 bp, synthetic construct
  misc_feature 1..22: note = chemically synthesized
  source 1..22: mol_type = other DNA
ttactgtttatatagcacactt

SEQ ID NO: 26131 - DNA, 22 bp, synthetic construct
  misc_feature 1..22: note = chemically synthesized
  source 1..22: mol_type = other DNA
tactgtttatatagcacacttt

SEQ ID NO: 26132 - DNA, 22 bp, synthetic construct
  misc_feature 1..22: note = chemically synthesized
  source 1..22: mol_type = other DNA
actgtttatatagcacactttg

SEQ ID NO: 26133 - DNA, 22 bp, synthetic construct
  misc_feature 1..22: note = chemically synthesized
  source 1..22: mol_type = other DNA
ctgtttatatagcacactttgt

SEQ ID NO: 26134 - DNA, 22 bp, synthetic construct
  misc_feature 1..22: note = chemically synthesized
  source 1..22: mol_type = other DNA
tttatatagcacactttgtgct

SEQ ID NO: 26135 - DNA, 22 bp, synthetic construct
  misc_feature 1..22: note = chemically synthesized
  source 1..22: mol_type = other DNA
atatagcacactttgtgctata

SEQ ID NO: 26136 - DNA, 22 bp, synthetic construct
  misc_feature 1..22: note = chemically synthesized
  source 1..22: mol_type = other DNA
tatagcacactttgtgctatag

SEQ ID NO: 26137 - DNA, 22 bp, synthetic construct
  misc_feature 1..22: note = chemically synthesized
  source 1..22: mol_type = other DNA
tgtgctatagtttacctcagtt

SEQ ID NO: 26138 - DNA, 22 bp, synthetic construct
  misc_feature 1..22: note = chemically synthesized
  source 1..22: mol_type = other DNA
gtgctatagtttacctcagttt

SEQ ID NO: 26139 - DNA, 22 bp, synthetic construct
  misc_feature 1..22: note = chemically synthesized
  source 1..22: mol_type = other DNA
tgctatagtttacctcagtttt

SEQ ID NO: 26140 - DNA, 22 bp, synthetic construct
  misc_feature 1..22: note = chemically synthesized
  source 1..22: mol_type = other DNA
tagtttacctcagtttttacta

SEQ ID NO: 26141 - DNA, 22 bp, synthetic construct
  misc_feature 1..22: note = chemically synthesized
  source 1..22: mol_type = other DNA
acctcagtttttactatttata

SEQ ID NO: 26142 - DNA, 22 bp, synthetic construct
  misc_feature 1..22: note = chemically synthesized
  source 1..22: mol_type = other DNA
cctcagtttttactatttataa

SEQ ID NO: 26143 - DNA, 22 bp, synthetic construct
  misc_feature 1..22: note = chemically synthesized
  source 1..22: mol_type = other DNA
agtttttactatttataaagca

SEQ ID NO: 26144 - DNA, 22 bp, synthetic construct
  misc_feature 1..22: note = chemically synthesized
  source 1..22: mol_type = other DNA
ttactatttataaagcacattt

SEQ ID NO: 26145 - DNA, 22 bp, synthetic construct
  misc_feature 1..22: note = chemically synthesized
  source 1..22: mol_type = other DNA
tactatttataaagcacatttt

SEQ ID NO: 26146 - DNA, 22 bp, synthetic construct
  misc_feature 1..22: note = chemically synthesized
  source 1..22: mol_type = other DNA
actatttataaagcacattttg

SEQ ID NO: 26147 - DNA, 22 bp, synthetic construct
  misc_feature 1..22: note = chemically synthesized
  source 1..22: mol_type = other DNA
ctatttataaagcacattttgc

SEQ ID NO: 26148 - DNA, 22 bp, synthetic construct
  misc_feature 1..22: note = chemically synthesized
  source 1..22: mol_type = other DNA
tttataaagcacattttgcccc

SEQ ID NO: 26149 - DNA, 22 bp, synthetic construct
  misc_feature 1..22: note = chemically synthesized
  source 1..22: mol_type = other DNA
ataaagcacattttgccccaaa

SEQ ID NO: 26150 - DNA, 22 bp, synthetic construct
  misc_feature 1..22: note = chemically synthesized
  source 1..22: mol_type = other DNA
taaagcacattttgccccaaac

SEQ ID NO: 26151 - DNA, 22 bp, synthetic construct
  misc_feature 1..22: note = chemically synthesized
  source 1..22: mol_type = other DNA
tgccccaaacttctctcttaac

SEQ ID NO: 26152 - DNA, 22 bp, synthetic construct
  misc_feature 1..22: note = chemically synthesized
  source 1..22: mol_type = other DNA
gccccaaacttctctcttaaca

SEQ ID NO: 26153 - DNA, 22 bp, synthetic construct
  misc_feature 1..22: note = chemically synthesized
  source 1..22: mol_type = other DNA
ccccaaacttctctcttaacaa

SEQ ID NO: 26154 - DNA, 22 bp, synthetic construct
  misc_feature 1..22: note = chemically synthesized
  source 1..22: mol_type = other DNA
ctctcttaacaagctagaatat

SEQ ID NO: 26155 - DNA, 22 bp, synthetic construct
  misc_feature 1..22: note = chemically synthesized
  source 1..22: mol_type = other DNA
tctcttaacaagctagaatata

SEQ ID NO: 26156 - DNA, 22 bp, synthetic construct
  misc_feature 1..22: note = chemically synthesized
  source 1..22: mol_type = other DNA
tcttaacaagctagaatataag

SEQ ID NO: 26157 - DNA, 22 bp, synthetic construct
  misc_feature 1..22: note = chemically synthesized
  source 1..22: mol_type = other DNA
ttaacaagctagaatataagtg

SEQ ID NO: 26158 - DNA, 22 bp, synthetic construct
  misc_feature 1..22: note = chemically synthesized
  source 1..22: mol_type = other DNA
aacaagctagaatataagtgaa

SEQ ID NO: 26159 - DNA, 22 bp, synthetic construct
  misc_feature 1..22: note = chemically synthesized
  source 1..22: mol_type = other DNA
acaagctagaatataagtgaat

SEQ ID NO: 26160 - DNA, 22 bp, synthetic construct
  misc_feature 1..22: note = chemically synthesized
  source 1..22: mol_type = other DNA
gaatataagtgaatgcaagagc

SEQ ID NO: 26161 - DNA, 22 bp, synthetic construct
  misc_feature 1..22: note = chemically synthesized
  source 1..22: mol_type = other DNA
ctattttcatatttgaggtata

SEQ ID NO: 26162 - DNA, 22 bp, synthetic construct
  misc_feature 1..22: note = chemically synthesized
  source 1..22: mol_type = other DNA
ttttcatatttgaggtataaac

SEQ ID NO: 26163 - DNA, 22 bp, synthetic construct
  misc_feature 1..22: note = chemically synthesized
  source 1..22: mol_type = other DNA
tcatatttgaggtataaaccaa

SEQ ID NO: 26164 - DNA, 22 bp, synthetic construct
  misc_feature 1..22: note = chemically synthesized
  source 1..22: mol_type = other DNA
catatttgaggtataaaccaag

SEQ ID NO: 26165 - DNA, 22 bp, synthetic construct
  misc_feature 1..22: note = chemically synthesized
  source 1..22: mol_type = other DNA
atatttgaggtataaaccaagg

SEQ ID NO: 26166 - DNA, 22 bp, synthetic construct
  misc_feature 1..22: note = chemically synthesized
  source 1..22: mol_type = other DNA
gaggtataaaccaaggagattt

SEQ ID NO: 26167 - DNA, 22 bp, synthetic construct
  misc_feature 1..22: note = chemically synthesized
  source 1..22: mol_type = other DNA
aggtataaaccaaggagattta

SEQ ID NO: 26168 - DNA, 22 bp, synthetic construct
  misc_feature 1..22: note = chemically synthesized
  source 1..22: mol_type = other DNA
acatacacatatatatttttaa

SEQ ID NO: 26169 - DNA, 22 bp, synthetic construct
  misc_feature 1..22: note = chemically synthesized
  source 1..22: mol_type = other DNA
catacacatatatatttttaaa

SEQ ID NO: 26170 - DNA, 22 bp, synthetic construct
  misc_feature 1..22: note = chemically synthesized
  source 1..22: mol_type = other DNA
ttaaatctgcaaataaatggtt

SEQ ID NO: 26171 - DNA, 22 bp, synthetic construct
  misc_feature 1..22: note = chemically synthesized
  source 1..22: mol_type = other DNA
taaatctgcaaataaatggttt

SEQ ID NO: 26172 - DNA, 22 bp, synthetic construct
  misc_feature 1..22: note = chemically synthesized
  source 1..22: mol_type = other DNA
aaatctgcaaataaatggtttt

SEQ ID NO: 26173 - DNA, 22 bp, synthetic construct
  misc_feature 1..22: note = chemically synthesized
  source 1..22: mol_type = other DNA
aatctgcaaataaatggtttta

SEQ ID NO: 26174 - DNA, 22 bp, synthetic construct
  misc_feature 1..22: note = chemically synthesized
  source 1..22: mol_type = other DNA
caaataaatggttttattctga

SEQ ID NO: 26175 - DNA, 22 bp, synthetic construct
  misc_feature 1..22: note = chemically synthesized
  source 1..22: mol_type = other DNA
tattctgacattaaaaaagaaa

SEQ ID NO: 26176 - DNA, 22 bp, synthetic construct
  misc_feature 1..22: note = chemically synthesized
  source 1..22: mol_type = other DNA
attctgacattaaaaaagaaaa

SEQ ID NO: 26177 - DNA, 22 bp, synthetic construct
  misc_feature 1..22: note = chemically synthesized
  source 1..22: mol_type = other DNA
ttctgacattaaaaaagaaaat

SEQ ID NO: 26178 - DNA, 22 bp, synthetic construct
  misc_feature 1..22: note = chemically synthesized
  source 1..22: mol_type = other DNA
tgacattaaaaaagaaaatact

SEQ ID NO: 26179 - DNA, 22 bp, synthetic construct
  misc_feature 1..22: note = chemically synthesized
  source 1..22: mol_type = other DNA
acattaaaaaagaaaatactta

SEQ ID NO: 26180 - DNA, 22 bp, synthetic construct
  misc_feature 1..22: note = chemically synthesized
  source 1..22: mol_type = other DNA
aaaaagaaaatacttaatatca

SEQ ID NO: 26181 - DNA, 22 bp, synthetic construct
  misc_feature 1..22: note = chemically synthesized
  source 1..22: mol_type = other DNA
aatatcattaatgaatgatcgt

SEQ ID NO: 26182 - DNA, 22 bp, synthetic construct
  misc_feature 1..22: note = chemically synthesized
  source 1..22: mol_type = other DNA
atatcattaatgaatgatcgtt

SEQ ID NO: 26183 - DNA, 22 bp, synthetic construct
  misc_feature 1..22: note = chemically synthesized
  source 1..22: mol_type = other DNA
atgaatgatcgttttaccacag

SEQ ID NO: 26184 - DNA, 22 bp, synthetic construct
  misc_feature 1..22: note = chemically synthesized
  source 1..22: mol_type = other DNA
taccacagcgtaggtcattgaa

SEQ ID NO: 26185 - DNA, 22 bp, synthetic construct
  misc_feature 1..22: note = chemically synthesized
  source 1..22: mol_type = other DNA
accacagcgtaggtcattgaat

SEQ ID NO: 26186 - DNA, 22 bp, synthetic construct
  misc_feature 1..22: note = chemically synthesized
  source 1..22: mol_type = other DNA
ccacagcgtaggtcattgaatt

SEQ ID NO: 26187 - DNA, 22 bp, synthetic construct
  misc_feature 1..22: note = chemically synthesized
  source 1..22: mol_type = other DNA
aatttgaacttaaccttcactt

SEQ ID NO: 26188 - DNA, 22 bp, synthetic construct
  misc_feature 1..22: note = chemically synthesized
  source 1..22: mol_type = other DNA
gaacttaaccttcactttcaaa

SEQ ID NO: 26189 - DNA, 22 bp, synthetic construct
  misc_feature 1..22: note = chemically synthesized
  source 1..22: mol_type = other DNA
aacttaaccttcactttcaaac

SEQ ID NO: 26190 - DNA, 22 bp, synthetic construct
  misc_feature 1..22: note = chemically synthesized
  source 1..22: mol_type = other DNA
aaccttcactttcaaacaagta

SEQ ID NO: 26191 - DNA, 22 bp, synthetic construct
  misc_feature 1..22: note = chemically synthesized
  source 1..22: mol_type = other DNA
accttcactttcaaacaagtac

SEQ ID NO: 26192 - DNA, 22 bp, synthetic construct
  misc_feature 1..22: note = chemically synthesized
  source 1..22: mol_type = other DNA
cactttcaaacaagtactttgt

SEQ ID NO: 26193 - DNA, 22 bp, synthetic construct
  misc_feature 1..22: note = chemically synthesized
  source 1..22: mol_type = other DNA
actttcaaacaagtactttgta

SEQ ID NO: 26194 - DNA, 22 bp, synthetic construct
  misc_feature 1..22: note = chemically synthesized
  source 1..22: mol_type = other DNA
tcaaacaagtactttgtatttt

SEQ ID NO: 26195 - DNA, 22 bp, synthetic construct
  misc_feature 1..22: note = chemically synthesized
  source 1..22: mol_type = other DNA
caaacaagtactttgtatttta

SEQ ID NO: 26196 - DNA, 22 bp, synthetic construct
  misc_feature 1..22: note = chemically synthesized
  source 1..22: mol_type = other DNA
aaacaagtactttgtattttat

SEQ ID NO: 26197 - DNA, 22 bp, synthetic construct
  misc_feature 1..22: note = chemically synthesized
  source 1..22: mol_type = other DNA
tgtattttattgatctctattt

SEQ ID NO: 26198 - DNA, 22 bp, synthetic construct
  misc_feature 1..22: note = chemically synthesized
  source 1..22: mol_type = other DNA
gtattttattgatctctatttt

SEQ ID NO: 26199 - DNA, 22 bp, synthetic construct
  misc_feature 1..22: note = chemically synthesized
  source 1..22: mol_type = other DNA
tattttattgatctctattttc

SEQ ID NO: 26200 - DNA, 22 bp, synthetic construct
  misc_feature 1..22: note = chemically synthesized
  source 1..22: mol_type = other DNA
tattgatctctattttcctgga

SEQ ID NO: 26201 - DNA, 22 bp, synthetic construct
  misc_feature 1..22: note = chemically synthesized
  source 1..22: mol_type = other DNA
attgatctctattttcctggaa

SEQ ID NO: 26202 - DNA, 22 bp, synthetic construct
  misc_feature 1..22: note = chemically synthesized
  source 1..22: mol_type = other DNA
ttgatctctattttcctggaac

SEQ ID NO: 26203 - DNA, 22 bp, synthetic construct
  misc_feature 1..22: note = chemically synthesized
  source 1..22: mol_type = other DNA
atctctattttcctggaacaac

SEQ ID NO: 26204 - DNA, 22 bp, synthetic construct
  misc_feature 1..22: note = chemically synthesized
  source 1..22: mol_type = other DNA
tattttcctggaacaacatggg

SEQ ID NO: 26205 - DNA, 22 bp, synthetic construct
  misc_feature 1..22: note = chemically synthesized
  source 1..22: mol_type = other DNA
ttttcctggaacaacatggggg

SEQ ID NO: 26206 - DNA, 22 bp, synthetic construct
  misc_feature 1..22: note = chemically synthesized
  source 1..22: mol_type = other DNA
tcctggaacaacatgggggcta

SEQ ID NO: 26207 - DNA, 22 bp, synthetic construct
  misc_feature 1..22: note = chemically synthesized
  source 1..22: mol_type = other DNA
cctggaacaacatgggggctat

SEQ ID NO: 26208 - DNA, 22 bp, synthetic construct
  misc_feature 1..22: note = chemically synthesized
  source 1..22: mol_type = other DNA
ctggaacaacatgggggctatg

SEQ ID NO: 26209 - DNA, 22 bp, synthetic construct
  misc_feature 1..22: note = chemically synthesized
  source 1..22: mol_type = other DNA
gaacaacatgggggctatgttt

SEQ ID NO: 26210 - DNA, 22 bp, synthetic construct
  misc_feature 1..22: note = chemically synthesized
  source 1..22: mol_type = other DNA
tgtttagcgtgaggacaaagta

SEQ ID NO: 26211 - DNA, 22 bp, synthetic construct
  misc_feature 1..22: note = chemically synthesized
  source 1..22: mol_type = other DNA
agcgtgaggacaaagtatcaca

SEQ ID NO: 26212 - DNA, 22 bp, synthetic construct
  misc_feature 1..22: note = chemically synthesized
  source 1..22: mol_type = other DNA
gcgtgaggacaaagtatcacaa

SEQ ID NO: 26213 - DNA, 22 bp, synthetic construct
  misc_feature 1..22: note = chemically synthesized
  source 1..22: mol_type = other DNA
tcacctgaaagaaaagatgagc

SEQ ID NO: 26214 - DNA, 22 bp, synthetic construct
  misc_feature 1..22: note = chemically synthesized
  source 1..22: mol_type = other DNA
cacctgaaagaaaagatgagct

SEQ ID NO: 26215 - DNA, 22 bp, synthetic construct
  misc_feature 1..22: note = chemically synthesized
  source 1..22: mol_type = other DNA
acctgaaagaaaagatgagcta

SEQ ID NO: 26216 - DNA, 22 bp, synthetic construct
  misc_feature 1..22: note = chemically synthesized
  source 1..22: mol_type = other DNA
aaagaaaagatgagctaccatg

SEQ ID NO: 26217 - DNA, 22 bp, synthetic construct
  misc_feature 1..22: note = chemically synthesized
  source 1..22: mol_type = other DNA
ccatggtacatataacaatgag

SEQ ID NO: 26218 - DNA, 22 bp, synthetic construct
  misc_feature 1..22: note = chemically synthesized
  source 1..22: mol_type = other DNA
aaactctaagtcgtcatctggc

SEQ ID NO: 26219 - DNA, 22 bp, synthetic construct
  misc_feature 1..22: note = chemically synthesized
  source 1..22: mol_type = other DNA
taagtcgtcatctggcaacact

SEQ ID NO: 26220 - DNA, 22 bp, synthetic construct
  misc_feature 1..22: note = chemically synthesized
  source 1..22: mol_type = other DNA
agtcgtcatctggcaacactgc

SEQ ID NO: 26221 - DNA, 22 bp, synthetic construct
  misc_feature 1..22: note = chemically synthesized
  source 1..22: mol_type = other DNA
gcaacactgccaatttactaaa

SEQ ID NO: 26222 - DNA, 22 bp, synthetic construct
  misc_feature 1..22: note = chemically synthesized
  source 1..22: mol_type = other DNA
ccaatttactaaaaatcactat

SEQ ID NO: 26223 - DNA, 22 bp, synthetic construct
  misc_feature 1..22: note = chemically synthesized
  source 1..22: mol_type = other DNA
actaaaaatcactatttcaaag

SEQ ID NO: 26224 - DNA, 22 bp, synthetic construct
  misc_feature 1..22: note = chemically synthesized
  source 1..22: mol_type = other DNA
ctaaaaatcactatttcaaaga

SEQ ID NO: 26225 - DNA, 22 bp, synthetic construct
  misc_feature 1..22: note = chemically synthesized
  source 1..22: mol_type = other DNA
aaaatcactatttcaaagaagt

SEQ ID NO: 26226 - DNA, 22 bp, synthetic construct
  misc_feature 1..22: note = chemically synthesized
  source 1..22: mol_type = other DNA
tttcaaagaagtatagaataga

SEQ ID NO: 26227 - DNA, 22 bp, synthetic construct
  misc_feature 1..22: note = chemically synthesized
  source 1..22: mol_type = other DNA
caaagaagtatagaatagatat

SEQ ID NO: 26228 - DNA, 22 bp, synthetic construct
  misc_feature 1..22: note = chemically synthesized
  source 1..22: mol_type = other DNA
aaagaagtatagaatagatatc

SEQ ID NO: 26229 - DNA, 22 bp, synthetic construct
  misc_feature 1..22: note = chemically synthesized
  source 1..22: mol_type = other DNA
tttctctgcctctctctcgctc

SEQ ID NO: 26230 - DNA, 22 bp, synthetic construct
  misc_feature 1..22: note = chemically synthesized
  source 1..22: mol_type = other DNA
tctctgcctctctctcgctctc

SEQ ID NO: 26231 - DNA, 22 bp, synthetic construct
  misc_feature 1..22: note = chemically synthesized
  source 1..22: mol_type = other DNA
ctctgcctctctctcgctctct

SEQ ID NO: 26232 - DNA, 22 bp, synthetic construct
  misc_feature 1..22: note = chemically synthesized
  source 1..22: mol_type = other DNA
tctgcctctctctcgctctctc

SEQ ID NO: 26233 - DNA, 22 bp, synthetic construct
  misc_feature 1..22: note = chemically synthesized
  source 1..22: mol_type = other DNA
tgcctctctctcgctctctctc

SEQ ID NO: 26234 - DNA, 22 bp, synthetic construct
  misc_feature 1..22: note = chemically synthesized
  source 1..22: mol_type = other DNA
cctctctctcgctctctctctc

SEQ ID NO: 26235 - DNA, 22 bp, synthetic construct
  misc_feature 1..22: note = chemically synthesized
  source 1..22: mol_type = other DNA
tctctcgctctctctctctctc

SEQ ID NO: 26236 - DNA, 22 bp, synthetic construct
  misc_feature 1..22: note = chemically synthesized
  source 1..22: mol_type = other DNA
tctcgctctctctctctctctc

SEQ ID NO: 26237 - DNA, 22 bp, synthetic construct
  misc_feature 1..22: note = chemically synthesized
  source 1..22: mol_type = other DNA
tcgctctctctctctctctccc

SEQ ID NO: 26238 - DNA, 22 bp, synthetic construct
  misc_feature 1..22: note = chemically synthesized
  source 1..22: mol_type = other DNA
gctctctctctctctctccccc

SEQ ID NO: 26239 - DNA, 22 bp, synthetic construct
  misc_feature 1..22: note = chemically synthesized
  source 1..22: mol_type = other DNA
tctctctctctctcccccatct

SEQ ID NO: 26240 - DNA, 22 bp, synthetic construct
  misc_feature 1..22: note = chemically synthesized
  source 1..22: mol_type = other DNA
tctctctctctcccccatctct

SEQ ID NO: 26241 - DNA, 22 bp, synthetic construct
  misc_feature 1..22: note = chemically synthesized
  source 1..22: mol_type = other DNA
tctctctctcccccatctctct

SEQ ID NO: 26242 - DNA, 22 bp, synthetic construct
  misc_feature 1..22: note = chemically synthesized
  source 1..22: mol_type = other DNA
tctctctcccccatctctctct

SEQ ID NO: 26243 - DNA, 22 bp, synthetic construct
  misc_feature 1..22: note = chemically synthesized
  source 1..22: mol_type = other DNA
tctctcccccatctctctctgt

SEQ ID NO: 26244 - DNA, 22 bp, synthetic construct
  misc_feature 1..22: note = chemically synthesized
  source 1..22: mol_type = other DNA
tctcccccatctctctctgtct

SEQ ID NO: 26245 - DNA, 22 bp, synthetic construct
  misc_feature 1..22: note = chemically synthesized
  source 1..22: mol_type = other DNA
tcccccatctctctctgtctct

SEQ ID NO: 26246 - DNA, 22 bp, synthetic construct
  misc_feature 1..22: note = chemically synthesized
  source 1..22: mol_type = other DNA
ccccatctctctctgtctctct

SEQ ID NO: 26247 - DNA, 22 bp, synthetic construct
  misc_feature 1..22: note = chemically synthesized
  source 1..22: mol_type = other DNA
tctctgtctctctctctatata

SEQ ID NO: 26248 - DNA, 22 bp, synthetic construct
  misc_feature 1..22: note = chemically synthesized
  source 1..22: mol_type = other DNA
tctgtctctctctctatatata

SEQ ID NO: 26249 - DNA, 22 bp, synthetic construct
  misc_feature 1..22: note = chemically synthesized
  source 1..22: mol_type = other DNA
tgtctctctctctatatatatg

SEQ ID NO: 26250 - DNA, 22 bp, synthetic construct
  misc_feature 1..22: note = chemically synthesized
  source 1..22: mol_type = other DNA
tctctctctctatatatatgta

SEQ ID NO: 26251 - DNA, 22 bp, synthetic construct
  misc_feature 1..22: note = chemically synthesized
  source 1..22: mol_type = other DNA
tctctctatatatatgtataca

SEQ ID NO: 26252 - DNA, 22 bp, synthetic construct
  misc_feature 1..22: note = chemically synthesized
  source 1..22: mol_type = other DNA
tctctatatatatgtatacaca

SEQ ID NO: 26253 - DNA, 22 bp, synthetic construct
  misc_feature 1..22: note = chemically synthesized
  source 1..22: mol_type = other DNA
tctatatatatgtatacacaca

SEQ ID NO: 26254 - DNA, 22 bp, synthetic construct
  misc_feature 1..22: note = chemically synthesized
  source 1..22: mol_type = other DNA
tatatatatgtatacacacata

SEQ ID NO: 26255 - DNA, 22 bp, synthetic construct
  misc_feature 1..22: note = chemically synthesized
  source 1..22: mol_type = other DNA
tatatatgtatacacacatata

SEQ ID NO: 26256 - DNA, 22 bp, synthetic construct
  misc_feature 1..22: note = chemically synthesized
  source 1..22: mol_type = other DNA
tacacatatggagaaatttcac

SEQ ID NO: 26257 - DNA, 22 bp, synthetic construct
  misc_feature 1..22: note = chemically synthesized
  source 1..22: mol_type = other DNA
cactattttgtatatgcttaaa

SEQ ID NO: 26258 - DNA, 22 bp, synthetic construct
  misc_feature 1..22: note = chemically synthesized
  source 1..22: mol_type = other DNA
actattttgtatatgcttaaaa

SEQ ID NO: 26259 - DNA, 22 bp, synthetic construct
  misc_feature 1..22: note = chemically synthesized
  source 1..22: mol_type = other DNA
ttttgtatatgcttaaaaatta

SEQ ID NO: 26260 - DNA, 22 bp, synthetic construct
  misc_feature 1..22: note = chemically synthesized
  source 1..22: mol_type = other DNA
tgtatatgcttaaaaattacag

SEQ ID NO: 26261 - DNA, 22 bp, synthetic construct
  misc_feature 1..22: note = chemically synthesized
  source 1..22: mol_type = other DNA
gtatatgcttaaaaattacaga

SEQ ID NO: 26262 - DNA, 22 bp, synthetic construct
  misc_feature 1..22: note = chemically synthesized
  source 1..22: mol_type = other DNA
tatatgcttaaaaattacagac

SEQ ID NO: 26263 - DNA, 22 bp, synthetic construct
  misc_feature 1..22: note = chemically synthesized
  source 1..22: mol_type = other DNA
aaaaattacagactttggaagt

SEQ ID NO: 26264 - DNA, 22 bp, synthetic construct
  misc_feature 1..22: note = chemically synthesized
  source 1..22: mol_type = other DNA
aaaattacagactttggaagtc

SEQ ID NO: 26265 - DNA, 22 bp, synthetic construct
  misc_feature 1..22: note = chemically synthesized
  source 1..22: mol_type = other DNA
cagactttggaagtcatatgac

SEQ ID NO: 26266 - DNA, 22 bp, synthetic construct
  misc_feature 1..22: note = chemically synthesized
  source 1..22: mol_type = other DNA
tggaagtcatatgactatttca

SEQ ID NO: 26267 - DNA, 22 bp, synthetic construct
  misc_feature 1..22: note = chemically synthesized
  source 1..22: mol_type = other DNA
ggaagtcatatgactatttcag

SEQ ID NO: 26268 - DNA, 22 bp, synthetic construct
  misc_feature 1..22: note = chemically synthesized
  source 1..22: mol_type = other DNA
gaagtcatatgactatttcagt

SEQ ID NO: 26269 - DNA, 22 bp, synthetic construct
  misc_feature 1..22: note = chemically synthesized
  source 1..22: mol_type = other DNA
tttcagtgtgtgtggctactaa

SEQ ID NO: 26270 - DNA, 22 bp, synthetic construct
  misc_feature 1..22: note = chemically synthesized
  source 1..22: mol_type = other DNA
cagtgtgtgtggctactaatct

SEQ ID NO: 26271 - DNA, 22 bp, synthetic construct
  misc_feature 1..22: note = chemically synthesized
  source 1..22: mol_type = other DNA
agtgtgtgtggctactaatctc

SEQ ID NO: 26272 - DNA, 22 bp, synthetic construct
  misc_feature 1..22: note = chemically synthesized
  source 1..22: mol_type = other DNA
ctaatctcaccctcctgttcca

SEQ ID NO: 26273 - DNA, 22 bp, synthetic construct
  misc_feature 1..22: note = chemically synthesized
  source 1..22: mol_type = other DNA
atctcaccctcctgttccaaaa

SEQ ID NO: 26274 - DNA, 22 bp, synthetic construct
  misc_feature 1..22: note = chemically synthesized
  source 1..22: mol_type = other DNA
accctcctgttccaaaacacag

SEQ ID NO: 26275 - DNA, 22 bp, synthetic construct
  misc_feature 1..22: note = chemically synthesized
  source 1..22: mol_type = other DNA
ctgttccaaaacacagttgcag

SEQ ID NO: 26276 - DNA, 22 bp, synthetic construct
  misc_feature 1..22: note = chemically synthesized
  source 1..22: mol_type = other DNA
ttccaaaacacagttgcagaag

SEQ ID NO: 26277 - DNA, 22 bp, synthetic construct
  misc_feature 1..22: note = chemically synthesized
  source 1..22: mol_type = other DNA
caaaacacagttgcagaagcag

SEQ ID NO: 26278 - DNA, 22 bp, synthetic construct
  misc_feature 1..22: note = chemically synthesized
  source 1..22: mol_type = other DNA
cagaagcagaggaagtcattat

SEQ ID NO: 26279 - DNA, 22 bp, synthetic construct
  misc_feature 1..22: note = chemically synthesized
  source 1..22: mol_type = other DNA
tacacttagaacatcattttat

SEQ ID NO: 26280 - DNA, 22 bp, synthetic construct
  misc_feature 1..22: note = chemically synthesized
  source 1..22: mol_type = other DNA
agaacatcattttataaggcag

SEQ ID NO: 26281 - DNA, 22 bp, synthetic construct
  misc_feature 1..22: note = chemically synthesized
  source 1..22: mol_type = other DNA
gaacatcattttataaggcagc

SEQ ID NO: 26282 - DNA, 22 bp, synthetic construct
  misc_feature 1..22: note = chemically synthesized
  source 1..22: mol_type = other DNA
tataaggcagcaggtctggtag

SEQ ID NO: 26283 - DNA, 22 bp, synthetic construct
  misc_feature 1..22: note = chemically synthesized
  source 1..22: mol_type = other DNA
ataaggcagcaggtctggtagg

SEQ ID NO: 26284 - DNA, 22 bp, synthetic construct
  misc_feature 1..22: note = chemically synthesized
  source 1..22: mol_type = other DNA
taaggcagcaggtctggtagga

SEQ ID NO: 26285 - DNA, 22 bp, synthetic construct
  misc_feature 1..22: note = chemically synthesized
  source 1..22: mol_type = other DNA
gtaggaaggagattaggtgcta

SEQ ID NO: 26286 - DNA, 22 bp, synthetic construct
  misc_feature 1..22: note = chemically synthesized
  source 1..22: mol_type = other DNA
ggtgctacttgtgacaaaggtc

SEQ ID NO: 26287 - DNA, 22 bp, synthetic construct
  misc_feature 1..22: note = chemically synthesized
  source 1..22: mol_type = other DNA
cttgtgacaaaggtcagcaaat

SEQ ID NO: 26288 - DNA, 22 bp, synthetic construct
  misc_feature 1..22: note = chemically synthesized
  source 1..22: mol_type = other DNA
gtgacaaaggtcagcaaatatt

SEQ ID NO: 26289 - DNA, 22 bp, synthetic construct
  misc_feature 1..22: note = chemically synthesized
  source 1..22: mol_type = other DNA
tgacaaaggtcagcaaatattt

SEQ ID NO: 26290 - DNA, 22 bp, synthetic construct
  misc_feature 1..22: note = chemically synthesized
  source 1..22: mol_type = other DNA
gtgttcccagcacttttctaga

SEQ ID NO: 26291 - DNA, 22 bp, synthetic construct
  misc_feature 1..22: note = chemically synthesized
  source 1..22: mol_type = other DNA
tgttcccagcacttttctagat

SEQ ID NO: 26292 - DNA, 22 bp, synthetic construct
  misc_feature 1..22: note = chemically synthesized
  source 1..22: mol_type = other DNA
ccagcacttttctagatcctca

SEQ ID NO: 26293 - DNA, 22 bp, synthetic construct
  misc_feature 1..22: note = chemically synthesized
  source 1..22: mol_type = other DNA
ttctagatcctcagttaaaatc

SEQ ID NO: 26294 - DNA, 22 bp, synthetic construct
  misc_feature 1..22: note = chemically synthesized
  source 1..22: mol_type = other DNA
tctagatcctcagttaaaatca

SEQ ID NO: 26295 - DNA, 22 bp, synthetic construct
  misc_feature 1..22: note = chemically synthesized
  source 1..22: mol_type = other DNA
ctagatcctcagttaaaatcaa

SEQ ID NO: 26296 - DNA, 22 bp, synthetic construct
  misc_feature 1..22: note = chemically synthesized
  source 1..22: mol_type = other DNA
tagatcctcagttaaaatcaaa

SEQ ID NO: 26297 - DNA, 22 bp, synthetic construct
  misc_feature 1..22: note = chemically synthesized
  source 1..22: mol_type = other DNA
gatcctcagttaaaatcaaagc

SEQ ID NO: 26298 - DNA, 22 bp, synthetic construct
  misc_feature 1..22: note = chemically synthesized
  source 1..22: mol_type = other DNA
agttaaaatcaaagcagctgca

SEQ ID NO: 26299 - DNA, 22 bp, synthetic construct
  misc_feature 1..22: note = chemically synthesized
  source 1..22: mol_type = other DNA
aaatcaaagcagctgcagtctt

SEQ ID NO: 26300 - DNA, 22 bp, synthetic construct
  misc_feature 1..22: note = chemically synthesized
  source 1..22: mol_type = other DNA
cagtcttggcagtgggaggtga

SEQ ID NO: 26301 - DNA, 22 bp, synthetic construct
  misc_feature 1..22: note = chemically synthesized
  source 1..22: mol_type = other DNA
ggcagtgggaggtgatactcac

SEQ ID NO: 26302 - DNA, 22 bp, synthetic construct
  misc_feature 1..22: note = chemically synthesized
  source 1..22: mol_type = other DNA
gcagtgggaggtgatactcaca

SEQ ID NO: 26303 - DNA, 22 bp, synthetic construct
  misc_feature 1..22: note = chemically synthesized
  source 1..22: mol_type = other DNA
acactttgaacaagaccacctg

SEQ ID NO: 26304 - DNA, 22 bp, synthetic construct
  misc_feature 1..22: note = chemically synthesized
  source 1..22: mol_type = other DNA
tgaacaagaccacctgcactac

SEQ ID NO: 26305 - DNA, 22 bp, synthetic construct
  misc_feature 1..22: note = chemically synthesized
  source 1..22: mol_type = other DNA
gaacaagaccacctgcactacc

SEQ ID NO: 26306 - DNA, 22 bp, synthetic construct
  misc_feature 1..22: note = chemically synthesized
  source 1..22: mol_type = other DNA
aacaagaccacctgcactacct

SEQ ID NO: 26307 - DNA, 22 bp, synthetic construct
  misc_feature 1..22: note = chemically synthesized
  source 1..22: mol_type = other DNA
cactacctacaatggcagctcc

SEQ ID NO: 26308 - DNA, 22 bp, synthetic construct
  misc_feature 1..22: note = chemically synthesized
  source 1..22: mol_type = other DNA
cctacaatggcagctccaaata

SEQ ID NO: 26309 - DNA, 22 bp, synthetic construct
  misc_feature 1..22: note = chemically synthesized
  source 1..22: mol_type = other DNA
caatggcagctccaaatatttt

SEQ ID NO: 26310 - DNA, 22 bp, synthetic construct
  misc_feature 1..22: note = chemically synthesized
  source 1..22: mol_type = other DNA
caaatattttatatgaaagggg

SEQ ID NO: 26311 - DNA, 22 bp, synthetic construct
  misc_feature 1..22: note = chemically synthesized
  source 1..22: mol_type = other DNA
tatatgaaaggggcctagacat

SEQ ID NO: 26312 - DNA, 22 bp, synthetic construct
  misc_feature 1..22: note = chemically synthesized
  source 1..22: mol_type = other DNA
atatgaaaggggcctagacata

SEQ ID NO: 26313 - DNA, 22 bp, synthetic construct
  misc_feature 1..22: note = chemically synthesized
  source 1..22: mol_type = other DNA
tatgaaaggggcctagacatag

SEQ ID NO: 26314 - DNA, 22 bp, synthetic construct
  misc_feature 1..22: note = chemically synthesized
  source 1..22: mol_type = other DNA
gacatagcatgctgaatgaaaa

SEQ ID NO: 26315 - DNA, 22 bp, synthetic construct
  misc_feature 1..22: note = chemically synthesized
  source 1..22: mol_type = other DNA
aatgaaaaggaagtgagtagac

SEQ ID NO: 26316 - DNA, 22 bp, synthetic construct
  misc_feature 1..22: note = chemically synthesized
  source 1..22: mol_type = other DNA
gtgctttccttgaagctgtgca

SEQ ID NO: 26317 - DNA, 22 bp, synthetic construct
  misc_feature 1..22: note = chemically synthesized
  source 1..22: mol_type = other DNA
tccttgaagctgtgcaaccaag

SEQ ID NO: 26318 - DNA, 22 bp, synthetic construct
  misc_feature 1..22: note = chemically synthesized
  source 1..22: mol_type = other DNA
ccttgaagctgtgcaaccaagc

SEQ ID NO: 26319 - DNA, 22 bp, synthetic construct
  misc_feature 1..22: note = chemically synthesized
  source 1..22: mol_type = other DNA
cttgaagctgtgcaaccaagca

SEQ ID NO: 26320 - DNA, 22 bp, synthetic construct
  misc_feature 1..22: note = chemically synthesized
  source 1..22: mol_type = other DNA
gaagctgtgcaaccaagcatag

SEQ ID NO: 26321 - DNA, 22 bp, synthetic construct
  misc_feature 1..22: note = chemically synthesized
  source 1..22: mol_type = other DNA
aagctgtgcaaccaagcatagt

SEQ ID NO: 26322 - DNA, 22 bp, synthetic construct
  misc_feature 1..22: note = chemically synthesized
  source 1..22: mol_type = other DNA
tgcaaccaagcatagtttttac

SEQ ID NO: 26323 - DNA, 22 bp, synthetic construct
  misc_feature 1..22: note = chemically synthesized
  source 1..22: mol_type = other DNA
ttacatagatcgtgtgtttcac

SEQ ID NO: 26324 - DNA, 22 bp, synthetic construct
  misc_feature 1..22: note = chemically synthesized
  source 1..22: mol_type = other DNA
tacatagatcgtgtgtttcaca

SEQ ID NO: 26325 - DNA, 22 bp, synthetic construct
  misc_feature 1..22: note = chemically synthesized
  source 1..22: mol_type = other DNA
acatagatcgtgtgtttcacat

SEQ ID NO: 26326 - DNA, 22 bp, synthetic construct
  misc_feature 1..22: note = chemically synthesized
  source 1..22: mol_type = other DNA
catagatcgtgtgtttcacatg

SEQ ID NO: 26327 - DNA, 22 bp, synthetic construct
  misc_feature 1..22: note = chemically synthesized
  source 1..22: mol_type = other DNA
cacatggtgtgataacagcttg

SEQ ID NO: 26328 - DNA, 22 bp, synthetic construct
  misc_feature 1..22: note = chemically synthesized
  source 1..22: mol_type = other DNA
acatggtgtgataacagcttga

SEQ ID NO: 26329 - DNA, 22 bp, synthetic construct
  misc_feature 1..22: note = chemically synthesized
  source 1..22: mol_type = other DNA
gagatgccattgacatggccca

SEQ ID NO: 26330 - DNA, 22 bp, synthetic construct
  misc_feature 1..22: note = chemically synthesized
  source 1..22: mol_type = other DNA
agatgccattgacatggcccac

SEQ ID NO: 26331 - DNA, 22 bp, synthetic construct
  misc_feature 1..22: note = chemically synthesized
  source 1..22: mol_type = other DNA
acatggcccaccggcttatcca

SEQ ID NO: 26332 - DNA, 22 bp, synthetic construct
  misc_feature 1..22: note = chemically synthesized
  source 1..22: mol_type = other DNA
atccacatcagtaattagggca

SEQ ID NO: 26333 - DNA, 22 bp, synthetic construct
  misc_feature 1..22: note = chemically synthesized
  source 1..22: mol_type = other DNA
tccacatcagtaattagggcaa

SEQ ID NO: 26334 - DNA, 22 bp, synthetic construct
  misc_feature 1..22: note = chemically synthesized
  source 1..22: mol_type = other DNA
gggcaaagaaatcctaattact

SEQ ID NO: 26335 - DNA, 22 bp, synthetic construct
  misc_feature 1..22: note = chemically synthesized
  source 1..22: mol_type = other DNA
attactatgcatcccgtgattg

SEQ ID NO: 26336 - DNA, 22 bp, synthetic construct
  misc_feature 1..22: note = chemically synthesized
  source 1..22: mol_type = other DNA
ctatgcatcccgtgattgaagt

SEQ ID NO: 26337 - DNA, 22 bp, synthetic construct
  misc_feature 1..22: note = chemically synthesized
  source 1..22: mol_type = other DNA
tgcatcccgtgattgaagtaac

SEQ ID NO: 26338 - DNA, 22 bp, synthetic construct
  misc_feature 1..22: note = chemically synthesized
  source 1..22: mol_type = other DNA
aagtaacattgatgtatacata

SEQ ID NO: 26339 - DNA, 22 bp, synthetic construct
  misc_feature 1..22: note = chemically synthesized
  source 1..22: mol_type = other DNA
atgtatacatattttttcctat

SEQ ID NO: 26340 - DNA, 22 bp, synthetic construct
  misc_feature 1..22: note = chemically synthesized
  source 1..22: mol_type = other DNA
tttcctattatttctctttttg

SEQ ID NO: 26341 - DNA, 22 bp, synthetic construct
  misc_feature 1..22: note = chemically synthesized
  source 1..22: mol_type = other DNA
ttcctattatttctctttttgt

SEQ ID NO: 26342 - DNA, 22 bp, synthetic construct
  misc_feature 1..22: note = chemically synthesized
  source 1..22: mol_type = other DNA
tcctattatttctctttttgtg

SEQ ID NO: 26343 - DNA, 22 bp, synthetic construct
  misc_feature 1..22: note = chemically synthesized
  source 1..22: mol_type = other DNA
cctattatttctctttttgtgt

SEQ ID NO: 26344 - DNA, 22 bp, synthetic construct
  misc_feature 1..22: note = chemically synthesized
  source 1..22: mol_type = other DNA
ctattatttctctttttgtgtt

SEQ ID NO: 26345 - DNA, 22 bp, synthetic construct
  misc_feature 1..22: note = chemically synthesized
  source 1..22: mol_type = other DNA
ttatttctctttttgtgtttaa

SEQ ID NO: 26346 - DNA, 22 bp, synthetic construct
  misc_feature 1..22: note = chemically synthesized
  source 1..22: mol_type = other DNA
tttctctttttgtgtttaaaaa

SEQ ID NO: 26347 - DNA, 22 bp, synthetic construct
  misc_feature 1..22: note = chemically synthesized
  source 1..22: mol_type = other DNA
ctctttttgtgtttaaaaatgc

SEQ ID NO: 26348 - DNA, 22 bp, synthetic construct
  misc_feature 1..22: note = chemically synthesized
  source 1..22: mol_type = other DNA
tctttttgtgtttaaaaatgca

SEQ ID NO: 26349 - DNA, 22 bp, synthetic construct
  misc_feature 1..22: note = chemically synthesized
  source 1..22: mol_type = other DNA
tttttgtgtttaaaaatgcaat

SEQ ID NO: 26350 - DNA, 22 bp, synthetic construct
  misc_feature 1..22: note = chemically synthesized
  source 1..22: mol_type = other DNA
tttgtgtttaaaaatgcaatta

SEQ ID NO: 26351 - DNA, 22 bp, synthetic construct
  misc_feature 1..22: note = chemically synthesized
  source 1..22: mol_type = other DNA
ttgtgtttaaaaatgcaattat

SEQ ID NO: 26352 - DNA, 22 bp, synthetic construct
  misc_feature 1..22: note = chemically synthesized
  source 1..22: mol_type = other DNA
tgtgtttaaaaatgcaattatg

SEQ ID NO: 26353 - DNA, 22 bp, synthetic construct
  misc_feature 1..22: note = chemically synthesized
  source 1..22: mol_type = other DNA
gtgtttaaaaatgcaattatgg

SEQ ID NO: 26354 - DNA, 22 bp, synthetic construct
  misc_feature 1..22: note = chemically synthesized
  source 1..22: mol_type = other DNA
tgtttaaaaatgcaattatgga

SEQ ID NO: 26355 - DNA, 22 bp, synthetic construct
  misc_feature 1..22: note = chemically synthesized
  source 1..22: mol_type = other DNA
aaaaatgcaattatggactcat

SEQ ID NO: 26356 - DNA, 22 bp, synthetic construct
  misc_feature 1..22: note = chemically synthesized
  source 1..22: mol_type = other DNA
aaaatgcaattatggactcatt

SEQ ID NO: 26357 - DNA, 22 bp, synthetic construct
  misc_feature 1..22: note = chemically synthesized
  source 1..22: mol_type = other DNA
tggactcattcaaagtgaaagc

SEQ ID NO: 26358 - DNA, 22 bp, synthetic construct
  misc_feature 1..22: note = chemically synthesized
  source 1..22: mol_type = other DNA
attcaaagtgaaagctggtatg

SEQ ID NO: 26359 - DNA, 22 bp, synthetic construct
  misc_feature 1..22: note = chemically synthesized
  source 1..22: mol_type = other DNA
aaagtgaaagctggtatgacaa

SEQ ID NO: 26360 - DNA, 22 bp, synthetic construct
  misc_feature 1..22: note = chemically synthesized
  source 1..22: mol_type = other DNA
gtatgacaatacatgagctaac

SEQ ID NO: 26361 - DNA, 22 bp, synthetic construct
  misc_feature 1..22: note = chemically synthesized
  source 1..22: mol_type = other DNA
acttcctcattttatgaataaa

SEQ ID NO: 26362 - DNA, 22 bp, synthetic construct
  misc_feature 1..22: note = chemically synthesized
  source 1..22: mol_type = other DNA
cctcattttatgaataaatttt

SEQ ID NO: 26363 - DNA, 22 bp, synthetic construct
  misc_feature 1..22: note = chemically synthesized
  source 1..22: mol_type = other DNA
ctcattttatgaataaatttta

SEQ ID NO: 26364 - DNA, 22 bp, synthetic construct
  misc_feature 1..22: note = chemically synthesized
  source 1..22: mol_type = other DNA
attttatgaataaattttataa

SEQ ID NO: 26365 - DNA, 22 bp, synthetic construct
  misc_feature 1..22: note = chemically synthesized
  source 1..22: mol_type = other DNA
tatgaataaattttataaagaa

SEQ ID NO: 26366 - DNA, 22 bp, synthetic construct
  misc_feature 1..22: note = chemically synthesized
  source 1..22: mol_type = other DNA
atgaataaattttataaagaaa

SEQ ID NO: 26367 - DNA, 22 bp, synthetic construct
  misc_feature 1..22: note = chemically synthesized
  source 1..22: mol_type = other DNA
tgaataaattttataaagaaat

SEQ ID NO: 26368 - DNA, 22 bp, synthetic construct
  misc_feature 1..22: note = chemically synthesized
  source 1..22: mol_type = other DNA
tataaagaaataagctaatacc

SEQ ID NO: 26369 - DNA, 22 bp, synthetic construct
  misc_feature 1..22: note = chemically synthesized
  source 1..22: mol_type = other DNA
ataaagaaataagctaatacct

SEQ ID NO: 26370 - DNA, 22 bp, synthetic construct
  misc_feature 1..22: note = chemically synthesized
  source 1..22: mol_type = other DNA
taaagaaataagctaataccta

SEQ ID NO: 26371 - DNA, 22 bp, synthetic construct
  misc_feature 1..22: note = chemically synthesized
  source 1..22: mol_type = other DNA
atacctacagagtgtttattaa

SEQ ID NO: 26372 - DNA, 22 bp, synthetic construct
  misc_feature 1..22: note = chemically synthesized
  source 1..22: mol_type = other DNA
cagagtgtttattaaatgctag

SEQ ID NO: 26373 - DNA, 22 bp, synthetic construct
  misc_feature 1..22: note = chemically synthesized
  source 1..22: mol_type = other DNA
attaaatgctaggcacagttct

SEQ ID NO: 26374 - DNA, 22 bp, synthetic construct
  misc_feature 1..22: note = chemically synthesized
  source 1..22: mol_type = other DNA
ttaaatgctaggcacagttctg

SEQ ID NO: 26375 - DNA, 22 bp, synthetic construct
  misc_feature 1..22: note = chemically synthesized
  source 1..22: mol_type = other DNA
aatgctaggcacagttctgagt

SEQ ID NO: 26376 - DNA, 22 bp, synthetic construct
  misc_feature 1..22: note = chemically synthesized
  source 1..22: mol_type = other DNA
ggcacagttctgagtgatttac

SEQ ID NO: 26377 - DNA, 22 bp, synthetic construct
  misc_feature 1..22: note = chemically synthesized
  source 1..22: mol_type = other DNA
tgagtgatttacaactggtatt

SEQ ID NO: 26378 - DNA, 22 bp, synthetic construct
  misc_feature 1..22: note = chemically synthesized
  source 1..22: mol_type = other DNA
agtgatttacaactggtatttc

SEQ ID NO: 26379 - DNA, 22 bp, synthetic construct
  misc_feature 1..22: note = chemically synthesized
  source 1..22: mol_type = other DNA
acaactggtatttcttttaatt

SEQ ID NO: 26380 - DNA, 22 bp, synthetic construct
  misc_feature 1..22: note = chemically synthesized
  source 1..22: mol_type = other DNA
caactggtatttcttttaattt

SEQ ID NO: 26381 - DNA, 22 bp, synthetic construct
  misc_feature 1..22: note = chemically synthesized
  source 1..22: mol_type = other DNA
gtatttcttttaattttcacaa

SEQ ID NO: 26382 - DNA, 22 bp, synthetic construct
  misc_feature 1..22: note = chemically synthesized
  source 1..22: mol_type = other DNA
cttttaattttcacaacattat

SEQ ID NO: 26383 - DNA, 22 bp, synthetic construct
  misc_feature 1..22: note = chemically synthesized
  source 1..22: mol_type = other DNA
ttttaattttcacaacattatt

SEQ ID NO: 26384 - DNA, 22 bp, synthetic construct
  misc_feature 1..22: note = chemically synthesized
  source 1..22: mol_type = other DNA
ttaattttcacaacattattac

SEQ ID NO: 26385 - DNA, 22 bp, synthetic construct
  misc_feature 1..22: note = chemically synthesized
  source 1..22: mol_type = other DNA
taattttcacaacattattaca

SEQ ID NO: 26386 - DNA, 22 bp, synthetic construct
  misc_feature 1..22: note = chemically synthesized
  source 1..22: mol_type = other DNA
aattttcacaacattattacag

SEQ ID NO: 26387 - DNA, 22 bp, synthetic construct
  misc_feature 1..22: note = chemically synthesized
  source 1..22: mol_type = other DNA
attttcacaacattattacagg

SEQ ID NO: 26388 - DNA, 22 bp, synthetic construct
  misc_feature 1..22: note = chemically synthesized
  source 1..22: mol_type = other DNA
tcacaacattattacaggtaga

SEQ ID NO: 26389 - DNA, 22 bp, synthetic construct
  misc_feature 1..22: note = chemically synthesized
  source 1..22: mol_type = other DNA
cacaacattattacaggtagat

SEQ ID NO: 26390 - DNA, 22 bp, synthetic construct
  misc_feature 1..22: note = chemically synthesized
  source 1..22: mol_type = other DNA
acaacattattacaggtagatt

SEQ ID NO: 26391 - DNA, 22 bp, synthetic construct
  misc_feature 1..22: note = chemically synthesized
  source 1..22: mol_type = other DNA
ttacaggtagattttatatatg

SEQ ID NO: 26392 - DNA, 22 bp, synthetic construct
  misc_feature 1..22: note = chemically synthesized
  source 1..22: mol_type = other DNA
caggtagattttatatatggag

SEQ ID NO: 26393 - DNA, 22 bp, synthetic construct
  misc_feature 1..22: note = chemically synthesized
  source 1..22: mol_type = other DNA
tatatatggagaaactgaggca

SEQ ID NO: 26394 - DNA, 22 bp, synthetic construct
  misc_feature 1..22: note = chemically synthesized
  source 1..22: mol_type = other DNA
atatatggagaaactgaggcac

SEQ ID NO: 26395 - DNA, 22 bp, synthetic construct
  misc_feature 1..22: note = chemically synthesized
  source 1..22: mol_type = other DNA
tatatggagaaactgaggcaca

SEQ ID NO: 26396 - DNA, 22 bp, synthetic construct
  misc_feature 1..22: note = chemically synthesized
  source 1..22: mol_type = other DNA
aggcacagagatgctatgtaat

SEQ ID NO: 26397 - DNA, 22 bp, synthetic construct
  misc_feature 1..22: note = chemically synthesized
  source 1..22: mol_type = other DNA
tgtaataaatctcaacattacc

SEQ ID NO: 26398 - DNA, 22 bp, synthetic construct
  misc_feature 1..22: note = chemically synthesized
  source 1..22: mol_type = other DNA
aacattacccaggtgatggtgg

SEQ ID NO: 26399 - DNA, 22 bp, synthetic construct
  misc_feature 1..22: note = chemically synthesized
  source 1..22: mol_type = other DNA
cccaggtgatggtggagttgga

SEQ ID NO: 26400 - DNA, 22 bp, synthetic construct
  misc_feature 1..22: note = chemically synthesized
  source 1..22: mol_type = other DNA
gaattccaaatcatgcagtctg

SEQ ID NO: 26401 - DNA, 22 bp, synthetic construct
  misc_feature 1..22: note = chemically synthesized
  source 1..22: mol_type = other DNA
caaatcatgcagtctgacttta

SEQ ID NO: 26402 - DNA, 22 bp, synthetic construct
  misc_feature 1..22: note = chemically synthesized
  source 1..22: mol_type = other DNA
actttagctgtagacagcaaga

SEQ ID NO: 26403 - DNA, 22 bp, synthetic construct
  misc_feature 1..22: note = chemically synthesized
  source 1..22: mol_type = other DNA
tagctgtagacagcaagatagt

SEQ ID NO: 26404 - DNA, 22 bp, synthetic construct
  misc_feature 1..22: note = chemically synthesized
  source 1..22: mol_type = other DNA
agctgtagacagcaagatagta

SEQ ID NO: 26405 - DNA, 22 bp, synthetic construct
  misc_feature 1..22: note = chemically synthesized
  source 1..22: mol_type = other DNA
gctgtagacagcaagatagtaa

SEQ ID NO: 26406 - DNA, 22 bp, synthetic construct
  misc_feature 1..22: note = chemically synthesized
  source 1..22: mol_type = other DNA
tagacagcaagatagtaagtaa

SEQ ID NO: 26407 - DNA, 22 bp, synthetic construct
  misc_feature 1..22: note = chemically synthesized
  source 1..22: mol_type = other DNA
atggatctttttgcttttgctt

SEQ ID NO: 26408 - DNA, 22 bp, synthetic construct
  misc_feature 1..22: note = chemically synthesized
  source 1..22: mol_type = other DNA
tttgcttttgcttgtttgtttg

SEQ ID NO: 26409 - DNA, 22 bp, synthetic construct
  misc_feature 1..22: note = chemically synthesized
  source 1..22: mol_type = other DNA
ttgcttttgcttgtttgtttga

SEQ ID NO: 26410 - DNA, 22 bp, synthetic construct
  misc_feature 1..22: note = chemically synthesized
  source 1..22: mol_type = other DNA
tgcttttgcttgtttgtttgaa

SEQ ID NO: 26411 - DNA, 22 bp, synthetic construct
  misc_feature 1..22: note = chemically synthesized
  source 1..22: mol_type = other DNA
gcttttgcttgtttgtttgaaa

SEQ ID NO: 26412 - DNA, 22 bp, synthetic construct
  misc_feature 1..22: note = chemically synthesized
  source 1..22: mol_type = other DNA
cttttgcttgtttgtttgaaac

SEQ ID NO: 26413 - DNA, 22 bp, synthetic construct
  misc_feature 1..22: note = chemically synthesized
  source 1..22: mol_type = other DNA
ttgcttgtttgtttgaaacagg

SEQ ID NO: 26414 - DNA, 22 bp, synthetic construct
  misc_feature 1..22: note = chemically synthesized
  source 1..22: mol_type = other DNA
tgcttgtttgtttgaaacaggg

SEQ ID NO: 26415 - DNA, 22 bp, synthetic construct
  misc_feature 1..22: note = chemically synthesized
  source 1..22: mol_type = other DNA
gcttgtttgtttgaaacagggt

SEQ ID NO: 26416 - DNA, 22 bp, synthetic construct
  misc_feature 1..22: note = chemically synthesized
  source 1..22: mol_type = other DNA
cttgtttgtttgaaacagggtc

SEQ ID NO: 26417 - DNA, 22 bp, synthetic construct
  misc_feature 1..22: note = chemically synthesized
  source 1..22: mol_type = other DNA
gtttgtttgaaacagggtctca

SEQ ID NO: 26418 - DNA, 22 bp, synthetic construct
  misc_feature 1..22: note = chemically synthesized
  source 1..22: mol_type = other DNA
tttgtttgaaacagggtctcac

SEQ ID NO: 26419 - DNA, 22 bp, synthetic construct
  misc_feature 1..22: note = chemically synthesized
  source 1..22: mol_type = other DNA
gtttgaaacagggtctcactct

SEQ ID NO: 26420 - DNA, 22 bp, synthetic construct
  misc_feature 1..22: note = chemically synthesized
  source 1..22: mol_type = other DNA
tttgaaacagggtctcactctg

SEQ ID NO: 26421 - DNA, 22 bp, synthetic construct
  misc_feature 1..22: note = chemically synthesized
  source 1..22: mol_type = other DNA
gaaacagggtctcactctgtca

SEQ ID NO: 26422 - DNA, 22 bp, synthetic construct
  misc_feature 1..22: note = chemically synthesized
  source 1..22: mol_type = other DNA
aaacagggtctcactctgtcac

SEQ ID NO: 26423 - DNA, 22 bp, synthetic construct
  misc_feature 1..22: note = chemically synthesized
  source 1..22: mol_type = other DNA
actctgtcaccccggctggagt

SEQ ID NO: 26424 - DNA, 22 bp, synthetic construct
  misc_feature 1..22: note = chemically synthesized
  source 1..22: mol_type = other DNA
tgtcaccccggctggagtgcaa

SEQ ID NO: 26425 - DNA, 22 bp, synthetic construct
  misc_feature 1..22: note = chemically synthesized
  source 1..22: mol_type = other DNA
tcaccccggctggagtgcaatg

SEQ ID NO: 26426 - DNA, 22 bp, synthetic construct
  misc_feature 1..22: note = chemically synthesized
  source 1..22: mol_type = other DNA
gagtgcaatggtgcaatcttgc

SEQ ID NO: 26427 - DNA, 22 bp, synthetic construct
  misc_feature 1..22: note = chemically synthesized
  source 1..22: mol_type = other DNA
gctcactgaagcctcactagaa

SEQ ID NO: 26428 - DNA, 22 bp, synthetic construct
  misc_feature 1..22: note = chemically synthesized
  source 1..22: mol_type = other DNA
ctcactgaagcctcactagaac

SEQ ID NO: 26429 - DNA, 22 bp, synthetic construct
  misc_feature 1..22: note = chemically synthesized
  source 1..22: mol_type = other DNA
actgaagcctcactagaacgcc

SEQ ID NO: 26430 - DNA, 22 bp, synthetic construct
  misc_feature 1..22: note = chemically synthesized
  source 1..22: mol_type = other DNA
aagcctcactagaacgcctgga

SEQ ID NO: 26431 - DNA, 22 bp, synthetic construct
  misc_feature 1..22: note = chemically synthesized
  source 1..22: mol_type = other DNA
actagaacgcctggattcaatt

SEQ ID NO: 26432 - DNA, 22 bp, synthetic construct
  misc_feature 1..22: note = chemically synthesized
  source 1..22: mol_type = other DNA
gaacgcctggattcaattgatc

SEQ ID NO: 26433 - DNA, 22 bp, synthetic construct
  misc_feature 1..22: note = chemically synthesized
  source 1..22: mol_type = other DNA
gattcaattgatcctcctgctt

SEQ ID NO: 26434 - DNA, 22 bp, synthetic construct
  misc_feature 1..22: note = chemically synthesized
  source 1..22: mol_type = other DNA
aattgatcctcctgctttagcc

SEQ ID NO: 26435 - DNA, 22 bp, synthetic construct
  misc_feature 1..22: note = chemically synthesized
  source 1..22: mol_type = other DNA
atcctcctgctttagcctctca

SEQ ID NO: 26436 - DNA, 22 bp, synthetic construct
  misc_feature 1..22: note = chemically synthesized
  source 1..22: mol_type = other DNA
ctgctttagcctctcaggtagc

SEQ ID NO: 26437 - DNA, 22 bp, synthetic construct
  misc_feature 1..22: note = chemically synthesized
  source 1..22: mol_type = other DNA
ctttagcctctcaggtagctag

SEQ ID NO: 26438 - DNA, 22 bp, synthetic construct
  misc_feature 1..22: note = chemically synthesized
  source 1..22: mol_type = other DNA
tagcctctcaggtagctaggac

SEQ ID NO: 26439 - DNA, 22 bp, synthetic construct
  misc_feature 1..22: note = chemically synthesized
  source 1..22: mol_type = other DNA
agcctctcaggtagctaggact

SEQ ID NO: 26440 - DNA, 22 bp, synthetic construct
  misc_feature 1..22: note = chemically synthesized
  source 1..22: mol_type = other DNA
gcctctcaggtagctaggacta

SEQ ID NO: 26441 - DNA, 22 bp, synthetic construct
  misc_feature 1..22: note = chemically synthesized
  source 1..22: mol_type = other DNA
tcaggtagctaggactacaggt

SEQ ID NO: 26442 - DNA, 22 bp, synthetic construct
  misc_feature 1..22: note = chemically synthesized
  source 1..22: mol_type = other DNA
aggtagctaggactacaggtgt

SEQ ID NO: 26443 - DNA, 22 bp, synthetic construct
  misc_feature 1..22: note = chemically synthesized
  source 1..22: mol_type = other DNA
ggactacaggtgtgagcctcca

SEQ ID NO: 26444 - DNA, 22 bp, synthetic construct
  misc_feature 1..22: note = chemically synthesized
  source 1..22: mol_type = other DNA
caggtgtgagcctccatggcca

SEQ ID NO: 26445 - DNA, 22 bp, synthetic construct
  misc_feature 1..22: note = chemically synthesized
  source 1..22: mol_type = other DNA
catggccagctagagaaatttt

SEQ ID NO: 26446 - DNA, 22 bp, synthetic construct
  misc_feature 1..22: note = chemically synthesized
  source 1..22: mol_type = other DNA
gagaaattttttaaatttctgt

SEQ ID NO: 26447 - DNA, 22 bp, synthetic construct
  misc_feature 1..22: note = chemically synthesized
  source 1..22: mol_type = other DNA
tttaaatttctgtagaaacagg

SEQ ID NO: 26448 - DNA, 22 bp, synthetic construct
  misc_feature 1..22: note = chemically synthesized
  source 1..22: mol_type = other DNA
ttaaatttctgtagaaacaggg

SEQ ID NO: 26449 - DNA, 22 bp, synthetic construct
  misc_feature 1..22: note = chemically synthesized
  source 1..22: mol_type = other DNA
taaatttctgtagaaacagggt

SEQ ID NO: 26450 - DNA, 22 bp, synthetic construct
  misc_feature 1..22: note = chemically synthesized
  source 1..22: mol_type = other DNA
aaatttctgtagaaacagggtc

SEQ ID NO: 26451 - DNA, 22 bp, synthetic construct
  misc_feature 1..22: note = chemically synthesized
  source 1..22: mol_type = other DNA
aatttctgtagaaacagggtct

SEQ ID NO: 26452 - DNA, 22 bp, synthetic construct
  misc_feature 1..22: note = chemically synthesized
  source 1..22: mol_type = other DNA
ctgtagaaacagggtctcccta

SEQ ID NO: 26453 - DNA, 22 bp, synthetic construct
  misc_feature 1..22: note = chemically synthesized
  source 1..22: mol_type = other DNA
tgtagaaacagggtctccctat

SEQ ID NO: 26454 - DNA, 22 bp, synthetic construct
  misc_feature 1..22: note = chemically synthesized
  source 1..22: mol_type = other DNA
tagaaacagggtctccctatgt

SEQ ID NO: 26455 - DNA, 22 bp, synthetic construct
  misc_feature 1..22: note = chemically synthesized
  source 1..22: mol_type = other DNA
cctatgttccccaggctggtat

SEQ ID NO: 26456 - DNA, 22 bp, synthetic construct
  misc_feature 1..22: note = chemically synthesized
  source 1..22: mol_type = other DNA
tgttccccaggctggtatccaa

SEQ ID NO: 26457 - DNA, 22 bp, synthetic construct
  misc_feature 1..22: note = chemically synthesized
  source 1..22: mol_type = other DNA
cccaggctggtatccaactctt

SEQ ID NO: 26458 - DNA, 22 bp, synthetic construct
  misc_feature 1..22: note = chemically synthesized
  source 1..22: mol_type = other DNA
gtatccaactcttggtctcaaa

SEQ ID NO: 26459 - DNA, 22 bp, synthetic construct
  misc_feature 1..22: note = chemically synthesized
  source 1..22: mol_type = other DNA
ttggtctcaaacaattctccca

SEQ ID NO: 26460 - DNA, 22 bp, synthetic construct
  misc_feature 1..22: note = chemically synthesized
  source 1..22: mol_type = other DNA
ggtctcaaacaattctcccacc

SEQ ID NO: 26461 - DNA, 22 bp, synthetic construct
  misc_feature 1..22: note = chemically synthesized
  source 1..22: mol_type = other DNA
gtctcaaacaattctcccacct

SEQ ID NO: 26462 - DNA, 22 bp, synthetic construct
  misc_feature 1..22: note = chemically synthesized
  source 1..22: mol_type = other DNA
aaacaattctcccacctcagcc

SEQ ID NO: 26463 - DNA, 22 bp, synthetic construct
  misc_feature 1..22: note = chemically synthesized
  source 1..22: mol_type = other DNA
tcccacctcagccttgaaaagt

SEQ ID NO: 26464 - DNA, 22 bp, synthetic construct
  misc_feature 1..22: note = chemically synthesized
  source 1..22: mol_type = other DNA
ccacctcagccttgaaaagtgt

SEQ ID NO: 26465 - DNA, 22 bp, synthetic construct
  misc_feature 1..22: note = chemically synthesized
  source 1..22: mol_type = other DNA
agccttgaaaagtgttgagatt

SEQ ID NO: 26466 - DNA, 22 bp, synthetic construct
  misc_feature 1..22: note = chemically synthesized
  source 1..22: mol_type = other DNA
gaaaagtgttgagattacaggt

SEQ ID NO: 26467 - DNA, 22 bp, synthetic construct
  misc_feature 1..22: note = chemically synthesized
  source 1..22: mol_type = other DNA
aaaagtgttgagattacaggtg

SEQ ID NO: 26468 - DNA, 22 bp, synthetic construct
  misc_feature 1..22: note = chemically synthesized
  source 1..22: mol_type = other DNA
agattacaggtgtgaatcacca

SEQ ID NO: 26469 - DNA, 22 bp, synthetic construct
  misc_feature 1..22: note = chemically synthesized
  source 1..22: mol_type = other DNA
caggtgtgaatcaccatgctgg

SEQ ID NO: 26470 - DNA, 22 bp, synthetic construct
  misc_feature 1..22: note = chemically synthesized
  source 1..22: mol_type = other DNA
ggccttgatggatctttaaaag

SEQ ID NO: 26471 - DNA, 22 bp, synthetic construct
  misc_feature 1..22: note = chemically synthesized
  source 1..22: mol_type = other DNA
gatggatctttaaaagtggtgg

SEQ ID NO: 26472 - DNA, 22 bp, synthetic construct
  misc_feature 1..22: note = chemically synthesized
  source 1..22: mol_type = other DNA
atggatctttaaaagtggtggg

SEQ ID NO: 26473 - DNA, 22 bp, synthetic construct
  misc_feature 1..22: note = chemically synthesized
  source 1..22: mol_type = other DNA
taaaagtggtggggggtaggag

SEQ ID NO: 26474 - DNA, 22 bp, synthetic construct
  misc_feature 1..22: note = chemically synthesized
  source 1..22: mol_type = other DNA
aaaagtggtggggggtaggaga

SEQ ID NO: 26475 - DNA, 22 bp, synthetic construct
  misc_feature 1..22: note = chemically synthesized
  source 1..22: mol_type = other DNA
aaagtggtggggggtaggagaa

SEQ ID NO: 26476 - DNA, 22 bp, synthetic construct
  misc_feature 1..22: note = chemically synthesized
  source 1..22: mol_type = other DNA
ggtctcgggaaggatgggatcc

SEQ ID NO: 26477 - DNA, 22 bp, synthetic construct
  misc_feature 1..22: note = chemically synthesized
  source 1..22: mol_type = other DNA
gggaaggatgggatccttttca

SEQ ID NO: 26478 - DNA, 22 bp, synthetic construct
  misc_feature 1..22: note = chemically synthesized
  source 1..22: mol_type = other DNA
ttcattttgctctagagaaaag

SEQ ID NO: 26479 - DNA, 22 bp, synthetic construct
  misc_feature 1..22: note = chemically synthesized
  source 1..22: mol_type = other DNA
tcattttgctctagagaaaagc

SEQ ID NO: 26480 - DNA, 22 bp, synthetic construct
  misc_feature 1..22: note = chemically synthesized
  source 1..22: mol_type = other DNA
cattttgctctagagaaaagcc

SEQ ID NO: 26481 - DNA, 22 bp, synthetic construct
  misc_feature 1..22: note = chemically synthesized
  source 1..22: mol_type = other DNA
attttgctctagagaaaagcca

SEQ ID NO: 26482 - DNA, 22 bp, synthetic construct
  misc_feature 1..22: note = chemically synthesized
  source 1..22: mol_type = other DNA
tgctctagagaaaagccatttg

SEQ ID NO: 26483 - DNA, 22 bp, synthetic construct
  misc_feature 1..22: note = chemically synthesized
  source 1..22: mol_type = other DNA
gctctagagaaaagccatttgg

SEQ ID NO: 26484 - DNA, 22 bp, synthetic construct
  misc_feature 1..22: note = chemically synthesized
  source 1..22: mol_type = other DNA
ctctagagaaaagccatttgga

SEQ ID NO: 26485 - DNA, 22 bp, synthetic construct
  misc_feature 1..22: note = chemically synthesized
  source 1..22: mol_type = other DNA
tagagaaaagccatttggaaaa

SEQ ID NO: 26486 - DNA, 22 bp, synthetic construct
  misc_feature 1..22: note = chemically synthesized
  source 1..22: mol_type = other DNA
gagaaaagccatttggaaaact

SEQ ID NO: 26487 - DNA, 22 bp, synthetic construct
  misc_feature 1..22: note = chemically synthesized
  source 1..22: mol_type = other DNA
ggaaaacttctgtgttaacaaa

SEQ ID NO: 26488 - DNA, 22 bp, synthetic construct
  misc_feature 1..22: note = chemically synthesized
  source 1..22: mol_type = other DNA
gaaaacttctgtgttaacaaaa

SEQ ID NO: 26489 - DNA, 22 bp, synthetic construct
  misc_feature 1..22: note = chemically synthesized
  source 1..22: mol_type = other DNA
ctgtgttaacaaaaaacagccg

SEQ ID NO: 26490 - DNA, 22 bp, synthetic construct
  misc_feature 1..22: note = chemically synthesized
  source 1..22: mol_type = other DNA
tgtgttaacaaaaaacagccga

SEQ ID NO: 26491 - DNA, 22 bp, synthetic construct
  misc_feature 1..22: note = chemically synthesized
  source 1..22: mol_type = other DNA
tgttaacaaaaaacagccgagt

SEQ ID NO: 26492 - DNA, 22 bp, synthetic construct
  misc_feature 1..22: note = chemically synthesized
  source 1..22: mol_type = other DNA
acaaaaaacagccgagtagcct

SEQ ID NO: 26493 - DNA, 22 bp, synthetic construct
  misc_feature 1..22: note = chemically synthesized
  source 1..22: mol_type = other DNA
gtattaaactttagagcagttg

SEQ ID NO: 26494 - DNA, 22 bp, synthetic construct
  misc_feature 1..22: note = chemically synthesized
  source 1..22: mol_type = other DNA
aactttagagcagttgttcttt

SEQ ID NO: 26495 - DNA, 22 bp, synthetic construct
  misc_feature 1..22: note = chemically synthesized
  source 1..22: mol_type = other DNA
tagagcagttgttctttacggc

SEQ ID NO: 26496 - DNA, 22 bp, synthetic construct
  misc_feature 1..22: note = chemically synthesized
  source 1..22: mol_type = other DNA
agagcagttgttctttacggca

SEQ ID NO: 26497 - DNA, 22 bp, synthetic construct
  misc_feature 1..22: note = chemically synthesized
  source 1..22: mol_type = other DNA
gagcagttgttctttacggcaa

SEQ ID NO: 26498 - DNA, 22 bp, synthetic construct
  misc_feature 1..22: note = chemically synthesized
  source 1..22: mol_type = other DNA
ttctttacggcaattacagggg

SEQ ID NO: 26499 - DNA, 22 bp, synthetic construct
  misc_feature 1..22: note = chemically synthesized
  source 1..22: mol_type = other DNA
tttacggcaattacaggggcct

SEQ ID NO: 26500 - DNA, 22 bp, synthetic construct
  misc_feature 1..22: note = chemically synthesized
  source 1..22: mol_type = other DNA
tacggcaattacaggggccttc

SEQ ID NO: 26501 - DNA, 22 bp, synthetic construct
  misc_feature 1..22: note = chemically synthesized
  source 1..22: mol_type = other DNA
acggcaattacaggggccttca

SEQ ID NO: 26502 - DNA, 22 bp, synthetic construct
  misc_feature 1..22: note = chemically synthesized
  source 1..22: mol_type = other DNA
cggcaattacaggggccttcag

SEQ ID NO: 26503 - DNA, 22 bp, synthetic construct
  misc_feature 1..22: note = chemically synthesized
  source 1..22: mol_type = other DNA
caggggccttcaggaagctgat

SEQ ID NO: 26504 - DNA, 22 bp, synthetic construct
  misc_feature 1..22: note = chemically synthesized
  source 1..22: mol_type = other DNA
caggaagctgatggaagtgtga

SEQ ID NO: 26505 - DNA, 22 bp, synthetic construct
  misc_feature 1..22: note = chemically synthesized
  source 1..22: mol_type = other DNA
aggaagctgatggaagtgtgaa

SEQ ID NO: 26506 - DNA, 22 bp, synthetic construct
  misc_feature 1..22: note = chemically synthesized
  source 1..22: mol_type = other DNA
atggaagtgtgaagtcctcttc

SEQ ID NO: 26507 - DNA, 22 bp, synthetic construct
  misc_feature 1..22: note = chemically synthesized
  source 1..22: mol_type = other DNA
ttctcagagaaaagtacttcta

SEQ ID NO: 26508 - DNA, 22 bp, synthetic construct
  misc_feature 1..22: note = chemically synthesized
  source 1..22: mol_type = other DNA
ctcagagaaaagtacttctata

SEQ ID NO: 26509 - DNA, 22 bp, synthetic construct
  misc_feature 1..22: note = chemically synthesized
  source 1..22: mol_type = other DNA
tcagagaaaagtacttctatat

SEQ ID NO: 26510 - DNA, 22 bp, synthetic construct
  misc_feature 1..22: note = chemically synthesized
  source 1..22: mol_type = other DNA
agagaaaagtacttctatatac

SEQ ID NO: 26511 - DNA, 22 bp, synthetic construct
  misc_feature 1..22: note = chemically synthesized
  source 1..22: mol_type = other DNA
ctatatacgtgcacctaatttt

SEQ ID NO: 26512 - DNA, 22 bp, synthetic construct
  misc_feature 1..22: note = chemically synthesized
  source 1..22: mol_type = other DNA
tatatacgtgcacctaattttt

SEQ ID NO: 26513 - DNA, 22 bp, synthetic construct
  misc_feature 1..22: note = chemically synthesized
  source 1..22: mol_type = other DNA
tatacgtgcacctaatttttag

SEQ ID NO: 26514 - DNA, 22 bp, synthetic construct
  misc_feature 1..22: note = chemically synthesized
  source 1..22: mol_type = other DNA
atttttagatataatttctgaa

SEQ ID NO: 26515 - DNA, 22 bp, synthetic construct
  misc_feature 1..22: note = chemically synthesized
  source 1..22: mol_type = other DNA
ttagatataatttctgaaggtt

SEQ ID NO: 26516 - DNA, 22 bp, synthetic construct
  misc_feature 1..22: note = chemically synthesized
  source 1..22: mol_type = other DNA
tagatataatttctgaaggttt

SEQ ID NO: 26517 - DNA, 22 bp, synthetic construct
  misc_feature 1..22: note = chemically synthesized
  source 1..22: mol_type = other DNA
agatataatttctgaaggttta

SEQ ID NO: 26518 - DNA, 22 bp, synthetic construct
  misc_feature 1..22: note = chemically synthesized
  source 1..22: mol_type = other DNA
gatataatttctgaaggtttag

SEQ ID NO: 26519 - DNA, 22 bp, synthetic construct
  misc_feature 1..22: note = chemically synthesized
  source 1..22: mol_type = other DNA
ctgaaggtttagaaactccttg

SEQ ID NO: 26520 - DNA, 22 bp, synthetic construct
  misc_feature 1..22: note = chemically synthesized
  source 1..22: mol_type = other DNA
tgaaggtttagaaactccttga

SEQ ID NO: 26521 - DNA, 22 bp, synthetic construct
  misc_feature 1..22: note = chemically synthesized
  source 1..22: mol_type = other DNA
aaggtttagaaactccttgagt

SEQ ID NO: 26522 - DNA, 22 bp, synthetic construct
  misc_feature 1..22: note = chemically synthesized
  source 1..22: mol_type = other DNA
agaaactccttgagttcactta

SEQ ID NO: 26523 - DNA, 22 bp, synthetic construct
  misc_feature 1..22: note = chemically synthesized
  source 1..22: mol_type = other DNA
gaaactccttgagttcacttat

SEQ ID NO: 26524 - DNA, 22 bp, synthetic construct
  misc_feature 1..22: note = chemically synthesized
  source 1..22: mol_type = other DNA
cttgagttcacttatatcaaag

SEQ ID NO: 26525 - DNA, 22 bp, synthetic construct
  misc_feature 1..22: note = chemically synthesized
  source 1..22: mol_type = other DNA
gagttcacttatatcaaagtcc

SEQ ID NO: 26526 - DNA, 22 bp, synthetic construct
  misc_feature 1..22: note = chemically synthesized
  source 1..22: mol_type = other DNA
agttcacttatatcaaagtcct

SEQ ID NO: 26527 - DNA, 22 bp, synthetic construct
  misc_feature 1..22: note = chemically synthesized
  source 1..22: mol_type = other DNA
acttatatcaaagtcctcacct

SEQ ID NO: 26528 - DNA, 22 bp, synthetic construct
  misc_feature 1..22: note = chemically synthesized
  source 1..22: mol_type = other DNA
atatcaaagtcctcacctttag

SEQ ID NO: 26529 - DNA, 22 bp, synthetic construct
  misc_feature 1..22: note = chemically synthesized
  source 1..22: mol_type = other DNA
tatcaaagtcctcacctttaga

SEQ ID NO: 26530 - DNA, 22 bp, synthetic construct
  misc_feature 1..22: note = chemically synthesized
  source 1..22: mol_type = other DNA
acctttagaactcctgtcctag

SEQ ID NO: 26531 - DNA, 22 bp, synthetic construct
  misc_feature 1..22: note = chemically synthesized
  source 1..22: mol_type = other DNA
tagaactcctgtcctagaagag

SEQ ID NO: 26532 - DNA, 22 bp, synthetic construct
  misc_feature 1..22: note = chemically synthesized
  source 1..22: mol_type = other DNA
agaactcctgtcctagaagagt

SEQ ID NO: 26533 - DNA, 22 bp, synthetic construct
  misc_feature 1..22: note = chemically synthesized
  source 1..22: mol_type = other DNA
gaactcctgtcctagaagagtg

SEQ ID NO: 26534 - DNA, 22 bp, synthetic construct
  misc_feature 1..22: note = chemically synthesized
  source 1..22: mol_type = other DNA
ctgtcctagaagagtggactca

SEQ ID NO: 26535 - DNA, 22 bp, synthetic construct
  misc_feature 1..22: note = chemically synthesized
  source 1..22: mol_type = other DNA
tcctagaagagtggactcatta

SEQ ID NO: 26536 - DNA, 22 bp, synthetic construct
  misc_feature 1..22: note = chemically synthesized
  source 1..22: mol_type = other DNA
gaagagtggactcattattata

SEQ ID NO: 26537 - DNA, 22 bp, synthetic construct
  misc_feature 1..22: note = chemically synthesized
  source 1..22: mol_type = other DNA
attattataatttcttccataa

SEQ ID NO: 26538 - DNA, 22 bp, synthetic construct
  misc_feature 1..22: note = chemically synthesized
  source 1..22: mol_type = other DNA
ttataatttcttccataaccac

SEQ ID NO: 26539 - DNA, 22 bp, synthetic construct
  misc_feature 1..22: note = chemically synthesized
  source 1..22: mol_type = other DNA
taatttcttccataaccacttt

SEQ ID NO: 26540 - DNA, 22 bp, synthetic construct
  misc_feature 1..22: note = chemically synthesized
  source 1..22: mol_type = other DNA
cttccataaccactttgactct

SEQ ID NO: 26541 - DNA, 22 bp, synthetic construct
  misc_feature 1..22: note = chemically synthesized
  source 1..22: mol_type = other DNA
ttccataaccactttgactcta

SEQ ID NO: 26542 - DNA, 22 bp, synthetic construct
  misc_feature 1..22: note = chemically synthesized
  source 1..22: mol_type = other DNA
ccataaccactttgactctagt

SEQ ID NO: 26543 - DNA, 22 bp, synthetic construct
  misc_feature 1..22: note = chemically synthesized
  source 1..22: mol_type = other DNA
cataaccactttgactctagtt

SEQ ID NO: 26544 - DNA, 22 bp, synthetic construct
  misc_feature 1..22: note = chemically synthesized
  source 1..22: mol_type = other DNA
tgactctagttttctgaattct

SEQ ID NO: 26545 - DNA, 22 bp, synthetic construct
  misc_feature 1..22: note = chemically synthesized
  source 1..22: mol_type = other DNA
gactctagttttctgaattctt

SEQ ID NO: 26546 - DNA, 22 bp, synthetic construct
  misc_feature 1..22: note = chemically synthesized
  source 1..22: mol_type = other DNA
actctagttttctgaattcttc

SEQ ID NO: 26547 - DNA, 22 bp, synthetic construct
  misc_feature 1..22: note = chemically synthesized
  source 1..22: mol_type = other DNA
tagttttctgaattcttccctg

SEQ ID NO: 26548 - DNA, 22 bp, synthetic construct
  misc_feature 1..22: note = chemically synthesized
  source 1..22: mol_type = other DNA
gttttctgaattcttccctgtg

SEQ ID NO: 26549 - DNA, 22 bp, synthetic construct
  misc_feature 1..22: note = chemically synthesized
  source 1..22: mol_type = other DNA
tctgaattcttccctgtgccac

SEQ ID NO: 26550 - DNA, 22 bp, synthetic construct
  misc_feature 1..22: note = chemically synthesized
  source 1..22: mol_type = other DNA
ctgaattcttccctgtgccact

SEQ ID NO: 26551 - DNA, 22 bp, synthetic construct
  misc_feature 1..22: note = chemically synthesized
  source 1..22: mol_type = other DNA
tgaattcttccctgtgccactt

SEQ ID NO: 26552 - DNA, 22 bp, synthetic construct
  misc_feature 1..22: note = chemically synthesized
  source 1..22: mol_type = other DNA
aattcttccctgtgccacttgt

SEQ ID NO: 26553 - DNA, 22 bp, synthetic construct
  misc_feature 1..22: note = chemically synthesized
  source 1..22: mol_type = other DNA
ttccctgtgccacttgtaccat

SEQ ID NO: 26554 - DNA, 22 bp, synthetic construct
  misc_feature 1..22: note = chemically synthesized
  source 1..22: mol_type = other DNA
ccctgtgccacttgtaccatgt

SEQ ID NO: 26555 - DNA, 22 bp, synthetic construct
  misc_feature 1..22: note = chemically synthesized
  source 1..22: mol_type = other DNA
cctgtgccacttgtaccatgta

SEQ ID NO: 26556 - DNA, 22 bp, synthetic construct
  misc_feature 1..22: note = chemically synthesized
  source 1..22: mol_type = other DNA
tgccacttgtaccatgtaattc

SEQ ID NO: 26557 - DNA, 22 bp, synthetic construct
  misc_feature 1..22: note = chemically synthesized
  source 1..22: mol_type = other DNA
gtaccatgtaattcagaggtgt

SEQ ID NO: 26558 - DNA, 22 bp, synthetic construct
  misc_feature 1..22: note = chemically synthesized
  source 1..22: mol_type = other DNA
taccatgtaattcagaggtgta

SEQ ID NO: 26559 - DNA, 22 bp, synthetic construct
  misc_feature 1..22: note = chemically synthesized
  source 1..22: mol_type = other DNA
agaggtgtagtgtcaagactga

SEQ ID NO: 26560 - DNA, 22 bp, synthetic construct
  misc_feature 1..22: note = chemically synthesized
  source 1..22: mol_type = other DNA
aggaggaagcaggtaaattatg

SEQ ID NO: 26561 - DNA, 22 bp, synthetic construct
  misc_feature 1..22: note = chemically synthesized
  source 1..22: mol_type = other DNA
tgtccagcaatacgttggctta

SEQ ID NO: 26562 - DNA, 22 bp, synthetic construct
  misc_feature 1..22: note = chemically synthesized
  source 1..22: mol_type = other DNA
gcttaggcaaaaacaaattgtt

SEQ ID NO: 26563 - DNA, 22 bp, synthetic construct
  misc_feature 1..22: note = chemically synthesized
  source 1..22: mol_type = other DNA
aggcaaaaacaaattgtttcta

SEQ ID NO: 26564 - DNA, 22 bp, synthetic construct
  misc_feature 1..22: note = chemically synthesized
  source 1..22: mol_type = other DNA
ggcaaaaacaaattgtttctag

SEQ ID NO: 26565 - DNA, 22 bp, synthetic construct
  misc_feature 1..22: note = chemically synthesized
  source 1..22: mol_type = other DNA
tttctagtccattttaagaggg

SEQ ID NO: 26566 - DNA, 22 bp, synthetic construct
  misc_feature 1..22: note = chemically synthesized
  source 1..22: mol_type = other DNA
ctagtccattttaagagggaag

SEQ ID NO: 26567 - DNA, 22 bp, synthetic construct
  misc_feature 1..22: note = chemically synthesized
  source 1..22: mol_type = other DNA
tagtccattttaagagggaagc

SEQ ID NO: 26568 - DNA, 22 bp, synthetic construct
  misc_feature 1..22: note = chemically synthesized
  source 1..22: mol_type = other DNA
gtccattttaagagggaagcat

SEQ ID NO: 26569 - DNA, 22 bp, synthetic construct
  misc_feature 1..22: note = chemically synthesized
  source 1..22: mol_type = other DNA
taagagggaagcatttatttag

SEQ ID NO: 26570 - DNA, 22 bp, synthetic construct
  misc_feature 1..22: note = chemically synthesized
  source 1..22: mol_type = other DNA
aagagggaagcatttatttagg

SEQ ID NO: 26571 - DNA, 22 bp, synthetic construct
  misc_feature 1..22: note = chemically synthesized
  source 1..22: mol_type = other DNA
agagggaagcatttatttaggg

SEQ ID NO: 26572 - DNA, 22 bp, synthetic construct
  misc_feature 1..22: note = chemically synthesized
  source 1..22: mol_type = other DNA
atttagggactacatcgctcaa

SEQ ID NO: 26573 - DNA, 22 bp, synthetic construct
  misc_feature 1..22: note = chemically synthesized
  source 1..22: mol_type = other DNA
tttagggactacatcgctcaag

SEQ ID NO: 26574 - DNA, 22 bp, synthetic construct
  misc_feature 1..22: note = chemically synthesized
  source 1..22: mol_type = other DNA
agggactacatcgctcaagtct

SEQ ID NO: 26575 - DNA, 22 bp, synthetic construct
  misc_feature 1..22: note = chemically synthesized
  source 1..22: mol_type = other DNA
gggactacatcgctcaagtctt

SEQ ID NO: 26576 - DNA, 22 bp, synthetic construct
  misc_feature 1..22: note = chemically synthesized
  source 1..22: mol_type = other DNA
catcgctcaagtctttacaatt

SEQ ID NO: 26577 - DNA, 22 bp, synthetic construct
  misc_feature 1..22: note = chemically synthesized
  source 1..22: mol_type = other DNA
aagtctttacaattcttaaatt

SEQ ID NO: 26578 - DNA, 22 bp, synthetic construct
  misc_feature 1..22: note = chemically synthesized
  source 1..22: mol_type = other DNA
tacaattcttaaattaactttc

SEQ ID NO: 26579 - DNA, 22 bp, synthetic construct
  misc_feature 1..22: note = chemically synthesized
  source 1..22: mol_type = other DNA
acaattcttaaattaactttca

SEQ ID NO: 26580 - DNA, 22 bp, synthetic construct
  misc_feature 1..22: note = chemically synthesized
  source 1..22: mol_type = other DNA
caattcttaaattaactttcat

SEQ ID NO: 26581 - DNA, 22 bp, synthetic construct
  misc_feature 1..22: note = chemically synthesized
  source 1..22: mol_type = other DNA
ttaaattaactttcattatgtg

SEQ ID NO: 26582 - DNA, 22 bp, synthetic construct
  misc_feature 1..22: note = chemically synthesized
  source 1..22: mol_type = other DNA
aaattaactttcattatgtgtg

SEQ ID NO: 26583 - DNA, 22 bp, synthetic construct
  misc_feature 1..22: note = chemically synthesized
  source 1..22: mol_type = other DNA
aattaactttcattatgtgtga

SEQ ID NO: 26584 - DNA, 22 bp, synthetic construct
  misc_feature 1..22: note = chemically synthesized
  source 1..22: mol_type = other DNA
actttcattatgtgtgacaaca

SEQ ID NO: 26585 - DNA, 22 bp, synthetic construct
  misc_feature 1..22: note = chemically synthesized
  source 1..22: mol_type = other DNA
tcattatgtgtgacaacattta

SEQ ID NO: 26586 - DNA, 22 bp, synthetic construct
  misc_feature 1..22: note = chemically synthesized
  source 1..22: mol_type = other DNA
cattatgtgtgacaacatttat

SEQ ID NO: 26587 - DNA, 22 bp, synthetic construct
  misc_feature 1..22: note = chemically synthesized
  source 1..22: mol_type = other DNA
attatgtgtgacaacatttatt

SEQ ID NO: 26588 - DNA, 22 bp, synthetic construct
  misc_feature 1..22: note = chemically synthesized
  source 1..22: mol_type = other DNA
tgtgtgacaacatttattaaac

SEQ ID NO: 26589 - DNA, 22 bp, synthetic construct
  misc_feature 1..22: note = chemically synthesized
  source 1..22: mol_type = other DNA
attaaacttttttaatgatcct

SEQ ID NO: 26590 - DNA, 22 bp, synthetic construct
  misc_feature 1..22: note = chemically synthesized
  source 1..22: mol_type = other DNA
ttaaacttttttaatgatccta

SEQ ID NO: 26591 - DNA, 22 bp, synthetic construct
  misc_feature 1..22: note = chemically synthesized
  source 1..22: mol_type = other DNA
aacttttttaatgatcctaaat

SEQ ID NO: 26592 - DNA, 22 bp, synthetic construct
  misc_feature 1..22: note = chemically synthesized
  source 1..22: mol_type = other DNA
ttttaatgatcctaaatatcct

SEQ ID NO: 26593 - DNA, 22 bp, synthetic construct
  misc_feature 1..22: note = chemically synthesized
  source 1..22: mol_type = other DNA
tttaatgatcctaaatatcctt

SEQ ID NO: 26594 - DNA, 22 bp, synthetic construct
  misc_feature 1..22: note = chemically synthesized
  source 1..22: mol_type = other DNA
ttaatgatcctaaatatcctta

SEQ ID NO: 26595 - DNA, 22 bp, synthetic construct
  misc_feature 1..22: note = chemically synthesized
  source 1..22: mol_type = other DNA
taatgatcctaaatatccttaa

SEQ ID NO: 26596 - DNA, 22 bp, synthetic construct
  misc_feature 1..22: note = chemically synthesized
  source 1..22: mol_type = other DNA
aatgatcctaaatatccttaac

SEQ ID NO: 26597 - DNA, 22 bp, synthetic construct
  misc_feature 1..22: note = chemically synthesized
  source 1..22: mol_type = other DNA
atgatcctaaatatccttaaca

SEQ ID NO: 26598 - DNA, 22 bp, synthetic construct
  misc_feature 1..22: note = chemically synthesized
  source 1..22: mol_type = other DNA
aatatccttaacatgttaattt

SEQ ID NO: 26599 - DNA, 22 bp, synthetic construct
  misc_feature 1..22: note = chemically synthesized
  source 1..22: mol_type = other DNA
aacatgttaatttctccagagt

SEQ ID NO: 26600 - DNA, 22 bp, synthetic construct
  misc_feature 1..22: note = chemically synthesized
  source 1..22: mol_type = other DNA
acatgttaatttctccagagtt

SEQ ID NO: 26601 - DNA, 22 bp, synthetic construct
  misc_feature 1..22: note = chemically synthesized
  source 1..22: mol_type = other DNA
atttctccagagtttgtaatgt

SEQ ID NO: 26602 - DNA, 22 bp, synthetic construct
  misc_feature 1..22: note = chemically synthesized
  source 1..22: mol_type = other DNA
ctccagagtttgtaatgttctg

SEQ ID NO: 26603 - DNA, 22 bp, synthetic construct
  misc_feature 1..22: note = chemically synthesized
  source 1..22: mol_type = other DNA
tccagagtttgtaatgttctga

SEQ ID NO: 26604 - DNA, 22 bp, synthetic construct
  misc_feature 1..22: note = chemically synthesized
  source 1..22: mol_type = other DNA
cagagtttgtaatgttctgagc

SEQ ID NO: 26605 - DNA, 22 bp, synthetic construct
  misc_feature 1..22: note = chemically synthesized
  source 1..22: mol_type = other DNA
gtaatgttctgagcaagtgtgt

SEQ ID NO: 26606 - DNA, 22 bp, synthetic construct
  misc_feature 1..22: note = chemically synthesized
  source 1..22: mol_type = other DNA
taatgttctgagcaagtgtgtg

SEQ ID NO: 26607 - DNA, 22 bp, synthetic construct
  misc_feature 1..22: note = chemically synthesized
  source 1..22: mol_type = other DNA
tgagcaagtgtgtgcagaagaa

SEQ ID NO: 26608 - DNA, 22 bp, synthetic construct
  misc_feature 1..22: note = chemically synthesized
  source 1..22: mol_type = other DNA
agcaagtgtgtgcagaagaaat

SEQ ID NO: 26609 - DNA, 22 bp, synthetic construct
  misc_feature 1..22: note = chemically synthesized
  source 1..22: mol_type = other DNA
tagtaagacctgggcaaaggag

SEQ ID NO: 26610 - DNA, 22 bp, synthetic construct
  misc_feature 1..22: note = chemically synthesized
  source 1..22: mol_type = other DNA
ggcaaaggagagagtaaacatt

SEQ ID NO: 26611 - DNA, 22 bp, synthetic construct
  misc_feature 1..22: note = chemically synthesized
  source 1..22: mol_type = other DNA
ttcccccacatttgggcaaaac

SEQ ID NO: 26612 - DNA, 22 bp, synthetic construct
  misc_feature 1..22: note = chemically synthesized
  source 1..22: mol_type = other DNA
tcccccacatttgggcaaaact

SEQ ID NO: 26613 - DNA, 22 bp, synthetic construct
  misc_feature 1..22: note = chemically synthesized
  source 1..22: mol_type = other DNA
cccccacatttgggcaaaactt

SEQ ID NO: 26614 - DNA, 22 bp, synthetic construct
  misc_feature 1..22: note = chemically synthesized
  source 1..22: mol_type = other DNA
ccccacatttgggcaaaacttt

SEQ ID NO: 26615 - DNA, 22 bp, synthetic construct
  misc_feature 1..22: note = chemically synthesized
  source 1..22: mol_type = other DNA
gggcaaaactttccatcctggg

SEQ ID NO: 26616 - DNA, 22 bp, synthetic construct
  misc_feature 1..22: note = chemically synthesized
  source 1..22: mol_type = other DNA
ggcaaaactttccatcctgggt

SEQ ID NO: 26617 - DNA, 22 bp, synthetic construct
  misc_feature 1..22: note = chemically synthesized
  source 1..22: mol_type = other DNA
tccatcctgggtcacaccacag

SEQ ID NO: 26618 - DNA, 22 bp, synthetic construct
  misc_feature 1..22: note = chemically synthesized
  source 1..22: mol_type = other DNA
ccatcctgggtcacaccacagt

SEQ ID NO: 26619 - DNA, 22 bp, synthetic construct
  misc_feature 1..22: note = chemically synthesized
  source 1..22: mol_type = other DNA
catcctgggtcacaccacagtc

SEQ ID NO: 26620 - DNA, 22 bp, synthetic construct
  misc_feature 1..22: note = chemically synthesized
  source 1..22: mol_type = other DNA
ggtcacaccacagtctaatttc

SEQ ID NO: 26621 - DNA, 22 bp, synthetic construct
  misc_feature 1..22: note = chemically synthesized
  source 1..22: mol_type = other DNA
atttccctcctctcctctccct

SEQ ID NO: 26622 - DNA, 22 bp, synthetic construct
  misc_feature 1..22: note = chemically synthesized
  source 1..22: mol_type = other DNA
ccctcctctcctctccctcaac

SEQ ID NO: 26623 - DNA, 22 bp, synthetic construct
  misc_feature 1..22: note = chemically synthesized
  source 1..22: mol_type = other DNA
cctcctctcctctccctcaact

SEQ ID NO: 26624 - DNA, 22 bp, synthetic construct
  misc_feature 1..22: note = chemically synthesized
  source 1..22: mol_type = other DNA
ctctcctctccctcaactggta

SEQ ID NO: 26625 - DNA, 22 bp, synthetic construct
  misc_feature 1..22: note = chemically synthesized
  source 1..22: mol_type = other DNA
tcctctccctcaactggtaaca

SEQ ID NO: 26626 - DNA, 22 bp, synthetic construct
  misc_feature 1..22: note = chemically synthesized
  source 1..22: mol_type = other DNA
ctctccctcaactggtaacagt

SEQ ID NO: 26627 - DNA, 22 bp, synthetic construct
  misc_feature 1..22: note = chemically synthesized
  source 1..22: mol_type = other DNA
tccctcaactggtaacagtgct

SEQ ID NO: 26628 - DNA, 22 bp, synthetic construct
  misc_feature 1..22: note = chemically synthesized
  source 1..22: mol_type = other DNA
cctcaactggtaacagtgcttc

SEQ ID NO: 26629 - DNA, 22 bp, synthetic construct
  misc_feature 1..22: note = chemically synthesized
  source 1..22: mol_type = other DNA
aactggtaacagtgcttcttcc

SEQ ID NO: 26630 - DNA, 22 bp, synthetic construct
  misc_feature 1..22: note = chemically synthesized
  source 1..22: mol_type = other DNA
gtaacagtgcttcttccaaaac

SEQ ID NO: 26631 - DNA, 22 bp, synthetic construct
  misc_feature 1..22: note = chemically synthesized
  source 1..22: mol_type = other DNA
cttccaaaacatacctgactac

SEQ ID NO: 26632 - DNA, 22 bp, synthetic construct
  misc_feature 1..22: note = chemically synthesized
  source 1..22: mol_type = other DNA
ttccaaaacatacctgactact

SEQ ID NO: 26633 - DNA, 22 bp, synthetic construct
  misc_feature 1..22: note = chemically synthesized
  source 1..22: mol_type = other DNA
ccaaaacatacctgactactta

SEQ ID NO: 26634 - DNA, 22 bp, synthetic construct
  misc_feature 1..22: note = chemically synthesized
  source 1..22: mol_type = other DNA
caaaacatacctgactacttag

SEQ ID NO: 26635 - DNA, 22 bp, synthetic construct
  misc_feature 1..22: note = chemically synthesized
  source 1..22: mol_type = other DNA
actacttagtacttcccactac

SEQ ID NO: 26636 - DNA, 22 bp, synthetic construct
  misc_feature 1..22: note = chemically synthesized
  source 1..22: mol_type = other DNA
cttagtacttcccactactgtg

SEQ ID NO: 26637 - DNA, 22 bp, synthetic construct
  misc_feature 1..22: note = chemically synthesized
  source 1..22: mol_type = other DNA
agtacttcccactactgtggat

SEQ ID NO: 26638 - DNA, 22 bp, synthetic construct
  misc_feature 1..22: note = chemically synthesized
  source 1..22: mol_type = other DNA
gtacttcccactactgtggata

SEQ ID NO: 26639 - DNA, 22 bp, synthetic construct
  misc_feature 1..22: note = chemically synthesized
  source 1..22: mol_type = other DNA
cccactactgtggatagaattt

SEQ ID NO: 26640 - DNA, 22 bp, synthetic construct
  misc_feature 1..22: note = chemically synthesized
  source 1..22: mol_type = other DNA
ccactactgtggatagaatttc

SEQ ID NO: 26641 - DNA, 22 bp, synthetic construct
  misc_feature 1..22: note = chemically synthesized
  source 1..22: mol_type = other DNA
ctgtggatagaatttcagtgac

SEQ ID NO: 26642 - DNA, 22 bp, synthetic construct
  misc_feature 1..22: note = chemically synthesized
  source 1..22: mol_type = other DNA
tggatagaatttcagtgactcc

SEQ ID NO: 26643 - DNA, 22 bp, synthetic construct
  misc_feature 1..22: note = chemically synthesized
  source 1..22: mol_type = other DNA
cagtgactcctcattcattgtt

SEQ ID NO: 26644 - DNA, 22 bp, synthetic construct
  misc_feature 1..22: note = chemically synthesized
  source 1..22: mol_type = other DNA
agtgactcctcattcattgttc

SEQ ID NO: 26645 - DNA, 22 bp, synthetic construct
  misc_feature 1..22: note = chemically synthesized
  source 1..22: mol_type = other DNA
ctcattcattgttcataccctg

SEQ ID NO: 26646 - DNA, 22 bp, synthetic construct
  misc_feature 1..22: note = chemically synthesized
  source 1..22: mol_type = other DNA
attcattgttcataccctggag

SEQ ID NO: 26647 - DNA, 22 bp, synthetic construct
  misc_feature 1..22: note = chemically synthesized
  source 1..22: mol_type = other DNA
attgttcataccctggagacaa

SEQ ID NO: 26648 - DNA, 22 bp, synthetic construct
  misc_feature 1..22: note = chemically synthesized
  source 1..22: mol_type = other DNA
ttcataccctggagacaaaact

SEQ ID NO: 26649 - DNA, 22 bp, synthetic construct
  misc_feature 1..22: note = chemically synthesized
  source 1..22: mol_type = other DNA
ataccctggagacaaaactcct

SEQ ID NO: 26650 - DNA, 22 bp, synthetic construct
  misc_feature 1..22: note = chemically synthesized
  source 1..22: mol_type = other DNA
gagacaaaactccttaaggcta

SEQ ID NO: 26651 - DNA, 22 bp, synthetic construct
  misc_feature 1..22: note = chemically synthesized
  source 1..22: mol_type = other DNA
cttaaggctattaactccccct

SEQ ID NO: 26652 - DNA, 22 bp, synthetic construct
  misc_feature 1..22: note = chemically synthesized
  source 1..22: mol_type = other DNA
aaggctattaactccccctgag

SEQ ID NO: 26653 - DNA, 22 bp, synthetic construct
  misc_feature 1..22: note = chemically synthesized
  source 1..22: mol_type = other DNA
aggctattaactccccctgagc

SEQ ID NO: 26654 - DNA, 22 bp, synthetic construct
  misc_feature 1..22: note = chemically synthesized
  source 1..22: mol_type = other DNA
ttaactccccctgagcttcaca

SEQ ID NO: 26655 - DNA, 22 bp, synthetic construct
  misc_feature 1..22: note = chemically synthesized
  source 1..22: mol_type = other DNA
actccccctgagcttcacaatc

SEQ ID NO: 26656 - DNA, 22 bp, synthetic construct
  misc_feature 1..22: note = chemically synthesized
  source 1..22: mol_type = other DNA
cccctgagcttcacaatctagt

SEQ ID NO: 26657 - DNA, 22 bp, synthetic construct
  misc_feature 1..22: note = chemically synthesized
  source 1..22: mol_type = other DNA
agcttcacaatctagtccctgc

SEQ ID NO: 26658 - DNA, 22 bp, synthetic construct
  misc_feature 1..22: note = chemically synthesized
  source 1..22: mol_type = other DNA
cacaatctagtccctgcaggtc

SEQ ID NO: 26659 - DNA, 22 bp, synthetic construct
  misc_feature 1..22: note = chemically synthesized
  source 1..22: mol_type = other DNA
acaatctagtccctgcaggtct

SEQ ID NO: 26660 - DNA, 22 bp, synthetic construct
  misc_feature 1..22: note = chemically synthesized
  source 1..22: mol_type = other DNA
gtccctgcaggtctctcccatc

SEQ ID NO: 26661 - DNA, 22 bp, synthetic construct
  misc_feature 1..22: note = chemically synthesized
  source 1..22: mol_type = other DNA
caggtctctcccatcttctctc

SEQ ID NO: 26662 - DNA, 22 bp, synthetic construct
  misc_feature 1..22: note = chemically synthesized
  source 1..22: mol_type = other DNA
tcccatcttctctcatactcct

SEQ ID NO: 26663 - DNA, 22 bp, synthetic construct
  misc_feature 1..22: note = chemically synthesized
  source 1..22: mol_type = other DNA
ccatcttctctcatactcctct

SEQ ID NO: 26664 - DNA, 22 bp, synthetic construct
  misc_feature 1..22: note = chemically synthesized
  source 1..22: mol_type = other DNA
ctctcatactcctctccttttc

SEQ ID NO: 26665 - DNA, 22 bp, synthetic construct
  misc_feature 1..22: note = chemically synthesized
  source 1..22: mol_type = other DNA
tctcatactcctctccttttcc

SEQ ID NO: 26666 - DNA, 22 bp, synthetic construct
  misc_feature 1..22: note = chemically synthesized
  source 1..22: mol_type = other DNA
tcatactcctctccttttccct

SEQ ID NO: 26667 - DNA, 22 bp, synthetic construct
  misc_feature 1..22: note = chemically synthesized
  source 1..22: mol_type = other DNA
atactcctctccttttccctct

SEQ ID NO: 26668 - DNA, 22 bp, synthetic construct
  misc_feature 1..22: note = chemically synthesized
  source 1..22: mol_type = other DNA
ctctccttttccctctctgagc

SEQ ID NO: 26669 - DNA, 22 bp, synthetic construct
  misc_feature 1..22: note = chemically synthesized
  source 1..22: mol_type = other DNA
tccttttccctctctgagcccc

SEQ ID NO: 26670 - DNA, 22 bp, synthetic construct
  misc_feature 1..22: note = chemically synthesized
  source 1..22: mol_type = other DNA
cttttccctctctgagccccgc

SEQ ID NO: 26671 - DNA, 22 bp, synthetic construct
  misc_feature 1..22: note = chemically synthesized
  source 1..22: mol_type = other DNA
ttccctctctgagccccgctca

SEQ ID NO: 26672 - DNA, 22 bp, synthetic construct
  misc_feature 1..22: note = chemically synthesized
  source 1..22: mol_type = other DNA
tccctctctgagccccgctcag

SEQ ID NO: 26673 - DNA, 22 bp, synthetic construct
  misc_feature 1..22: note = chemically synthesized
  source 1..22: mol_type = other DNA
ccctctctgagccccgctcaga

SEQ ID NO: 26674 - DNA, 22 bp, synthetic construct
  misc_feature 1..22: note = chemically synthesized
  source 1..22: mol_type = other DNA
cctctctgagccccgctcagat

SEQ ID NO: 26675 - DNA, 22 bp, synthetic construct
  misc_feature 1..22: note = chemically synthesized
  source 1..22: mol_type = other DNA
tctgagccccgctcagatcttc

SEQ ID NO: 26676 - DNA, 22 bp, synthetic construct
  misc_feature 1..22: note = chemically synthesized
  source 1..22: mol_type = other DNA
tgagccccgctcagatcttcga

SEQ ID NO: 26677 - DNA, 22 bp, synthetic construct
  misc_feature 1..22: note = chemically synthesized
  source 1..22: mol_type = other DNA
agccccgctcagatcttcgaac

SEQ ID NO: 26678 - DNA, 22 bp, synthetic construct
  misc_feature 1..22: note = chemically synthesized
  source 1..22: mol_type = other DNA
agatcttcgaacagagaacact

SEQ ID NO: 26679 - DNA, 22 bp, synthetic construct
  misc_feature 1..22: note = chemically synthesized
  source 1..22: mol_type = other DNA
cgaacagagaacacttctgcat

SEQ ID NO: 26680 - DNA, 22 bp, synthetic construct
  misc_feature 1..22: note = chemically synthesized
  source 1..22: mol_type = other DNA
gaacagagaacacttctgcatc

SEQ ID NO: 26681 - DNA, 22 bp, synthetic construct
  misc_feature 1..22: note = chemically synthesized
  source 1..22: mol_type = other DNA
ctgcatcttggcatatatagtt

SEQ ID NO: 26682 - DNA, 22 bp, synthetic construct
  misc_feature 1..22: note = chemically synthesized
  source 1..22: mol_type = other DNA
tgcatcttggcatatatagttc

SEQ ID NO: 26683 - DNA, 22 bp, synthetic construct
  misc_feature 1..22: note = chemically synthesized
  source 1..22: mol_type = other DNA
catcttggcatatatagttctc

SEQ ID NO: 26684 - DNA, 22 bp, synthetic construct
  misc_feature 1..22: note = chemically synthesized
  source 1..22: mol_type = other DNA
ggcatatatagttctctcacat

SEQ ID NO: 26685 - DNA, 22 bp, synthetic construct
  misc_feature 1..22: note = chemically synthesized
  source 1..22: mol_type = other DNA
gcatatatagttctctcacata

SEQ ID NO: 26686 - DNA, 22 bp, synthetic construct
  misc_feature 1..22: note = chemically synthesized
  source 1..22: mol_type = other DNA
tctcacatagaacgctttctcc

SEQ ID NO: 26687 - DNA, 22 bp, synthetic construct
  misc_feature 1..22: note = chemically synthesized
  source 1..22: mol_type = other DNA
tcacatagaacgctttctcccc

SEQ ID NO: 26688 - DNA, 22 bp, synthetic construct
  misc_feature 1..22: note = chemically synthesized
  source 1..22: mol_type = other DNA
acatagaacgctttctcccctt

SEQ ID NO: 26689 - DNA, 22 bp, synthetic construct
  misc_feature 1..22: note = chemically synthesized
  source 1..22: mol_type = other DNA
tctcccctttagctatttatcc

SEQ ID NO: 26690 - DNA, 22 bp, synthetic construct
  misc_feature 1..22: note = chemically synthesized
  source 1..22: mol_type = other DNA
ctcccctttagctatttatcct

SEQ ID NO: 26691 - DNA, 22 bp, synthetic construct
  misc_feature 1..22: note = chemically synthesized
  source 1..22: mol_type = other DNA
tcccctttagctatttatcctt

SEQ ID NO: 26692 - DNA, 22 bp, synthetic construct
  misc_feature 1..22: note = chemically synthesized
  source 1..22: mol_type = other DNA
ccctttagctatttatccttca

SEQ ID NO: 26693 - DNA, 22 bp, synthetic construct
  misc_feature 1..22: note = chemically synthesized
  source 1..22: mol_type = other DNA
tagctatttatccttcaagtgt

SEQ ID NO: 26694 - DNA, 22 bp, synthetic construct
  misc_feature 1..22: note = chemically synthesized
  source 1..22: mol_type = other DNA
agctatttatccttcaagtgtc

SEQ ID NO: 26695 - DNA, 22 bp, synthetic construct
  misc_feature 1..22: note = chemically synthesized
  source 1..22: mol_type = other DNA
gctatttatccttcaagtgtca

SEQ ID NO: 26696 - DNA, 22 bp, synthetic construct
  misc_feature 1..22: note = chemically synthesized
  source 1..22: mol_type = other DNA
tttatccttcaagtgtcagctc

SEQ ID NO: 26697 - DNA, 22 bp, synthetic construct
  misc_feature 1..22: note = chemically synthesized
  source 1..22: mol_type = other DNA
atccttcaagtgtcagctcaaa

SEQ ID NO: 26698 - DNA, 22 bp, synthetic construct
  misc_feature 1..22: note = chemically synthesized
  source 1..22: mol_type = other DNA
tccttcaagtgtcagctcaaac

SEQ ID NO: 26699 - DNA, 22 bp, synthetic construct
  misc_feature 1..22: note = chemically synthesized
  source 1..22: mol_type = other DNA
caagtgtcagctcaaacatctc

SEQ ID NO: 26700 - DNA, 22 bp, synthetic construct
  misc_feature 1..22: note = chemically synthesized
  source 1..22: mol_type = other DNA
aagtgtcagctcaaacatctca

SEQ ID NO: 26701 - DNA, 22 bp, synthetic construct
  misc_feature 1..22: note = chemically synthesized
  source 1..22: mol_type = other DNA
aaacatctcatcattagagagg

SEQ ID NO: 26702 - DNA, 22 bp, synthetic construct
  misc_feature 1..22: note = chemically synthesized
  source 1..22: mol_type = other DNA
atcattagagaggtttttccca

SEQ ID NO: 26703 - DNA, 22 bp, synthetic construct
  misc_feature 1..22: note = chemically synthesized
  source 1..22: mol_type = other DNA
gagaggtttttcccaaacctct

SEQ ID NO: 26704 - DNA, 22 bp, synthetic construct
  misc_feature 1..22: note = chemically synthesized
  source 1..22: mol_type = other DNA
ttcccaaacctctaggtaacta

SEQ ID NO: 26705 - DNA, 22 bp, synthetic construct
  misc_feature 1..22: note = chemically synthesized
  source 1..22: mol_type = other DNA
tcccaaacctctaggtaactag

SEQ ID NO: 26706 - DNA, 22 bp, synthetic construct
  misc_feature 1..22: note = chemically synthesized
  source 1..22: mol_type = other DNA
cccaaacctctaggtaactagg

SEQ ID NO: 26707 - DNA, 22 bp, synthetic construct
  misc_feature 1..22: note = chemically synthesized
  source 1..22: mol_type = other DNA
ccaaacctctaggtaactaggt

SEQ ID NO: 26708 - DNA, 22 bp, synthetic construct
  misc_feature 1..22: note = chemically synthesized
  source 1..22: mol_type = other DNA
taggtaactaggttagaaacca

SEQ ID NO: 26709 - DNA, 22 bp, synthetic construct
  misc_feature 1..22: note = chemically synthesized
  source 1..22: mol_type = other DNA
ggtaactaggttagaaaccact

SEQ ID NO: 26710 - DNA, 22 bp, synthetic construct
  misc_feature 1..22: note = chemically synthesized
  source 1..22: mol_type = other DNA
ggttagaaaccactccccattc

SEQ ID NO: 26711 - DNA, 22 bp, synthetic construct
  misc_feature 1..22: note = chemically synthesized
  source 1..22: mol_type = other DNA
gaaaccactccccattccacgg

SEQ ID NO: 26712 - DNA, 22 bp, synthetic construct
  misc_feature 1..22: note = chemically synthesized
  source 1..22: mol_type = other DNA
cccattccacggtacactgtat

SEQ ID NO: 26713 - DNA, 22 bp, synthetic construct
  misc_feature 1..22: note = chemically synthesized
  source 1..22: mol_type = other DNA
cacggtacactgtatagtctta

SEQ ID NO: 26714 - DNA, 22 bp, synthetic construct
  misc_feature 1..22: note = chemically synthesized
  source 1..22: mol_type = other DNA
tatagtcttaggacacctggtt

SEQ ID NO: 26715 - DNA, 22 bp, synthetic construct
  misc_feature 1..22: note = chemically synthesized
  source 1..22: mol_type = other DNA
aggacacctggttcccttagtc

SEQ ID NO: 26716 - DNA, 22 bp, synthetic construct
  misc_feature 1..22: note = chemically synthesized
  source 1..22: mol_type = other DNA
ggacacctggttcccttagtct

SEQ ID NO: 26717 - DNA, 22 bp, synthetic construct
  misc_feature 1..22: note = chemically synthesized
  source 1..22: mol_type = other DNA
gttcccttagtctcacactcat

SEQ ID NO: 26718 - DNA, 22 bp, synthetic construct
  misc_feature 1..22: note = chemically synthesized
  source 1..22: mol_type = other DNA
ccttagtctcacactcatcaca

SEQ ID NO: 26719 - DNA, 22 bp, synthetic construct
  misc_feature 1..22: note = chemically synthesized
  source 1..22: mol_type = other DNA
agtctcacactcatcacatttg

SEQ ID NO: 26720 - DNA, 22 bp, synthetic construct
  misc_feature 1..22: note = chemically synthesized
  source 1..22: mol_type = other DNA
gtctcacactcatcacatttga

SEQ ID NO: 26721 - DNA, 22 bp, synthetic construct
  misc_feature 1..22: note = chemically synthesized
  source 1..22: mol_type = other DNA
acactcatcacatttgactgta

SEQ ID NO: 26722 - DNA, 22 bp, synthetic construct
  misc_feature 1..22: note = chemically synthesized
  source 1..22: mol_type = other DNA
atcacatttgactgtattgtat

SEQ ID NO: 26723 - DNA, 22 bp, synthetic construct
  misc_feature 1..22: note = chemically synthesized
  source 1..22: mol_type = other DNA
gactgtattgtatgttcaatgt

SEQ ID NO: 26724 - DNA, 22 bp, synthetic construct
  misc_feature 1..22: note = chemically synthesized
  source 1..22: mol_type = other DNA
actgtattgtatgttcaatgtc

SEQ ID NO: 26725 - DNA, 22 bp, synthetic construct
  misc_feature 1..22: note = chemically synthesized
  source 1..22: mol_type = other DNA
tattgtatgttcaatgtctacc

SEQ ID NO: 26726 - DNA, 22 bp, synthetic construct
  misc_feature 1..22: note = chemically synthesized
  source 1..22: mol_type = other DNA
tatgttcaatgtctaccttcta

SEQ ID NO: 26727 - DNA, 22 bp, synthetic construct
  misc_feature 1..22: note = chemically synthesized
  source 1..22: mol_type = other DNA
aatgtctaccttctacaaattt

SEQ ID NO: 26728 - DNA, 22 bp, synthetic construct
  misc_feature 1..22: note = chemically synthesized
  source 1..22: mol_type = other DNA
ccttctacaaatttgtcaattc

SEQ ID NO: 26729 - DNA, 22 bp, synthetic construct
  misc_feature 1..22: note = chemically synthesized
  source 1..22: mol_type = other DNA
ctacaaatttgtcaattcttga

SEQ ID NO: 26730 - DNA, 22 bp, synthetic construct
  misc_feature 1..22: note = chemically synthesized
  source 1..22: mol_type = other DNA
tacaaatttgtcaattcttgaa

SEQ ID NO: 26731 - DNA, 22 bp, synthetic construct
  misc_feature 1..22: note = chemically synthesized
  source 1..22: mol_type = other DNA
caaatttgtcaattcttgaaga

SEQ ID NO: 26732 - DNA, 22 bp, synthetic construct
  misc_feature 1..22: note = chemically synthesized
  source 1..22: mol_type = other DNA
gtcaattcttgaagattaagaa

SEQ ID NO: 26733 - DNA, 22 bp, synthetic construct
  misc_feature 1..22: note = chemically synthesized
  source 1..22: mol_type = other DNA
tcaattcttgaagattaagaat

SEQ ID NO: 26734 - DNA, 22 bp, synthetic construct
  misc_feature 1..22: note = chemically synthesized
  source 1..22: mol_type = other DNA
ttgaagattaagaatcagttct

SEQ ID NO: 26735 - DNA, 22 bp, synthetic construct
  misc_feature 1..22: note = chemically synthesized
  source 1..22: mol_type = other DNA
gaagattaagaatcagttctgt

SEQ ID NO: 26736 - DNA, 22 bp, synthetic construct
  misc_feature 1..22: note = chemically synthesized
  source 1..22: mol_type = other DNA
aagattaagaatcagttctgta

SEQ ID NO: 26737 - DNA, 22 bp, synthetic construct
  misc_feature 1..22: note = chemically synthesized
  source 1..22: mol_type = other DNA
agaatcagttctgtattcttaa

SEQ ID NO: 26738 - DNA, 22 bp, synthetic construct
  misc_feature 1..22: note = chemically synthesized
  source 1..22: mol_type = other DNA
tgtattcttaactctatctccc

SEQ ID NO: 26739 - DNA, 22 bp, synthetic construct
  misc_feature 1..22: note = chemically synthesized
  source 1..22: mol_type = other DNA
tattcttaactctatctccctc

SEQ ID NO: 26740 - DNA, 22 bp, synthetic construct
  misc_feature 1..22: note = chemically synthesized
  source 1..22: mol_type = other DNA
ttaactctatctccctcgcctc

SEQ ID NO: 26741 - DNA, 22 bp, synthetic construct
  misc_feature 1..22: note = chemically synthesized
  source 1..22: mol_type = other DNA
aactctatctccctcgcctctc

SEQ ID NO: 26742 - DNA, 22 bp, synthetic construct
  misc_feature 1..22: note = chemically synthesized
  source 1..22: mol_type = other DNA
actctatctccctcgcctctca

SEQ ID NO: 26743 - DNA, 22 bp, synthetic construct
  misc_feature 1..22: note = chemically synthesized
  source 1..22: mol_type = other DNA
tatctccctcgcctctcagtgc

SEQ ID NO: 26744 - DNA, 22 bp, synthetic construct
  misc_feature 1..22: note = chemically synthesized
  source 1..22: mol_type = other DNA
tctccctcgcctctcagtgcct

SEQ ID NO: 26745 - DNA, 22 bp, synthetic construct
  misc_feature 1..22: note = chemically synthesized
  source 1..22: mol_type = other DNA
cctcgcctctcagtgcctgata

SEQ ID NO: 26746 - DNA, 22 bp, synthetic construct
  misc_feature 1..22: note = chemically synthesized
  source 1..22: mol_type = other DNA
gcctctcagtgcctgataccta

SEQ ID NO: 26747 - DNA, 22 bp, synthetic construct
  misc_feature 1..22: note = chemically synthesized
  source 1..22: mol_type = other DNA
tcagtgcctgatacctaataga

SEQ ID NO: 26748 - DNA, 22 bp, synthetic construct
  misc_feature 1..22: note = chemically synthesized
  source 1..22: mol_type = other DNA
agtgcctgatacctaatagaca

SEQ ID NO: 26749 - DNA, 22 bp, synthetic construct
  misc_feature 1..22: note = chemically synthesized
  source 1..22: mol_type = other DNA
atacctaatagacacttgatga

SEQ ID NO: 26750 - DNA, 22 bp, synthetic construct
  misc_feature 1..22: note = chemically synthesized
  source 1..22: mol_type = other DNA
atagacacttgatgaatcctta

SEQ ID NO: 26751 - DNA, 22 bp, synthetic construct
  misc_feature 1..22: note = chemically synthesized
  source 1..22: mol_type = other DNA
gatgaatccttactgaataata

SEQ ID NO: 26752 - DNA, 22 bp, synthetic construct
  misc_feature 1..22: note = chemically synthesized
  source 1..22: mol_type = other DNA
atgaatccttactgaataataa

SEQ ID NO: 26753 - DNA, 22 bp, synthetic construct
  misc_feature 1..22: note = chemically synthesized
  source 1..22: mol_type = other DNA
actgaataataaaatggattaa

SEQ ID NO: 26754 - DNA, 22 bp, synthetic construct
  misc_feature 1..22: note = chemically synthesized
  source 1..22: mol_type = other DNA
ctgaataataaaatggattaat

SEQ ID NO: 26755 - DNA, 22 bp, synthetic construct
  misc_feature 1..22: note = chemically synthesized
  source 1..22: mol_type = other DNA
aataataaaatggattaatgaa

SEQ ID NO: 26756 - DNA, 22 bp, synthetic construct
  misc_feature 1..22: note = chemically synthesized
  source 1..22: mol_type = other DNA
atgaataaaagcaataaatttc

SEQ ID NO: 26757 - DNA, 22 bp, synthetic construct
  misc_feature 1..22: note = chemically synthesized
  source 1..22: mol_type = other DNA
caaggttaatattaataaatta

SEQ ID NO: 26758 - DNA, 22 bp, synthetic construct
  misc_feature 1..22: note = chemically synthesized
  source 1..22: mol_type = other DNA
aaggttaatattaataaattaa

SEQ ID NO: 26759 - DNA, 22 bp, synthetic construct
  misc_feature 1..22: note = chemically synthesized
  source 1..22: mol_type = other DNA
atattaataaattaaaaaggtt

SEQ ID NO: 26760 - DNA, 22 bp, synthetic construct
  misc_feature 1..22: note = chemically synthesized
  source 1..22: mol_type = other DNA
ataaattaaaaaggttattttg

SEQ ID NO: 26761 - DNA, 22 bp, synthetic construct
  misc_feature 1..22: note = chemically synthesized
  source 1..22: mol_type = other DNA
aaaaggttattttgaagtctga

SEQ ID NO: 26762 - DNA, 22 bp, synthetic construct
  misc_feature 1..22: note = chemically synthesized
  source 1..22: mol_type = other DNA
ttttgaagtctgagaattagta

SEQ ID NO: 26763 - DNA, 22 bp, synthetic construct
  misc_feature 1..22: note = chemically synthesized
  source 1..22: mol_type = other DNA
tgaagtctgagaattagtaccc

SEQ ID NO: 26764 - DNA, 22 bp, synthetic construct
  misc_feature 1..22: note = chemically synthesized
  source 1..22: mol_type = other DNA
gaagtctgagaattagtaccca

SEQ ID NO: 26765 - DNA, 22 bp, synthetic construct
  misc_feature 1..22: note = chemically synthesized
  source 1..22: mol_type = other DNA
aagtctgagaattagtacccaa

SEQ ID NO: 26766 - DNA, 22 bp, synthetic construct
  misc_feature 1..22: note = chemically synthesized
  source 1..22: mol_type = other DNA
agaattagtacccaaaactaac

SEQ ID NO: 26767 - DNA, 22 bp, synthetic construct
  misc_feature 1..22: note = chemically synthesized
  source 1..22: mol_type = other DNA
gtacccaaaactaactgtgact

SEQ ID NO: 26768 - DNA, 22 bp, synthetic construct
  misc_feature 1..22: note = chemically synthesized
  source 1..22: mol_type = other DNA
actgtgactctctcatctgtta

SEQ ID NO: 26769 - DNA, 22 bp, synthetic construct
  misc_feature 1..22: note = chemically synthesized
  source 1..22: mol_type = other DNA
tgactctctcatctgttatgtt

SEQ ID NO: 26770 - DNA, 22 bp, synthetic construct
  misc_feature 1..22: note = chemically synthesized
  source 1..22: mol_type = other DNA
tctcatctgttatgtttttcac

SEQ ID NO: 26771 - DNA, 22 bp, synthetic construct
  misc_feature 1..22: note = chemically synthesized
  source 1..22: mol_type = other DNA
tcatctgttatgtttttcacgt

SEQ ID NO: 26772 - DNA, 22 bp, synthetic construct
  misc_feature 1..22: note = chemically synthesized
  source 1..22: mol_type = other DNA
atctgttatgtttttcacgttt

SEQ ID NO: 26773 - DNA, 22 bp, synthetic construct
  misc_feature 1..22: note = chemically synthesized
  source 1..22: mol_type = other DNA
ttatgtttttcacgtttccatt

SEQ ID NO: 26774 - DNA, 22 bp, synthetic construct
  misc_feature 1..22: note = chemically synthesized
  source 1..22: mol_type = other DNA
tgtttttcacgtttccattgtt

SEQ ID NO: 26775 - DNA, 22 bp, synthetic construct
  misc_feature 1..22: note = chemically synthesized
  source 1..22: mol_type = other DNA
ttcacgtttccattgttcatgg

SEQ ID NO: 26776 - DNA, 22 bp, synthetic construct
  misc_feature 1..22: note = chemically synthesized
  source 1..22: mol_type = other DNA
tcacgtttccattgttcatggg

SEQ ID NO: 26777 - DNA, 22 bp, synthetic construct
  misc_feature 1..22: note = chemically synthesized
  source 1..22: mol_type = other DNA
cacgtttccattgttcatgggc

SEQ ID NO: 26778 - DNA, 22 bp, synthetic construct
  misc_feature 1..22: note = chemically synthesized
  source 1..22: mol_type = other DNA
acgtttccattgttcatgggca

SEQ ID NO: 26779 - DNA, 22 bp, synthetic construct
  misc_feature 1..22: note = chemically synthesized
  source 1..22: mol_type = other DNA
ccattgttcatgggcaaaattc

SEQ ID NO: 26780 - DNA, 22 bp, synthetic construct
  misc_feature 1..22: note = chemically synthesized
  source 1..22: mol_type = other DNA
cattgttcatgggcaaaattct

SEQ ID NO: 26781 - DNA, 22 bp, synthetic construct
  misc_feature 1..22: note = chemically synthesized
  source 1..22: mol_type = other DNA
ttcatgggcaaaattctggcag

SEQ ID NO: 26782 - DNA, 22 bp, synthetic construct
  misc_feature 1..22: note = chemically synthesized
  source 1..22: mol_type = other DNA
atgggcaaaattctggcagcaa

SEQ ID NO: 26783 - DNA, 22 bp, synthetic construct
  misc_feature 1..22: note = chemically synthesized
  source 1..22: mol_type = other DNA
tggcagcaagggattcttctcc

SEQ ID NO: 26784 - DNA, 22 bp, synthetic construct
  misc_feature 1..22: note = chemically synthesized
  source 1..22: mol_type = other DNA
gcagcaagggattcttctccta

SEQ ID NO: 26785 - DNA, 22 bp, synthetic construct
  misc_feature 1..22: note = chemically synthesized
  source 1..22: mol_type = other DNA
ttctcctaagaaaccttttgtt

SEQ ID NO: 26786 - DNA, 22 bp, synthetic construct
  misc_feature 1..22: note = chemically synthesized
  source 1..22: mol_type = other DNA
ctcctaagaaaccttttgtttt

SEQ ID NO: 26787 - DNA, 22 bp, synthetic construct
  misc_feature 1..22: note = chemically synthesized
  source 1..22: mol_type = other DNA
tcctaagaaaccttttgttttc

SEQ ID NO: 26788 - DNA, 22 bp, synthetic construct
  misc_feature 1..22: note = chemically synthesized
  source 1..22: mol_type = other DNA
ctaagaaaccttttgttttctt

SEQ ID NO: 26789 - DNA, 22 bp, synthetic construct
  misc_feature 1..22: note = chemically synthesized
  source 1..22: mol_type = other DNA
agaaaccttttgttttcttgga

SEQ ID NO: 26790 - DNA, 22 bp, synthetic construct
  misc_feature 1..22: note = chemically synthesized
  source 1..22: mol_type = other DNA
ttgttttcttggatgtgaatac

SEQ ID NO: 26791 - DNA, 22 bp, synthetic construct
  misc_feature 1..22: note = chemically synthesized
  source 1..22: mol_type = other DNA
tgttttcttggatgtgaataca

SEQ ID NO: 26792 - DNA, 22 bp, synthetic construct
  misc_feature 1..22: note = chemically synthesized
  source 1..22: mol_type = other DNA
gttttcttggatgtgaatacat

SEQ ID NO: 26793 - DNA, 22 bp, synthetic construct
  misc_feature 1..22: note = chemically synthesized
  source 1..22: mol_type = other DNA
ttttcttggatgtgaatacatt

SEQ ID NO: 26794 - DNA, 22 bp, synthetic construct
  misc_feature 1..22: note = chemically synthesized
  source 1..22: mol_type = other DNA
tcttggatgtgaatacatttcc

SEQ ID NO: 26795 - DNA, 22 bp, synthetic construct
  misc_feature 1..22: note = chemically synthesized
  source 1..22: mol_type = other DNA
cttggatgtgaatacatttcct

SEQ ID NO: 26796 - DNA, 22 bp, synthetic construct
  misc_feature 1..22: note = chemically synthesized
  source 1..22: mol_type = other DNA
ttggatgtgaatacatttcctt

SEQ ID NO: 26797 - DNA, 22 bp, synthetic construct
  misc_feature 1..22: note = chemically synthesized
  source 1..22: mol_type = other DNA
ggatgtgaatacatttccttgt

SEQ ID NO: 26798 - DNA, 22 bp, synthetic construct
  misc_feature 1..22: note = chemically synthesized
  source 1..22: mol_type = other DNA
gatgtgaatacatttccttgtt

SEQ ID NO: 26799 - DNA, 22 bp, synthetic construct
  misc_feature 1..22: note = chemically synthesized
  source 1..22: mol_type = other DNA
ccttgtttgccagaaaacatgg

SEQ ID NO: 26800 - DNA, 22 bp, synthetic construct
  misc_feature 1..22: note = chemically synthesized
  source 1..22: mol_type = other DNA
cttgtttgccagaaaacatggt

SEQ ID NO: 26801 - DNA, 22 bp, synthetic construct
  misc_feature 1..22: note = chemically synthesized
  source 1..22: mol_type = other DNA
gtttgccagaaaacatggtaag

SEQ ID NO: 26802 - DNA, 22 bp, synthetic construct
  misc_feature 1..22: note = chemically synthesized
  source 1..22: mol_type = other DNA
tttgccagaaaacatggtaaga

SEQ ID NO: 26803 - DNA, 22 bp, synthetic construct
  misc_feature 1..22: note = chemically synthesized
  source 1..22: mol_type = other DNA
gccagaaaacatggtaagataa

SEQ ID NO: 26804 - DNA, 22 bp, synthetic construct
  misc_feature 1..22: note = chemically synthesized
  source 1..22: mol_type = other DNA
ccagaaaacatggtaagataac

SEQ ID NO: 26805 - DNA, 22 bp, synthetic construct
  misc_feature 1..22: note = chemically synthesized
  source 1..22: mol_type = other DNA
gagagtataacattcattttat

SEQ ID NO: 26806 - DNA, 22 bp, synthetic construct
  misc_feature 1..22: note = chemically synthesized
  source 1..22: mol_type = other DNA
attttattcatgaagaaactgt

SEQ ID NO: 26807 - DNA, 22 bp, synthetic construct
  misc_feature 1..22: note = chemically synthesized
  source 1..22: mol_type = other DNA
tattcatgaagaaactgttatt

SEQ ID NO: 26808 - DNA, 22 bp, synthetic construct
  misc_feature 1..22: note = chemically synthesized
  source 1..22: mol_type = other DNA
attcatgaagaaactgttattc

SEQ ID NO: 26809 - DNA, 22 bp, synthetic construct
  misc_feature 1..22: note = chemically synthesized
  source 1..22: mol_type = other DNA
ttcatgaagaaactgttattca

SEQ ID NO: 26810 - DNA, 22 bp, synthetic construct
  misc_feature 1..22: note = chemically synthesized
  source 1..22: mol_type = other DNA
atgaagaaactgttattcagtt

SEQ ID NO: 26811 - DNA, 22 bp, synthetic construct
  misc_feature 1..22: note = chemically synthesized
  source 1..22: mol_type = other DNA
ttattcagtttaaggggttctt

SEQ ID NO: 26812 - DNA, 22 bp, synthetic construct
  misc_feature 1..22: note = chemically synthesized
  source 1..22: mol_type = other DNA
ttcagtttaaggggttcttttt

SEQ ID NO: 26813 - DNA, 22 bp, synthetic construct
  misc_feature 1..22: note = chemically synthesized
  source 1..22: mol_type = other DNA
agtttaaggggttctttttcag

SEQ ID NO: 26814 - DNA, 22 bp, synthetic construct
  misc_feature 1..22: note = chemically synthesized
  source 1..22: mol_type = other DNA
aaggggttctttttcagaaagt

SEQ ID NO: 26815 - DNA, 22 bp, synthetic construct
  misc_feature 1..22: note = chemically synthesized
  source 1..22: mol_type = other DNA
aggggttctttttcagaaagtt

SEQ ID NO: 26816 - DNA, 22 bp, synthetic construct
  misc_feature 1..22: note = chemically synthesized
  source 1..22: mol_type = other DNA
tttttcagaaagtttcagaaat

SEQ ID NO: 26817 - DNA, 22 bp, synthetic construct
  misc_feature 1..22: note = chemically synthesized
  source 1..22: mol_type = other DNA
tttcagaaagtttcagaaatcc

SEQ ID NO: 26818 - DNA, 22 bp, synthetic construct
  misc_feature 1..22: note = chemically synthesized
  source 1..22: mol_type = other DNA
ttcagaaagtttcagaaatcca

SEQ ID NO: 26819 - DNA, 22 bp, synthetic construct
  misc_feature 1..22: note = chemically synthesized
  source 1..22: mol_type = other DNA
tcagaaagtttcagaaatccaa

SEQ ID NO: 26820 - DNA, 22 bp, synthetic construct
  misc_feature 1..22: note = chemically synthesized
  source 1..22: mol_type = other DNA
cagaaagtttcagaaatccaag

SEQ ID NO: 26821 - DNA, 22 bp, synthetic construct
  misc_feature 1..22: note = chemically synthesized
  source 1..22: mol_type = other DNA
agaaagtttcagaaatccaaga

SEQ ID NO: 26822 - DNA, 22 bp, synthetic construct
  misc_feature 1..22: note = chemically synthesized
  source 1..22: mol_type = other DNA
cagaaatccaagacctttgact

SEQ ID NO: 26823 - DNA, 22 bp, synthetic construct
  misc_feature 1..22: note = chemically synthesized
  source 1..22: mol_type = other DNA
agaaatccaagacctttgactg

SEQ ID NO: 26824 - DNA, 22 bp, synthetic construct
  misc_feature 1..22: note = chemically synthesized
  source 1..22: mol_type = other DNA
tgactgcaagtactgtgttctt

SEQ ID NO: 26825 - DNA, 22 bp, synthetic construct
  misc_feature 1..22: note = chemically synthesized
  source 1..22: mol_type = other DNA
gactgcaagtactgtgttcttt

SEQ ID NO: 26826 - DNA, 22 bp, synthetic construct
  misc_feature 1..22: note = chemically synthesized
  source 1..22: mol_type = other DNA
actgcaagtactgtgttctttc

SEQ ID NO: 26827 - DNA, 22 bp, synthetic construct
  misc_feature 1..22: note = chemically synthesized
  source 1..22: mol_type = other DNA
caagtactgtgttctttcatct

SEQ ID NO: 26828 - DNA, 22 bp, synthetic construct
  misc_feature 1..22: note = chemically synthesized
  source 1..22: mol_type = other DNA
tgttctttcatctataggacat

SEQ ID NO: 26829 - DNA, 22 bp, synthetic construct
  misc_feature 1..22: note = chemically synthesized
  source 1..22: mol_type = other DNA
tttcatctataggacatttcct

SEQ ID NO: 26830 - DNA, 22 bp, synthetic construct
  misc_feature 1..22: note = chemically synthesized
  source 1..22: mol_type = other DNA
tcatctataggacatttccttt

SEQ ID NO: 26831 - DNA, 22 bp, synthetic construct
  misc_feature 1..22: note = chemically synthesized
  source 1..22: mol_type = other DNA
catctataggacatttcctttg

SEQ ID NO: 26832 - DNA, 22 bp, synthetic construct
  misc_feature 1..22: note = chemically synthesized
  source 1..22: mol_type = other DNA
atctataggacatttcctttga

SEQ ID NO: 26833 - DNA, 22 bp, synthetic construct
  misc_feature 1..22: note = chemically synthesized
  source 1..22: mol_type = other DNA
taggacatttcctttgaaaact

SEQ ID NO: 26834 - DNA, 22 bp, synthetic construct
  misc_feature 1..22: note = chemically synthesized
  source 1..22: mol_type = other DNA
cctttgaaaactgaggttttaa

SEQ ID NO: 26835 - DNA, 22 bp, synthetic construct
  misc_feature 1..22: note = chemically synthesized
  source 1..22: mol_type = other DNA
ctttgaaaactgaggttttaat

SEQ ID NO: 26836 - DNA, 22 bp, synthetic construct
  misc_feature 1..22: note = chemically synthesized
  source 1..22: mol_type = other DNA
tgaaaactgaggttttaatatt

SEQ ID NO: 26837 - DNA, 22 bp, synthetic construct
  misc_feature 1..22: note = chemically synthesized
  source 1..22: mol_type = other DNA
gaaaactgaggttttaatattt

SEQ ID NO: 26838 - DNA, 22 bp, synthetic construct
  misc_feature 1..22: note = chemically synthesized
  source 1..22: mol_type = other DNA
aaaactgaggttttaatattta

SEQ ID NO: 26839 - DNA, 22 bp, synthetic construct
  misc_feature 1..22: note = chemically synthesized
  source 1..22: mol_type = other DNA
aggttttaatatttaattctta

SEQ ID NO: 26840 - DNA, 22 bp, synthetic construct
  misc_feature 1..22: note = chemically synthesized
  source 1..22: mol_type = other DNA
taatatttaattcttacataat

SEQ ID NO: 26841 - DNA, 22 bp, synthetic construct
  misc_feature 1..22: note = chemically synthesized
  source 1..22: mol_type = other DNA
aatatttaattcttacataata

SEQ ID NO: 26842 - DNA, 22 bp, synthetic construct
  misc_feature 1..22: note = chemically synthesized
  source 1..22: mol_type = other DNA
atatttaattcttacataatag

SEQ ID NO: 26843 - DNA, 22 bp, synthetic construct
  misc_feature 1..22: note = chemically synthesized
  source 1..22: mol_type = other DNA
aattcttacataatagtaaaaa

SEQ ID NO: 26844 - DNA, 22 bp, synthetic construct
  misc_feature 1..22: note = chemically synthesized
  source 1..22: mol_type = other DNA
attcttacataatagtaaaaaa

SEQ ID NO: 26845 - DNA, 22 bp, synthetic construct
  misc_feature 1..22: note = chemically synthesized
  source 1..22: mol_type = other DNA
ttacataatagtaaaaaagtga

SEQ ID NO: 26846 - DNA, 22 bp, synthetic construct
  misc_feature 1..22: note = chemically synthesized
  source 1..22: mol_type = other DNA
acataatagtaaaaaagtgaat

SEQ ID NO: 26847 - DNA, 22 bp, synthetic construct
  misc_feature 1..22: note = chemically synthesized
  source 1..22: mol_type = other DNA
cataatagtaaaaaagtgaatt

SEQ ID NO: 26848 - DNA, 22 bp, synthetic construct
  misc_feature 1..22: note = chemically synthesized
  source 1..22: mol_type = other DNA
gccttggaaaagacctaaatcc

SEQ ID NO: 26849 - DNA, 22 bp, synthetic construct
  misc_feature 1..22: note = chemically synthesized
  source 1..22: mol_type = other DNA
ggaaaagacctaaatcctggtc

SEQ ID NO: 26850 - DNA, 22 bp, synthetic construct
  misc_feature 1..22: note = chemically synthesized
  source 1..22: mol_type = other DNA
gaaaagacctaaatcctggtcc

SEQ ID NO: 26851 - DNA, 22 bp, synthetic construct
  misc_feature 1..22: note = chemically synthesized
  source 1..22: mol_type = other DNA
aatcctggtcctaactctgcca

SEQ ID NO: 26852 - DNA, 22 bp, synthetic construct
  misc_feature 1..22: note = chemically synthesized
  source 1..22: mol_type = other DNA
gtcctaactctgccatttgctt

SEQ ID NO: 26853 - DNA, 22 bp, synthetic construct
  misc_feature 1..22: note = chemically synthesized
  source 1..22: mol_type = other DNA
actctgccatttgcttgatcat

SEQ ID NO: 26854 - DNA, 22 bp, synthetic construct
  misc_feature 1..22: note = chemically synthesized
  source 1..22: mol_type = other DNA
tgccatttgcttgatcattaaa

SEQ ID NO: 26855 - DNA, 22 bp, synthetic construct
  misc_feature 1..22: note = chemically synthesized
  source 1..22: mol_type = other DNA
ccatttgcttgatcattaaata

SEQ ID NO: 26856 - DNA, 22 bp, synthetic construct
  misc_feature 1..22: note = chemically synthesized
  source 1..22: mol_type = other DNA
gcttgatcattaaatacctcta

SEQ ID NO: 26857 - DNA, 22 bp, synthetic construct
  misc_feature 1..22: note = chemically synthesized
  source 1..22: mol_type = other DNA
cttgatcattaaatacctctac

SEQ ID NO: 26858 - DNA, 22 bp, synthetic construct
  misc_feature 1..22: note = chemically synthesized
  source 1..22: mol_type = other DNA
gatcattaaatacctctacgaa

SEQ ID NO: 26859 - DNA, 22 bp, synthetic construct
  misc_feature 1..22: note = chemically synthesized
  source 1..22: mol_type = other DNA
atcattaaatacctctacgaat

SEQ ID NO: 26860 - DNA, 22 bp, synthetic construct
  misc_feature 1..22: note = chemically synthesized
  source 1..22: mol_type = other DNA
aatacctctacgaatcaatttg

SEQ ID NO: 26861 - DNA, 22 bp, synthetic construct
  misc_feature 1..22: note = chemically synthesized
  source 1..22: mol_type = other DNA
tacgaatcaatttgctctatga

SEQ ID NO: 26862 - DNA, 22 bp, synthetic construct
  misc_feature 1..22: note = chemically synthesized
  source 1..22: mol_type = other DNA
cgaatcaatttgctctatgaac

SEQ ID NO: 26863 - DNA, 22 bp, synthetic construct
  misc_feature 1..22: note = chemically synthesized
  source 1..22: mol_type = other DNA
gctctatgaactggaggagtgg

SEQ ID NO: 26864 - DNA, 22 bp, synthetic construct
  misc_feature 1..22: note = chemically synthesized
  source 1..22: mol_type = other DNA
ctctatgaactggaggagtggg

SEQ ID NO: 26865 - DNA, 22 bp, synthetic construct
  misc_feature 1..22: note = chemically synthesized
  source 1..22: mol_type = other DNA
tatgaactggaggagtgggatt

SEQ ID NO: 26866 - DNA, 22 bp, synthetic construct
  misc_feature 1..22: note = chemically synthesized
  source 1..22: mol_type = other DNA
tgaactggaggagtgggattca

SEQ ID NO: 26867 - DNA, 22 bp, synthetic construct
  misc_feature 1..22: note = chemically synthesized
  source 1..22: mol_type = other DNA
gaggagtgggattcatgatctc

SEQ ID NO: 26868 - DNA, 22 bp, synthetic construct
  misc_feature 1..22: note = chemically synthesized
  source 1..22: mol_type = other DNA
atgatctctaagatacctcata

SEQ ID NO: 26869 - DNA, 22 bp, synthetic construct
  misc_feature 1..22: note = chemically synthesized
  source 1..22: mol_type = other DNA
taagatacctcatatcactact

SEQ ID NO: 26870 - DNA, 22 bp, synthetic construct
  misc_feature 1..22: note = chemically synthesized
  source 1..22: mol_type = other DNA
agatacctcatatcactactat

SEQ ID NO: 26871 - DNA, 22 bp, synthetic construct
  misc_feature 1..22: note = chemically synthesized
  source 1..22: mol_type = other DNA
atatcactactatgaaatgcag

SEQ ID NO: 26872 - DNA, 22 bp, synthetic construct
  misc_feature 1..22: note = chemically synthesized
  source 1..22: mol_type = other DNA
ctatgaaatgcagggaagtaaa

SEQ ID NO: 26873 - DNA, 22 bp, synthetic construct
  misc_feature 1..22: note = chemically synthesized
  source 1..22: mol_type = other DNA
tgaaatgcagggaagtaaaaat

SEQ ID NO: 26874 - DNA, 22 bp, synthetic construct
  misc_feature 1..22: note = chemically synthesized
  source 1..22: mol_type = other DNA
aaatcattaaatttaaagaaac

SEQ ID NO: 26875 - DNA, 22 bp, synthetic construct
  misc_feature 1..22: note = chemically synthesized
  source 1..22: mol_type = other DNA
aatttaaagaaactatagtggc

SEQ ID NO: 26876 - DNA, 22 bp, synthetic construct
  misc_feature 1..22: note = chemically synthesized
  source 1..22: mol_type = other DNA
aaagaaactatagtggcaatgt

SEQ ID NO: 26877 - DNA, 22 bp, synthetic construct
  misc_feature 1..22: note = chemically synthesized
  source 1..22: mol_type = other DNA
aagaaactatagtggcaatgta

SEQ ID NO: 26878 - DNA, 22 bp, synthetic construct
  misc_feature 1..22: note = chemically synthesized
  source 1..22: mol_type = other DNA
tagtggcaatgtattattagga

SEQ ID NO: 26879 - DNA, 22 bp, synthetic construct
  misc_feature 1..22: note = chemically synthesized
  source 1..22: mol_type = other DNA
ttaggaataaacacaataatta

SEQ ID NO: 26880 - DNA, 22 bp, synthetic construct
  misc_feature 1..22: note = chemically synthesized
  source 1..22: mol_type = other DNA
ggaataaacacaataattatcc

SEQ ID NO: 26881 - DNA, 22 bp, synthetic construct
  misc_feature 1..22: note = chemically synthesized
  source 1..22: mol_type = other DNA
tccatctatatgaaaatctcaa

SEQ ID NO: 26882 - DNA, 22 bp, synthetic construct
  misc_feature 1..22: note = chemically synthesized
  source 1..22: mol_type = other DNA
tatgaaaatctcaaaccatacc

SEQ ID NO: 26883 - DNA, 22 bp, synthetic construct
  misc_feature 1..22: note = chemically synthesized
  source 1..22: mol_type = other DNA
aaaccataccaggctatgataa

SEQ ID NO: 26884 - DNA, 22 bp, synthetic construct
  misc_feature 1..22: note = chemically synthesized
  source 1..22: mol_type = other DNA
tgataatattaaaataaagata

SEQ ID NO: 26885 - DNA, 22 bp, synthetic construct
  misc_feature 1..22: note = chemically synthesized
  source 1..22: mol_type = other DNA
aaataaagatacattgaagatg

SEQ ID NO: 26886 - DNA, 22 bp, synthetic construct
  misc_feature 1..22: note = chemically synthesized
  source 1..22: mol_type = other DNA
aagatgatatcaacttgtgtaa

SEQ ID NO: 26887 - DNA, 22 bp, synthetic construct
  misc_feature 1..22: note = chemically synthesized
  source 1..22: mol_type = other DNA
gtgtaaatcacattgtggggac

SEQ ID NO: 26888 - DNA, 22 bp, synthetic construct
  misc_feature 1..22: note = chemically synthesized
  source 1..22: mol_type = other DNA
tgtaaatcacattgtggggacc

SEQ ID NO: 26889 - DNA, 22 bp, synthetic construct
  misc_feature 1..22: note = chemically synthesized
  source 1..22: mol_type = other DNA
tggggacctctccacaaaaaca

SEQ ID NO: 26890 - DNA, 22 bp, synthetic construct
  misc_feature 1..22: note = chemically synthesized
  source 1..22: mol_type = other DNA
tccacaaaaacacttcccttcc

SEQ ID NO: 26891 - DNA, 22 bp, synthetic construct
  misc_feature 1..22: note = chemically synthesized
  source 1..22: mol_type = other DNA
cacaaaaacacttcccttcccc

SEQ ID NO: 26892 - DNA, 22 bp, synthetic construct
  misc_feature 1..22: note = chemically synthesized
  source 1..22: mol_type = other DNA
cccttccccttgaaagggaaat

SEQ ID NO: 26893 - DNA, 22 bp, synthetic construct
  misc_feature 1..22: note = chemically synthesized
  source 1..22: mol_type = other DNA
ccttccccttgaaagggaaatg

SEQ ID NO: 26894 - DNA, 22 bp, synthetic construct
  misc_feature 1..22: note = chemically synthesized
  source 1..22: mol_type = other DNA
ccccttgaaagggaaatgatag

SEQ ID NO: 26895 - DNA, 22 bp, synthetic construct
  misc_feature 1..22: note = chemically synthesized
  source 1..22: mol_type = other DNA
cccttgaaagggaaatgataga

SEQ ID NO: 26896 - DNA, 22 bp, synthetic construct
  misc_feature 1..22: note = chemically synthesized
  source 1..22: mol_type = other DNA
gaaagggaaatgatagaaaata

SEQ ID NO: 26897 - DNA, 22 bp, synthetic construct
  misc_feature 1..22: note = chemically synthesized
  source 1..22: mol_type = other DNA
aaagggaaatgatagaaaataa

SEQ ID NO: 26898 - DNA, 22 bp, synthetic construct
  misc_feature 1..22: note = chemically synthesized
  source 1..22: mol_type = other DNA
aaggcagcttaggggttgaaaa

SEQ ID NO: 26899 - DNA, 22 bp, synthetic construct
  misc_feature 1..22: note = chemically synthesized
  source 1..22: mol_type = other DNA
aggggttgaaaaacaaattttt

SEQ ID NO: 26900 - DNA, 22 bp, synthetic construct
  misc_feature 1..22: note = chemically synthesized
  source 1..22: mol_type = other DNA
ggggttgaaaaacaaatttttt

SEQ ID NO: 26901 - DNA, 22 bp, synthetic construct
  misc_feature 1..22: note = chemically synthesized
  source 1..22: mol_type = other DNA
aaaaacaaattttttcaaaaaa

SEQ ID NO: 26902 - DNA, 22 bp, synthetic construct
  misc_feature 1..22: note = chemically synthesized
  source 1..22: mol_type = other DNA
tttcaaaaaaaaatccattgag

SEQ ID NO: 26903 - DNA, 22 bp, synthetic construct
  misc_feature 1..22: note = chemically synthesized
  source 1..22: mol_type = other DNA
ttcaaaaaaaaatccattgagc

SEQ ID NO: 26904 - DNA, 22 bp, synthetic construct
  misc_feature 1..22: note = chemically synthesized
  source 1..22: mol_type = other DNA
tcaaaaaaaaatccattgagca

SEQ ID NO: 26905 - DNA, 22 bp, synthetic construct
  misc_feature 1..22: note = chemically synthesized
  source 1..22: mol_type = other DNA
caaaaaaaaatccattgagcat

SEQ ID NO: 26906 - DNA, 22 bp, synthetic construct
  misc_feature 1..22: note = chemically synthesized
  source 1..22: mol_type = other DNA
aaaaaaaaatccattgagcatt

SEQ ID NO: 26907 - DNA, 22 bp, synthetic construct
  misc_feature 1..22: note = chemically synthesized
  source 1..22: mol_type = other DNA
agcattttctatgtaccaggca

SEQ ID NO: 26908 - DNA, 22 bp, synthetic construct
  misc_feature 1..22: note = chemically synthesized
  source 1..22: mol_type = other DNA
tctatgtaccaggcactgttct

SEQ ID NO: 26909 - DNA, 22 bp, synthetic construct
  misc_feature 1..22: note = chemically synthesized
  source 1..22: mol_type = other DNA
ctatgtaccaggcactgttcta

SEQ ID NO: 26910 - DNA, 22 bp, synthetic construct
  misc_feature 1..22: note = chemically synthesized
  source 1..22: mol_type = other DNA
tatgtaccaggcactgttctag

SEQ ID NO: 26911 - DNA, 22 bp, synthetic construct
  misc_feature 1..22: note = chemically synthesized
  source 1..22: mol_type = other DNA
tgtaccaggcactgttctagac

SEQ ID NO: 26912 - DNA, 22 bp, synthetic construct
  misc_feature 1..22: note = chemically synthesized
  source 1..22: mol_type = other DNA
ttctagaccctgagatcaacac

SEQ ID NO: 26913 - DNA, 22 bp, synthetic construct
  misc_feature 1..22: note = chemically synthesized
  source 1..22: mol_type = other DNA
tagaccctgagatcaacacaca

SEQ ID NO: 26914 - DNA, 22 bp, synthetic construct
  misc_feature 1..22: note = chemically synthesized
  source 1..22: mol_type = other DNA
gaccctgagatcaacacacatg

SEQ ID NO: 26915 - DNA, 22 bp, synthetic construct
  misc_feature 1..22: note = chemically synthesized
  source 1..22: mol_type = other DNA
agatcaacacacatgctactga

SEQ ID NO: 26916 - DNA, 22 bp, synthetic construct
  misc_feature 1..22: note = chemically synthesized
  source 1..22: mol_type = other DNA
ctgattataagatccataaaat

SEQ ID NO: 26917 - DNA, 22 bp, synthetic construct
  misc_feature 1..22: note = chemically synthesized
  source 1..22: mol_type = other DNA
attataagatccataaaataac

SEQ ID NO: 26918 - DNA, 22 bp, synthetic construct
  misc_feature 1..22: note = chemically synthesized
  source 1..22: mol_type = other DNA
taagatccataaaataacttag

SEQ ID NO: 26919 - DNA, 22 bp, synthetic construct
  misc_feature 1..22: note = chemically synthesized
  source 1..22: mol_type = other DNA
agtttcactggcgtgttcccag

SEQ ID NO: 26920 - DNA, 22 bp, synthetic construct
  misc_feature 1..22: note = chemically synthesized
  source 1..22: mol_type = other DNA
gtttcactggcgtgttcccagt

SEQ ID NO: 26921 - DNA, 22 bp, synthetic construct
  misc_feature 1..22: note = chemically synthesized
  source 1..22: mol_type = other DNA
cactggcgtgttcccagtgccc

SEQ ID NO: 26922 - DNA, 22 bp, synthetic construct
  misc_feature 1..22: note = chemically synthesized
  source 1..22: mol_type = other DNA
actggcgtgttcccagtgccca

SEQ ID NO: 26923 - DNA, 22 bp, synthetic construct
  misc_feature 1..22: note = chemically synthesized
  source 1..22: mol_type = other DNA
gcgtgttcccagtgcccaggta

SEQ ID NO: 26924 - DNA, 22 bp, synthetic construct
  misc_feature 1..22: note = chemically synthesized
  source 1..22: mol_type = other DNA
ccagtgcccaggtaacagtgct

SEQ ID NO: 26925 - DNA, 22 bp, synthetic construct
  misc_feature 1..22: note = chemically synthesized
  source 1..22: mol_type = other DNA
cattaatgtttgttaaatgatg

SEQ ID NO: 26926 - DNA, 22 bp, synthetic construct
  misc_feature 1..22: note = chemically synthesized
  source 1..22: mol_type = other DNA
atgtttgttaaatgatgagaaa

SEQ ID NO: 26927 - DNA, 22 bp, synthetic construct
  misc_feature 1..22: note = chemically synthesized
  source 1..22: mol_type = other DNA
gttaaatgatgagaaaagagga

SEQ ID NO: 26928 - DNA, 22 bp, synthetic construct
  misc_feature 1..22: note = chemically synthesized
  source 1..22: mol_type = other DNA
ttaaatgatgagaaaagaggaa

SEQ ID NO: 26929 - DNA, 22 bp, synthetic construct
  misc_feature 1..22: note = chemically synthesized
  source 1..22: mol_type = other DNA
aatgatgagaaaagaggaaagc

SEQ ID NO: 26930 - DNA, 22 bp, synthetic construct
  misc_feature 1..22: note = chemically synthesized
  source 1..22: mol_type = other DNA
tgctcaggtgcaggaacttgtg

SEQ ID NO: 26931 - DNA, 22 bp, synthetic construct
  misc_feature 1..22: note = chemically synthesized
  source 1..22: mol_type = other DNA
ctcaggtgcaggaacttgtgca

SEQ ID NO: 26932 - DNA, 22 bp, synthetic construct
  misc_feature 1..22: note = chemically synthesized
  source 1..22: mol_type = other DNA
aggtgcaggaacttgtgcagag

SEQ ID NO: 26933 - DNA, 22 bp, synthetic construct
  misc_feature 1..22: note = chemically synthesized
  source 1..22: mol_type = other DNA
gtgcagagatcttctggactga

SEQ ID NO: 26934 - DNA, 22 bp, synthetic construct
  misc_feature 1..22: note = chemically synthesized
  source 1..22: mol_type = other DNA
tgcagagatcttctggactgat

SEQ ID NO: 26935 - DNA, 22 bp, synthetic construct
  misc_feature 1..22: note = chemically synthesized
  source 1..22: mol_type = other DNA
ctggactgattcccagtgctaa

SEQ ID NO: 26936 - DNA, 22 bp, synthetic construct
  misc_feature 1..22: note = chemically synthesized
  source 1..22: mol_type = other DNA
tggactgattcccagtgctaac

SEQ ID NO: 26937 - DNA, 22 bp, synthetic construct
  misc_feature 1..22: note = chemically synthesized
  source 1..22: mol_type = other DNA
gactgattcccagtgctaacaa

SEQ ID NO: 26938 - DNA, 22 bp, synthetic construct
  misc_feature 1..22: note = chemically synthesized
  source 1..22: mol_type = other DNA
attcccagtgctaacaagtccc

SEQ ID NO: 26939 - DNA, 22 bp, synthetic construct
  misc_feature 1..22: note = chemically synthesized
  source 1..22: mol_type = other DNA
ccagtgctaacaagtcccttcc

SEQ ID NO: 26940 - DNA, 22 bp, synthetic construct
  misc_feature 1..22: note = chemically synthesized
  source 1..22: mol_type = other DNA
acaagtcccttccagttttatc

SEQ ID NO: 26941 - DNA, 22 bp, synthetic construct
  misc_feature 1..22: note = chemically synthesized
  source 1..22: mol_type = other DNA
ccagttttatccaccaataagc

SEQ ID NO: 26942 - DNA, 22 bp, synthetic construct
  misc_feature 1..22: note = chemically synthesized
  source 1..22: mol_type = other DNA
cagttttatccaccaataagct

SEQ ID NO: 26943 - DNA, 22 bp, synthetic construct
  misc_feature 1..22: note = chemically synthesized
  source 1..22: mol_type = other DNA
tatccaccaataagctatgtcc

SEQ ID NO: 26944 - DNA, 22 bp, synthetic construct
  misc_feature 1..22: note = chemically synthesized
  source 1..22: mol_type = other DNA
atccaccaataagctatgtcct

SEQ ID NO: 26945 - DNA, 22 bp, synthetic construct
  misc_feature 1..22: note = chemically synthesized
  source 1..22: mol_type = other DNA
tccaccaataagctatgtcctt

SEQ ID NO: 26946 - DNA, 22 bp, synthetic construct
  misc_feature 1..22: note = chemically synthesized
  source 1..22: mol_type = other DNA
tgtccttgagctcctgcccact

SEQ ID NO: 26947 - DNA, 22 bp, synthetic construct
  misc_feature 1..22: note = chemically synthesized
  source 1..22: mol_type = other DNA
gagctcctgcccactctctaga

SEQ ID NO: 26948 - DNA, 22 bp, synthetic construct
  misc_feature 1..22: note = chemically synthesized
  source 1..22: mol_type = other DNA
agctcctgcccactctctagag

SEQ ID NO: 26949 - DNA, 22 bp, synthetic construct
  misc_feature 1..22: note = chemically synthesized
  source 1..22: mol_type = other DNA
ctgcccactctctagagaaaac

SEQ ID NO: 26950 - DNA, 22 bp, synthetic construct
  misc_feature 1..22: note = chemically synthesized
  source 1..22: mol_type = other DNA
cccactctctagagaaaacttt

SEQ ID NO: 26951 - DNA, 22 bp, synthetic construct
  misc_feature 1..22: note = chemically synthesized
  source 1..22: mol_type = other DNA
tctagagaaaacttttatttca

SEQ ID NO: 26952 - DNA, 22 bp, synthetic construct
  misc_feature 1..22: note = chemically synthesized
  source 1..22: mol_type = other DNA
tagagaaaacttttatttcaag

SEQ ID NO: 26953 - DNA, 22 bp, synthetic construct
  misc_feature 1..22: note = chemically synthesized
  source 1..22: mol_type = other DNA
gagaaaacttttatttcaaggc

SEQ ID NO: 26954 - DNA, 22 bp, synthetic construct
  misc_feature 1..22: note = chemically synthesized
  source 1..22: mol_type = other DNA
ttatttcaaggcatactccggg

SEQ ID NO: 26955 - DNA, 22 bp, synthetic construct
  misc_feature 1..22: note = chemically synthesized
  source 1..22: mol_type = other DNA
tatttcaaggcatactccggga

SEQ ID NO: 26956 - DNA, 22 bp, synthetic construct
  misc_feature 1..22: note = chemically synthesized
  source 1..22: mol_type = other DNA
atttcaaggcatactccgggat

SEQ ID NO: 26957 - DNA, 22 bp, synthetic construct
  misc_feature 1..22: note = chemically synthesized
  source 1..22: mol_type = other DNA
tttcaaggcatactccgggatt

SEQ ID NO: 26958 - DNA, 22 bp, synthetic construct
  misc_feature 1..22: note = chemically synthesized
  source 1..22: mol_type = other DNA
caaggcatactccgggattcac

SEQ ID NO: 26959 - DNA, 22 bp, synthetic construct
  misc_feature 1..22: note = chemically synthesized
  source 1..22: mol_type = other DNA
aaggcatactccgggattcaca

SEQ ID NO: 26960 - DNA, 22 bp, synthetic construct
  misc_feature 1..22: note = chemically synthesized
  source 1..22: mol_type = other DNA
cgggattcacatgtgatagaga

SEQ ID NO: 26961 - DNA, 22 bp, synthetic construct
  misc_feature 1..22: note = chemically synthesized
  source 1..22: mol_type = other DNA
acatgtgatagagatggttctg

SEQ ID NO: 26962 - DNA, 22 bp, synthetic construct
  misc_feature 1..22: note = chemically synthesized
  source 1..22: mol_type = other DNA
tgttcccaggaactttgggcat

SEQ ID NO: 26963 - DNA, 22 bp, synthetic construct
  misc_feature 1..22: note = chemically synthesized
  source 1..22: mol_type = other DNA
ttcccaggaactttgggcatat

SEQ ID NO: 26964 - DNA, 22 bp, synthetic construct
  misc_feature 1..22: note = chemically synthesized
  source 1..22: mol_type = other DNA
ccaggaactttgggcatattta

SEQ ID NO: 26965 - DNA, 22 bp, synthetic construct
  misc_feature 1..22: note = chemically synthesized
  source 1..22: mol_type = other DNA
tgggcatatttaaaaactggac

SEQ ID NO: 26966 - DNA, 22 bp, synthetic construct
  misc_feature 1..22: note = chemically synthesized
  source 1..22: mol_type = other DNA
gggcatatttaaaaactggact

SEQ ID NO: 26967 - DNA, 22 bp, synthetic construct
  misc_feature 1..22: note = chemically synthesized
  source 1..22: mol_type = other DNA
ggcatatttaaaaactggactg

SEQ ID NO: 26968 - DNA, 22 bp, synthetic construct
  misc_feature 1..22: note = chemically synthesized
  source 1..22: mol_type = other DNA
aaaaactggactggaaaaattt

SEQ ID NO: 26969 - DNA, 22 bp, synthetic construct
  misc_feature 1..22: note = chemically synthesized
  source 1..22: mol_type = other DNA
aaaactggactggaaaaatttg

SEQ ID NO: 26970 - DNA, 22 bp, synthetic construct
  misc_feature 1..22: note = chemically synthesized
  source 1..22: mol_type = other DNA
gactggaaaaatttgtgactag

SEQ ID NO: 26971 - DNA, 22 bp, synthetic construct
  misc_feature 1..22: note = chemically synthesized
  source 1..22: mol_type = other DNA
gaaaaatttgtgactagaaaaa

SEQ ID NO: 26972 - DNA, 22 bp, synthetic construct
  misc_feature 1..22: note = chemically synthesized
  source 1..22: mol_type = other DNA
gtgactagaaaaaggacattaa

SEQ ID NO: 26973 - DNA, 22 bp, synthetic construct
  misc_feature 1..22: note = chemically synthesized
  source 1..22: mol_type = other DNA
tgactagaaaaaggacattaaa

SEQ ID NO: 26974 - DNA, 22 bp, synthetic construct
  misc_feature 1..22: note = chemically synthesized
  source 1..22: mol_type = other DNA
gaaaaaggacattaaaaacaca

SEQ ID NO: 26975 - DNA, 22 bp, synthetic construct
  misc_feature 1..22: note = chemically synthesized
  source 1..22: mol_type = other DNA
aaaacacatgctcatttcagga

SEQ ID NO: 26976 - DNA, 22 bp, synthetic construct
  misc_feature 1..22: note = chemically synthesized
  source 1..22: mol_type = other DNA
atttcaggataaagatctctga

SEQ ID NO: 26977 - DNA, 22 bp, synthetic construct
  misc_feature 1..22: note = chemically synthesized
  source 1..22: mol_type = other DNA
caggataaagatctctgaggaa

SEQ ID NO: 26978 - DNA, 22 bp, synthetic construct
  misc_feature 1..22: note = chemically synthesized
  source 1..22: mol_type = other DNA
aggataaagatctctgaggaaa

SEQ ID NO: 26979 - DNA, 22 bp, synthetic construct
  misc_feature 1..22: note = chemically synthesized
  source 1..22: mol_type = other DNA
tgaggaaaagaatacaaaataa

SEQ ID NO: 26980 - DNA, 22 bp, synthetic construct
  misc_feature 1..22: note = chemically synthesized
  source 1..22: mol_type = other DNA
aggaaaagaatacaaaataatt

SEQ ID NO: 26981 - DNA, 22 bp, synthetic construct
  misc_feature 1..22: note = chemically synthesized
  source 1..22: mol_type = other DNA
aaaaagaaacaacagaaacagg

SEQ ID NO: 26982 - DNA, 22 bp, synthetic construct
  misc_feature 1..22: note = chemically synthesized
  source 1..22: mol_type = other DNA
aaaagaaacaacagaaacaggt

SEQ ID NO: 26983 - DNA, 22 bp, synthetic construct
  misc_feature 1..22: note = chemically synthesized
  source 1..22: mol_type = other DNA
cacttctctgtaataaggtttc

SEQ ID NO: 26984 - DNA, 22 bp, synthetic construct
  misc_feature 1..22: note = chemically synthesized
  source 1..22: mol_type = other DNA
acttctctgtaataaggtttct

SEQ ID NO: 26985 - DNA, 22 bp, synthetic construct
  misc_feature 1..22: note = chemically synthesized
  source 1..22: mol_type = other DNA
ctctgtaataaggtttctgtcc

SEQ ID NO: 26986 - DNA, 22 bp, synthetic construct
  misc_feature 1..22: note = chemically synthesized
  source 1..22: mol_type = other DNA
tctgtaataaggtttctgtcct

SEQ ID NO: 26987 - DNA, 22 bp, synthetic construct
  misc_feature 1..22: note = chemically synthesized
  source 1..22: mol_type = other DNA
tgtaataaggtttctgtcctcc

SEQ ID NO: 26988 - DNA, 22 bp, synthetic construct
  misc_feature 1..22: note = chemically synthesized
  source 1..22: mol_type = other DNA
taataaggtttctgtcctccta

SEQ ID NO: 26989 - DNA, 22 bp, synthetic construct
  misc_feature 1..22: note = chemically synthesized
  source 1..22: mol_type = other DNA
ctgtcctcctagattctttctc

SEQ ID NO: 26990 - DNA, 22 bp, synthetic construct
  misc_feature 1..22: note = chemically synthesized
  source 1..22: mol_type = other DNA
tgtcctcctagattctttctca

SEQ ID NO: 26991 - DNA, 22 bp, synthetic construct
  misc_feature 1..22: note = chemically synthesized
  source 1..22: mol_type = other DNA
tcctcctagattctttctcact

SEQ ID NO: 26992 - DNA, 22 bp, synthetic construct
  misc_feature 1..22: note = chemically synthesized
  source 1..22: mol_type = other DNA
ctagattctttctcactaaact

SEQ ID NO: 26993 - DNA, 22 bp, synthetic construct
  misc_feature 1..22: note = chemically synthesized
  source 1..22: mol_type = other DNA
gattctttctcactaaactaca

SEQ ID NO: 26994 - DNA, 22 bp, synthetic construct
  misc_feature 1..22: note = chemically synthesized
  source 1..22: mol_type = other DNA
tttctcactaaactacagagaa

SEQ ID NO: 26995 - DNA, 22 bp, synthetic construct
  misc_feature 1..22: note = chemically synthesized
  source 1..22: mol_type = other DNA
tctcactaaactacagagaata

SEQ ID NO: 26996 - DNA, 22 bp, synthetic construct
  misc_feature 1..22: note = chemically synthesized
  source 1..22: mol_type = other DNA
ctcactaaactacagagaataa

SEQ ID NO: 26997 - DNA, 22 bp, synthetic construct
  misc_feature 1..22: note = chemically synthesized
  source 1..22: mol_type = other DNA
tcactaaactacagagaataag

SEQ ID NO: 26998 - DNA, 22 bp, synthetic construct
  misc_feature 1..22: note = chemically synthesized
  source 1..22: mol_type = other DNA
actaaactacagagaataagac

SEQ ID NO: 26999 - DNA, 22 bp, synthetic construct
  misc_feature 1..22: note = chemically synthesized
  source 1..22: mol_type = other DNA
aactacagagaataagaccgtg

SEQ ID NO: 27000 - DNA, 22 bp, synthetic construct
  misc_feature 1..22: note = chemically synthesized
  source 1..22: mol_type = other DNA
cagagaataagaccgtgctttg

SEQ ID NO: 27001 - DNA, 22 bp, synthetic construct
  misc_feature 1..22: note = chemically synthesized
  source 1..22: mol_type = other DNA
tgttctcttatatgcattctgt

SEQ ID NO: 27002 - DNA, 22 bp, synthetic construct
  misc_feature 1..22: note = chemically synthesized
  source 1..22: mol_type = other DNA
gttctcttatatgcattctgtc

SEQ ID NO: 27003 - DNA, 22 bp, synthetic construct
  misc_feature 1..22: note = chemically synthesized
  source 1..22: mol_type = other DNA
ttctcttatatgcattctgtcc

SEQ ID NO: 27004 - DNA, 22 bp, synthetic construct
  misc_feature 1..22: note = chemically synthesized
  source 1..22: mol_type = other DNA
tcttatatgcattctgtccact

SEQ ID NO: 27005 - DNA, 22 bp, synthetic construct
  misc_feature 1..22: note = chemically synthesized
  source 1..22: mol_type = other DNA
ttatatgcattctgtccacttc

SEQ ID NO: 27006 - DNA, 22 bp, synthetic construct
  misc_feature 1..22: note = chemically synthesized
  source 1..22: mol_type = other DNA
atatgcattctgtccacttcta

SEQ ID NO: 27007 - DNA, 22 bp, synthetic construct
  misc_feature 1..22: note = chemically synthesized
  source 1..22: mol_type = other DNA
tatgcattctgtccacttctac

SEQ ID NO: 27008 - DNA, 22 bp, synthetic construct
  misc_feature 1..22: note = chemically synthesized
  source 1..22: mol_type = other DNA
tgtccacttctacataggcaaa

SEQ ID NO: 27009 - DNA, 22 bp, synthetic construct
  misc_feature 1..22: note = chemically synthesized
  source 1..22: mol_type = other DNA
tccacttctacataggcaaaat

SEQ ID NO: 27010 - DNA, 22 bp, synthetic construct
  misc_feature 1..22: note = chemically synthesized
  source 1..22: mol_type = other DNA
ctacataggcaaaattgacttt

SEQ ID NO: 27011 - DNA, 22 bp, synthetic construct
  misc_feature 1..22: note = chemically synthesized
  source 1..22: mol_type = other DNA
tacataggcaaaattgactttt

SEQ ID NO: 27012 - DNA, 22 bp, synthetic construct
  misc_feature 1..22: note = chemically synthesized
  source 1..22: mol_type = other DNA
cataggcaaaattgacttttaa

SEQ ID NO: 27013 - DNA, 22 bp, synthetic construct
  misc_feature 1..22: note = chemically synthesized
  source 1..22: mol_type = other DNA
acttttaattttgattttatga

SEQ ID NO: 27014 - DNA, 22 bp, synthetic construct
  misc_feature 1..22: note = chemically synthesized
  source 1..22: mol_type = other DNA
ttaattttgattttatgaatgc

SEQ ID NO: 27015 - DNA, 22 bp, synthetic construct
  misc_feature 1..22: note = chemically synthesized
  source 1..22: mol_type = other DNA
taattttgattttatgaatgca

SEQ ID NO: 27016 - DNA, 22 bp, synthetic construct
  misc_feature 1..22: note = chemically synthesized
  source 1..22: mol_type = other DNA
aattttgattttatgaatgcat

SEQ ID NO: 27017 - DNA, 22 bp, synthetic construct
  misc_feature 1..22: note = chemically synthesized
  source 1..22: mol_type = other DNA
attttgattttatgaatgcata

SEQ ID NO: 27018 - DNA, 22 bp, synthetic construct
  misc_feature 1..22: note = chemically synthesized
  source 1..22: mol_type = other DNA
tgattttatgaatgcatacaca

SEQ ID NO: 27019 - DNA, 22 bp, synthetic construct
  misc_feature 1..22: note = chemically synthesized
  source 1..22: mol_type = other DNA
gattttatgaatgcatacacac

SEQ ID NO: 27020 - DNA, 22 bp, synthetic construct
  misc_feature 1..22: note = chemically synthesized
  source 1..22: mol_type = other DNA
attttatgaatgcatacacacg

SEQ ID NO: 27021 - DNA, 22 bp, synthetic construct
  misc_feature 1..22: note = chemically synthesized
  source 1..22: mol_type = other DNA
tatgaatgcatacacacgagaa

SEQ ID NO: 27022 - DNA, 22 bp, synthetic construct
  misc_feature 1..22: note = chemically synthesized
  source 1..22: mol_type = other DNA
atgaatgcatacacacgagaac

SEQ ID NO: 27023 - DNA, 22 bp, synthetic construct
  misc_feature 1..22: note = chemically synthesized
  source 1..22: mol_type = other DNA
tgaatgcatacacacgagaact

SEQ ID NO: 27024 - DNA, 22 bp, synthetic construct
  misc_feature 1..22: note = chemically synthesized
  source 1..22: mol_type = other DNA
tgaacagttagtataaggtgaa

SEQ ID NO: 27025 - DNA, 22 bp, synthetic construct
  misc_feature 1..22: note = chemically synthesized
  source 1..22: mol_type = other DNA
gaacagttagtataaggtgaat

SEQ ID NO: 27026 - DNA, 22 bp, synthetic construct
  misc_feature 1..22: note = chemically synthesized
  source 1..22: mol_type = other DNA
aacagttagtataaggtgaatt

SEQ ID NO: 27027 - DNA, 22 bp, synthetic construct
  misc_feature 1..22: note = chemically synthesized
  source 1..22: mol_type = other DNA
gtataaggtgaattctgatttt

SEQ ID NO: 27028 - DNA, 22 bp, synthetic construct
  misc_feature 1..22: note = chemically synthesized
  source 1..22: mol_type = other DNA
tgatttttcagaatgcatgcca

SEQ ID NO: 27029 - DNA, 22 bp, synthetic construct
  misc_feature 1..22: note = chemically synthesized
  source 1..22: mol_type = other DNA
atttttcagaatgcatgccata

SEQ ID NO: 27030 - DNA, 22 bp, synthetic construct
  misc_feature 1..22: note = chemically synthesized
  source 1..22: mol_type = other DNA
ttcagaatgcatgccatatata

SEQ ID NO: 27031 - DNA, 22 bp, synthetic construct
  misc_feature 1..22: note = chemically synthesized
  source 1..22: mol_type = other DNA
tcagaatgcatgccatatataa

SEQ ID NO: 27032 - DNA, 22 bp, synthetic construct
  misc_feature 1..22: note = chemically synthesized
  source 1..22: mol_type = other DNA
cagaatgcatgccatatataat

SEQ ID NO: 27033 - DNA, 22 bp, synthetic construct
  misc_feature 1..22: note = chemically synthesized
  source 1..22: mol_type = other DNA
agaatgcatgccatatataatg

SEQ ID NO: 27034 - DNA, 22 bp, synthetic construct
  misc_feature 1..22: note = chemically synthesized
  source 1..22: mol_type = other DNA
aattttgagattatgctggctc

SEQ ID NO: 27035 - DNA, 22 bp, synthetic construct
  misc_feature 1..22: note = chemically synthesized
  source 1..22: mol_type = other DNA
attttgagattatgctggctct

SEQ ID NO: 27036 - DNA, 22 bp, synthetic construct
  misc_feature 1..22: note = chemically synthesized
  source 1..22: mol_type = other DNA
tgagattatgctggctctgatt

SEQ ID NO: 27037 - DNA, 22 bp, synthetic construct
  misc_feature 1..22: note = chemically synthesized
  source 1..22: mol_type = other DNA
gagattatgctggctctgatta

SEQ ID NO: 27038 - DNA, 22 bp, synthetic construct
  misc_feature 1..22: note = chemically synthesized
  source 1..22: mol_type = other DNA
agattatgctggctctgattag

SEQ ID NO: 27039 - DNA, 22 bp, synthetic construct
  misc_feature 1..22: note = chemically synthesized
  source 1..22: mol_type = other DNA
tgctggctctgattagccaaaa

SEQ ID NO: 27040 - DNA, 22 bp, synthetic construct
  misc_feature 1..22: note = chemically synthesized
  source 1..22: mol_type = other DNA
gctctgattagccaaaagaagg

SEQ ID NO: 27041 - DNA, 22 bp, synthetic construct
  misc_feature 1..22: note = chemically synthesized
  source 1..22: mol_type = other DNA
tgattagccaaaagaaggaagt

SEQ ID NO: 27042 - DNA, 22 bp, synthetic construct
  misc_feature 1..22: note = chemically synthesized
  source 1..22: mol_type = other DNA
attagccaaaagaaggaagtaa

SEQ ID NO: 27043 - DNA, 22 bp, synthetic construct
  misc_feature 1..22: note = chemically synthesized
  source 1..22: mol_type = other DNA
gccaaaagaaggaagtaatata

SEQ ID NO: 27044 - DNA, 22 bp, synthetic construct
  misc_feature 1..22: note = chemically synthesized
  source 1..22: mol_type = other DNA
tggttattatttcagatccttt

SEQ ID NO: 27045 - DNA, 22 bp, synthetic construct
  misc_feature 1..22: note = chemically synthesized
  source 1..22: mol_type = other DNA
gttattatttcagatcctttag

SEQ ID NO: 27046 - DNA, 22 bp, synthetic construct
  misc_feature 1..22: note = chemically synthesized
  source 1..22: mol_type = other DNA
ttatttcagatcctttagatta

SEQ ID NO: 27047 - DNA, 22 bp, synthetic construct
  misc_feature 1..22: note = chemically synthesized
  source 1..22: mol_type = other DNA
tttcagatcctttagattactg

SEQ ID NO: 27048 - DNA, 22 bp, synthetic construct
  misc_feature 1..22: note = chemically synthesized
  source 1..22: mol_type = other DNA
cagatcctttagattactgtaa

SEQ ID NO: 27049 - DNA, 22 bp, synthetic construct
  misc_feature 1..22: note = chemically synthesized
  source 1..22: mol_type = other DNA
agatcctttagattactgtaat

SEQ ID NO: 27050 - DNA, 22 bp, synthetic construct
  misc_feature 1..22: note = chemically synthesized
  source 1..22: mol_type = other DNA
tagattactgtaatagacatga

SEQ ID NO: 27051 - DNA, 22 bp, synthetic construct
  misc_feature 1..22: note = chemically synthesized
  source 1..22: mol_type = other DNA
agattactgtaatagacatgaa

SEQ ID NO: 27052 - DNA, 22 bp, synthetic construct
  misc_feature 1..22: note = chemically synthesized
  source 1..22: mol_type = other DNA
gattactgtaatagacatgaaa

SEQ ID NO: 27053 - DNA, 22 bp, synthetic construct
  misc_feature 1..22: note = chemically synthesized
  source 1..22: mol_type = other DNA
ctgtaatagacatgaaatagta

SEQ ID NO: 27054 - DNA, 22 bp, synthetic construct
  misc_feature 1..22: note = chemically synthesized
  source 1..22: mol_type = other DNA
taatagacatgaaatagtaaac

SEQ ID NO: 27055 - DNA, 22 bp, synthetic construct
  misc_feature 1..22: note = chemically synthesized
  source 1..22: mol_type = other DNA
tatatcacaacacatgacataa

SEQ ID NO: 27056 - DNA, 22 bp, synthetic construct
  misc_feature 1..22: note = chemically synthesized
  source 1..22: mol_type = other DNA
cagatcgtttaaatcacacaag

SEQ ID NO: 27057 - DNA, 22 bp, synthetic construct
  misc_feature 1..22: note = chemically synthesized
  source 1..22: mol_type = other DNA
agatcgtttaaatcacacaagt

SEQ ID NO: 27058 - DNA, 22 bp, synthetic construct
  misc_feature 1..22: note = chemically synthesized
  source 1..22: mol_type = other DNA
aaatcacacaagtcatcactgc

SEQ ID NO: 27059 - DNA, 22 bp, synthetic construct
  misc_feature 1..22: note = chemically synthesized
  source 1..22: mol_type = other DNA
aatcacacaagtcatcactgcc

SEQ ID NO: 27060 - DNA, 22 bp, synthetic construct
  misc_feature 1..22: note = chemically synthesized
  source 1..22: mol_type = other DNA
ccatttacccagcaatcagttg

SEQ ID NO: 27061 - DNA, 22 bp, synthetic construct
  misc_feature 1..22: note = chemically synthesized
  source 1..22: mol_type = other DNA
acccagcaatcagttggcttga

SEQ ID NO: 27062 - DNA, 22 bp, synthetic construct
  misc_feature 1..22: note = chemically synthesized
  source 1..22: mol_type = other DNA
cccagcaatcagttggcttgat

SEQ ID NO: 27063 - DNA, 22 bp, synthetic construct
  misc_feature 1..22: note = chemically synthesized
  source 1..22: mol_type = other DNA
gcttgattcttcaagatcttga

SEQ ID NO: 27064 - DNA, 22 bp, synthetic construct
  misc_feature 1..22: note = chemically synthesized
  source 1..22: mol_type = other DNA
gattcttcaagatcttgaggaa

SEQ ID NO: 27065 - DNA, 22 bp, synthetic construct
  misc_feature 1..22: note = chemically synthesized
  source 1..22: mol_type = other DNA
attcttcaagatcttgaggaac

SEQ ID NO: 27066 - DNA, 22 bp, synthetic construct
  misc_feature 1..22: note = chemically synthesized
  source 1..22: mol_type = other DNA
ttcaagatcttgaggaactcag

SEQ ID NO: 27067 - DNA, 22 bp, synthetic construct
  misc_feature 1..22: note = chemically synthesized
  source 1..22: mol_type = other DNA
caagatcttgaggaactcagcc

SEQ ID NO: 27068 - DNA, 22 bp, synthetic construct
  misc_feature 1..22: note = chemically synthesized
  source 1..22: mol_type = other DNA
aagatcttgaggaactcagcct

SEQ ID NO: 27069 - DNA, 22 bp, synthetic construct
  misc_feature 1..22: note = chemically synthesized
  source 1..22: mol_type = other DNA
gaggaactcagccttcaaaacc

SEQ ID NO: 27070 - DNA, 22 bp, synthetic construct
  misc_feature 1..22: note = chemically synthesized
  source 1..22: mol_type = other DNA
aggaactcagccttcaaaacca

SEQ ID NO: 27071 - DNA, 22 bp, synthetic construct
  misc_feature 1..22: note = chemically synthesized
  source 1..22: mol_type = other DNA
agccttcaaaaccatgactttt

SEQ ID NO: 27072 - DNA, 22 bp, synthetic construct
  misc_feature 1..22: note = chemically synthesized
  source 1..22: mol_type = other DNA
caaaaccatgactttttctttg

SEQ ID NO: 27073 - DNA, 22 bp, synthetic construct
  misc_feature 1..22: note = chemically synthesized
  source 1..22: mol_type = other DNA
aaaaccatgactttttctttgc

SEQ ID NO: 27074 - DNA, 22 bp, synthetic construct
  misc_feature 1..22: note = chemically synthesized
  source 1..22: mol_type = other DNA
tttctttgctaatgttccttca

SEQ ID NO: 27075 - DNA, 22 bp, synthetic construct
  misc_feature 1..22: note = chemically synthesized
  source 1..22: mol_type = other DNA
ttctttgctaatgttccttcaa

SEQ ID NO: 27076 - DNA, 22 bp, synthetic construct
  misc_feature 1..22: note = chemically synthesized
  source 1..22: mol_type = other DNA
tctttgctaatgttccttcaat

SEQ ID NO: 27077 - DNA, 22 bp, synthetic construct
  misc_feature 1..22: note = chemically synthesized
  source 1..22: mol_type = other DNA
ctttgctaatgttccttcaata

SEQ ID NO: 27078 - DNA, 22 bp, synthetic construct
  misc_feature 1..22: note = chemically synthesized
  source 1..22: mol_type = other DNA
tttgctaatgttccttcaatag

SEQ ID NO: 27079 - DNA, 22 bp, synthetic construct
  misc_feature 1..22: note = chemically synthesized
  source 1..22: mol_type = other DNA
tgctaatgttccttcaatagtc

SEQ ID NO: 27080 - DNA, 22 bp, synthetic construct
  misc_feature 1..22: note = chemically synthesized
  source 1..22: mol_type = other DNA
gctaatgttccttcaatagtct

SEQ ID NO: 27081 - DNA, 22 bp, synthetic construct
  misc_feature 1..22: note = chemically synthesized
  source 1..22: mol_type = other DNA
ctaatgttccttcaatagtctt

SEQ ID NO: 27082 - DNA, 22 bp, synthetic construct
  misc_feature 1..22: note = chemically synthesized
  source 1..22: mol_type = other DNA
atgttccttcaatagtcttgac

SEQ ID NO: 27083 - DNA, 22 bp, synthetic construct
  misc_feature 1..22: note = chemically synthesized
  source 1..22: mol_type = other DNA
cttcaatagtcttgacactttt

SEQ ID NO: 27084 - DNA, 22 bp, synthetic construct
  misc_feature 1..22: note = chemically synthesized
  source 1..22: mol_type = other DNA
caatagtcttgacacttttaaa

SEQ ID NO: 27085 - DNA, 22 bp, synthetic construct
  misc_feature 1..22: note = chemically synthesized
  source 1..22: mol_type = other DNA
aatagtcttgacacttttaaac

SEQ ID NO: 27086 - DNA, 22 bp, synthetic construct
  misc_feature 1..22: note = chemically synthesized
  source 1..22: mol_type = other DNA
gacacttttaaactagagagta

SEQ ID NO: 27087 - DNA, 22 bp, synthetic construct
  misc_feature 1..22: note = chemically synthesized
  source 1..22: mol_type = other DNA
acacttttaaactagagagtat

SEQ ID NO: 27088 - DNA, 22 bp, synthetic construct
  misc_feature 1..22: note = chemically synthesized
  source 1..22: mol_type = other DNA
ttaaactagagagtataaaccc

SEQ ID NO: 27089 - DNA, 22 bp, synthetic construct
  misc_feature 1..22: note = chemically synthesized
  source 1..22: mol_type = other DNA
taaactagagagtataaaccca

SEQ ID NO: 27090 - DNA, 22 bp, synthetic construct
  misc_feature 1..22: note = chemically synthesized
  source 1..22: mol_type = other DNA
aaactagagagtataaacccac

SEQ ID NO: 27091 - DNA, 22 bp, synthetic construct
  misc_feature 1..22: note = chemically synthesized
  source 1..22: mol_type = other DNA
aactagagagtataaacccaca

SEQ ID NO: 27092 - DNA, 22 bp, synthetic construct
  misc_feature 1..22: note = chemically synthesized
  source 1..22: mol_type = other DNA
gagagtataaacccacaaggaa

SEQ ID NO: 27093 - DNA, 22 bp, synthetic construct
  misc_feature 1..22: note = chemically synthesized
  source 1..22: mol_type = other DNA
ttttataattttacagatgtct

SEQ ID NO: 27094 - DNA, 22 bp, synthetic construct
  misc_feature 1..22: note = chemically synthesized
  source 1..22: mol_type = other DNA
tataattttacagatgtcttta

SEQ ID NO: 27095 - DNA, 22 bp, synthetic construct
  misc_feature 1..22: note = chemically synthesized
  source 1..22: mol_type = other DNA
ataattttacagatgtctttat

SEQ ID NO: 27096 - DNA, 22 bp, synthetic construct
  misc_feature 1..22: note = chemically synthesized
  source 1..22: mol_type = other DNA
taattttacagatgtctttatt

SEQ ID NO: 27097 - DNA, 22 bp, synthetic construct
  misc_feature 1..22: note = chemically synthesized
  source 1..22: mol_type = other DNA
tacagatgtctttattttcaaa

SEQ ID NO: 27098 - DNA, 22 bp, synthetic construct
  misc_feature 1..22: note = chemically synthesized
  source 1..22: mol_type = other DNA
acagatgtctttattttcaaaa

SEQ ID NO: 27099 - DNA, 22 bp, synthetic construct
  misc_feature 1..22: note = chemically synthesized
  source 1..22: mol_type = other DNA
cagatgtctttattttcaaaat

SEQ ID NO: 27100 - DNA, 22 bp, synthetic construct
  misc_feature 1..22: note = chemically synthesized
  source 1..22: mol_type = other DNA
tattttcaaaatcatttacatt

SEQ ID NO: 27101 - DNA, 22 bp, synthetic construct
  misc_feature 1..22: note = chemically synthesized
  source 1..22: mol_type = other DNA
attttcaaaatcatttacattg

SEQ ID NO: 27102 - DNA, 22 bp, synthetic construct
  misc_feature 1..22: note = chemically synthesized
  source 1..22: mol_type = other DNA
ttttcaaaatcatttacattgt

SEQ ID NO: 27103 - DNA, 22 bp, synthetic construct
  misc_feature 1..22: note = chemically synthesized
  source 1..22: mol_type = other DNA
tcaaaatcatttacattgtggt

SEQ ID NO: 27104 - DNA, 22 bp, synthetic construct
  misc_feature 1..22: note = chemically synthesized
  source 1..22: mol_type = other DNA
caaaatcatttacattgtggtt

SEQ ID NO: 27105 - DNA, 22 bp, synthetic construct
  misc_feature 1..22: note = chemically synthesized
  source 1..22: mol_type = other DNA
aaaatcatttacattgtggttc

SEQ ID NO: 27106 - DNA, 22 bp, synthetic construct
  misc_feature 1..22: note = chemically synthesized
  source 1..22: mol_type = other DNA
acattgtggttctctaccttgc

SEQ ID NO: 27107 - DNA, 22 bp, synthetic construct
  misc_feature 1..22: note = chemically synthesized
  source 1..22: mol_type = other DNA
cattgtggttctctaccttgcc

SEQ ID NO: 27108 - DNA, 22 bp, synthetic construct
  misc_feature 1..22: note = chemically synthesized
  source 1..22: mol_type = other DNA
tggttctctaccttgccttctc

SEQ ID NO: 27109 - DNA, 22 bp, synthetic construct
  misc_feature 1..22: note = chemically synthesized
  source 1..22: mol_type = other DNA
tctaccttgccttctcttaccc

SEQ ID NO: 27110 - DNA, 22 bp, synthetic construct
  misc_feature 1..22: note = chemically synthesized
  source 1..22: mol_type = other DNA
taccttgccttctcttacccag

SEQ ID NO: 27111 - DNA, 22 bp, synthetic construct
  misc_feature 1..22: note = chemically synthesized
  source 1..22: mol_type = other DNA
ccttgccttctcttacccagca

SEQ ID NO: 27112 - DNA, 22 bp, synthetic construct
  misc_feature 1..22: note = chemically synthesized
  source 1..22: mol_type = other DNA
gccttctcttacccagcacaga

SEQ ID NO: 27113 - DNA, 22 bp, synthetic construct
  misc_feature 1..22: note = chemically synthesized
  source 1..22: mol_type = other DNA
ccttctcttacccagcacagat

SEQ ID NO: 27114 - DNA, 22 bp, synthetic construct
  misc_feature 1..22: note = chemically synthesized
  source 1..22: mol_type = other DNA
ctcttacccagcacagatgagg

SEQ ID NO: 27115 - DNA, 22 bp, synthetic construct
  misc_feature 1..22: note = chemically synthesized
  source 1..22: mol_type = other DNA
tcttacccagcacagatgaggt

SEQ ID NO: 27116 - DNA, 22 bp, synthetic construct
  misc_feature 1..22: note = chemically synthesized
  source 1..22: mol_type = other DNA
ttacccagcacagatgaggtta

SEQ ID NO: 27117 - DNA, 22 bp, synthetic construct
  misc_feature 1..22: note = chemically synthesized
  source 1..22: mol_type = other DNA
acccagcacagatgaggttata

SEQ ID NO: 27118 - DNA, 22 bp, synthetic construct
  misc_feature 1..22: note = chemically synthesized
  source 1..22: mol_type = other DNA
cccagcacagatgaggttatac

SEQ ID NO: 27119 - DNA, 22 bp, synthetic construct
  misc_feature 1..22: note = chemically synthesized
  source 1..22: mol_type = other DNA
tacctcactcgcaaattgtttt

SEQ ID NO: 27120 - DNA, 22 bp, synthetic construct
  misc_feature 1..22: note = chemically synthesized
  source 1..22: mol_type = other DNA
actcgcaaattgttttatcaat

SEQ ID NO: 27121 - DNA, 22 bp, synthetic construct
  misc_feature 1..22: note = chemically synthesized
  source 1..22: mol_type = other DNA
gcaaattgttttatcaatttga

SEQ ID NO: 27122 - DNA, 22 bp, synthetic construct
  misc_feature 1..22: note = chemically synthesized
  source 1..22: mol_type = other DNA
ttttatcaatttgattttcttt

SEQ ID NO: 27123 - DNA, 22 bp, synthetic construct
  misc_feature 1..22: note = chemically synthesized
  source 1..22: mol_type = other DNA
tatcaatttgattttctttatt

SEQ ID NO: 27124 - DNA, 22 bp, synthetic construct
  misc_feature 1..22: note = chemically synthesized
  source 1..22: mol_type = other DNA
atcaatttgattttctttattt

SEQ ID NO: 27125 - DNA, 22 bp, synthetic construct
  misc_feature 1..22: note = chemically synthesized
  source 1..22: mol_type = other DNA
tcaatttgattttctttatttt

SEQ ID NO: 27126 - DNA, 22 bp, synthetic construct
  misc_feature 1..22: note = chemically synthesized
  source 1..22: mol_type = other DNA
gattttctttattttataattc

SEQ ID NO: 27127 - DNA, 22 bp, synthetic construct
  misc_feature 1..22: note = chemically synthesized
  source 1..22: mol_type = other DNA
attttctttattttataattcc

SEQ ID NO: 27128 - DNA, 22 bp, synthetic construct
  misc_feature 1..22: note = chemically synthesized
  source 1..22: mol_type = other DNA
tctttattttataattcctaca

SEQ ID NO: 27129 - DNA, 22 bp, synthetic construct
  misc_feature 1..22: note = chemically synthesized
  source 1..22: mol_type = other DNA
ctttattttataattcctacat

SEQ ID NO: 27130 - DNA, 22 bp, synthetic construct
  misc_feature 1..22: note = chemically synthesized
  source 1..22: mol_type = other DNA
tttattttataattcctacata

SEQ ID NO: 27131 - DNA, 22 bp, synthetic construct
  misc_feature 1..22: note = chemically synthesized
  source 1..22: mol_type = other DNA
tattttataattcctacataag

SEQ ID NO: 27132 - DNA, 22 bp, synthetic construct
  misc_feature 1..22: note = chemically synthesized
  source 1..22: mol_type = other DNA
attttataattcctacataagc

SEQ ID NO: 27133 - DNA, 22 bp, synthetic construct
  misc_feature 1..22: note = chemically synthesized
  source 1..22: mol_type = other DNA
ttttataattcctacataagca

SEQ ID NO: 27134 - DNA, 22 bp, synthetic construct
  misc_feature 1..22: note = chemically synthesized
  source 1..22: mol_type = other DNA
tataattcctacataagcatag

SEQ ID NO: 27135 - DNA, 22 bp, synthetic construct
  misc_feature 1..22: note = chemically synthesized
  source 1..22: mol_type = other DNA
ataattcctacataagcatagc

SEQ ID NO: 27136 - DNA, 22 bp, synthetic construct
  misc_feature 1..22: note = chemically synthesized
  source 1..22: mol_type = other DNA
taattcctacataagcatagca

SEQ ID NO: 27137 - DNA, 22 bp, synthetic construct
  misc_feature 1..22: note = chemically synthesized
  source 1..22: mol_type = other DNA
ctacataagcatagcattgaag

SEQ ID NO: 27138 - DNA, 22 bp, synthetic construct
  misc_feature 1..22: note = chemically synthesized
  source 1..22: mol_type = other DNA
cataagcatagcattgaagaaa

SEQ ID NO: 27139 - DNA, 22 bp, synthetic construct
  misc_feature 1..22: note = chemically synthesized
  source 1..22: mol_type = other DNA
aagaaaaaaattactttcattc

SEQ ID NO: 27140 - DNA, 22 bp, synthetic construct
  misc_feature 1..22: note = chemically synthesized
  source 1..22: mol_type = other DNA
ctttcattctgaaaggagcaca

SEQ ID NO: 27141 - DNA, 22 bp, synthetic construct
  misc_feature 1..22: note = chemically synthesized
  source 1..22: mol_type = other DNA
tcattctgaaaggagcacagta

SEQ ID NO: 27142 - DNA, 22 bp, synthetic construct
  misc_feature 1..22: note = chemically synthesized
  source 1..22: mol_type = other DNA
cattctgaaaggagcacagtat

SEQ ID NO: 27143 - DNA, 22 bp, synthetic construct
  misc_feature 1..22: note = chemically synthesized
  source 1..22: mol_type = other DNA
attctgaaaggagcacagtatt

SEQ ID NO: 27144 - DNA, 22 bp, synthetic construct
  misc_feature 1..22: note = chemically synthesized
  source 1..22: mol_type = other DNA
tgaaaggagcacagtattttgc

SEQ ID NO: 27145 - DNA, 22 bp, synthetic construct
  misc_feature 1..22: note = chemically synthesized
  source 1..22: mol_type = other DNA
aaaggagcacagtattttgcct

SEQ ID NO: 27146 - DNA, 22 bp, synthetic construct
  misc_feature 1..22: note = chemically synthesized
  source 1..22: mol_type = other DNA
tgccttttgagaagctcctgaa

SEQ ID NO: 27147 - DNA, 22 bp, synthetic construct
  misc_feature 1..22: note = chemically synthesized
  source 1..22: mol_type = other DNA
gccttttgagaagctcctgaat

SEQ ID NO: 27148 - DNA, 22 bp, synthetic construct
  misc_feature 1..22: note = chemically synthesized
  source 1..22: mol_type = other DNA
ccttttgagaagctcctgaatt

SEQ ID NO: 27149 - DNA, 22 bp, synthetic construct
  misc_feature 1..22: note = chemically synthesized
  source 1..22: mol_type = other DNA
ttgagaagctcctgaattaaaa

SEQ ID NO: 27150 - DNA, 22 bp, synthetic construct
  misc_feature 1..22: note = chemically synthesized
  source 1..22: mol_type = other DNA
tgagaagctcctgaattaaaac

SEQ ID NO: 27151 - DNA, 22 bp, synthetic construct
  misc_feature 1..22: note = chemically synthesized
  source 1..22: mol_type = other DNA
gagaagctcctgaattaaaaca

SEQ ID NO: 27152 - DNA, 22 bp, synthetic construct
  misc_feature 1..22: note = chemically synthesized
  source 1..22: mol_type = other DNA
agaagctcctgaattaaaacat

SEQ ID NO: 27153 - DNA, 22 bp, synthetic construct
  misc_feature 1..22: note = chemically synthesized
  source 1..22: mol_type = other DNA
ctgaattaaaacattaattcca

SEQ ID NO: 27154 - DNA, 22 bp, synthetic construct
  misc_feature 1..22: note = chemically synthesized
  source 1..22: mol_type = other DNA
aattaaaacattaattccaagc

SEQ ID NO: 27155 - DNA, 22 bp, synthetic construct
  misc_feature 1..22: note = chemically synthesized
  source 1..22: mol_type = other DNA
aaacattaattccaagctaatt

SEQ ID NO: 27156 - DNA, 22 bp, synthetic construct
  misc_feature 1..22: note = chemically synthesized
  source 1..22: mol_type = other DNA
attccaagctaattgtgaatat

SEQ ID NO: 27157 - DNA, 22 bp, synthetic construct
  misc_feature 1..22: note = chemically synthesized
  source 1..22: mol_type = other DNA
caagctaattgtgaatatgaaa

SEQ ID NO: 27158 - DNA, 22 bp, synthetic construct
  misc_feature 1..22: note = chemically synthesized
  source 1..22: mol_type = other DNA
attgtgaatatgaaacattctt

SEQ ID NO: 27159 - DNA, 22 bp, synthetic construct
  misc_feature 1..22: note = chemically synthesized
  source 1..22: mol_type = other DNA
tgaatatgaaacattcttaagc

SEQ ID NO: 27160 - DNA, 22 bp, synthetic construct
  misc_feature 1..22: note = chemically synthesized
  source 1..22: mol_type = other DNA
ttaagcatttcatataattact

SEQ ID NO: 27161 - DNA, 22 bp, synthetic construct
  misc_feature 1..22: note = chemically synthesized
  source 1..22: mol_type = other DNA
aagcatttcatataattactaa

SEQ ID NO: 27162 - DNA, 22 bp, synthetic construct
  misc_feature 1..22: note = chemically synthesized
  source 1..22: mol_type = other DNA
agcatttcatataattactaac

SEQ ID NO: 27163 - DNA, 22 bp, synthetic construct
  misc_feature 1..22: note = chemically synthesized
  source 1..22: mol_type = other DNA
catataattactaacagaatgt

SEQ ID NO: 27164 - DNA, 22 bp, synthetic construct
  misc_feature 1..22: note = chemically synthesized
  source 1..22: mol_type = other DNA
atataattactaacagaatgta

SEQ ID NO: 27165 - DNA, 22 bp, synthetic construct
  misc_feature 1..22: note = chemically synthesized
  source 1..22: mol_type = other DNA
ctaacagaatgtagagttgagg

SEQ ID NO: 27166 - DNA, 22 bp, synthetic construct
  misc_feature 1..22: note = chemically synthesized
  source 1..22: mol_type = other DNA
acagaatgtagagttgaggttt

SEQ ID NO: 27167 - DNA, 22 bp, synthetic construct
  misc_feature 1..22: note = chemically synthesized
  source 1..22: mol_type = other DNA
aggtttccaactggttctaatc

SEQ ID NO: 27168 - DNA, 22 bp, synthetic construct
  misc_feature 1..22: note = chemically synthesized
  source 1..22: mol_type = other DNA
ccaactggttctaatcacatat

SEQ ID NO: 27169 - DNA, 22 bp, synthetic construct
  misc_feature 1..22: note = chemically synthesized
  source 1..22: mol_type = other DNA
caactggttctaatcacatata

SEQ ID NO: 27170 - DNA, 22 bp, synthetic construct
  misc_feature 1..22: note = chemically synthesized
  source 1..22: mol_type = other DNA
gttctaatcacatatacatctt

SEQ ID NO: 27171 - DNA, 22 bp, synthetic construct
  misc_feature 1..22: note = chemically synthesized
  source 1..22: mol_type = other DNA
taatcacatatacatcttccta

SEQ ID NO: 27172 - DNA, 22 bp, synthetic construct
  misc_feature 1..22: note = chemically synthesized
  source 1..22: mol_type = other DNA
atcacatatacatcttcctaaa

SEQ ID NO: 27173 - DNA, 22 bp, synthetic construct
  misc_feature 1..22: note = chemically synthesized
  source 1..22: mol_type = other DNA
cctaaaataaaatgtttaatta

SEQ ID NO: 27174 - DNA, 22 bp, synthetic construct
  misc_feature 1..22: note = chemically synthesized
  source 1..22: mol_type = other DNA
ctaaaataaaatgtttaattat

SEQ ID NO: 27175 - DNA, 22 bp, synthetic construct
  misc_feature 1..22: note = chemically synthesized
  source 1..22: mol_type = other DNA
aaataaaatgtttaattatact

SEQ ID NO: 27176 - DNA, 22 bp, synthetic construct
  misc_feature 1..22: note = chemically synthesized
  source 1..22: mol_type = other DNA
aattatactattttgctgagaa

SEQ ID NO: 27177 - DNA, 22 bp, synthetic construct
  misc_feature 1..22: note = chemically synthesized
  source 1..22: mol_type = other DNA
attatactattttgctgagaaa

SEQ ID NO: 27178 - DNA, 22 bp, synthetic construct
  misc_feature 1..22: note = chemically synthesized
  source 1..22: mol_type = other DNA
tactattttgctgagaaaaatt

SEQ ID NO: 27179 - DNA, 22 bp, synthetic construct
  misc_feature 1..22: note = chemically synthesized
  source 1..22: mol_type = other DNA
ttttgctgagaaaaattttaaa

SEQ ID NO: 27180 - DNA, 22 bp, synthetic construct
  misc_feature 1..22: note = chemically synthesized
  source 1..22: mol_type = other DNA
tgctgagaaaaattttaaaaca

SEQ ID NO: 27181 - DNA, 22 bp, synthetic construct
  misc_feature 1..22: note = chemically synthesized
  source 1..22: mol_type = other DNA
gctgagaaaaattttaaaacaa

SEQ ID NO: 27182 - DNA, 22 bp, synthetic construct
  misc_feature 1..22: note = chemically synthesized
  source 1..22: mol_type = other DNA
ctgagaaaaattttaaaacaaa

SEQ ID NO: 27183 - DNA, 22 bp, synthetic construct
  misc_feature 1..22: note = chemically synthesized
  source 1..22: mol_type = other DNA
agaaaaattttaaaacaaaaaa

SEQ ID NO: 27184 - DNA, 22 bp, synthetic construct
  misc_feature 1..22: note = chemically synthesized
  source 1..22: mol_type = other DNA
taaaacaaaaaatgtaaatatt

SEQ ID NO: 27185 - DNA, 22 bp, synthetic construct
  misc_feature 1..22: note = chemically synthesized
  source 1..22: mol_type = other DNA
aaaacaaaaaatgtaaatatta

SEQ ID NO: 27186 - DNA, 22 bp, synthetic construct
  misc_feature 1..22: note = chemically synthesized
  source 1..22: mol_type = other DNA
aaacaaaaaatgtaaatattaa

SEQ ID NO: 27187 - DNA, 22 bp, synthetic construct
  misc_feature 1..22: note = chemically synthesized
  source 1..22: mol_type = other DNA
actttttatttctatgttgtca

SEQ ID NO: 27188 - DNA, 22 bp, synthetic construct
  misc_feature 1..22: note = chemically synthesized
  source 1..22: mol_type = other DNA
tttatttctatgttgtcataat

SEQ ID NO: 27189 - DNA, 22 bp, synthetic construct
  misc_feature 1..22: note = chemically synthesized
  source 1..22: mol_type = other DNA
ttatttctatgttgtcataata

SEQ ID NO: 27190 - DNA, 22 bp, synthetic construct
  misc_feature 1..22: note = chemically synthesized
  source 1..22: mol_type = other DNA
tatttctatgttgtcataatat

SEQ ID NO: 27191 - DNA, 22 bp, synthetic construct
  misc_feature 1..22: note = chemically synthesized
  source 1..22: mol_type = other DNA
atttctatgttgtcataatatg

SEQ ID NO: 27192 - DNA, 22 bp, synthetic construct
  misc_feature 1..22: note = chemically synthesized
  source 1..22: mol_type = other DNA
tttctatgttgtcataatatgg

SEQ ID NO: 27193 - DNA, 22 bp, synthetic construct
  misc_feature 1..22: note = chemically synthesized
  source 1..22: mol_type = other DNA
ctatgttgtcataatatggatt

SEQ ID NO: 27194 - DNA, 22 bp, synthetic construct
  misc_feature 1..22: note = chemically synthesized
  source 1..22: mol_type = other DNA
tatgttgtcataatatggattt

SEQ ID NO: 27195 - DNA, 22 bp, synthetic construct
  misc_feature 1..22: note = chemically synthesized
  source 1..22: mol_type = other DNA
tgttgtcataatatggatttta

SEQ ID NO: 27196 - DNA, 22 bp, synthetic construct
  misc_feature 1..22: note = chemically synthesized
  source 1..22: mol_type = other DNA
tcataatatggattttaaattt

SEQ ID NO: 27197 - DNA, 22 bp, synthetic construct
  misc_feature 1..22: note = chemically synthesized
  source 1..22: mol_type = other DNA
taaattttaatttaaatgcaca

SEQ ID NO: 27198 - DNA, 22 bp, synthetic construct
  misc_feature 1..22: note = chemically synthesized
  source 1..22: mol_type = other DNA
aaattttaatttaaatgcacat

SEQ ID NO: 27199 - DNA, 22 bp, synthetic construct
  misc_feature 1..22: note = chemically synthesized
  source 1..22: mol_type = other DNA
aattttaatttaaatgcacatt

SEQ ID NO: 27200 - DNA, 22 bp, synthetic construct
  misc_feature 1..22: note = chemically synthesized
  source 1..22: mol_type = other DNA
taatttaaatgcacattccatg

SEQ ID NO: 27201 - DNA, 22 bp, synthetic construct
  misc_feature 1..22: note = chemically synthesized
  source 1..22: mol_type = other DNA
aatttaaatgcacattccatgg

SEQ ID NO: 27202 - DNA, 22 bp, synthetic construct
  misc_feature 1..22: note = chemically synthesized
  source 1..22: mol_type = other DNA
atttaaatgcacattccatggc

SEQ ID NO: 27203 - DNA, 22 bp, synthetic construct
  misc_feature 1..22: note = chemically synthesized
  source 1..22: mol_type = other DNA
aaatgcacattccatggcaatg

SEQ ID NO: 27204 - DNA, 22 bp, synthetic construct
  misc_feature 1..22: note = chemically synthesized
  source 1..22: mol_type = other DNA
aatgcacattccatggcaatgg

SEQ ID NO: 27205 - DNA, 22 bp, synthetic construct
  misc_feature 1..22: note = chemically synthesized
  source 1..22: mol_type = other DNA
catggcaatggctaatattttc

SEQ ID NO: 27206 - DNA, 22 bp, synthetic construct
  misc_feature 1..22: note = chemically synthesized
  source 1..22: mol_type = other DNA
atattttcaactttctccctct

SEQ ID NO: 27207 - DNA, 22 bp, synthetic construct
  misc_feature 1..22: note = chemically synthesized
  source 1..22: mol_type = other DNA
tcaactttctccctcttcaaca

SEQ ID NO: 27208 - DNA, 22 bp, synthetic construct
  misc_feature 1..22: note = chemically synthesized
  source 1..22: mol_type = other DNA
caactttctccctcttcaacac

SEQ ID NO: 27209 - DNA, 22 bp, synthetic construct
  misc_feature 1..22: note = chemically synthesized
  source 1..22: mol_type = other DNA
aactttctccctcttcaacaca

SEQ ID NO: 27210 - DNA, 22 bp, synthetic construct
  misc_feature 1..22: note = chemically synthesized
  source 1..22: mol_type = other DNA
tctccctcttcaacacatacac

SEQ ID NO: 27211 - DNA, 22 bp, synthetic construct
  misc_feature 1..22: note = chemically synthesized
  source 1..22: mol_type = other DNA
ctccctcttcaacacatacaca

SEQ ID NO: 27212 - DNA, 22 bp, synthetic construct
  misc_feature 1..22: note = chemically synthesized
  source 1..22: mol_type = other DNA
tccctcttcaacacatacacaa

SEQ ID NO: 27213 - DNA, 22 bp, synthetic construct
  misc_feature 1..22: note = chemically synthesized
  source 1..22: mol_type = other DNA
cctcttcaacacatacacaagt

SEQ ID NO: 27214 - DNA, 22 bp, synthetic construct
  misc_feature 1..22: note = chemically synthesized
  source 1..22: mol_type = other DNA
ttcaacacatacacaagtctgt

SEQ ID NO: 27215 - DNA, 22 bp, synthetic construct
  misc_feature 1..22: note = chemically synthesized
  source 1..22: mol_type = other DNA
caacacatacacaagtctgtat

SEQ ID NO: 27216 - DNA, 22 bp, synthetic construct
  misc_feature 1..22: note = chemically synthesized
  source 1..22: mol_type = other DNA
aacacatacacaagtctgtatt

SEQ ID NO: 27217 - DNA, 22 bp, synthetic construct
  misc_feature 1..22: note = chemically synthesized
  source 1..22: mol_type = other DNA
tattcatagcctgttgtaatag

SEQ ID NO: 27218 - DNA, 22 bp, synthetic construct
  misc_feature 1..22: note = chemically synthesized
  source 1..22: mol_type = other DNA
atagcctgttgtaatagacaag

SEQ ID NO: 27219 - DNA, 22 bp, synthetic construct
  misc_feature 1..22: note = chemically synthesized
  source 1..22: mol_type = other DNA
ttgtaatagacaaggttaaatg

SEQ ID NO: 27220 - DNA, 22 bp, synthetic construct
  misc_feature 1..22: note = chemically synthesized
  source 1..22: mol_type = other DNA
taatagacaaggttaaatgtag

SEQ ID NO: 27221 - DNA, 22 bp, synthetic construct
  misc_feature 1..22: note = chemically synthesized
  source 1..22: mol_type = other DNA
aatgtagcctaaatatatattc

SEQ ID NO: 27222 - DNA, 22 bp, synthetic construct
  misc_feature 1..22: note = chemically synthesized
  source 1..22: mol_type = other DNA
aatatatattccgtttaaatgc

SEQ ID NO: 27223 - DNA, 22 bp, synthetic construct
  misc_feature 1..22: note = chemically synthesized
  source 1..22: mol_type = other DNA
cgtttaaatgctttcctcactc

SEQ ID NO: 27224 - DNA, 22 bp, synthetic construct
  misc_feature 1..22: note = chemically synthesized
  source 1..22: mol_type = other DNA
aaatgctttcctcactcactag

SEQ ID NO: 27225 - DNA, 22 bp, synthetic construct
  misc_feature 1..22: note = chemically synthesized
  source 1..22: mol_type = other DNA
aatgctttcctcactcactagc

SEQ ID NO: 27226 - DNA, 22 bp, synthetic construct
  misc_feature 1..22: note = chemically synthesized
  source 1..22: mol_type = other DNA
tcctcactcactagcaattggt

SEQ ID NO: 27227 - DNA, 22 bp, synthetic construct
  misc_feature 1..22: note = chemically synthesized
  source 1..22: mol_type = other DNA
cctcactcactagcaattggtt

SEQ ID NO: 27228 - DNA, 22 bp, synthetic construct
  misc_feature 1..22: note = chemically synthesized
  source 1..22: mol_type = other DNA
ctcactcactagcaattggtta

SEQ ID NO: 27229 - DNA, 22 bp, synthetic construct
  misc_feature 1..22: note = chemically synthesized
  source 1..22: mol_type = other DNA
actcactagcaattggttatca

SEQ ID NO: 27230 - DNA, 22 bp, synthetic construct
  misc_feature 1..22: note = chemically synthesized
  source 1..22: mol_type = other DNA
actagcaattggttatcactag

SEQ ID NO: 27231 - DNA, 22 bp, synthetic construct
  misc_feature 1..22: note = chemically synthesized
  source 1..22: mol_type = other DNA
gcaattggttatcactagagag

SEQ ID NO: 27232 - DNA, 22 bp, synthetic construct
  misc_feature 1..22: note = chemically synthesized
  source 1..22: mol_type = other DNA
gttatcactagagagttatctg

SEQ ID NO: 27233 - DNA, 22 bp, synthetic construct
  misc_feature 1..22: note = chemically synthesized
  source 1..22: mol_type = other DNA
tcactagagagttatctgtgaa

SEQ ID NO: 27234 - DNA, 22 bp, synthetic construct
  misc_feature 1..22: note = chemically synthesized
  source 1..22: mol_type = other DNA
gagagttatctgtgaaatctta

SEQ ID NO: 27235 - DNA, 22 bp, synthetic construct
  misc_feature 1..22: note = chemically synthesized
  source 1..22: mol_type = other DNA
tctgtgaaatcttactctacat

SEQ ID NO: 27236 - DNA, 22 bp, synthetic construct
  misc_feature 1..22: note = chemically synthesized
  source 1..22: mol_type = other DNA
tgaaatcttactctacattcct

SEQ ID NO: 27237 - DNA, 22 bp, synthetic construct
  misc_feature 1..22: note = chemically synthesized
  source 1..22: mol_type = other DNA
actctacattcctcagtcacct

SEQ ID NO: 27238 - DNA, 22 bp, synthetic construct
  misc_feature 1..22: note = chemically synthesized
  source 1..22: mol_type = other DNA
ctctacattcctcagtcaccta

SEQ ID NO: 27239 - DNA, 22 bp, synthetic construct
  misc_feature 1..22: note = chemically synthesized
  source 1..22: mol_type = other DNA
tacattcctcagtcacctagtg

SEQ ID NO: 27240 - DNA, 22 bp, synthetic construct
  misc_feature 1..22: note = chemically synthesized
  source 1..22: mol_type = other DNA
cattcctcagtcacctagtgaa

SEQ ID NO: 27241 - DNA, 22 bp, synthetic construct
  misc_feature 1..22: note = chemically synthesized
  source 1..22: mol_type = other DNA
ctcagtcacctagtgaaggtgt

SEQ ID NO: 27242 - DNA, 22 bp, synthetic construct
  misc_feature 1..22: note = chemically synthesized
  source 1..22: mol_type = other DNA
agtcacctagtgaaggtgtact

SEQ ID NO: 27243 - DNA, 22 bp, synthetic construct
  misc_feature 1..22: note = chemically synthesized
  source 1..22: mol_type = other DNA
gtgaaggtgtactgatccacct

SEQ ID NO: 27244 - DNA, 22 bp, synthetic construct
  misc_feature 1..22: note = chemically synthesized
  source 1..22: mol_type = other DNA
atccaccttcaggagcagtaca

SEQ ID NO: 27245 - DNA, 22 bp, synthetic construct
  misc_feature 1..22: note = chemically synthesized
  source 1..22: mol_type = other DNA
caggagcagtacaaacctttat

SEQ ID NO: 27246 - DNA, 22 bp, synthetic construct
  misc_feature 1..22: note = chemically synthesized
  source 1..22: mol_type = other DNA
aggagcagtacaaacctttatt

SEQ ID NO: 27247 - DNA, 22 bp, synthetic construct
  misc_feature 1..22: note = chemically synthesized
  source 1..22: mol_type = other DNA
tattggtcacttcccaagcaac

SEQ ID NO: 27248 - DNA, 22 bp, synthetic construct
  misc_feature 1..22: note = chemically synthesized
  source 1..22: mol_type = other DNA
attggtcacttcccaagcaact

SEQ ID NO: 27249 - DNA, 22 bp, synthetic construct
  misc_feature 1..22: note = chemically synthesized
  source 1..22: mol_type = other DNA
ttggtcacttcccaagcaactt

SEQ ID NO: 27250 - DNA, 22 bp, synthetic construct
  misc_feature 1..22: note = chemically synthesized
  source 1..22: mol_type = other DNA
gtcacttcccaagcaacttcaa

SEQ ID NO: 27251 - DNA, 22 bp, synthetic construct
  misc_feature 1..22: note = chemically synthesized
  source 1..22: mol_type = other DNA
cccaagcaacttcaaagagcag

SEQ ID NO: 27252 - DNA, 22 bp, synthetic construct
  misc_feature 1..22: note = chemically synthesized
  source 1..22: mol_type = other DNA
ccaagcaacttcaaagagcagt

SEQ ID NO: 27253 - DNA, 22 bp, synthetic construct
  misc_feature 1..22: note = chemically synthesized
  source 1..22: mol_type = other DNA
caaagagcagtaactcctccac

SEQ ID NO: 27254 - DNA, 22 bp, synthetic construct
  misc_feature 1..22: note = chemically synthesized
  source 1..22: mol_type = other DNA
aaagagcagtaactcctccaca

SEQ ID NO: 27255 - DNA, 22 bp, synthetic construct
  misc_feature 1..22: note = chemically synthesized
  source 1..22: mol_type = other DNA
ctccacaggaagttcttcgact

SEQ ID NO: 27256 - DNA, 22 bp, synthetic construct
  misc_feature 1..22: note = chemically synthesized
  source 1..22: mol_type = other DNA
cacaggaagttcttcgacttcc

SEQ ID NO: 27257 - DNA, 22 bp, synthetic construct
  misc_feature 1..22: note = chemically synthesized
  source 1..22: mol_type = other DNA
ttcgacttcccactggggaagc

SEQ ID NO: 27258 - DNA, 22 bp, synthetic construct
  misc_feature 1..22: note = chemically synthesized
  source 1..22: mol_type = other DNA
cgacttcccactggggaagccc

SEQ ID NO: 27259 - DNA, 22 bp, synthetic construct
  misc_feature 1..22: note = chemically synthesized
  source 1..22: mol_type = other DNA
gacttcccactggggaagccca

SEQ ID NO: 27260 - DNA, 22 bp, synthetic construct
  misc_feature 1..22: note = chemically synthesized
  source 1..22: mol_type = other DNA
cccactggggaagcccacccag

SEQ ID NO: 27261 - DNA, 22 bp, synthetic construct
  misc_feature 1..22: note = chemically synthesized
  source 1..22: mol_type = other DNA
ccactggggaagcccacccagg

SEQ ID NO: 27262 - DNA, 22 bp, synthetic construct
  misc_feature 1..22: note = chemically synthesized
  source 1..22: mol_type = other DNA
gggaagcccacccagggatgtt

SEQ ID NO: 27263 - DNA, 22 bp, synthetic construct
  misc_feature 1..22: note = chemically synthesized
  source 1..22: mol_type = other DNA
cagagagggatcggcctcgaag

SEQ ID NO: 27264 - DNA, 22 bp, synthetic construct
  misc_feature 1..22: note = chemically synthesized
  source 1..22: mol_type = other DNA
gaagcattcttcttacagtcct

SEQ ID NO: 27265 - DNA, 22 bp, synthetic construct
  misc_feature 1..22: note = chemically synthesized
  source 1..22: mol_type = other DNA
ttcttacagtcctccgagactc

SEQ ID NO: 27266 - DNA, 22 bp, synthetic construct
  misc_feature 1..22: note = chemically synthesized
  source 1..22: mol_type = other DNA
cttacagtcctccgagactcct

SEQ ID NO: 27267 - DNA, 22 bp, synthetic construct
  misc_feature 1..22: note = chemically synthesized
  source 1..22: mol_type = other DNA
ttacagtcctccgagactcctt

SEQ ID NO: 27268 - DNA, 22 bp, synthetic construct
  misc_feature 1..22: note = chemically synthesized
  source 1..22: mol_type = other DNA
acagtcctccgagactcctttg

SEQ ID NO: 27269 - DNA, 22 bp, synthetic construct
  misc_feature 1..22: note = chemically synthesized
  source 1..22: mol_type = other DNA
cagtcctccgagactcctttga

SEQ ID NO: 27270 - DNA, 22 bp, synthetic construct
  misc_feature 1..22: note = chemically synthesized
  source 1..22: mol_type = other DNA
cgagactcctttgaattcctgt

SEQ ID NO: 27271 - DNA, 22 bp, synthetic construct
  misc_feature 1..22: note = chemically synthesized
  source 1..22: mol_type = other DNA
ctttgaattcctgtttcaatta

SEQ ID NO: 27272 - DNA, 22 bp, synthetic construct
  misc_feature 1..22: note = chemically synthesized
  source 1..22: mol_type = other DNA
tgaattcctgtttcaattagtt

SEQ ID NO: 27273 - DNA, 22 bp, synthetic construct
  misc_feature 1..22: note = chemically synthesized
  source 1..22: mol_type = other DNA
gaattcctgtttcaattagttg

SEQ ID NO: 27274 - DNA, 22 bp, synthetic construct
  misc_feature 1..22: note = chemically synthesized
  source 1..22: mol_type = other DNA
aattcctgtttcaattagttgt

SEQ ID NO: 27275 - DNA, 22 bp, synthetic construct
  misc_feature 1..22: note = chemically synthesized
  source 1..22: mol_type = other DNA
ctgtttcaattagttgtaatcc

SEQ ID NO: 27276 - DNA, 22 bp, synthetic construct
  misc_feature 1..22: note = chemically synthesized
  source 1..22: mol_type = other DNA
tttcaattagttgtaatcccag

SEQ ID NO: 27277 - DNA, 22 bp, synthetic construct
  misc_feature 1..22: note = chemically synthesized
  source 1..22: mol_type = other DNA
caattagttgtaatcccaggag

SEQ ID NO: 27278 - DNA, 22 bp, synthetic construct
  misc_feature 1..22: note = chemically synthesized
  source 1..22: mol_type = other DNA
aattagttgtaatcccaggaga

SEQ ID NO: 27279 - DNA, 22 bp, synthetic construct
  misc_feature 1..22: note = chemically synthesized
  source 1..22: mol_type = other DNA
gttgtaatcccaggagaagaga

SEQ ID NO: 27280 - DNA, 22 bp, synthetic construct
  misc_feature 1..22: note = chemically synthesized
  source 1..22: mol_type = other DNA
taatcccaggagaagagaactt

SEQ ID NO: 27281 - DNA, 22 bp, synthetic construct
  misc_feature 1..22: note = chemically synthesized
  source 1..22: mol_type = other DNA
acaggcacaaaagttagagttg

SEQ ID NO: 27282 - DNA, 22 bp, synthetic construct
  misc_feature 1..22: note = chemically synthesized
  source 1..22: mol_type = other DNA
caggcacaaaagttagagttgg

SEQ ID NO: 27283 - DNA, 22 bp, synthetic construct
  misc_feature 1..22: note = chemically synthesized
  source 1..22: mol_type = other DNA
gagttggtagagttaccaggct

SEQ ID NO: 27284 - DNA, 22 bp, synthetic construct
  misc_feature 1..22: note = chemically synthesized
  source 1..22: mol_type = other DNA
gtagagttaccaggctttggta

SEQ ID NO: 27285 - DNA, 22 bp, synthetic construct
  misc_feature 1..22: note = chemically synthesized
  source 1..22: mol_type = other DNA
ccaggctttggtagcttctctt

SEQ ID NO: 27286 - DNA, 22 bp, synthetic construct
  misc_feature 1..22: note = chemically synthesized
  source 1..22: mol_type = other DNA
tggtagcttctcttgggaataa

SEQ ID NO: 27287 - DNA, 22 bp, synthetic construct
  misc_feature 1..22: note = chemically synthesized
  source 1..22: mol_type = other DNA
ggtagcttctcttgggaataaa

SEQ ID NO: 27288 - DNA, 22 bp, synthetic construct
  misc_feature 1..22: note = chemically synthesized
  source 1..22: mol_type = other DNA
gtagcttctcttgggaataaac

SEQ ID NO: 27289 - DNA, 22 bp, synthetic construct
  misc_feature 1..22: note = chemically synthesized
  source 1..22: mol_type = other DNA
ctcttgggaataaactagtagc

SEQ ID NO: 27290 - DNA, 22 bp, synthetic construct
  misc_feature 1..22: note = chemically synthesized
  source 1..22: mol_type = other DNA
tcttgggaataaactagtagca

SEQ ID NO: 27291 - DNA, 22 bp, synthetic construct
  misc_feature 1..22: note = chemically synthesized
  source 1..22: mol_type = other DNA
ttgggaataaactagtagcatg

SEQ ID NO: 27292 - DNA, 22 bp, synthetic construct
  misc_feature 1..22: note = chemically synthesized
  source 1..22: mol_type = other DNA
gggaataaactagtagcatgaa

SEQ ID NO: 27293 - DNA, 22 bp, synthetic construct
  misc_feature 1..22: note = chemically synthesized
  source 1..22: mol_type = other DNA
ggaataaactagtagcatgaaa

SEQ ID NO: 27294 - DNA, 22 bp, synthetic construct
  misc_feature 1..22: note = chemically synthesized
  source 1..22: mol_type = other DNA
gtagcatgaaatcttatgtgct

SEQ ID NO: 27295 - DNA, 22 bp, synthetic construct
  misc_feature 1..22: note = chemically synthesized
  source 1..22: mol_type = other DNA
atgtgcttcccacagaattcct

SEQ ID NO: 27296 - DNA, 22 bp, synthetic construct
  misc_feature 1..22: note = chemically synthesized
  source 1..22: mol_type = other DNA
tgtgcttcccacagaattcctg

SEQ ID NO: 27297 - DNA, 22 bp, synthetic construct
  misc_feature 1..22: note = chemically synthesized
  source 1..22: mol_type = other DNA
cccacagaattcctggtggaag

SEQ ID NO: 27298 - DNA, 22 bp, synthetic construct
  misc_feature 1..22: note = chemically synthesized
  source 1..22: mol_type = other DNA
ccacagaattcctggtggaagg

SEQ ID NO: 27299 - DNA, 22 bp, synthetic construct
  misc_feature 1..22: note = chemically synthesized
  source 1..22: mol_type = other DNA
ctggtggaaggaggaattcttc

SEQ ID NO: 27300 - DNA, 22 bp, synthetic construct
  misc_feature 1..22: note = chemically synthesized
  source 1..22: mol_type = other DNA
gtggaaggaggaattcttcctc

SEQ ID NO: 27301 - DNA, 22 bp, synthetic construct
  misc_feature 1..22: note = chemically synthesized
  source 1..22: mol_type = other DNA
ttcctcctctttctcgtctttc

SEQ ID NO: 27302 - DNA, 22 bp, synthetic construct
  misc_feature 1..22: note = chemically synthesized
  source 1..22: mol_type = other DNA
cctcctctttctcgtctttctg

SEQ ID NO: 27303 - DNA, 22 bp, synthetic construct
  misc_feature 1..22: note = chemically synthesized
  source 1..22: mol_type = other DNA
ctcctctttctcgtctttctgg

SEQ ID NO: 27304 - DNA, 22 bp, synthetic construct
  misc_feature 1..22: note = chemically synthesized
  source 1..22: mol_type = other DNA
ctctttctcgtctttctgggca

SEQ ID NO: 27305 - DNA, 22 bp, synthetic construct
  misc_feature 1..22: note = chemically synthesized
  source 1..22: mol_type = other DNA
tttctcgtctttctgggcaggt

SEQ ID NO: 27306 - DNA, 22 bp, synthetic construct
  misc_feature 1..22: note = chemically synthesized
  source 1..22: mol_type = other DNA
tctcgtctttctgggcaggtat

SEQ ID NO: 27307 - DNA, 22 bp, synthetic construct
  misc_feature 1..22: note = chemically synthesized
  source 1..22: mol_type = other DNA
ctcgtctttctgggcaggtatt

SEQ ID NO: 27308 - DNA, 22 bp, synthetic construct
  misc_feature 1..22: note = chemically synthesized
  source 1..22: mol_type = other DNA
tcgtctttctgggcaggtattg

SEQ ID NO: 27309 - DNA, 22 bp, synthetic construct
  misc_feature 1..22: note = chemically synthesized
  source 1..22: mol_type = other DNA
gtctttctgggcaggtattgtg

SEQ ID NO: 27310 - DNA, 22 bp, synthetic construct
  misc_feature 1..22: note = chemically synthesized
  source 1..22: mol_type = other DNA
tctgggcaggtattgtgaggac

SEQ ID NO: 27311 - DNA, 22 bp, synthetic construct
  misc_feature 1..22: note = chemically synthesized
  source 1..22: mol_type = other DNA
ctgggcaggtattgtgaggacg

SEQ ID NO: 27312 - DNA, 22 bp, synthetic construct
  misc_feature 1..22: note = chemically synthesized
  source 1..22: mol_type = other DNA
tgggcaggtattgtgaggacgg

SEQ ID NO: 27313 - DNA, 22 bp, synthetic construct
  misc_feature 1..22: note = chemically synthesized
  source 1..22: mol_type = other DNA
ggcaggtattgtgaggacggta

SEQ ID NO: 27314 - DNA, 22 bp, synthetic construct
  misc_feature 1..22: note = chemically synthesized
  source 1..22: mol_type = other DNA
tgaggacggtatctgccctgtc

SEQ ID NO: 27315 - DNA, 22 bp, synthetic construct
  misc_feature 1..22: note = chemically synthesized
  source 1..22: mol_type = other DNA
acagggcagataccgtcctcac

SEQ ID NO: 27316 - DNA, 22 bp, synthetic construct
  misc_feature 1..22: note = chemically synthesized
  source 1..22: mol_type = other DNA
acaatacctgcccagaaagacg

SEQ ID NO: 27317 - DNA, 22 bp, synthetic construct
  misc_feature 1..22: note = chemically synthesized
  source 1..22: mol_type = other DNA
cccagaaagacgagaaagagga

SEQ ID NO: 27318 - DNA, 22 bp, synthetic construct
  misc_feature 1..22: note = chemically synthesized
  source 1..22: mol_type = other DNA
ctccttccaccaggaattctgt

SEQ ID NO: 27319 - DNA, 22 bp, synthetic construct
  misc_feature 1..22: note = chemically synthesized
  source 1..22: mol_type = other DNA
cttccaccaggaattctgtggg

SEQ ID NO: 27320 - DNA, 22 bp, synthetic construct
  misc_feature 1..22: note = chemically synthesized
  source 1..22: mol_type = other DNA
ccaccaggaattctgtgggaag

SEQ ID NO: 27321 - DNA, 22 bp, synthetic construct
  misc_feature 1..22: note = chemically synthesized
  source 1..22: mol_type = other DNA
caccaggaattctgtgggaagc

SEQ ID NO: 27322 - DNA, 22 bp, synthetic construct
  misc_feature 1..22: note = chemically synthesized
  source 1..22: mol_type = other DNA
tgtgggaagcacataagatttc

SEQ ID NO: 27323 - DNA, 22 bp, synthetic construct
  misc_feature 1..22: note = chemically synthesized
  source 1..22: mol_type = other DNA
tgggaagcacataagatttcat

SEQ ID NO: 27324 - DNA, 22 bp, synthetic construct
  misc_feature 1..22: note = chemically synthesized
  source 1..22: mol_type = other DNA
catgctactagtttattcccaa

SEQ ID NO: 27325 - DNA, 22 bp, synthetic construct
  misc_feature 1..22: note = chemically synthesized
  source 1..22: mol_type = other DNA
atgctactagtttattcccaag

SEQ ID NO: 27326 - DNA, 22 bp, synthetic construct
  misc_feature 1..22: note = chemically synthesized
  source 1..22: mol_type = other DNA
ctagtttattcccaagagaagc

SEQ ID NO: 27327 - DNA, 22 bp, synthetic construct
  misc_feature 1..22: note = chemically synthesized
  source 1..22: mol_type = other DNA
gtttattcccaagagaagctac

SEQ ID NO: 27328 - DNA, 22 bp, synthetic construct
  misc_feature 1..22: note = chemically synthesized
  source 1..22: mol_type = other DNA
attcccaagagaagctaccaaa

SEQ ID NO: 27329 - DNA, 22 bp, synthetic construct
  misc_feature 1..22: note = chemically synthesized
  source 1..22: mol_type = other DNA
ttcccaagagaagctaccaaag

SEQ ID NO: 27330 - DNA, 22 bp, synthetic construct
  misc_feature 1..22: note = chemically synthesized
  source 1..22: mol_type = other DNA
ccaagagaagctaccaaagcct

SEQ ID NO: 27331 - DNA, 22 bp, synthetic construct
  misc_feature 1..22: note = chemically synthesized
  source 1..22: mol_type = other DNA
ccaaagcctggtaactctacca

SEQ ID NO: 27332 - DNA, 22 bp, synthetic construct
  misc_feature 1..22: note = chemically synthesized
  source 1..22: mol_type = other DNA
gtaactctaccaactctaactt

SEQ ID NO: 27333 - DNA, 22 bp, synthetic construct
  misc_feature 1..22: note = chemically synthesized
  source 1..22: mol_type = other DNA
taccaactctaacttttgtgcc

SEQ ID NO: 27334 - DNA, 22 bp, synthetic construct
  misc_feature 1..22: note = chemically synthesized
  source 1..22: mol_type = other DNA
ccaactctaacttttgtgcctg

SEQ ID NO: 27335 - DNA, 22 bp, synthetic construct
  misc_feature 1..22: note = chemically synthesized
  source 1..22: mol_type = other DNA
taacttttgtgcctgtaagttc

SEQ ID NO: 27336 - DNA, 22 bp, synthetic construct
  misc_feature 1..22: note = chemically synthesized
  source 1..22: mol_type = other DNA
acttttgtgcctgtaagttctc

SEQ ID NO: 27337 - DNA, 22 bp, synthetic construct
  misc_feature 1..22: note = chemically synthesized
  source 1..22: mol_type = other DNA
ttgtgcctgtaagttctcttct

SEQ ID NO: 27338 - DNA, 22 bp, synthetic construct
  misc_feature 1..22: note = chemically synthesized
  source 1..22: mol_type = other DNA
tgtgcctgtaagttctcttctc

SEQ ID NO: 27339 - DNA, 22 bp, synthetic construct
  misc_feature 1..22: note = chemically synthesized
  source 1..22: mol_type = other DNA
gtgcctgtaagttctcttctcc

SEQ ID NO: 27340 - DNA, 22 bp, synthetic construct
  misc_feature 1..22: note = chemically synthesized
  source 1..22: mol_type = other DNA
tgcctgtaagttctcttctcct

SEQ ID NO: 27341 - DNA, 22 bp, synthetic construct
  misc_feature 1..22: note = chemically synthesized
  source 1..22: mol_type = other DNA
taagttctcttctcctgggatt

SEQ ID NO: 27342 - DNA, 22 bp, synthetic construct
  misc_feature 1..22: note = chemically synthesized
  source 1..22: mol_type = other DNA
tcttctcctgggattacaacta

SEQ ID NO: 27343 - DNA, 22 bp, synthetic construct
  misc_feature 1..22: note = chemically synthesized
  source 1..22: mol_type = other DNA
ttctcctgggattacaactaat

SEQ ID NO: 27344 - DNA, 22 bp, synthetic construct
  misc_feature 1..22: note = chemically synthesized
  source 1..22: mol_type = other DNA
ctcctgggattacaactaattg

SEQ ID NO: 27345 - DNA, 22 bp, synthetic construct
  misc_feature 1..22: note = chemically synthesized
  source 1..22: mol_type = other DNA
tcctgggattacaactaattga

SEQ ID NO: 27346 - DNA, 22 bp, synthetic construct
  misc_feature 1..22: note = chemically synthesized
  source 1..22: mol_type = other DNA
ctgggattacaactaattgaaa

SEQ ID NO: 27347 - DNA, 22 bp, synthetic construct
  misc_feature 1..22: note = chemically synthesized
  source 1..22: mol_type = other DNA
ggattacaactaattgaaacag

SEQ ID NO: 27348 - DNA, 22 bp, synthetic construct
  misc_feature 1..22: note = chemically synthesized
  source 1..22: mol_type = other DNA
caactaattgaaacaggaattc

SEQ ID NO: 27349 - DNA, 22 bp, synthetic construct
  misc_feature 1..22: note = chemically synthesized
  source 1..22: mol_type = other DNA
attgaaacaggaattcaaagga

SEQ ID NO: 27350 - DNA, 22 bp, synthetic construct
  misc_feature 1..22: note = chemically synthesized
  source 1..22: mol_type = other DNA
aaacaggaattcaaaggagtct

SEQ ID NO: 27351 - DNA, 22 bp, synthetic construct
  misc_feature 1..22: note = chemically synthesized
  source 1..22: mol_type = other DNA
aaaggagtctcggaggactgta

SEQ ID NO: 27352 - DNA, 22 bp, synthetic construct
  misc_feature 1..22: note = chemically synthesized
  source 1..22: mol_type = other DNA
ggaggactgtaagaagaatgct

SEQ ID NO: 27353 - DNA, 22 bp, synthetic construct
  misc_feature 1..22: note = chemically synthesized
  source 1..22: mol_type = other DNA
taagaagaatgcttcgaggccg

SEQ ID NO: 27354 - DNA, 22 bp, synthetic construct
  misc_feature 1..22: note = chemically synthesized
  source 1..22: mol_type = other DNA
cgaggccgatccctctctgtaa

SEQ ID NO: 27355 - DNA, 22 bp, synthetic construct
  misc_feature 1..22: note = chemically synthesized
  source 1..22: mol_type = other DNA
gaggccgatccctctctgtaac

SEQ ID NO: 27356 - DNA, 22 bp, synthetic construct
  misc_feature 1..22: note = chemically synthesized
  source 1..22: mol_type = other DNA
tctgtaacatccctgggtgggc

SEQ ID NO: 27357 - DNA, 22 bp, synthetic construct
  misc_feature 1..22: note = chemically synthesized
  source 1..22: mol_type = other DNA
tgtaacatccctgggtgggctt

SEQ ID NO: 27358 - DNA, 22 bp, synthetic construct
  misc_feature 1..22: note = chemically synthesized
  source 1..22: mol_type = other DNA
taacatccctgggtgggcttcc

SEQ ID NO: 27359 - DNA, 22 bp, synthetic construct
  misc_feature 1..22: note = chemically synthesized
  source 1..22: mol_type = other DNA
ggtgggcttccccagtgggaag

SEQ ID NO: 27360 - DNA, 22 bp, synthetic construct
  misc_feature 1..22: note = chemically synthesized
  source 1..22: mol_type = other DNA
ccccagtgggaagtcgaagaac

SEQ ID NO: 27361 - DNA, 22 bp, synthetic construct
  misc_feature 1..22: note = chemically synthesized
  source 1..22: mol_type = other DNA
cccagtgggaagtcgaagaact

SEQ ID NO: 27362 - DNA, 22 bp, synthetic construct
  misc_feature 1..22: note = chemically synthesized
  source 1..22: mol_type = other DNA
cctgtggaggagttactgctct

SEQ ID NO: 27363 - DNA, 22 bp, synthetic construct
  misc_feature 1..22: note = chemically synthesized
  source 1..22: mol_type = other DNA
ctgtggaggagttactgctctt

SEQ ID NO: 27364 - DNA, 22 bp, synthetic construct
  misc_feature 1..22: note = chemically synthesized
  source 1..22: mol_type = other DNA
tggaggagttactgctctttga

SEQ ID NO: 27365 - DNA, 22 bp, synthetic construct
  misc_feature 1..22: note = chemically synthesized
  source 1..22: mol_type = other DNA
ctgctctttgaagttgcttggg

SEQ ID NO: 27366 - DNA, 22 bp, synthetic construct
  misc_feature 1..22: note = chemically synthesized
  source 1..22: mol_type = other DNA
ctctttgaagttgcttgggaag

SEQ ID NO: 27367 - DNA, 22 bp, synthetic construct
  misc_feature 1..22: note = chemically synthesized
  source 1..22: mol_type = other DNA
tttgaagttgcttgggaagtga

SEQ ID NO: 27368 - DNA, 22 bp, synthetic construct
  misc_feature 1..22: note = chemically synthesized
  source 1..22: mol_type = other DNA
tgaagttgcttgggaagtgacc

SEQ ID NO: 27369 - DNA, 22 bp, synthetic construct
  misc_feature 1..22: note = chemically synthesized
  source 1..22: mol_type = other DNA
gaagttgcttgggaagtgacca

SEQ ID NO: 27370 - DNA, 22 bp, synthetic construct
  misc_feature 1..22: note = chemically synthesized
  source 1..22: mol_type = other DNA
aagttgcttgggaagtgaccaa

SEQ ID NO: 27371 - DNA, 22 bp, synthetic construct
  misc_feature 1..22: note = chemically synthesized
  source 1..22: mol_type = other DNA
cttgggaagtgaccaataaagg

SEQ ID NO: 27372 - DNA, 22 bp, synthetic construct
  misc_feature 1..22: note = chemically synthesized
  source 1..22: mol_type = other DNA
gggaagtgaccaataaaggttt

SEQ ID NO: 27373 - DNA, 22 bp, synthetic construct
  misc_feature 1..22: note = chemically synthesized
  source 1..22: mol_type = other DNA
ggaagtgaccaataaaggtttg

SEQ ID NO: 27374 - DNA, 22 bp, synthetic construct
  misc_feature 1..22: note = chemically synthesized
  source 1..22: mol_type = other DNA
gtactgctcctgaaggtggatc

SEQ ID NO: 27375 - DNA, 22 bp, synthetic construct
  misc_feature 1..22: note = chemically synthesized
  source 1..22: mol_type = other DNA
tactgctcctgaaggtggatca

SEQ ID NO: 27376 - DNA, 22 bp, synthetic construct
  misc_feature 1..22: note = chemically synthesized
  source 1..22: mol_type = other DNA
ctcctgaaggtggatcagtaca

SEQ ID NO: 27377 - DNA, 22 bp, synthetic construct
  misc_feature 1..22: note = chemically synthesized
  source 1..22: mol_type = other DNA
ctgaaggtggatcagtacacct

SEQ ID NO: 27378 - DNA, 22 bp, synthetic construct
  misc_feature 1..22: note = chemically synthesized
  source 1..22: mol_type = other DNA
aaggtggatcagtacaccttca

SEQ ID NO: 27379 - DNA, 22 bp, synthetic construct
  misc_feature 1..22: note = chemically synthesized
  source 1..22: mol_type = other DNA
cactaggtgactgaggaatgta

SEQ ID NO: 27380 - DNA, 22 bp, synthetic construct
  misc_feature 1..22: note = chemically synthesized
  source 1..22: mol_type = other DNA
actaggtgactgaggaatgtag

SEQ ID NO: 27381 - DNA, 22 bp, synthetic construct
  misc_feature 1..22: note = chemically synthesized
  source 1..22: mol_type = other DNA
ggtgactgaggaatgtagagta

SEQ ID NO: 27382 - DNA, 22 bp, synthetic construct
  misc_feature 1..22: note = chemically synthesized
  source 1..22: mol_type = other DNA
aggaatgtagagtaagatttca

SEQ ID NO: 27383 - DNA, 22 bp, synthetic construct
  misc_feature 1..22: note = chemically synthesized
  source 1..22: mol_type = other DNA
cacagataactctctagtgata

SEQ ID NO: 27384 - DNA, 22 bp, synthetic construct
  misc_feature 1..22: note = chemically synthesized
  source 1..22: mol_type = other DNA
acagataactctctagtgataa

SEQ ID NO: 27385 - DNA, 22 bp, synthetic construct
  misc_feature 1..22: note = chemically synthesized
  source 1..22: mol_type = other DNA
tctagtgataaccaattgctag

SEQ ID NO: 27386 - DNA, 22 bp, synthetic construct
  misc_feature 1..22: note = chemically synthesized
  source 1..22: mol_type = other DNA
tagtgataaccaattgctagtg

SEQ ID NO: 27387 - DNA, 22 bp, synthetic construct
  misc_feature 1..22: note = chemically synthesized
  source 1..22: mol_type = other DNA
gtgataaccaattgctagtgag

SEQ ID NO: 27388 - DNA, 22 bp, synthetic construct
  misc_feature 1..22: note = chemically synthesized
  source 1..22: mol_type = other DNA
ctagtgagtgaggaaagcattt

SEQ ID NO: 27389 - DNA, 22 bp, synthetic construct
  misc_feature 1..22: note = chemically synthesized
  source 1..22: mol_type = other DNA
gtgagtgaggaaagcatttaaa

SEQ ID NO: 27390 - DNA, 22 bp, synthetic construct
  misc_feature 1..22: note = chemically synthesized
  source 1..22: mol_type = other DNA
aaacggaatatatatttaggct

SEQ ID NO: 27391 - DNA, 22 bp, synthetic construct
  misc_feature 1..22: note = chemically synthesized
  source 1..22: mol_type = other DNA
aacggaatatatatttaggcta

SEQ ID NO: 27392 - DNA, 22 bp, synthetic construct
  misc_feature 1..22: note = chemically synthesized
  source 1..22: mol_type = other DNA
aggctacatttaaccttgtcta

SEQ ID NO: 27393 - DNA, 22 bp, synthetic construct
  misc_feature 1..22: note = chemically synthesized
  source 1..22: mol_type = other DNA
ggctacatttaaccttgtctat

SEQ ID NO: 27394 - DNA, 22 bp, synthetic construct
  misc_feature 1..22: note = chemically synthesized
  source 1..22: mol_type = other DNA
catttaaccttgtctattacaa

SEQ ID NO: 27395 - DNA, 22 bp, synthetic construct
  misc_feature 1..22: note = chemically synthesized
  source 1..22: mol_type = other DNA
aaccttgtctattacaacaggc

SEQ ID NO: 27396 - DNA, 22 bp, synthetic construct
  misc_feature 1..22: note = chemically synthesized
  source 1..22: mol_type = other DNA
accttgtctattacaacaggct

SEQ ID NO: 27397 - DNA, 22 bp, synthetic construct
  misc_feature 1..22: note = chemically synthesized
  source 1..22: mol_type = other DNA
gtctattacaacaggctatgaa

SEQ ID NO: 27398 - DNA, 22 bp, synthetic construct
  misc_feature 1..22: note = chemically synthesized
  source 1..22: mol_type = other DNA
tctattacaacaggctatgaat

SEQ ID NO: 27399 - DNA, 22 bp, synthetic construct
  misc_feature 1..22: note = chemically synthesized
  source 1..22: mol_type = other DNA
ttacaacaggctatgaatacag

SEQ ID NO: 27400 - DNA, 22 bp, synthetic construct
  misc_feature 1..22: note = chemically synthesized
  source 1..22: mol_type = other DNA
caacaggctatgaatacagact

SEQ ID NO: 27401 - DNA, 22 bp, synthetic construct
  misc_feature 1..22: note = chemically synthesized
  source 1..22: mol_type = other DNA
tgaatacagacttgtgtatgtg

SEQ ID NO: 27402 - DNA, 22 bp, synthetic construct
  misc_feature 1..22: note = chemically synthesized
  source 1..22: mol_type = other DNA
gtgtatgtgttgaagagggaga

SEQ ID NO: 27403 - DNA, 22 bp, synthetic construct
  misc_feature 1..22: note = chemically synthesized
  source 1..22: mol_type = other DNA
tgtatgtgttgaagagggagaa

SEQ ID NO: 27404 - DNA, 22 bp, synthetic construct
  misc_feature 1..22: note = chemically synthesized
  source 1..22: mol_type = other DNA
aagagggagaaagttgaaaata

SEQ ID NO: 27405 - DNA, 22 bp, synthetic construct
  misc_feature 1..22: note = chemically synthesized
  source 1..22: mol_type = other DNA
aaaatattagccattgccatgg

SEQ ID NO: 27406 - DNA, 22 bp, synthetic construct
  misc_feature 1..22: note = chemically synthesized
  source 1..22: mol_type = other DNA
gccattgccatggaatgtgcat

SEQ ID NO: 27407 - DNA, 22 bp, synthetic construct
  misc_feature 1..22: note = chemically synthesized
  source 1..22: mol_type = other DNA
ccatggaatgtgcatttaaatt

SEQ ID NO: 27408 - DNA, 22 bp, synthetic construct
  misc_feature 1..22: note = chemically synthesized
  source 1..22: mol_type = other DNA
aaattaaaatttaaaatccata

SEQ ID NO: 27409 - DNA, 22 bp, synthetic construct
  misc_feature 1..22: note = chemically synthesized
  source 1..22: mol_type = other DNA
aattaaaatttaaaatccatat

SEQ ID NO: 27410 - DNA, 22 bp, synthetic construct
  misc_feature 1..22: note = chemically synthesized
  source 1..22: mol_type = other DNA
aaatttaaaatccatattatga

SEQ ID NO: 27411 - DNA, 22 bp, synthetic construct
  misc_feature 1..22: note = chemically synthesized
  source 1..22: mol_type = other DNA
aaaatccatattatgacaacat

SEQ ID NO: 27412 - DNA, 22 bp, synthetic construct
  misc_feature 1..22: note = chemically synthesized
  source 1..22: mol_type = other DNA
aaatccatattatgacaacata

SEQ ID NO: 27413 - DNA, 22 bp, synthetic construct
  misc_feature 1..22: note = chemically synthesized
  source 1..22: mol_type = other DNA
tgacaacatagaaataaaaagt

SEQ ID NO: 27414 - DNA, 22 bp, synthetic construct
  misc_feature 1..22: note = chemically synthesized
  source 1..22: mol_type = other DNA
atatttacattttttgttttaa

SEQ ID NO: 27415 - DNA, 22 bp, synthetic construct
  misc_feature 1..22: note = chemically synthesized
  source 1..22: mol_type = other DNA
acattttttgttttaaaatttt

SEQ ID NO: 27416 - DNA, 22 bp, synthetic construct
  misc_feature 1..22: note = chemically synthesized
  source 1..22: mol_type = other DNA
cattttttgttttaaaattttt

SEQ ID NO: 27417 - DNA, 22 bp, synthetic construct
  misc_feature 1..22: note = chemically synthesized
  source 1..22: mol_type = other DNA
tttgttttaaaatttttctcag

SEQ ID NO: 27418 - DNA, 22 bp, synthetic construct
  misc_feature 1..22: note = chemically synthesized
  source 1..22: mol_type = other DNA
ttgttttaaaatttttctcagc

SEQ ID NO: 27419 - DNA, 22 bp, synthetic construct
  misc_feature 1..22: note = chemically synthesized
  source 1..22: mol_type = other DNA
tgttttaaaatttttctcagca

SEQ ID NO: 27420 - DNA, 22 bp, synthetic construct
  misc_feature 1..22: note = chemically synthesized
  source 1..22: mol_type = other DNA
gttttaaaatttttctcagcaa

SEQ ID NO: 27421 - DNA, 22 bp, synthetic construct
  misc_feature 1..22: note = chemically synthesized
  source 1..22: mol_type = other DNA
ttttaaaatttttctcagcaaa

SEQ ID NO: 27422 - DNA, 22 bp, synthetic construct
  misc_feature 1..22: note = chemically synthesized
  source 1..22: mol_type = other DNA
taaaatttttctcagcaaaata

SEQ ID NO: 27423 - DNA, 22 bp, synthetic construct
  misc_feature 1..22: note = chemically synthesized
  source 1..22: mol_type = other DNA
aaaatttttctcagcaaaatag

SEQ ID NO: 27424 - DNA, 22 bp, synthetic construct
  misc_feature 1..22: note = chemically synthesized
  source 1..22: mol_type = other DNA
aaatttttctcagcaaaatagt

SEQ ID NO: 27425 - DNA, 22 bp, synthetic construct
  misc_feature 1..22: note = chemically synthesized
  source 1..22: mol_type = other DNA
ttctcagcaaaatagtataatt

SEQ ID NO: 27426 - DNA, 22 bp, synthetic construct
  misc_feature 1..22: note = chemically synthesized
  source 1..22: mol_type = other DNA
tctcagcaaaatagtataatta

SEQ ID NO: 27427 - DNA, 22 bp, synthetic construct
  misc_feature 1..22: note = chemically synthesized
  source 1..22: mol_type = other DNA
ctcagcaaaatagtataattaa

SEQ ID NO: 27428 - DNA, 22 bp, synthetic construct
  misc_feature 1..22: note = chemically synthesized
  source 1..22: mol_type = other DNA
tcagcaaaatagtataattaaa

SEQ ID NO: 27429 - DNA, 22 bp, synthetic construct
  misc_feature 1..22: note = chemically synthesized
  source 1..22: mol_type = other DNA
agcaaaatagtataattaaaca

SEQ ID NO: 27430 - DNA, 22 bp, synthetic construct
  misc_feature 1..22: note = chemically synthesized
  source 1..22: mol_type = other DNA
aacattttattttaggaagatg

SEQ ID NO: 27431 - DNA, 22 bp, synthetic construct
  misc_feature 1..22: note = chemically synthesized
  source 1..22: mol_type = other DNA
tattttaggaagatgtatatgt

SEQ ID NO: 27432 - DNA, 22 bp, synthetic construct
  misc_feature 1..22: note = chemically synthesized
  source 1..22: mol_type = other DNA
attttaggaagatgtatatgtg

SEQ ID NO: 27433 - DNA, 22 bp, synthetic construct
  misc_feature 1..22: note = chemically synthesized
  source 1..22: mol_type = other DNA
ttttaggaagatgtatatgtga

SEQ ID NO: 27434 - DNA, 22 bp, synthetic construct
  misc_feature 1..22: note = chemically synthesized
  source 1..22: mol_type = other DNA
taggaagatgtatatgtgatta

SEQ ID NO: 27435 - DNA, 22 bp, synthetic construct
  misc_feature 1..22: note = chemically synthesized
  source 1..22: mol_type = other DNA
aggaagatgtatatgtgattag

SEQ ID NO: 27436 - DNA, 22 bp, synthetic construct
  misc_feature 1..22: note = chemically synthesized
  source 1..22: mol_type = other DNA
ggaagatgtatatgtgattaga

SEQ ID NO: 27437 - DNA, 22 bp, synthetic construct
  misc_feature 1..22: note = chemically synthesized
  source 1..22: mol_type = other DNA
gaaccagttggaaacctcaact

SEQ ID NO: 27438 - DNA, 22 bp, synthetic construct
  misc_feature 1..22: note = chemically synthesized
  source 1..22: mol_type = other DNA
gaaacctcaactctacattctg

SEQ ID NO: 27439 - DNA, 22 bp, synthetic construct
  misc_feature 1..22: note = chemically synthesized
  source 1..22: mol_type = other DNA
aactctacattctgttagtaat

SEQ ID NO: 27440 - DNA, 22 bp, synthetic construct
  misc_feature 1..22: note = chemically synthesized
  source 1..22: mol_type = other DNA
tacattctgttagtaattatat

SEQ ID NO: 27441 - DNA, 22 bp, synthetic construct
  misc_feature 1..22: note = chemically synthesized
  source 1..22: mol_type = other DNA
cattctgttagtaattatatga

SEQ ID NO: 27442 - DNA, 22 bp, synthetic construct
  misc_feature 1..22: note = chemically synthesized
  source 1..22: mol_type = other DNA
tgttagtaattatatgaaatgc

SEQ ID NO: 27443 - DNA, 22 bp, synthetic construct
  misc_feature 1..22: note = chemically synthesized
  source 1..22: mol_type = other DNA
ttagtaattatatgaaatgctt

SEQ ID NO: 27444 - DNA, 22 bp, synthetic construct
  misc_feature 1..22: note = chemically synthesized
  source 1..22: mol_type = other DNA
gtaattatatgaaatgcttaag

SEQ ID NO: 27445 - DNA, 22 bp, synthetic construct
  misc_feature 1..22: note = chemically synthesized
  source 1..22: mol_type = other DNA
tatgaaatgcttaagaatgttt

SEQ ID NO: 27446 - DNA, 22 bp, synthetic construct
  misc_feature 1..22: note = chemically synthesized
  source 1..22: mol_type = other DNA
aagaatgtttcatattcacaat

SEQ ID NO: 27447 - DNA, 22 bp, synthetic construct
  misc_feature 1..22: note = chemically synthesized
  source 1..22: mol_type = other DNA
agaatgtttcatattcacaatt

SEQ ID NO: 27448 - DNA, 22 bp, synthetic construct
  misc_feature 1..22: note = chemically synthesized
  source 1..22: mol_type = other DNA
catattcacaattagcttggaa

SEQ ID NO: 27449 - DNA, 22 bp, synthetic construct
  misc_feature 1..22: note = chemically synthesized
  source 1..22: mol_type = other DNA
atattcacaattagcttggaat

SEQ ID NO: 27450 - DNA, 22 bp, synthetic construct
  misc_feature 1..22: note = chemically synthesized
  source 1..22: mol_type = other DNA
acaattagcttggaattaatgt

SEQ ID NO: 27451 - DNA, 22 bp, synthetic construct
  misc_feature 1..22: note = chemically synthesized
  source 1..22: mol_type = other DNA
gcttggaattaatgttttaatt

SEQ ID NO: 27452 - DNA, 22 bp, synthetic construct
  misc_feature 1..22: note = chemically synthesized
  source 1..22: mol_type = other DNA
ggaattaatgttttaattcagg

SEQ ID NO: 27453 - DNA, 22 bp, synthetic construct
  misc_feature 1..22: note = chemically synthesized
  source 1..22: mol_type = other DNA
gaattaatgttttaattcagga

SEQ ID NO: 27454 - DNA, 22 bp, synthetic construct
  misc_feature 1..22: note = chemically synthesized
  source 1..22: mol_type = other DNA
atgttttaattcaggagcttct

SEQ ID NO: 27455 - DNA, 22 bp, synthetic construct
  misc_feature 1..22: note = chemically synthesized
  source 1..22: mol_type = other DNA
taattcaggagcttctcaaaag

SEQ ID NO: 27456 - DNA, 22 bp, synthetic construct
  misc_feature 1..22: note = chemically synthesized
  source 1..22: mol_type = other DNA
aattcaggagcttctcaaaagg

SEQ ID NO: 27457 - DNA, 22 bp, synthetic construct
  misc_feature 1..22: note = chemically synthesized
  source 1..22: mol_type = other DNA
attcaggagcttctcaaaaggc

SEQ ID NO: 27458 - DNA, 22 bp, synthetic construct
  misc_feature 1..22: note = chemically synthesized
  source 1..22: mol_type = other DNA
aggagcttctcaaaaggcaaaa

SEQ ID NO: 27459 - DNA, 22 bp, synthetic construct
  misc_feature 1..22: note = chemically synthesized
  source 1..22: mol_type = other DNA
ctcaaaaggcaaaatactgtgc

SEQ ID NO: 27460 - DNA, 22 bp, synthetic construct
  misc_feature 1..22: note = chemically synthesized
  source 1..22: mol_type = other DNA
tcaaaaggcaaaatactgtgct

SEQ ID NO: 27461 - DNA, 22 bp, synthetic construct
  misc_feature 1..22: note = chemically synthesized
  source 1..22: mol_type = other DNA
aaaaggcaaaatactgtgctcc

SEQ ID NO: 27462 - DNA, 22 bp, synthetic construct
  misc_feature 1..22: note = chemically synthesized
  source 1..22: mol_type = other DNA
tgctcctttcagaatgaaagta

SEQ ID NO: 27463 - DNA, 22 bp, synthetic construct
  misc_feature 1..22: note = chemically synthesized
  source 1..22: mol_type = other DNA
ctttcagaatgaaagtaatttt

SEQ ID NO: 27464 - DNA, 22 bp, synthetic construct
  misc_feature 1..22: note = chemically synthesized
  source 1..22: mol_type = other DNA
tcagaatgaaagtaattttttt

SEQ ID NO: 27465 - DNA, 22 bp, synthetic construct
  misc_feature 1..22: note = chemically synthesized
  source 1..22: mol_type = other DNA
cagaatgaaagtaatttttttc

SEQ ID NO: 27466 - DNA, 22 bp, synthetic construct
  misc_feature 1..22: note = chemically synthesized
  source 1..22: mol_type = other DNA
agaatgaaagtaatttttttct

SEQ ID NO: 27467 - DNA, 22 bp, synthetic construct
  misc_feature 1..22: note = chemically synthesized
  source 1..22: mol_type = other DNA
ttttcttcaatgctatgcttat

SEQ ID NO: 27468 - DNA, 22 bp, synthetic construct
  misc_feature 1..22: note = chemically synthesized
  source 1..22: mol_type = other DNA
tttcttcaatgctatgcttatg

SEQ ID NO: 27469 - DNA, 22 bp, synthetic construct
  misc_feature 1..22: note = chemically synthesized
  source 1..22: mol_type = other DNA
ttcttcaatgctatgcttatgt

SEQ ID NO: 27470 - DNA, 22 bp, synthetic construct
  misc_feature 1..22: note = chemically synthesized
  source 1..22: mol_type = other DNA
tcttcaatgctatgcttatgta

SEQ ID NO: 27471 - DNA, 22 bp, synthetic construct
  misc_feature 1..22: note = chemically synthesized
  source 1..22: mol_type = other DNA
cttcaatgctatgcttatgtag

SEQ ID NO: 27472 - DNA, 22 bp, synthetic construct
  misc_feature 1..22: note = chemically synthesized
  source 1..22: mol_type = other DNA
ttcaatgctatgcttatgtagg

SEQ ID NO: 27473 - DNA, 22 bp, synthetic construct
  misc_feature 1..22: note = chemically synthesized
  source 1..22: mol_type = other DNA
caatgctatgcttatgtaggaa

SEQ ID NO: 27474 - DNA, 22 bp, synthetic construct
  misc_feature 1..22: note = chemically synthesized
  source 1..22: mol_type = other DNA
aatgctatgcttatgtaggaat

SEQ ID NO: 27475 - DNA, 22 bp, synthetic construct
  misc_feature 1..22: note = chemically synthesized
  source 1..22: mol_type = other DNA
tgcttatgtaggaattataaaa

SEQ ID NO: 27476 - DNA, 22 bp, synthetic construct
  misc_feature 1..22: note = chemically synthesized
  source 1..22: mol_type = other DNA
atgtaggaattataaaataaag

SEQ ID NO: 27477 - DNA, 22 bp, synthetic construct
  misc_feature 1..22: note = chemically synthesized
  source 1..22: mol_type = other DNA
tgtaggaattataaaataaaga

SEQ ID NO: 27478 - DNA, 22 bp, synthetic construct
  misc_feature 1..22: note = chemically synthesized
  source 1..22: mol_type = other DNA
taaaataaagaaaatcaaattg

SEQ ID NO: 27479 - DNA, 22 bp, synthetic construct
  misc_feature 1..22: note = chemically synthesized
  source 1..22: mol_type = other DNA
ataaaacaatttgcgagtgagg

SEQ ID NO: 27480 - DNA, 22 bp, synthetic construct
  misc_feature 1..22: note = chemically synthesized
  source 1..22: mol_type = other DNA
gcgagtgaggtataacctcatc

SEQ ID NO: 27481 - DNA, 22 bp, synthetic construct
  misc_feature 1..22: note = chemically synthesized
  source 1..22: mol_type = other DNA
cgagtgaggtataacctcatct

SEQ ID NO: 27482 - DNA, 22 bp, synthetic construct
  misc_feature 1..22: note = chemically synthesized
  source 1..22: mol_type = other DNA
atctgtgctgggtaagagaagg

SEQ ID NO: 27483 - DNA, 22 bp, synthetic construct
  misc_feature 1..22: note = chemically synthesized
  source 1..22: mol_type = other DNA
tgctgggtaagagaaggcaagg

SEQ ID NO: 27484 - DNA, 22 bp, synthetic construct
  misc_feature 1..22: note = chemically synthesized
  source 1..22: mol_type = other DNA
ggtaagagaaggcaaggtagag

SEQ ID NO: 27485 - DNA, 22 bp, synthetic construct
  misc_feature 1..22: note = chemically synthesized
  source 1..22: mol_type = other DNA
tgaaaataaagacatctgtaaa

SEQ ID NO: 27486 - DNA, 22 bp, synthetic construct
  misc_feature 1..22: note = chemically synthesized
  source 1..22: mol_type = other DNA
gaaaataaagacatctgtaaaa

SEQ ID NO: 27487 - DNA, 22 bp, synthetic construct
  misc_feature 1..22: note = chemically synthesized
  source 1..22: mol_type = other DNA
aaaataaagacatctgtaaaat

SEQ ID NO: 27488 - DNA, 22 bp, synthetic construct
  misc_feature 1..22: note = chemically synthesized
  source 1..22: mol_type = other DNA
taaaattataaaacaattcctt

SEQ ID NO: 27489 - DNA, 22 bp, synthetic construct
  misc_feature 1..22: note = chemically synthesized
  source 1..22: mol_type = other DNA
taaaacaattccttgtgggttt

SEQ ID NO: 27490 - DNA, 22 bp, synthetic construct
  misc_feature 1..22: note = chemically synthesized
  source 1..22: mol_type = other DNA
cttgtgggtttatactctctag

SEQ ID NO: 27491 - DNA, 22 bp, synthetic construct
  misc_feature 1..22: note = chemically synthesized
  source 1..22: mol_type = other DNA
gtgggtttatactctctagttt

SEQ ID NO: 27492 - DNA, 22 bp, synthetic construct
  misc_feature 1..22: note = chemically synthesized
  source 1..22: mol_type = other DNA
tgggtttatactctctagttta

SEQ ID NO: 27493 - DNA, 22 bp, synthetic construct
  misc_feature 1..22: note = chemically synthesized
  source 1..22: mol_type = other DNA
atactctctagtttaaaagtgt

SEQ ID NO: 27494 - DNA, 22 bp, synthetic construct
  misc_feature 1..22: note = chemically synthesized
  source 1..22: mol_type = other DNA
tactctctagtttaaaagtgtc

SEQ ID NO: 27495 - DNA, 22 bp, synthetic construct
  misc_feature 1..22: note = chemically synthesized
  source 1..22: mol_type = other DNA
tctagtttaaaagtgtcaagac

SEQ ID NO: 27496 - DNA, 22 bp, synthetic construct
  misc_feature 1..22: note = chemically synthesized
  source 1..22: mol_type = other DNA
tagtttaaaagtgtcaagacta

SEQ ID NO: 27497 - DNA, 22 bp, synthetic construct
  misc_feature 1..22: note = chemically synthesized
  source 1..22: mol_type = other DNA
gtttaaaagtgtcaagactatt

SEQ ID NO: 27498 - DNA, 22 bp, synthetic construct
  misc_feature 1..22: note = chemically synthesized
  source 1..22: mol_type = other DNA
aaaagtgtcaagactattgaag

SEQ ID NO: 27499 - DNA, 22 bp, synthetic construct
  misc_feature 1..22: note = chemically synthesized
  source 1..22: mol_type = other DNA
aaagtgtcaagactattgaagg

SEQ ID NO: 27500 - DNA, 22 bp, synthetic construct
  misc_feature 1..22: note = chemically synthesized
  source 1..22: mol_type = other DNA
ttgaaggaacattagcaaagaa

SEQ ID NO: 27501 - DNA, 22 bp, synthetic construct
  misc_feature 1..22: note = chemically synthesized
  source 1..22: mol_type = other DNA
aaggaacattagcaaagaaaaa

SEQ ID NO: 27502 - DNA, 22 bp, synthetic construct
  misc_feature 1..22: note = chemically synthesized
  source 1..22: mol_type = other DNA
gcaaagaaaaagtcatggtttt

SEQ ID NO: 27503 - DNA, 22 bp, synthetic construct
  misc_feature 1..22: note = chemically synthesized
  source 1..22: mol_type = other DNA
tgaaggctgagttcctcaagat

SEQ ID NO: 27504 - DNA, 22 bp, synthetic construct
  misc_feature 1..22: note = chemically synthesized
  source 1..22: mol_type = other DNA
gaaggctgagttcctcaagatc

SEQ ID NO: 27505 - DNA, 22 bp, synthetic construct
  misc_feature 1..22: note = chemically synthesized
  source 1..22: mol_type = other DNA
aaggctgagttcctcaagatct

SEQ ID NO: 27506 - DNA, 22 bp, synthetic construct
  misc_feature 1..22: note = chemically synthesized
  source 1..22: mol_type = other DNA
agttcctcaagatcttgaagaa

SEQ ID NO: 27507 - DNA, 22 bp, synthetic construct
  misc_feature 1..22: note = chemically synthesized
  source 1..22: mol_type = other DNA
ctcaagatcttgaagaatcaag

SEQ ID NO: 27508 - DNA, 22 bp, synthetic construct
  misc_feature 1..22: note = chemically synthesized
  source 1..22: mol_type = other DNA
aagatcttgaagaatcaagcca

SEQ ID NO: 27509 - DNA, 22 bp, synthetic construct
  misc_feature 1..22: note = chemically synthesized
  source 1..22: mol_type = other DNA
gaagaatcaagccaactgattg

SEQ ID NO: 27510 - DNA, 22 bp, synthetic construct
  misc_feature 1..22: note = chemically synthesized
  source 1..22: mol_type = other DNA
aagaatcaagccaactgattgc

SEQ ID NO: 27511 - DNA, 22 bp, synthetic construct
  misc_feature 1..22: note = chemically synthesized
  source 1..22: mol_type = other DNA
attgctgggtaaatggcagtga

SEQ ID NO: 27512 - DNA, 22 bp, synthetic construct
  misc_feature 1..22: note = chemically synthesized
  source 1..22: mol_type = other DNA
ctgggtaaatggcagtgatgac

SEQ ID NO: 27513 - DNA, 22 bp, synthetic construct
  misc_feature 1..22: note = chemically synthesized
  source 1..22: mol_type = other DNA
ggtaaatggcagtgatgacttg

SEQ ID NO: 27514 - DNA, 22 bp, synthetic construct
  misc_feature 1..22: note = chemically synthesized
  source 1..22: mol_type = other DNA
gtgtgatttaaacgatctgaaa

SEQ ID NO: 27515 - DNA, 22 bp, synthetic construct
  misc_feature 1..22: note = chemically synthesized
  source 1..22: mol_type = other DNA
tgtgatttaaacgatctgaaat

SEQ ID NO: 27516 - DNA, 22 bp, synthetic construct
  misc_feature 1..22: note = chemically synthesized
  source 1..22: mol_type = other DNA
aaacgatctgaaattatgtcat

SEQ ID NO: 27517 - DNA, 22 bp, synthetic construct
  misc_feature 1..22: note = chemically synthesized
  source 1..22: mol_type = other DNA
aacgatctgaaattatgtcatg

SEQ ID NO: 27518 - DNA, 22 bp, synthetic construct
  misc_feature 1..22: note = chemically synthesized
  source 1..22: mol_type = other DNA
aaattatgtcatgtgttgtgat

SEQ ID NO: 27519 - DNA, 22 bp, synthetic construct
  misc_feature 1..22: note = chemically synthesized
  source 1..22: mol_type = other DNA
tgtcatgtgttgtgatatataa

SEQ ID NO: 27520 - DNA, 22 bp, synthetic construct
  misc_feature 1..22: note = chemically synthesized
  source 1..22: mol_type = other DNA
tgatatataacacatttatttt

SEQ ID NO: 27521 - DNA, 22 bp, synthetic construct
  misc_feature 1..22: note = chemically synthesized
  source 1..22: mol_type = other DNA
atttttcattttgtgtttacta

SEQ ID NO: 27522 - DNA, 22 bp, synthetic construct
  misc_feature 1..22: note = chemically synthesized
  source 1..22: mol_type = other DNA
tttttcattttgtgtttactat

SEQ ID NO: 27523 - DNA, 22 bp, synthetic construct
  misc_feature 1..22: note = chemically synthesized
  source 1..22: mol_type = other DNA
ttcattttgtgtttactatttc

SEQ ID NO: 27524 - DNA, 22 bp, synthetic construct
  misc_feature 1..22: note = chemically synthesized
  source 1..22: mol_type = other DNA
tcattttgtgtttactatttca

SEQ ID NO: 27525 - DNA, 22 bp, synthetic construct
  misc_feature 1..22: note = chemically synthesized
  source 1..22: mol_type = other DNA
cattttgtgtttactatttcat

SEQ ID NO: 27526 - DNA, 22 bp, synthetic construct
  misc_feature 1..22: note = chemically synthesized
  source 1..22: mol_type = other DNA
attttgtgtttactatttcatg

SEQ ID NO: 27527 - DNA, 22 bp, synthetic construct
  misc_feature 1..22: note = chemically synthesized
  source 1..22: mol_type = other DNA
tgtgtttactatttcatgtcta

SEQ ID NO: 27528 - DNA, 22 bp, synthetic construct
  misc_feature 1..22: note = chemically synthesized
  source 1..22: mol_type = other DNA
gtgtttactatttcatgtctat

SEQ ID NO: 27529 - DNA, 22 bp, synthetic construct
  misc_feature 1..22: note = chemically synthesized
  source 1..22: mol_type = other DNA
tgtttactatttcatgtctatt

SEQ ID NO: 27530 - DNA, 22 bp, synthetic construct
  misc_feature 1..22: note = chemically synthesized
  source 1..22: mol_type = other DNA
actatttcatgtctattacagt

SEQ ID NO: 27531 - DNA, 22 bp, synthetic construct
  misc_feature 1..22: note = chemically synthesized
  source 1..22: mol_type = other DNA
ctatttcatgtctattacagta

SEQ ID NO: 27532 - DNA, 22 bp, synthetic construct
  misc_feature 1..22: note = chemically synthesized
  source 1..22: mol_type = other DNA
tttcatgtctattacagtaatc

SEQ ID NO: 27533 - DNA, 22 bp, synthetic construct
  misc_feature 1..22: note = chemically synthesized
  source 1..22: mol_type = other DNA
catgtctattacagtaatctaa

SEQ ID NO: 27534 - DNA, 22 bp, synthetic construct
  misc_feature 1..22: note = chemically synthesized
  source 1..22: mol_type = other DNA
atgtctattacagtaatctaaa

SEQ ID NO: 27535 - DNA, 22 bp, synthetic construct
  misc_feature 1..22: note = chemically synthesized
  source 1..22: mol_type = other DNA
ttacagtaatctaaaggatctg

SEQ ID NO: 27536 - DNA, 22 bp, synthetic construct
  misc_feature 1..22: note = chemically synthesized
  source 1..22: mol_type = other DNA
cagtaatctaaaggatctgaaa

SEQ ID NO: 27537 - DNA, 22 bp, synthetic construct
  misc_feature 1..22: note = chemically synthesized
  source 1..22: mol_type = other DNA
aaggatctgaaataataaccag

SEQ ID NO: 27538 - DNA, 22 bp, synthetic construct
  misc_feature 1..22: note = chemically synthesized
  source 1..22: mol_type = other DNA
aaataataaccagaatgtgata

SEQ ID NO: 27539 - DNA, 22 bp, synthetic construct
  misc_feature 1..22: note = chemically synthesized
  source 1..22: mol_type = other DNA
cttccttcttttggctaatcag

SEQ ID NO: 27540 - DNA, 22 bp, synthetic construct
  misc_feature 1..22: note = chemically synthesized
  source 1..22: mol_type = other DNA
ccttcttttggctaatcagagc

SEQ ID NO: 27541 - DNA, 22 bp, synthetic construct
  misc_feature 1..22: note = chemically synthesized
  source 1..22: mol_type = other DNA
cttcttttggctaatcagagcc

SEQ ID NO: 27542 - DNA, 22 bp, synthetic construct
  misc_feature 1..22: note = chemically synthesized
  source 1..22: mol_type = other DNA
cttttggctaatcagagccagc

SEQ ID NO: 27543 - DNA, 22 bp, synthetic construct
  misc_feature 1..22: note = chemically synthesized
  source 1..22: mol_type = other DNA
ttttggctaatcagagccagca

SEQ ID NO: 27544 - DNA, 22 bp, synthetic construct
  misc_feature 1..22: note = chemically synthesized
  source 1..22: mol_type = other DNA
ttggctaatcagagccagcata

SEQ ID NO: 27545 - DNA, 22 bp, synthetic construct
  misc_feature 1..22: note = chemically synthesized
  source 1..22: mol_type = other DNA
tggctaatcagagccagcataa

SEQ ID NO: 27546 - DNA, 22 bp, synthetic construct
  misc_feature 1..22: note = chemically synthesized
  source 1..22: mol_type = other DNA
ggctaatcagagccagcataat

SEQ ID NO: 27547 - DNA, 22 bp, synthetic construct
  misc_feature 1..22: note = chemically synthesized
  source 1..22: mol_type = other DNA
gctaatcagagccagcataatc

SEQ ID NO: 27548 - DNA, 22 bp, synthetic construct
  misc_feature 1..22: note = chemically synthesized
  source 1..22: mol_type = other DNA
atcagagccagcataatctcaa

SEQ ID NO: 27549 - DNA, 22 bp, synthetic construct
  misc_feature 1..22: note = chemically synthesized
  source 1..22: mol_type = other DNA
aaaattaaatgcattatatatg

SEQ ID NO: 27550 - DNA, 22 bp, synthetic construct
  misc_feature 1..22: note = chemically synthesized
  source 1..22: mol_type = other DNA
aatgcattatatatggcatgca

SEQ ID NO: 27551 - DNA, 22 bp, synthetic construct
  misc_feature 1..22: note = chemically synthesized
  source 1..22: mol_type = other DNA
tatatggcatgcattctgaaaa

SEQ ID NO: 27552 - DNA, 22 bp, synthetic construct
  misc_feature 1..22: note = chemically synthesized
  source 1..22: mol_type = other DNA
tgaaaaatcagaattcacctta

SEQ ID NO: 27553 - DNA, 22 bp, synthetic construct
  misc_feature 1..22: note = chemically synthesized
  source 1..22: mol_type = other DNA
aaaaatcagaattcaccttata

SEQ ID NO: 27554 - DNA, 22 bp, synthetic construct
  misc_feature 1..22: note = chemically synthesized
  source 1..22: mol_type = other DNA
accttatactaactgttcaaag

SEQ ID NO: 27555 - DNA, 22 bp, synthetic construct
  misc_feature 1..22: note = chemically synthesized
  source 1..22: mol_type = other DNA
atactaactgttcaaagttctc

SEQ ID NO: 27556 - DNA, 22 bp, synthetic construct
  misc_feature 1..22: note = chemically synthesized
  source 1..22: mol_type = other DNA
tactaactgttcaaagttctcg

SEQ ID NO: 27557 - DNA, 22 bp, synthetic construct
  misc_feature 1..22: note = chemically synthesized
  source 1..22: mol_type = other DNA
actgttcaaagttctcgtgtgt

SEQ ID NO: 27558 - DNA, 22 bp, synthetic construct
  misc_feature 1..22: note = chemically synthesized
  source 1..22: mol_type = other DNA
ttcaaagttctcgtgtgtatgc

SEQ ID NO: 27559 - DNA, 22 bp, synthetic construct
  misc_feature 1..22: note = chemically synthesized
  source 1..22: mol_type = other DNA
aaagttctcgtgtgtatgcatt

SEQ ID NO: 27560 - DNA, 22 bp, synthetic construct
  misc_feature 1..22: note = chemically synthesized
  source 1..22: mol_type = other DNA
tcgtgtgtatgcattcataaaa

SEQ ID NO: 27561 - DNA, 22 bp, synthetic construct
  misc_feature 1..22: note = chemically synthesized
  source 1..22: mol_type = other DNA
gtgtgtatgcattcataaaatc

SEQ ID NO: 27562 - DNA, 22 bp, synthetic construct
  misc_feature 1..22: note = chemically synthesized
  source 1..22: mol_type = other DNA
ataaaatcaaaattaaaagtca

SEQ ID NO: 27563 - DNA, 22 bp, synthetic construct
  misc_feature 1..22: note = chemically synthesized
  source 1..22: mol_type = other DNA
aaagtcaattttgcctatgtag

SEQ ID NO: 27564 - DNA, 22 bp, synthetic construct
  misc_feature 1..22: note = chemically synthesized
  source 1..22: mol_type = other DNA
tgcctatgtagaagtggacaga

SEQ ID NO: 27565 - DNA, 22 bp, synthetic construct
  misc_feature 1..22: note = chemically synthesized
  source 1..22: mol_type = other DNA
gcctatgtagaagtggacagaa

SEQ ID NO: 27566 - DNA, 22 bp, synthetic construct
  misc_feature 1..22: note = chemically synthesized
  source 1..22: mol_type = other DNA
cctatgtagaagtggacagaat

SEQ ID NO: 27567 - DNA, 22 bp, synthetic construct
  misc_feature 1..22: note = chemically synthesized
  source 1..22: mol_type = other DNA
tgtagaagtggacagaatgcat

SEQ ID NO: 27568 - DNA, 22 bp, synthetic construct
  misc_feature 1..22: note = chemically synthesized
  source 1..22: mol_type = other DNA
attctctgtagtttagtgagaa

SEQ ID NO: 27569 - DNA, 22 bp, synthetic construct
  misc_feature 1..22: note = chemically synthesized
  source 1..22: mol_type = other DNA
ttctctgtagtttagtgagaaa

SEQ ID NO: 27570 - DNA, 22 bp, synthetic construct
  misc_feature 1..22: note = chemically synthesized
  source 1..22: mol_type = other DNA
tctgtagtttagtgagaaagaa

SEQ ID NO: 27571 - DNA, 22 bp, synthetic construct
  misc_feature 1..22: note = chemically synthesized
  source 1..22: mol_type = other DNA
tgtagtttagtgagaaagaatc

SEQ ID NO: 27572 - DNA, 22 bp, synthetic construct
  misc_feature 1..22: note = chemically synthesized
  source 1..22: mol_type = other DNA
tagtttagtgagaaagaatcta

SEQ ID NO: 27573 - DNA, 22 bp, synthetic construct
  misc_feature 1..22: note = chemically synthesized
  source 1..22: mol_type = other DNA
agtgagaaagaatctaggagga

SEQ ID NO: 27574 - DNA, 22 bp, synthetic construct
  misc_feature 1..22: note = chemically synthesized
  source 1..22: mol_type = other DNA
gtgagaaagaatctaggaggac

SEQ ID NO: 27575 - DNA, 22 bp, synthetic construct
  misc_feature 1..22: note = chemically synthesized
  source 1..22: mol_type = other DNA
ggaggacagaaaccttattaca

SEQ ID NO: 27576 - DNA, 22 bp, synthetic construct
  misc_feature 1..22: note = chemically synthesized
  source 1..22: mol_type = other DNA
attacagagaagtgaagtattt

SEQ ID NO: 27577 - DNA, 22 bp, synthetic construct
  misc_feature 1..22: note = chemically synthesized
  source 1..22: mol_type = other DNA
ttacagagaagtgaagtatttt

SEQ ID NO: 27578 - DNA, 22 bp, synthetic construct
  misc_feature 1..22: note = chemically synthesized
  source 1..22: mol_type = other DNA
cagagaagtgaagtattttatg

SEQ ID NO: 27579 - DNA, 22 bp, synthetic construct
  misc_feature 1..22: note = chemically synthesized
  source 1..22: mol_type = other DNA
tatgtgtacctgtttctgttgt

SEQ ID NO: 27580 - DNA, 22 bp, synthetic construct
  misc_feature 1..22: note = chemically synthesized
  source 1..22: mol_type = other DNA
atgtgtacctgtttctgttgtt

SEQ ID NO: 27581 - DNA, 22 bp, synthetic construct
  misc_feature 1..22: note = chemically synthesized
  source 1..22: mol_type = other DNA
tgtgtacctgtttctgttgttt

SEQ ID NO: 27582 - DNA, 22 bp, synthetic construct
  misc_feature 1..22: note = chemically synthesized
  source 1..22: mol_type = other DNA
tttctgttgtttctttttaaat

SEQ ID NO: 27583 - DNA, 22 bp, synthetic construct
  misc_feature 1..22: note = chemically synthesized
  source 1..22: mol_type = other DNA
ctgttgtttctttttaaattat

SEQ ID NO: 27584 - DNA, 22 bp, synthetic construct
  misc_feature 1..22: note = chemically synthesized
  source 1..22: mol_type = other DNA
tgttgtttctttttaaattatt

SEQ ID NO: 27585 - DNA, 22 bp, synthetic construct
  misc_feature 1..22: note = chemically synthesized
  source 1..22: mol_type = other DNA
ttgtttctttttaaattatttt

SEQ ID NO: 27586 - DNA, 22 bp, synthetic construct
  misc_feature 1..22: note = chemically synthesized
  source 1..22: mol_type = other DNA
tttctttttaaattattttgta

SEQ ID NO: 27587 - DNA, 22 bp, synthetic construct
  misc_feature 1..22: note = chemically synthesized
  source 1..22: mol_type = other DNA
ctttttaaattattttgtattc

SEQ ID NO: 27588 - DNA, 22 bp, synthetic construct
  misc_feature 1..22: note = chemically synthesized
  source 1..22: mol_type = other DNA
tttttaaattattttgtattct

SEQ ID NO: 27589 - DNA, 22 bp, synthetic construct
  misc_feature 1..22: note = chemically synthesized
  source 1..22: mol_type = other DNA
tttaaattattttgtattcttt

SEQ ID NO: 27590 - DNA, 22 bp, synthetic construct
  misc_feature 1..22: note = chemically synthesized
  source 1..22: mol_type = other DNA
ttaaattattttgtattctttt

SEQ ID NO: 27591 - DNA, 22 bp, synthetic construct
  misc_feature 1..22: note = chemically synthesized
  source 1..22: mol_type = other DNA
taaattattttgtattcttttc

SEQ ID NO: 27592 - DNA, 22 bp, synthetic construct
  misc_feature 1..22: note = chemically synthesized
  source 1..22: mol_type = other DNA
aaattattttgtattcttttcc

SEQ ID NO: 27593 - DNA, 22 bp, synthetic construct
  misc_feature 1..22: note = chemically synthesized
  source 1..22: mol_type = other DNA
aattattttgtattcttttcct

SEQ ID NO: 27594 - DNA, 22 bp, synthetic construct
  misc_feature 1..22: note = chemically synthesized
  source 1..22: mol_type = other DNA
ttttgtattcttttcctcagag

SEQ ID NO: 27595 - DNA, 22 bp, synthetic construct
  misc_feature 1..22: note = chemically synthesized
  source 1..22: mol_type = other DNA
tgtattcttttcctcagagatc

SEQ ID NO: 27596 - DNA, 22 bp, synthetic construct
  misc_feature 1..22: note = chemically synthesized
  source 1..22: mol_type = other DNA
gtattcttttcctcagagatct

SEQ ID NO: 27597 - DNA, 22 bp, synthetic construct
  misc_feature 1..22: note = chemically synthesized
  source 1..22: mol_type = other DNA
tattcttttcctcagagatctt

SEQ ID NO: 27598 - DNA, 22 bp, synthetic construct
  misc_feature 1..22: note = chemically synthesized
  source 1..22: mol_type = other DNA
ttttcctcagagatctttatcc

SEQ ID NO: 27599 - DNA, 22 bp, synthetic construct
  misc_feature 1..22: note = chemically synthesized
  source 1..22: mol_type = other DNA
ttcctcagagatctttatcctg

SEQ ID NO: 27600 - DNA, 22 bp, synthetic construct
  misc_feature 1..22: note = chemically synthesized
  source 1..22: mol_type = other DNA
tcctcagagatctttatcctga

SEQ ID NO: 27601 - DNA, 22 bp, synthetic construct
  misc_feature 1..22: note = chemically synthesized
  source 1..22: mol_type = other DNA
cctcagagatctttatcctgaa

SEQ ID NO: 27602 - DNA, 22 bp, synthetic construct
  misc_feature 1..22: note = chemically synthesized
  source 1..22: mol_type = other DNA
ctcagagatctttatcctgaaa

SEQ ID NO: 27603 - DNA, 22 bp, synthetic construct
  misc_feature 1..22: note = chemically synthesized
  source 1..22: mol_type = other DNA
agagatctttatcctgaaatga

SEQ ID NO: 27604 - DNA, 22 bp, synthetic construct
  misc_feature 1..22: note = chemically synthesized
  source 1..22: mol_type = other DNA
tatcctgaaatgagcatgtgtt

SEQ ID NO: 27605 - DNA, 22 bp, synthetic construct
  misc_feature 1..22: note = chemically synthesized
  source 1..22: mol_type = other DNA
atcctgaaatgagcatgtgttt

SEQ ID NO: 27606 - DNA, 22 bp, synthetic construct
  misc_feature 1..22: note = chemically synthesized
  source 1..22: mol_type = other DNA
tcctgaaatgagcatgtgtttt

SEQ ID NO: 27607 - DNA, 22 bp, synthetic construct
  misc_feature 1..22: note = chemically synthesized
  source 1..22: mol_type = other DNA
aaatgagcatgtgtttttaatg

SEQ ID NO: 27608 - DNA, 22 bp, synthetic construct
  misc_feature 1..22: note = chemically synthesized
  source 1..22: mol_type = other DNA
ttaatgtcctttttctagtcac

SEQ ID NO: 27609 - DNA, 22 bp, synthetic construct
  misc_feature 1..22: note = chemically synthesized
  source 1..22: mol_type = other DNA
taatgtcctttttctagtcaca

SEQ ID NO: 27610 - DNA, 22 bp, synthetic construct
  misc_feature 1..22: note = chemically synthesized
  source 1..22: mol_type = other DNA
aatgtcctttttctagtcacaa

SEQ ID NO: 27611 - DNA, 22 bp, synthetic construct
  misc_feature 1..22: note = chemically synthesized
  source 1..22: mol_type = other DNA
atgtcctttttctagtcacaaa

SEQ ID NO: 27612 - DNA, 22 bp, synthetic construct
  misc_feature 1..22: note = chemically synthesized
  source 1..22: mol_type = other DNA
tttctagtcacaaatttttcca

SEQ ID NO: 27613 - DNA, 22 bp, synthetic construct
  misc_feature 1..22: note = chemically synthesized
  source 1..22: mol_type = other DNA
ttctagtcacaaatttttccag

SEQ ID NO: 27614 - DNA, 22 bp, synthetic construct
  misc_feature 1..22: note = chemically synthesized
  source 1..22: mol_type = other DNA
tctagtcacaaatttttccagt

SEQ ID NO: 27615 - DNA, 22 bp, synthetic construct
  misc_feature 1..22: note = chemically synthesized
  source 1..22: mol_type = other DNA
ctagtcacaaatttttccagtc

SEQ ID NO: 27616 - DNA, 22 bp, synthetic construct
  misc_feature 1..22: note = chemically synthesized
  source 1..22: mol_type = other DNA
tagtcacaaatttttccagtcc

SEQ ID NO: 27617 - DNA, 22 bp, synthetic construct
  misc_feature 1..22: note = chemically synthesized
  source 1..22: mol_type = other DNA
gtcacaaatttttccagtccag

SEQ ID NO: 27618 - DNA, 22 bp, synthetic construct
  misc_feature 1..22: note = chemically synthesized
  source 1..22: mol_type = other DNA
ttccagtccagtttttaaatat

SEQ ID NO: 27619 - DNA, 22 bp, synthetic construct
  misc_feature 1..22: note = chemically synthesized
  source 1..22: mol_type = other DNA
tccagtccagtttttaaatatg

SEQ ID NO: 27620 - DNA, 22 bp, synthetic construct
  misc_feature 1..22: note = chemically synthesized
  source 1..22: mol_type = other DNA
ccagtccagtttttaaatatgc

SEQ ID NO: 27621 - DNA, 22 bp, synthetic construct
  misc_feature 1..22: note = chemically synthesized
  source 1..22: mol_type = other DNA
cagtccagtttttaaatatgcc

SEQ ID NO: 27622 - DNA, 22 bp, synthetic construct
  misc_feature 1..22: note = chemically synthesized
  source 1..22: mol_type = other DNA
ttaaatatgcccaaagttcctg

SEQ ID NO: 27623 - DNA, 22 bp, synthetic construct
  misc_feature 1..22: note = chemically synthesized
  source 1..22: mol_type = other DNA
taaatatgcccaaagttcctgg

SEQ ID NO: 27624 - DNA, 22 bp, synthetic construct
  misc_feature 1..22: note = chemically synthesized
  source 1..22: mol_type = other DNA
aaatatgcccaaagttcctggg

SEQ ID NO: 27625 - DNA, 22 bp, synthetic construct
  misc_feature 1..22: note = chemically synthesized
  source 1..22: mol_type = other DNA
aatatgcccaaagttcctggga

SEQ ID NO: 27626 - DNA, 22 bp, synthetic construct
  misc_feature 1..22: note = chemically synthesized
  source 1..22: mol_type = other DNA
ctgggaacagaaccatctctat

SEQ ID NO: 27627 - DNA, 22 bp, synthetic construct
  misc_feature 1..22: note = chemically synthesized
  source 1..22: mol_type = other DNA
ggaacagaaccatctctatcac

SEQ ID NO: 27628 - DNA, 22 bp, synthetic construct
  misc_feature 1..22: note = chemically synthesized
  source 1..22: mol_type = other DNA
tatcacatgtgaatcccggagt

SEQ ID NO: 27629 - DNA, 22 bp, synthetic construct
  misc_feature 1..22: note = chemically synthesized
  source 1..22: mol_type = other DNA
tcacatgtgaatcccggagtat

SEQ ID NO: 27630 - DNA, 22 bp, synthetic construct
  misc_feature 1..22: note = chemically synthesized
  source 1..22: mol_type = other DNA
gaaataaaagttttctctagag

SEQ ID NO: 27631 - DNA, 22 bp, synthetic construct
  misc_feature 1..22: note = chemically synthesized
  source 1..22: mol_type = other DNA
aaataaaagttttctctagaga

SEQ ID NO: 27632 - DNA, 22 bp, synthetic construct
  misc_feature 1..22: note = chemically synthesized
  source 1..22: mol_type = other DNA
tctctagagagtgggcaggagc

SEQ ID NO: 27633 - DNA, 22 bp, synthetic construct
  misc_feature 1..22: note = chemically synthesized
  source 1..22: mol_type = other DNA
ctctagagagtgggcaggagct

SEQ ID NO: 27634 - DNA, 22 bp, synthetic construct
  misc_feature 1..22: note = chemically synthesized
  source 1..22: mol_type = other DNA
tctagagagtgggcaggagctc

SEQ ID NO: 27635 - DNA, 22 bp, synthetic construct
  misc_feature 1..22: note = chemically synthesized
  source 1..22: mol_type = other DNA
tagagagtgggcaggagctcaa

SEQ ID NO: 27636 - DNA, 22 bp, synthetic construct
  misc_feature 1..22: note = chemically synthesized
  source 1..22: mol_type = other DNA
gagagtgggcaggagctcaagg

SEQ ID NO: 27637 - DNA, 22 bp, synthetic construct
  misc_feature 1..22: note = chemically synthesized
  source 1..22: mol_type = other DNA
aaggacatagcttattggtgga

SEQ ID NO: 27638 - DNA, 22 bp, synthetic construct
  misc_feature 1..22: note = chemically synthesized
  source 1..22: mol_type = other DNA
attggtggataaaactggaagg

SEQ ID NO: 27639 - DNA, 22 bp, synthetic construct
  misc_feature 1..22: note = chemically synthesized
  source 1..22: mol_type = other DNA
ttggtggataaaactggaaggg

SEQ ID NO: 27640 - DNA, 22 bp, synthetic construct
  misc_feature 1..22: note = chemically synthesized
  source 1..22: mol_type = other DNA
gtggataaaactggaagggact

SEQ ID NO: 27641 - DNA, 22 bp, synthetic construct
  misc_feature 1..22: note = chemically synthesized
  source 1..22: mol_type = other DNA
gaagggacttgttagcactggg

SEQ ID NO: 27642 - DNA, 22 bp, synthetic construct
  misc_feature 1..22: note = chemically synthesized
  source 1..22: mol_type = other DNA
gttagcactgggaatcagtcca

SEQ ID NO: 27643 - DNA, 22 bp, synthetic construct
  misc_feature 1..22: note = chemically synthesized
  source 1..22: mol_type = other DNA
ttagcactgggaatcagtccag

SEQ ID NO: 27644 - DNA, 22 bp, synthetic construct
  misc_feature 1..22: note = chemically synthesized
  source 1..22: mol_type = other DNA
gcactgggaatcagtccagaag

SEQ ID NO: 27645 - DNA, 22 bp, synthetic construct
  misc_feature 1..22: note = chemically synthesized
  source 1..22: mol_type = other DNA
ggaatcagtccagaagatctct

SEQ ID NO: 27646 - DNA, 22 bp, synthetic construct
  misc_feature 1..22: note = chemically synthesized
  source 1..22: mol_type = other DNA
tgcacaagttcctgcacctgag

SEQ ID NO: 27647 - DNA, 22 bp, synthetic construct
  misc_feature 1..22: note = chemically synthesized
  source 1..22: mol_type = other DNA
cacaagttcctgcacctgagca

SEQ ID NO: 27648 - DNA, 22 bp, synthetic construct
  misc_feature 1..22: note = chemically synthesized
  source 1..22: mol_type = other DNA
ctgcacctgagcagagcccctt

SEQ ID NO: 27649 - DNA, 22 bp, synthetic construct
  misc_feature 1..22: note = chemically synthesized
  source 1..22: mol_type = other DNA
cacctgagcagagccccttctg

SEQ ID NO: 27650 - DNA, 22 bp, synthetic construct
  misc_feature 1..22: note = chemically synthesized
  source 1..22: mol_type = other DNA
agcagagccccttctgctttcc

SEQ ID NO: 27651 - DNA, 22 bp, synthetic construct
  misc_feature 1..22: note = chemically synthesized
  source 1..22: mol_type = other DNA
ctgctttcctcttttctcatca

SEQ ID NO: 27652 - DNA, 22 bp, synthetic construct
  misc_feature 1..22: note = chemically synthesized
  source 1..22: mol_type = other DNA
tgctttcctcttttctcatcat

SEQ ID NO: 27653 - DNA, 22 bp, synthetic construct
  misc_feature 1..22: note = chemically synthesized
  source 1..22: mol_type = other DNA
ctttcctcttttctcatcattt

SEQ ID NO: 27654 - DNA, 22 bp, synthetic construct
  misc_feature 1..22: note = chemically synthesized
  source 1..22: mol_type = other DNA
tcctcttttctcatcatttaac

SEQ ID NO: 27655 - DNA, 22 bp, synthetic construct
  misc_feature 1..22: note = chemically synthesized
  source 1..22: mol_type = other DNA
cctcttttctcatcatttaaca

SEQ ID NO: 27656 - DNA, 22 bp, synthetic construct
  misc_feature 1..22: note = chemically synthesized
  source 1..22: mol_type = other DNA
ctcttttctcatcatttaacaa

SEQ ID NO: 27657 - DNA, 22 bp, synthetic construct
  misc_feature 1..22: note = chemically synthesized
  source 1..22: mol_type = other DNA
ttttctcatcatttaacaaaca

SEQ ID NO: 27658 - DNA, 22 bp, synthetic construct
  misc_feature 1..22: note = chemically synthesized
  source 1..22: mol_type = other DNA
ttctcatcatttaacaaacatt

SEQ ID NO: 27659 - DNA, 22 bp, synthetic construct
  misc_feature 1..22: note = chemically synthesized
  source 1..22: mol_type = other DNA
tctcatcatttaacaaacatta

SEQ ID NO: 27660 - DNA, 22 bp, synthetic construct
  misc_feature 1..22: note = chemically synthesized
  source 1..22: mol_type = other DNA
ctcatcatttaacaaacattaa

SEQ ID NO: 27661 - DNA, 22 bp, synthetic construct
  misc_feature 1..22: note = chemically synthesized
  source 1..22: mol_type = other DNA
tcatcatttaacaaacattaat

SEQ ID NO: 27662 - DNA, 22 bp, synthetic construct
  misc_feature 1..22: note = chemically synthesized
  source 1..22: mol_type = other DNA
atcatttaacaaacattaatgg

SEQ ID NO: 27663 - DNA, 22 bp, synthetic construct
  misc_feature 1..22: note = chemically synthesized
  source 1..22: mol_type = other DNA
aacaaacattaatggagcactg

SEQ ID NO: 27664 - DNA, 22 bp, synthetic construct
  misc_feature 1..22: note = chemically synthesized
  source 1..22: mol_type = other DNA
acaaacattaatggagcactgt

SEQ ID NO: 27665 - DNA, 22 bp, synthetic construct
  misc_feature 1..22: note = chemically synthesized
  source 1..22: mol_type = other DNA
atggagcactgttacctgggca

SEQ ID NO: 27666 - DNA, 22 bp, synthetic construct
  misc_feature 1..22: note = chemically synthesized
  source 1..22: mol_type = other DNA
ttacctgggcactgggaacacg

SEQ ID NO: 27667 - DNA, 22 bp, synthetic construct
  misc_feature 1..22: note = chemically synthesized
  source 1..22: mol_type = other DNA
cctgggcactgggaacacgcca

SEQ ID NO: 27668 - DNA, 22 bp, synthetic construct
  misc_feature 1..22: note = chemically synthesized
  source 1..22: mol_type = other DNA
ggcactgggaacacgccagtga

SEQ ID NO: 27669 - DNA, 22 bp, synthetic construct
  misc_feature 1..22: note = chemically synthesized
  source 1..22: mol_type = other DNA
ggaacacgccagtgaaactaag

SEQ ID NO: 27670 - DNA, 22 bp, synthetic construct
  misc_feature 1..22: note = chemically synthesized
  source 1..22: mol_type = other DNA
agttattttatggatcttataa

SEQ ID NO: 27671 - DNA, 22 bp, synthetic construct
  misc_feature 1..22: note = chemically synthesized
  source 1..22: mol_type = other DNA
ttttatggatcttataatcagt

SEQ ID NO: 27672 - DNA, 22 bp, synthetic construct
  misc_feature 1..22: note = chemically synthesized
  source 1..22: mol_type = other DNA
tatggatcttataatcagtagc

SEQ ID NO: 27673 - DNA, 22 bp, synthetic construct
  misc_feature 1..22: note = chemically synthesized
  source 1..22: mol_type = other DNA
atggatcttataatcagtagca

SEQ ID NO: 27674 - DNA, 22 bp, synthetic construct
  misc_feature 1..22: note = chemically synthesized
  source 1..22: mol_type = other DNA
tggatcttataatcagtagcat

SEQ ID NO: 27675 - DNA, 22 bp, synthetic construct
  misc_feature 1..22: note = chemically synthesized
  source 1..22: mol_type = other DNA
ataatcagtagcatgtgtgttg

SEQ ID NO: 27676 - DNA, 22 bp, synthetic construct
  misc_feature 1..22: note = chemically synthesized
  source 1..22: mol_type = other DNA
taatcagtagcatgtgtgttga

SEQ ID NO: 27677 - DNA, 22 bp, synthetic construct
  misc_feature 1..22: note = chemically synthesized
  source 1..22: mol_type = other DNA
atctcagggtctagaacagtgc

SEQ ID NO: 27678 - DNA, 22 bp, synthetic construct
  misc_feature 1..22: note = chemically synthesized
  source 1..22: mol_type = other DNA
agggtctagaacagtgcctggt

SEQ ID NO: 27679 - DNA, 22 bp, synthetic construct
  misc_feature 1..22: note = chemically synthesized
  source 1..22: mol_type = other DNA
gaacagtgcctggtacatagaa

SEQ ID NO: 27680 - DNA, 22 bp, synthetic construct
  misc_feature 1..22: note = chemically synthesized
  source 1..22: mol_type = other DNA
gtacatagaaaatgctcaatgg

SEQ ID NO: 27681 - DNA, 22 bp, synthetic construct
  misc_feature 1..22: note = chemically synthesized
  source 1..22: mol_type = other DNA
aatggatttttttttgaaaaaa

SEQ ID NO: 27682 - DNA, 22 bp, synthetic construct
  misc_feature 1..22: note = chemically synthesized
  source 1..22: mol_type = other DNA
ttttttgaaaaaatttgttttt

SEQ ID NO: 27683 - DNA, 22 bp, synthetic construct
  misc_feature 1..22: note = chemically synthesized
  source 1..22: mol_type = other DNA
tttttgaaaaaatttgtttttc

SEQ ID NO: 27684 - DNA, 22 bp, synthetic construct
  misc_feature 1..22: note = chemically synthesized
  source 1..22: mol_type = other DNA
ttttgaaaaaatttgtttttca

SEQ ID NO: 27685 - DNA, 22 bp, synthetic construct
  misc_feature 1..22: note = chemically synthesized
  source 1..22: mol_type = other DNA
tttgaaaaaatttgtttttcaa

SEQ ID NO: 27686 - DNA, 22 bp, synthetic construct
  misc_feature 1..22: note = chemically synthesized
  source 1..22: mol_type = other DNA
ttgaaaaaatttgtttttcaac

SEQ ID NO: 27687 - DNA, 22 bp, synthetic construct
  misc_feature 1..22: note = chemically synthesized
  source 1..22: mol_type = other DNA
tgaaaaaatttgtttttcaacc

SEQ ID NO: 27688 - DNA, 22 bp, synthetic construct
  misc_feature 1..22: note = chemically synthesized
  source 1..22: mol_type = other DNA
gaaaaaatttgtttttcaaccc

SEQ ID NO: 27689 - DNA, 22 bp, synthetic construct
  misc_feature 1..22: note = chemically synthesized
  source 1..22: mol_type = other DNA
aaaaaatttgtttttcaacccc

SEQ ID NO: 27690 - DNA, 22 bp, synthetic construct
  misc_feature 1..22: note = chemically synthesized
  source 1..22: mol_type = other DNA
gtttttcaacccctaagctgcc

SEQ ID NO: 27691 - DNA, 22 bp, synthetic construct
  misc_feature 1..22: note = chemically synthesized
  source 1..22: mol_type = other DNA
tttttcaacccctaagctgcct

SEQ ID NO: 27692 - DNA, 22 bp, synthetic construct
  misc_feature 1..22: note = chemically synthesized
  source 1..22: mol_type = other DNA
ttcaacccctaagctgccttta

SEQ ID NO: 27693 - DNA, 22 bp, synthetic construct
  misc_feature 1..22: note = chemically synthesized
  source 1..22: mol_type = other DNA
tcaacccctaagctgcctttaa

SEQ ID NO: 27694 - DNA, 22 bp, synthetic construct
  misc_feature 1..22: note = chemically synthesized
  source 1..22: mol_type = other DNA
caacccctaagctgcctttaat

SEQ ID NO: 27695 - DNA, 22 bp, synthetic construct
  misc_feature 1..22: note = chemically synthesized
  source 1..22: mol_type = other DNA
aacccctaagctgcctttaata

SEQ ID NO: 27696 - DNA, 22 bp, synthetic construct
  misc_feature 1..22: note = chemically synthesized
  source 1..22: mol_type = other DNA
agctgcctttaatacttatttt

SEQ ID NO: 27697 - DNA, 22 bp, synthetic construct
  misc_feature 1..22: note = chemically synthesized
  source 1..22: mol_type = other DNA
cctttaatacttattttctatc

SEQ ID NO: 27698 - DNA, 22 bp, synthetic construct
  misc_feature 1..22: note = chemically synthesized
  source 1..22: mol_type = other DNA
taatacttattttctatcattt

SEQ ID NO: 27699 - DNA, 22 bp, synthetic construct
  misc_feature 1..22: note = chemically synthesized
  source 1..22: mol_type = other DNA
aatacttattttctatcatttc

SEQ ID NO: 27700 - DNA, 22 bp, synthetic construct
  misc_feature 1..22: note = chemically synthesized
  source 1..22: mol_type = other DNA
atacttattttctatcatttcc

SEQ ID NO: 27701 - DNA, 22 bp, synthetic construct
  misc_feature 1..22: note = chemically synthesized
  source 1..22: mol_type = other DNA
attttctatcatttccctttca

SEQ ID NO: 27702 - DNA, 22 bp, synthetic construct
  misc_feature 1..22: note = chemically synthesized
  source 1..22: mol_type = other DNA
ttttctatcatttccctttcaa

SEQ ID NO: 27703 - DNA, 22 bp, synthetic construct
  misc_feature 1..22: note = chemically synthesized
  source 1..22: mol_type = other DNA
tctatcatttccctttcaaggg

SEQ ID NO: 27704 - DNA, 22 bp, synthetic construct
  misc_feature 1..22: note = chemically synthesized
  source 1..22: mol_type = other DNA
ctatcatttccctttcaagggg

SEQ ID NO: 27705 - DNA, 22 bp, synthetic construct
  misc_feature 1..22: note = chemically synthesized
  source 1..22: mol_type = other DNA
tatcatttccctttcaagggga

SEQ ID NO: 27706 - DNA, 22 bp, synthetic construct
  misc_feature 1..22: note = chemically synthesized
  source 1..22: mol_type = other DNA
tcatttccctttcaaggggaag

SEQ ID NO: 27707 - DNA, 22 bp, synthetic construct
  misc_feature 1..22: note = chemically synthesized
  source 1..22: mol_type = other DNA
ccctttcaaggggaagggaagt

SEQ ID NO: 27708 - DNA, 22 bp, synthetic construct
  misc_feature 1..22: note = chemically synthesized
  source 1..22: mol_type = other DNA
cctttcaaggggaagggaagtg

SEQ ID NO: 27709 - DNA, 22 bp, synthetic construct
  misc_feature 1..22: note = chemically synthesized
  source 1..22: mol_type = other DNA
tcaaggggaagggaagtgtttt

SEQ ID NO: 27710 - DNA, 22 bp, synthetic construct
  misc_feature 1..22: note = chemically synthesized
  source 1..22: mol_type = other DNA
caaggggaagggaagtgttttt

SEQ ID NO: 27711 - DNA, 22 bp, synthetic construct
  misc_feature 1..22: note = chemically synthesized
  source 1..22: mol_type = other DNA
aaggggaagggaagtgtttttg

SEQ ID NO: 27712 - DNA, 22 bp, synthetic construct
  misc_feature 1..22: note = chemically synthesized
  source 1..22: mol_type = other DNA
ttgtggagaggtccccacaatg

SEQ ID NO: 27713 - DNA, 22 bp, synthetic construct
  misc_feature 1..22: note = chemically synthesized
  source 1..22: mol_type = other DNA
tgtggagaggtccccacaatgt

SEQ ID NO: 27714 - DNA, 22 bp, synthetic construct
  misc_feature 1..22: note = chemically synthesized
  source 1..22: mol_type = other DNA
gtggagaggtccccacaatgtg

SEQ ID NO: 27715 - DNA, 22 bp, synthetic construct
  misc_feature 1..22: note = chemically synthesized
  source 1..22: mol_type = other DNA
tggagaggtccccacaatgtga

SEQ ID NO: 27716 - DNA, 22 bp, synthetic construct
  misc_feature 1..22: note = chemically synthesized
  source 1..22: mol_type = other DNA
acacaagttgatatcatcttca

SEQ ID NO: 27717 - DNA, 22 bp, synthetic construct
  misc_feature 1..22: note = chemically synthesized
  source 1..22: mol_type = other DNA
cacaagttgatatcatcttcaa

SEQ ID NO: 27718 - DNA, 22 bp, synthetic construct
  misc_feature 1..22: note = chemically synthesized
  source 1..22: mol_type = other DNA
atatcatcttcaatgtatcttt

SEQ ID NO: 27719 - DNA, 22 bp, synthetic construct
  misc_feature 1..22: note = chemically synthesized
  source 1..22: mol_type = other DNA
caatgtatctttattttaatat

SEQ ID NO: 27720 - DNA, 22 bp, synthetic construct
  misc_feature 1..22: note = chemically synthesized
  source 1..22: mol_type = other DNA
aatgtatctttattttaatatt

SEQ ID NO: 27721 - DNA, 22 bp, synthetic construct
  misc_feature 1..22: note = chemically synthesized
  source 1..22: mol_type = other DNA
tattttaatattatcatagcct

SEQ ID NO: 27722 - DNA, 22 bp, synthetic construct
  misc_feature 1..22: note = chemically synthesized
  source 1..22: mol_type = other DNA
attttaatattatcatagcctg

SEQ ID NO: 27723 - DNA, 22 bp, synthetic construct
  misc_feature 1..22: note = chemically synthesized
  source 1..22: mol_type = other DNA
ttttaatattatcatagcctgg

SEQ ID NO: 27724 - DNA, 22 bp, synthetic construct
  misc_feature 1..22: note = chemically synthesized
  source 1..22: mol_type = other DNA
taatattatcatagcctggtat

SEQ ID NO: 27725 - DNA, 22 bp, synthetic construct
  misc_feature 1..22: note = chemically synthesized
  source 1..22: mol_type = other DNA
aatattatcatagcctggtatg

SEQ ID NO: 27726 - DNA, 22 bp, synthetic construct
  misc_feature 1..22: note = chemically synthesized
  source 1..22: mol_type = other DNA
atattatcatagcctggtatgg

SEQ ID NO: 27727 - DNA, 22 bp, synthetic construct
  misc_feature 1..22: note = chemically synthesized
  source 1..22: mol_type = other DNA
tcatagcctggtatggtttgag

SEQ ID NO: 27728 - DNA, 22 bp, synthetic construct
  misc_feature 1..22: note = chemically synthesized
  source 1..22: mol_type = other DNA
gtatggtttgagattttcatat

SEQ ID NO: 27729 - DNA, 22 bp, synthetic construct
  misc_feature 1..22: note = chemically synthesized
  source 1..22: mol_type = other DNA
gagattttcatatagatggata

SEQ ID NO: 27730 - DNA, 22 bp, synthetic construct
  misc_feature 1..22: note = chemically synthesized
  source 1..22: mol_type = other DNA
agattttcatatagatggataa

SEQ ID NO: 27731 - DNA, 22 bp, synthetic construct
  misc_feature 1..22: note = chemically synthesized
  source 1..22: mol_type = other DNA
tcatatagatggataattattg

SEQ ID NO: 27732 - DNA, 22 bp, synthetic construct
  misc_feature 1..22: note = chemically synthesized
  source 1..22: mol_type = other DNA
catatagatggataattattgt

SEQ ID NO: 27733 - DNA, 22 bp, synthetic construct
  misc_feature 1..22: note = chemically synthesized
  source 1..22: mol_type = other DNA
atatagatggataattattgtg

SEQ ID NO: 27734 - DNA, 22 bp, synthetic construct
  misc_feature 1..22: note = chemically synthesized
  source 1..22: mol_type = other DNA
ttgtgtttattcctaataatac

SEQ ID NO: 27735 - DNA, 22 bp, synthetic construct
  misc_feature 1..22: note = chemically synthesized
  source 1..22: mol_type = other DNA
tgtttattcctaataatacatt

SEQ ID NO: 27736 - DNA, 22 bp, synthetic construct
  misc_feature 1..22: note = chemically synthesized
  source 1..22: mol_type = other DNA
attcctaataatacattgccac

SEQ ID NO: 27737 - DNA, 22 bp, synthetic construct
  misc_feature 1..22: note = chemically synthesized
  source 1..22: mol_type = other DNA
ttcctaataatacattgccact

SEQ ID NO: 27738 - DNA, 22 bp, synthetic construct
  misc_feature 1..22: note = chemically synthesized
  source 1..22: mol_type = other DNA
ctaataatacattgccactata

SEQ ID NO: 27739 - DNA, 22 bp, synthetic construct
  misc_feature 1..22: note = chemically synthesized
  source 1..22: mol_type = other DNA
ataatacattgccactatagtt

SEQ ID NO: 27740 - DNA, 22 bp, synthetic construct
  misc_feature 1..22: note = chemically synthesized
  source 1..22: mol_type = other DNA
ccactatagtttctttaaattt

SEQ ID NO: 27741 - DNA, 22 bp, synthetic construct
  misc_feature 1..22: note = chemically synthesized
  source 1..22: mol_type = other DNA
tagtttctttaaatttaatgat

SEQ ID NO: 27742 - DNA, 22 bp, synthetic construct
  misc_feature 1..22: note = chemically synthesized
  source 1..22: mol_type = other DNA
ctttaaatttaatgatttgaat

SEQ ID NO: 27743 - DNA, 22 bp, synthetic construct
  misc_feature 1..22: note = chemically synthesized
  source 1..22: mol_type = other DNA
tttaaatttaatgatttgaatt

SEQ ID NO: 27744 - DNA, 22 bp, synthetic construct
  misc_feature 1..22: note = chemically synthesized
  source 1..22: mol_type = other DNA
taaatttaatgatttgaatttt

SEQ ID NO: 27745 - DNA, 22 bp, synthetic construct
  misc_feature 1..22: note = chemically synthesized
  source 1..22: mol_type = other DNA
aaatttaatgatttgaattttt

SEQ ID NO: 27746 - DNA, 22 bp, synthetic construct
  misc_feature 1..22: note = chemically synthesized
  source 1..22: mol_type = other DNA
aatttaatgatttgaattttta

SEQ ID NO: 27747 - DNA, 22 bp, synthetic construct
  misc_feature 1..22: note = chemically synthesized
  source 1..22: mol_type = other DNA
aatgatttgaatttttacttcc

SEQ ID NO: 27748 - DNA, 22 bp, synthetic construct
  misc_feature 1..22: note = chemically synthesized
  source 1..22: mol_type = other DNA
atgatttgaatttttacttccc

SEQ ID NO: 27749 - DNA, 22 bp, synthetic construct
  misc_feature 1..22: note = chemically synthesized
  source 1..22: mol_type = other DNA
gaatttttacttccctgcattt

SEQ ID NO: 27750 - DNA, 22 bp, synthetic construct
  misc_feature 1..22: note = chemically synthesized
  source 1..22: mol_type = other DNA
aatttttacttccctgcatttc

SEQ ID NO: 27751 - DNA, 22 bp, synthetic construct
  misc_feature 1..22: note = chemically synthesized
  source 1..22: mol_type = other DNA
ttacttccctgcatttcatagt

SEQ ID NO: 27752 - DNA, 22 bp, synthetic construct
  misc_feature 1..22: note = chemically synthesized
  source 1..22: mol_type = other DNA
tacttccctgcatttcatagta

SEQ ID NO: 27753 - DNA, 22 bp, synthetic construct
  misc_feature 1..22: note = chemically synthesized
  source 1..22: mol_type = other DNA
acttccctgcatttcatagtag

SEQ ID NO: 27754 - DNA, 22 bp, synthetic construct
  misc_feature 1..22: note = chemically synthesized
  source 1..22: mol_type = other DNA
cttccctgcatttcatagtagt

SEQ ID NO: 27755 - DNA, 22 bp, synthetic construct
  misc_feature 1..22: note = chemically synthesized
  source 1..22: mol_type = other DNA
ccctgcatttcatagtagtgat

SEQ ID NO: 27756 - DNA, 22 bp, synthetic construct
  misc_feature 1..22: note = chemically synthesized
  source 1..22: mol_type = other DNA
cctgcatttcatagtagtgata

SEQ ID NO: 27757 - DNA, 22 bp, synthetic construct
  misc_feature 1..22: note = chemically synthesized
  source 1..22: mol_type = other DNA
catttcatagtagtgatatgag

SEQ ID NO: 27758 - DNA, 22 bp, synthetic construct
  misc_feature 1..22: note = chemically synthesized
  source 1..22: mol_type = other DNA
catagtagtgatatgaggtatc

SEQ ID NO: 27759 - DNA, 22 bp, synthetic construct
  misc_feature 1..22: note = chemically synthesized
  source 1..22: mol_type = other DNA
atagtagtgatatgaggtatct

SEQ ID NO: 27760 - DNA, 22 bp, synthetic construct
  misc_feature 1..22: note = chemically synthesized
  source 1..22: mol_type = other DNA
agagatcatgaatcccactcct

SEQ ID NO: 27761 - DNA, 22 bp, synthetic construct
  misc_feature 1..22: note = chemically synthesized
  source 1..22: mol_type = other DNA
gagatcatgaatcccactcctc

SEQ ID NO: 27762 - DNA, 22 bp, synthetic construct
  misc_feature 1..22: note = chemically synthesized
  source 1..22: mol_type = other DNA
ctccagttcatagagcaaattg

SEQ ID NO: 27763 - DNA, 22 bp, synthetic construct
  misc_feature 1..22: note = chemically synthesized
  source 1..22: mol_type = other DNA
cagttcatagagcaaattgatt

SEQ ID NO: 27764 - DNA, 22 bp, synthetic construct
  misc_feature 1..22: note = chemically synthesized
  source 1..22: mol_type = other DNA
atagagcaaattgattcgtaga

SEQ ID NO: 27765 - DNA, 22 bp, synthetic construct
  misc_feature 1..22: note = chemically synthesized
  source 1..22: mol_type = other DNA
attcgtagaggtatttaatgat

SEQ ID NO: 27766 - DNA, 22 bp, synthetic construct
  misc_feature 1..22: note = chemically synthesized
  source 1..22: mol_type = other DNA
gtagaggtatttaatgatcaag

SEQ ID NO: 27767 - DNA, 22 bp, synthetic construct
  misc_feature 1..22: note = chemically synthesized
  source 1..22: mol_type = other DNA
aatgatcaagcaaatggcagag

SEQ ID NO: 27768 - DNA, 22 bp, synthetic construct
  misc_feature 1..22: note = chemically synthesized
  source 1..22: mol_type = other DNA
atgatcaagcaaatggcagagt

SEQ ID NO: 27769 - DNA, 22 bp, synthetic construct
  misc_feature 1..22: note = chemically synthesized
  source 1..22: mol_type = other DNA
ggaccaggatttaggtcttttc

SEQ ID NO: 27770 - DNA, 22 bp, synthetic construct
  misc_feature 1..22: note = chemically synthesized
  source 1..22: mol_type = other DNA
aggtcttttccaaggccaattc

SEQ ID NO: 27771 - DNA, 22 bp, synthetic construct
  misc_feature 1..22: note = chemically synthesized
  source 1..22: mol_type = other DNA
ggtcttttccaaggccaattca

SEQ ID NO: 27772 - DNA, 22 bp, synthetic construct
  misc_feature 1..22: note = chemically synthesized
  source 1..22: mol_type = other DNA
ttccaaggccaattcacttttt

SEQ ID NO: 27773 - DNA, 22 bp, synthetic construct
  misc_feature 1..22: note = chemically synthesized
  source 1..22: mol_type = other DNA
tccaaggccaattcactttttt

SEQ ID NO: 27774 - DNA, 22 bp, synthetic construct
  misc_feature 1..22: note = chemically synthesized
  source 1..22: mol_type = other DNA
ccaaggccaattcactttttta

SEQ ID NO: 27775 - DNA, 22 bp, synthetic construct
  misc_feature 1..22: note = chemically synthesized
  source 1..22: mol_type = other DNA
caaggccaattcacttttttac

SEQ ID NO: 27776 - DNA, 22 bp, synthetic construct
  misc_feature 1..22: note = chemically synthesized
  source 1..22: mol_type = other DNA
acttttttactattatgtaaga

SEQ ID NO: 27777 - DNA, 22 bp, synthetic construct
  misc_feature 1..22: note = chemically synthesized
  source 1..22: mol_type = other DNA
ttttactattatgtaagaatta

SEQ ID NO: 27778 - DNA, 22 bp, synthetic construct
  misc_feature 1..22: note = chemically synthesized
  source 1..22: mol_type = other DNA
tttactattatgtaagaattaa

SEQ ID NO: 27779 - DNA, 22 bp, synthetic construct
  misc_feature 1..22: note = chemically synthesized
  source 1..22: mol_type = other DNA
ttactattatgtaagaattaaa

SEQ ID NO: 27780 - DNA, 22 bp, synthetic construct
  misc_feature 1..22: note = chemically synthesized
  source 1..22: mol_type = other DNA
tactattatgtaagaattaaat

SEQ ID NO: 27781 - DNA, 22 bp, synthetic construct
  misc_feature 1..22: note = chemically synthesized
  source 1..22: mol_type = other DNA
actattatgtaagaattaaata

SEQ ID NO: 27782 - DNA, 22 bp, synthetic construct
  misc_feature 1..22: note = chemically synthesized
  source 1..22: mol_type = other DNA
ctattatgtaagaattaaatat

SEQ ID NO: 27783 - DNA, 22 bp, synthetic construct
  misc_feature 1..22: note = chemically synthesized
  source 1..22: mol_type = other DNA
ttatgtaagaattaaatattaa

SEQ ID NO: 27784 - DNA, 22 bp, synthetic construct
  misc_feature 1..22: note = chemically synthesized
  source 1..22: mol_type = other DNA
tgtaagaattaaatattaaaac

SEQ ID NO: 27785 - DNA, 22 bp, synthetic construct
  misc_feature 1..22: note = chemically synthesized
  source 1..22: mol_type = other DNA
aatattaaaacctcagttttca

SEQ ID NO: 27786 - DNA, 22 bp, synthetic construct
  misc_feature 1..22: note = chemically synthesized
  source 1..22: mol_type = other DNA
aaacctcagttttcaaaggaaa

SEQ ID NO: 27787 - DNA, 22 bp, synthetic construct
  misc_feature 1..22: note = chemically synthesized
  source 1..22: mol_type = other DNA
agttttcaaaggaaatgtccta

SEQ ID NO: 27788 - DNA, 22 bp, synthetic construct
  misc_feature 1..22: note = chemically synthesized
  source 1..22: mol_type = other DNA
tcaaaggaaatgtcctatagat

SEQ ID NO: 27789 - DNA, 22 bp, synthetic construct
  misc_feature 1..22: note = chemically synthesized
  source 1..22: mol_type = other DNA
caaaggaaatgtcctatagatg

SEQ ID NO: 27790 - DNA, 22 bp, synthetic construct
  misc_feature 1..22: note = chemically synthesized
  source 1..22: mol_type = other DNA
aaaggaaatgtcctatagatga

SEQ ID NO: 27791 - DNA, 22 bp, synthetic construct
  misc_feature 1..22: note = chemically synthesized
  source 1..22: mol_type = other DNA
tagatgaaagaacacagtactt

SEQ ID NO: 27792 - DNA, 22 bp, synthetic construct
  misc_feature 1..22: note = chemically synthesized
  source 1..22: mol_type = other DNA
gcagtcaaaggtcttggatttc

SEQ ID NO: 27793 - DNA, 22 bp, synthetic construct
  misc_feature 1..22: note = chemically synthesized
  source 1..22: mol_type = other DNA
cagtcaaaggtcttggatttct

SEQ ID NO: 27794 - DNA, 22 bp, synthetic construct
  misc_feature 1..22: note = chemically synthesized
  source 1..22: mol_type = other DNA
ggatttctgaaactttctgaaa

SEQ ID NO: 27795 - DNA, 22 bp, synthetic construct
  misc_feature 1..22: note = chemically synthesized
  source 1..22: mol_type = other DNA
gatttctgaaactttctgaaaa

SEQ ID NO: 27796 - DNA, 22 bp, synthetic construct
  misc_feature 1..22: note = chemically synthesized
  source 1..22: mol_type = other DNA
ctgaaactttctgaaaaagaac

SEQ ID NO: 27797 - DNA, 22 bp, synthetic construct
  misc_feature 1..22: note = chemically synthesized
  source 1..22: mol_type = other DNA
tgaaactttctgaaaaagaacc

SEQ ID NO: 27798 - DNA, 22 bp, synthetic construct
  misc_feature 1..22: note = chemically synthesized
  source 1..22: mol_type = other DNA
aaactttctgaaaaagaacccc

SEQ ID NO: 27799 - DNA, 22 bp, synthetic construct
  misc_feature 1..22: note = chemically synthesized
  source 1..22: mol_type = other DNA
tctgaaaaagaaccccttaaac

SEQ ID NO: 27800 - DNA, 22 bp, synthetic construct
  misc_feature 1..22: note = chemically synthesized
  source 1..22: mol_type = other DNA
ctgaaaaagaaccccttaaact

SEQ ID NO: 27801 - DNA, 22 bp, synthetic construct
  misc_feature 1..22: note = chemically synthesized
  source 1..22: mol_type = other DNA
tgaaaaagaaccccttaaactg

SEQ ID NO: 27802 - DNA, 22 bp, synthetic construct
  misc_feature 1..22: note = chemically synthesized
  source 1..22: mol_type = other DNA
aaaaagaaccccttaaactgaa

SEQ ID NO: 27803 - DNA, 22 bp, synthetic construct
  misc_feature 1..22: note = chemically synthesized
  source 1..22: mol_type = other DNA
aaactgaataacagtttcttca

SEQ ID NO: 27804 - DNA, 22 bp, synthetic construct
  misc_feature 1..22: note = chemically synthesized
  source 1..22: mol_type = other DNA
aactgaataacagtttcttcat

SEQ ID NO: 27805 - DNA, 22 bp, synthetic construct
  misc_feature 1..22: note = chemically synthesized
  source 1..22: mol_type = other DNA
aataacagtttcttcatgaata

SEQ ID NO: 27806 - DNA, 22 bp, synthetic construct
  misc_feature 1..22: note = chemically synthesized
  source 1..22: mol_type = other DNA
cttcatgaataaaatgaatgtt

SEQ ID NO: 27807 - DNA, 22 bp, synthetic construct
  misc_feature 1..22: note = chemically synthesized
  source 1..22: mol_type = other DNA
ttcatgaataaaatgaatgtta

SEQ ID NO: 27808 - DNA, 22 bp, synthetic construct
  misc_feature 1..22: note = chemically synthesized
  source 1..22: mol_type = other DNA
catgaataaaatgaatgttata

SEQ ID NO: 27809 - DNA, 22 bp, synthetic construct
  misc_feature 1..22: note = chemically synthesized
  source 1..22: mol_type = other DNA
atgaataaaatgaatgttatac

SEQ ID NO: 27810 - DNA, 22 bp, synthetic construct
  misc_feature 1..22: note = chemically synthesized
  source 1..22: mol_type = other DNA
tactctccagttatcttaccat

SEQ ID NO: 27811 - DNA, 22 bp, synthetic construct
  misc_feature 1..22: note = chemically synthesized
  source 1..22: mol_type = other DNA
tccagttatcttaccatgtttt

SEQ ID NO: 27812 - DNA, 22 bp, synthetic construct
  misc_feature 1..22: note = chemically synthesized
  source 1..22: mol_type = other DNA
cagttatcttaccatgttttct

SEQ ID NO: 27813 - DNA, 22 bp, synthetic construct
  misc_feature 1..22: note = chemically synthesized
  source 1..22: mol_type = other DNA
tcttaccatgttttctggcaaa

SEQ ID NO: 27814 - DNA, 22 bp, synthetic construct
  misc_feature 1..22: note = chemically synthesized
  source 1..22: mol_type = other DNA
accatgttttctggcaaacaag

SEQ ID NO: 27815 - DNA, 22 bp, synthetic construct
  misc_feature 1..22: note = chemically synthesized
  source 1..22: mol_type = other DNA
ccatgttttctggcaaacaagg

SEQ ID NO: 27816 - DNA, 22 bp, synthetic construct
  misc_feature 1..22: note = chemically synthesized
  source 1..22: mol_type = other DNA
tctggcaaacaaggaaatgtat

SEQ ID NO: 27817 - DNA, 22 bp, synthetic construct
  misc_feature 1..22: note = chemically synthesized
  source 1..22: mol_type = other DNA
ctggcaaacaaggaaatgtatt

SEQ ID NO: 27818 - DNA, 22 bp, synthetic construct
  misc_feature 1..22: note = chemically synthesized
  source 1..22: mol_type = other DNA
tggcaaacaaggaaatgtattc

SEQ ID NO: 27819 - DNA, 22 bp, synthetic construct
  misc_feature 1..22: note = chemically synthesized
  source 1..22: mol_type = other DNA
gcaaacaaggaaatgtattcac

SEQ ID NO: 27820 - DNA, 22 bp, synthetic construct
  misc_feature 1..22: note = chemically synthesized
  source 1..22: mol_type = other DNA
acatccaagaaaacaaaaggtt

SEQ ID NO: 27821 - DNA, 22 bp, synthetic construct
  misc_feature 1..22: note = chemically synthesized
  source 1..22: mol_type = other DNA
cttaggagaagaatcccttgct

SEQ ID NO: 27822 - DNA, 22 bp, synthetic construct
  misc_feature 1..22: note = chemically synthesized
  source 1..22: mol_type = other DNA
ttaggagaagaatcccttgctg

SEQ ID NO: 27823 - DNA, 22 bp, synthetic construct
  misc_feature 1..22: note = chemically synthesized
  source 1..22: mol_type = other DNA
aggagaagaatcccttgctgcc

SEQ ID NO: 27824 - DNA, 22 bp, synthetic construct
  misc_feature 1..22: note = chemically synthesized
  source 1..22: mol_type = other DNA
ggagaagaatcccttgctgcca

SEQ ID NO: 27825 - DNA, 22 bp, synthetic construct
  misc_feature 1..22: note = chemically synthesized
  source 1..22: mol_type = other DNA
gctgccagaattttgcccatga

SEQ ID NO: 27826 - DNA, 22 bp, synthetic construct
  misc_feature 1..22: note = chemically synthesized
  source 1..22: mol_type = other DNA
ctgccagaattttgcccatgaa

SEQ ID NO: 27827 - DNA, 22 bp, synthetic construct
  misc_feature 1..22: note = chemically synthesized
  source 1..22: mol_type = other DNA
ccagaattttgcccatgaacaa

SEQ ID NO: 27828 - DNA, 22 bp, synthetic construct
  misc_feature 1..22: note = chemically synthesized
  source 1..22: mol_type = other DNA
tgcccatgaacaatggaaacgt

SEQ ID NO: 27829 - DNA, 22 bp, synthetic construct
  misc_feature 1..22: note = chemically synthesized
  source 1..22: mol_type = other DNA
gcccatgaacaatggaaacgtg

SEQ ID NO: 27830 - DNA, 22 bp, synthetic construct
  misc_feature 1..22: note = chemically synthesized
  source 1..22: mol_type = other DNA
cccatgaacaatggaaacgtga

SEQ ID NO: 27831 - DNA, 22 bp, synthetic construct
  misc_feature 1..22: note = chemically synthesized
  source 1..22: mol_type = other DNA
gttttgggtactaattctcaga

SEQ ID NO: 27832 - DNA, 22 bp, synthetic construct
  misc_feature 1..22: note = chemically synthesized
  source 1..22: mol_type = other DNA
tgggtactaattctcagacttc

SEQ ID NO: 27833 - DNA, 22 bp, synthetic construct
  misc_feature 1..22: note = chemically synthesized
  source 1..22: mol_type = other DNA
gggtactaattctcagacttca

SEQ ID NO: 27834 - DNA, 22 bp, synthetic construct
  misc_feature 1..22: note = chemically synthesized
  source 1..22: mol_type = other DNA
ggtactaattctcagacttcaa

SEQ ID NO: 27835 - DNA, 22 bp, synthetic construct
  misc_feature 1..22: note = chemically synthesized
  source 1..22: mol_type = other DNA
attctcagacttcaaaataacc

SEQ ID NO: 27836 - DNA, 22 bp, synthetic construct
  misc_feature 1..22: note = chemically synthesized
  source 1..22: mol_type = other DNA
tcagacttcaaaataacctttt

SEQ ID NO: 27837 - DNA, 22 bp, synthetic construct
  misc_feature 1..22: note = chemically synthesized
  source 1..22: mol_type = other DNA
agacttcaaaataaccttttta

SEQ ID NO: 27838 - DNA, 22 bp, synthetic construct
  misc_feature 1..22: note = chemically synthesized
  source 1..22: mol_type = other DNA
caaaataacctttttaatttat

SEQ ID NO: 27839 - DNA, 22 bp, synthetic construct
  misc_feature 1..22: note = chemically synthesized
  source 1..22: mol_type = other DNA
aaaataacctttttaatttatt

SEQ ID NO: 27840 - DNA, 22 bp, synthetic construct
  misc_feature 1..22: note = chemically synthesized
  source 1..22: mol_type = other DNA
tttaatttattaatattaacct

SEQ ID NO: 27841 - DNA, 22 bp, synthetic construct
  misc_feature 1..22: note = chemically synthesized
  source 1..22: mol_type = other DNA
ttaatttattaatattaacctt

SEQ ID NO: 27842 - DNA, 22 bp, synthetic construct
  misc_feature 1..22: note = chemically synthesized
  source 1..22: mol_type = other DNA
taatttattaatattaaccttg

SEQ ID NO: 27843 - DNA, 22 bp, synthetic construct
  misc_feature 1..22: note = chemically synthesized
  source 1..22: mol_type = other DNA
aatttattaatattaaccttga

SEQ ID NO: 27844 - DNA, 22 bp, synthetic construct
  misc_feature 1..22: note = chemically synthesized
  source 1..22: mol_type = other DNA
atttattaatattaaccttgaa

SEQ ID NO: 27845 - DNA, 22 bp, synthetic construct
  misc_feature 1..22: note = chemically synthesized
  source 1..22: mol_type = other DNA
attaatattaaccttgaaattt

SEQ ID NO: 27846 - DNA, 22 bp, synthetic construct
  misc_feature 1..22: note = chemically synthesized
  source 1..22: mol_type = other DNA
ttaatattaaccttgaaattta

SEQ ID NO: 27847 - DNA, 22 bp, synthetic construct
  misc_feature 1..22: note = chemically synthesized
  source 1..22: mol_type = other DNA
atattaaccttgaaatttattg

SEQ ID NO: 27848 - DNA, 22 bp, synthetic construct
  misc_feature 1..22: note = chemically synthesized
  source 1..22: mol_type = other DNA
accttgaaatttattgctttta

SEQ ID NO: 27849 - DNA, 22 bp, synthetic construct
  misc_feature 1..22: note = chemically synthesized
  source 1..22: mol_type = other DNA
gaaatttattgcttttattcat

SEQ ID NO: 27850 - DNA, 22 bp, synthetic construct
  misc_feature 1..22: note = chemically synthesized
  source 1..22: mol_type = other DNA
aaatttattgcttttattcatt

SEQ ID NO: 27851 - DNA, 22 bp, synthetic construct
  misc_feature 1..22: note = chemically synthesized
  source 1..22: mol_type = other DNA
attgcttttattcattaatcca

SEQ ID NO: 27852 - DNA, 22 bp, synthetic construct
  misc_feature 1..22: note = chemically synthesized
  source 1..22: mol_type = other DNA
ttgcttttattcattaatccat

SEQ ID NO: 27853 - DNA, 22 bp, synthetic construct
  misc_feature 1..22: note = chemically synthesized
  source 1..22: mol_type = other DNA
cttttattcattaatccatttt

SEQ ID NO: 27854 - DNA, 22 bp, synthetic construct
  misc_feature 1..22: note = chemically synthesized
  source 1..22: mol_type = other DNA
ttattcattaatccattttatt

SEQ ID NO: 27855 - DNA, 22 bp, synthetic construct
  misc_feature 1..22: note = chemically synthesized
  source 1..22: mol_type = other DNA
tattcattaatccattttatta

SEQ ID NO: 27856 - DNA, 22 bp, synthetic construct
  misc_feature 1..22: note = chemically synthesized
  source 1..22: mol_type = other DNA
attcattaatccattttattat

SEQ ID NO: 27857 - DNA, 22 bp, synthetic construct
  misc_feature 1..22: note = chemically synthesized
  source 1..22: mol_type = other DNA
ttcattaatccattttattatt

SEQ ID NO: 27858 - DNA, 22 bp, synthetic construct
  misc_feature 1..22: note = chemically synthesized
  source 1..22: mol_type = other DNA
attaatccattttattattcag

SEQ ID NO: 27859 - DNA, 22 bp, synthetic construct
  misc_feature 1..22: note = chemically synthesized
  source 1..22: mol_type = other DNA
atccattttattattcagtaag

SEQ ID NO: 27860 - DNA, 22 bp, synthetic construct
  misc_feature 1..22: note = chemically synthesized
  source 1..22: mol_type = other DNA
tattattcagtaaggattcatc

SEQ ID NO: 27861 - DNA, 22 bp, synthetic construct
  misc_feature 1..22: note = chemically synthesized
  source 1..22: mol_type = other DNA
attattcagtaaggattcatca

SEQ ID NO: 27862 - DNA, 22 bp, synthetic construct
  misc_feature 1..22: note = chemically synthesized
  source 1..22: mol_type = other DNA
ttattcagtaaggattcatcaa

SEQ ID NO: 27863 - DNA, 22 bp, synthetic construct
  misc_feature 1..22: note = chemically synthesized
  source 1..22: mol_type = other DNA
ttcagtaaggattcatcaagtg

SEQ ID NO: 27864 - DNA, 22 bp, synthetic construct
  misc_feature 1..22: note = chemically synthesized
  source 1..22: mol_type = other DNA
agtaaggattcatcaagtgtct

SEQ ID NO: 27865 - DNA, 22 bp, synthetic construct
  misc_feature 1..22: note = chemically synthesized
  source 1..22: mol_type = other DNA
atcaagtgtctattaggtatca

SEQ ID NO: 27866 - DNA, 22 bp, synthetic construct
  misc_feature 1..22: note = chemically synthesized
  source 1..22: mol_type = other DNA
ttaggtatcaggcactgagagg

SEQ ID NO: 27867 - DNA, 22 bp, synthetic construct
  misc_feature 1..22: note = chemically synthesized
  source 1..22: mol_type = other DNA
ggtatcaggcactgagaggcga

SEQ ID NO: 27868 - DNA, 22 bp, synthetic construct
  misc_feature 1..22: note = chemically synthesized
  source 1..22: mol_type = other DNA
agaggcgagggagatagagtta

SEQ ID NO: 27869 - DNA, 22 bp, synthetic construct
  misc_feature 1..22: note = chemically synthesized
  source 1..22: mol_type = other DNA
agaatacagaactgattcttaa

SEQ ID NO: 27870 - DNA, 22 bp, synthetic construct
  misc_feature 1..22: note = chemically synthesized
  source 1..22: mol_type = other DNA
attcttaatcttcaagaattga

SEQ ID NO: 27871 - DNA, 22 bp, synthetic construct
  misc_feature 1..22: note = chemically synthesized
  source 1..22: mol_type = other DNA
ttaatcttcaagaattgacaaa

SEQ ID NO: 27872 - DNA, 22 bp, synthetic construct
  misc_feature 1..22: note = chemically synthesized
  source 1..22: mol_type = other DNA
aatcttcaagaattgacaaatt

SEQ ID NO: 27873 - DNA, 22 bp, synthetic construct
  misc_feature 1..22: note = chemically synthesized
  source 1..22: mol_type = other DNA
atcttcaagaattgacaaattt

SEQ ID NO: 27874 - DNA, 22 bp, synthetic construct
  misc_feature 1..22: note = chemically synthesized
  source 1..22: mol_type = other DNA
caagaattgacaaatttgtaga

SEQ ID NO: 27875 - DNA, 22 bp, synthetic construct
  misc_feature 1..22: note = chemically synthesized
  source 1..22: mol_type = other DNA
aagaattgacaaatttgtagaa

SEQ ID NO: 27876 - DNA, 22 bp, synthetic construct
  misc_feature 1..22: note = chemically synthesized
  source 1..22: mol_type = other DNA
acaaatttgtagaaggtagaca

SEQ ID NO: 27877 - DNA, 22 bp, synthetic construct
  misc_feature 1..22: note = chemically synthesized
  source 1..22: mol_type = other DNA
gtagaaggtagacattgaacat

SEQ ID NO: 27878 - DNA, 22 bp, synthetic construct
  misc_feature 1..22: note = chemically synthesized
  source 1..22: mol_type = other DNA
tagaaggtagacattgaacata

SEQ ID NO: 27879 - DNA, 22 bp, synthetic construct
  misc_feature 1..22: note = chemically synthesized
  source 1..22: mol_type = other DNA
aacatacaatacagtcaaatgt

SEQ ID NO: 27880 - DNA, 22 bp, synthetic construct
  misc_feature 1..22: note = chemically synthesized
  source 1..22: mol_type = other DNA
agggaaccaggtgtcctaagac

SEQ ID NO: 27881 - DNA, 22 bp, synthetic construct
  misc_feature 1..22: note = chemically synthesized
  source 1..22: mol_type = other DNA
agactatacagtgtaccgtgga

SEQ ID NO: 27882 - DNA, 22 bp, synthetic construct
  misc_feature 1..22: note = chemically synthesized
  source 1..22: mol_type = other DNA
tacagtgtaccgtggaatgggg

SEQ ID NO: 27883 - DNA, 22 bp, synthetic construct
  misc_feature 1..22: note = chemically synthesized
  source 1..22: mol_type = other DNA
ctaacctagttacctagaggtt

SEQ ID NO: 27884 - DNA, 22 bp, synthetic construct
  misc_feature 1..22: note = chemically synthesized
  source 1..22: mol_type = other DNA
taacctagttacctagaggttt

SEQ ID NO: 27885 - DNA, 22 bp, synthetic construct
  misc_feature 1..22: note = chemically synthesized
  source 1..22: mol_type = other DNA
acctagttacctagaggtttgg

SEQ ID NO: 27886 - DNA, 22 bp, synthetic construct
  misc_feature 1..22: note = chemically synthesized
  source 1..22: mol_type = other DNA
gttacctagaggtttgggaaaa

SEQ ID NO: 27887 - DNA, 22 bp, synthetic construct
  misc_feature 1..22: note = chemically synthesized
  source 1..22: mol_type = other DNA
cctagaggtttgggaaaaacct

SEQ ID NO: 27888 - DNA, 22 bp, synthetic construct
  misc_feature 1..22: note = chemically synthesized
  source 1..22: mol_type = other DNA
gaggtttgggaaaaacctctct

SEQ ID NO: 27889 - DNA, 22 bp, synthetic construct
  misc_feature 1..22: note = chemically synthesized
  source 1..22: mol_type = other DNA
gggaaaaacctctctaatgatg

SEQ ID NO: 27890 - DNA, 22 bp, synthetic construct
  misc_feature 1..22: note = chemically synthesized
  source 1..22: mol_type = other DNA
ggaaaaacctctctaatgatga

SEQ ID NO: 27891 - DNA, 22 bp, synthetic construct
  misc_feature 1..22: note = chemically synthesized
  source 1..22: mol_type = other DNA
tctaatgatgagatgtttgagc

SEQ ID NO: 27892 - DNA, 22 bp, synthetic construct
  misc_feature 1..22: note = chemically synthesized
  source 1..22: mol_type = other DNA
taatgatgagatgtttgagctg

SEQ ID NO: 27893 - DNA, 22 bp, synthetic construct
  misc_feature 1..22: note = chemically synthesized
  source 1..22: mol_type = other DNA
atgatgagatgtttgagctgac

SEQ ID NO: 27894 - DNA, 22 bp, synthetic construct
  misc_feature 1..22: note = chemically synthesized
  source 1..22: mol_type = other DNA
gagctgacacttgaaggataaa

SEQ ID NO: 27895 - DNA, 22 bp, synthetic construct
  misc_feature 1..22: note = chemically synthesized
  source 1..22: mol_type = other DNA
agctgacacttgaaggataaat

SEQ ID NO: 27896 - DNA, 22 bp, synthetic construct
  misc_feature 1..22: note = chemically synthesized
  source 1..22: mol_type = other DNA
acacttgaaggataaatagcta

SEQ ID NO: 27897 - DNA, 22 bp, synthetic construct
  misc_feature 1..22: note = chemically synthesized
  source 1..22: mol_type = other DNA
gaaggataaatagctaaagggg

SEQ ID NO: 27898 - DNA, 22 bp, synthetic construct
  misc_feature 1..22: note = chemically synthesized
  source 1..22: mol_type = other DNA
aaggataaatagctaaagggga

SEQ ID NO: 27899 - DNA, 22 bp, synthetic construct
  misc_feature 1..22: note = chemically synthesized
  source 1..22: mol_type = other DNA
aaggggagaaagcgttctatgt

SEQ ID NO: 27900 - DNA, 22 bp, synthetic construct
  misc_feature 1..22: note = chemically synthesized
  source 1..22: mol_type = other DNA
tatgtgagagaactatatatgc

SEQ ID NO: 27901 - DNA, 22 bp, synthetic construct
  misc_feature 1..22: note = chemically synthesized
  source 1..22: mol_type = other DNA
tgtgagagaactatatatgcca

SEQ ID NO: 27902 - DNA, 22 bp, synthetic construct
  misc_feature 1..22: note = chemically synthesized
  source 1..22: mol_type = other DNA
tatatgccaagatgcagaagtg

SEQ ID NO: 27903 - DNA, 22 bp, synthetic construct
  misc_feature 1..22: note = chemically synthesized
  source 1..22: mol_type = other DNA
tctgttcgaagatctgagcggg

SEQ ID NO: 27904 - DNA, 22 bp, synthetic construct
  misc_feature 1..22: note = chemically synthesized
  source 1..22: mol_type = other DNA
tgttcgaagatctgagcggggc

SEQ ID NO: 27905 - DNA, 22 bp, synthetic construct
  misc_feature 1..22: note = chemically synthesized
  source 1..22: mol_type = other DNA
ttcgaagatctgagcggggctc

SEQ ID NO: 27906 - DNA, 22 bp, synthetic construct
  misc_feature 1..22: note = chemically synthesized
  source 1..22: mol_type = other DNA
gaagatctgagcggggctcaga

SEQ ID NO: 27907 - DNA, 22 bp, synthetic construct
  misc_feature 1..22: note = chemically synthesized
  source 1..22: mol_type = other DNA
agcggggctcagagagggaaaa

SEQ ID NO: 27908 - DNA, 22 bp, synthetic construct
  misc_feature 1..22: note = chemically synthesized
  source 1..22: mol_type = other DNA
agagagggaaaaggagaggagt

SEQ ID NO: 27909 - DNA, 22 bp, synthetic construct
  misc_feature 1..22: note = chemically synthesized
  source 1..22: mol_type = other DNA
cagggactagattgtgaagctc

SEQ ID NO: 27910 - DNA, 22 bp, synthetic construct
  misc_feature 1..22: note = chemically synthesized
  source 1..22: mol_type = other DNA
gattgtgaagctcagggggagt

SEQ ID NO: 27911 - DNA, 22 bp, synthetic construct
  misc_feature 1..22: note = chemically synthesized
  source 1..22: mol_type = other DNA
tgaagctcagggggagttaata

SEQ ID NO: 27912 - DNA, 22 bp, synthetic construct
  misc_feature 1..22: note = chemically synthesized
  source 1..22: mol_type = other DNA
agggggagttaatagccttaag

SEQ ID NO: 27913 - DNA, 22 bp, synthetic construct
  misc_feature 1..22: note = chemically synthesized
  source 1..22: mol_type = other DNA
atagccttaaggagttttgtct

SEQ ID NO: 27914 - DNA, 22 bp, synthetic construct
  misc_feature 1..22: note = chemically synthesized
  source 1..22: mol_type = other DNA
aaggagttttgtctccagggta

SEQ ID NO: 27915 - DNA, 22 bp, synthetic construct
  misc_feature 1..22: note = chemically synthesized
  source 1..22: mol_type = other DNA
aggagttttgtctccagggtat

SEQ ID NO: 27916 - DNA, 22 bp, synthetic construct
  misc_feature 1..22: note = chemically synthesized
  source 1..22: mol_type = other DNA
tgtctccagggtatgaacaatg

SEQ ID NO: 27917 - DNA, 22 bp, synthetic construct
  misc_feature 1..22: note = chemically synthesized
  source 1..22: mol_type = other DNA
gtctccagggtatgaacaatga

SEQ ID NO: 27918 - DNA, 22 bp, synthetic construct
  misc_feature 1..22: note = chemically synthesized
  source 1..22: mol_type = other DNA
tctccagggtatgaacaatgaa

SEQ ID NO: 27919 - DNA, 22 bp, synthetic construct
  misc_feature 1..22: note = chemically synthesized
  source 1..22: mol_type = other DNA
cagggtatgaacaatgaatgag

SEQ ID NO: 27920 - DNA, 22 bp, synthetic construct
  misc_feature 1..22: note = chemically synthesized
  source 1..22: mol_type = other DNA
aaattctatccacagtagtggg

SEQ ID NO: 27921 - DNA, 22 bp, synthetic construct
  misc_feature 1..22: note = chemically synthesized
  source 1..22: mol_type = other DNA
tatccacagtagtgggaagtac

SEQ ID NO: 27922 - DNA, 22 bp, synthetic construct
  misc_feature 1..22: note = chemically synthesized
  source 1..22: mol_type = other DNA
tccacagtagtgggaagtacta

SEQ ID NO: 27923 - DNA, 22 bp, synthetic construct
  misc_feature 1..22: note = chemically synthesized
  source 1..22: mol_type = other DNA
agtagtcaggtatgttttggaa

SEQ ID NO: 27924 - DNA, 22 bp, synthetic construct
  misc_feature 1..22: note = chemically synthesized
  source 1..22: mol_type = other DNA
tggaagaagcactgttaccagt

SEQ ID NO: 27925 - DNA, 22 bp, synthetic construct
  misc_feature 1..22: note = chemically synthesized
  source 1..22: mol_type = other DNA
ggaagaagcactgttaccagtt

SEQ ID NO: 27926 - DNA, 22 bp, synthetic construct
  misc_feature 1..22: note = chemically synthesized
  source 1..22: mol_type = other DNA
gaagaagcactgttaccagttg

SEQ ID NO: 27927 - DNA, 22 bp, synthetic construct
  misc_feature 1..22: note = chemically synthesized
  source 1..22: mol_type = other DNA
ttaccagttgagggagaggaga

SEQ ID NO: 27928 - DNA, 22 bp, synthetic construct
  misc_feature 1..22: note = chemically synthesized
  source 1..22: mol_type = other DNA
ccagttgagggagaggagagga

SEQ ID NO: 27929 - DNA, 22 bp, synthetic construct
  misc_feature 1..22: note = chemically synthesized
  source 1..22: mol_type = other DNA
agggagaggagaggagggaaat

SEQ ID NO: 27930 - DNA, 22 bp, synthetic construct
  misc_feature 1..22: note = chemically synthesized
  source 1..22: mol_type = other DNA
gactgtggtgtgacccaggatg

SEQ ID NO: 27931 - DNA, 22 bp, synthetic construct
  misc_feature 1..22: note = chemically synthesized
  source 1..22: mol_type = other DNA
tggtgtgacccaggatggaaag

SEQ ID NO: 27932 - DNA, 22 bp, synthetic construct
  misc_feature 1..22: note = chemically synthesized
  source 1..22: mol_type = other DNA
tgcccaaatgtgggggaaaaat

SEQ ID NO: 27933 - DNA, 22 bp, synthetic construct
  misc_feature 1..22: note = chemically synthesized
  source 1..22: mol_type = other DNA
gcccaaatgtgggggaaaaatg

SEQ ID NO: 27934 - DNA, 22 bp, synthetic construct
  misc_feature 1..22: note = chemically synthesized
  source 1..22: mol_type = other DNA
cccaaatgtgggggaaaaatgt

SEQ ID NO: 27935 - DNA, 22 bp, synthetic construct
  misc_feature 1..22: note = chemically synthesized
  source 1..22: mol_type = other DNA
actctctcctttgcccaggtct

SEQ ID NO: 27936 - DNA, 22 bp, synthetic construct
  misc_feature 1..22: note = chemically synthesized
  source 1..22: mol_type = other DNA
ctctctcctttgcccaggtctt

SEQ ID NO: 27937 - DNA, 22 bp, synthetic construct
  misc_feature 1..22: note = chemically synthesized
  source 1..22: mol_type = other DNA
tctcctttgcccaggtcttact

SEQ ID NO: 27938 - DNA, 22 bp, synthetic construct
  misc_feature 1..22: note = chemically synthesized
  source 1..22: mol_type = other DNA
tcctttgcccaggtcttactac

SEQ ID NO: 27939 - DNA, 22 bp, synthetic construct
  misc_feature 1..22: note = chemically synthesized
  source 1..22: mol_type = other DNA
ctttgcccaggtcttactacaa

SEQ ID NO: 27940 - DNA, 22 bp, synthetic construct
  misc_feature 1..22: note = chemically synthesized
  source 1..22: mol_type = other DNA
tgcccaggtcttactacaatca

SEQ ID NO: 27941 - DNA, 22 bp, synthetic construct
  misc_feature 1..22: note = chemically synthesized
  source 1..22: mol_type = other DNA
gcccaggtcttactacaatcat

SEQ ID NO: 27942 - DNA, 22 bp, synthetic construct
  misc_feature 1..22: note = chemically synthesized
  source 1..22: mol_type = other DNA
cccaggtcttactacaatcatt

SEQ ID NO: 27943 - DNA, 22 bp, synthetic construct
  misc_feature 1..22: note = chemically synthesized
  source 1..22: mol_type = other DNA
actacaatcatttcttctgcac

SEQ ID NO: 27944 - DNA, 22 bp, synthetic construct
  misc_feature 1..22: note = chemically synthesized
  source 1..22: mol_type = other DNA
ctacaatcatttcttctgcaca

SEQ ID NO: 27945 - DNA, 22 bp, synthetic construct
  misc_feature 1..22: note = chemically synthesized
  source 1..22: mol_type = other DNA
caatcatttcttctgcacacac

SEQ ID NO: 27946 - DNA, 22 bp, synthetic construct
  misc_feature 1..22: note = chemically synthesized
  source 1..22: mol_type = other DNA
cttctgcacacacttgctcaga

SEQ ID NO: 27947 - DNA, 22 bp, synthetic construct
  misc_feature 1..22: note = chemically synthesized
  source 1..22: mol_type = other DNA
ttctgcacacacttgctcagaa

SEQ ID NO: 27948 - DNA, 22 bp, synthetic construct
  misc_feature 1..22: note = chemically synthesized
  source 1..22: mol_type = other DNA
ctgcacacacttgctcagaaca

SEQ ID NO: 27949 - DNA, 22 bp, synthetic construct
  misc_feature 1..22: note = chemically synthesized
  source 1..22: mol_type = other DNA
tgcacacacttgctcagaacat

SEQ ID NO: 27950 - DNA, 22 bp, synthetic construct
  misc_feature 1..22: note = chemically synthesized
  source 1..22: mol_type = other DNA
cacacacttgctcagaacatta

SEQ ID NO: 27951 - DNA, 22 bp, synthetic construct
  misc_feature 1..22: note = chemically synthesized
  source 1..22: mol_type = other DNA
gctcagaacattacaaactctg

SEQ ID NO: 27952 - DNA, 22 bp, synthetic construct
  misc_feature 1..22: note = chemically synthesized
  source 1..22: mol_type = other DNA
ctcagaacattacaaactctgg

SEQ ID NO: 27953 - DNA, 22 bp, synthetic construct
  misc_feature 1..22: note = chemically synthesized
  source 1..22: mol_type = other DNA
agaacattacaaactctggaga

SEQ ID NO: 27954 - DNA, 22 bp, synthetic construct
  misc_feature 1..22: note = chemically synthesized
  source 1..22: mol_type = other DNA
caaactctggagaaattaacat

SEQ ID NO: 27955 - DNA, 22 bp, synthetic construct
  misc_feature 1..22: note = chemically synthesized
  source 1..22: mol_type = other DNA
tggagaaattaacatgttaagg

SEQ ID NO: 27956 - DNA, 22 bp, synthetic construct
  misc_feature 1..22: note = chemically synthesized
  source 1..22: mol_type = other DNA
gagaaattaacatgttaaggat

SEQ ID NO: 27957 - DNA, 22 bp, synthetic construct
  misc_feature 1..22: note = chemically synthesized
  source 1..22: mol_type = other DNA
acatgttaaggatatttaggat

SEQ ID NO: 27958 - DNA, 22 bp, synthetic construct
  misc_feature 1..22: note = chemically synthesized
  source 1..22: mol_type = other DNA
aggatatttaggatcattaaaa

SEQ ID NO: 27959 - DNA, 22 bp, synthetic construct
  misc_feature 1..22: note = chemically synthesized
  source 1..22: mol_type = other DNA
aggatcattaaaaaagtttaat

SEQ ID NO: 27960 - DNA, 22 bp, synthetic construct
  misc_feature 1..22: note = chemically synthesized
  source 1..22: mol_type = other DNA
ggatcattaaaaaagtttaata

SEQ ID NO: 27961 - DNA, 22 bp, synthetic construct
  misc_feature 1..22: note = chemically synthesized
  source 1..22: mol_type = other DNA
aaaaagtttaataaatgttgtc

SEQ ID NO: 27962 - DNA, 22 bp, synthetic construct
  misc_feature 1..22: note = chemically synthesized
  source 1..22: mol_type = other DNA
aataaatgttgtcacacataat

SEQ ID NO: 27963 - DNA, 22 bp, synthetic construct
  misc_feature 1..22: note = chemically synthesized
  source 1..22: mol_type = other DNA
ataaatgttgtcacacataatg

SEQ ID NO: 27964 - DNA, 22 bp, synthetic construct
  misc_feature 1..22: note = chemically synthesized
  source 1..22: mol_type = other DNA
tcacacataatgaaagttaatt

SEQ ID NO: 27965 - DNA, 22 bp, synthetic construct
  misc_feature 1..22: note = chemically synthesized
  source 1..22: mol_type = other DNA
atttaagaattgtaaagacttg

SEQ ID NO: 27966 - DNA, 22 bp, synthetic construct
  misc_feature 1..22: note = chemically synthesized
  source 1..22: mol_type = other DNA
aagaattgtaaagacttgagcg

SEQ ID NO: 27967 - DNA, 22 bp, synthetic construct
  misc_feature 1..22: note = chemically synthesized
  source 1..22: mol_type = other DNA
agaattgtaaagacttgagcga

SEQ ID NO: 27968 - DNA, 22 bp, synthetic construct
  misc_feature 1..22: note = chemically synthesized
  source 1..22: mol_type = other DNA
taaagacttgagcgatgtagtc

SEQ ID NO: 27969 - DNA, 22 bp, synthetic construct
  misc_feature 1..22: note = chemically synthesized
  source 1..22: mol_type = other DNA
gagcgatgtagtccctaaataa

SEQ ID NO: 27970 - DNA, 22 bp, synthetic construct
  misc_feature 1..22: note = chemically synthesized
  source 1..22: mol_type = other DNA
agcgatgtagtccctaaataaa

SEQ ID NO: 27971 - DNA, 22 bp, synthetic construct
  misc_feature 1..22: note = chemically synthesized
  source 1..22: mol_type = other DNA
aataaatgcttccctcttaaaa

SEQ ID NO: 27972 - DNA, 22 bp, synthetic construct
  misc_feature 1..22: note = chemically synthesized
  source 1..22: mol_type = other DNA
ccctcttaaaatggactagaaa

SEQ ID NO: 27973 - DNA, 22 bp, synthetic construct
  misc_feature 1..22: note = chemically synthesized
  source 1..22: mol_type = other DNA
cctcttaaaatggactagaaac

SEQ ID NO: 27974 - DNA, 22 bp, synthetic construct
  misc_feature 1..22: note = chemically synthesized
  source 1..22: mol_type = other DNA
ttaaaatggactagaaacaatt

SEQ ID NO: 27975 - DNA, 22 bp, synthetic construct
  misc_feature 1..22: note = chemically synthesized
  source 1..22: mol_type = other DNA
aaaatggactagaaacaatttg

SEQ ID NO: 27976 - DNA, 22 bp, synthetic construct
  misc_feature 1..22: note = chemically synthesized
  source 1..22: mol_type = other DNA
aaatggactagaaacaatttgt

SEQ ID NO: 27977 - DNA, 22 bp, synthetic construct
  misc_feature 1..22: note = chemically synthesized
  source 1..22: mol_type = other DNA
gaaacaatttgtttttgcctaa

SEQ ID NO: 27978 - DNA, 22 bp, synthetic construct
  misc_feature 1..22: note = chemically synthesized
  source 1..22: mol_type = other DNA
gtttttgcctaagccaacgtat

SEQ ID NO: 27979 - DNA, 22 bp, synthetic construct
  misc_feature 1..22: note = chemically synthesized
  source 1..22: mol_type = other DNA
tttttgcctaagccaacgtatt

SEQ ID NO: 27980 - DNA, 22 bp, synthetic construct
  misc_feature 1..22: note = chemically synthesized
  source 1..22: mol_type = other DNA
ttgcctaagccaacgtattgct

SEQ ID NO: 27981 - DNA, 22 bp, synthetic construct
  misc_feature 1..22: note = chemically synthesized
  source 1..22: mol_type = other DNA
tgcctaagccaacgtattgctg

SEQ ID NO: 27982 - DNA, 22 bp, synthetic construct
  misc_feature 1..22: note = chemically synthesized
  source 1..22: mol_type = other DNA
gcctaagccaacgtattgctgg

SEQ ID NO: 27983 - DNA, 22 bp, synthetic construct
  misc_feature 1..22: note = chemically synthesized
  source 1..22: mol_type = other DNA
cctaagccaacgtattgctgga

SEQ ID NO: 27984 - DNA, 22 bp, synthetic construct
  misc_feature 1..22: note = chemically synthesized
  source 1..22: mol_type = other DNA
agccaacgtattgctggacata

SEQ ID NO: 27985 - DNA, 22 bp, synthetic construct
  misc_feature 1..22: note = chemically synthesized
  source 1..22: mol_type = other DNA
ctggacataatttacctgcttc

SEQ ID NO: 27986 - DNA, 22 bp, synthetic construct
  misc_feature 1..22: note = chemically synthesized
  source 1..22: mol_type = other DNA
gacataatttacctgcttcctc

SEQ ID NO: 27987 - DNA, 22 bp, synthetic construct
  misc_feature 1..22: note = chemically synthesized
  source 1..22: mol_type = other DNA
acctgcttcctcctcagtcttg

SEQ ID NO: 27988 - DNA, 22 bp, synthetic construct
  misc_feature 1..22: note = chemically synthesized
  source 1..22: mol_type = other DNA
cctgcttcctcctcagtcttga

SEQ ID NO: 27989 - DNA, 22 bp, synthetic construct
  misc_feature 1..22: note = chemically synthesized
  source 1..22: mol_type = other DNA
cttcctcctcagtcttgacact

SEQ ID NO: 27990 - DNA, 22 bp, synthetic construct
  misc_feature 1..22: note = chemically synthesized
  source 1..22: mol_type = other DNA
cctcctcagtcttgacactaca

SEQ ID NO: 27991 - DNA, 22 bp, synthetic construct
  misc_feature 1..22: note = chemically synthesized
  source 1..22: mol_type = other DNA
ctcctcagtcttgacactacac

SEQ ID NO: 27992 - DNA, 22 bp, synthetic construct
  misc_feature 1..22: note = chemically synthesized
  source 1..22: mol_type = other DNA
ctcagtcttgacactacacctc

SEQ ID NO: 27993 - DNA, 22 bp, synthetic construct
  misc_feature 1..22: note = chemically synthesized
  source 1..22: mol_type = other DNA
agtcttgacactacacctctga

SEQ ID NO: 27994 - DNA, 22 bp, synthetic construct
  misc_feature 1..22: note = chemically synthesized
  source 1..22: mol_type = other DNA
gacactacacctctgaattaca

SEQ ID NO: 27995 - DNA, 22 bp, synthetic construct
  misc_feature 1..22: note = chemically synthesized
  source 1..22: mol_type = other DNA
acactacacctctgaattacat

SEQ ID NO: 27996 - DNA, 22 bp, synthetic construct
  misc_feature 1..22: note = chemically synthesized
  source 1..22: mol_type = other DNA
cacctctgaattacatggtaca

SEQ ID NO: 27997 - DNA, 22 bp, synthetic construct
  misc_feature 1..22: note = chemically synthesized
  source 1..22: mol_type = other DNA
tgaattacatggtacaagtggc

SEQ ID NO: 27998 - DNA, 22 bp, synthetic construct
  misc_feature 1..22: note = chemically synthesized
  source 1..22: mol_type = other DNA
aattacatggtacaagtggcac

SEQ ID NO: 27999 - DNA, 22 bp, synthetic construct
  misc_feature 1..22: note = chemically synthesized
  source 1..22: mol_type = other DNA
catggtacaagtggcacaggga

SEQ ID NO: 28000 - DNA, 22 bp, synthetic construct
  misc_feature 1..22: note = chemically synthesized
  source 1..22: mol_type = other DNA
agaaaactagagtcaaagtggt

SEQ ID NO: 28001 - DNA, 22 bp, synthetic construct
  misc_feature 1..22: note = chemically synthesized
  source 1..22: mol_type = other DNA
gagtcaaagtggttatggaaga

SEQ ID NO: 28002 - DNA, 22 bp, synthetic construct
  misc_feature 1..22: note = chemically synthesized
  source 1..22: mol_type = other DNA
tggaagaaattataataatgag

SEQ ID NO: 28003 - DNA, 22 bp, synthetic construct
  misc_feature 1..22: note = chemically synthesized
  source 1..22: mol_type = other DNA
taataatgagtccactcttcta

SEQ ID NO: 28004 - DNA, 22 bp, synthetic construct
  misc_feature 1..22: note = chemically synthesized
  source 1..22: mol_type = other DNA
ttctaggacaggagttctaaag

SEQ ID NO: 28005 - DNA, 22 bp, synthetic construct
  misc_feature 1..22: note = chemically synthesized
  source 1..22: mol_type = other DNA
ctaggacaggagttctaaaggt

SEQ ID NO: 28006 - DNA, 22 bp, synthetic construct
  misc_feature 1..22: note = chemically synthesized
  source 1..22: mol_type = other DNA
taggacaggagttctaaaggtg

SEQ ID NO: 28007 - DNA, 22 bp, synthetic construct
  misc_feature 1..22: note = chemically synthesized
  source 1..22: mol_type = other DNA
ggacaggagttctaaaggtgag

SEQ ID NO: 28008 - DNA, 22 bp, synthetic construct
  misc_feature 1..22: note = chemically synthesized
  source 1..22: mol_type = other DNA
taaaggtgaggactttgatata

SEQ ID NO: 28009 - DNA, 22 bp, synthetic construct
  misc_feature 1..22: note = chemically synthesized
  source 1..22: mol_type = other DNA
aaggtgaggactttgatataag

SEQ ID NO: 28010 - DNA, 22 bp, synthetic construct
  misc_feature 1..22: note = chemically synthesized
  source 1..22: mol_type = other DNA
tgatataagtgaactcaaggag

SEQ ID NO: 28011 - DNA, 22 bp, synthetic construct
  misc_feature 1..22: note = chemically synthesized
  source 1..22: mol_type = other DNA
gatataagtgaactcaaggagt

SEQ ID NO: 28012 - DNA, 22 bp, synthetic construct
  misc_feature 1..22: note = chemically synthesized
  source 1..22: mol_type = other DNA
atataagtgaactcaaggagtt

SEQ ID NO: 28013 - DNA, 22 bp, synthetic construct
  misc_feature 1..22: note = chemically synthesized
  source 1..22: mol_type = other DNA
aaggagtttctaaaccttcaga

SEQ ID NO: 28014 - DNA, 22 bp, synthetic construct
  misc_feature 1..22: note = chemically synthesized
  source 1..22: mol_type = other DNA
ctaaaccttcagaaattatatc

SEQ ID NO: 28015 - DNA, 22 bp, synthetic construct
  misc_feature 1..22: note = chemically synthesized
  source 1..22: mol_type = other DNA
taaaccttcagaaattatatct

SEQ ID NO: 28016 - DNA, 22 bp, synthetic construct
  misc_feature 1..22: note = chemically synthesized
  source 1..22: mol_type = other DNA
aaccttcagaaattatatctaa

SEQ ID NO: 28017 - DNA, 22 bp, synthetic construct
  misc_feature 1..22: note = chemically synthesized
  source 1..22: mol_type = other DNA
cagaaattatatctaaaaatta

SEQ ID NO: 28018 - DNA, 22 bp, synthetic construct
  misc_feature 1..22: note = chemically synthesized
  source 1..22: mol_type = other DNA
agaaattatatctaaaaattag

SEQ ID NO: 28019 - DNA, 22 bp, synthetic construct
  misc_feature 1..22: note = chemically synthesized
  source 1..22: mol_type = other DNA
tatctaaaaattaggtgcacgt

SEQ ID NO: 28020 - DNA, 22 bp, synthetic construct
  misc_feature 1..22: note = chemically synthesized
  source 1..22: mol_type = other DNA
aaaattaggtgcacgtatatag

SEQ ID NO: 28021 - DNA, 22 bp, synthetic construct
  misc_feature 1..22: note = chemically synthesized
  source 1..22: mol_type = other DNA
ggtgcacgtatatagaagtact

SEQ ID NO: 28022 - DNA, 22 bp, synthetic construct
  misc_feature 1..22: note = chemically synthesized
  source 1..22: mol_type = other DNA
ttctctgagaagaggacttcac

SEQ ID NO: 28023 - DNA, 22 bp, synthetic construct
  misc_feature 1..22: note = chemically synthesized
  source 1..22: mol_type = other DNA
tctctgagaagaggacttcaca

SEQ ID NO: 28024 - DNA, 22 bp, synthetic construct
  misc_feature 1..22: note = chemically synthesized
  source 1..22: mol_type = other DNA
ctctgagaagaggacttcacac

SEQ ID NO: 28025 - DNA, 22 bp, synthetic construct
  misc_feature 1..22: note = chemically synthesized
  source 1..22: mol_type = other DNA
tctgagaagaggacttcacact

SEQ ID NO: 28026 - DNA, 22 bp, synthetic construct
  misc_feature 1..22: note = chemically synthesized
  source 1..22: mol_type = other DNA
tgagaagaggacttcacacttc

SEQ ID NO: 28027 - DNA, 22 bp, synthetic construct
  misc_feature 1..22: note = chemically synthesized
  source 1..22: mol_type = other DNA
agaagaggacttcacacttcca

SEQ ID NO: 28028 - DNA, 22 bp, synthetic construct
  misc_feature 1..22: note = chemically synthesized
  source 1..22: mol_type = other DNA
cacacttccatcagcttcctga

SEQ ID NO: 28029 - DNA, 22 bp, synthetic construct
  misc_feature 1..22: note = chemically synthesized
  source 1..22: mol_type = other DNA
acacttccatcagcttcctgaa

SEQ ID NO: 28030 - DNA, 22 bp, synthetic construct
  misc_feature 1..22: note = chemically synthesized
  source 1..22: mol_type = other DNA
ccatcagcttcctgaaggcccc

SEQ ID NO: 28031 - DNA, 22 bp, synthetic construct
  misc_feature 1..22: note = chemically synthesized
  source 1..22: mol_type = other DNA
catcagcttcctgaaggcccct

SEQ ID NO: 28032 - DNA, 22 bp, synthetic construct
  misc_feature 1..22: note = chemically synthesized
  source 1..22: mol_type = other DNA
cctgaaggcccctgtaattgcc

SEQ ID NO: 28033 - DNA, 22 bp, synthetic construct
  misc_feature 1..22: note = chemically synthesized
  source 1..22: mol_type = other DNA
ctgaaggcccctgtaattgccg

SEQ ID NO: 28034 - DNA, 22 bp, synthetic construct
  misc_feature 1..22: note = chemically synthesized
  source 1..22: mol_type = other DNA
aaggcccctgtaattgccgtaa

SEQ ID NO: 28035 - DNA, 22 bp, synthetic construct
  misc_feature 1..22: note = chemically synthesized
  source 1..22: mol_type = other DNA
taattgccgtaaagaacaactg

SEQ ID NO: 28036 - DNA, 22 bp, synthetic construct
  misc_feature 1..22: note = chemically synthesized
  source 1..22: mol_type = other DNA
ccgtaaagaacaactgctctaa

SEQ ID NO: 28037 - DNA, 22 bp, synthetic construct
  misc_feature 1..22: note = chemically synthesized
  source 1..22: mol_type = other DNA
ctctaaagtttaatactaggct

SEQ ID NO: 28038 - DNA, 22 bp, synthetic construct
  misc_feature 1..22: note = chemically synthesized
  source 1..22: mol_type = other DNA
taaagtttaatactaggctact

SEQ ID NO: 28039 - DNA, 22 bp, synthetic construct
  misc_feature 1..22: note = chemically synthesized
  source 1..22: mol_type = other DNA
aagtttaatactaggctactcg

SEQ ID NO: 28040 - DNA, 22 bp, synthetic construct
  misc_feature 1..22: note = chemically synthesized
  source 1..22: mol_type = other DNA
aatactaggctactcggctgtt

SEQ ID NO: 28041 - DNA, 22 bp, synthetic construct
  misc_feature 1..22: note = chemically synthesized
  source 1..22: mol_type = other DNA
atactaggctactcggctgttt

SEQ ID NO: 28042 - DNA, 22 bp, synthetic construct
  misc_feature 1..22: note = chemically synthesized
  source 1..22: mol_type = other DNA
ggctactcggctgttttttgtt

SEQ ID NO: 28043 - DNA, 22 bp, synthetic construct
  misc_feature 1..22: note = chemically synthesized
  source 1..22: mol_type = other DNA
ctcggctgttttttgttaacac

SEQ ID NO: 28044 - DNA, 22 bp, synthetic construct
  misc_feature 1..22: note = chemically synthesized
  source 1..22: mol_type = other DNA
ggctgttttttgttaacacaga

SEQ ID NO: 28045 - DNA, 22 bp, synthetic construct
  misc_feature 1..22: note = chemically synthesized
  source 1..22: mol_type = other DNA
ttttttgttaacacagaagttt

SEQ ID NO: 28046 - DNA, 22 bp, synthetic construct
  misc_feature 1..22: note = chemically synthesized
  source 1..22: mol_type = other DNA
tttgttaacacagaagttttcc

SEQ ID NO: 28047 - DNA, 22 bp, synthetic construct
  misc_feature 1..22: note = chemically synthesized
  source 1..22: mol_type = other DNA
ttgttaacacagaagttttcca

SEQ ID NO: 28048 - DNA, 22 bp, synthetic construct
  misc_feature 1..22: note = chemically synthesized
  source 1..22: mol_type = other DNA
tgttaacacagaagttttccaa

SEQ ID NO: 28049 - DNA, 22 bp, synthetic construct
  misc_feature 1..22: note = chemically synthesized
  source 1..22: mol_type = other DNA
gttaacacagaagttttccaaa

SEQ ID NO: 28050 - DNA, 22 bp, synthetic construct
  misc_feature 1..22: note = chemically synthesized
  source 1..22: mol_type = other DNA
ttaacacagaagttttccaaat

SEQ ID NO: 28051 - DNA, 22 bp, synthetic construct
  misc_feature 1..22: note = chemically synthesized
  source 1..22: mol_type = other DNA
acacagaagttttccaaatggc

SEQ ID NO: 28052 - DNA, 22 bp, synthetic construct
  misc_feature 1..22: note = chemically synthesized
  source 1..22: mol_type = other DNA
tccaaatggcttttctctagag

SEQ ID NO: 28053 - DNA, 22 bp, synthetic construct
  misc_feature 1..22: note = chemically synthesized
  source 1..22: mol_type = other DNA
ccaaatggcttttctctagagc

SEQ ID NO: 28054 - DNA, 22 bp, synthetic construct
  misc_feature 1..22: note = chemically synthesized
  source 1..22: mol_type = other DNA
caaatggcttttctctagagca

SEQ ID NO: 28055 - DNA, 22 bp, synthetic construct
  misc_feature 1..22: note = chemically synthesized
  source 1..22: mol_type = other DNA
ttctctagagcaaaatgaaaag

SEQ ID NO: 28056 - DNA, 22 bp, synthetic construct
  misc_feature 1..22: note = chemically synthesized
  source 1..22: mol_type = other DNA
tctctagagcaaaatgaaaagg

SEQ ID NO: 28057 - DNA, 22 bp, synthetic construct
  misc_feature 1..22: note = chemically synthesized
  source 1..22: mol_type = other DNA
ctctagagcaaaatgaaaagga

SEQ ID NO: 28058 - DNA, 22 bp, synthetic construct
  misc_feature 1..22: note = chemically synthesized
  source 1..22: mol_type = other DNA
tctagagcaaaatgaaaaggat

SEQ ID NO: 28059 - DNA, 22 bp, synthetic construct
  misc_feature 1..22: note = chemically synthesized
  source 1..22: mol_type = other DNA
tagagcaaaatgaaaaggatcc

SEQ ID NO: 28060 - DNA, 22 bp, synthetic construct
  misc_feature 1..22: note = chemically synthesized
  source 1..22: mol_type = other DNA
gagcaaaatgaaaaggatccca

SEQ ID NO: 28061 - DNA, 22 bp, synthetic construct
  misc_feature 1..22: note = chemically synthesized
  source 1..22: mol_type = other DNA
cccgagacctaacgatgtttat

SEQ ID NO: 28062 - DNA, 22 bp, synthetic construct
  misc_feature 1..22: note = chemically synthesized
  source 1..22: mol_type = other DNA
ccgagacctaacgatgtttatc

SEQ ID NO: 28063 - DNA, 22 bp, synthetic construct
  misc_feature 1..22: note = chemically synthesized
  source 1..22: mol_type = other DNA
acgatgtttatctttcgtgata

SEQ ID NO: 28064 - DNA, 22 bp, synthetic construct
  misc_feature 1..22: note = chemically synthesized
  source 1..22: mol_type = other DNA
atctttcgtgatactgtttttg

SEQ ID NO: 28065 - DNA, 22 bp, synthetic construct
  misc_feature 1..22: note = chemically synthesized
  source 1..22: mol_type = other DNA
tctttcgtgatactgtttttgt

SEQ ID NO: 28066 - DNA, 22 bp, synthetic construct
  misc_feature 1..22: note = chemically synthesized
  source 1..22: mol_type = other DNA
tcgtgatactgtttttgttctt

SEQ ID NO: 28067 - DNA, 22 bp, synthetic construct
  misc_feature 1..22: note = chemically synthesized
  source 1..22: mol_type = other DNA
cgtgatactgtttttgttcttc

SEQ ID NO: 28068 - DNA, 22 bp, synthetic construct
  misc_feature 1..22: note = chemically synthesized
  source 1..22: mol_type = other DNA
gtgatactgtttttgttcttcc

SEQ ID NO: 28069 - DNA, 22 bp, synthetic construct
  misc_feature 1..22: note = chemically synthesized
  source 1..22: mol_type = other DNA
tttttgttcttcctctttttct

SEQ ID NO: 28070 - DNA, 22 bp, synthetic construct
  misc_feature 1..22: note = chemically synthesized
  source 1..22: mol_type = other DNA
ttgttcttcctctttttctcct

SEQ ID NO: 28071 - DNA, 22 bp, synthetic construct
  misc_feature 1..22: note = chemically synthesized
  source 1..22: mol_type = other DNA
tgttcttcctctttttctccta

SEQ ID NO: 28072 - DNA, 22 bp, synthetic construct
  misc_feature 1..22: note = chemically synthesized
  source 1..22: mol_type = other DNA
gttcttcctctttttctcctac

SEQ ID NO: 28073 - DNA, 22 bp, synthetic construct
  misc_feature 1..22: note = chemically synthesized
  source 1..22: mol_type = other DNA
ttcttcctctttttctcctacc

SEQ ID NO: 28074 - DNA, 22 bp, synthetic construct
  misc_feature 1..22: note = chemically synthesized
  source 1..22: mol_type = other DNA
ttcctctttttctcctaccccc

SEQ ID NO: 28075 - DNA, 22 bp, synthetic construct
  misc_feature 1..22: note = chemically synthesized
  source 1..22: mol_type = other DNA
cctctttttctcctacccccca

SEQ ID NO: 28076 - DNA, 22 bp, synthetic construct
  misc_feature 1..22: note = chemically synthesized
  source 1..22: mol_type = other DNA
ctctttttctcctaccccccac

SEQ ID NO: 28077 - DNA, 22 bp, synthetic construct
  misc_feature 1..22: note = chemically synthesized
  source 1..22: mol_type = other DNA
tttttctcctaccccccaccac

SEQ ID NO: 28078 - DNA, 22 bp, synthetic construct
  misc_feature 1..22: note = chemically synthesized
  source 1..22: mol_type = other DNA
tttctcctaccccccaccactt

SEQ ID NO: 28079 - DNA, 22 bp, synthetic construct
  misc_feature 1..22: note = chemically synthesized
  source 1..22: mol_type = other DNA
ttctcctaccccccaccacttt

SEQ ID NO: 28080 - DNA, 22 bp, synthetic construct
  misc_feature 1..22: note = chemically synthesized
  source 1..22: mol_type = other DNA
tctcctaccccccaccactttt

SEQ ID NO: 28081 - DNA, 22 bp, synthetic construct
  misc_feature 1..22: note = chemically synthesized
  source 1..22: mol_type = other DNA
ctcctaccccccaccactttta

SEQ ID NO: 28082 - DNA, 22 bp, synthetic construct
  misc_feature 1..22: note = chemically synthesized
  source 1..22: mol_type = other DNA
tcctaccccccaccacttttaa

SEQ ID NO: 28083 - DNA, 22 bp, synthetic construct
  misc_feature 1..22: note = chemically synthesized
  source 1..22: mol_type = other DNA
ctaccccccaccacttttaaag

SEQ ID NO: 28084 - DNA, 22 bp, synthetic construct
  misc_feature 1..22: note = chemically synthesized
  source 1..22: mol_type = other DNA
ccccccaccacttttaaagatc

SEQ ID NO: 28085 - DNA, 22 bp, synthetic construct
  misc_feature 1..22: note = chemically synthesized
  source 1..22: mol_type = other DNA
ttaaagatccatcaaggcccag

SEQ ID NO: 28086 - DNA, 22 bp, synthetic construct
  misc_feature 1..22: note = chemically synthesized
  source 1..22: mol_type = other DNA
taaagatccatcaaggcccagc

SEQ ID NO: 28087 - DNA, 22 bp, synthetic construct
  misc_feature 1..22: note = chemically synthesized
  source 1..22: mol_type = other DNA
aaagatccatcaaggcccagca

SEQ ID NO: 28088 - DNA, 22 bp, synthetic construct
  misc_feature 1..22: note = chemically synthesized
  source 1..22: mol_type = other DNA
aagatccatcaaggcccagcat

SEQ ID NO: 28089 - DNA, 22 bp, synthetic construct
  misc_feature 1..22: note = chemically synthesized
  source 1..22: mol_type = other DNA
acacctgtaatctcaacacttt

SEQ ID NO: 28090 - DNA, 22 bp, synthetic construct
  misc_feature 1..22: note = chemically synthesized
  source 1..22: mol_type = other DNA
taatctcaacacttttcaaggc

SEQ ID NO: 28091 - DNA, 22 bp, synthetic construct
  misc_feature 1..22: note = chemically synthesized
  source 1..22: mol_type = other DNA
aacacttttcaaggctgaggtg

SEQ ID NO: 28092 - DNA, 22 bp, synthetic construct
  misc_feature 1..22: note = chemically synthesized
  source 1..22: mol_type = other DNA
ttcaaggctgaggtgggagaat

SEQ ID NO: 28093 - DNA, 22 bp, synthetic construct
  misc_feature 1..22: note = chemically synthesized
  source 1..22: mol_type = other DNA
tcaaggctgaggtgggagaatt

SEQ ID NO: 28094 - DNA, 22 bp, synthetic construct
  misc_feature 1..22: note = chemically synthesized
  source 1..22: mol_type = other DNA
caaggctgaggtgggagaattg

SEQ ID NO: 28095 - DNA, 22 bp, synthetic construct
  misc_feature 1..22: note = chemically synthesized
  source 1..22: mol_type = other DNA
aaggctgaggtgggagaattgt

SEQ ID NO: 28096 - DNA, 22 bp, synthetic construct
  misc_feature 1..22: note = chemically synthesized
  source 1..22: mol_type = other DNA
aggtgggagaattgtttgagac

SEQ ID NO: 28097 - DNA, 22 bp, synthetic construct
  misc_feature 1..22: note = chemically synthesized
  source 1..22: mol_type = other DNA
tttgagaccaagagttggatac

SEQ ID NO: 28098 - DNA, 22 bp, synthetic construct
  misc_feature 1..22: note = chemically synthesized
  source 1..22: mol_type = other DNA
gagaccaagagttggataccag

SEQ ID NO: 28099 - DNA, 22 bp, synthetic construct
  misc_feature 1..22: note = chemically synthesized
  source 1..22: mol_type = other DNA
agaccaagagttggataccagc

SEQ ID NO: 28100 - DNA, 22 bp, synthetic construct
  misc_feature 1..22: note = chemically synthesized
  source 1..22: mol_type = other DNA
gataccagcctggggaacatag

SEQ ID NO: 28101 - DNA, 22 bp, synthetic construct
  misc_feature 1..22: note = chemically synthesized
  source 1..22: mol_type = other DNA
gggaacatagggagaccctgtt

SEQ ID NO: 28102 - DNA, 22 bp, synthetic construct
  misc_feature 1..22: note = chemically synthesized
  source 1..22: mol_type = other DNA
tttctacagaaatttaaaaaat

SEQ ID NO: 28103 - DNA, 22 bp, synthetic construct
  misc_feature 1..22: note = chemically synthesized
  source 1..22: mol_type = other DNA
ctacagaaatttaaaaaatttc

SEQ ID NO: 28104 - DNA, 22 bp, synthetic construct
  misc_feature 1..22: note = chemically synthesized
  source 1..22: mol_type = other DNA
tacagaaatttaaaaaatttct

SEQ ID NO: 28105 - DNA, 22 bp, synthetic construct
  misc_feature 1..22: note = chemically synthesized
  source 1..22: mol_type = other DNA
cagaaatttaaaaaatttctct

SEQ ID NO: 28106 - DNA, 22 bp, synthetic construct
  misc_feature 1..22: note = chemically synthesized
  source 1..22: mol_type = other DNA
aaaaaatttctctagctggcca

SEQ ID NO: 28107 - DNA, 22 bp, synthetic construct
  misc_feature 1..22: note = chemically synthesized
  source 1..22: mol_type = other DNA
aaaaatttctctagctggccat

SEQ ID NO: 28108 - DNA, 22 bp, synthetic construct
  misc_feature 1..22: note = chemically synthesized
  source 1..22: mol_type = other DNA
ctctagctggccatggaggctc

SEQ ID NO: 28109 - DNA, 22 bp, synthetic construct
  misc_feature 1..22: note = chemically synthesized
  source 1..22: mol_type = other DNA
tctagctggccatggaggctca

SEQ ID NO: 28110 - DNA, 22 bp, synthetic construct
  misc_feature 1..22: note = chemically synthesized
  source 1..22: mol_type = other DNA
tagctggccatggaggctcaca

SEQ ID NO: 28111 - DNA, 22 bp, synthetic construct
  misc_feature 1..22: note = chemically synthesized
  source 1..22: mol_type = other DNA
gctggccatggaggctcacacc

SEQ ID NO: 28112 - DNA, 22 bp, synthetic construct
  misc_feature 1..22: note = chemically synthesized
  source 1..22: mol_type = other DNA
gccatggaggctcacacctgta

SEQ ID NO: 28113 - DNA, 22 bp, synthetic construct
  misc_feature 1..22: note = chemically synthesized
  source 1..22: mol_type = other DNA
acacctgtagtcctagctacct

SEQ ID NO: 28114 - DNA, 22 bp, synthetic construct
  misc_feature 1..22: note = chemically synthesized
  source 1..22: mol_type = other DNA
tagtcctagctacctgagaggc

SEQ ID NO: 28115 - DNA, 22 bp, synthetic construct
  misc_feature 1..22: note = chemically synthesized
  source 1..22: mol_type = other DNA
gctacctgagaggctaaagcag

SEQ ID NO: 28116 - DNA, 22 bp, synthetic construct
  misc_feature 1..22: note = chemically synthesized
  source 1..22: mol_type = other DNA
cctgagaggctaaagcaggagg

SEQ ID NO: 28117 - DNA, 22 bp, synthetic construct
  misc_feature 1..22: note = chemically synthesized
  source 1..22: mol_type = other DNA
agaggctaaagcaggaggatca

SEQ ID NO: 28118 - DNA, 22 bp, synthetic construct
  misc_feature 1..22: note = chemically synthesized
  source 1..22: mol_type = other DNA
aagcaggaggatcaattgaatc

SEQ ID NO: 28119 - DNA, 22 bp, synthetic construct
  misc_feature 1..22: note = chemically synthesized
  source 1..22: mol_type = other DNA
aatccaggcgttctagtgaggc

SEQ ID NO: 28120 - DNA, 22 bp, synthetic construct
  misc_feature 1..22: note = chemically synthesized
  source 1..22: mol_type = other DNA
tagtgaggcttcagtgagcaag

SEQ ID NO: 28121 - DNA, 22 bp, synthetic construct
  misc_feature 1..22: note = chemically synthesized
  source 1..22: mol_type = other DNA
gtgaggcttcagtgagcaagat

SEQ ID NO: 28122 - DNA, 22 bp, synthetic construct
  misc_feature 1..22: note = chemically synthesized
  source 1..22: mol_type = other DNA
cagtgagcaagattgcaccatt

SEQ ID NO: 28123 - DNA, 22 bp, synthetic construct
  misc_feature 1..22: note = chemically synthesized
  source 1..22: mol_type = other DNA
agtgagcaagattgcaccattg

SEQ ID NO: 28124 - DNA, 22 bp, synthetic construct
  misc_feature 1..22: note = chemically synthesized
  source 1..22: mol_type = other DNA
caccattgcactccagccgggg

SEQ ID NO: 28125 - DNA, 22 bp, synthetic construct
  misc_feature 1..22: note = chemically synthesized
  source 1..22: mol_type = other DNA
cactccagccggggtgacagag

SEQ ID NO: 28126 - DNA, 22 bp, synthetic construct
  misc_feature 1..22: note = chemically synthesized
  source 1..22: mol_type = other DNA
cagccggggtgacagagtgaga

SEQ ID NO: 28127 - DNA, 22 bp, synthetic construct
  misc_feature 1..22: note = chemically synthesized
  source 1..22: mol_type = other DNA
tttcaaacaaacaagcaaaagc

SEQ ID NO: 28128 - DNA, 22 bp, synthetic construct
  misc_feature 1..22: note = chemically synthesized
  source 1..22: mol_type = other DNA
caaacaaacaagcaaaagcaaa

SEQ ID NO: 28129 - DNA, 22 bp, synthetic construct
  misc_feature 1..22: note = chemically synthesized
  source 1..22: mol_type = other DNA
aaacaaacaagcaaaagcaaaa

SEQ ID NO: 28130 - DNA, 22 bp, synthetic construct
  misc_feature 1..22: note = chemically synthesized
  source 1..22: mol_type = other DNA
gttgctccattcctttacttac

SEQ ID NO: 28131 - DNA, 22 bp, synthetic construct
  misc_feature 1..22: note = chemically synthesized
  source 1..22: mol_type = other DNA
ttgctccattcctttacttact

SEQ ID NO: 28132 - DNA, 22 bp, synthetic construct
  misc_feature 1..22: note = chemically synthesized
  source 1..22: mol_type = other DNA
ctccattcctttacttactatc

SEQ ID NO: 28133 - DNA, 22 bp, synthetic construct
  misc_feature 1..22: note = chemically synthesized
  source 1..22: mol_type = other DNA
cattcctttacttactatcttg

SEQ ID NO: 28134 - DNA, 22 bp, synthetic construct
  misc_feature 1..22: note = chemically synthesized
  source 1..22: mol_type = other DNA
ctttacttactatcttgctgtc

SEQ ID NO: 28135 - DNA, 22 bp, synthetic construct
  misc_feature 1..22: note = chemically synthesized
  source 1..22: mol_type = other DNA
tacttactatcttgctgtctac

SEQ ID NO: 28136 - DNA, 22 bp, synthetic construct
  misc_feature 1..22: note = chemically synthesized
  source 1..22: mol_type = other DNA
acttactatcttgctgtctaca

SEQ ID NO: 28137 - DNA, 22 bp, synthetic construct
  misc_feature 1..22: note = chemically synthesized
  source 1..22: mol_type = other DNA
cttactatcttgctgtctacag

SEQ ID NO: 28138 - DNA, 22 bp, synthetic construct
  misc_feature 1..22: note = chemically synthesized
  source 1..22: mol_type = other DNA
actatcttgctgtctacagcta

SEQ ID NO: 28139 - DNA, 22 bp, synthetic construct
  misc_feature 1..22: note = chemically synthesized
  source 1..22: mol_type = other DNA
ctatcttgctgtctacagctaa

SEQ ID NO: 28140 - DNA, 22 bp, synthetic construct
  misc_feature 1..22: note = chemically synthesized
  source 1..22: mol_type = other DNA
tcttgctgtctacagctaaagt

SEQ ID NO: 28141 - DNA, 22 bp, synthetic construct
  misc_feature 1..22: note = chemically synthesized
  source 1..22: mol_type = other DNA
gctgtctacagctaaagtcaga

SEQ ID NO: 28142 - DNA, 22 bp, synthetic construct
  misc_feature 1..22: note = chemically synthesized
  source 1..22: mol_type = other DNA
ctgtctacagctaaagtcagac

SEQ ID NO: 28143 - DNA, 22 bp, synthetic construct
  misc_feature 1..22: note = chemically synthesized
  source 1..22: mol_type = other DNA
tctacagctaaagtcagactgc

SEQ ID NO: 28144 - DNA, 22 bp, synthetic construct
  misc_feature 1..22: note = chemically synthesized
  source 1..22: mol_type = other DNA
cagctaaagtcagactgcatga

SEQ ID NO: 28145 - DNA, 22 bp, synthetic construct
  misc_feature 1..22: note = chemically synthesized
  source 1..22: mol_type = other DNA
aagtcagactgcatgatttgga

SEQ ID NO: 28146 - DNA, 22 bp, synthetic construct
  misc_feature 1..22: note = chemically synthesized
  source 1..22: mol_type = other DNA
catgatttggaattccaactcc

SEQ ID NO: 28147 - DNA, 22 bp, synthetic construct
  misc_feature 1..22: note = chemically synthesized
  source 1..22: mol_type = other DNA
ggaattccaactccaccatcac

SEQ ID NO: 28148 - DNA, 22 bp, synthetic construct
  misc_feature 1..22: note = chemically synthesized
  source 1..22: mol_type = other DNA
gaattccaactccaccatcacc

SEQ ID NO: 28149 - DNA, 22 bp, synthetic construct
  misc_feature 1..22: note = chemically synthesized
  source 1..22: mol_type = other DNA
caactccaccatcacctgggta

SEQ ID NO: 28150 - DNA, 22 bp, synthetic construct
  misc_feature 1..22: note = chemically synthesized
  source 1..22: mol_type = other DNA
caccatcacctgggtaatgttg

SEQ ID NO: 28151 - DNA, 22 bp, synthetic construct
  misc_feature 1..22: note = chemically synthesized
  source 1..22: mol_type = other DNA
ggtaatgttgagatttattaca

SEQ ID NO: 28152 - DNA, 22 bp, synthetic construct
  misc_feature 1..22: note = chemically synthesized
  source 1..22: mol_type = other DNA
agatttattacatagcatctct

SEQ ID NO: 28153 - DNA, 22 bp, synthetic construct
  misc_feature 1..22: note = chemically synthesized
  source 1..22: mol_type = other DNA
attacatagcatctctgtgcct

SEQ ID NO: 28154 - DNA, 22 bp, synthetic construct
  misc_feature 1..22: note = chemically synthesized
  source 1..22: mol_type = other DNA
ttacatagcatctctgtgcctc

SEQ ID NO: 28155 - DNA, 22 bp, synthetic construct
  misc_feature 1..22: note = chemically synthesized
  source 1..22: mol_type = other DNA
catagcatctctgtgcctcagt

SEQ ID NO: 28156 - DNA, 22 bp, synthetic construct
  misc_feature 1..22: note = chemically synthesized
  source 1..22: mol_type = other DNA
tgtgcctcagtttctccatata

SEQ ID NO: 28157 - DNA, 22 bp, synthetic construct
  misc_feature 1..22: note = chemically synthesized
  source 1..22: mol_type = other DNA
tgcctcagtttctccatatata

SEQ ID NO: 28158 - DNA, 22 bp, synthetic construct
  misc_feature 1..22: note = chemically synthesized
  source 1..22: mol_type = other DNA
agtttctccatatataaaatct

SEQ ID NO: 28159 - DNA, 22 bp, synthetic construct
  misc_feature 1..22: note = chemically synthesized
  source 1..22: mol_type = other DNA
ctccatatataaaatctacctg

SEQ ID NO: 28160 - DNA, 22 bp, synthetic construct
  misc_feature 1..22: note = chemically synthesized
  source 1..22: mol_type = other DNA
tccatatataaaatctacctgt

SEQ ID NO: 28161 - DNA, 22 bp, synthetic construct
  misc_feature 1..22: note = chemically synthesized
  source 1..22: mol_type = other DNA
catatataaaatctacctgtaa

SEQ ID NO: 28162 - DNA, 22 bp, synthetic construct
  misc_feature 1..22: note = chemically synthesized
  source 1..22: mol_type = other DNA
cctgtaataatgttgtgaaaat

SEQ ID NO: 28163 - DNA, 22 bp, synthetic construct
  misc_feature 1..22: note = chemically synthesized
  source 1..22: mol_type = other DNA
taataatgttgtgaaaattaaa

SEQ ID NO: 28164 - DNA, 22 bp, synthetic construct
  misc_feature 1..22: note = chemically synthesized
  source 1..22: mol_type = other DNA
tgaaaattaaaagaaataccag

SEQ ID NO: 28165 - DNA, 22 bp, synthetic construct
  misc_feature 1..22: note = chemically synthesized
  source 1..22: mol_type = other DNA
aaagaaataccagttgtaaatc

SEQ ID NO: 28166 - DNA, 22 bp, synthetic construct
  misc_feature 1..22: note = chemically synthesized
  source 1..22: mol_type = other DNA
taaatcactcagaactgtgcct

SEQ ID NO: 28167 - DNA, 22 bp, synthetic construct
  misc_feature 1..22: note = chemically synthesized
  source 1..22: mol_type = other DNA
agaactgtgcctagcatttaat

SEQ ID NO: 28168 - DNA, 22 bp, synthetic construct
  misc_feature 1..22: note = chemically synthesized
  source 1..22: mol_type = other DNA
tgcctagcatttaataaacact

SEQ ID NO: 28169 - DNA, 22 bp, synthetic construct
  misc_feature 1..22: note = chemically synthesized
  source 1..22: mol_type = other DNA
gcatttaataaacactctgtag

SEQ ID NO: 28170 - DNA, 22 bp, synthetic construct
  misc_feature 1..22: note = chemically synthesized
  source 1..22: mol_type = other DNA
aataaacactctgtaggtatta

SEQ ID NO: 28171 - DNA, 22 bp, synthetic construct
  misc_feature 1..22: note = chemically synthesized
  source 1..22: mol_type = other DNA
ataaacactctgtaggtattag

SEQ ID NO: 28172 - DNA, 22 bp, synthetic construct
  misc_feature 1..22: note = chemically synthesized
  source 1..22: mol_type = other DNA
tgtaggtattagcttatttctt

SEQ ID NO: 28173 - DNA, 22 bp, synthetic construct
  misc_feature 1..22: note = chemically synthesized
  source 1..22: mol_type = other DNA
taggtattagcttatttcttta

SEQ ID NO: 28174 - DNA, 22 bp, synthetic construct
  misc_feature 1..22: note = chemically synthesized
  source 1..22: mol_type = other DNA
gcttatttctttataaaattta

SEQ ID NO: 28175 - DNA, 22 bp, synthetic construct
  misc_feature 1..22: note = chemically synthesized
  source 1..22: mol_type = other DNA
atttctttataaaatttattca

SEQ ID NO: 28176 - DNA, 22 bp, synthetic construct
  misc_feature 1..22: note = chemically synthesized
  source 1..22: mol_type = other DNA
tttctttataaaatttattcat

SEQ ID NO: 28177 - DNA, 22 bp, synthetic construct
  misc_feature 1..22: note = chemically synthesized
  source 1..22: mol_type = other DNA
ctttataaaatttattcataaa

SEQ ID NO: 28178 - DNA, 22 bp, synthetic construct
  misc_feature 1..22: note = chemically synthesized
  source 1..22: mol_type = other DNA
tttataaaatttattcataaaa

SEQ ID NO: 28179 - DNA, 22 bp, synthetic construct
  misc_feature 1..22: note = chemically synthesized
  source 1..22: mol_type = other DNA
tataaaatttattcataaaatg

SEQ ID NO: 28180 - DNA, 22 bp, synthetic construct
  misc_feature 1..22: note = chemically synthesized
  source 1..22: mol_type = other DNA
ataaaatttattcataaaatga

SEQ ID NO: 28181 - DNA, 22 bp, synthetic construct
  misc_feature 1..22: note = chemically synthesized
  source 1..22: mol_type = other DNA
taaaatttattcataaaatgag

SEQ ID NO: 28182 - DNA, 22 bp, synthetic construct
  misc_feature 1..22: note = chemically synthesized
  source 1..22: mol_type = other DNA
attcataaaatgaggaagttag

SEQ ID NO: 28183 - DNA, 22 bp, synthetic construct
  misc_feature 1..22: note = chemically synthesized
  source 1..22: mol_type = other DNA
ttcataaaatgaggaagttagc

SEQ ID NO: 28184 - DNA, 22 bp, synthetic construct
  misc_feature 1..22: note = chemically synthesized
  source 1..22: mol_type = other DNA
ataaaatgaggaagttagctca

SEQ ID NO: 28185 - DNA, 22 bp, synthetic construct
  misc_feature 1..22: note = chemically synthesized
  source 1..22: mol_type = other DNA
gctcatgtattgtcataccagc

SEQ ID NO: 28186 - DNA, 22 bp, synthetic construct
  misc_feature 1..22: note = chemically synthesized
  source 1..22: mol_type = other DNA
atgtattgtcataccagctttc

SEQ ID NO: 28187 - DNA, 22 bp, synthetic construct
  misc_feature 1..22: note = chemically synthesized
  source 1..22: mol_type = other DNA
tcataccagctttcactttgaa

SEQ ID NO: 28188 - DNA, 22 bp, synthetic construct
  misc_feature 1..22: note = chemically synthesized
  source 1..22: mol_type = other DNA
tcactttgaatgagtccataat

SEQ ID NO: 28189 - DNA, 22 bp, synthetic construct
  misc_feature 1..22: note = chemically synthesized
  source 1..22: mol_type = other DNA
cactttgaatgagtccataatt

SEQ ID NO: 28190 - DNA, 22 bp, synthetic construct
  misc_feature 1..22: note = chemically synthesized
  source 1..22: mol_type = other DNA
actttgaatgagtccataattg

SEQ ID NO: 28191 - DNA, 22 bp, synthetic construct
  misc_feature 1..22: note = chemically synthesized
  source 1..22: mol_type = other DNA
tgaatgagtccataattgcatt

SEQ ID NO: 28192 - DNA, 22 bp, synthetic construct
  misc_feature 1..22: note = chemically synthesized
  source 1..22: mol_type = other DNA
gaatgagtccataattgcattt

SEQ ID NO: 28193 - DNA, 22 bp, synthetic construct
  misc_feature 1..22: note = chemically synthesized
  source 1..22: mol_type = other DNA
aatgagtccataattgcatttt

SEQ ID NO: 28194 - DNA, 22 bp, synthetic construct
  misc_feature 1..22: note = chemically synthesized
  source 1..22: mol_type = other DNA
catttttaaacacaaaaagaga

SEQ ID NO: 28195 - DNA, 22 bp, synthetic construct
  misc_feature 1..22: note = chemically synthesized
  source 1..22: mol_type = other DNA
ttaaacacaaaaagagaaataa

SEQ ID NO: 28196 - DNA, 22 bp, synthetic construct
  misc_feature 1..22: note = chemically synthesized
  source 1..22: mol_type = other DNA
taaacacaaaaagagaaataat

SEQ ID NO: 28197 - DNA, 22 bp, synthetic construct
  misc_feature 1..22: note = chemically synthesized
  source 1..22: mol_type = other DNA
aaacacaaaaagagaaataata

SEQ ID NO: 28198 - DNA, 22 bp, synthetic construct
  misc_feature 1..22: note = chemically synthesized
  source 1..22: mol_type = other DNA
aacacaaaaagagaaataatag

SEQ ID NO: 28199 - DNA, 22 bp, synthetic construct
  misc_feature 1..22: note = chemically synthesized
  source 1..22: mol_type = other DNA
cttcaatcacgggatgcatagt

SEQ ID NO: 28200 - DNA, 22 bp, synthetic construct
  misc_feature 1..22: note = chemically synthesized
  source 1..22: mol_type = other DNA
caatcacgggatgcatagtaat

SEQ ID NO: 28201 - DNA, 22 bp, synthetic construct
  misc_feature 1..22: note = chemically synthesized
  source 1..22: mol_type = other DNA
aatcacgggatgcatagtaatt

SEQ ID NO: 28202 - DNA, 22 bp, synthetic construct
  misc_feature 1..22: note = chemically synthesized
  source 1..22: mol_type = other DNA
ggatttctttgccctaattact

SEQ ID NO: 28203 - DNA, 22 bp, synthetic construct
  misc_feature 1..22: note = chemically synthesized
  source 1..22: mol_type = other DNA
ctttgccctaattactgatgtg

SEQ ID NO: 28204 - DNA, 22 bp, synthetic construct
  misc_feature 1..22: note = chemically synthesized
  source 1..22: mol_type = other DNA
tttgccctaattactgatgtgg

SEQ ID NO: 28205 - DNA, 22 bp, synthetic construct
  misc_feature 1..22: note = chemically synthesized
  source 1..22: mol_type = other DNA
tgccctaattactgatgtggat

SEQ ID NO: 28206 - DNA, 22 bp, synthetic construct
  misc_feature 1..22: note = chemically synthesized
  source 1..22: mol_type = other DNA
gccctaattactgatgtggata

SEQ ID NO: 28207 - DNA, 22 bp, synthetic construct
  misc_feature 1..22: note = chemically synthesized
  source 1..22: mol_type = other DNA
ccctaattactgatgtggataa

SEQ ID NO: 28208 - DNA, 22 bp, synthetic construct
  misc_feature 1..22: note = chemically synthesized
  source 1..22: mol_type = other DNA
attactgatgtggataagccgg

SEQ ID NO: 28209 - DNA, 22 bp, synthetic construct
  misc_feature 1..22: note = chemically synthesized
  source 1..22: mol_type = other DNA
ctgatgtggataagccggtggg

SEQ ID NO: 28210 - DNA, 22 bp, synthetic construct
  misc_feature 1..22: note = chemically synthesized
  source 1..22: mol_type = other DNA
atgtggataagccggtgggcca

SEQ ID NO: 28211 - DNA, 22 bp, synthetic construct
  misc_feature 1..22: note = chemically synthesized
  source 1..22: mol_type = other DNA
aagctgttatcacaccatgtga

SEQ ID NO: 28212 - DNA, 22 bp, synthetic construct
  misc_feature 1..22: note = chemically synthesized
  source 1..22: mol_type = other DNA
ttatcacaccatgtgaaacaca

SEQ ID NO: 28213 - DNA, 22 bp, synthetic construct
  misc_feature 1..22: note = chemically synthesized
  source 1..22: mol_type = other DNA
tcacaccatgtgaaacacacga

SEQ ID NO: 28214 - DNA, 22 bp, synthetic construct
  misc_feature 1..22: note = chemically synthesized
  source 1..22: mol_type = other DNA
tgtaaaaactatgcttggttgc

SEQ ID NO: 28215 - DNA, 22 bp, synthetic construct
  misc_feature 1..22: note = chemically synthesized
  source 1..22: mol_type = other DNA
tgcttggttgcacagcttcaag

SEQ ID NO: 28216 - DNA, 22 bp, synthetic construct
  misc_feature 1..22: note = chemically synthesized
  source 1..22: mol_type = other DNA
ggttgcacagcttcaaggaaag

SEQ ID NO: 28217 - DNA, 22 bp, synthetic construct
  misc_feature 1..22: note = chemically synthesized
  source 1..22: mol_type = other DNA
gttgcacagcttcaaggaaagc

SEQ ID NO: 28218 - DNA, 22 bp, synthetic construct
  misc_feature 1..22: note = chemically synthesized
  source 1..22: mol_type = other DNA
cacagcttcaaggaaagcacta

SEQ ID NO: 28219 - DNA, 22 bp, synthetic construct
  misc_feature 1..22: note = chemically synthesized
  source 1..22: mol_type = other DNA
caaggaaagcactagtctactc

SEQ ID NO: 28220 - DNA, 22 bp, synthetic construct
  misc_feature 1..22: note = chemically synthesized
  source 1..22: mol_type = other DNA
aaggaaagcactagtctactca

SEQ ID NO: 28221 - DNA, 22 bp, synthetic construct
  misc_feature 1..22: note = chemically synthesized
  source 1..22: mol_type = other DNA
gtctactcacttccttttcatt

SEQ ID NO: 28222 - DNA, 22 bp, synthetic construct
  misc_feature 1..22: note = chemically synthesized
  source 1..22: mol_type = other DNA
ctcacttccttttcattcagca

SEQ ID NO: 28223 - DNA, 22 bp, synthetic construct
  misc_feature 1..22: note = chemically synthesized
  source 1..22: mol_type = other DNA
acttccttttcattcagcatgc

SEQ ID NO: 28224 - DNA, 22 bp, synthetic construct
  misc_feature 1..22: note = chemically synthesized
  source 1..22: mol_type = other DNA
ccttttcattcagcatgctatg

SEQ ID NO: 28225 - DNA, 22 bp, synthetic construct
  misc_feature 1..22: note = chemically synthesized
  source 1..22: mol_type = other DNA
cttttcattcagcatgctatgt

SEQ ID NO: 28226 - DNA, 22 bp, synthetic construct
  misc_feature 1..22: note = chemically synthesized
  source 1..22: mol_type = other DNA
ttcattcagcatgctatgtcta

SEQ ID NO: 28227 - DNA, 22 bp, synthetic construct
  misc_feature 1..22: note = chemically synthesized
  source 1..22: mol_type = other DNA
tcattcagcatgctatgtctag

SEQ ID NO: 28228 - DNA, 22 bp, synthetic construct
  misc_feature 1..22: note = chemically synthesized
  source 1..22: mol_type = other DNA
cattcagcatgctatgtctagg

SEQ ID NO: 28229 - DNA, 22 bp, synthetic construct
  misc_feature 1..22: note = chemically synthesized
  source 1..22: mol_type = other DNA
attcagcatgctatgtctaggc

SEQ ID NO: 28230 - DNA, 22 bp, synthetic construct
  misc_feature 1..22: note = chemically synthesized
  source 1..22: mol_type = other DNA
agcatgctatgtctaggcccct

SEQ ID NO: 28231 - DNA, 22 bp, synthetic construct
  misc_feature 1..22: note = chemically synthesized
  source 1..22: mol_type = other DNA
tgtctaggcccctttcatataa

SEQ ID NO: 28232 - DNA, 22 bp, synthetic construct
  misc_feature 1..22: note = chemically synthesized
  source 1..22: mol_type = other DNA
ggcccctttcatataaaatatt

SEQ ID NO: 28233 - DNA, 22 bp, synthetic construct
  misc_feature 1..22: note = chemically synthesized
  source 1..22: mol_type = other DNA
tcatataaaatatttggagctg

SEQ ID NO: 28234 - DNA, 22 bp, synthetic construct
  misc_feature 1..22: note = chemically synthesized
  source 1..22: mol_type = other DNA
catataaaatatttggagctgc

SEQ ID NO: 28235 - DNA, 22 bp, synthetic construct
  misc_feature 1..22: note = chemically synthesized
  source 1..22: mol_type = other DNA
atataaaatatttggagctgcc

SEQ ID NO: 28236 - DNA, 22 bp, synthetic construct
  misc_feature 1..22: note = chemically synthesized
  source 1..22: mol_type = other DNA
ggagctgccattgtaggtagtg

SEQ ID NO: 28237 - DNA, 22 bp, synthetic construct
  misc_feature 1..22: note = chemically synthesized
  source 1..22: mol_type = other DNA
gagctgccattgtaggtagtgc

SEQ ID NO: 28238 - DNA, 22 bp, synthetic construct
  misc_feature 1..22: note = chemically synthesized
  source 1..22: mol_type = other DNA
ccattgtaggtagtgcaggtgg

SEQ ID NO: 28239 - DNA, 22 bp, synthetic construct
  misc_feature 1..22: note = chemically synthesized
  source 1..22: mol_type = other DNA
taggtagtgcaggtggtcttgt

SEQ ID NO: 28240 - DNA, 22 bp, synthetic construct
  misc_feature 1..22: note = chemically synthesized
  source 1..22: mol_type = other DNA
gttcaaagtgtgagtatcacct

SEQ ID NO: 28241 - DNA, 22 bp, synthetic construct
  misc_feature 1..22: note = chemically synthesized
  source 1..22: mol_type = other DNA
ttcaaagtgtgagtatcacctc

SEQ ID NO: 28242 - DNA, 22 bp, synthetic construct
  misc_feature 1..22: note = chemically synthesized
  source 1..22: mol_type = other DNA
aaagtgtgagtatcacctccca

SEQ ID NO: 28243 - DNA, 22 bp, synthetic construct
  misc_feature 1..22: note = chemically synthesized
  source 1..22: mol_type = other DNA
ccactgccaagactgcagctgc

SEQ ID NO: 28244 - DNA, 22 bp, synthetic construct
  misc_feature 1..22: note = chemically synthesized
  source 1..22: mol_type = other DNA
ccaagactgcagctgctttgat

SEQ ID NO: 28245 - DNA, 22 bp, synthetic construct
  misc_feature 1..22: note = chemically synthesized
  source 1..22: mol_type = other DNA
cagctgctttgattttaactga

SEQ ID NO: 28246 - DNA, 22 bp, synthetic construct
  misc_feature 1..22: note = chemically synthesized
  source 1..22: mol_type = other DNA
ctttgattttaactgaggatct

SEQ ID NO: 28247 - DNA, 22 bp, synthetic construct
  misc_feature 1..22: note = chemically synthesized
  source 1..22: mol_type = other DNA
tgattttaactgaggatctaga

SEQ ID NO: 28248 - DNA, 22 bp, synthetic construct
  misc_feature 1..22: note = chemically synthesized
  source 1..22: mol_type = other DNA
gattttaactgaggatctagaa

SEQ ID NO: 28249 - DNA, 22 bp, synthetic construct
  misc_feature 1..22: note = chemically synthesized
  source 1..22: mol_type = other DNA
attttaactgaggatctagaaa

SEQ ID NO: 28250 - DNA, 22 bp, synthetic construct
  misc_feature 1..22: note = chemically synthesized
  source 1..22: mol_type = other DNA
taactgaggatctagaaaagtg

SEQ ID NO: 28251 - DNA, 22 bp, synthetic construct
  misc_feature 1..22: note = chemically synthesized
  source 1..22: mol_type = other DNA
aactgaggatctagaaaagtgc

SEQ ID NO: 28252 - DNA, 22 bp, synthetic construct
  misc_feature 1..22: note = chemically synthesized
  source 1..22: mol_type = other DNA
actgaggatctagaaaagtgct

SEQ ID NO: 28253 - DNA, 22 bp, synthetic construct
  misc_feature 1..22: note = chemically synthesized
  source 1..22: mol_type = other DNA
aggatctagaaaagtgctggga

SEQ ID NO: 28254 - DNA, 22 bp, synthetic construct
  misc_feature 1..22: note = chemically synthesized
  source 1..22: mol_type = other DNA
gaaaagtgctgggaacacaaat

SEQ ID NO: 28255 - DNA, 22 bp, synthetic construct
  misc_feature 1..22: note = chemically synthesized
  source 1..22: mol_type = other DNA
ggaacacaaatatttgctgacc

SEQ ID NO: 28256 - DNA, 22 bp, synthetic construct
  misc_feature 1..22: note = chemically synthesized
  source 1..22: mol_type = other DNA
gctgacctttgtcacaagtagc

SEQ ID NO: 28257 - DNA, 22 bp, synthetic construct
  misc_feature 1..22: note = chemically synthesized
  source 1..22: mol_type = other DNA
ctgacctttgtcacaagtagca

SEQ ID NO: 28258 - DNA, 22 bp, synthetic construct
  misc_feature 1..22: note = chemically synthesized
  source 1..22: mol_type = other DNA
acctttgtcacaagtagcacct

SEQ ID NO: 28259 - DNA, 22 bp, synthetic construct
  misc_feature 1..22: note = chemically synthesized
  source 1..22: mol_type = other DNA
tgtcacaagtagcacctaatct

SEQ ID NO: 28260 - DNA, 22 bp, synthetic construct
  misc_feature 1..22: note = chemically synthesized
  source 1..22: mol_type = other DNA
gtcacaagtagcacctaatctc

SEQ ID NO: 28261 - DNA, 22 bp, synthetic construct
  misc_feature 1..22: note = chemically synthesized
  source 1..22: mol_type = other DNA
tcacaagtagcacctaatctcc

SEQ ID NO: 28262 - DNA, 22 bp, synthetic construct
  misc_feature 1..22: note = chemically synthesized
  source 1..22: mol_type = other DNA
atctccttcctaccagacctgc

SEQ ID NO: 28263 - DNA, 22 bp, synthetic construct
  misc_feature 1..22: note = chemically synthesized
  source 1..22: mol_type = other DNA
cttcctaccagacctgctgcct

SEQ ID NO: 28264 - DNA, 22 bp, synthetic construct
  misc_feature 1..22: note = chemically synthesized
  source 1..22: mol_type = other DNA
cctaccagacctgctgccttat

SEQ ID NO: 28265 - DNA, 22 bp, synthetic construct
  misc_feature 1..22: note = chemically synthesized
  source 1..22: mol_type = other DNA
ctaccagacctgctgccttata

SEQ ID NO: 28266 - DNA, 22 bp, synthetic construct
  misc_feature 1..22: note = chemically synthesized
  source 1..22: mol_type = other DNA
ccagacctgctgccttataaaa

SEQ ID NO: 28267 - DNA, 22 bp, synthetic construct
  misc_feature 1..22: note = chemically synthesized
  source 1..22: mol_type = other DNA
ctgccttataaaatgatgttct

SEQ ID NO: 28268 - DNA, 22 bp, synthetic construct
  misc_feature 1..22: note = chemically synthesized
  source 1..22: mol_type = other DNA
ccttataaaatgatgttctaag

SEQ ID NO: 28269 - DNA, 22 bp, synthetic construct
  misc_feature 1..22: note = chemically synthesized
  source 1..22: mol_type = other DNA
ataaaatgatgttctaagtgta

SEQ ID NO: 28270 - DNA, 22 bp, synthetic construct
  misc_feature 1..22: note = chemically synthesized
  source 1..22: mol_type = other DNA
taaaatgatgttctaagtgtat

SEQ ID NO: 28271 - DNA, 22 bp, synthetic construct
  misc_feature 1..22: note = chemically synthesized
  source 1..22: mol_type = other DNA
taagtgtataatgacttcctct

SEQ ID NO: 28272 - DNA, 22 bp, synthetic construct
  misc_feature 1..22: note = chemically synthesized
  source 1..22: mol_type = other DNA
agtgtataatgacttcctctgc

SEQ ID NO: 28273 - DNA, 22 bp, synthetic construct
  misc_feature 1..22: note = chemically synthesized
  source 1..22: mol_type = other DNA
cctctgcttctgcaactgtgtt

SEQ ID NO: 28274 - DNA, 22 bp, synthetic construct
  misc_feature 1..22: note = chemically synthesized
  source 1..22: mol_type = other DNA
ctctgcttctgcaactgtgttt

SEQ ID NO: 28275 - DNA, 22 bp, synthetic construct
  misc_feature 1..22: note = chemically synthesized
  source 1..22: mol_type = other DNA
tgcttctgcaactgtgttttgg

SEQ ID NO: 28276 - DNA, 22 bp, synthetic construct
  misc_feature 1..22: note = chemically synthesized
  source 1..22: mol_type = other DNA
cttctgcaactgtgttttggaa

SEQ ID NO: 28277 - DNA, 22 bp, synthetic construct
  misc_feature 1..22: note = chemically synthesized
  source 1..22: mol_type = other DNA
ctgcaactgtgttttggaacag

SEQ ID NO: 28278 - DNA, 22 bp, synthetic construct
  misc_feature 1..22: note = chemically synthesized
  source 1..22: mol_type = other DNA
tgcaactgtgttttggaacagg

SEQ ID NO: 28279 - DNA, 22 bp, synthetic construct
  misc_feature 1..22: note = chemically synthesized
  source 1..22: mol_type = other DNA
caactgtgttttggaacaggag

SEQ ID NO: 28280 - DNA, 22 bp, synthetic construct
  misc_feature 1..22: note = chemically synthesized
  source 1..22: mol_type = other DNA
tgttttggaacaggagggtgag

SEQ ID NO: 28281 - DNA, 22 bp, synthetic construct
  misc_feature 1..22: note = chemically synthesized
  source 1..22: mol_type = other DNA
tggaacaggagggtgagattag

SEQ ID NO: 28282 - DNA, 22 bp, synthetic construct
  misc_feature 1..22: note = chemically synthesized
  source 1..22: mol_type = other DNA
ggaacaggagggtgagattagt

SEQ ID NO: 28283 - DNA, 22 bp, synthetic construct
  misc_feature 1..22: note = chemically synthesized
  source 1..22: mol_type = other DNA
gaacaggagggtgagattagta

SEQ ID NO: 28284 - DNA, 22 bp, synthetic construct
  misc_feature 1..22: note = chemically synthesized
  source 1..22: mol_type = other DNA
gtagccacacacactgaaatag

SEQ ID NO: 28285 - DNA, 22 bp, synthetic construct
  misc_feature 1..22: note = chemically synthesized
  source 1..22: mol_type = other DNA
aaatagtcatatgacttccaaa

SEQ ID NO: 28286 - DNA, 22 bp, synthetic construct
  misc_feature 1..22: note = chemically synthesized
  source 1..22: mol_type = other DNA
ccaaagtctgtaatttttaagc

SEQ ID NO: 28287 - DNA, 22 bp, synthetic construct
  misc_feature 1..22: note = chemically synthesized
  source 1..22: mol_type = other DNA
caaagtctgtaatttttaagca

SEQ ID NO: 28288 - DNA, 22 bp, synthetic construct
  misc_feature 1..22: note = chemically synthesized
  source 1..22: mol_type = other DNA
taatttttaagcatatacaaaa

SEQ ID NO: 28289 - DNA, 22 bp, synthetic construct
  misc_feature 1..22: note = chemically synthesized
  source 1..22: mol_type = other DNA
ttaagcatatacaaaatagtga

SEQ ID NO: 28290 - DNA, 22 bp, synthetic construct
  misc_feature 1..22: note = chemically synthesized
  source 1..22: mol_type = other DNA
taagcatatacaaaatagtgaa

SEQ ID NO: 28291 - DNA, 22 bp, synthetic construct
  misc_feature 1..22: note = chemically synthesized
  source 1..22: mol_type = other DNA
aagcatatacaaaatagtgaaa

SEQ ID NO: 28292 - DNA, 22 bp, synthetic construct
  misc_feature 1..22: note = chemically synthesized
  source 1..22: mol_type = other DNA
agcatatacaaaatagtgaaat

SEQ ID NO: 28293 - DNA, 22 bp, synthetic construct
  misc_feature 1..22: note = chemically synthesized
  source 1..22: mol_type = other DNA
ctccatatgtgtataatatgta

SEQ ID NO: 28294 - DNA, 22 bp, synthetic construct
  misc_feature 1..22: note = chemically synthesized
  source 1..22: mol_type = other DNA
tccatatgtgtataatatgtat

SEQ ID NO: 28295 - DNA, 22 bp, synthetic construct
  misc_feature 1..22: note = chemically synthesized
  source 1..22: mol_type = other DNA
catatgtgtataatatgtatat

SEQ ID NO: 28296 - DNA, 22 bp, synthetic construct
  misc_feature 1..22: note = chemically synthesized
  source 1..22: mol_type = other DNA
attttggctgatatctattcta

SEQ ID NO: 28297 - DNA, 22 bp, synthetic construct
  misc_feature 1..22: note = chemically synthesized
  source 1..22: mol_type = other DNA
ttttggctgatatctattctat

SEQ ID NO: 28298 - DNA, 22 bp, synthetic construct
  misc_feature 1..22: note = chemically synthesized
  source 1..22: mol_type = other DNA
tggctgatatctattctatact

SEQ ID NO: 28299 - DNA, 22 bp, synthetic construct
  misc_feature 1..22: note = chemically synthesized
  source 1..22: mol_type = other DNA
ggctgatatctattctatactt

SEQ ID NO: 28300 - DNA, 22 bp, synthetic construct
  misc_feature 1..22: note = chemically synthesized
  source 1..22: mol_type = other DNA
gctgatatctattctatacttc

SEQ ID NO: 28301 - DNA, 22 bp, synthetic construct
  misc_feature 1..22: note = chemically synthesized
  source 1..22: mol_type = other DNA
atatctattctatacttctttg

SEQ ID NO: 28302 - DNA, 22 bp, synthetic construct
  misc_feature 1..22: note = chemically synthesized
  source 1..22: mol_type = other DNA
ttctatacttctttgaaatagt

SEQ ID NO: 28303 - DNA, 22 bp, synthetic construct
  misc_feature 1..22: note = chemically synthesized
  source 1..22: mol_type = other DNA
tatacttctttgaaatagtgat

SEQ ID NO: 28304 - DNA, 22 bp, synthetic construct
  misc_feature 1..22: note = chemically synthesized
  source 1..22: mol_type = other DNA
tacttctttgaaatagtgattt

SEQ ID NO: 28305 - DNA, 22 bp, synthetic construct
  misc_feature 1..22: note = chemically synthesized
  source 1..22: mol_type = other DNA
ctttgaaatagtgatttttagt

SEQ ID NO: 28306 - DNA, 22 bp, synthetic construct
  misc_feature 1..22: note = chemically synthesized
  source 1..22: mol_type = other DNA
tttgaaatagtgatttttagta

SEQ ID NO: 28307 - DNA, 22 bp, synthetic construct
  misc_feature 1..22: note = chemically synthesized
  source 1..22: mol_type = other DNA
tgaaatagtgatttttagtaaa

SEQ ID NO: 28308 - DNA, 22 bp, synthetic construct
  misc_feature 1..22: note = chemically synthesized
  source 1..22: mol_type = other DNA
gaaatagtgatttttagtaaat

SEQ ID NO: 28309 - DNA, 22 bp, synthetic construct
  misc_feature 1..22: note = chemically synthesized
  source 1..22: mol_type = other DNA
aaatagtgatttttagtaaatt

SEQ ID NO: 28310 - DNA, 22 bp, synthetic construct
  misc_feature 1..22: note = chemically synthesized
  source 1..22: mol_type = other DNA
ttagtaaattggcagtgttgcc

SEQ ID NO: 28311 - DNA, 22 bp, synthetic construct
  misc_feature 1..22: note = chemically synthesized
  source 1..22: mol_type = other DNA
tagtaaattggcagtgttgcca

SEQ ID NO: 28312 - DNA, 22 bp, synthetic construct
  misc_feature 1..22: note = chemically synthesized
  source 1..22: mol_type = other DNA
agtaaattggcagtgttgccag

SEQ ID NO: 28313 - DNA, 22 bp, synthetic construct
  misc_feature 1..22: note = chemically synthesized
  source 1..22: mol_type = other DNA
gtaaattggcagtgttgccaga

SEQ ID NO: 28314 - DNA, 22 bp, synthetic construct
  misc_feature 1..22: note = chemically synthesized
  source 1..22: mol_type = other DNA
gcagtgttgccagatgacgact

SEQ ID NO: 28315 - DNA, 22 bp, synthetic construct
  misc_feature 1..22: note = chemically synthesized
  source 1..22: mol_type = other DNA
ccagatgacgacttagagtttt

SEQ ID NO: 28316 - DNA, 22 bp, synthetic construct
  misc_feature 1..22: note = chemically synthesized
  source 1..22: mol_type = other DNA
agagttttaaccacctcattgt

SEQ ID NO: 28317 - DNA, 22 bp, synthetic construct
  misc_feature 1..22: note = chemically synthesized
  source 1..22: mol_type = other DNA
gagttttaaccacctcattgtt

SEQ ID NO: 28318 - DNA, 22 bp, synthetic construct
  misc_feature 1..22: note = chemically synthesized
  source 1..22: mol_type = other DNA
taaccacctcattgttatatgt

SEQ ID NO: 28319 - DNA, 22 bp, synthetic construct
  misc_feature 1..22: note = chemically synthesized
  source 1..22: mol_type = other DNA
aaccacctcattgttatatgta

SEQ ID NO: 28320 - DNA, 22 bp, synthetic construct
  misc_feature 1..22: note = chemically synthesized
  source 1..22: mol_type = other DNA
accacctcattgttatatgtac

SEQ ID NO: 28321 - DNA, 22 bp, synthetic construct
  misc_feature 1..22: note = chemically synthesized
  source 1..22: mol_type = other DNA
attgttatatgtaccatggtag

SEQ ID NO: 28322 - DNA, 22 bp, synthetic construct
  misc_feature 1..22: note = chemically synthesized
  source 1..22: mol_type = other DNA
ttatatgtaccatggtagctca

SEQ ID NO: 28323 - DNA, 22 bp, synthetic construct
  misc_feature 1..22: note = chemically synthesized
  source 1..22: mol_type = other DNA
tatgtaccatggtagctcatct

SEQ ID NO: 28324 - DNA, 22 bp, synthetic construct
  misc_feature 1..22: note = chemically synthesized
  source 1..22: mol_type = other DNA
atcttttctttcaggtgaaagt

SEQ ID NO: 28325 - DNA, 22 bp, synthetic construct
  misc_feature 1..22: note = chemically synthesized
  source 1..22: mol_type = other DNA
ttctttcaggtgaaagttgtga

SEQ ID NO: 28326 - DNA, 22 bp, synthetic construct
  misc_feature 1..22: note = chemically synthesized
  source 1..22: mol_type = other DNA
tctttcaggtgaaagttgtgat

SEQ ID NO: 28327 - DNA, 22 bp, synthetic construct
  misc_feature 1..22: note = chemically synthesized
  source 1..22: mol_type = other DNA
ctttcaggtgaaagttgtgata

SEQ ID NO: 28328 - DNA, 22 bp, synthetic construct
  misc_feature 1..22: note = chemically synthesized
  source 1..22: mol_type = other DNA
tttcaggtgaaagttgtgatac

SEQ ID NO: 28329 - DNA, 22 bp, synthetic construct
  misc_feature 1..22: note = chemically synthesized
  source 1..22: mol_type = other DNA
tcaggtgaaagttgtgatactt

SEQ ID NO: 28330 - DNA, 22 bp, synthetic construct
  misc_feature 1..22: note = chemically synthesized
  source 1..22: mol_type = other DNA
caggtgaaagttgtgatacttt

SEQ ID NO: 28331 - DNA, 22 bp, synthetic construct
  misc_feature 1..22: note = chemically synthesized
  source 1..22: mol_type = other DNA
aggtgaaagttgtgatactttg

SEQ ID NO: 28332 - DNA, 22 bp, synthetic construct
  misc_feature 1..22: note = chemically synthesized
  source 1..22: mol_type = other DNA
tgatactttgtcctcacgctaa

SEQ ID NO: 28333 - DNA, 22 bp, synthetic construct
  misc_feature 1..22: note = chemically synthesized
  source 1..22: mol_type = other DNA
tgtcctcacgctaaacatagcc

SEQ ID NO: 28334 - DNA, 22 bp, synthetic construct
  misc_feature 1..22: note = chemically synthesized
  source 1..22: mol_type = other DNA
gtcctcacgctaaacatagccc

SEQ ID NO: 28335 - DNA, 22 bp, synthetic construct
  misc_feature 1..22: note = chemically synthesized
  source 1..22: mol_type = other DNA
tcctcacgctaaacatagcccc

SEQ ID NO: 28336 - DNA, 22 bp, synthetic construct
  misc_feature 1..22: note = chemically synthesized
  source 1..22: mol_type = other DNA
acgctaaacatagcccccatgt

SEQ ID NO: 28337 - DNA, 22 bp, synthetic construct
  misc_feature 1..22: note = chemically synthesized
  source 1..22: mol_type = other DNA
aacatagcccccatgttgttcc

SEQ ID NO: 28338 - DNA, 22 bp, synthetic construct
  misc_feature 1..22: note = chemically synthesized
  source 1..22: mol_type = other DNA
ttccaggaaaatagagatcaat

SEQ ID NO: 28339 - DNA, 22 bp, synthetic construct
  misc_feature 1..22: note = chemically synthesized
  source 1..22: mol_type = other DNA
caggaaaatagagatcaataaa

SEQ ID NO: 28340 - DNA, 22 bp, synthetic construct
  misc_feature 1..22: note = chemically synthesized
  source 1..22: mol_type = other DNA
gtttgaaagtgaaggttaagtt

SEQ ID NO: 28341 - DNA, 22 bp, synthetic construct
  misc_feature 1..22: note = chemically synthesized
  source 1..22: mol_type = other DNA
tttgaaagtgaaggttaagttc

SEQ ID NO: 28342 - DNA, 22 bp, synthetic construct
  misc_feature 1..22: note = chemically synthesized
  source 1..22: mol_type = other DNA
gaaagtgaaggttaagttcaaa

SEQ ID NO: 28343 - DNA, 22 bp, synthetic construct
  misc_feature 1..22: note = chemically synthesized
  source 1..22: mol_type = other DNA
aaagtgaaggttaagttcaaat

SEQ ID NO: 28344 - DNA, 22 bp, synthetic construct
  misc_feature 1..22: note = chemically synthesized
  source 1..22: mol_type = other DNA
agttcaaattcaatgacctacg

SEQ ID NO: 28345 - DNA, 22 bp, synthetic construct
  misc_feature 1..22: note = chemically synthesized
  source 1..22: mol_type = other DNA
aaattcaatgacctacgctgtg

SEQ ID NO: 28346 - DNA, 22 bp, synthetic construct
  misc_feature 1..22: note = chemically synthesized
  source 1..22: mol_type = other DNA
aatgacctacgctgtggtaaaa

SEQ ID NO: 28347 - DNA, 22 bp, synthetic construct
  misc_feature 1..22: note = chemically synthesized
  source 1..22: mol_type = other DNA
cgctgtggtaaaacgatcattc

SEQ ID NO: 28348 - DNA, 22 bp, synthetic construct
  misc_feature 1..22: note = chemically synthesized
  source 1..22: mol_type = other DNA
tggtaaaacgatcattcattaa

SEQ ID NO: 28349 - DNA, 22 bp, synthetic construct
  misc_feature 1..22: note = chemically synthesized
  source 1..22: mol_type = other DNA
attaatgatattaagtattttc

SEQ ID NO: 28350 - DNA, 22 bp, synthetic construct
  misc_feature 1..22: note = chemically synthesized
  source 1..22: mol_type = other DNA
atgatattaagtattttctttt

SEQ ID NO: 28351 - DNA, 22 bp, synthetic construct
  misc_feature 1..22: note = chemically synthesized
  source 1..22: mol_type = other DNA
agtattttcttttttaatgtca

SEQ ID NO: 28352 - DNA, 22 bp, synthetic construct
  misc_feature 1..22: note = chemically synthesized
  source 1..22: mol_type = other DNA
tcttttttaatgtcagaataaa

SEQ ID NO: 28353 - DNA, 22 bp, synthetic construct
  misc_feature 1..22: note = chemically synthesized
  source 1..22: mol_type = other DNA
cttttttaatgtcagaataaaa

SEQ ID NO: 28354 - DNA, 22 bp, synthetic construct
  misc_feature 1..22: note = chemically synthesized
  source 1..22: mol_type = other DNA
ttttttaatgtcagaataaaac

SEQ ID NO: 28355 - DNA, 22 bp, synthetic construct
  misc_feature 1..22: note = chemically synthesized
  source 1..22: mol_type = other DNA
ttttaatgtcagaataaaacca

SEQ ID NO: 28356 - DNA, 22 bp, synthetic construct
  misc_feature 1..22: note = chemically synthesized
  source 1..22: mol_type = other DNA
tttaatgtcagaataaaaccat

SEQ ID NO: 28357 - DNA, 22 bp, synthetic construct
  misc_feature 1..22: note = chemically synthesized
  source 1..22: mol_type = other DNA
ttaatgtcagaataaaaccatt

SEQ ID NO: 28358 - DNA, 22 bp, synthetic construct
  misc_feature 1..22: note = chemically synthesized
  source 1..22: mol_type = other DNA
taatgtcagaataaaaccattt

SEQ ID NO: 28359 - DNA, 22 bp, synthetic construct
  misc_feature 1..22: note = chemically synthesized
  source 1..22: mol_type = other DNA
aatgtcagaataaaaccattta

SEQ ID NO: 28360 - DNA, 22 bp, synthetic construct
  misc_feature 1..22: note = chemically synthesized
  source 1..22: mol_type = other DNA
atgtcagaataaaaccatttat

SEQ ID NO: 28361 - DNA, 22 bp, synthetic construct
  misc_feature 1..22: note = chemically synthesized
  source 1..22: mol_type = other DNA
atttgcagatttaaaaatatat

SEQ ID NO: 28362 - DNA, 22 bp, synthetic construct
  misc_feature 1..22: note = chemically synthesized
  source 1..22: mol_type = other DNA
tttgcagatttaaaaatatata

SEQ ID NO: 28363 - DNA, 22 bp, synthetic construct
  misc_feature 1..22: note = chemically synthesized
  source 1..22: mol_type = other DNA
gcagatttaaaaatatatatgt

SEQ ID NO: 28364 - DNA, 22 bp, synthetic construct
  misc_feature 1..22: note = chemically synthesized
  source 1..22: mol_type = other DNA
cagatttaaaaatatatatgtg

SEQ ID NO: 28365 - DNA, 22 bp, synthetic construct
  misc_feature 1..22: note = chemically synthesized
  source 1..22: mol_type = other DNA
aaaaatatatatgtgtatgtaa

SEQ ID NO: 28366 - DNA, 22 bp, synthetic construct
  misc_feature 1..22: note = chemically synthesized
  source 1..22: mol_type = other DNA
aaaatatatatgtgtatgtaaa

SEQ ID NO: 28367 - DNA, 22 bp, synthetic construct
  misc_feature 1..22: note = chemically synthesized
  source 1..22: mol_type = other DNA
cttggtttatacctcaaatatg

SEQ ID NO: 28368 - DNA, 22 bp, synthetic construct
  misc_feature 1..22: note = chemically synthesized
  source 1..22: mol_type = other DNA
ggtttatacctcaaatatgaaa

SEQ ID NO: 28369 - DNA, 22 bp, synthetic construct
  misc_feature 1..22: note = chemically synthesized
  source 1..22: mol_type = other DNA
gtttatacctcaaatatgaaaa

SEQ ID NO: 28370 - DNA, 22 bp, synthetic construct
  misc_feature 1..22: note = chemically synthesized
  source 1..22: mol_type = other DNA
atacctcaaatatgaaaatagg

SEQ ID NO: 28371 - DNA, 22 bp, synthetic construct
  misc_feature 1..22: note = chemically synthesized
  source 1..22: mol_type = other DNA
tacctcaaatatgaaaatagga

SEQ ID NO: 28372 - DNA, 22 bp, synthetic construct
  misc_feature 1..22: note = chemically synthesized
  source 1..22: mol_type = other DNA
aaatatgaaaataggaatgacc

SEQ ID NO: 28373 - DNA, 22 bp, synthetic construct
  misc_feature 1..22: note = chemically synthesized
  source 1..22: mol_type = other DNA
tctctatgctcttgcattcact

SEQ ID NO: 28374 - DNA, 22 bp, synthetic construct
  misc_feature 1..22: note = chemically synthesized
  source 1..22: mol_type = other DNA
tatgctcttgcattcacttata

SEQ ID NO: 28375 - DNA, 22 bp, synthetic construct
  misc_feature 1..22: note = chemically synthesized
  source 1..22: mol_type = other DNA
tgctcttgcattcacttatatt

SEQ ID NO: 28376 - DNA, 22 bp, synthetic construct
  misc_feature 1..22: note = chemically synthesized
  source 1..22: mol_type = other DNA
ttgcattcacttatattctagc

SEQ ID NO: 28377 - DNA, 22 bp, synthetic construct
  misc_feature 1..22: note = chemically synthesized
  source 1..22: mol_type = other DNA
gcattcacttatattctagctt

SEQ ID NO: 28378 - DNA, 22 bp, synthetic construct
  misc_feature 1..22: note = chemically synthesized
  source 1..22: mol_type = other DNA
cattcacttatattctagcttg

SEQ ID NO: 28379 - DNA, 22 bp, synthetic construct
  misc_feature 1..22: note = chemically synthesized
  source 1..22: mol_type = other DNA
acttatattctagcttgttaag

SEQ ID NO: 28380 - DNA, 22 bp, synthetic construct
  misc_feature 1..22: note = chemically synthesized
  source 1..22: mol_type = other DNA
atattctagcttgttaagagag

SEQ ID NO: 28381 - DNA, 22 bp, synthetic construct
  misc_feature 1..22: note = chemically synthesized
  source 1..22: mol_type = other DNA
tattctagcttgttaagagaga

SEQ ID NO: 28382 - DNA, 22 bp, synthetic construct
  misc_feature 1..22: note = chemically synthesized
  source 1..22: mol_type = other DNA
tagcttgttaagagagaagttt

SEQ ID NO: 28383 - DNA, 22 bp, synthetic construct
  misc_feature 1..22: note = chemically synthesized
  source 1..22: mol_type = other DNA
gcttgttaagagagaagtttgg

SEQ ID NO: 28384 - DNA, 22 bp, synthetic construct
  misc_feature 1..22: note = chemically synthesized
  source 1..22: mol_type = other DNA
gttaagagagaagtttggggca

SEQ ID NO: 28385 - DNA, 22 bp, synthetic construct
  misc_feature 1..22: note = chemically synthesized
  source 1..22: mol_type = other DNA
ttaagagagaagtttggggcaa

SEQ ID NO: 28386 - DNA, 22 bp, synthetic construct
  misc_feature 1..22: note = chemically synthesized
  source 1..22: mol_type = other DNA
agagagaagtttggggcaaaat

SEQ ID NO: 28387 - DNA, 22 bp, synthetic construct
  misc_feature 1..22: note = chemically synthesized
  source 1..22: mol_type = other DNA
ggggcaaaatgtgctttataaa

SEQ ID NO: 28388 - DNA, 22 bp, synthetic construct
  misc_feature 1..22: note = chemically synthesized
  source 1..22: mol_type = other DNA
gggcaaaatgtgctttataaat

SEQ ID NO: 28389 - DNA, 22 bp, synthetic construct
  misc_feature 1..22: note = chemically synthesized
  source 1..22: mol_type = other DNA
tataaatagtaaaaactgaggt

SEQ ID NO: 28390 - DNA, 22 bp, synthetic construct
  misc_feature 1..22: note = chemically synthesized
  source 1..22: mol_type = other DNA
ataaatagtaaaaactgaggta

SEQ ID NO: 28391 - DNA, 22 bp, synthetic construct
  misc_feature 1..22: note = chemically synthesized
  source 1..22: mol_type = other DNA
taaatagtaaaaactgaggtaa

SEQ ID NO: 28392 - DNA, 22 bp, synthetic construct
  misc_feature 1..22: note = chemically synthesized
  source 1..22: mol_type = other DNA
aggtaaactatagcacaaagtg

SEQ ID NO: 28393 - DNA, 22 bp, synthetic construct
  misc_feature 1..22: note = chemically synthesized
  source 1..22: mol_type = other DNA
tagcacaaagtgtgctatataa

SEQ ID NO: 28394 - DNA, 22 bp, synthetic construct
  misc_feature 1..22: note = chemically synthesized
  source 1..22: mol_type = other DNA
tataaacagtaaaaaccgaggt

SEQ ID NO: 28395 - DNA, 22 bp, synthetic construct
  misc_feature 1..22: note = chemically synthesized
  source 1..22: mol_type = other DNA
aaatggtgttggaatataagaa

SEQ ID NO: 28396 - DNA, 22 bp, synthetic construct
  misc_feature 1..22: note = chemically synthesized
  source 1..22: mol_type = other DNA
gaatataagaaatagcagtaaa

SEQ ID NO: 28397 - DNA, 22 bp, synthetic construct
  misc_feature 1..22: note = chemically synthesized
  source 1..22: mol_type = other DNA
ctcacagcaagacagtacaggg

SEQ ID NO: 28398 - DNA, 22 bp, synthetic construct
  misc_feature 1..22: note = chemically synthesized
  source 1..22: mol_type = other DNA
acagcaagacagtacagggaaa

SEQ ID NO: 28399 - DNA, 22 bp, synthetic construct
  misc_feature 1..22: note = chemically synthesized
  source 1..22: mol_type = other DNA
gagggacaaagatttacttaca

SEQ ID NO: 28400 - DNA, 22 bp, synthetic construct
  misc_feature 1..22: note = chemically synthesized
  source 1..22: mol_type = other DNA
acttacaatcaggcctcaacca

SEQ ID NO: 28401 - DNA, 22 bp, synthetic construct
  misc_feature 1..22: note = chemically synthesized
  source 1..22: mol_type = other DNA
cttacaatcaggcctcaaccaa

SEQ ID NO: 28402 - DNA, 22 bp, synthetic construct
  misc_feature 1..22: note = chemically synthesized
  source 1..22: mol_type = other DNA
acaatcaggcctcaaccaatat

SEQ ID NO: 28403 - DNA, 22 bp, synthetic construct
  misc_feature 1..22: note = chemically synthesized
  source 1..22: mol_type = other DNA
caatcaggcctcaaccaatatg

SEQ ID NO: 28404 - DNA, 22 bp, synthetic construct
  misc_feature 1..22: note = chemically synthesized
  source 1..22: mol_type = other DNA
aaccaatatgagatcgactttc

SEQ ID NO: 28405 - DNA, 22 bp, synthetic construct
  misc_feature 1..22: note = chemically synthesized
  source 1..22: mol_type = other DNA
tcttttattgatatatgacgtg

SEQ ID NO: 28406 - DNA, 22 bp, synthetic construct
  misc_feature 1..22: note = chemically synthesized
  source 1..22: mol_type = other DNA
cttttattgatatatgacgtgt

SEQ ID NO: 28407 - DNA, 22 bp, synthetic construct
  misc_feature 1..22: note = chemically synthesized
  source 1..22: mol_type = other DNA
ttttattgatatatgacgtgtt

SEQ ID NO: 28408 - DNA, 22 bp, synthetic construct
  misc_feature 1..22: note = chemically synthesized
  source 1..22: mol_type = other DNA
ttattgatatatgacgtgttta

SEQ ID NO: 28409 - DNA, 22 bp, synthetic construct
  misc_feature 1..22: note = chemically synthesized
  source 1..22: mol_type = other DNA
tattgatatatgacgtgtttat

SEQ ID NO: 28410 - DNA, 22 bp, synthetic construct
  misc_feature 1..22: note = chemically synthesized
  source 1..22: mol_type = other DNA
attgatatatgacgtgtttata

SEQ ID NO: 28411 - DNA, 22 bp, synthetic construct
  misc_feature 1..22: note = chemically synthesized
  source 1..22: mol_type = other DNA
ttgatatatgacgtgtttatat

SEQ ID NO: 28412 - DNA, 22 bp, synthetic construct
  misc_feature 1..22: note = chemically synthesized
  source 1..22: mol_type = other DNA
atatatgacgtgtttatatgta

SEQ ID NO: 28413 - DNA, 22 bp, synthetic construct
  misc_feature 1..22: note = chemically synthesized
  source 1..22: mol_type = other DNA
atatgtatcaggtacatgtgac

SEQ ID NO: 28414 - DNA, 22 bp, synthetic construct
  misc_feature 1..22: note = chemically synthesized
  source 1..22: mol_type = other DNA
tatgtatcaggtacatgtgaca

SEQ ID NO: 28415 - DNA, 22 bp, synthetic construct
  misc_feature 1..22: note = chemically synthesized
  source 1..22: mol_type = other DNA
tgttacatgcatataatgtata

SEQ ID NO: 28416 - DNA, 22 bp, synthetic construct
  misc_feature 1..22: note = chemically synthesized
  source 1..22: mol_type = other DNA
gttacatgcatataatgtataa

SEQ ID NO: 28417 - DNA, 22 bp, synthetic construct
  misc_feature 1..22: note = chemically synthesized
  source 1..22: mol_type = other DNA
ttacatgcatataatgtataat

SEQ ID NO: 28418 - DNA, 22 bp, synthetic construct
  misc_feature 1..22: note = chemically synthesized
  source 1..22: mol_type = other DNA
catgcatataatgtataatgat

SEQ ID NO: 28419 - DNA, 22 bp, synthetic construct
  misc_feature 1..22: note = chemically synthesized
  source 1..22: mol_type = other DNA
ggggtattcatcacctcaagta

SEQ ID NO: 28420 - DNA, 22 bp, synthetic construct
  misc_feature 1..22: note = chemically synthesized
  source 1..22: mol_type = other DNA
gggtattcatcacctcaagtat

SEQ ID NO: 28421 - DNA, 22 bp, synthetic construct
  misc_feature 1..22: note = chemically synthesized
  source 1..22: mol_type = other DNA
atcacctcaagtatttatcgtt

SEQ ID NO: 28422 - DNA, 22 bp, synthetic construct
  misc_feature 1..22: note = chemically synthesized
  source 1..22: mol_type = other DNA
aagtatttatcgtttctatgtg

SEQ ID NO: 28423 - DNA, 22 bp, synthetic construct
  misc_feature 1..22: note = chemically synthesized
  source 1..22: mol_type = other DNA
atcgtttctatgtgttaggaac

SEQ ID NO: 28424 - DNA, 22 bp, synthetic construct
  misc_feature 1..22: note = chemically synthesized
  source 1..22: mol_type = other DNA
tcgtttctatgtgttaggaaca

SEQ ID NO: 28425 - DNA, 22 bp, synthetic construct
  misc_feature 1..22: note = chemically synthesized
  source 1..22: mol_type = other DNA
ctatgtgttaggaacatttcaa

SEQ ID NO: 28426 - DNA, 22 bp, synthetic construct
  misc_feature 1..22: note = chemically synthesized
  source 1..22: mol_type = other DNA
tatgtgttaggaacatttcaag

SEQ ID NO: 28427 - DNA, 22 bp, synthetic construct
  misc_feature 1..22: note = chemically synthesized
  source 1..22: mol_type = other DNA
tgtgttaggaacatttcaagac

SEQ ID NO: 28428 - DNA, 22 bp, synthetic construct
  misc_feature 1..22: note = chemically synthesized
  source 1..22: mol_type = other DNA
ggaacatttcaagacctttctt

SEQ ID NO: 28429 - DNA, 22 bp, synthetic construct
  misc_feature 1..22: note = chemically synthesized
  source 1..22: mol_type = other DNA
caagacctttcttctactattt

SEQ ID NO: 28430 - DNA, 22 bp, synthetic construct
  misc_feature 1..22: note = chemically synthesized
  source 1..22: mol_type = other DNA
aagacctttcttctactatttt

SEQ ID NO: 28431 - DNA, 22 bp, synthetic construct
  misc_feature 1..22: note = chemically synthesized
  source 1..22: mol_type = other DNA
tcttctactattttgaaatata

SEQ ID NO: 28432 - DNA, 22 bp, synthetic construct
  misc_feature 1..22: note = chemically synthesized
  source 1..22: mol_type = other DNA
cttctactattttgaaatatac

SEQ ID NO: 28433 - DNA, 22 bp, synthetic construct
  misc_feature 1..22: note = chemically synthesized
  source 1..22: mol_type = other DNA
ttctactattttgaaatataca

SEQ ID NO: 28434 - DNA, 22 bp, synthetic construct
  misc_feature 1..22: note = chemically synthesized
  source 1..22: mol_type = other DNA
ctactattttgaaatatacaat

SEQ ID NO: 28435 - DNA, 22 bp, synthetic construct
  misc_feature 1..22: note = chemically synthesized
  source 1..22: mol_type = other DNA
tactattttgaaatatacaata

SEQ ID NO: 28436 - DNA, 22 bp, synthetic construct
  misc_feature 1..22: note = chemically synthesized
  source 1..22: mol_type = other DNA
ctattttgaaatatacaatata

SEQ ID NO: 28437 - DNA, 22 bp, synthetic construct
  misc_feature 1..22: note = chemically synthesized
  source 1..22: mol_type = other DNA
ttttgaaatatacaatatattg

SEQ ID NO: 28438 - DNA, 22 bp, synthetic construct
  misc_feature 1..22: note = chemically synthesized
  source 1..22: mol_type = other DNA
tgaaatatacaatatattgttt

SEQ ID NO: 28439 - DNA, 22 bp, synthetic construct
  misc_feature 1..22: note = chemically synthesized
  source 1..22: mol_type = other DNA
gaaatatacaatatattgtttt

SEQ ID NO: 28440 - DNA, 22 bp, synthetic construct
  misc_feature 1..22: note = chemically synthesized
  source 1..22: mol_type = other DNA
aaatatacaatatattgttttt

SEQ ID NO: 28441 - DNA, 22 bp, synthetic construct
  misc_feature 1..22: note = chemically synthesized
  source 1..22: mol_type = other DNA
tttttaactataatcaccctac

SEQ ID NO: 28442 - DNA, 22 bp, synthetic construct
  misc_feature 1..22: note = chemically synthesized
  source 1..22: mol_type = other DNA
ttaactataatcaccctacttt

SEQ ID NO: 28443 - DNA, 22 bp, synthetic construct
  misc_feature 1..22: note = chemically synthesized
  source 1..22: mol_type = other DNA
taactataatcaccctactttg

SEQ ID NO: 28444 - DNA, 22 bp, synthetic construct
  misc_feature 1..22: note = chemically synthesized
  source 1..22: mol_type = other DNA
aactataatcaccctactttgc

SEQ ID NO: 28445 - DNA, 22 bp, synthetic construct
  misc_feature 1..22: note = chemically synthesized
  source 1..22: mol_type = other DNA
actataatcaccctactttgct

SEQ ID NO: 28446 - DNA, 22 bp, synthetic construct
  misc_feature 1..22: note = chemically synthesized
  source 1..22: mol_type = other DNA
taatcaccctactttgctattg

SEQ ID NO: 28447 - DNA, 22 bp, synthetic construct
  misc_feature 1..22: note = chemically synthesized
  source 1..22: mol_type = other DNA
ctttgctattgaacatcagaac

SEQ ID NO: 28448 - DNA, 22 bp, synthetic construct
  misc_feature 1..22: note = chemically synthesized
  source 1..22: mol_type = other DNA
tgctattgaacatcagaacata

SEQ ID NO: 28449 - DNA, 22 bp, synthetic construct
  misc_feature 1..22: note = chemically synthesized
  source 1..22: mol_type = other DNA
gctattgaacatcagaacatat

SEQ ID NO: 28450 - DNA, 22 bp, synthetic construct
  misc_feature 1..22: note = chemically synthesized
  source 1..22: mol_type = other DNA
ctattgaacatcagaacatatt

SEQ ID NO: 28451 - DNA, 22 bp, synthetic construct
  misc_feature 1..22: note = chemically synthesized
  source 1..22: mol_type = other DNA
ttgaacatcagaacatattcct

SEQ ID NO: 28452 - DNA, 22 bp, synthetic construct
  misc_feature 1..22: note = chemically synthesized
  source 1..22: mol_type = other DNA
aacatcagaacatattccttct

SEQ ID NO: 28453 - DNA, 22 bp, synthetic construct
  misc_feature 1..22: note = chemically synthesized
  source 1..22: mol_type = other DNA
cttctatctaactgcctgtttc

SEQ ID NO: 28454 - DNA, 22 bp, synthetic construct
  misc_feature 1..22: note = chemically synthesized
  source 1..22: mol_type = other DNA
ctatctaactgcctgtttccat

SEQ ID NO: 28455 - DNA, 22 bp, synthetic construct
  misc_feature 1..22: note = chemically synthesized
  source 1..22: mol_type = other DNA
tatctaactgcctgtttccatt

SEQ ID NO: 28456 - DNA, 22 bp, synthetic construct
  misc_feature 1..22: note = chemically synthesized
  source 1..22: mol_type = other DNA
tctaactgcctgtttccattaa

SEQ ID NO: 28457 - DNA, 22 bp, synthetic construct
  misc_feature 1..22: note = chemically synthesized
  source 1..22: mol_type = other DNA
actgcctgtttccattaaccaa

SEQ ID NO: 28458 - DNA, 22 bp, synthetic construct
  misc_feature 1..22: note = chemically synthesized
  source 1..22: mol_type = other DNA
cctgtttccattaaccaacttc

SEQ ID NO: 28459 - DNA, 22 bp, synthetic construct
  misc_feature 1..22: note = chemically synthesized
  source 1..22: mol_type = other DNA
tttccattaaccaacttctctt

SEQ ID NO: 28460 - DNA, 22 bp, synthetic construct
  misc_feature 1..22: note = chemically synthesized
  source 1..22: mol_type = other DNA
ccattaaccaacttctcttcgt

SEQ ID NO: 28461 - DNA, 22 bp, synthetic construct
  misc_feature 1..22: note = chemically synthesized
  source 1..22: mol_type = other DNA
cattaaccaacttctcttcgtc

SEQ ID NO: 28462 - DNA, 22 bp, synthetic construct
  misc_feature 1..22: note = chemically synthesized
  source 1..22: mol_type = other DNA
accaacttctcttcgtctccct

SEQ ID NO: 28463 - DNA, 22 bp, synthetic construct
  misc_feature 1..22: note = chemically synthesized
  source 1..22: mol_type = other DNA
ctcttcgtctcccttcctccca

SEQ ID NO: 28464 - DNA, 22 bp, synthetic construct
  misc_feature 1..22: note = chemically synthesized
  source 1..22: mol_type = other DNA
tcttcgtctcccttcctcccat

SEQ ID NO: 28465 - DNA, 22 bp, synthetic construct
  misc_feature 1..22: note = chemically synthesized
  source 1..22: mol_type = other DNA
ttcgtctcccttcctcccataa

SEQ ID NO: 28466 - DNA, 22 bp, synthetic construct
  misc_feature 1..22: note = chemically synthesized
  source 1..22: mol_type = other DNA
cgtctcccttcctcccataacg

SEQ ID NO: 28467 - DNA, 22 bp, synthetic construct
  misc_feature 1..22: note = chemically synthesized
  source 1..22: mol_type = other DNA
gtctcccttcctcccataacgt

SEQ ID NO: 28468 - DNA, 22 bp, synthetic construct
  misc_feature 1..22: note = chemically synthesized
  source 1..22: mol_type = other DNA
ccttcctcccataacgtacaca

SEQ ID NO: 28469 - DNA, 22 bp, synthetic construct
  misc_feature 1..22: note = chemically synthesized
  source 1..22: mol_type = other DNA
cctcccataacgtacacacctt

SEQ ID NO: 28470 - DNA, 22 bp, synthetic construct
  misc_feature 1..22: note = chemically synthesized
  source 1..22: mol_type = other DNA
ctcccataacgtacacaccttt

SEQ ID NO: 28471 - DNA, 22 bp, synthetic construct
  misc_feature 1..22: note = chemically synthesized
  source 1..22: mol_type = other DNA
ccataacgtacacacctttctc

SEQ ID NO: 28472 - DNA, 22 bp, synthetic construct
  misc_feature 1..22: note = chemically synthesized
  source 1..22: mol_type = other DNA
tctctacctctggtttctgtca

SEQ ID NO: 28473 - DNA, 22 bp, synthetic construct
  misc_feature 1..22: note = chemically synthesized
  source 1..22: mol_type = other DNA
ctctacctctggtttctgtcat

SEQ ID NO: 28474 - DNA, 22 bp, synthetic construct
  misc_feature 1..22: note = chemically synthesized
  source 1..22: mol_type = other DNA
tctacctctggtttctgtcatt

SEQ ID NO: 28475 - DNA, 22 bp, synthetic construct
  misc_feature 1..22: note = chemically synthesized
  source 1..22: mol_type = other DNA
tacctctggtttctgtcattct

SEQ ID NO: 28476 - DNA, 22 bp, synthetic construct
  misc_feature 1..22: note = chemically synthesized
  source 1..22: mol_type = other DNA
cctctggtttctgtcattctac

SEQ ID NO: 28477 - DNA, 22 bp, synthetic construct
  misc_feature 1..22: note = chemically synthesized
  source 1..22: mol_type = other DNA
tggtttctgtcattctactctc

SEQ ID NO: 28478 - DNA, 22 bp, synthetic construct
  misc_feature 1..22: note = chemically synthesized
  source 1..22: mol_type = other DNA
gtttctgtcattctactctcta

SEQ ID NO: 28479 - DNA, 22 bp, synthetic construct
  misc_feature 1..22: note = chemically synthesized
  source 1..22: mol_type = other DNA
ctgtcattctactctctaccta

SEQ ID NO: 28480 - DNA, 22 bp, synthetic construct
  misc_feature 1..22: note = chemically synthesized
  source 1..22: mol_type = other DNA
tgtcattctactctctacctac

SEQ ID NO: 28481 - DNA, 22 bp, synthetic construct
  misc_feature 1..22: note = chemically synthesized
  source 1..22: mol_type = other DNA
tcattctactctctacctacat

SEQ ID NO: 28482 - DNA, 22 bp, synthetic construct
  misc_feature 1..22: note = chemically synthesized
  source 1..22: mol_type = other DNA
tactctctacctacatgatatt

SEQ ID NO: 28483 - DNA, 22 bp, synthetic construct
  misc_feature 1..22: note = chemically synthesized
  source 1..22: mol_type = other DNA
ctctctacctacatgatattaa

SEQ ID NO: 28484 - DNA, 22 bp, synthetic construct
  misc_feature 1..22: note = chemically synthesized
  source 1..22: mol_type = other DNA
tctacctacatgatattaactt

SEQ ID NO: 28485 - DNA, 22 bp, synthetic construct
  misc_feature 1..22: note = chemically synthesized
  source 1..22: mol_type = other DNA
tacctacatgatattaactttt

SEQ ID NO: 28486 - DNA, 22 bp, synthetic construct
  misc_feature 1..22: note = chemically synthesized
  source 1..22: mol_type = other DNA
cctacatgatattaactttttt

SEQ ID NO: 28487 - DNA, 22 bp, synthetic construct
  misc_feature 1..22: note = chemically synthesized
  source 1..22: mol_type = other DNA
catgatattaacttttttagct

SEQ ID NO: 28488 - DNA, 22 bp, synthetic construct
  misc_feature 1..22: note = chemically synthesized
  source 1..22: mol_type = other DNA
acttttttagctcccacatatc

SEQ ID NO: 28489 - DNA, 22 bp, synthetic construct
  misc_feature 1..22: note = chemically synthesized
  source 1..22: mol_type = other DNA
ttttagctcccacatatcagtg

SEQ ID NO: 28490 - DNA, 22 bp, synthetic construct
  misc_feature 1..22: note = chemically synthesized
  source 1..22: mol_type = other DNA
tttagctcccacatatcagtga

SEQ ID NO: 28491 - DNA, 22 bp, synthetic construct
  misc_feature 1..22: note = chemically synthesized
  source 1..22: mol_type = other DNA
ttagctcccacatatcagtgag

SEQ ID NO: 28492 - DNA, 22 bp, synthetic construct
  misc_feature 1..22: note = chemically synthesized
  source 1..22: mol_type = other DNA
tagctcccacatatcagtgaga

SEQ ID NO: 28493 - DNA, 22 bp, synthetic construct
  misc_feature 1..22: note = chemically synthesized
  source 1..22: mol_type = other DNA
agctcccacatatcagtgagaa

SEQ ID NO: 28494 - DNA, 22 bp, synthetic construct
  misc_feature 1..22: note = chemically synthesized
  source 1..22: mol_type = other DNA
gctcccacatatcagtgagaac

SEQ ID NO: 28495 - DNA, 22 bp, synthetic construct
  misc_feature 1..22: note = chemically synthesized
  source 1..22: mol_type = other DNA
ccacatatcagtgagaacatgc

SEQ ID NO: 28496 - DNA, 22 bp, synthetic construct
  misc_feature 1..22: note = chemically synthesized
  source 1..22: mol_type = other DNA
gtctttctatgcctggcttatt

SEQ ID NO: 28497 - DNA, 22 bp, synthetic construct
  misc_feature 1..22: note = chemically synthesized
  source 1..22: mol_type = other DNA
tctttctatgcctggcttattt

SEQ ID NO: 28498 - DNA, 22 bp, synthetic construct
  misc_feature 1..22: note = chemically synthesized
  source 1..22: mol_type = other DNA
tctatgcctggcttatttcgtt

SEQ ID NO: 28499 - DNA, 22 bp, synthetic construct
  misc_feature 1..22: note = chemically synthesized
  source 1..22: mol_type = other DNA
ctatgcctggcttatttcgttt

SEQ ID NO: 28500 - DNA, 22 bp, synthetic construct
  misc_feature 1..22: note = chemically synthesized
  source 1..22: mol_type = other DNA
tatgcctggcttatttcgttta

SEQ ID NO: 28501 - DNA, 22 bp, synthetic construct
  misc_feature 1..22: note = chemically synthesized
  source 1..22: mol_type = other DNA
tgcctggcttatttcgtttaac

SEQ ID NO: 28502 - DNA, 22 bp, synthetic construct
  misc_feature 1..22: note = chemically synthesized
  source 1..22: mol_type = other DNA
gcttatttcgtttaacataatg

SEQ ID NO: 28503 - DNA, 22 bp, synthetic construct
  misc_feature 1..22: note = chemically synthesized
  source 1..22: mol_type = other DNA
atttcgtttaacataatgactt

SEQ ID NO: 28504 - DNA, 22 bp, synthetic construct
  misc_feature 1..22: note = chemically synthesized
  source 1..22: mol_type = other DNA
tttcgtttaacataatgacttc

SEQ ID NO: 28505 - DNA, 22 bp, synthetic construct
  misc_feature 1..22: note = chemically synthesized
  source 1..22: mol_type = other DNA
cgtttaacataatgacttccag

SEQ ID NO: 28506 - DNA, 22 bp, synthetic construct
  misc_feature 1..22: note = chemically synthesized
  source 1..22: mol_type = other DNA
gtttaacataatgacttccagt

SEQ ID NO: 28507 - DNA, 22 bp, synthetic construct
  misc_feature 1..22: note = chemically synthesized
  source 1..22: mol_type = other DNA
aacataatgacttccagtttca

SEQ ID NO: 28508 - DNA, 22 bp, synthetic construct
  misc_feature 1..22: note = chemically synthesized
  source 1..22: mol_type = other DNA
acataatgacttccagtttcat

SEQ ID NO: 28509 - DNA, 22 bp, synthetic construct
  misc_feature 1..22: note = chemically synthesized
  source 1..22: mol_type = other DNA
ccagtttcatccatgttgctgc

SEQ ID NO: 28510 - DNA, 22 bp, synthetic construct
  misc_feature 1..22: note = chemically synthesized
  source 1..22: mol_type = other DNA
cagtttcatccatgttgctgca

SEQ ID NO: 28511 - DNA, 22 bp, synthetic construct
  misc_feature 1..22: note = chemically synthesized
  source 1..22: mol_type = other DNA
catccatgttgctgcaaatgaa

SEQ ID NO: 28512 - DNA, 22 bp, synthetic construct
  misc_feature 1..22: note = chemically synthesized
  source 1..22: mol_type = other DNA
atccatgttgctgcaaatgaaa

SEQ ID NO: 28513 - DNA, 22 bp, synthetic construct
  misc_feature 1..22: note = chemically synthesized
  source 1..22: mol_type = other DNA
ctgcaaatgaaatgattttata

SEQ ID NO: 28514 - DNA, 22 bp, synthetic construct
  misc_feature 1..22: note = chemically synthesized
  source 1..22: mol_type = other DNA
caaatgaaatgattttatattt

SEQ ID NO: 28515 - DNA, 22 bp, synthetic construct
  misc_feature 1..22: note = chemically synthesized
  source 1..22: mol_type = other DNA
tatatttgtatggttgaataat

SEQ ID NO: 28516 - DNA, 22 bp, synthetic construct
  misc_feature 1..22: note = chemically synthesized
  source 1..22: mol_type = other DNA
atatttgtatggttgaataata

SEQ ID NO: 28517 - DNA, 22 bp, synthetic construct
  misc_feature 1..22: note = chemically synthesized
  source 1..22: mol_type = other DNA
tatttgtatggttgaataatat

SEQ ID NO: 28518 - DNA, 22 bp, synthetic construct
  misc_feature 1..22: note = chemically synthesized
  source 1..22: mol_type = other DNA
gtatggttgaataatattcaat

SEQ ID NO: 28519 - DNA, 22 bp, synthetic construct
  misc_feature 1..22: note = chemically synthesized
  source 1..22: mol_type = other DNA
tatggttgaataatattcaatt

SEQ ID NO: 28520 - DNA, 22 bp, synthetic construct
  misc_feature 1..22: note = chemically synthesized
  source 1..22: mol_type = other DNA
aataatattcaattgtgtgtat

SEQ ID NO: 28521 - DNA, 22 bp, synthetic construct
  misc_feature 1..22: note = chemically synthesized
  source 1..22: mol_type = other DNA
aattgtgtgtatacaccacatt

SEQ ID NO: 28522 - DNA, 22 bp, synthetic construct
  misc_feature 1..22: note = chemically synthesized
  source 1..22: mol_type = other DNA
tgtgtatacaccacattttctt

SEQ ID NO: 28523 - DNA, 22 bp, synthetic construct
  misc_feature 1..22: note = chemically synthesized
  source 1..22: mol_type = other DNA
tcttcattcatccattgatgga

SEQ ID NO: 28524 - DNA, 22 bp, synthetic construct
  misc_feature 1..22: note = chemically synthesized
  source 1..22: mol_type = other DNA
cttcattcatccattgatggac

SEQ ID NO: 28525 - DNA, 22 bp, synthetic construct
  misc_feature 1..22: note = chemically synthesized
  source 1..22: mol_type = other DNA
ttcattcatccattgatggaca

SEQ ID NO: 28526 - DNA, 22 bp, synthetic construct
  misc_feature 1..22: note = chemically synthesized
  source 1..22: mol_type = other DNA
cattcatccattgatggacact

SEQ ID NO: 28527 - DNA, 22 bp, synthetic construct
  misc_feature 1..22: note = chemically synthesized
  source 1..22: mol_type = other DNA
attcatccattgatggacactt

SEQ ID NO: 28528 - DNA, 22 bp, synthetic construct
  misc_feature 1..22: note = chemically synthesized
  source 1..22: mol_type = other DNA
atccattgatggacacttaggt

SEQ ID NO: 28529 - DNA, 22 bp, synthetic construct
  misc_feature 1..22: note = chemically synthesized
  source 1..22: mol_type = other DNA
atggacacttaggttgattcca

SEQ ID NO: 28530 - DNA, 22 bp, synthetic construct
  misc_feature 1..22: note = chemically synthesized
  source 1..22: mol_type = other DNA
aggttgattccatatctttgct

SEQ ID NO: 28531 - DNA, 22 bp, synthetic construct
  misc_feature 1..22: note = chemically synthesized
  source 1..22: mol_type = other DNA
ggttgattccatatctttgcta

SEQ ID NO: 28532 - DNA, 22 bp, synthetic construct
  misc_feature 1..22: note = chemically synthesized
  source 1..22: mol_type = other DNA
attccatatctttgctaatgtg

SEQ ID NO: 28533 - DNA, 22 bp, synthetic construct
  misc_feature 1..22: note = chemically synthesized
  source 1..22: mol_type = other DNA
catatctttgctaatgtgaatc

SEQ ID NO: 28534 - DNA, 22 bp, synthetic construct
  misc_feature 1..22: note = chemically synthesized
  source 1..22: mol_type = other DNA
tgctaatgtgaatcgtgctgca

SEQ ID NO: 28535 - DNA, 22 bp, synthetic construct
  misc_feature 1..22: note = chemically synthesized
  source 1..22: mol_type = other DNA
gctaatgtgaatcgtgctgcaa

SEQ ID NO: 28536 - DNA, 22 bp, synthetic construct
  misc_feature 1..22: note = chemically synthesized
  source 1..22: mol_type = other DNA
ctaatgtgaatcgtgctgcaat

SEQ ID NO: 28537 - DNA, 22 bp, synthetic construct
  misc_feature 1..22: note = chemically synthesized
  source 1..22: mol_type = other DNA
atgtgaatcgtgctgcaataaa

SEQ ID NO: 28538 - DNA, 22 bp, synthetic construct
  misc_feature 1..22: note = chemically synthesized
  source 1..22: mol_type = other DNA
caataaacagtgtggtaccagt

SEQ ID NO: 28539 - DNA, 22 bp, synthetic construct
  misc_feature 1..22: note = chemically synthesized
  source 1..22: mol_type = other DNA
tttattattctgaattcttttc

SEQ ID NO: 28540 - DNA, 22 bp, synthetic construct
  misc_feature 1..22: note = chemically synthesized
  source 1..22: mol_type = other DNA
attattctgaattcttttcctt

SEQ ID NO: 28541 - DNA, 22 bp, synthetic construct
  misc_feature 1..22: note = chemically synthesized
  source 1..22: mol_type = other DNA
ttattctgaattcttttccttt

SEQ ID NO: 28542 - DNA, 22 bp, synthetic construct
  misc_feature 1..22: note = chemically synthesized
  source 1..22: mol_type = other DNA
ttctgaattcttttcctttgga

SEQ ID NO: 28543 - DNA, 22 bp, synthetic construct
  misc_feature 1..22: note = chemically synthesized
  source 1..22: mol_type = other DNA
tgaattcttttcctttggataa

SEQ ID NO: 28544 - DNA, 22 bp, synthetic construct
  misc_feature 1..22: note = chemically synthesized
  source 1..22: mol_type = other DNA
aattcttttcctttggataaat

SEQ ID NO: 28545 - DNA, 22 bp, synthetic construct
  misc_feature 1..22: note = chemically synthesized
  source 1..22: mol_type = other DNA
ttttcctttggataaataccca

SEQ ID NO: 28546 - DNA, 22 bp, synthetic construct
  misc_feature 1..22: note = chemically synthesized
  source 1..22: mol_type = other DNA
ttcctttggataaatacccagt

SEQ ID NO: 28547 - DNA, 22 bp, synthetic construct
  misc_feature 1..22: note = chemically synthesized
  source 1..22: mol_type = other DNA
tcctttggataaatacccagta

SEQ ID NO: 28548 - DNA, 22 bp, synthetic construct
  misc_feature 1..22: note = chemically synthesized
  source 1..22: mol_type = other DNA
cctttggataaatacccagtaa

SEQ ID NO: 28549 - DNA, 22 bp, synthetic construct
  misc_feature 1..22: note = chemically synthesized
  source 1..22: mol_type = other DNA
ctttggataaatacccagtaat

SEQ ID NO: 28550 - DNA, 22 bp, synthetic construct
  misc_feature 1..22: note = chemically synthesized
  source 1..22: mol_type = other DNA
tggataaatacccagtaataag

SEQ ID NO: 28551 - DNA, 22 bp, synthetic construct
  misc_feature 1..22: note = chemically synthesized
  source 1..22: mol_type = other DNA
ggataaatacccagtaataaga

SEQ ID NO: 28552 - DNA, 22 bp, synthetic construct
  misc_feature 1..22: note = chemically synthesized
  source 1..22: mol_type = other DNA
gataaatacccagtaataagat

SEQ ID NO: 28553 - DNA, 22 bp, synthetic construct
  misc_feature 1..22: note = chemically synthesized
  source 1..22: mol_type = other DNA
ctggatcttatgatagttcaat

SEQ ID NO: 28554 - DNA, 22 bp, synthetic construct
  misc_feature 1..22: note = chemically synthesized
  source 1..22: mol_type = other DNA
gatcttatgatagttcaatttt

SEQ ID NO: 28555 - DNA, 22 bp, synthetic construct
  misc_feature 1..22: note = chemically synthesized
  source 1..22: mol_type = other DNA
atgatagttcaatttttagctt

SEQ ID NO: 28556 - DNA, 22 bp, synthetic construct
  misc_feature 1..22: note = chemically synthesized
  source 1..22: mol_type = other DNA
tgatagttcaatttttagcttt

SEQ ID NO: 28557 - DNA, 22 bp, synthetic construct
  misc_feature 1..22: note = chemically synthesized
  source 1..22: mol_type = other DNA
aatttttagctttttggtaaat

SEQ ID NO: 28558 - DNA, 22 bp, synthetic construct
  misc_feature 1..22: note = chemically synthesized
  source 1..22: mol_type = other DNA
ttagctttttggtaaatctaca

SEQ ID NO: 28559 - DNA, 22 bp, synthetic construct
  misc_feature 1..22: note = chemically synthesized
  source 1..22: mol_type = other DNA
tagctttttggtaaatctacat

SEQ ID NO: 28560 - DNA, 22 bp, synthetic construct
  misc_feature 1..22: note = chemically synthesized
  source 1..22: mol_type = other DNA
agctttttggtaaatctacata

SEQ ID NO: 28561 - DNA, 22 bp, synthetic construct
  misc_feature 1..22: note = chemically synthesized
  source 1..22: mol_type = other DNA
gctttttggtaaatctacatat

SEQ ID NO: 28562 - DNA, 22 bp, synthetic construct
  misc_feature 1..22: note = chemically synthesized
  source 1..22: mol_type = other DNA
tttggtaaatctacatattgtt

SEQ ID NO: 28563 - DNA, 22 bp, synthetic construct
  misc_feature 1..22: note = chemically synthesized
  source 1..22: mol_type = other DNA
ttggtaaatctacatattgttt

SEQ ID NO: 28564 - DNA, 22 bp, synthetic construct
  misc_feature 1..22: note = chemically synthesized
  source 1..22: mol_type = other DNA
tggtaaatctacatattgtttt

SEQ ID NO: 28565 - DNA, 22 bp, synthetic construct
  misc_feature 1..22: note = chemically synthesized
  source 1..22: mol_type = other DNA
ggtaaatctacatattgttttc

SEQ ID NO: 28566 - DNA, 22 bp, synthetic construct
  misc_feature 1..22: note = chemically synthesized
  source 1..22: mol_type = other DNA
gtaaatctacatattgttttcc

SEQ ID NO: 28567 - DNA, 22 bp, synthetic construct
  misc_feature 1..22: note = chemically synthesized
  source 1..22: mol_type = other DNA
catattgttttccatagtggct

SEQ ID NO: 28568 - DNA, 22 bp, synthetic construct
  misc_feature 1..22: note = chemically synthesized
  source 1..22: mol_type = other DNA
ttttccatagtggctatactaa

SEQ ID NO: 28569 - DNA, 22 bp, synthetic construct
  misc_feature 1..22: note = chemically synthesized
  source 1..22: mol_type = other DNA
tccatagtggctatactaattt

SEQ ID NO: 28570 - DNA, 22 bp, synthetic construct
  misc_feature 1..22: note = chemically synthesized
  source 1..22: mol_type = other DNA
ccatagtggctatactaatttg

SEQ ID NO: 28571 - DNA, 22 bp, synthetic construct
  misc_feature 1..22: note = chemically synthesized
  source 1..22: mol_type = other DNA
catagtggctatactaatttgc

SEQ ID NO: 28572 - DNA, 22 bp, synthetic construct
  misc_feature 1..22: note = chemically synthesized
  source 1..22: mol_type = other DNA
tactaatttgcatgcttaccaa

SEQ ID NO: 28573 - DNA, 22 bp, synthetic construct
  misc_feature 1..22: note = chemically synthesized
  source 1..22: mol_type = other DNA
atttgcatgcttaccaatagtg

SEQ ID NO: 28574 - DNA, 22 bp, synthetic construct
  misc_feature 1..22: note = chemically synthesized
  source 1..22: mol_type = other DNA
gcatgcttaccaatagtgccta

SEQ ID NO: 28575 - DNA, 22 bp, synthetic construct
  misc_feature 1..22: note = chemically synthesized
  source 1..22: mol_type = other DNA
catgcttaccaatagtgcctac

SEQ ID NO: 28576 - DNA, 22 bp, synthetic construct
  misc_feature 1..22: note = chemically synthesized
  source 1..22: mol_type = other DNA
accaatagtgcctacgagtgcc

SEQ ID NO: 28577 - DNA, 22 bp, synthetic construct
  misc_feature 1..22: note = chemically synthesized
  source 1..22: mol_type = other DNA
ccaatagtgcctacgagtgcct

SEQ ID NO: 28578 - DNA, 22 bp, synthetic construct
  misc_feature 1..22: note = chemically synthesized
  source 1..22: mol_type = other DNA
cgagtgccttttccttcacatc

SEQ ID NO: 28579 - DNA, 22 bp, synthetic construct
  misc_feature 1..22: note = chemically synthesized
  source 1..22: mol_type = other DNA
ttccttcacatccttgccagca

SEQ ID NO: 28580 - DNA, 22 bp, synthetic construct
  misc_feature 1..22: note = chemically synthesized
  source 1..22: mol_type = other DNA
tccttcacatccttgccagcat

SEQ ID NO: 28581 - DNA, 22 bp, synthetic construct
  misc_feature 1..22: note = chemically synthesized
  source 1..22: mol_type = other DNA
ccttcacatccttgccagcatg

SEQ ID NO: 28582 - DNA, 22 bp, synthetic construct
  misc_feature 1..22: note = chemically synthesized
  source 1..22: mol_type = other DNA
cttcacatccttgccagcatgt

SEQ ID NO: 28583 - DNA, 22 bp, synthetic construct
  misc_feature 1..22: note = chemically synthesized
  source 1..22: mol_type = other DNA
cacatccttgccagcatgtgtt

SEQ ID NO: 28584 - DNA, 22 bp, synthetic construct
  misc_feature 1..22: note = chemically synthesized
  source 1..22: mol_type = other DNA
acatccttgccagcatgtgtta

SEQ ID NO: 28585 - DNA, 22 bp, synthetic construct
  misc_feature 1..22: note = chemically synthesized
  source 1..22: mol_type = other DNA
gccagcatgtgttatttattta

SEQ ID NO: 28586 - DNA, 22 bp, synthetic construct
  misc_feature 1..22: note = chemically synthesized
  source 1..22: mol_type = other DNA
ccagcatgtgttatttatttat

SEQ ID NO: 28587 - DNA, 22 bp, synthetic construct
  misc_feature 1..22: note = chemically synthesized
  source 1..22: mol_type = other DNA
tttatttattaatttatttaaa

SEQ ID NO: 28588 - DNA, 22 bp, synthetic construct
  misc_feature 1..22: note = chemically synthesized
  source 1..22: mol_type = other DNA
atttattaatttatttaaatca

SEQ ID NO: 28589 - DNA, 22 bp, synthetic construct
  misc_feature 1..22: note = chemically synthesized
  source 1..22: mol_type = other DNA
tttattaatttatttaaatcat

SEQ ID NO: 28590 - DNA, 22 bp, synthetic construct
  misc_feature 1..22: note = chemically synthesized
  source 1..22: mol_type = other DNA
attaatttatttaaatcatgat

SEQ ID NO: 28591 - DNA, 22 bp, synthetic construct
  misc_feature 1..22: note = chemically synthesized
  source 1..22: mol_type = other DNA
ttaatttatttaaatcatgatg

SEQ ID NO: 28592 - DNA, 22 bp, synthetic construct
  misc_feature 1..22: note = chemically synthesized
  source 1..22: mol_type = other DNA
atttatttaaatcatgatgatt

SEQ ID NO: 28593 - DNA, 22 bp, synthetic construct
  misc_feature 1..22: note = chemically synthesized
  source 1..22: mol_type = other DNA
atttaaatcatgatgattctaa

SEQ ID NO: 28594 - DNA, 22 bp, synthetic construct
  misc_feature 1..22: note = chemically synthesized
  source 1..22: mol_type = other DNA
tttaaatcatgatgattctaac

SEQ ID NO: 28595 - DNA, 22 bp, synthetic construct
  misc_feature 1..22: note = chemically synthesized
  source 1..22: mol_type = other DNA
aaatcatgatgattctaactgg

SEQ ID NO: 28596 - DNA, 22 bp, synthetic construct
  misc_feature 1..22: note = chemically synthesized
  source 1..22: mol_type = other DNA
aatcatgatgattctaactggc

SEQ ID NO: 28597 - DNA, 22 bp, synthetic construct
  misc_feature 1..22: note = chemically synthesized
  source 1..22: mol_type = other DNA
taactggcataagatgatatct

SEQ ID NO: 28598 - DNA, 22 bp, synthetic construct
  misc_feature 1..22: note = chemically synthesized
  source 1..22: mol_type = other DNA
actggcataagatgatatctca

SEQ ID NO: 28599 - DNA, 22 bp, synthetic construct
  misc_feature 1..22: note = chemically synthesized
  source 1..22: mol_type = other DNA
gcataagatgatatctcattgt

SEQ ID NO: 28600 - DNA, 22 bp, synthetic construct
  misc_feature 1..22: note = chemically synthesized
  source 1..22: mol_type = other DNA
attgtggttttgatttgcattt

SEQ ID NO: 28601 - DNA, 22 bp, synthetic construct
  misc_feature 1..22: note = chemically synthesized
  source 1..22: mol_type = other DNA
tggttttgatttgcatttctct

SEQ ID NO: 28602 - DNA, 22 bp, synthetic construct
  misc_feature 1..22: note = chemically synthesized
  source 1..22: mol_type = other DNA
tgatttgcatttctctgatgat

SEQ ID NO: 28603 - DNA, 22 bp, synthetic construct
  misc_feature 1..22: note = chemically synthesized
  source 1..22: mol_type = other DNA
gatttgcatttctctgatgatt

SEQ ID NO: 28604 - DNA, 22 bp, synthetic construct
  misc_feature 1..22: note = chemically synthesized
  source 1..22: mol_type = other DNA
atttgcatttctctgatgatta

SEQ ID NO: 28605 - DNA, 22 bp, synthetic construct
  misc_feature 1..22: note = chemically synthesized
  source 1..22: mol_type = other DNA
gcatttctctgatgattagtaa

SEQ ID NO: 28606 - DNA, 22 bp, synthetic construct
  misc_feature 1..22: note = chemically synthesized
  source 1..22: mol_type = other DNA
catttctctgatgattagtaat

SEQ ID NO: 28607 - DNA, 22 bp, synthetic construct
  misc_feature 1..22: note = chemically synthesized
  source 1..22: mol_type = other DNA
ctctgatgattagtaatgttga

SEQ ID NO: 28608 - DNA, 22 bp, synthetic construct
  misc_feature 1..22: note = chemically synthesized
  source 1..22: mol_type = other DNA
tctgatgattagtaatgttgag

SEQ ID NO: 28609 - DNA, 22 bp, synthetic construct
  misc_feature 1..22: note = chemically synthesized
  source 1..22: mol_type = other DNA
tgatgattagtaatgttgagca

SEQ ID NO: 28610 - DNA, 22 bp, synthetic construct
  misc_feature 1..22: note = chemically synthesized
  source 1..22: mol_type = other DNA
atgattagtaatgttgagcaat

SEQ ID NO: 28611 - DNA, 22 bp, synthetic construct
  misc_feature 1..22: note = chemically synthesized
  source 1..22: mol_type = other DNA
gtaatgttgagcaatttcccca

SEQ ID NO: 28612 - DNA, 22 bp, synthetic construct
  misc_feature 1..22: note = chemically synthesized
  source 1..22: mol_type = other DNA
agcaatttccccatacccattg

SEQ ID NO: 28613 - DNA, 22 bp, synthetic construct
  misc_feature 1..22: note = chemically synthesized
  source 1..22: mol_type = other DNA
ccccatacccattgtgcatttg

SEQ ID NO: 28614 - DNA, 22 bp, synthetic construct
  misc_feature 1..22: note = chemically synthesized
  source 1..22: mol_type = other DNA
cccatacccattgtgcatttgt

SEQ ID NO: 28615 - DNA, 22 bp, synthetic construct
  misc_feature 1..22: note = chemically synthesized
  source 1..22: mol_type = other DNA
tgcatttgtatgtcttcttttg

SEQ ID NO: 28616 - DNA, 22 bp, synthetic construct
  misc_feature 1..22: note = chemically synthesized
  source 1..22: mol_type = other DNA
gtatgtcttcttttgaaaaata

SEQ ID NO: 28617 - DNA, 22 bp, synthetic construct
  misc_feature 1..22: note = chemically synthesized
  source 1..22: mol_type = other DNA
tatgtcttcttttgaaaaatat

SEQ ID NO: 28618 - DNA, 22 bp, synthetic construct
  misc_feature 1..22: note = chemically synthesized
  source 1..22: mol_type = other DNA
cttttgaaaaatatcctttgcc

SEQ ID NO: 28619 - DNA, 22 bp, synthetic construct
  misc_feature 1..22: note = chemically synthesized
  source 1..22: mol_type = other DNA
ttttgaaaaatatcctttgcca

SEQ ID NO: 28620 - DNA, 22 bp, synthetic construct
  misc_feature 1..22: note = chemically synthesized
  source 1..22: mol_type = other DNA
ttgaaaaatatcctttgccaat

SEQ ID NO: 28621 - DNA, 22 bp, synthetic construct
  misc_feature 1..22: note = chemically synthesized
  source 1..22: mol_type = other DNA
tgaaaaatatcctttgccaatt

SEQ ID NO: 28622 - DNA, 22 bp, synthetic construct
  misc_feature 1..22: note = chemically synthesized
  source 1..22: mol_type = other DNA
gaaaaatatcctttgccaattt

SEQ ID NO: 28623 - DNA, 22 bp, synthetic construct
  misc_feature 1..22: note = chemically synthesized
  source 1..22: mol_type = other DNA
aaaaatatcctttgccaatttt

SEQ ID NO: 28624 - DNA, 22 bp, synthetic construct
  misc_feature 1..22: note = chemically synthesized
  source 1..22: mol_type = other DNA
tgccaattttttaatgagatta

SEQ ID NO: 28625 - DNA, 22 bp, synthetic construct
  misc_feature 1..22: note = chemically synthesized
  source 1..22: mol_type = other DNA
gccaattttttaatgagattat

SEQ ID NO: 28626 - DNA, 22 bp, synthetic construct
  misc_feature 1..22: note = chemically synthesized
  source 1..22: mol_type = other DNA
ccaattttttaatgagattatt

SEQ ID NO: 28627 - DNA, 22 bp, synthetic construct
  misc_feature 1..22: note = chemically synthesized
  source 1..22: mol_type = other DNA
tttaatgagattatttgttttt

SEQ ID NO: 28628 - DNA, 22 bp, synthetic construct
  misc_feature 1..22: note = chemically synthesized
  source 1..22: mol_type = other DNA
ttaatgagattatttgtttttc

SEQ ID NO: 28629 - DNA, 22 bp, synthetic construct
  misc_feature 1..22: note = chemically synthesized
  source 1..22: mol_type = other DNA
taatgagattatttgtttttcc

SEQ ID NO: 28630 - DNA, 22 bp, synthetic construct
  misc_feature 1..22: note = chemically synthesized
  source 1..22: mol_type = other DNA
aatgagattatttgtttttcca

SEQ ID NO: 28631 - DNA, 22 bp, synthetic construct
  misc_feature 1..22: note = chemically synthesized
  source 1..22: mol_type = other DNA
atgagattatttgtttttccac

SEQ ID NO: 28632 - DNA, 22 bp, synthetic construct
  misc_feature 1..22: note = chemically synthesized
  source 1..22: mol_type = other DNA
tttgtttttccactgttgagtt

SEQ ID NO: 28633 - DNA, 22 bp, synthetic construct
  misc_feature 1..22: note = chemically synthesized
  source 1..22: mol_type = other DNA
gtttttccactgttgagttgtt

SEQ ID NO: 28634 - DNA, 22 bp, synthetic construct
  misc_feature 1..22: note = chemically synthesized
  source 1..22: mol_type = other DNA
tttttccactgttgagttgttt

SEQ ID NO: 28635 - DNA, 22 bp, synthetic construct
  misc_feature 1..22: note = chemically synthesized
  source 1..22: mol_type = other DNA
ttccactgttgagttgtttgag

SEQ ID NO: 28636 - DNA, 22 bp, synthetic construct
  misc_feature 1..22: note = chemically synthesized
  source 1..22: mol_type = other DNA
tccactgttgagttgtttgagt

SEQ ID NO: 28637 - DNA, 22 bp, synthetic construct
  misc_feature 1..22: note = chemically synthesized
  source 1..22: mol_type = other DNA
ccactgttgagttgtttgagtt

SEQ ID NO: 28638 - DNA, 22 bp, synthetic construct
  misc_feature 1..22: note = chemically synthesized
  source 1..22: mol_type = other DNA
cactgttgagttgtttgagttt

SEQ ID NO: 28639 - DNA, 22 bp, synthetic construct
  misc_feature 1..22: note = chemically synthesized
  source 1..22: mol_type = other DNA
ttgagttgtttgagtttcttat

SEQ ID NO: 28640 - DNA, 22 bp, synthetic construct
  misc_feature 1..22: note = chemically synthesized
  source 1..22: mol_type = other DNA
agttgtttgagtttcttatata

SEQ ID NO: 28641 - DNA, 22 bp, synthetic construct
  misc_feature 1..22: note = chemically synthesized
  source 1..22: mol_type = other DNA
tttgagtttcttatatattctg

SEQ ID NO: 28642 - DNA, 22 bp, synthetic construct
  misc_feature 1..22: note = chemically synthesized
  source 1..22: mol_type = other DNA
gagtttcttatatattctggag

SEQ ID NO: 28643 - DNA, 22 bp, synthetic construct
  misc_feature 1..22: note = chemically synthesized
  source 1..22: mol_type = other DNA
agtttcttatatattctggaga

SEQ ID NO: 28644 - DNA, 22 bp, synthetic construct
  misc_feature 1..22: note = chemically synthesized
  source 1..22: mol_type = other DNA
cttatatattctggagattaat

SEQ ID NO: 28645 - DNA, 22 bp, synthetic construct
  misc_feature 1..22: note = chemically synthesized
  source 1..22: mol_type = other DNA
ttatatattctggagattaatt

SEQ ID NO: 28646 - DNA, 22 bp, synthetic construct
  misc_feature 1..22: note = chemically synthesized
  source 1..22: mol_type = other DNA
atatattctggagattaattcc

SEQ ID NO: 28647 - DNA, 22 bp, synthetic construct
  misc_feature 1..22: note = chemically synthesized
  source 1..22: mol_type = other DNA
tatattctggagattaattcct

SEQ ID NO: 28648 - DNA, 22 bp, synthetic construct
  misc_feature 1..22: note = chemically synthesized
  source 1..22: mol_type = other DNA
tggagattaattccttgtcaaa

SEQ ID NO: 28649 - DNA, 22 bp, synthetic construct
  misc_feature 1..22: note = chemically synthesized
  source 1..22: mol_type = other DNA
gagattaattccttgtcaaatg

SEQ ID NO: 28650 - DNA, 22 bp, synthetic construct
  misc_feature 1..22: note = chemically synthesized
  source 1..22: mol_type = other DNA
attccttgtcaaatgtatgcaa

SEQ ID NO: 28651 - DNA, 22 bp, synthetic construct
  misc_feature 1..22: note = chemically synthesized
  source 1..22: mol_type = other DNA
cttgtcaaatgtatgcaaatat

SEQ ID NO: 28652 - DNA, 22 bp, synthetic construct
  misc_feature 1..22: note = chemically synthesized
  source 1..22: mol_type = other DNA
gtcaaatgtatgcaaatatttt

SEQ ID NO: 28653 - DNA, 22 bp, synthetic construct
  misc_feature 1..22: note = chemically synthesized
  source 1..22: mol_type = other DNA
tcaaatgtatgcaaatattttc

SEQ ID NO: 28654 - DNA, 22 bp, synthetic construct
  misc_feature 1..22: note = chemically synthesized
  source 1..22: mol_type = other DNA
tctcgcattcaacagcttgtct

SEQ ID NO: 28655 - DNA, 22 bp, synthetic construct
  misc_feature 1..22: note = chemically synthesized
  source 1..22: mol_type = other DNA
ctcgcattcaacagcttgtctc

SEQ ID NO: 28656 - DNA, 22 bp, synthetic construct
  misc_feature 1..22: note = chemically synthesized
  source 1..22: mol_type = other DNA
tcgcattcaacagcttgtctct

SEQ ID NO: 28657 - DNA, 22 bp, synthetic construct
  misc_feature 1..22: note = chemically synthesized
  source 1..22: mol_type = other DNA
gcattcaacagcttgtctcttc

SEQ ID NO: 28658 - DNA, 22 bp, synthetic construct
  misc_feature 1..22: note = chemically synthesized
  source 1..22: mol_type = other DNA
aacagcttgtctcttcactgtg

SEQ ID NO: 28659 - DNA, 22 bp, synthetic construct
  misc_feature 1..22: note = chemically synthesized
  source 1..22: mol_type = other DNA
gtctcttcactgtgttgattgt

SEQ ID NO: 28660 - DNA, 22 bp, synthetic construct
  misc_feature 1..22: note = chemically synthesized
  source 1..22: mol_type = other DNA
tctcttcactgtgttgattgtt

SEQ ID NO: 28661 - DNA, 22 bp, synthetic construct
  misc_feature 1..22: note = chemically synthesized
  source 1..22: mol_type = other DNA
ttcactgtgttgattgtttcct

SEQ ID NO: 28662 - DNA, 22 bp, synthetic construct
  misc_feature 1..22: note = chemically synthesized
  source 1..22: mol_type = other DNA
cactgtgttgattgtttccttt

SEQ ID NO: 28663 - DNA, 22 bp, synthetic construct
  misc_feature 1..22: note = chemically synthesized
  source 1..22: mol_type = other DNA
actgtgttgattgtttccttta

SEQ ID NO: 28664 - DNA, 22 bp, synthetic construct
  misc_feature 1..22: note = chemically synthesized
  source 1..22: mol_type = other DNA
tgttgattgtttcctttactgt

SEQ ID NO: 28665 - DNA, 22 bp, synthetic construct
  misc_feature 1..22: note = chemically synthesized
  source 1..22: mol_type = other DNA
attgtttcctttactgtgcaga

SEQ ID NO: 28666 - DNA, 22 bp, synthetic construct
  misc_feature 1..22: note = chemically synthesized
  source 1..22: mol_type = other DNA
tttcctttactgtgcagatgta

SEQ ID NO: 28667 - DNA, 22 bp, synthetic construct
  misc_feature 1..22: note = chemically synthesized
  source 1..22: mol_type = other DNA
cctttactgtgcagatgtattt

SEQ ID NO: 28668 - DNA, 22 bp, synthetic construct
  misc_feature 1..22: note = chemically synthesized
  source 1..22: mol_type = other DNA
ctttactgtgcagatgtatttt

SEQ ID NO: 28669 - DNA, 22 bp, synthetic construct
  misc_feature 1..22: note = chemically synthesized
  source 1..22: mol_type = other DNA
tactgtgcagatgtattttagc

SEQ ID NO: 28670 - DNA, 22 bp, synthetic construct
  misc_feature 1..22: note = chemically synthesized
  source 1..22: mol_type = other DNA
actgtgcagatgtattttagct

SEQ ID NO: 28671 - DNA, 22 bp, synthetic construct
  misc_feature 1..22: note = chemically synthesized
  source 1..22: mol_type = other DNA
ctgtgcagatgtattttagctt

SEQ ID NO: 28672 - DNA, 22 bp, synthetic construct
  misc_feature 1..22: note = chemically synthesized
  source 1..22: mol_type = other DNA
tgcagatgtattttagcttaat

SEQ ID NO: 28673 - DNA, 22 bp, synthetic construct
  misc_feature 1..22: note = chemically synthesized
  source 1..22: mol_type = other DNA
tagcttaatatagtcccatttg

SEQ ID NO: 28674 - DNA, 22 bp, synthetic construct
  misc_feature 1..22: note = chemically synthesized
  source 1..22: mol_type = other DNA
agcttaatatagtcccatttgt

SEQ ID NO: 28675 - DNA, 22 bp, synthetic construct
  misc_feature 1..22: note = chemically synthesized
  source 1..22: mol_type = other DNA
gcttaatatagtcccatttgtc

SEQ ID NO: 28676 - DNA, 22 bp, synthetic construct
  misc_feature 1..22: note = chemically synthesized
  source 1..22: mol_type = other DNA
aatatagtcccatttgtctatt

SEQ ID NO: 28677 - DNA, 22 bp, synthetic construct
  misc_feature 1..22: note = chemically synthesized
  source 1..22: mol_type = other DNA
atatagtcccatttgtctattt

SEQ ID NO: 28678 - DNA, 22 bp, synthetic construct
  misc_feature 1..22: note = chemically synthesized
  source 1..22: mol_type = other DNA
gtctatttttgcttttgttgcc

SEQ ID NO: 28679 - DNA, 22 bp, synthetic construct
  misc_feature 1..22: note = chemically synthesized
  source 1..22: mol_type = other DNA
tctatttttgcttttgttgcct

SEQ ID NO: 28680 - DNA, 22 bp, synthetic construct
  misc_feature 1..22: note = chemically synthesized
  source 1..22: mol_type = other DNA
tttttgcttttgttgcctgtgc

SEQ ID NO: 28681 - DNA, 22 bp, synthetic construct
  misc_feature 1..22: note = chemically synthesized
  source 1..22: mol_type = other DNA
ttgcttttgttgcctgtgcttt

SEQ ID NO: 28682 - DNA, 22 bp, synthetic construct
  misc_feature 1..22: note = chemically synthesized
  source 1..22: mol_type = other DNA
tgcttttgttgcctgtgctttt

SEQ ID NO: 28683 - DNA, 22 bp, synthetic construct
  misc_feature 1..22: note = chemically synthesized
  source 1..22: mol_type = other DNA
gcttttgttgcctgtgcttttg

SEQ ID NO: 28684 - DNA, 22 bp, synthetic construct
  misc_feature 1..22: note = chemically synthesized
  source 1..22: mol_type = other DNA
cttttgttgcctgtgcttttga

SEQ ID NO: 28685 - DNA, 22 bp, synthetic construct
  misc_feature 1..22: note = chemically synthesized
  source 1..22: mol_type = other DNA
ttgttgcctgtgcttttgaggt

SEQ ID NO: 28686 - DNA, 22 bp, synthetic construct
  misc_feature 1..22: note = chemically synthesized
  source 1..22: mol_type = other DNA
tgttgcctgtgcttttgaggtc

SEQ ID NO: 28687 - DNA, 22 bp, synthetic construct
  misc_feature 1..22: note = chemically synthesized
  source 1..22: mol_type = other DNA
gttgcctgtgcttttgaggtct

SEQ ID NO: 28688 - DNA, 22 bp, synthetic construct
  misc_feature 1..22: note = chemically synthesized
  source 1..22: mol_type = other DNA
ttgcctgtgcttttgaggtctt

SEQ ID NO: 28689 - DNA, 22 bp, synthetic construct
  misc_feature 1..22: note = chemically synthesized
  source 1..22: mol_type = other DNA
cctgtgcttttgaggtcttggc

SEQ ID NO: 28690 - DNA, 22 bp, synthetic construct
  misc_feature 1..22: note = chemically synthesized
  source 1..22: mol_type = other DNA
tgcttttgaggtcttggccata

SEQ ID NO: 28691 - DNA, 22 bp, synthetic construct
  misc_feature 1..22: note = chemically synthesized
  source 1..22: mol_type = other DNA
ttgaggtcttggccataaaatc

SEQ ID NO: 28692 - DNA, 22 bp, synthetic construct
  misc_feature 1..22: note = chemically synthesized
  source 1..22: mol_type = other DNA
tgaggtcttggccataaaatct

SEQ ID NO: 28693 - DNA, 22 bp, synthetic construct
  misc_feature 1..22: note = chemically synthesized
  source 1..22: mol_type = other DNA
gaggtcttggccataaaatctt

SEQ ID NO: 28694 - DNA, 22 bp, synthetic construct
  misc_feature 1..22: note = chemically synthesized
  source 1..22: mol_type = other DNA
aggtcttggccataaaatcttt

SEQ ID NO: 28695 - DNA, 22 bp, synthetic construct
  misc_feature 1..22: note = chemically synthesized
  source 1..22: mol_type = other DNA
ggccataaaatctttgcccaaa

SEQ ID NO: 28696 - DNA, 22 bp, synthetic construct
  misc_feature 1..22: note = chemically synthesized
  source 1..22: mol_type = other DNA
gccataaaatctttgcccaaag

SEQ ID NO: 28697 - DNA, 22 bp, synthetic construct
  misc_feature 1..22: note = chemically synthesized
  source 1..22: mol_type = other DNA
tgcccaaagccatgtcttgaag

SEQ ID NO: 28698 - DNA, 22 bp, synthetic construct
  misc_feature 1..22: note = chemically synthesized
  source 1..22: mol_type = other DNA
gcccaaagccatgtcttgaagt

SEQ ID NO: 28699 - DNA, 22 bp, synthetic construct
  misc_feature 1..22: note = chemically synthesized
  source 1..22: mol_type = other DNA
cccaaagccatgtcttgaagtg

SEQ ID NO: 28700 - DNA, 22 bp, synthetic construct
  misc_feature 1..22: note = chemically synthesized
  source 1..22: mol_type = other DNA
gaagtgtctcccttatgttttc

SEQ ID NO: 28701 - DNA, 22 bp, synthetic construct
  misc_feature 1..22: note = chemically synthesized
  source 1..22: mol_type = other DNA
aagtgtctcccttatgttttct

SEQ ID NO: 28702 - DNA, 22 bp, synthetic construct
  misc_feature 1..22: note = chemically synthesized
  source 1..22: mol_type = other DNA
ccttatgttttcttttagtagt

SEQ ID NO: 28703 - DNA, 22 bp, synthetic construct
  misc_feature 1..22: note = chemically synthesized
  source 1..22: mol_type = other DNA
atgttttcttttagtagtttta

SEQ ID NO: 28704 - DNA, 22 bp, synthetic construct
  misc_feature 1..22: note = chemically synthesized
  source 1..22: mol_type = other DNA
tgttttcttttagtagttttat

SEQ ID NO: 28705 - DNA, 22 bp, synthetic construct
  misc_feature 1..22: note = chemically synthesized
  source 1..22: mol_type = other DNA
tcttttagtagttttatagttt

SEQ ID NO: 28706 - DNA, 22 bp, synthetic construct
  misc_feature 1..22: note = chemically synthesized
  source 1..22: mol_type = other DNA
cttttagtagttttatagtttt

SEQ ID NO: 28707 - DNA, 22 bp, synthetic construct
  misc_feature 1..22: note = chemically synthesized
  source 1..22: mol_type = other DNA
ttttagtagttttatagtttta

SEQ ID NO: 28708 - DNA, 22 bp, synthetic construct
  misc_feature 1..22: note = chemically synthesized
  source 1..22: mol_type = other DNA
ttagtagttttatagttttaag

SEQ ID NO: 28709 - DNA, 22 bp, synthetic construct
  misc_feature 1..22: note = chemically synthesized
  source 1..22: mol_type = other DNA
tagtagttttatagttttaagt

SEQ ID NO: 28710 - DNA, 22 bp, synthetic construct
  misc_feature 1..22: note = chemically synthesized
  source 1..22: mol_type = other DNA
agtagttttatagttttaagtt

SEQ ID NO: 28711 - DNA, 22 bp, synthetic construct
  misc_feature 1..22: note = chemically synthesized
  source 1..22: mol_type = other DNA
gtagttttatagttttaagttt

SEQ ID NO: 28712 - DNA, 22 bp, synthetic construct
  misc_feature 1..22: note = chemically synthesized
  source 1..22: mol_type = other DNA
tatagttttaagttttatattt

SEQ ID NO: 28713 - DNA, 22 bp, synthetic construct
  misc_feature 1..22: note = chemically synthesized
  source 1..22: mol_type = other DNA
atagttttaagttttatattta

SEQ ID NO: 28714 - DNA, 22 bp, synthetic construct
  misc_feature 1..22: note = chemically synthesized
  source 1..22: mol_type = other DNA
tagttttaagttttatatttaa

SEQ ID NO: 28715 - DNA, 22 bp, synthetic construct
  misc_feature 1..22: note = chemically synthesized
  source 1..22: mol_type = other DNA
taagttttatatttaagtcttt

SEQ ID NO: 28716 - DNA, 22 bp, synthetic construct
  misc_feature 1..22: note = chemically synthesized
  source 1..22: mol_type = other DNA
aagttttatatttaagtcttta

SEQ ID NO: 28717 - DNA, 22 bp, synthetic construct
  misc_feature 1..22: note = chemically synthesized
  source 1..22: mol_type = other DNA
agttttatatttaagtctttaa

SEQ ID NO: 28718 - DNA, 22 bp, synthetic construct
  misc_feature 1..22: note = chemically synthesized
  source 1..22: mol_type = other DNA
tatatttaagtctttaatccat

SEQ ID NO: 28719 - DNA, 22 bp, synthetic construct
  misc_feature 1..22: note = chemically synthesized
  source 1..22: mol_type = other DNA
atatttaagtctttaatccatc

SEQ ID NO: 28720 - DNA, 22 bp, synthetic construct
  misc_feature 1..22: note = chemically synthesized
  source 1..22: mol_type = other DNA
tatttaagtctttaatccatct

SEQ ID NO: 28721 - DNA, 22 bp, synthetic construct
  misc_feature 1..22: note = chemically synthesized
  source 1..22: mol_type = other DNA
aagtctttaatccatcttgaga

SEQ ID NO: 28722 - DNA, 22 bp, synthetic construct
  misc_feature 1..22: note = chemically synthesized
  source 1..22: mol_type = other DNA
agtctttaatccatcttgagag

SEQ ID NO: 28723 - DNA, 22 bp, synthetic construct
  misc_feature 1..22: note = chemically synthesized
  source 1..22: mol_type = other DNA
taatccatcttgagagtacgtt

SEQ ID NO: 28724 - DNA, 22 bp, synthetic construct
  misc_feature 1..22: note = chemically synthesized
  source 1..22: mol_type = other DNA
aatccatcttgagagtacgttt

SEQ ID NO: 28725 - DNA, 22 bp, synthetic construct
  misc_feature 1..22: note = chemically synthesized
  source 1..22: mol_type = other DNA
atccatcttgagagtacgtttt

SEQ ID NO: 28726 - DNA, 22 bp, synthetic construct
  misc_feature 1..22: note = chemically synthesized
  source 1..22: mol_type = other DNA
gagagtacgttttatatggcaa

SEQ ID NO: 28727 - DNA, 22 bp, synthetic construct
  misc_feature 1..22: note = chemically synthesized
  source 1..22: mol_type = other DNA
agagtacgttttatatggcaat

SEQ ID NO: 28728 - DNA, 22 bp, synthetic construct
  misc_feature 1..22: note = chemically synthesized
  source 1..22: mol_type = other DNA
tatatggcaataaataggggtt

SEQ ID NO: 28729 - DNA, 22 bp, synthetic construct
  misc_feature 1..22: note = chemically synthesized
  source 1..22: mol_type = other DNA
atatggcaataaataggggttg

SEQ ID NO: 28730 - DNA, 22 bp, synthetic construct
  misc_feature 1..22: note = chemically synthesized
  source 1..22: mol_type = other DNA
tatggcaataaataggggttgt

SEQ ID NO: 28731 - DNA, 22 bp, synthetic construct
  misc_feature 1..22: note = chemically synthesized
  source 1..22: mol_type = other DNA
tattaggccatttttgcatcta

SEQ ID NO: 28732 - DNA, 22 bp, synthetic construct
  misc_feature 1..22: note = chemically synthesized
  source 1..22: mol_type = other DNA
ggccatttttgcatctattgta

SEQ ID NO: 28733 - DNA, 22 bp, synthetic construct
  misc_feature 1..22: note = chemically synthesized
  source 1..22: mol_type = other DNA
ttgcatctattgtacaaggggt

SEQ ID NO: 28734 - DNA, 22 bp, synthetic construct
  misc_feature 1..22: note = chemically synthesized
  source 1..22: mol_type = other DNA
tgcatctattgtacaaggggtt

SEQ ID NO: 28735 - DNA, 22 bp, synthetic construct
  misc_feature 1..22: note = chemically synthesized
  source 1..22: mol_type = other DNA
gcatctattgtacaaggggttg

SEQ ID NO: 28736 - DNA, 22 bp, synthetic construct
  misc_feature 1..22: note = chemically synthesized
  source 1..22: mol_type = other DNA
catctattgtacaaggggttga

SEQ ID NO: 28737 - DNA, 22 bp, synthetic construct
  misc_feature 1..22: note = chemically synthesized
  source 1..22: mol_type = other DNA
ttgtacaaggggttgagttctt

SEQ ID NO: 28738 - DNA, 22 bp, synthetic construct
  misc_feature 1..22: note = chemically synthesized
  source 1..22: mol_type = other DNA
tacaaggggttgagttcttgat

SEQ ID NO: 28739 - DNA, 22 bp, synthetic construct
  misc_feature 1..22: note = chemically synthesized
  source 1..22: mol_type = other DNA
agttcttgatttgattctccat

SEQ ID NO: 28740 - DNA, 22 bp, synthetic construct
  misc_feature 1..22: note = chemically synthesized
  source 1..22: mol_type = other DNA
ttgatttgattctccatttggt

SEQ ID NO: 28741 - DNA, 22 bp, synthetic construct
  misc_feature 1..22: note = chemically synthesized
  source 1..22: mol_type = other DNA
gatttgattctccatttggttg

SEQ ID NO: 28742 - DNA, 22 bp, synthetic construct
  misc_feature 1..22: note = chemically synthesized
  source 1..22: mol_type = other DNA
atttgattctccatttggttgc

SEQ ID NO: 28743 - DNA, 22 bp, synthetic construct
  misc_feature 1..22: note = chemically synthesized
  source 1..22: mol_type = other DNA
gattctccatttggttgctgtt

SEQ ID NO: 28744 - DNA, 22 bp, synthetic construct
  misc_feature 1..22: note = chemically synthesized
  source 1..22: mol_type = other DNA
attctccatttggttgctgttg

SEQ ID NO: 28745 - DNA, 22 bp, synthetic construct
  misc_feature 1..22: note = chemically synthesized
  source 1..22: mol_type = other DNA
tccatttggttgctgttggtgt

SEQ ID NO: 28746 - DNA, 22 bp, synthetic construct
  misc_feature 1..22: note = chemically synthesized
  source 1..22: mol_type = other DNA
catttggttgctgttggtgtat

SEQ ID NO: 28747 - DNA, 22 bp, synthetic construct
  misc_feature 1..22: note = chemically synthesized
  source 1..22: mol_type = other DNA
ggttgctgttggtgtatagaag

SEQ ID NO: 28748 - DNA, 22 bp, synthetic construct
  misc_feature 1..22: note = chemically synthesized
  source 1..22: mol_type = other DNA
gttgctgttggtgtatagaaga

SEQ ID NO: 28749 - DNA, 22 bp, synthetic construct
  misc_feature 1..22: note = chemically synthesized
  source 1..22: mol_type = other DNA
ctgttggtgtatagaagagtta

SEQ ID NO: 28750 - DNA, 22 bp, synthetic construct
  misc_feature 1..22: note = chemically synthesized
  source 1..22: mol_type = other DNA
ttggtgtatagaagagttactg

SEQ ID NO: 28751 - DNA, 22 bp, synthetic construct
  misc_feature 1..22: note = chemically synthesized
  source 1..22: mol_type = other DNA
gtgtatagaagagttactgatt

SEQ ID NO: 28752 - DNA, 22 bp, synthetic construct
  misc_feature 1..22: note = chemically synthesized
  source 1..22: mol_type = other DNA
ctgatttgtgtgcattcatctt

SEQ ID NO: 28753 - DNA, 22 bp, synthetic construct
  misc_feature 1..22: note = chemically synthesized
  source 1..22: mol_type = other DNA
atttgtgtgcattcatcttgta

SEQ ID NO: 28754 - DNA, 22 bp, synthetic construct
  misc_feature 1..22: note = chemically synthesized
  source 1..22: mol_type = other DNA
gtgtgcattcatcttgtatctg

SEQ ID NO: 28755 - DNA, 22 bp, synthetic construct
  misc_feature 1..22: note = chemically synthesized
  source 1..22: mol_type = other DNA
tgtgcattcatcttgtatctgg

SEQ ID NO: 28756 - DNA, 22 bp, synthetic construct
  misc_feature 1..22: note = chemically synthesized
  source 1..22: mol_type = other DNA
atcttgtatctggaaactttgc

SEQ ID NO: 28757 - DNA, 22 bp, synthetic construct
  misc_feature 1..22: note = chemically synthesized
  source 1..22: mol_type = other DNA
gtatctggaaactttgctgaat

SEQ ID NO: 28758 - DNA, 22 bp, synthetic construct
  misc_feature 1..22: note = chemically synthesized
  source 1..22: mol_type = other DNA
tatctggaaactttgctgaatt

SEQ ID NO: 28759 - DNA, 22 bp, synthetic construct
  misc_feature 1..22: note = chemically synthesized
  source 1..22: mol_type = other DNA
gaaactttgctgaattatttta

SEQ ID NO: 28760 - DNA, 22 bp, synthetic construct
  misc_feature 1..22: note = chemically synthesized
  source 1..22: mol_type = other DNA
tgctgaattattttatcagttc

SEQ ID NO: 28761 - DNA, 22 bp, synthetic construct
  misc_feature 1..22: note = chemically synthesized
  source 1..22: mol_type = other DNA
gctgaattattttatcagttct

SEQ ID NO: 28762 - DNA, 22 bp, synthetic construct
  misc_feature 1..22: note = chemically synthesized
  source 1..22: mol_type = other DNA
ctgaattattttatcagttcta

SEQ ID NO: 28763 - DNA, 22 bp, synthetic construct
  misc_feature 1..22: note = chemically synthesized
  source 1..22: mol_type = other DNA
aattattttatcagttctagga

SEQ ID NO: 28764 - DNA, 22 bp, synthetic construct
  misc_feature 1..22: note = chemically synthesized
  source 1..22: mol_type = other DNA
ttttatcagttctaggagcttt

SEQ ID NO: 28765 - DNA, 22 bp, synthetic construct
  misc_feature 1..22: note = chemically synthesized
  source 1..22: mol_type = other DNA
tatcagttctaggagctttctg

SEQ ID NO: 28766 - DNA, 22 bp, synthetic construct
  misc_feature 1..22: note = chemically synthesized
  source 1..22: mol_type = other DNA
atcagttctaggagctttctgg

SEQ ID NO: 28767 - DNA, 22 bp, synthetic construct
  misc_feature 1..22: note = chemically synthesized
  source 1..22: mol_type = other DNA
tcagttctaggagctttctgga

SEQ ID NO: 28768 - DNA, 22 bp, synthetic construct
  misc_feature 1..22: note = chemically synthesized
  source 1..22: mol_type = other DNA
taggagctttctggaggagtct

SEQ ID NO: 28769 - DNA, 22 bp, synthetic construct
  misc_feature 1..22: note = chemically synthesized
  source 1..22: mol_type = other DNA
ggagctttctggaggagtcttt

SEQ ID NO: 28770 - DNA, 22 bp, synthetic construct
  misc_feature 1..22: note = chemically synthesized
  source 1..22: mol_type = other DNA
tctggaggagtctttagggttt

SEQ ID NO: 28771 - DNA, 22 bp, synthetic construct
  misc_feature 1..22: note = chemically synthesized
  source 1..22: mol_type = other DNA
ctggaggagtctttagggtttt

SEQ ID NO: 28772 - DNA, 22 bp, synthetic construct
  misc_feature 1..22: note = chemically synthesized
  source 1..22: mol_type = other DNA
tggaggagtctttagggtttta

SEQ ID NO: 28773 - DNA, 22 bp, synthetic construct
  misc_feature 1..22: note = chemically synthesized
  source 1..22: mol_type = other DNA
gaggagtctttagggttttaaa

SEQ ID NO: 28774 - DNA, 22 bp, synthetic construct
  misc_feature 1..22: note = chemically synthesized
  source 1..22: mol_type = other DNA
tagggttttaaaggtaaatgat

SEQ ID NO: 28775 - DNA, 22 bp, synthetic construct
  misc_feature 1..22: note = chemically synthesized
  source 1..22: mol_type = other DNA
agggttttaaaggtaaatgatc

SEQ ID NO: 28776 - DNA, 22 bp, synthetic construct
  misc_feature 1..22: note = chemically synthesized
  source 1..22: mol_type = other DNA
gggttttaaaggtaaatgatca

SEQ ID NO: 28777 - DNA, 22 bp, synthetic construct
  misc_feature 1..22: note = chemically synthesized
  source 1..22: mol_type = other DNA
taaaggtaaatgatcatatcat

SEQ ID NO: 28778 - DNA, 22 bp, synthetic construct
  misc_feature 1..22: note = chemically synthesized
  source 1..22: mol_type = other DNA
aaaggtaaatgatcatatcatc

SEQ ID NO: 28779 - DNA, 22 bp, synthetic construct
  misc_feature 1..22: note = chemically synthesized
  source 1..22: mol_type = other DNA
aaggtaaatgatcatatcatca

SEQ ID NO: 28780 - DNA, 22 bp, synthetic construct
  misc_feature 1..22: note = chemically synthesized
  source 1..22: mol_type = other DNA
gacttcctctttactgatttga

SEQ ID NO: 28781 - DNA, 22 bp, synthetic construct
  misc_feature 1..22: note = chemically synthesized
  source 1..22: mol_type = other DNA
acttcctctttactgatttgaa

SEQ ID NO: 28782 - DNA, 22 bp, synthetic construct
  misc_feature 1..22: note = chemically synthesized
  source 1..22: mol_type = other DNA
cctctttactgatttgaatgcc

SEQ ID NO: 28783 - DNA, 22 bp, synthetic construct
  misc_feature 1..22: note = chemically synthesized
  source 1..22: mol_type = other DNA
ctctttactgatttgaatgccc

SEQ ID NO: 28784 - DNA, 22 bp, synthetic construct
  misc_feature 1..22: note = chemically synthesized
  source 1..22: mol_type = other DNA
tttactgatttgaatgcccttt

SEQ ID NO: 28785 - DNA, 22 bp, synthetic construct
  misc_feature 1..22: note = chemically synthesized
  source 1..22: mol_type = other DNA
tactgatttgaatgccctttat

SEQ ID NO: 28786 - DNA, 22 bp, synthetic construct
  misc_feature 1..22: note = chemically synthesized
  source 1..22: mol_type = other DNA
actgatttgaatgccctttatt

SEQ ID NO: 28787 - DNA, 22 bp, synthetic construct
  misc_feature 1..22: note = chemically synthesized
  source 1..22: mol_type = other DNA
ctgatttgaatgccctttattt

SEQ ID NO: 28788 - DNA, 22 bp, synthetic construct
  misc_feature 1..22: note = chemically synthesized
  source 1..22: mol_type = other DNA
atttgaatgccctttatttctt

SEQ ID NO: 28789 - DNA, 22 bp, synthetic construct
  misc_feature 1..22: note = chemically synthesized
  source 1..22: mol_type = other DNA
gaatgccctttatttctttgtt

SEQ ID NO: 28790 - DNA, 22 bp, synthetic construct
  misc_feature 1..22: note = chemically synthesized
  source 1..22: mol_type = other DNA
aatgccctttatttctttgttt

SEQ ID NO: 28791 - DNA, 22 bp, synthetic construct
  misc_feature 1..22: note = chemically synthesized
  source 1..22: mol_type = other DNA
tatttctttgttttgtctgatt

SEQ ID NO: 28792 - DNA, 22 bp, synthetic construct
  misc_feature 1..22: note = chemically synthesized
  source 1..22: mol_type = other DNA
atttctttgttttgtctgattg

SEQ ID NO: 28793 - DNA, 22 bp, synthetic construct
  misc_feature 1..22: note = chemically synthesized
  source 1..22: mol_type = other DNA
tttctttgttttgtctgattgc

SEQ ID NO: 28794 - DNA, 22 bp, synthetic construct
  misc_feature 1..22: note = chemically synthesized
  source 1..22: mol_type = other DNA
ctttgttttgtctgattgccct

SEQ ID NO: 28795 - DNA, 22 bp, synthetic construct
  misc_feature 1..22: note = chemically synthesized
  source 1..22: mol_type = other DNA
tttgttttgtctgattgccctg

SEQ ID NO: 28796 - DNA, 22 bp, synthetic construct
  misc_feature 1..22: note = chemically synthesized
  source 1..22: mol_type = other DNA
tgttttgtctgattgccctggc

SEQ ID NO: 28797 - DNA, 22 bp, synthetic construct
  misc_feature 1..22: note = chemically synthesized
  source 1..22: mol_type = other DNA
gttttgtctgattgccctggct

SEQ ID NO: 28798 - DNA, 22 bp, synthetic construct
  misc_feature 1..22: note = chemically synthesized
  source 1..22: mol_type = other DNA
ttttgtctgattgccctggcta

SEQ ID NO: 28799 - DNA, 22 bp, synthetic construct
  misc_feature 1..22: note = chemically synthesized
  source 1..22: mol_type = other DNA
tgtctgattgccctggctagga

SEQ ID NO: 28800 - DNA, 22 bp, synthetic construct
  misc_feature 1..22: note = chemically synthesized
  source 1..22: mol_type = other DNA
gtctgattgccctggctaggac

SEQ ID NO: 28801 - DNA, 22 bp, synthetic construct
  misc_feature 1..22: note = chemically synthesized
  source 1..22: mol_type = other DNA
tctgattgccctggctaggact

SEQ ID NO: 28802 - DNA, 22 bp, synthetic construct
  misc_feature 1..22: note = chemically synthesized
  source 1..22: mol_type = other DNA
attgccctggctaggacttcca

SEQ ID NO: 28803 - DNA, 22 bp, synthetic construct
  misc_feature 1..22: note = chemically synthesized
  source 1..22: mol_type = other DNA
ccctggctaggacttccagtac

SEQ ID NO: 28804 - DNA, 22 bp, synthetic construct
  misc_feature 1..22: note = chemically synthesized
  source 1..22: mol_type = other DNA
gctaggacttccagtactatgt

SEQ ID NO: 28805 - DNA, 22 bp, synthetic construct
  misc_feature 1..22: note = chemically synthesized
  source 1..22: mol_type = other DNA
ggacttccagtactatgttgaa

SEQ ID NO: 28806 - DNA, 22 bp, synthetic construct
  misc_feature 1..22: note = chemically synthesized
  source 1..22: mol_type = other DNA
ccagtactatgttgaagaggag

SEQ ID NO: 28807 - DNA, 22 bp, synthetic construct
  misc_feature 1..22: note = chemically synthesized
  source 1..22: mol_type = other DNA
cagtactatgttgaagaggagt

SEQ ID NO: 28808 - DNA, 22 bp, synthetic construct
  misc_feature 1..22: note = chemically synthesized
  source 1..22: mol_type = other DNA
tgttgaagaggagtggtgagag

SEQ ID NO: 28809 - DNA, 22 bp, synthetic construct
  misc_feature 1..22: note = chemically synthesized
  source 1..22: mol_type = other DNA
aagaggagtggtgagagtgggc

SEQ ID NO: 28810 - DNA, 22 bp, synthetic construct
  misc_feature 1..22: note = chemically synthesized
  source 1..22: mol_type = other DNA
gtcttgttccagttctcagagg

SEQ ID NO: 28811 - DNA, 22 bp, synthetic construct
  misc_feature 1..22: note = chemically synthesized
  source 1..22: mol_type = other DNA
tcttgttccagttctcagaggg

SEQ ID NO: 28812 - DNA, 22 bp, synthetic construct
  misc_feature 1..22: note = chemically synthesized
  source 1..22: mol_type = other DNA
gttccagttctcagagggaatg

SEQ ID NO: 28813 - DNA, 22 bp, synthetic construct
  misc_feature 1..22: note = chemically synthesized
  source 1..22: mol_type = other DNA
ttccagttctcagagggaatgc

SEQ ID NO: 28814 - DNA, 22 bp, synthetic construct
  misc_feature 1..22: note = chemically synthesized
  source 1..22: mol_type = other DNA
cagttctcagagggaatgcttt

SEQ ID NO: 28815 - DNA, 22 bp, synthetic construct
  misc_feature 1..22: note = chemically synthesized
  source 1..22: mol_type = other DNA
tcagagggaatgctttcaactt

SEQ ID NO: 28816 - DNA, 22 bp, synthetic construct
  misc_feature 1..22: note = chemically synthesized
  source 1..22: mol_type = other DNA
agagggaatgctttcaactttt

SEQ ID NO: 28817 - DNA, 22 bp, synthetic construct
  misc_feature 1..22: note = chemically synthesized
  source 1..22: mol_type = other DNA
tcaacttttccccattcaatat

SEQ ID NO: 28818 - DNA, 22 bp, synthetic construct
  misc_feature 1..22: note = chemically synthesized
  source 1..22: mol_type = other DNA
caacttttccccattcaatatt

SEQ ID NO: 28819 - DNA, 22 bp, synthetic construct
  misc_feature 1..22: note = chemically synthesized
  source 1..22: mol_type = other DNA
aacttttccccattcaatatta

SEQ ID NO: 28820 - DNA, 22 bp, synthetic construct
  misc_feature 1..22: note = chemically synthesized
  source 1..22: mol_type = other DNA
ttccccattcaatattatgttg

SEQ ID NO: 28821 - DNA, 22 bp, synthetic construct
  misc_feature 1..22: note = chemically synthesized
  source 1..22: mol_type = other DNA
tccccattcaatattatgttgg

SEQ ID NO: 28822 - DNA, 22 bp, synthetic construct
  misc_feature 1..22: note = chemically synthesized
  source 1..22: mol_type = other DNA
ccccattcaatattatgttggc

SEQ ID NO: 28823 - DNA, 22 bp, synthetic construct
  misc_feature 1..22: note = chemically synthesized
  source 1..22: mol_type = other DNA
cccattcaatattatgttggct

SEQ ID NO: 28824 - DNA, 22 bp, synthetic construct
  misc_feature 1..22: note = chemically synthesized
  source 1..22: mol_type = other DNA
aatattatgttggctgtgggtt

SEQ ID NO: 28825 - DNA, 22 bp, synthetic construct
  misc_feature 1..22: note = chemically synthesized
  source 1..22: mol_type = other DNA
tgttggctgtgggtttgtcaca

SEQ ID NO: 28826 - DNA, 22 bp, synthetic construct
  misc_feature 1..22: note = chemically synthesized
  source 1..22: mol_type = other DNA
gctgtgggtttgtcacagatgg

SEQ ID NO: 28827 - DNA, 22 bp, synthetic construct
  misc_feature 1..22: note = chemically synthesized
  source 1..22: mol_type = other DNA
tgggtttgtcacagatggcttt

SEQ ID NO: 28828 - DNA, 22 bp, synthetic construct
  misc_feature 1..22: note = chemically synthesized
  source 1..22: mol_type = other DNA
gtcacagatggcttttattaca

SEQ ID NO: 28829 - DNA, 22 bp, synthetic construct
  misc_feature 1..22: note = chemically synthesized
  source 1..22: mol_type = other DNA
tcacagatggcttttattacac

SEQ ID NO: 28830 - DNA, 22 bp, synthetic construct
  misc_feature 1..22: note = chemically synthesized
  source 1..22: mol_type = other DNA
ttattacactgaggtatgtctc

SEQ ID NO: 28831 - DNA, 22 bp, synthetic construct
  misc_feature 1..22: note = chemically synthesized
  source 1..22: mol_type = other DNA
tattacactgaggtatgtctct

SEQ ID NO: 28832 - DNA, 22 bp, synthetic construct
  misc_feature 1..22: note = chemically synthesized
  source 1..22: mol_type = other DNA
attacactgaggtatgtctctt

SEQ ID NO: 28833 - DNA, 22 bp, synthetic construct
  misc_feature 1..22: note = chemically synthesized
  source 1..22: mol_type = other DNA
ttacactgaggtatgtctcttg

SEQ ID NO: 28834 - DNA, 22 bp, synthetic construct
  misc_feature 1..22: note = chemically synthesized
  source 1..22: mol_type = other DNA
cactgaggtatgtctcttgtat

SEQ ID NO: 28835 - DNA, 22 bp, synthetic construct
  misc_feature 1..22: note = chemically synthesized
  source 1..22: mol_type = other DNA
aggtatgtctcttgtatgctga

SEQ ID NO: 28836 - DNA, 22 bp, synthetic construct
  misc_feature 1..22: note = chemically synthesized
  source 1..22: mol_type = other DNA
ttgtatgctgattttgctgagc

SEQ ID NO: 28837 - DNA, 22 bp, synthetic construct
  misc_feature 1..22: note = chemically synthesized
  source 1..22: mol_type = other DNA
gtatgctgattttgctgagcat

SEQ ID NO: 28838 - DNA, 22 bp, synthetic construct
  misc_feature 1..22: note = chemically synthesized
  source 1..22: mol_type = other DNA
tatgctgattttgctgagcatt

SEQ ID NO: 28839 - DNA, 22 bp, synthetic construct
  misc_feature 1..22: note = chemically synthesized
  source 1..22: mol_type = other DNA
attttgctgagcattttaatca

SEQ ID NO: 28840 - DNA, 22 bp, synthetic construct
  misc_feature 1..22: note = chemically synthesized
  source 1..22: mol_type = other DNA
tgctgagcattttaatcataaa

SEQ ID NO: 28841 - DNA, 22 bp, synthetic construct
  misc_feature 1..22: note = chemically synthesized
  source 1..22: mol_type = other DNA
gctgagcattttaatcataaat

SEQ ID NO: 28842 - DNA, 22 bp, synthetic construct
  misc_feature 1..22: note = chemically synthesized
  source 1..22: mol_type = other DNA
ctgagcattttaatcataaatg

SEQ ID NO: 28843 - DNA, 22 bp, synthetic construct
  misc_feature 1..22: note = chemically synthesized
  source 1..22: mol_type = other DNA
agcattttaatcataaatgtat

SEQ ID NO: 28844 - DNA, 22 bp, synthetic construct
  misc_feature 1..22: note = chemically synthesized
  source 1..22: mol_type = other DNA
taatcataaatgtatgctggat

SEQ ID NO: 28845 - DNA, 22 bp, synthetic construct
  misc_feature 1..22: note = chemically synthesized
  source 1..22: mol_type = other DNA
aatcataaatgtatgctggatt

SEQ ID NO: 28846 - DNA, 22 bp, synthetic construct
  misc_feature 1..22: note = chemically synthesized
  source 1..22: mol_type = other DNA
atcataaatgtatgctggattt

SEQ ID NO: 28847 - DNA, 22 bp, synthetic construct
  misc_feature 1..22: note = chemically synthesized
  source 1..22: mol_type = other DNA
gattttgttgaatgctttttct

SEQ ID NO: 28848 - DNA, 22 bp, synthetic construct
  misc_feature 1..22: note = chemically synthesized
  source 1..22: mol_type = other DNA
tgttgaatgctttttctgcatc

SEQ ID NO: 28849 - DNA, 22 bp, synthetic construct
  misc_feature 1..22: note = chemically synthesized
  source 1..22: mol_type = other DNA
gttgaatgctttttctgcatct

SEQ ID NO: 28850 - DNA, 22 bp, synthetic construct
  misc_feature 1..22: note = chemically synthesized
  source 1..22: mol_type = other DNA
ttgaatgctttttctgcatcta

SEQ ID NO: 28851 - DNA, 22 bp, synthetic construct
  misc_feature 1..22: note = chemically synthesized
  source 1..22: mol_type = other DNA
aatgctttttctgcatctattg

SEQ ID NO: 28852 - DNA, 22 bp, synthetic construct
  misc_feature 1..22: note = chemically synthesized
  source 1..22: mol_type = other DNA
tttctgcatctattgagatgat

SEQ ID NO: 28853 - DNA, 22 bp, synthetic construct
  misc_feature 1..22: note = chemically synthesized
  source 1..22: mol_type = other DNA
ttctgcatctattgagatgatc

SEQ ID NO: 28854 - DNA, 22 bp, synthetic construct
  misc_feature 1..22: note = chemically synthesized
  source 1..22: mol_type = other DNA
tctgcatctattgagatgatca

SEQ ID NO: 28855 - DNA, 22 bp, synthetic construct
  misc_feature 1..22: note = chemically synthesized
  source 1..22: mol_type = other DNA
ctgcatctattgagatgatcat

SEQ ID NO: 28856 - DNA, 22 bp, synthetic construct
  misc_feature 1..22: note = chemically synthesized
  source 1..22: mol_type = other DNA
tgcatctattgagatgatcatg

SEQ ID NO: 28857 - DNA, 22 bp, synthetic construct
  misc_feature 1..22: note = chemically synthesized
  source 1..22: mol_type = other DNA
catctattgagatgatcatgta

SEQ ID NO: 28858 - DNA, 22 bp, synthetic construct
  misc_feature 1..22: note = chemically synthesized
  source 1..22: mol_type = other DNA
ttgagatgatcatgtaattttt

SEQ ID NO: 28859 - DNA, 22 bp, synthetic construct
  misc_feature 1..22: note = chemically synthesized
  source 1..22: mol_type = other DNA
agatgatcatgtaatttttgtt

SEQ ID NO: 28860 - DNA, 22 bp, synthetic construct
  misc_feature 1..22: note = chemically synthesized
  source 1..22: mol_type = other DNA
ttgtttttaaatctgtttatgt

SEQ ID NO: 28861 - DNA, 22 bp, synthetic construct
  misc_feature 1..22: note = chemically synthesized
  source 1..22: mol_type = other DNA
tgtttttaaatctgtttatgtg

SEQ ID NO: 28862 - DNA, 22 bp, synthetic construct
  misc_feature 1..22: note = chemically synthesized
  source 1..22: mol_type = other DNA
gtttttaaatctgtttatgtgg

SEQ ID NO: 28863 - DNA, 22 bp, synthetic construct
  misc_feature 1..22: note = chemically synthesized
  source 1..22: mol_type = other DNA
tttttaaatctgtttatgtggt

SEQ ID NO: 28864 - DNA, 22 bp, synthetic construct
  misc_feature 1..22: note = chemically synthesized
  source 1..22: mol_type = other DNA
ttaaatctgtttatgtggtgta

SEQ ID NO: 28865 - DNA, 22 bp, synthetic construct
  misc_feature 1..22: note = chemically synthesized
  source 1..22: mol_type = other DNA
taaatctgtttatgtggtgtat

SEQ ID NO: 28866 - DNA, 22 bp, synthetic construct
  misc_feature 1..22: note = chemically synthesized
  source 1..22: mol_type = other DNA
aaatctgtttatgtggtgtatc

SEQ ID NO: 28867 - DNA, 22 bp, synthetic construct
  misc_feature 1..22: note = chemically synthesized
  source 1..22: mol_type = other DNA
aatctgtttatgtggtgtatca

SEQ ID NO: 28868 - DNA, 22 bp, synthetic construct
  misc_feature 1..22: note = chemically synthesized
  source 1..22: mol_type = other DNA
tttatgtggtgtatcacactta

SEQ ID NO: 28869 - DNA, 22 bp, synthetic construct
  misc_feature 1..22: note = chemically synthesized
  source 1..22: mol_type = other DNA
atgtggtgtatcacacttattg

SEQ ID NO: 28870 - DNA, 22 bp, synthetic construct
  misc_feature 1..22: note = chemically synthesized
  source 1..22: mol_type = other DNA
tgtggtgtatcacacttattga

SEQ ID NO: 28871 - DNA, 22 bp, synthetic construct
  misc_feature 1..22: note = chemically synthesized
  source 1..22: mol_type = other DNA
attgacttgcagatgtcaaacc

SEQ ID NO: 28872 - DNA, 22 bp, synthetic construct
  misc_feature 1..22: note = chemically synthesized
  source 1..22: mol_type = other DNA
ttgacttgcagatgtcaaacca

SEQ ID NO: 28873 - DNA, 22 bp, synthetic construct
  misc_feature 1..22: note = chemically synthesized
  source 1..22: mol_type = other DNA
acttgcagatgtcaaaccaacc

SEQ ID NO: 28874 - DNA, 22 bp, synthetic construct
  misc_feature 1..22: note = chemically synthesized
  source 1..22: mol_type = other DNA
gcagatgtcaaaccaaccctgc

SEQ ID NO: 28875 - DNA, 22 bp, synthetic construct
  misc_feature 1..22: note = chemically synthesized
  source 1..22: mol_type = other DNA
cagatgtcaaaccaaccctgca

SEQ ID NO: 28876 - DNA, 22 bp, synthetic construct
  misc_feature 1..22: note = chemically synthesized
  source 1..22: mol_type = other DNA
catccctggcatggaacctgct

SEQ ID NO: 28877 - DNA, 22 bp, synthetic construct
  misc_feature 1..22: note = chemically synthesized
  source 1..22: mol_type = other DNA
gcatggaacctgcttgatcatg

SEQ ID NO: 28878 - DNA, 22 bp, synthetic construct
  misc_feature 1..22: note = chemically synthesized
  source 1..22: mol_type = other DNA
cttgatcatggtggattatctt

SEQ ID NO: 28879 - DNA, 22 bp, synthetic construct
  misc_feature 1..22: note = chemically synthesized
  source 1..22: mol_type = other DNA
gatcatggtggattatcttttt

SEQ ID NO: 28880 - DNA, 22 bp, synthetic construct
  misc_feature 1..22: note = chemically synthesized
  source 1..22: mol_type = other DNA
atcatggtggattatctttttg

SEQ ID NO: 28881 - DNA, 22 bp, synthetic construct
  misc_feature 1..22: note = chemically synthesized
  source 1..22: mol_type = other DNA
tctttttgttatgttgttgaat

SEQ ID NO: 28882 - DNA, 22 bp, synthetic construct
  misc_feature 1..22: note = chemically synthesized
  source 1..22: mol_type = other DNA
tttgttatgttgttgaatttgg

SEQ ID NO: 28883 - DNA, 22 bp, synthetic construct
  misc_feature 1..22: note = chemically synthesized
  source 1..22: mol_type = other DNA
ttgttatgttgttgaatttggt

SEQ ID NO: 28884 - DNA, 22 bp, synthetic construct
  misc_feature 1..22: note = chemically synthesized
  source 1..22: mol_type = other DNA
tgttatgttgttgaatttggtt

SEQ ID NO: 28885 - DNA, 22 bp, synthetic construct
  misc_feature 1..22: note = chemically synthesized
  source 1..22: mol_type = other DNA
gttatgttgttgaatttggtta

SEQ ID NO: 28886 - DNA, 22 bp, synthetic construct
  misc_feature 1..22: note = chemically synthesized
  source 1..22: mol_type = other DNA
ttatgttgttgaatttggttat

SEQ ID NO: 28887 - DNA, 22 bp, synthetic construct
  misc_feature 1..22: note = chemically synthesized
  source 1..22: mol_type = other DNA
tgttgttgaatttggttatcta

SEQ ID NO: 28888 - DNA, 22 bp, synthetic construct
  misc_feature 1..22: note = chemically synthesized
  source 1..22: mol_type = other DNA
ttgaatttggttatctagtatt

SEQ ID NO: 28889 - DNA, 22 bp, synthetic construct
  misc_feature 1..22: note = chemically synthesized
  source 1..22: mol_type = other DNA
aatttggttatctagtattttg

SEQ ID NO: 28890 - DNA, 22 bp, synthetic construct
  misc_feature 1..22: note = chemically synthesized
  source 1..22: mol_type = other DNA
ggttatctagtattttgttaag

SEQ ID NO: 28891 - DNA, 22 bp, synthetic construct
  misc_feature 1..22: note = chemically synthesized
  source 1..22: mol_type = other DNA
gttatctagtattttgttaagg

SEQ ID NO: 28892 - DNA, 22 bp, synthetic construct
  misc_feature 1..22: note = chemically synthesized
  source 1..22: mol_type = other DNA
tctagtattttgttaaggattt

SEQ ID NO: 28893 - DNA, 22 bp, synthetic construct
  misc_feature 1..22: note = chemically synthesized
  source 1..22: mol_type = other DNA
gtattttgttaaggattttagc

SEQ ID NO: 28894 - DNA, 22 bp, synthetic construct
  misc_feature 1..22: note = chemically synthesized
  source 1..22: mol_type = other DNA
tgttaaggattttagcatctat

SEQ ID NO: 28895 - DNA, 22 bp, synthetic construct
  misc_feature 1..22: note = chemically synthesized
  source 1..22: mol_type = other DNA
gttaaggattttagcatctatg

SEQ ID NO: 28896 - DNA, 22 bp, synthetic construct
  misc_feature 1..22: note = chemically synthesized
  source 1..22: mol_type = other DNA
ttaaggattttagcatctatgt

SEQ ID NO: 28897 - DNA, 22 bp, synthetic construct
  misc_feature 1..22: note = chemically synthesized
  source 1..22: mol_type = other DNA
aggattttagcatctatgttca

SEQ ID NO: 28898 - DNA, 22 bp, synthetic construct
  misc_feature 1..22: note = chemically synthesized
  source 1..22: mol_type = other DNA
tagcatctatgttcatcaaggc

SEQ ID NO: 28899 - DNA, 22 bp, synthetic construct
  misc_feature 1..22: note = chemically synthesized
  source 1..22: mol_type = other DNA
agcatctatgttcatcaaggct

SEQ ID NO: 28900 - DNA, 22 bp, synthetic construct
  misc_feature 1..22: note = chemically synthesized
  source 1..22: mol_type = other DNA
gcatctatgttcatcaaggcta

SEQ ID NO: 28901 - DNA, 22 bp, synthetic construct
  misc_feature 1..22: note = chemically synthesized
  source 1..22: mol_type = other DNA
tgttcatcaaggctatcagtct

SEQ ID NO: 28902 - DNA, 22 bp, synthetic construct
  misc_feature 1..22: note = chemically synthesized
  source 1..22: mol_type = other DNA
atcaaggctatcagtctgtagt

SEQ ID NO: 28903 - DNA, 22 bp, synthetic construct
  misc_feature 1..22: note = chemically synthesized
  source 1..22: mol_type = other DNA
tcagtctgtagttttctttttt

SEQ ID NO: 28904 - DNA, 22 bp, synthetic construct
  misc_feature 1..22: note = chemically synthesized
  source 1..22: mol_type = other DNA
tagttttcttttttggttatgt

SEQ ID NO: 28905 - DNA, 22 bp, synthetic construct
  misc_feature 1..22: note = chemically synthesized
  source 1..22: mol_type = other DNA
tcttttttggttatgtccttcc

SEQ ID NO: 28906 - DNA, 22 bp, synthetic construct
  misc_feature 1..22: note = chemically synthesized
  source 1..22: mol_type = other DNA
cttttttggttatgtccttccc

SEQ ID NO: 28907 - DNA, 22 bp, synthetic construct
  misc_feature 1..22: note = chemically synthesized
  source 1..22: mol_type = other DNA
ttttttggttatgtccttccct

SEQ ID NO: 28908 - DNA, 22 bp, synthetic construct
  misc_feature 1..22: note = chemically synthesized
  source 1..22: mol_type = other DNA
ttttggttatgtccttccctgg

SEQ ID NO: 28909 - DNA, 22 bp, synthetic construct
  misc_feature 1..22: note = chemically synthesized
  source 1..22: mol_type = other DNA
tttggttatgtccttccctggt

SEQ ID NO: 28910 - DNA, 22 bp, synthetic construct
  misc_feature 1..22: note = chemically synthesized
  source 1..22: mol_type = other DNA
ttggttatgtccttccctggtt

SEQ ID NO: 28911 - DNA, 22 bp, synthetic construct
  misc_feature 1..22: note = chemically synthesized
  source 1..22: mol_type = other DNA
tggttatgtccttccctggttt

SEQ ID NO: 28912 - DNA, 22 bp, synthetic construct
  misc_feature 1..22: note = chemically synthesized
  source 1..22: mol_type = other DNA
ggttatgtccttccctggtttt

SEQ ID NO: 28913 - DNA, 22 bp, synthetic construct
  misc_feature 1..22: note = chemically synthesized
  source 1..22: mol_type = other DNA
gttatgtccttccctggttttg

SEQ ID NO: 28914 - DNA, 22 bp, synthetic construct
  misc_feature 1..22: note = chemically synthesized
  source 1..22: mol_type = other DNA
tgtccttccctggttttggtgt

SEQ ID NO: 28915 - DNA, 22 bp, synthetic construct
  misc_feature 1..22: note = chemically synthesized
  source 1..22: mol_type = other DNA
ccctggttttggtgtgatgctg

SEQ ID NO: 28916 - DNA, 22 bp, synthetic construct
  misc_feature 1..22: note = chemically synthesized
  source 1..22: mol_type = other DNA
cctggttttggtgtgatgctgg

SEQ ID NO: 28917 - DNA, 22 bp, synthetic construct
  misc_feature 1..22: note = chemically synthesized
  source 1..22: mol_type = other DNA
gttttggtgtgatgctggcttc

SEQ ID NO: 28918 - DNA, 22 bp, synthetic construct
  misc_feature 1..22: note = chemically synthesized
  source 1..22: mol_type = other DNA
tggtgtgatgctggcttcatag

SEQ ID NO: 28919 - DNA, 22 bp, synthetic construct
  misc_feature 1..22: note = chemically synthesized
  source 1..22: mol_type = other DNA
ggtgtgatgctggcttcataga

SEQ ID NO: 28920 - DNA, 22 bp, synthetic construct
  misc_feature 1..22: note = chemically synthesized
  source 1..22: mol_type = other DNA
gtgtgatgctggcttcatagaa

SEQ ID NO: 28921 - DNA, 22 bp, synthetic construct
  misc_feature 1..22: note = chemically synthesized
  source 1..22: mol_type = other DNA
gcttcatagaatgaattagggc

SEQ ID NO: 28922 - DNA, 22 bp, synthetic construct
  misc_feature 1..22: note = chemically synthesized
  source 1..22: mol_type = other DNA
catagaatgaattagggcaggt

SEQ ID NO: 28923 - DNA, 22 bp, synthetic construct
  misc_feature 1..22: note = chemically synthesized
  source 1..22: mol_type = other DNA
atagaatgaattagggcaggtt

SEQ ID NO: 28924 - DNA, 22 bp, synthetic construct
  misc_feature 1..22: note = chemically synthesized
  source 1..22: mol_type = other DNA
gggcaggttccttctttatctg

SEQ ID NO: 28925 - DNA, 22 bp, synthetic construct
  misc_feature 1..22: note = chemically synthesized
  source 1..22: mol_type = other DNA
cttctttatctgtcttgtagaa

SEQ ID NO: 28926 - DNA, 22 bp, synthetic construct
  misc_feature 1..22: note = chemically synthesized
  source 1..22: mol_type = other DNA
ctttatctgtcttgtagaatag

SEQ ID NO: 28927 - DNA, 22 bp, synthetic construct
  misc_feature 1..22: note = chemically synthesized
  source 1..22: mol_type = other DNA
tttatctgtcttgtagaatagt

SEQ ID NO: 28928 - DNA, 22 bp, synthetic construct
  misc_feature 1..22: note = chemically synthesized
  source 1..22: mol_type = other DNA
tatctgtcttgtagaatagtgt

SEQ ID NO: 28929 - DNA, 22 bp, synthetic construct
  misc_feature 1..22: note = chemically synthesized
  source 1..22: mol_type = other DNA
atctgtcttgtagaatagtgtc

SEQ ID NO: 28930 - DNA, 22 bp, synthetic construct
  misc_feature 1..22: note = chemically synthesized
  source 1..22: mol_type = other DNA
tctgtcttgtagaatagtgtca

SEQ ID NO: 28931 - DNA, 22 bp, synthetic construct
  misc_feature 1..22: note = chemically synthesized
  source 1..22: mol_type = other DNA
tcttgtagaatagtgtcaaaaa

SEQ ID NO: 28932 - DNA, 22 bp, synthetic construct
  misc_feature 1..22: note = chemically synthesized
  source 1..22: mol_type = other DNA
gtagaatagtgtcaaaaagatg

SEQ ID NO: 28933 - DNA, 22 bp, synthetic construct
  misc_feature 1..22: note = chemically synthesized
  source 1..22: mol_type = other DNA
tagaatagtgtcaaaaagatgg

SEQ ID NO: 28934 - DNA, 22 bp, synthetic construct
  misc_feature 1..22: note = chemically synthesized
  source 1..22: mol_type = other DNA
ctctttgaatgtctagtagaat

SEQ ID NO: 28935 - DNA, 22 bp, synthetic construct
  misc_feature 1..22: note = chemically synthesized
  source 1..22: mol_type = other DNA
tttgaatgtctagtagaattct

SEQ ID NO: 28936 - DNA, 22 bp, synthetic construct
  misc_feature 1..22: note = chemically synthesized
  source 1..22: mol_type = other DNA
tgaatgtctagtagaattctgt

SEQ ID NO: 28937 - DNA, 22 bp, synthetic construct
  misc_feature 1..22: note = chemically synthesized
  source 1..22: mol_type = other DNA
gaatgtctagtagaattctgtt

SEQ ID NO: 28938 - DNA, 22 bp, synthetic construct
  misc_feature 1..22: note = chemically synthesized
  source 1..22: mol_type = other DNA
aatgtctagtagaattctgttg

SEQ ID NO: 28939 - DNA, 22 bp, synthetic construct
  misc_feature 1..22: note = chemically synthesized
  source 1..22: mol_type = other DNA
gtagaattctgttgtgaatcca

SEQ ID NO: 28940 - DNA, 22 bp, synthetic construct
  misc_feature 1..22: note = chemically synthesized
  source 1..22: mol_type = other DNA
tgttgtgaatccatctggtcct

SEQ ID NO: 28941 - DNA, 22 bp, synthetic construct
  misc_feature 1..22: note = chemically synthesized
  source 1..22: mol_type = other DNA
ttgtgaatccatctggtcctga

SEQ ID NO: 28942 - DNA, 22 bp, synthetic construct
  misc_feature 1..22: note = chemically synthesized
  source 1..22: mol_type = other DNA
tgaatccatctggtcctgaact

SEQ ID NO: 28943 - DNA, 22 bp, synthetic construct
  misc_feature 1..22: note = chemically synthesized
  source 1..22: mol_type = other DNA
gtcctgaacttttttttggttg

SEQ ID NO: 28944 - DNA, 22 bp, synthetic construct
  misc_feature 1..22: note = chemically synthesized
  source 1..22: mol_type = other DNA
aacttttttttggttggtaatt

SEQ ID NO: 28945 - DNA, 22 bp, synthetic construct
  misc_feature 1..22: note = chemically synthesized
  source 1..22: mol_type = other DNA
ttttttggttggtaatttttta

SEQ ID NO: 28946 - DNA, 22 bp, synthetic construct
  misc_feature 1..22: note = chemically synthesized
  source 1..22: mol_type = other DNA
tttttggttggtaattttttaa

SEQ ID NO: 28947 - DNA, 22 bp, synthetic construct
  misc_feature 1..22: note = chemically synthesized
  source 1..22: mol_type = other DNA
ttttggttggtaattttttaat

SEQ ID NO: 28948 - DNA, 22 bp, synthetic construct
  misc_feature 1..22: note = chemically synthesized
  source 1..22: mol_type = other DNA
tttggttggtaattttttaatt

SEQ ID NO: 28949 - DNA, 22 bp, synthetic construct
  misc_feature 1..22: note = chemically synthesized
  source 1..22: mol_type = other DNA
ttggttggtaattttttaatta

SEQ ID NO: 28950 - DNA, 22 bp, synthetic construct
  misc_feature 1..22: note = chemically synthesized
  source 1..22: mol_type = other DNA
tggttggtaattttttaattac

SEQ ID NO: 28951 - DNA, 22 bp, synthetic construct
  misc_feature 1..22: note = chemically synthesized
  source 1..22: mol_type = other DNA
ggttggtaattttttaattacc

SEQ ID NO: 28952 - DNA, 22 bp, synthetic construct
  misc_feature 1..22: note = chemically synthesized
  source 1..22: mol_type = other DNA
gttggtaattttttaattacca

SEQ ID NO: 28953 - DNA, 22 bp, synthetic construct
  misc_feature 1..22: note = chemically synthesized
  source 1..22: mol_type = other DNA
gtaattttttaattaccaatta

SEQ ID NO: 28954 - DNA, 22 bp, synthetic construct
  misc_feature 1..22: note = chemically synthesized
  source 1..22: mol_type = other DNA
tttaattaccaattaaatctca

SEQ ID NO: 28955 - DNA, 22 bp, synthetic construct
  misc_feature 1..22: note = chemically synthesized
  source 1..22: mol_type = other DNA
ttaattaccaattaaatctcac

SEQ ID NO: 28956 - DNA, 22 bp, synthetic construct
  misc_feature 1..22: note = chemically synthesized
  source 1..22: mol_type = other DNA
taattaccaattaaatctcact

SEQ ID NO: 28957 - DNA, 22 bp, synthetic construct
  misc_feature 1..22: note = chemically synthesized
  source 1..22: mol_type = other DNA
aattaccaattaaatctcactg

SEQ ID NO: 28958 - DNA, 22 bp, synthetic construct
  misc_feature 1..22: note = chemically synthesized
  source 1..22: mol_type = other DNA
attaccaattaaatctcactgc

SEQ ID NO: 28959 - DNA, 22 bp, synthetic construct
  misc_feature 1..22: note = chemically synthesized
  source 1..22: mol_type = other DNA
ccaattaaatctcactgcttgt

SEQ ID NO: 28960 - DNA, 22 bp, synthetic construct
  misc_feature 1..22: note = chemically synthesized
  source 1..22: mol_type = other DNA
aatctcactgcttgttattggt

SEQ ID NO: 28961 - DNA, 22 bp, synthetic construct
  misc_feature 1..22: note = chemically synthesized
  source 1..22: mol_type = other DNA
actgcttgttattggtctgtta

SEQ ID NO: 28962 - DNA, 22 bp, synthetic construct
  misc_feature 1..22: note = chemically synthesized
  source 1..22: mol_type = other DNA
cttgttattggtctgttagtaa

SEQ ID NO: 28963 - DNA, 22 bp, synthetic construct
  misc_feature 1..22: note = chemically synthesized
  source 1..22: mol_type = other DNA
gttattggtctgttagtaaatt

SEQ ID NO: 28964 - DNA, 22 bp, synthetic construct
  misc_feature 1..22: note = chemically synthesized
  source 1..22: mol_type = other DNA
ttattggtctgttagtaaattt

SEQ ID NO: 28965 - DNA, 22 bp, synthetic construct
  misc_feature 1..22: note = chemically synthesized
  source 1..22: mol_type = other DNA
ttggtctgttagtaaatttatt

SEQ ID NO: 28966 - DNA, 22 bp, synthetic construct
  misc_feature 1..22: note = chemically synthesized
  source 1..22: mol_type = other DNA
gtctgttagtaaatttattgag

SEQ ID NO: 28967 - DNA, 22 bp, synthetic construct
  misc_feature 1..22: note = chemically synthesized
  source 1..22: mol_type = other DNA
ttagtaaatttattgaggctca

SEQ ID NO: 28968 - DNA, 22 bp, synthetic construct
  misc_feature 1..22: note = chemically synthesized
  source 1..22: mol_type = other DNA
gtaaatttattgaggctcattt

SEQ ID NO: 28969 - DNA, 22 bp, synthetic construct
  misc_feature 1..22: note = chemically synthesized
  source 1..22: mol_type = other DNA
attgaggctcatttcatggcct

SEQ ID NO: 28970 - DNA, 22 bp, synthetic construct
  misc_feature 1..22: note = chemically synthesized
  source 1..22: mol_type = other DNA
ttgaggctcatttcatggccta

SEQ ID NO: 28971 - DNA, 22 bp, synthetic construct
  misc_feature 1..22: note = chemically synthesized
  source 1..22: mol_type = other DNA
aggctcatttcatggcctatca

SEQ ID NO: 28972 - DNA, 22 bp, synthetic construct
  misc_feature 1..22: note = chemically synthesized
  source 1..22: mol_type = other DNA
atttcatggcctatcatatggt

SEQ ID NO: 28973 - DNA, 22 bp, synthetic construct
  misc_feature 1..22: note = chemically synthesized
  source 1..22: mol_type = other DNA
catggcctatcatatggtctac

SEQ ID NO: 28974 - DNA, 22 bp, synthetic construct
  misc_feature 1..22: note = chemically synthesized
  source 1..22: mol_type = other DNA
atggcctatcatatggtctacc

SEQ ID NO: 28975 - DNA, 22 bp, synthetic construct
  misc_feature 1..22: note = chemically synthesized
  source 1..22: mol_type = other DNA
tcatatggtctaccttggagaa

SEQ ID NO: 28976 - DNA, 22 bp, synthetic construct
  misc_feature 1..22: note = chemically synthesized
  source 1..22: mol_type = other DNA
ccttggagaaatttccacgcgc

SEQ ID NO: 28977 - DNA, 22 bp, synthetic construct
  misc_feature 1..22: note = chemically synthesized
  source 1..22: mol_type = other DNA
ggagaaatttccacgcgctgtt

SEQ ID NO: 28978 - DNA, 22 bp, synthetic construct
  misc_feature 1..22: note = chemically synthesized
  source 1..22: mol_type = other DNA
gagaaatttccacgcgctgttg

SEQ ID NO: 28979 - DNA, 22 bp, synthetic construct
  misc_feature 1..22: note = chemically synthesized
  source 1..22: mol_type = other DNA
ccacgcgctgttgaatagaatg

SEQ ID NO: 28980 - DNA, 22 bp, synthetic construct
  misc_feature 1..22: note = chemically synthesized
  source 1..22: mol_type = other DNA
cacgcgctgttgaatagaatgt

SEQ ID NO: 28981 - DNA, 22 bp, synthetic construct
  misc_feature 1..22: note = chemically synthesized
  source 1..22: mol_type = other DNA
ttgaatagaatgtgtgttctgt

SEQ ID NO: 28982 - DNA, 22 bp, synthetic construct
  misc_feature 1..22: note = chemically synthesized
  source 1..22: mol_type = other DNA
aatagaatgtgtgttctgtggt

SEQ ID NO: 28983 - DNA, 22 bp, synthetic construct
  misc_feature 1..22: note = chemically synthesized
  source 1..22: mol_type = other DNA
tgtggttattggatgaaatgtt

SEQ ID NO: 28984 - DNA, 22 bp, synthetic construct
  misc_feature 1..22: note = chemically synthesized
  source 1..22: mol_type = other DNA
tggttattggatgaaatgttct

SEQ ID NO: 28985 - DNA, 22 bp, synthetic construct
  misc_feature 1..22: note = chemically synthesized
  source 1..22: mol_type = other DNA
ttggatgaaatgttctgtatat

SEQ ID NO: 28986 - DNA, 22 bp, synthetic construct
  misc_feature 1..22: note = chemically synthesized
  source 1..22: mol_type = other DNA
gatgaaatgttctgtatataac

SEQ ID NO: 28987 - DNA, 22 bp, synthetic construct
  misc_feature 1..22: note = chemically synthesized
  source 1..22: mol_type = other DNA
tgtatataactgttaagtccat

SEQ ID NO: 28988 - DNA, 22 bp, synthetic construct
  misc_feature 1..22: note = chemically synthesized
  source 1..22: mol_type = other DNA
tatataactgttaagtccattt

SEQ ID NO: 28989 - DNA, 22 bp, synthetic construct
  misc_feature 1..22: note = chemically synthesized
  source 1..22: mol_type = other DNA
ttaagtccatttgttctaaggt

SEQ ID NO: 28990 - DNA, 22 bp, synthetic construct
  misc_feature 1..22: note = chemically synthesized
  source 1..22: mol_type = other DNA
agtccatttgttctaaggtata

SEQ ID NO: 28991 - DNA, 22 bp, synthetic construct
  misc_feature 1..22: note = chemically synthesized
  source 1..22: mol_type = other DNA
gttctaaggtataatttaaatc

SEQ ID NO: 28992 - DNA, 22 bp, synthetic construct
  misc_feature 1..22: note = chemically synthesized
  source 1..22: mol_type = other DNA
ttctaaggtataatttaaatcc

SEQ ID NO: 28993 - DNA, 22 bp, synthetic construct
  misc_feature 1..22: note = chemically synthesized
  source 1..22: mol_type = other DNA
taaggtataatttaaatccatt

SEQ ID NO: 28994 - DNA, 22 bp, synthetic construct
  misc_feature 1..22: note = chemically synthesized
  source 1..22: mol_type = other DNA
aggtataatttaaatccattat

SEQ ID NO: 28995 - DNA, 22 bp, synthetic construct
  misc_feature 1..22: note = chemically synthesized
  source 1..22: mol_type = other DNA
aaatccattatttttttgttga

SEQ ID NO: 28996 - DNA, 22 bp, synthetic construct
  misc_feature 1..22: note = chemically synthesized
  source 1..22: mol_type = other DNA
aatccattatttttttgttgac

SEQ ID NO: 28997 - DNA, 22 bp, synthetic construct
  misc_feature 1..22: note = chemically synthesized
  source 1..22: mol_type = other DNA
tttttttgttgactttctgtct

SEQ ID NO: 28998 - DNA, 22 bp, synthetic construct
  misc_feature 1..22: note = chemically synthesized
  source 1..22: mol_type = other DNA
ttttgttgactttctgtcttga

SEQ ID NO: 28999 - DNA, 22 bp, synthetic construct
  misc_feature 1..22: note = chemically synthesized
  source 1..22: mol_type = other DNA
tttgttgactttctgtcttgat

SEQ ID NO: 29000 - DNA, 22 bp, synthetic construct
  misc_feature 1..22: note = chemically synthesized
  source 1..22: mol_type = other DNA
ttgttgactttctgtcttgatg

SEQ ID NO: 29001 - DNA, 22 bp, synthetic construct
  misc_feature 1..22: note = chemically synthesized
  source 1..22: mol_type = other DNA
tgttgactttctgtcttgatga

SEQ ID NO: 29002 - DNA, 22 bp, synthetic construct
  misc_feature 1..22: note = chemically synthesized
  source 1..22: mol_type = other DNA
gttgactttctgtcttgatgaa

SEQ ID NO: 29003 - DNA, 22 bp, synthetic construct
  misc_feature 1..22: note = chemically synthesized
  source 1..22: mol_type = other DNA
ttgactttctgtcttgatgaac

SEQ ID NO: 29004 - DNA, 22 bp, synthetic construct
  misc_feature 1..22: note = chemically synthesized
  source 1..22: mol_type = other DNA
actttctgtcttgatgaactgt

SEQ ID NO: 29005 - DNA, 22 bp, synthetic construct
  misc_feature 1..22: note = chemically synthesized
  source 1..22: mol_type = other DNA
tctgtcttgatgaactgtctag

SEQ ID NO: 29006 - DNA, 22 bp, synthetic construct
  misc_feature 1..22: note = chemically synthesized
  source 1..22: mol_type = other DNA
ctgtcttgatgaactgtctagt

SEQ ID NO: 29007 - DNA, 22 bp, synthetic construct
  misc_feature 1..22: note = chemically synthesized
  source 1..22: mol_type = other DNA
tgtcttgatgaactgtctagtg

SEQ ID NO: 29008 - DNA, 22 bp, synthetic construct
  misc_feature 1..22: note = chemically synthesized
  source 1..22: mol_type = other DNA
tcttgatgaactgtctagtgct

SEQ ID NO: 29009 - DNA, 22 bp, synthetic construct
  misc_feature 1..22: note = chemically synthesized
  source 1..22: mol_type = other DNA
gatgaactgtctagtgctgtca

SEQ ID NO: 29010 - DNA, 22 bp, synthetic construct
  misc_feature 1..22: note = chemically synthesized
  source 1..22: mol_type = other DNA
atgaactgtctagtgctgtcaa

SEQ ID NO: 29011 - DNA, 22 bp, synthetic construct
  misc_feature 1..22: note = chemically synthesized
  source 1..22: mol_type = other DNA
tctagtgctgtcaatgaagtat

SEQ ID NO: 29012 - DNA, 22 bp, synthetic construct
  misc_feature 1..22: note = chemically synthesized
  source 1..22: mol_type = other DNA
gtgctgtcaatgaagtattgaa

SEQ ID NO: 29013 - DNA, 22 bp, synthetic construct
  misc_feature 1..22: note = chemically synthesized
  source 1..22: mol_type = other DNA
tcaatgaagtattgaagtcccc

SEQ ID NO: 29014 - DNA, 22 bp, synthetic construct
  misc_feature 1..22: note = chemically synthesized
  source 1..22: mol_type = other DNA
aagtcccccactattattgtgt

SEQ ID NO: 29015 - DNA, 22 bp, synthetic construct
  misc_feature 1..22: note = chemically synthesized
  source 1..22: mol_type = other DNA
ttattgtgttgctgtctatctc

SEQ ID NO: 29016 - DNA, 22 bp, synthetic construct
  misc_feature 1..22: note = chemically synthesized
  source 1..22: mol_type = other DNA
ttgtgttgctgtctatctcatt

SEQ ID NO: 29017 - DNA, 22 bp, synthetic construct
  misc_feature 1..22: note = chemically synthesized
  source 1..22: mol_type = other DNA
tgttgctgtctatctcatttct

SEQ ID NO: 29018 - DNA, 22 bp, synthetic construct
  misc_feature 1..22: note = chemically synthesized
  source 1..22: mol_type = other DNA
ctgtctatctcatttcttaggt

SEQ ID NO: 29019 - DNA, 22 bp, synthetic construct
  misc_feature 1..22: note = chemically synthesized
  source 1..22: mol_type = other DNA
tctatctcatttcttaggtcta

SEQ ID NO: 29020 - DNA, 22 bp, synthetic construct
  misc_feature 1..22: note = chemically synthesized
  source 1..22: mol_type = other DNA
tctcatttcttaggtctattag

SEQ ID NO: 29021 - DNA, 22 bp, synthetic construct
  misc_feature 1..22: note = chemically synthesized
  source 1..22: mol_type = other DNA
atttcttaggtctattagtaat

SEQ ID NO: 29022 - DNA, 22 bp, synthetic construct
  misc_feature 1..22: note = chemically synthesized
  source 1..22: mol_type = other DNA
cttaggtctattagtaattgtt

SEQ ID NO: 29023 - DNA, 22 bp, synthetic construct
  misc_feature 1..22: note = chemically synthesized
  source 1..22: mol_type = other DNA
ttaggtctattagtaattgttc

SEQ ID NO: 29024 - DNA, 22 bp, synthetic construct
  misc_feature 1..22: note = chemically synthesized
  source 1..22: mol_type = other DNA
aggtctattagtaattgttcta

SEQ ID NO: 29025 - DNA, 22 bp, synthetic construct
  misc_feature 1..22: note = chemically synthesized
  source 1..22: mol_type = other DNA
ggtctattagtaattgttctat

SEQ ID NO: 29026 - DNA, 22 bp, synthetic construct
  misc_feature 1..22: note = chemically synthesized
  source 1..22: mol_type = other DNA
ttagtaattgttctataaattt

SEQ ID NO: 29027 - DNA, 22 bp, synthetic construct
  misc_feature 1..22: note = chemically synthesized
  source 1..22: mol_type = other DNA
gtaattgttctataaatttggg

SEQ ID NO: 29028 - DNA, 22 bp, synthetic construct
  misc_feature 1..22: note = chemically synthesized
  source 1..22: mol_type = other DNA
ttctataaatttgggagctcca

SEQ ID NO: 29029 - DNA, 22 bp, synthetic construct
  misc_feature 1..22: note = chemically synthesized
  source 1..22: mol_type = other DNA
tataaatttgggagctccagtg

SEQ ID NO: 29030 - DNA, 22 bp, synthetic construct
  misc_feature 1..22: note = chemically synthesized
  source 1..22: mol_type = other DNA
taaatttgggagctccagtgtt

SEQ ID NO: 29031 - DNA, 22 bp, synthetic construct
  misc_feature 1..22: note = chemically synthesized
  source 1..22: mol_type = other DNA
gggagctccagtgttaggtgca

SEQ ID NO: 29032 - DNA, 22 bp, synthetic construct
  misc_feature 1..22: note = chemically synthesized
  source 1..22: mol_type = other DNA
ggagctccagtgttaggtgcat

SEQ ID NO: 29033 - DNA, 22 bp, synthetic construct
  misc_feature 1..22: note = chemically synthesized
  source 1..22: mol_type = other DNA
cagtgttaggtgcatatatgtt

SEQ ID NO: 29034 - DNA, 22 bp, synthetic construct
  misc_feature 1..22: note = chemically synthesized
  source 1..22: mol_type = other DNA
ggtgcatatatgtttaagattg

SEQ ID NO: 29035 - DNA, 22 bp, synthetic construct
  misc_feature 1..22: note = chemically synthesized
  source 1..22: mol_type = other DNA
aagattgtgatattttcctgtt

SEQ ID NO: 29036 - DNA, 22 bp, synthetic construct
  misc_feature 1..22: note = chemically synthesized
  source 1..22: mol_type = other DNA
agattgtgatattttcctgttg

SEQ ID NO: 29037 - DNA, 22 bp, synthetic construct
  misc_feature 1..22: note = chemically synthesized
  source 1..22: mol_type = other DNA
tgatattttcctgttggacaag

SEQ ID NO: 29038 - DNA, 22 bp, synthetic construct
  misc_feature 1..22: note = chemically synthesized
  source 1..22: mol_type = other DNA
tcctgttggacaaggcctttta

SEQ ID NO: 29039 - DNA, 22 bp, synthetic construct
  misc_feature 1..22: note = chemically synthesized
  source 1..22: mol_type = other DNA
cctgttggacaaggccttttac

SEQ ID NO: 29040 - DNA, 22 bp, synthetic construct
  misc_feature 1..22: note = chemically synthesized
  source 1..22: mol_type = other DNA
ctgttggacaaggccttttacc

SEQ ID NO: 29041 - DNA, 22 bp, synthetic construct
  misc_feature 1..22: note = chemically synthesized
  source 1..22: mol_type = other DNA
ttggacaaggccttttaccatt

SEQ ID NO: 29042 - DNA, 22 bp, synthetic construct
  misc_feature 1..22: note = chemically synthesized
  source 1..22: mol_type = other DNA
gacaaggccttttaccattata

SEQ ID NO: 29043 - DNA, 22 bp, synthetic construct
  misc_feature 1..22: note = chemically synthesized
  source 1..22: mol_type = other DNA
ttaccattatataatgtccctc

SEQ ID NO: 29044 - DNA, 22 bp, synthetic construct
  misc_feature 1..22: note = chemically synthesized
  source 1..22: mol_type = other DNA
taccattatataatgtccctct

SEQ ID NO: 29045 - DNA, 22 bp, synthetic construct
  misc_feature 1..22: note = chemically synthesized
  source 1..22: mol_type = other DNA
accattatataatgtccctctt

SEQ ID NO: 29046 - DNA, 22 bp, synthetic construct
  misc_feature 1..22: note = chemically synthesized
  source 1..22: mol_type = other DNA
ccattatataatgtccctcttt

SEQ ID NO: 29047 - DNA, 22 bp, synthetic construct
  misc_feature 1..22: note = chemically synthesized
  source 1..22: mol_type = other DNA
tataatgtccctctttgtctct

SEQ ID NO: 29048 - DNA, 22 bp, synthetic construct
  misc_feature 1..22: note = chemically synthesized
  source 1..22: mol_type = other DNA
tttgtctcttttaactgctgtt

SEQ ID NO: 29049 - DNA, 22 bp, synthetic construct
  misc_feature 1..22: note = chemically synthesized
  source 1..22: mol_type = other DNA
tgtctcttttaactgctgttgc

SEQ ID NO: 29050 - DNA, 22 bp, synthetic construct
  misc_feature 1..22: note = chemically synthesized
  source 1..22: mol_type = other DNA
gtctcttttaactgctgttgct

SEQ ID NO: 29051 - DNA, 22 bp, synthetic construct
  misc_feature 1..22: note = chemically synthesized
  source 1..22: mol_type = other DNA
tctcttttaactgctgttgctt

SEQ ID NO: 29052 - DNA, 22 bp, synthetic construct
  misc_feature 1..22: note = chemically synthesized
  source 1..22: mol_type = other DNA
ttttaactgctgttgctttaaa

SEQ ID NO: 29053 - DNA, 22 bp, synthetic construct
  misc_feature 1..22: note = chemically synthesized
  source 1..22: mol_type = other DNA
ttaactgctgttgctttaaagt

SEQ ID NO: 29054 - DNA, 22 bp, synthetic construct
  misc_feature 1..22: note = chemically synthesized
  source 1..22: mol_type = other DNA
taactgctgttgctttaaagtt

SEQ ID NO: 29055 - DNA, 22 bp, synthetic construct
  misc_feature 1..22: note = chemically synthesized
  source 1..22: mol_type = other DNA
aactgctgttgctttaaagttt

SEQ ID NO: 29056 - DNA, 22 bp, synthetic construct
  misc_feature 1..22: note = chemically synthesized
  source 1..22: mol_type = other DNA
actgctgttgctttaaagtttg

SEQ ID NO: 29057 - DNA, 22 bp, synthetic construct
  misc_feature 1..22: note = chemically synthesized
  source 1..22: mol_type = other DNA
ctgttgctttaaagtttgtttt

SEQ ID NO: 29058 - DNA, 22 bp, synthetic construct
  misc_feature 1..22: note = chemically synthesized
  source 1..22: mol_type = other DNA
ttgctttaaagtttgttttgcc

SEQ ID NO: 29059 - DNA, 22 bp, synthetic construct
  misc_feature 1..22: note = chemically synthesized
  source 1..22: mol_type = other DNA
ctttaaagtttgttttgcctac

SEQ ID NO: 29060 - DNA, 22 bp, synthetic construct
  misc_feature 1..22: note = chemically synthesized
  source 1..22: mol_type = other DNA
taaagtttgttttgcctactca

SEQ ID NO: 29061 - DNA, 22 bp, synthetic construct
  misc_feature 1..22: note = chemically synthesized
  source 1..22: mol_type = other DNA
aaagtttgttttgcctactcac

SEQ ID NO: 29062 - DNA, 22 bp, synthetic construct
  misc_feature 1..22: note = chemically synthesized
  source 1..22: mol_type = other DNA
aagtttgttttgcctactcact

SEQ ID NO: 29063 - DNA, 22 bp, synthetic construct
  misc_feature 1..22: note = chemically synthesized
  source 1..22: mol_type = other DNA
gttttgcctactcacttttggt

SEQ ID NO: 29064 - DNA, 22 bp, synthetic construct
  misc_feature 1..22: note = chemically synthesized
  source 1..22: mol_type = other DNA
ttttgcctactcacttttggtg

SEQ ID NO: 29065 - DNA, 22 bp, synthetic construct
  misc_feature 1..22: note = chemically synthesized
  source 1..22: mol_type = other DNA
tgcctactcacttttggtggcc

SEQ ID NO: 29066 - DNA, 22 bp, synthetic construct
  misc_feature 1..22: note = chemically synthesized
  source 1..22: mol_type = other DNA
gcctactcacttttggtggcca

SEQ ID NO: 29067 - DNA, 22 bp, synthetic construct
  misc_feature 1..22: note = chemically synthesized
  source 1..22: mol_type = other DNA
cctactcacttttggtggccat

SEQ ID NO: 29068 - DNA, 22 bp, synthetic construct
  misc_feature 1..22: note = chemically synthesized
  source 1..22: mol_type = other DNA
ctcacttttggtggccatttgc

SEQ ID NO: 29069 - DNA, 22 bp, synthetic construct
  misc_feature 1..22: note = chemically synthesized
  source 1..22: mol_type = other DNA
acttttggtggccatttgcatg

SEQ ID NO: 29070 - DNA, 22 bp, synthetic construct
  misc_feature 1..22: note = chemically synthesized
  source 1..22: mol_type = other DNA
ttggtggccatttgcatgaaat

SEQ ID NO: 29071 - DNA, 22 bp, synthetic construct
  misc_feature 1..22: note = chemically synthesized
  source 1..22: mol_type = other DNA
tggtggccatttgcatgaaata

SEQ ID NO: 29072 - DNA, 22 bp, synthetic construct
  misc_feature 1..22: note = chemically synthesized
  source 1..22: mol_type = other DNA
ggtggccatttgcatgaaatac

SEQ ID NO: 29073 - DNA, 22 bp, synthetic construct
  misc_feature 1..22: note = chemically synthesized
  source 1..22: mol_type = other DNA
gtggccatttgcatgaaatacc

SEQ ID NO: 29074 - DNA, 22 bp, synthetic construct
  misc_feature 1..22: note = chemically synthesized
  source 1..22: mol_type = other DNA
gcatgaaatacctttttcaccc

SEQ ID NO: 29075 - DNA, 22 bp, synthetic construct
  misc_feature 1..22: note = chemically synthesized
  source 1..22: mol_type = other DNA
catgaaatacctttttcaccct

SEQ ID NO: 29076 - DNA, 22 bp, synthetic construct
  misc_feature 1..22: note = chemically synthesized
  source 1..22: mol_type = other DNA
tttcacccttttaagtggagca

SEQ ID NO: 29077 - DNA, 22 bp, synthetic construct
  misc_feature 1..22: note = chemically synthesized
  source 1..22: mol_type = other DNA
ttcacccttttaagtggagcat

SEQ ID NO: 29078 - DNA, 22 bp, synthetic construct
  misc_feature 1..22: note = chemically synthesized
  source 1..22: mol_type = other DNA
tcacccttttaagtggagcatt

SEQ ID NO: 29079 - DNA, 22 bp, synthetic construct
  misc_feature 1..22: note = chemically synthesized
  source 1..22: mol_type = other DNA
cacccttttaagtggagcattt

SEQ ID NO: 29080 - DNA, 22 bp, synthetic construct
  misc_feature 1..22: note = chemically synthesized
  source 1..22: mol_type = other DNA
acccttttaagtggagcattta

SEQ ID NO: 29081 - DNA, 22 bp, synthetic construct
  misc_feature 1..22: note = chemically synthesized
  source 1..22: mol_type = other DNA
ttaagtggagcatttaggccat

SEQ ID NO: 29082 - DNA, 22 bp, synthetic construct
  misc_feature 1..22: note = chemically synthesized
  source 1..22: mol_type = other DNA
taagtggagcatttaggccatt

SEQ ID NO: 29083 - DNA, 22 bp, synthetic construct
  misc_feature 1..22: note = chemically synthesized
  source 1..22: mol_type = other DNA
aagtggagcatttaggccattt

SEQ ID NO: 29084 - DNA, 22 bp, synthetic construct
  misc_feature 1..22: note = chemically synthesized
  source 1..22: mol_type = other DNA
agtggagcatttaggccattta

SEQ ID NO: 29085 - DNA, 22 bp, synthetic construct
  misc_feature 1..22: note = chemically synthesized
  source 1..22: mol_type = other DNA
aggccatttacattcaatgtta

SEQ ID NO: 29086 - DNA, 22 bp, synthetic construct
  misc_feature 1..22: note = chemically synthesized
  source 1..22: mol_type = other DNA
ggccatttacattcaatgttag

SEQ ID NO: 29087 - DNA, 22 bp, synthetic construct
  misc_feature 1..22: note = chemically synthesized
  source 1..22: mol_type = other DNA
acattcaatgttagtaatgtaa

SEQ ID NO: 29088 - DNA, 22 bp, synthetic construct
  misc_feature 1..22: note = chemically synthesized
  source 1..22: mol_type = other DNA
cattcaatgttagtaatgtaaa

SEQ ID NO: 29089 - DNA, 22 bp, synthetic construct
  misc_feature 1..22: note = chemically synthesized
  source 1..22: mol_type = other DNA
aatgttagtaatgtaaatgcct

SEQ ID NO: 29090 - DNA, 22 bp, synthetic construct
  misc_feature 1..22: note = chemically synthesized
  source 1..22: mol_type = other DNA
gtaatgtaaatgcctggctatg

SEQ ID NO: 29091 - DNA, 22 bp, synthetic construct
  misc_feature 1..22: note = chemically synthesized
  source 1..22: mol_type = other DNA
gctatgccaggcaggaatggcc

SEQ ID NO: 29092 - DNA, 22 bp, synthetic construct
  misc_feature 1..22: note = chemically synthesized
  source 1..22: mol_type = other DNA
tgccaggcaggaatggcctgct

SEQ ID NO: 29093 - DNA, 22 bp, synthetic construct
  misc_feature 1..22: note = chemically synthesized
  source 1..22: mol_type = other DNA
ctcagggacccagtgagctccc

SEQ ID NO: 29094 - DNA, 22 bp, synthetic construct
  misc_feature 1..22: note = chemically synthesized
  source 1..22: mol_type = other DNA
agggacccagtgagctcccagg

SEQ ID NO: 29095 - DNA, 22 bp, synthetic construct
  misc_feature 1..22: note = chemically synthesized
  source 1..22: mol_type = other DNA
ccagggcctttctcactgcttc

SEQ ID NO: 29096 - DNA, 22 bp, synthetic construct
  misc_feature 1..22: note = chemically synthesized
  source 1..22: mol_type = other DNA
tctcactgcttcctctacacct

SEQ ID NO: 29097 - DNA, 22 bp, synthetic construct
  misc_feature 1..22: note = chemically synthesized
  source 1..22: mol_type = other DNA
ctcactgcttcctctacacctg

SEQ ID NO: 29098 - DNA, 22 bp, synthetic construct
  misc_feature 1..22: note = chemically synthesized
  source 1..22: mol_type = other DNA
tcactgcttcctctacacctgt

SEQ ID NO: 29099 - DNA, 22 bp, synthetic construct
  misc_feature 1..22: note = chemically synthesized
  source 1..22: mol_type = other DNA
actgcttcctctacacctgtat

SEQ ID NO: 29100 - DNA, 22 bp, synthetic construct
  misc_feature 1..22: note = chemically synthesized
  source 1..22: mol_type = other DNA
cttcctctacacctgtattttg

SEQ ID NO: 29101 - DNA, 22 bp, synthetic construct
  misc_feature 1..22: note = chemically synthesized
  source 1..22: mol_type = other DNA
cctctacacctgtattttgctc

SEQ ID NO: 29102 - DNA, 22 bp, synthetic construct
  misc_feature 1..22: note = chemically synthesized
  source 1..22: mol_type = other DNA
ctctacacctgtattttgctca

SEQ ID NO: 29103 - DNA, 22 bp, synthetic construct
  misc_feature 1..22: note = chemically synthesized
  source 1..22: mol_type = other DNA
tacacctgtattttgctcagct

SEQ ID NO: 29104 - DNA, 22 bp, synthetic construct
  misc_feature 1..22: note = chemically synthesized
  source 1..22: mol_type = other DNA
cacctgtattttgctcagctct

SEQ ID NO: 29105 - DNA, 22 bp, synthetic construct
  misc_feature 1..22: note = chemically synthesized
  source 1..22: mol_type = other DNA
tattttgctcagctctctaagt

SEQ ID NO: 29106 - DNA, 22 bp, synthetic construct
  misc_feature 1..22: note = chemically synthesized
  source 1..22: mol_type = other DNA
tgctcagctctctaagttaact

SEQ ID NO: 29107 - DNA, 22 bp, synthetic construct
  misc_feature 1..22: note = chemically synthesized
  source 1..22: mol_type = other DNA
gctcagctctctaagttaactc

SEQ ID NO: 29108 - DNA, 22 bp, synthetic construct
  misc_feature 1..22: note = chemically synthesized
  source 1..22: mol_type = other DNA
ctcagctctctaagttaactca

SEQ ID NO: 29109 - DNA, 22 bp, synthetic construct
  misc_feature 1..22: note = chemically synthesized
  source 1..22: mol_type = other DNA
agctctctaagttaactcaact

SEQ ID NO: 29110 - DNA, 22 bp, synthetic construct
  misc_feature 1..22: note = chemically synthesized
  source 1..22: mol_type = other DNA
tctaagttaactcaactccagg

SEQ ID NO: 29111 - DNA, 22 bp, synthetic construct
  misc_feature 1..22: note = chemically synthesized
  source 1..22: mol_type = other DNA
taagttaactcaactccaggta

SEQ ID NO: 29112 - DNA, 22 bp, synthetic construct
  misc_feature 1..22: note = chemically synthesized
  source 1..22: mol_type = other DNA
agttaactcaactccaggtaag

SEQ ID NO: 29113 - DNA, 22 bp, synthetic construct
  misc_feature 1..22: note = chemically synthesized
  source 1..22: mol_type = other DNA
actcaactccaggtaaggtcag

SEQ ID NO: 29114 - DNA, 22 bp, synthetic construct
  misc_feature 1..22: note = chemically synthesized
  source 1..22: mol_type = other DNA
aactccaggtaaggtcagaaac

SEQ ID NO: 29115 - DNA, 22 bp, synthetic construct
  misc_feature 1..22: note = chemically synthesized
  source 1..22: mol_type = other DNA
caggtaaggtcagaaacttctc

SEQ ID NO: 29116 - DNA, 22 bp, synthetic construct
  misc_feature 1..22: note = chemically synthesized
  source 1..22: mol_type = other DNA
ctcccacaaacagaccttcagt

SEQ ID NO: 29117 - DNA, 22 bp, synthetic construct
  misc_feature 1..22: note = chemically synthesized
  source 1..22: mol_type = other DNA
tcccacaaacagaccttcagtt

SEQ ID NO: 29118 - DNA, 22 bp, synthetic construct
  misc_feature 1..22: note = chemically synthesized
  source 1..22: mol_type = other DNA
ccacaaacagaccttcagtttc

SEQ ID NO: 29119 - DNA, 22 bp, synthetic construct
  misc_feature 1..22: note = chemically synthesized
  source 1..22: mol_type = other DNA
cagtttctccagtgggagtgtg

SEQ ID NO: 29120 - DNA, 22 bp, synthetic construct
  misc_feature 1..22: note = chemically synthesized
  source 1..22: mol_type = other DNA
agtttctccagtgggagtgtgt

SEQ ID NO: 29121 - DNA, 22 bp, synthetic construct
  misc_feature 1..22: note = chemically synthesized
  source 1..22: mol_type = other DNA
ctccagtgggagtgtgtgttta

SEQ ID NO: 29122 - DNA, 22 bp, synthetic construct
  misc_feature 1..22: note = chemically synthesized
  source 1..22: mol_type = other DNA
tccagtgggagtgtgtgtttag

SEQ ID NO: 29123 - DNA, 22 bp, synthetic construct
  misc_feature 1..22: note = chemically synthesized
  source 1..22: mol_type = other DNA
cagtgggagtgtgtgtttagga

SEQ ID NO: 29124 - DNA, 22 bp, synthetic construct
  misc_feature 1..22: note = chemically synthesized
  source 1..22: mol_type = other DNA
aggagaggaggatctccctttc

SEQ ID NO: 29125 - DNA, 22 bp, synthetic construct
  misc_feature 1..22: note = chemically synthesized
  source 1..22: mol_type = other DNA
ggagaggaggatctccctttcc

SEQ ID NO: 29126 - DNA, 22 bp, synthetic construct
  misc_feature 1..22: note = chemically synthesized
  source 1..22: mol_type = other DNA
cctttcccacttccgcagttgg

SEQ ID NO: 29127 - DNA, 22 bp, synthetic construct
  misc_feature 1..22: note = chemically synthesized
  source 1..22: mol_type = other DNA
tcccacttccgcagttggggca

SEQ ID NO: 29128 - DNA, 22 bp, synthetic construct
  misc_feature 1..22: note = chemically synthesized
  source 1..22: mol_type = other DNA
cccacttccgcagttggggcac

SEQ ID NO: 29129 - DNA, 22 bp, synthetic construct
  misc_feature 1..22: note = chemically synthesized
  source 1..22: mol_type = other DNA
ccacttccgcagttggggcact

SEQ ID NO: 29130 - DNA, 22 bp, synthetic construct
  misc_feature 1..22: note = chemically synthesized
  source 1..22: mol_type = other DNA
ccgcagttggggcactcacagt

SEQ ID NO: 29131 - DNA, 22 bp, synthetic construct
  misc_feature 1..22: note = chemically synthesized
  source 1..22: mol_type = other DNA
cgcagttggggcactcacagta

SEQ ID NO: 29132 - DNA, 22 bp, synthetic construct
  misc_feature 1..22: note = chemically synthesized
  source 1..22: mol_type = other DNA
gggcactcacagtatttggggt

SEQ ID NO: 29133 - DNA, 22 bp, synthetic construct
  misc_feature 1..22: note = chemically synthesized
  source 1..22: mol_type = other DNA
acagtatttggggtgtctcctg

SEQ ID NO: 29134 - DNA, 22 bp, synthetic construct
  misc_feature 1..22: note = chemically synthesized
  source 1..22: mol_type = other DNA
ggggtgtctcctgggtcctgca

SEQ ID NO: 29135 - DNA, 22 bp, synthetic construct
  misc_feature 1..22: note = chemically synthesized
  source 1..22: mol_type = other DNA
gggtgtctcctgggtcctgcag

SEQ ID NO: 29136 - DNA, 22 bp, synthetic construct
  misc_feature 1..22: note = chemically synthesized
  source 1..22: mol_type = other DNA
ctgggtcctgcaggagcaatct

SEQ ID NO: 29137 - DNA, 22 bp, synthetic construct
  misc_feature 1..22: note = chemically synthesized
  source 1..22: mol_type = other DNA
ggtcctgcaggagcaatctact

SEQ ID NO: 29138 - DNA, 22 bp, synthetic construct
  misc_feature 1..22: note = chemically synthesized
  source 1..22: mol_type = other DNA
caggagcaatctacttccttca

SEQ ID NO: 29139 - DNA, 22 bp, synthetic construct
  misc_feature 1..22: note = chemically synthesized
  source 1..22: mol_type = other DNA
cttccttcagagggtctgtggg

SEQ ID NO: 29140 - DNA, 22 bp, synthetic construct
  misc_feature 1..22: note = chemically synthesized
  source 1..22: mol_type = other DNA
ccttcagagggtctgtgggtcc

SEQ ID NO: 29141 - DNA, 22 bp, synthetic construct
  misc_feature 1..22: note = chemically synthesized
  source 1..22: mol_type = other DNA
cttcagagggtctgtgggtcct

SEQ ID NO: 29142 - DNA, 22 bp, synthetic construct
  misc_feature 1..22: note = chemically synthesized
  source 1..22: mol_type = other DNA
cagagggtctgtgggtcctctc

SEQ ID NO: 29143 - DNA, 22 bp, synthetic construct
  misc_feature 1..22: note = chemically synthesized
  source 1..22: mol_type = other DNA
agagggtctgtgggtcctctca

SEQ ID NO: 29144 - DNA, 22 bp, synthetic construct
  misc_feature 1..22: note = chemically synthesized
  source 1..22: mol_type = other DNA
tgggtcctctcaggattgctgg

SEQ ID NO: 29145 - DNA, 22 bp, synthetic construct
  misc_feature 1..22: note = chemically synthesized
  source 1..22: mol_type = other DNA
tcaggattgctggtttgttctt

SEQ ID NO: 29146 - DNA, 22 bp, synthetic construct
  misc_feature 1..22: note = chemically synthesized
  source 1..22: mol_type = other DNA
aggattgctggtttgttcttgc

SEQ ID NO: 29147 - DNA, 22 bp, synthetic construct
  misc_feature 1..22: note = chemically synthesized
  source 1..22: mol_type = other DNA
ctggtttgttcttgcagtctat

SEQ ID NO: 29148 - DNA, 22 bp, synthetic construct
  misc_feature 1..22: note = chemically synthesized
  source 1..22: mol_type = other DNA
gtttgttcttgcagtctatctg

SEQ ID NO: 29149 - DNA, 22 bp, synthetic construct
  misc_feature 1..22: note = chemically synthesized
  source 1..22: mol_type = other DNA
gttcttgcagtctatctgcagc

SEQ ID NO: 29150 - DNA, 22 bp, synthetic construct
  misc_feature 1..22: note = chemically synthesized
  source 1..22: mol_type = other DNA
ttcttgcagtctatctgcagct

SEQ ID NO: 29151 - DNA, 22 bp, synthetic construct
  misc_feature 1..22: note = chemically synthesized
  source 1..22: mol_type = other DNA
ttgcagtctatctgcagctaaa

SEQ ID NO: 29152 - DNA, 22 bp, synthetic construct
  misc_feature 1..22: note = chemically synthesized
  source 1..22: mol_type = other DNA
gcagtctatctgcagctaaaat

SEQ ID NO: 29153 - DNA, 22 bp, synthetic construct
  misc_feature 1..22: note = chemically synthesized
  source 1..22: mol_type = other DNA
cagtctatctgcagctaaaatt

SEQ ID NO: 29154 - DNA, 22 bp, synthetic construct
  misc_feature 1..22: note = chemically synthesized
  source 1..22: mol_type = other DNA
tctgcagctaaaattcacaatg

SEQ ID NO: 29155 - DNA, 22 bp, synthetic construct
  misc_feature 1..22: note = chemically synthesized
  source 1..22: mol_type = other DNA
cagctaaaattcacaatgcgag

SEQ ID NO: 29156 - DNA, 22 bp, synthetic construct
  misc_feature 1..22: note = chemically synthesized
  source 1..22: mol_type = other DNA
aaattcacaatgcgagcctcca

SEQ ID NO: 29157 - DNA, 22 bp, synthetic construct
  misc_feature 1..22: note = chemically synthesized
  source 1..22: mol_type = other DNA
acaatgcgagcctccacatgct

SEQ ID NO: 29158 - DNA, 22 bp, synthetic construct
  misc_feature 1..22: note = chemically synthesized
  source 1..22: mol_type = other DNA
cacatgctgctctgtccatctg

SEQ ID NO: 29159 - DNA, 22 bp, synthetic construct
  misc_feature 1..22: note = chemically synthesized
  source 1..22: mol_type = other DNA
ctctgtccatctgagttggagc

SEQ ID NO: 29160 - DNA, 22 bp, synthetic construct
  misc_feature 1..22: note = chemically synthesized
  source 1..22: mol_type = other DNA
tgtccatctgagttggagctgc

SEQ ID NO: 29161 - DNA, 22 bp, synthetic construct
  misc_feature 1..22: note = chemically synthesized
  source 1..22: mol_type = other DNA
tccatctgagttggagctgcaa

SEQ ID NO: 29162 - DNA, 22 bp, synthetic construct
  misc_feature 1..22: note = chemically synthesized
  source 1..22: mol_type = other DNA
agttggagctgcaatctaggcc

SEQ ID NO: 29163 - DNA, 22 bp, synthetic construct
  misc_feature 1..22: note = chemically synthesized
  source 1..22: mol_type = other DNA
gagctgcaatctaggcctacct

SEQ ID NO: 29164 - DNA, 22 bp, synthetic construct
  misc_feature 1..22: note = chemically synthesized
  source 1..22: mol_type = other DNA
caatctaggcctacctcccatc

SEQ ID NO: 29165 - DNA, 22 bp, synthetic construct
  misc_feature 1..22: note = chemically synthesized
  source 1..22: mol_type = other DNA
ggcctacctcccatccgccaag

SEQ ID NO: 29166 - DNA, 22 bp, synthetic construct
  misc_feature 1..22: note = chemically synthesized
  source 1..22: mol_type = other DNA
cctcccatccgccaagatcctg

SEQ ID NO: 29167 - DNA, 22 bp, synthetic construct
  misc_feature 1..22: note = chemically synthesized
  source 1..22: mol_type = other DNA
ccatccgccaagatcctgagaa

SEQ ID NO: 29168 - DNA, 22 bp, synthetic construct
  misc_feature 1..22: note = chemically synthesized
  source 1..22: mol_type = other DNA
agaagttggggattatatttca

SEQ ID NO: 29169 - DNA, 22 bp, synthetic construct
  misc_feature 1..22: note = chemically synthesized
  source 1..22: mol_type = other DNA
gggattatatttcaacatgaga

SEQ ID NO: 29170 - DNA, 22 bp, synthetic construct
  misc_feature 1..22: note = chemically synthesized
  source 1..22: mol_type = other DNA
tatttcaacatgagatttggag

SEQ ID NO: 29171 - DNA, 22 bp, synthetic construct
  misc_feature 1..22: note = chemically synthesized
  source 1..22: mol_type = other DNA
caacatgagatttggagggaac

SEQ ID NO: 29172 - DNA, 22 bp, synthetic construct
  misc_feature 1..22: note = chemically synthesized
  source 1..22: mol_type = other DNA
aacatgagatttggagggaaca

SEQ ID NO: 29173 - DNA, 22 bp, synthetic construct
  misc_feature 1..22: note = chemically synthesized
  source 1..22: mol_type = other DNA
ggagggaacaaacatccaaacc

SEQ ID NO: 29174 - DNA, 22 bp, synthetic construct
  misc_feature 1..22: note = chemically synthesized
  source 1..22: mol_type = other DNA
gagggaacaaacatccaaacca

SEQ ID NO: 29175 - DNA, 22 bp, synthetic construct
  misc_feature 1..22: note = chemically synthesized
  source 1..22: mol_type = other DNA
tattcttttgcacatggatatc

SEQ ID NO: 29176 - DNA, 22 bp, synthetic construct
  misc_feature 1..22: note = chemically synthesized
  source 1..22: mol_type = other DNA
attcttttgcacatggatatcc

SEQ ID NO: 29177 - DNA, 22 bp, synthetic construct
  misc_feature 1..22: note = chemically synthesized
  source 1..22: mol_type = other DNA
ttcttttgcacatggatatcca

SEQ ID NO: 29178 - DNA, 22 bp, synthetic construct
  misc_feature 1..22: note = chemically synthesized
  source 1..22: mol_type = other DNA
ttttgcacatggatatccaatg

SEQ ID NO: 29179 - DNA, 22 bp, synthetic construct
  misc_feature 1..22: note = chemically synthesized
  source 1..22: mol_type = other DNA
ttgcacatggatatccaatgga

SEQ ID NO: 29180 - DNA, 22 bp, synthetic construct
  misc_feature 1..22: note = chemically synthesized
  source 1..22: mol_type = other DNA
tgcacatggatatccaatggat

SEQ ID NO: 29181 - DNA, 22 bp, synthetic construct
  misc_feature 1..22: note = chemically synthesized
  source 1..22: mol_type = other DNA
gcacatggatatccaatggata

SEQ ID NO: 29182 - DNA, 22 bp, synthetic construct
  misc_feature 1..22: note = chemically synthesized
  source 1..22: mol_type = other DNA
cacatggatatccaatggatat

SEQ ID NO: 29183 - DNA, 22 bp, synthetic construct
  misc_feature 1..22: note = chemically synthesized
  source 1..22: mol_type = other DNA
tttcagcaccatttcttgaaca

SEQ ID NO: 29184 - DNA, 22 bp, synthetic construct
  misc_feature 1..22: note = chemically synthesized
  source 1..22: mol_type = other DNA
ttcagcaccatttcttgaacac

SEQ ID NO: 29185 - DNA, 22 bp, synthetic construct
  misc_feature 1..22: note = chemically synthesized
  source 1..22: mol_type = other DNA
tcagcaccatttcttgaacact

SEQ ID NO: 29186 - DNA, 22 bp, synthetic construct
  misc_feature 1..22: note = chemically synthesized
  source 1..22: mol_type = other DNA
cagcaccatttcttgaacactg

SEQ ID NO: 29187 - DNA, 22 bp, synthetic construct
  misc_feature 1..22: note = chemically synthesized
  source 1..22: mol_type = other DNA
agcaccatttcttgaacactgt

SEQ ID NO: 29188 - DNA, 22 bp, synthetic construct
  misc_feature 1..22: note = chemically synthesized
  source 1..22: mol_type = other DNA
cttgaacactgtgtcctttcct

SEQ ID NO: 29189 - DNA, 22 bp, synthetic construct
  misc_feature 1..22: note = chemically synthesized
  source 1..22: mol_type = other DNA
ttgaacactgtgtcctttcctc

SEQ ID NO: 29190 - DNA, 22 bp, synthetic construct
  misc_feature 1..22: note = chemically synthesized
  source 1..22: mol_type = other DNA
gaacactgtgtcctttcctcaa

SEQ ID NO: 29191 - DNA, 22 bp, synthetic construct
  misc_feature 1..22: note = chemically synthesized
  source 1..22: mol_type = other DNA
aacactgtgtcctttcctcaat

SEQ ID NO: 29192 - DNA, 22 bp, synthetic construct
  misc_feature 1..22: note = chemically synthesized
  source 1..22: mol_type = other DNA
tgtcctttcctcaatgtatatt

SEQ ID NO: 29193 - DNA, 22 bp, synthetic construct
  misc_feature 1..22: note = chemically synthesized
  source 1..22: mol_type = other DNA
tcctcaatgtatattcttgtca

SEQ ID NO: 29194 - DNA, 22 bp, synthetic construct
  misc_feature 1..22: note = chemically synthesized
  source 1..22: mol_type = other DNA
cctcaatgtatattcttgtcac

SEQ ID NO: 29195 - DNA, 22 bp, synthetic construct
  misc_feature 1..22: note = chemically synthesized
  source 1..22: mol_type = other DNA
ctcaatgtatattcttgtcacc

SEQ ID NO: 29196 - DNA, 22 bp, synthetic construct
  misc_feature 1..22: note = chemically synthesized
  source 1..22: mol_type = other DNA
aatgtatattcttgtcaccttt

SEQ ID NO: 29197 - DNA, 22 bp, synthetic construct
  misc_feature 1..22: note = chemically synthesized
  source 1..22: mol_type = other DNA
ttgtcacctttgttgaaaatct

SEQ ID NO: 29198 - DNA, 22 bp, synthetic construct
  misc_feature 1..22: note = chemically synthesized
  source 1..22: mol_type = other DNA
gtcacctttgttgaaaatctgt

SEQ ID NO: 29199 - DNA, 22 bp, synthetic construct
  misc_feature 1..22: note = chemically synthesized
  source 1..22: mol_type = other DNA
tcacctttgttgaaaatctgtt

SEQ ID NO: 29200 - DNA, 22 bp, synthetic construct
  misc_feature 1..22: note = chemically synthesized
  source 1..22: mol_type = other DNA
tgttgaaaatctgttggctata

SEQ ID NO: 29201 - DNA, 22 bp, synthetic construct
  misc_feature 1..22: note = chemically synthesized
  source 1..22: mol_type = other DNA
gttgaaaatctgttggctataa

SEQ ID NO: 29202 - DNA, 22 bp, synthetic construct
  misc_feature 1..22: note = chemically synthesized
  source 1..22: mol_type = other DNA
ttgaaaatctgttggctataaa

SEQ ID NO: 29203 - DNA, 22 bp, synthetic construct
  misc_feature 1..22: note = chemically synthesized
  source 1..22: mol_type = other DNA
aaaatctgttggctataaatat

SEQ ID NO: 29204 - DNA, 22 bp, synthetic construct
  misc_feature 1..22: note = chemically synthesized
  source 1..22: mol_type = other DNA
ttggctataaatatgtggatgc

SEQ ID NO: 29205 - DNA, 22 bp, synthetic construct
  misc_feature 1..22: note = chemically synthesized
  source 1..22: mol_type = other DNA
gctataaatatgtggatgcatt

SEQ ID NO: 29206 - DNA, 22 bp, synthetic construct
  misc_feature 1..22: note = chemically synthesized
  source 1..22: mol_type = other DNA
taaatatgtggatgcatttcta

SEQ ID NO: 29207 - DNA, 22 bp, synthetic construct
  misc_feature 1..22: note = chemically synthesized
  source 1..22: mol_type = other DNA
ctaggttctctattctcttcca

SEQ ID NO: 29208 - DNA, 22 bp, synthetic construct
  misc_feature 1..22: note = chemically synthesized
  source 1..22: mol_type = other DNA
taggttctctattctcttccat

SEQ ID NO: 29209 - DNA, 22 bp, synthetic construct
  misc_feature 1..22: note = chemically synthesized
  source 1..22: mol_type = other DNA
ggttctctattctcttccattg

SEQ ID NO: 29210 - DNA, 22 bp, synthetic construct
  misc_feature 1..22: note = chemically synthesized
  source 1..22: mol_type = other DNA
tctattctcttccattggtcta

SEQ ID NO: 29211 - DNA, 22 bp, synthetic construct
  misc_feature 1..22: note = chemically synthesized
  source 1..22: mol_type = other DNA
tattctcttccattggtctaag

SEQ ID NO: 29212 - DNA, 22 bp, synthetic construct
  misc_feature 1..22: note = chemically synthesized
  source 1..22: mol_type = other DNA
ttctcttccattggtctaagtg

SEQ ID NO: 29213 - DNA, 22 bp, synthetic construct
  misc_feature 1..22: note = chemically synthesized
  source 1..22: mol_type = other DNA
tcttccattggtctaagtgtct

SEQ ID NO: 29214 - DNA, 22 bp, synthetic construct
  misc_feature 1..22: note = chemically synthesized
  source 1..22: mol_type = other DNA
ttccattggtctaagtgtctgt

SEQ ID NO: 29215 - DNA, 22 bp, synthetic construct
  misc_feature 1..22: note = chemically synthesized
  source 1..22: mol_type = other DNA
ccattggtctaagtgtctgttc

SEQ ID NO: 29216 - DNA, 22 bp, synthetic construct
  misc_feature 1..22: note = chemically synthesized
  source 1..22: mol_type = other DNA
cattggtctaagtgtctgttct

SEQ ID NO: 29217 - DNA, 22 bp, synthetic construct
  misc_feature 1..22: note = chemically synthesized
  source 1..22: mol_type = other DNA
gtctaagtgtctgttctaatgt

SEQ ID NO: 29218 - DNA, 22 bp, synthetic construct
  misc_feature 1..22: note = chemically synthesized
  source 1..22: mol_type = other DNA
agtgtctgttctaatgtcagta

SEQ ID NO: 29219 - DNA, 22 bp, synthetic construct
  misc_feature 1..22: note = chemically synthesized
  source 1..22: mol_type = other DNA
ttctaatgtcagtatcatgctg

SEQ ID NO: 29220 - DNA, 22 bp, synthetic construct
  misc_feature 1..22: note = chemically synthesized
  source 1..22: mol_type = other DNA
taatgtcagtatcatgctgttt

SEQ ID NO: 29221 - DNA, 22 bp, synthetic construct
  misc_feature 1..22: note = chemically synthesized
  source 1..22: mol_type = other DNA
atgtcagtatcatgctgtttag

SEQ ID NO: 29222 - DNA, 22 bp, synthetic construct
  misc_feature 1..22: note = chemically synthesized
  source 1..22: mol_type = other DNA
tttaggttcctatacttttgta

SEQ ID NO: 29223 - DNA, 22 bp, synthetic construct
  misc_feature 1..22: note = chemically synthesized
  source 1..22: mol_type = other DNA
aggttcctatacttttgtaata

SEQ ID NO: 29224 - DNA, 22 bp, synthetic construct
  misc_feature 1..22: note = chemically synthesized
  source 1..22: mol_type = other DNA
ggttcctatacttttgtaatat

SEQ ID NO: 29225 - DNA, 22 bp, synthetic construct
  misc_feature 1..22: note = chemically synthesized
  source 1..22: mol_type = other DNA
ctatacttttgtaatatacttt

SEQ ID NO: 29226 - DNA, 22 bp, synthetic construct
  misc_feature 1..22: note = chemically synthesized
  source 1..22: mol_type = other DNA
tacttttgtaatatactttgaa

SEQ ID NO: 29227 - DNA, 22 bp, synthetic construct
  misc_feature 1..22: note = chemically synthesized
  source 1..22: mol_type = other DNA
ttgtaatatactttgaaatcag

SEQ ID NO: 29228 - DNA, 22 bp, synthetic construct
  misc_feature 1..22: note = chemically synthesized
  source 1..22: mol_type = other DNA
tgtaatatactttgaaatcagg

SEQ ID NO: 29229 - DNA, 22 bp, synthetic construct
  misc_feature 1..22: note = chemically synthesized
  source 1..22: mol_type = other DNA
gtaatatactttgaaatcaggt

SEQ ID NO: 29230 - DNA, 22 bp, synthetic construct
  misc_feature 1..22: note = chemically synthesized
  source 1..22: mol_type = other DNA
taatatactttgaaatcaggta

SEQ ID NO: 29231 - DNA, 22 bp, synthetic construct
  misc_feature 1..22: note = chemically synthesized
  source 1..22: mol_type = other DNA
tgaaatcaggtagtatgatacc

SEQ ID NO: 29232 - DNA, 22 bp, synthetic construct
  misc_feature 1..22: note = chemically synthesized
  source 1..22: mol_type = other DNA
gaaatcaggtagtatgatacct

SEQ ID NO: 29233 - DNA, 22 bp, synthetic construct
  misc_feature 1..22: note = chemically synthesized
  source 1..22: mol_type = other DNA
aaatcaggtagtatgatacctc

SEQ ID NO: 29234 - DNA, 22 bp, synthetic construct
  misc_feature 1..22: note = chemically synthesized
  source 1..22: mol_type = other DNA
tagcattgttcttttttcacag

SEQ ID NO: 29235 - DNA, 22 bp, synthetic construct
  misc_feature 1..22: note = chemically synthesized
  source 1..22: mol_type = other DNA
gcattgttcttttttcacagga

SEQ ID NO: 29236 - DNA, 22 bp, synthetic construct
  misc_feature 1..22: note = chemically synthesized
  source 1..22: mol_type = other DNA
ttcttttttcacaggatgactt

SEQ ID NO: 29237 - DNA, 22 bp, synthetic construct
  misc_feature 1..22: note = chemically synthesized
  source 1..22: mol_type = other DNA
ttttttcacaggatgactttgg

SEQ ID NO: 29238 - DNA, 22 bp, synthetic construct
  misc_feature 1..22: note = chemically synthesized
  source 1..22: mol_type = other DNA
ttttcacaggatgactttggct

SEQ ID NO: 29239 - DNA, 22 bp, synthetic construct
  misc_feature 1..22: note = chemically synthesized
  source 1..22: mol_type = other DNA
tttcacaggatgactttggcta

SEQ ID NO: 29240 - DNA, 22 bp, synthetic construct
  misc_feature 1..22: note = chemically synthesized
  source 1..22: mol_type = other DNA
ttcacaggatgactttggctac

SEQ ID NO: 29241 - DNA, 22 bp, synthetic construct
  misc_feature 1..22: note = chemically synthesized
  source 1..22: mol_type = other DNA
tcacaggatgactttggctact

SEQ ID NO: 29242 - DNA, 22 bp, synthetic construct
  misc_feature 1..22: note = chemically synthesized
  source 1..22: mol_type = other DNA
cacaggatgactttggctactg

SEQ ID NO: 29243 - DNA, 22 bp, synthetic construct
  misc_feature 1..22: note = chemically synthesized
  source 1..22: mol_type = other DNA
acaggatgactttggctactgg

SEQ ID NO: 29244 - DNA, 22 bp, synthetic construct
  misc_feature 1..22: note = chemically synthesized
  source 1..22: mol_type = other DNA
tggctactggagctatttttta

SEQ ID NO: 29245 - DNA, 22 bp, synthetic construct
  misc_feature 1..22: note = chemically synthesized
  source 1..22: mol_type = other DNA
ggctactggagctattttttaa

SEQ ID NO: 29246 - DNA, 22 bp, synthetic construct
  misc_feature 1..22: note = chemically synthesized
  source 1..22: mol_type = other DNA
gctactggagctattttttaat

SEQ ID NO: 29247 - DNA, 22 bp, synthetic construct
  misc_feature 1..22: note = chemically synthesized
  source 1..22: mol_type = other DNA
ctggagctattttttaatttca

SEQ ID NO: 29248 - DNA, 22 bp, synthetic construct
  misc_feature 1..22: note = chemically synthesized
  source 1..22: mol_type = other DNA
gagctattttttaatttcatac

SEQ ID NO: 29249 - DNA, 22 bp, synthetic construct
  misc_feature 1..22: note = chemically synthesized
  source 1..22: mol_type = other DNA
ttttttaatttcatacaaattt

SEQ ID NO: 29250 - DNA, 22 bp, synthetic construct
  misc_feature 1..22: note = chemically synthesized
  source 1..22: mol_type = other DNA
tttaatttcatacaaattttag

SEQ ID NO: 29251 - DNA, 22 bp, synthetic construct
  misc_feature 1..22: note = chemically synthesized
  source 1..22: mol_type = other DNA
ttaatttcatacaaattttaga

SEQ ID NO: 29252 - DNA, 22 bp, synthetic construct
  misc_feature 1..22: note = chemically synthesized
  source 1..22: mol_type = other DNA
taatttcatacaaattttagat

SEQ ID NO: 29253 - DNA, 22 bp, synthetic construct
  misc_feature 1..22: note = chemically synthesized
  source 1..22: mol_type = other DNA
aatttcatacaaattttagatt

SEQ ID NO: 29254 - DNA, 22 bp, synthetic construct
  misc_feature 1..22: note = chemically synthesized
  source 1..22: mol_type = other DNA
atttcatacaaattttagattg

SEQ ID NO: 29255 - DNA, 22 bp, synthetic construct
  misc_feature 1..22: note = chemically synthesized
  source 1..22: mol_type = other DNA
catacaaattttagattggttt

SEQ ID NO: 29256 - DNA, 22 bp, synthetic construct
  misc_feature 1..22: note = chemically synthesized
  source 1..22: mol_type = other DNA
atacaaattttagattggtttt

SEQ ID NO: 29257 - DNA, 22 bp, synthetic construct
  misc_feature 1..22: note = chemically synthesized
  source 1..22: mol_type = other DNA
tagattggtttttccatttctg

SEQ ID NO: 29258 - DNA, 22 bp, synthetic construct
  misc_feature 1..22: note = chemically synthesized
  source 1..22: mol_type = other DNA
agattggtttttccatttctgt

SEQ ID NO: 29259 - DNA, 22 bp, synthetic construct
  misc_feature 1..22: note = chemically synthesized
  source 1..22: mol_type = other DNA
gattggtttttccatttctgtg

SEQ ID NO: 29260 - DNA, 22 bp, synthetic construct
  misc_feature 1..22: note = chemically synthesized
  source 1..22: mol_type = other DNA
gtttttccatttctgtgaaaaa

SEQ ID NO: 29261 - DNA, 22 bp, synthetic construct
  misc_feature 1..22: note = chemically synthesized
  source 1..22: mol_type = other DNA
ttccatttctgtgaaaaatgac

SEQ ID NO: 29262 - DNA, 22 bp, synthetic construct
  misc_feature 1..22: note = chemically synthesized
  source 1..22: mol_type = other DNA
tccatttctgtgaaaaatgaca

SEQ ID NO: 29263 - DNA, 22 bp, synthetic construct
  misc_feature 1..22: note = chemically synthesized
  source 1..22: mol_type = other DNA
ccatttctgtgaaaaatgacat

SEQ ID NO: 29264 - DNA, 22 bp, synthetic construct
  misc_feature 1..22: note = chemically synthesized
  source 1..22: mol_type = other DNA
catttctgtgaaaaatgacatt

SEQ ID NO: 29265 - DNA, 22 bp, synthetic construct
  misc_feature 1..22: note = chemically synthesized
  source 1..22: mol_type = other DNA
ctgtgaaaaatgacattgctat

SEQ ID NO: 29266 - DNA, 22 bp, synthetic construct
  misc_feature 1..22: note = chemically synthesized
  source 1..22: mol_type = other DNA
tgtgaaaaatgacattgctatt

SEQ ID NO: 29267 - DNA, 22 bp, synthetic construct
  misc_feature 1..22: note = chemically synthesized
  source 1..22: mol_type = other DNA
tgaaaaatgacattgctatttt

SEQ ID NO: 29268 - DNA, 22 bp, synthetic construct
  misc_feature 1..22: note = chemically synthesized
  source 1..22: mol_type = other DNA
ctattttgatagcggtcatata

SEQ ID NO: 29269 - DNA, 22 bp, synthetic construct
  misc_feature 1..22: note = chemically synthesized
  source 1..22: mol_type = other DNA
ttttgatagcggtcatatagaa

SEQ ID NO: 29270 - DNA, 22 bp, synthetic construct
  misc_feature 1..22: note = chemically synthesized
  source 1..22: mol_type = other DNA
tgatagcggtcatatagaatct

SEQ ID NO: 29271 - DNA, 22 bp, synthetic construct
  misc_feature 1..22: note = chemically synthesized
  source 1..22: mol_type = other DNA
gatagcggtcatatagaatctg

SEQ ID NO: 29272 - DNA, 22 bp, synthetic construct
  misc_feature 1..22: note = chemically synthesized
  source 1..22: mol_type = other DNA
atagcggtcatatagaatctgt

SEQ ID NO: 29273 - DNA, 22 bp, synthetic construct
  misc_feature 1..22: note = chemically synthesized
  source 1..22: mol_type = other DNA
tagattgctttgggtagtatgg

SEQ ID NO: 29274 - DNA, 22 bp, synthetic construct
  misc_feature 1..22: note = chemically synthesized
  source 1..22: mol_type = other DNA
ctttgggtagtatggccatttt

SEQ ID NO: 29275 - DNA, 22 bp, synthetic construct
  misc_feature 1..22: note = chemically synthesized
  source 1..22: mol_type = other DNA
tgggtagtatggccattttaac

SEQ ID NO: 29276 - DNA, 22 bp, synthetic construct
  misc_feature 1..22: note = chemically synthesized
  source 1..22: mol_type = other DNA
gggtagtatggccattttaaca

SEQ ID NO: 29277 - DNA, 22 bp, synthetic construct
  misc_feature 1..22: note = chemically synthesized
  source 1..22: mol_type = other DNA
ggtagtatggccattttaacaa

SEQ ID NO: 29278 - DNA, 22 bp, synthetic construct
  misc_feature 1..22: note = chemically synthesized
  source 1..22: mol_type = other DNA
taacaatattaatttttctgat

SEQ ID NO: 29279 - DNA, 22 bp, synthetic construct
  misc_feature 1..22: note = chemically synthesized
  source 1..22: mol_type = other DNA
aacaatattaatttttctgatc

SEQ ID NO: 29280 - DNA, 22 bp, synthetic construct
  misc_feature 1..22: note = chemically synthesized
  source 1..22: mol_type = other DNA
acaatattaatttttctgatcc

SEQ ID NO: 29281 - DNA, 22 bp, synthetic construct
  misc_feature 1..22: note = chemically synthesized
  source 1..22: mol_type = other DNA
atttttctgatccatgaacata

SEQ ID NO: 29282 - DNA, 22 bp, synthetic construct
  misc_feature 1..22: note = chemically synthesized
  source 1..22: mol_type = other DNA
ttctgatccatgaacataggat

SEQ ID NO: 29283 - DNA, 22 bp, synthetic construct
  misc_feature 1..22: note = chemically synthesized
  source 1..22: mol_type = other DNA
tctgatccatgaacataggata

SEQ ID NO: 29284 - DNA, 22 bp, synthetic construct
  misc_feature 1..22: note = chemically synthesized
  source 1..22: mol_type = other DNA
ctgatccatgaacataggatat

SEQ ID NO: 29285 - DNA, 22 bp, synthetic construct
  misc_feature 1..22: note = chemically synthesized
  source 1..22: mol_type = other DNA
tgatccatgaacataggatatc

SEQ ID NO: 29286 - DNA, 22 bp, synthetic construct
  misc_feature 1..22: note = chemically synthesized
  source 1..22: mol_type = other DNA
atccatgaacataggatatctc

SEQ ID NO: 29287 - DNA, 22 bp, synthetic construct
  misc_feature 1..22: note = chemically synthesized
  source 1..22: mol_type = other DNA
tccatttgtttctgtccttttc

SEQ ID NO: 29288 - DNA, 22 bp, synthetic construct
  misc_feature 1..22: note = chemically synthesized
  source 1..22: mol_type = other DNA
catttgtttctgtccttttcaa

SEQ ID NO: 29289 - DNA, 22 bp, synthetic construct
  misc_feature 1..22: note = chemically synthesized
  source 1..22: mol_type = other DNA
gtttctgtccttttcaattctt

SEQ ID NO: 29290 - DNA, 22 bp, synthetic construct
  misc_feature 1..22: note = chemically synthesized
  source 1..22: mol_type = other DNA
tttctgtccttttcaattcttt

SEQ ID NO: 29291 - DNA, 22 bp, synthetic construct
  misc_feature 1..22: note = chemically synthesized
  source 1..22: mol_type = other DNA
ctgtccttttcaattcttttat

SEQ ID NO: 29292 - DNA, 22 bp, synthetic construct
  misc_feature 1..22: note = chemically synthesized
  source 1..22: mol_type = other DNA
tgtccttttcaattcttttatc

SEQ ID NO: 29293 - DNA, 22 bp, synthetic construct
  misc_feature 1..22: note = chemically synthesized
  source 1..22: mol_type = other DNA
tccttttcaattcttttatcag

SEQ ID NO: 29294 - DNA, 22 bp, synthetic construct
  misc_feature 1..22: note = chemically synthesized
  source 1..22: mol_type = other DNA
ttcaattcttttatcagtgttt

SEQ ID NO: 29295 - DNA, 22 bp, synthetic construct
  misc_feature 1..22: note = chemically synthesized
  source 1..22: mol_type = other DNA
tcaattcttttatcagtgtttt

SEQ ID NO: 29296 - DNA, 22 bp, synthetic construct
  misc_feature 1..22: note = chemically synthesized
  source 1..22: mol_type = other DNA
caattcttttatcagtgttttg

SEQ ID NO: 29297 - DNA, 22 bp, synthetic construct
  misc_feature 1..22: note = chemically synthesized
  source 1..22: mol_type = other DNA
aattcttttatcagtgttttgt

SEQ ID NO: 29298 - DNA, 22 bp, synthetic construct
  misc_feature 1..22: note = chemically synthesized
  source 1..22: mol_type = other DNA
ttttatcagtgttttgtagttt

SEQ ID NO: 29299 - DNA, 22 bp, synthetic construct
  misc_feature 1..22: note = chemically synthesized
  source 1..22: mol_type = other DNA
ttatcagtgttttgtagttttc

SEQ ID NO: 29300 - DNA, 22 bp, synthetic construct
  misc_feature 1..22: note = chemically synthesized
  source 1..22: mol_type = other DNA
tatcagtgttttgtagttttcc

SEQ ID NO: 29301 - DNA, 22 bp, synthetic construct
  misc_feature 1..22: note = chemically synthesized
  source 1..22: mol_type = other DNA
atcagtgttttgtagttttccg

SEQ ID NO: 29302 - DNA, 22 bp, synthetic construct
  misc_feature 1..22: note = chemically synthesized
  source 1..22: mol_type = other DNA
tcagtgttttgtagttttccga

SEQ ID NO: 29303 - DNA, 22 bp, synthetic construct
  misc_feature 1..22: note = chemically synthesized
  source 1..22: mol_type = other DNA
tgtagttttccgaatagaggtt

SEQ ID NO: 29304 - DNA, 22 bp, synthetic construct
  misc_feature 1..22: note = chemically synthesized
  source 1..22: mol_type = other DNA
gtagttttccgaatagaggttt

SEQ ID NO: 29305 - DNA, 22 bp, synthetic construct
  misc_feature 1..22: note = chemically synthesized
  source 1..22: mol_type = other DNA
tagttttccgaatagaggtttt

SEQ ID NO: 29306 - DNA, 22 bp, synthetic construct
  misc_feature 1..22: note = chemically synthesized
  source 1..22: mol_type = other DNA
tccgaatagaggtttttcggtt

SEQ ID NO: 29307 - DNA, 22 bp, synthetic construct
  misc_feature 1..22: note = chemically synthesized
  source 1..22: mol_type = other DNA
ccgaatagaggtttttcggttc

SEQ ID NO: 29308 - DNA, 22 bp, synthetic construct
  misc_feature 1..22: note = chemically synthesized
  source 1..22: mol_type = other DNA
cgaatagaggtttttcggttcc

SEQ ID NO: 29309 - DNA, 22 bp, synthetic construct
  misc_feature 1..22: note = chemically synthesized
  source 1..22: mol_type = other DNA
ttcggttccttggttaaattta

SEQ ID NO: 29310 - DNA, 22 bp, synthetic construct
  misc_feature 1..22: note = chemically synthesized
  source 1..22: mol_type = other DNA
tcggttccttggttaaatttat

SEQ ID NO: 29311 - DNA, 22 bp, synthetic construct
  misc_feature 1..22: note = chemically synthesized
  source 1..22: mol_type = other DNA
cggttccttggttaaatttatc

SEQ ID NO: 29312 - DNA, 22 bp, synthetic construct
  misc_feature 1..22: note = chemically synthesized
  source 1..22: mol_type = other DNA
ggttccttggttaaatttatcc

SEQ ID NO: 29313 - DNA, 22 bp, synthetic construct
  misc_feature 1..22: note = chemically synthesized
  source 1..22: mol_type = other DNA
cttggttaaatttatccctaaa

SEQ ID NO: 29314 - DNA, 22 bp, synthetic construct
  misc_feature 1..22: note = chemically synthesized
  source 1..22: mol_type = other DNA
ggttaaatttatccctaaatat

SEQ ID NO: 29315 - DNA, 22 bp, synthetic construct
  misc_feature 1..22: note = chemically synthesized
  source 1..22: mol_type = other DNA
gttaaatttatccctaaatatt

SEQ ID NO: 29316 - DNA, 22 bp, synthetic construct
  misc_feature 1..22: note = chemically synthesized
  source 1..22: mol_type = other DNA
aatttatccctaaatattttat

SEQ ID NO: 29317 - DNA, 22 bp, synthetic construct
  misc_feature 1..22: note = chemically synthesized
  source 1..22: mol_type = other DNA
atccctaaatattttatttttt

SEQ ID NO: 29318 - DNA, 22 bp, synthetic construct
  misc_feature 1..22: note = chemically synthesized
  source 1..22: mol_type = other DNA
tccctaaatattttatttttta

SEQ ID NO: 29319 - DNA, 22 bp, synthetic construct
  misc_feature 1..22: note = chemically synthesized
  source 1..22: mol_type = other DNA
aatattttattttttagctatt

SEQ ID NO: 29320 - DNA, 22 bp, synthetic construct
  misc_feature 1..22: note = chemically synthesized
  source 1..22: mol_type = other DNA
tattttttagctattgtaaatg

SEQ ID NO: 29321 - DNA, 22 bp, synthetic construct
  misc_feature 1..22: note = chemically synthesized
  source 1..22: mol_type = other DNA
attttttagctattgtaaatgg

SEQ ID NO: 29322 - DNA, 22 bp, synthetic construct
  misc_feature 1..22: note = chemically synthesized
  source 1..22: mol_type = other DNA
ttttttagctattgtaaatggg

SEQ ID NO: 29323 - DNA, 22 bp, synthetic construct
  misc_feature 1..22: note = chemically synthesized
  source 1..22: mol_type = other DNA
tttagctattgtaaatgggatt

SEQ ID NO: 29324 - DNA, 22 bp, synthetic construct
  misc_feature 1..22: note = chemically synthesized
  source 1..22: mol_type = other DNA
ttagctattgtaaatgggattg

SEQ ID NO: 29325 - DNA, 22 bp, synthetic construct
  misc_feature 1..22: note = chemically synthesized
  source 1..22: mol_type = other DNA
tagctattgtaaatgggattgc

SEQ ID NO: 29326 - DNA, 22 bp, synthetic construct
  misc_feature 1..22: note = chemically synthesized
  source 1..22: mol_type = other DNA
agctattgtaaatgggattgcc

SEQ ID NO: 29327 - DNA, 22 bp, synthetic construct
  misc_feature 1..22: note = chemically synthesized
  source 1..22: mol_type = other DNA
gctattgtaaatgggattgcct

SEQ ID NO: 29328 - DNA, 22 bp, synthetic construct
  misc_feature 1..22: note = chemically synthesized
  source 1..22: mol_type = other DNA
ttgtaaatgggattgccttctt

SEQ ID NO: 29329 - DNA, 22 bp, synthetic construct
  misc_feature 1..22: note = chemically synthesized
  source 1..22: mol_type = other DNA
taaatgggattgccttcttaat

SEQ ID NO: 29330 - DNA, 22 bp, synthetic construct
  misc_feature 1..22: note = chemically synthesized
  source 1..22: mol_type = other DNA
ccttcttaatttccttctcagc

SEQ ID NO: 29331 - DNA, 22 bp, synthetic construct
  misc_feature 1..22: note = chemically synthesized
  source 1..22: mol_type = other DNA
cttaatttccttctcagctagt

SEQ ID NO: 29332 - DNA, 22 bp, synthetic construct
  misc_feature 1..22: note = chemically synthesized
  source 1..22: mol_type = other DNA
ttaatttccttctcagctagtt

SEQ ID NO: 29333 - DNA, 22 bp, synthetic construct
  misc_feature 1..22: note = chemically synthesized
  source 1..22: mol_type = other DNA
aatttccttctcagctagttta

SEQ ID NO: 29334 - DNA, 22 bp, synthetic construct
  misc_feature 1..22: note = chemically synthesized
  source 1..22: mol_type = other DNA
atttccttctcagctagtttat

SEQ ID NO: 29335 - DNA, 22 bp, synthetic construct
  misc_feature 1..22: note = chemically synthesized
  source 1..22: mol_type = other DNA
ccttctcagctagtttattatt

SEQ ID NO: 29336 - DNA, 22 bp, synthetic construct
  misc_feature 1..22: note = chemically synthesized
  source 1..22: mol_type = other DNA
cttctcagctagtttattattg

SEQ ID NO: 29337 - DNA, 22 bp, synthetic construct
  misc_feature 1..22: note = chemically synthesized
  source 1..22: mol_type = other DNA
ctcagctagtttattattggtg

SEQ ID NO: 29338 - DNA, 22 bp, synthetic construct
  misc_feature 1..22: note = chemically synthesized
  source 1..22: mol_type = other DNA
tcagctagtttattattggtgt

SEQ ID NO: 29339 - DNA, 22 bp, synthetic construct
  misc_feature 1..22: note = chemically synthesized
  source 1..22: mol_type = other DNA
agctagtttattattggtgtgt

SEQ ID NO: 29340 - DNA, 22 bp, synthetic construct
  misc_feature 1..22: note = chemically synthesized
  source 1..22: mol_type = other DNA
gtttattattggtgtgtagaaa

SEQ ID NO: 29341 - DNA, 22 bp, synthetic construct
  misc_feature 1..22: note = chemically synthesized
  source 1..22: mol_type = other DNA
attattggtgtgtagaaacatt

SEQ ID NO: 29342 - DNA, 22 bp, synthetic construct
  misc_feature 1..22: note = chemically synthesized
  source 1..22: mol_type = other DNA
ttattggtgtgtagaaacattg

SEQ ID NO: 29343 - DNA, 22 bp, synthetic construct
  misc_feature 1..22: note = chemically synthesized
  source 1..22: mol_type = other DNA
ttggtgtgtagaaacattgctt

SEQ ID NO: 29344 - DNA, 22 bp, synthetic construct
  misc_feature 1..22: note = chemically synthesized
  source 1..22: mol_type = other DNA
gtgtgtagaaacattgcttgtt

SEQ ID NO: 29345 - DNA, 22 bp, synthetic construct
  misc_feature 1..22: note = chemically synthesized
  source 1..22: mol_type = other DNA
cttgtttcatatgctgattttg

SEQ ID NO: 29346 - DNA, 22 bp, synthetic construct
  misc_feature 1..22: note = chemically synthesized
  source 1..22: mol_type = other DNA
gtttcatatgctgattttgtct

SEQ ID NO: 29347 - DNA, 22 bp, synthetic construct
  misc_feature 1..22: note = chemically synthesized
  source 1..22: mol_type = other DNA
tttcatatgctgattttgtctc

SEQ ID NO: 29348 - DNA, 22 bp, synthetic construct
  misc_feature 1..22: note = chemically synthesized
  source 1..22: mol_type = other DNA
catatgctgattttgtctcctg

SEQ ID NO: 29349 - DNA, 22 bp, synthetic construct
  misc_feature 1..22: note = chemically synthesized
  source 1..22: mol_type = other DNA
atatgctgattttgtctcctgt

SEQ ID NO: 29350 - DNA, 22 bp, synthetic construct
  misc_feature 1..22: note = chemically synthesized
  source 1..22: mol_type = other DNA
attttgtctcctgtaactttac

SEQ ID NO: 29351 - DNA, 22 bp, synthetic construct
  misc_feature 1..22: note = chemically synthesized
  source 1..22: mol_type = other DNA
tgtctcctgtaactttactgaa

SEQ ID NO: 29352 - DNA, 22 bp, synthetic construct
  misc_feature 1..22: note = chemically synthesized
  source 1..22: mol_type = other DNA
gtctcctgtaactttactgaat

SEQ ID NO: 29353 - DNA, 22 bp, synthetic construct
  misc_feature 1..22: note = chemically synthesized
  source 1..22: mol_type = other DNA
tctcctgtaactttactgaatt

SEQ ID NO: 29354 - DNA, 22 bp, synthetic construct
  misc_feature 1..22: note = chemically synthesized
  source 1..22: mol_type = other DNA
ctgtaactttactgaatttatt

SEQ ID NO: 29355 - DNA, 22 bp, synthetic construct
  misc_feature 1..22: note = chemically synthesized
  source 1..22: mol_type = other DNA
taactttactgaatttattttt

SEQ ID NO: 29356 - DNA, 22 bp, synthetic construct
  misc_feature 1..22: note = chemically synthesized
  source 1..22: mol_type = other DNA
tactgaatttatttttcagcgc

SEQ ID NO: 29357 - DNA, 22 bp, synthetic construct
  misc_feature 1..22: note = chemically synthesized
  source 1..22: mol_type = other DNA
actgaatttatttttcagcgct

SEQ ID NO: 29358 - DNA, 22 bp, synthetic construct
  misc_feature 1..22: note = chemically synthesized
  source 1..22: mol_type = other DNA
ctgaatttatttttcagcgcta

SEQ ID NO: 29359 - DNA, 22 bp, synthetic construct
  misc_feature 1..22: note = chemically synthesized
  source 1..22: mol_type = other DNA
aatttatttttcagcgctaaga

SEQ ID NO: 29360 - DNA, 22 bp, synthetic construct
  misc_feature 1..22: note = chemically synthesized
  source 1..22: mol_type = other DNA
atttttcagcgctaagagtgct

SEQ ID NO: 29361 - DNA, 22 bp, synthetic construct
  misc_feature 1..22: note = chemically synthesized
  source 1..22: mol_type = other DNA
tttttcagcgctaagagtgctt

SEQ ID NO: 29362 - DNA, 22 bp, synthetic construct
  misc_feature 1..22: note = chemically synthesized
  source 1..22: mol_type = other DNA
ttcagcgctaagagtgctttgg

SEQ ID NO: 29363 - DNA, 22 bp, synthetic construct
  misc_feature 1..22: note = chemically synthesized
  source 1..22: mol_type = other DNA
tcagcgctaagagtgctttggt

SEQ ID NO: 29364 - DNA, 22 bp, synthetic construct
  misc_feature 1..22: note = chemically synthesized
  source 1..22: mol_type = other DNA
cagcgctaagagtgctttggtg

SEQ ID NO: 29365 - DNA, 22 bp, synthetic construct
  misc_feature 1..22: note = chemically synthesized
  source 1..22: mol_type = other DNA
agcgctaagagtgctttggtgg

SEQ ID NO: 29366 - DNA, 22 bp, synthetic construct
  misc_feature 1..22: note = chemically synthesized
  source 1..22: mol_type = other DNA
agagtgctttggtggagtcttg

SEQ ID NO: 29367 - DNA, 22 bp, synthetic construct
  misc_feature 1..22: note = chemically synthesized
  source 1..22: mol_type = other DNA
tggtggagtcttggtttttcta

SEQ ID NO: 29368 - DNA, 22 bp, synthetic construct
  misc_feature 1..22: note = chemically synthesized
  source 1..22: mol_type = other DNA
ggtggagtcttggtttttctag

SEQ ID NO: 29369 - DNA, 22 bp, synthetic construct
  misc_feature 1..22: note = chemically synthesized
  source 1..22: mol_type = other DNA
gtggagtcttggtttttctagg

SEQ ID NO: 29370 - DNA, 22 bp, synthetic construct
  misc_feature 1..22: note = chemically synthesized
  source 1..22: mol_type = other DNA
ggtttttctaggtataaaatca

SEQ ID NO: 29371 - DNA, 22 bp, synthetic construct
  misc_feature 1..22: note = chemically synthesized
  source 1..22: mol_type = other DNA
gtttttctaggtataaaatcat

SEQ ID NO: 29372 - DNA, 22 bp, synthetic construct
  misc_feature 1..22: note = chemically synthesized
  source 1..22: mol_type = other DNA
ttctaggtataaaatcatgtca

SEQ ID NO: 29373 - DNA, 22 bp, synthetic construct
  misc_feature 1..22: note = chemically synthesized
  source 1..22: mol_type = other DNA
tctaggtataaaatcatgtcat

SEQ ID NO: 29374 - DNA, 22 bp, synthetic construct
  misc_feature 1..22: note = chemically synthesized
  source 1..22: mol_type = other DNA
ctaggtataaaatcatgtcatc

SEQ ID NO: 29375 - DNA, 22 bp, synthetic construct
  misc_feature 1..22: note = chemically synthesized
  source 1..22: mol_type = other DNA
taggtataaaatcatgtcatct

SEQ ID NO: 29376 - DNA, 22 bp, synthetic construct
  misc_feature 1..22: note = chemically synthesized
  source 1..22: mol_type = other DNA
ggtataaaatcatgtcatctgg

SEQ ID NO: 29377 - DNA, 22 bp, synthetic construct
  misc_feature 1..22: note = chemically synthesized
  source 1..22: mol_type = other DNA
gaaagatggacagtttgacttc

SEQ ID NO: 29378 - DNA, 22 bp, synthetic construct
  misc_feature 1..22: note = chemically synthesized
  source 1..22: mol_type = other DNA
gacttcatcttttcctatttgc

SEQ ID NO: 29379 - DNA, 22 bp, synthetic construct
  misc_feature 1..22: note = chemically synthesized
  source 1..22: mol_type = other DNA
acttcatcttttcctatttgca

SEQ ID NO: 29380 - DNA, 22 bp, synthetic construct
  misc_feature 1..22: note = chemically synthesized
  source 1..22: mol_type = other DNA
catcttttcctatttgcatgcc

SEQ ID NO: 29381 - DNA, 22 bp, synthetic construct
  misc_feature 1..22: note = chemically synthesized
  source 1..22: mol_type = other DNA
atcttttcctatttgcatgcct

SEQ ID NO: 29382 - DNA, 22 bp, synthetic construct
  misc_feature 1..22: note = chemically synthesized
  source 1..22: mol_type = other DNA
ttcctatttgcatgccttttct

SEQ ID NO: 29383 - DNA, 22 bp, synthetic construct
  misc_feature 1..22: note = chemically synthesized
  source 1..22: mol_type = other DNA
tcctatttgcatgccttttctt

SEQ ID NO: 29384 - DNA, 22 bp, synthetic construct
  misc_feature 1..22: note = chemically synthesized
  source 1..22: mol_type = other DNA
cctatttgcatgccttttcttt

SEQ ID NO: 29385 - DNA, 22 bp, synthetic construct
  misc_feature 1..22: note = chemically synthesized
  source 1..22: mol_type = other DNA
ctatttgcatgccttttctttc

SEQ ID NO: 29386 - DNA, 22 bp, synthetic construct
  misc_feature 1..22: note = chemically synthesized
  source 1..22: mol_type = other DNA
tttgcatgccttttctttcttt

SEQ ID NO: 29387 - DNA, 22 bp, synthetic construct
  misc_feature 1..22: note = chemically synthesized
  source 1..22: mol_type = other DNA
gcatgccttttctttctttctt

SEQ ID NO: 29388 - DNA, 22 bp, synthetic construct
  misc_feature 1..22: note = chemically synthesized
  source 1..22: mol_type = other DNA
catgccttttctttctttcttt

SEQ ID NO: 29389 - DNA, 22 bp, synthetic construct
  misc_feature 1..22: note = chemically synthesized
  source 1..22: mol_type = other DNA
ttctttctttctttctctgacc

SEQ ID NO: 29390 - DNA, 22 bp, synthetic construct
  misc_feature 1..22: note = chemically synthesized
  source 1..22: mol_type = other DNA
tctttctttctttctctgacct

SEQ ID NO: 29391 - DNA, 22 bp, synthetic construct
  misc_feature 1..22: note = chemically synthesized
  source 1..22: mol_type = other DNA
ctttctttctttctctgacctg

SEQ ID NO: 29392 - DNA, 22 bp, synthetic construct
  misc_feature 1..22: note = chemically synthesized
  source 1..22: mol_type = other DNA
tttctttctttctctgacctga

SEQ ID NO: 29393 - DNA, 22 bp, synthetic construct
  misc_feature 1..22: note = chemically synthesized
  source 1..22: mol_type = other DNA
tctttctttctctgacctgaaa

SEQ ID NO: 29394 - DNA, 22 bp, synthetic construct
  misc_feature 1..22: note = chemically synthesized
  source 1..22: mol_type = other DNA
ctttctttctctgacctgaaag

SEQ ID NO: 29395 - DNA, 22 bp, synthetic construct
  misc_feature 1..22: note = chemically synthesized
  source 1..22: mol_type = other DNA
tttctttctctgacctgaaagc

SEQ ID NO: 29396 - DNA, 22 bp, synthetic construct
  misc_feature 1..22: note = chemically synthesized
  source 1..22: mol_type = other DNA
tctttctctgacctgaaagctg

SEQ ID NO: 29397 - DNA, 22 bp, synthetic construct
  misc_feature 1..22: note = chemically synthesized
  source 1..22: mol_type = other DNA
ctttctctgacctgaaagctgt

SEQ ID NO: 29398 - DNA, 22 bp, synthetic construct
  misc_feature 1..22: note = chemically synthesized
  source 1..22: mol_type = other DNA
tttctctgacctgaaagctgtg

SEQ ID NO: 29399 - DNA, 22 bp, synthetic construct
  misc_feature 1..22: note = chemically synthesized
  source 1..22: mol_type = other DNA
tctctgacctgaaagctgtggc

SEQ ID NO: 29400 - DNA, 22 bp, synthetic construct
  misc_feature 1..22: note = chemically synthesized
  source 1..22: mol_type = other DNA
ctctgacctgaaagctgtggct

SEQ ID NO: 29401 - DNA, 22 bp, synthetic construct
  misc_feature 1..22: note = chemically synthesized
  source 1..22: mol_type = other DNA
tctgacctgaaagctgtggcta

SEQ ID NO: 29402 - DNA, 22 bp, synthetic construct
  misc_feature 1..22: note = chemically synthesized
  source 1..22: mol_type = other DNA
tgacctgaaagctgtggctagg

SEQ ID NO: 29403 - DNA, 22 bp, synthetic construct
  misc_feature 1..22: note = chemically synthesized
  source 1..22: mol_type = other DNA
acctgaaagctgtggctaggac

SEQ ID NO: 29404 - DNA, 22 bp, synthetic construct
  misc_feature 1..22: note = chemically synthesized
  source 1..22: mol_type = other DNA
aaagctgtggctaggacttcca

SEQ ID NO: 29405 - DNA, 22 bp, synthetic construct
  misc_feature 1..22: note = chemically synthesized
  source 1..22: mol_type = other DNA
tggctaggacttccagtattat

SEQ ID NO: 29406 - DNA, 22 bp, synthetic construct
  misc_feature 1..22: note = chemically synthesized
  source 1..22: mol_type = other DNA
ggacttccagtattatattgaa

SEQ ID NO: 29407 - DNA, 22 bp, synthetic construct
  misc_feature 1..22: note = chemically synthesized
  source 1..22: mol_type = other DNA
ccagtattatattgaataggag

SEQ ID NO: 29408 - DNA, 22 bp, synthetic construct
  misc_feature 1..22: note = chemically synthesized
  source 1..22: mol_type = other DNA
cagtattatattgaataggagt

SEQ ID NO: 29409 - DNA, 22 bp, synthetic construct
  misc_feature 1..22: note = chemically synthesized
  source 1..22: mol_type = other DNA
tattgaataggagtgatggaag

SEQ ID NO: 29410 - DNA, 22 bp, synthetic construct
  misc_feature 1..22: note = chemically synthesized
  source 1..22: mol_type = other DNA
aataggagtgatggaagtgggc

SEQ ID NO: 29411 - DNA, 22 bp, synthetic construct
  misc_feature 1..22: note = chemically synthesized
  source 1..22: mol_type = other DNA
attttgtttcagttcttagagg

SEQ ID NO: 29412 - DNA, 22 bp, synthetic construct
  misc_feature 1..22: note = chemically synthesized
  source 1..22: mol_type = other DNA
ttttgtttcagttcttagagga

SEQ ID NO: 29413 - DNA, 22 bp, synthetic construct
  misc_feature 1..22: note = chemically synthesized
  source 1..22: mol_type = other DNA
tgtttcagttcttagaggaaag

SEQ ID NO: 29414 - DNA, 22 bp, synthetic construct
  misc_feature 1..22: note = chemically synthesized
  source 1..22: mol_type = other DNA
gtttcagttcttagaggaaagg

SEQ ID NO: 29415 - DNA, 22 bp, synthetic construct
  misc_feature 1..22: note = chemically synthesized
  source 1..22: mol_type = other DNA
tttcagttcttagaggaaaggc

SEQ ID NO: 29416 - DNA, 22 bp, synthetic construct
  misc_feature 1..22: note = chemically synthesized
  source 1..22: mol_type = other DNA
cagttcttagaggaaaggcttc

SEQ ID NO: 29417 - DNA, 22 bp, synthetic construct
  misc_feature 1..22: note = chemically synthesized
  source 1..22: mol_type = other DNA
agttcttagaggaaaggcttcc

SEQ ID NO: 29418 - DNA, 22 bp, synthetic construct
  misc_feature 1..22: note = chemically synthesized
  source 1..22: mol_type = other DNA
ttagaggaaaggcttccagctt

SEQ ID NO: 29419 - DNA, 22 bp, synthetic construct
  misc_feature 1..22: note = chemically synthesized
  source 1..22: mol_type = other DNA
agaggaaaggcttccagctttt

SEQ ID NO: 29420 - DNA, 22 bp, synthetic construct
  misc_feature 1..22: note = chemically synthesized
  source 1..22: mol_type = other DNA
gaggaaaggcttccagcttttc

SEQ ID NO: 29421 - DNA, 22 bp, synthetic construct
  misc_feature 1..22: note = chemically synthesized
  source 1..22: mol_type = other DNA
ccagcttttcccaattcagtat

SEQ ID NO: 29422 - DNA, 22 bp, synthetic construct
  misc_feature 1..22: note = chemically synthesized
  source 1..22: mol_type = other DNA
cagcttttcccaattcagtatg

SEQ ID NO: 29423 - DNA, 22 bp, synthetic construct
  misc_feature 1..22: note = chemically synthesized
  source 1..22: mol_type = other DNA
ttcccaattcagtatgatgtta

SEQ ID NO: 29424 - DNA, 22 bp, synthetic construct
  misc_feature 1..22: note = chemically synthesized
  source 1..22: mol_type = other DNA
tcccaattcagtatgatgttag

SEQ ID NO: 29425 - DNA, 22 bp, synthetic construct
  misc_feature 1..22: note = chemically synthesized
  source 1..22: mol_type = other DNA
cccaattcagtatgatgttagc

SEQ ID NO: 29426 - DNA, 22 bp, synthetic construct
  misc_feature 1..22: note = chemically synthesized
  source 1..22: mol_type = other DNA
ccaattcagtatgatgttagct

SEQ ID NO: 29427 - DNA, 22 bp, synthetic construct
  misc_feature 1..22: note = chemically synthesized
  source 1..22: mol_type = other DNA
agtatgatgttagctgtgggtt

SEQ ID NO: 29428 - DNA, 22 bp, synthetic construct
  misc_feature 1..22: note = chemically synthesized
  source 1..22: mol_type = other DNA
gctgtgggtttgtcatatatga

SEQ ID NO: 29429 - DNA, 22 bp, synthetic construct
  misc_feature 1..22: note = chemically synthesized
  source 1..22: mol_type = other DNA
tgggtttgtcatatatgacttt

SEQ ID NO: 29430 - DNA, 22 bp, synthetic construct
  misc_feature 1..22: note = chemically synthesized
  source 1..22: mol_type = other DNA
gtcatatatgacttttattata

SEQ ID NO: 29431 - DNA, 22 bp, synthetic construct
  misc_feature 1..22: note = chemically synthesized
  source 1..22: mol_type = other DNA
tcatatatgacttttattatat

SEQ ID NO: 29432 - DNA, 22 bp, synthetic construct
  misc_feature 1..22: note = chemically synthesized
  source 1..22: mol_type = other DNA
ttattatattgagatatgttcc

SEQ ID NO: 29433 - DNA, 22 bp, synthetic construct
  misc_feature 1..22: note = chemically synthesized
  source 1..22: mol_type = other DNA
tattatattgagatatgttcct

SEQ ID NO: 29434 - DNA, 22 bp, synthetic construct
  misc_feature 1..22: note = chemically synthesized
  source 1..22: mol_type = other DNA
attatattgagatatgttcctt

SEQ ID NO: 29435 - DNA, 22 bp, synthetic construct
  misc_feature 1..22: note = chemically synthesized
  source 1..22: mol_type = other DNA
ttatattgagatatgttccttc

SEQ ID NO: 29436 - DNA, 22 bp, synthetic construct
  misc_feature 1..22: note = chemically synthesized
  source 1..22: mol_type = other DNA
tattgagatatgttccttctat

SEQ ID NO: 29437 - DNA, 22 bp, synthetic construct
  misc_feature 1..22: note = chemically synthesized
  source 1..22: mol_type = other DNA
agatatgttccttctatgattg

SEQ ID NO: 29438 - DNA, 22 bp, synthetic construct
  misc_feature 1..22: note = chemically synthesized
  source 1..22: mol_type = other DNA
cttctatgattggctgcagata

SEQ ID NO: 29439 - DNA, 22 bp, synthetic construct
  misc_feature 1..22: note = chemically synthesized
  source 1..22: mol_type = other DNA
ctatgattggctgcagatagtt

SEQ ID NO: 29440 - DNA, 22 bp, synthetic construct
  misc_feature 1..22: note = chemically synthesized
  source 1..22: mol_type = other DNA
tatgattggctgcagatagttt

SEQ ID NO: 29441 - DNA, 22 bp, synthetic construct
  misc_feature 1..22: note = chemically synthesized
  source 1..22: mol_type = other DNA
tgattggctgcagatagttttt

SEQ ID NO: 29442 - DNA, 22 bp, synthetic construct
  misc_feature 1..22: note = chemically synthesized
  source 1..22: mol_type = other DNA
gctgcagatagtttttatcatg

SEQ ID NO: 29443 - DNA, 22 bp, synthetic construct
  misc_feature 1..22: note = chemically synthesized
  source 1..22: mol_type = other DNA
cagatagtttttatcatgaagg

SEQ ID NO: 29444 - DNA, 22 bp, synthetic construct
  misc_feature 1..22: note = chemically synthesized
  source 1..22: mol_type = other DNA
ttatcatgaaggaatgttaaat

SEQ ID NO: 29445 - DNA, 22 bp, synthetic construct
  misc_feature 1..22: note = chemically synthesized
  source 1..22: mol_type = other DNA
tatcatgaaggaatgttaaatt

SEQ ID NO: 29446 - DNA, 22 bp, synthetic construct
  misc_feature 1..22: note = chemically synthesized
  source 1..22: mol_type = other DNA
atcatgaaggaatgttaaattt

SEQ ID NO: 29447 - DNA, 22 bp, synthetic construct
  misc_feature 1..22: note = chemically synthesized
  source 1..22: mol_type = other DNA
tcatgaaggaatgttaaatttt

SEQ ID NO: 29448 - DNA, 22 bp, synthetic construct
  misc_feature 1..22: note = chemically synthesized
  source 1..22: mol_type = other DNA
aattttatcaaatactttttct

SEQ ID NO: 29449 - DNA, 22 bp, synthetic construct
  misc_feature 1..22: note = chemically synthesized
  source 1..22: mol_type = other DNA
tatcaaatactttttctgtatc

SEQ ID NO: 29450 - DNA, 22 bp, synthetic construct
  misc_feature 1..22: note = chemically synthesized
  source 1..22: mol_type = other DNA
atcaaatactttttctgtatct

SEQ ID NO: 29451 - DNA, 22 bp, synthetic construct
  misc_feature 1..22: note = chemically synthesized
  source 1..22: mol_type = other DNA
tcaaatactttttctgtatcta

SEQ ID NO: 29452 - DNA, 22 bp, synthetic construct
  misc_feature 1..22: note = chemically synthesized
  source 1..22: mol_type = other DNA
tttctgtatctattgagatgat

SEQ ID NO: 29453 - DNA, 22 bp, synthetic construct
  misc_feature 1..22: note = chemically synthesized
  source 1..22: mol_type = other DNA
ttctgtatctattgagatgatc

SEQ ID NO: 29454 - DNA, 22 bp, synthetic construct
  misc_feature 1..22: note = chemically synthesized
  source 1..22: mol_type = other DNA
tctgtatctattgagatgatca

SEQ ID NO: 29455 - DNA, 22 bp, synthetic construct
  misc_feature 1..22: note = chemically synthesized
  source 1..22: mol_type = other DNA
ctgtatctattgagatgatcat

SEQ ID NO: 29456 - DNA, 22 bp, synthetic construct
  misc_feature 1..22: note = chemically synthesized
  source 1..22: mol_type = other DNA
tgtatctattgagatgatcata

SEQ ID NO: 29457 - DNA, 22 bp, synthetic construct
  misc_feature 1..22: note = chemically synthesized
  source 1..22: mol_type = other DNA
tatctattgagatgatcatatg

SEQ ID NO: 29458 - DNA, 22 bp, synthetic construct
  misc_feature 1..22: note = chemically synthesized
  source 1..22: mol_type = other DNA
ttgagatgatcatatggttttt

SEQ ID NO: 29459 - DNA, 22 bp, synthetic construct
  misc_feature 1..22: note = chemically synthesized
  source 1..22: mol_type = other DNA
agatgatcatatggtttttgtt

SEQ ID NO: 29460 - DNA, 22 bp, synthetic construct
  misc_feature 1..22: note = chemically synthesized
  source 1..22: mol_type = other DNA
ttgttctttttgttgatgtgat

SEQ ID NO: 29461 - DNA, 22 bp, synthetic construct
  misc_feature 1..22: note = chemically synthesized
  source 1..22: mol_type = other DNA
tgttctttttgttgatgtgatg

SEQ ID NO: 29462 - DNA, 22 bp, synthetic construct
  misc_feature 1..22: note = chemically synthesized
  source 1..22: mol_type = other DNA
gttctttttgttgatgtgatgt

SEQ ID NO: 29463 - DNA, 22 bp, synthetic construct
  misc_feature 1..22: note = chemically synthesized
  source 1..22: mol_type = other DNA
ttctttttgttgatgtgatgta

SEQ ID NO: 29464 - DNA, 22 bp, synthetic construct
  misc_feature 1..22: note = chemically synthesized
  source 1..22: mol_type = other DNA
tttttgttgatgtgatgtatca

SEQ ID NO: 29465 - DNA, 22 bp, synthetic construct
  misc_feature 1..22: note = chemically synthesized
  source 1..22: mol_type = other DNA
tttgttgatgtgatgtatcaca

SEQ ID NO: 29466 - DNA, 22 bp, synthetic construct
  misc_feature 1..22: note = chemically synthesized
  source 1..22: mol_type = other DNA
ttgttgatgtgatgtatcacat

SEQ ID NO: 29467 - DNA, 22 bp, synthetic construct
  misc_feature 1..22: note = chemically synthesized
  source 1..22: mol_type = other DNA
tgttgatgtgatgtatcacatt

SEQ ID NO: 29468 - DNA, 22 bp, synthetic construct
  misc_feature 1..22: note = chemically synthesized
  source 1..22: mol_type = other DNA
gttgatgtgatgtatcacattt

SEQ ID NO: 29469 - DNA, 22 bp, synthetic construct
  misc_feature 1..22: note = chemically synthesized
  source 1..22: mol_type = other DNA
ttgatgtgatgtatcacattta

SEQ ID NO: 29470 - DNA, 22 bp, synthetic construct
  misc_feature 1..22: note = chemically synthesized
  source 1..22: mol_type = other DNA
atgtgatgtatcacatttattg

SEQ ID NO: 29471 - DNA, 22 bp, synthetic construct
  misc_feature 1..22: note = chemically synthesized
  source 1..22: mol_type = other DNA
attgatttgaactgttcttgca

SEQ ID NO: 29472 - DNA, 22 bp, synthetic construct
  misc_feature 1..22: note = chemically synthesized
  source 1..22: mol_type = other DNA
ttgatttgaactgttcttgcaa

SEQ ID NO: 29473 - DNA, 22 bp, synthetic construct
  misc_feature 1..22: note = chemically synthesized
  source 1..22: mol_type = other DNA
atttgaactgttcttgcaaccc

SEQ ID NO: 29474 - DNA, 22 bp, synthetic construct
  misc_feature 1..22: note = chemically synthesized
  source 1..22: mol_type = other DNA
gaactgttcttgcaaccctagt

SEQ ID NO: 29475 - DNA, 22 bp, synthetic construct
  misc_feature 1..22: note = chemically synthesized
  source 1..22: mol_type = other DNA
aactgttcttgcaaccctagta

SEQ ID NO: 29476 - DNA, 22 bp, synthetic construct
  misc_feature 1..22: note = chemically synthesized
  source 1..22: mol_type = other DNA
ttcttgcaaccctagtataaat

SEQ ID NO: 29477 - DNA, 22 bp, synthetic construct
  misc_feature 1..22: note = chemically synthesized
  source 1..22: mol_type = other DNA
ttgcaaccctagtataaatccc

SEQ ID NO: 29478 - DNA, 22 bp, synthetic construct
  misc_feature 1..22: note = chemically synthesized
  source 1..22: mol_type = other DNA
gcaaccctagtataaatcccac

SEQ ID NO: 29479 - DNA, 22 bp, synthetic construct
  misc_feature 1..22: note = chemically synthesized
  source 1..22: mol_type = other DNA
caaccctagtataaatcccact

SEQ ID NO: 29480 - DNA, 22 bp, synthetic construct
  misc_feature 1..22: note = chemically synthesized
  source 1..22: mol_type = other DNA
gtataaatcccacttgatcatg

SEQ ID NO: 29481 - DNA, 22 bp, synthetic construct
  misc_feature 1..22: note = chemically synthesized
  source 1..22: mol_type = other DNA
gatcatggtgtattatcttttg

SEQ ID NO: 29482 - DNA, 22 bp, synthetic construct
  misc_feature 1..22: note = chemically synthesized
  source 1..22: mol_type = other DNA
atcatggtgtattatcttttgg

SEQ ID NO: 29483 - DNA, 22 bp, synthetic construct
  misc_feature 1..22: note = chemically synthesized
  source 1..22: mol_type = other DNA
tcttttggatgtactgttggat

SEQ ID NO: 29484 - DNA, 22 bp, synthetic construct
  misc_feature 1..22: note = chemically synthesized
  source 1..22: mol_type = other DNA
ttggatgtactgttggattcag

SEQ ID NO: 29485 - DNA, 22 bp, synthetic construct
  misc_feature 1..22: note = chemically synthesized
  source 1..22: mol_type = other DNA
tggatgtactgttggattcagt

SEQ ID NO: 29486 - DNA, 22 bp, synthetic construct
  misc_feature 1..22: note = chemically synthesized
  source 1..22: mol_type = other DNA
ggatgtactgttggattcagtt

SEQ ID NO: 29487 - DNA, 22 bp, synthetic construct
  misc_feature 1..22: note = chemically synthesized
  source 1..22: mol_type = other DNA
gatgtactgttggattcagttt

SEQ ID NO: 29488 - DNA, 22 bp, synthetic construct
  misc_feature 1..22: note = chemically synthesized
  source 1..22: mol_type = other DNA
ttggattcagtttgctagtatt

SEQ ID NO: 29489 - DNA, 22 bp, synthetic construct
  misc_feature 1..22: note = chemically synthesized
  source 1..22: mol_type = other DNA
gattcagtttgctagtattttg

SEQ ID NO: 29490 - DNA, 22 bp, synthetic construct
  misc_feature 1..22: note = chemically synthesized
  source 1..22: mol_type = other DNA
agtttgctagtattttgttgag

SEQ ID NO: 29491 - DNA, 22 bp, synthetic construct
  misc_feature 1..22: note = chemically synthesized
  source 1..22: mol_type = other DNA
gctagtattttgttgaggattt

SEQ ID NO: 29492 - DNA, 22 bp, synthetic construct
  misc_feature 1..22: note = chemically synthesized
  source 1..22: mol_type = other DNA
ctagtattttgttgaggatttt

SEQ ID NO: 29493 - DNA, 22 bp, synthetic construct
  misc_feature 1..22: note = chemically synthesized
  source 1..22: mol_type = other DNA
gtattttgttgaggattttcac

SEQ ID NO: 29494 - DNA, 22 bp, synthetic construct
  misc_feature 1..22: note = chemically synthesized
  source 1..22: mol_type = other DNA
tgttgaggattttcacacctat

SEQ ID NO: 29495 - DNA, 22 bp, synthetic construct
  misc_feature 1..22: note = chemically synthesized
  source 1..22: mol_type = other DNA
gttgaggattttcacacctatg

SEQ ID NO: 29496 - DNA, 22 bp, synthetic construct
  misc_feature 1..22: note = chemically synthesized
  source 1..22: mol_type = other DNA
ttgaggattttcacacctatgt

SEQ ID NO: 29497 - DNA, 22 bp, synthetic construct
  misc_feature 1..22: note = chemically synthesized
  source 1..22: mol_type = other DNA
aggattttcacacctatgttcc

SEQ ID NO: 29498 - DNA, 22 bp, synthetic construct
  misc_feature 1..22: note = chemically synthesized
  source 1..22: mol_type = other DNA
tcacacctatgttccatcaggg

SEQ ID NO: 29499 - DNA, 22 bp, synthetic construct
  misc_feature 1..22: note = chemically synthesized
  source 1..22: mol_type = other DNA
cacacctatgttccatcaggga

SEQ ID NO: 29500 - DNA, 22 bp, synthetic construct
  misc_feature 1..22: note = chemically synthesized
  source 1..22: mol_type = other DNA
acacctatgttccatcagggat

SEQ ID NO: 29501 - DNA, 22 bp, synthetic construct
  misc_feature 1..22: note = chemically synthesized
  source 1..22: mol_type = other DNA
tgttccatcagggatattgacc

SEQ ID NO: 29502 - DNA, 22 bp, synthetic construct
  misc_feature 1..22: note = chemically synthesized
  source 1..22: mol_type = other DNA
catcagggatattgacctgcag

SEQ ID NO: 29503 - DNA, 22 bp, synthetic construct
  misc_feature 1..22: note = chemically synthesized
  source 1..22: mol_type = other DNA
acctgcagttttatttttactt

SEQ ID NO: 29504 - DNA, 22 bp, synthetic construct
  misc_feature 1..22: note = chemically synthesized
  source 1..22: mol_type = other DNA
cagttttatttttacttgcatc

SEQ ID NO: 29505 - DNA, 22 bp, synthetic construct
  misc_feature 1..22: note = chemically synthesized
  source 1..22: mol_type = other DNA
tatttttacttgcatccttgtc

SEQ ID NO: 29506 - DNA, 22 bp, synthetic construct
  misc_feature 1..22: note = chemically synthesized
  source 1..22: mol_type = other DNA
atttttacttgcatccttgtct

SEQ ID NO: 29507 - DNA, 22 bp, synthetic construct
  misc_feature 1..22: note = chemically synthesized
  source 1..22: mol_type = other DNA
tttttacttgcatccttgtctg

SEQ ID NO: 29508 - DNA, 22 bp, synthetic construct
  misc_feature 1..22: note = chemically synthesized
  source 1..22: mol_type = other DNA
ttacttgcatccttgtctggtt

SEQ ID NO: 29509 - DNA, 22 bp, synthetic construct
  misc_feature 1..22: note = chemically synthesized
  source 1..22: mol_type = other DNA
tacttgcatccttgtctggtta

SEQ ID NO: 29510 - DNA, 22 bp, synthetic construct
  misc_feature 1..22: note = chemically synthesized
  source 1..22: mol_type = other DNA
acttgcatccttgtctggttat

SEQ ID NO: 29511 - DNA, 22 bp, synthetic construct
  misc_feature 1..22: note = chemically synthesized
  source 1..22: mol_type = other DNA
cttgcatccttgtctggttatg

SEQ ID NO: 29512 - DNA, 22 bp, synthetic construct
  misc_feature 1..22: note = chemically synthesized
  source 1..22: mol_type = other DNA
gcatccttgtctggttatggaa

SEQ ID NO: 29513 - DNA, 22 bp, synthetic construct
  misc_feature 1..22: note = chemically synthesized
  source 1..22: mol_type = other DNA
catccttgtctggttatggaat

SEQ ID NO: 29514 - DNA, 22 bp, synthetic construct
  misc_feature 1..22: note = chemically synthesized
  source 1..22: mol_type = other DNA
gtctggttatggaatcaggata

SEQ ID NO: 29515 - DNA, 22 bp, synthetic construct
  misc_feature 1..22: note = chemically synthesized
  source 1..22: mol_type = other DNA
tctggttatggaatcaggataa

SEQ ID NO: 29516 - DNA, 22 bp, synthetic construct
  misc_feature 1..22: note = chemically synthesized
  source 1..22: mol_type = other DNA
gttatggaatcaggataatact

SEQ ID NO: 29517 - DNA, 22 bp, synthetic construct
  misc_feature 1..22: note = chemically synthesized
  source 1..22: mol_type = other DNA
tggaatcaggataatactggcc

SEQ ID NO: 29518 - DNA, 22 bp, synthetic construct
  misc_feature 1..22: note = chemically synthesized
  source 1..22: mol_type = other DNA
gcctcagagaatgagttaggga

SEQ ID NO: 29519 - DNA, 22 bp, synthetic construct
  misc_feature 1..22: note = chemically synthesized
  source 1..22: mol_type = other DNA
agagaatgagttagggagaatt

SEQ ID NO: 29520 - DNA, 22 bp, synthetic construct
  misc_feature 1..22: note = chemically synthesized
  source 1..22: mol_type = other DNA
gggagaattccttcctgtttaa

SEQ ID NO: 29521 - DNA, 22 bp, synthetic construct
  misc_feature 1..22: note = chemically synthesized
  source 1..22: mol_type = other DNA
cttcctgtttaatttttaaaag

SEQ ID NO: 29522 - DNA, 22 bp, synthetic construct
  misc_feature 1..22: note = chemically synthesized
  source 1..22: mol_type = other DNA
cctgtttaatttttaaaagaat

SEQ ID NO: 29523 - DNA, 22 bp, synthetic construct
  misc_feature 1..22: note = chemically synthesized
  source 1..22: mol_type = other DNA
ctgtttaatttttaaaagaatt

SEQ ID NO: 29524 - DNA, 22 bp, synthetic construct
  misc_feature 1..22: note = chemically synthesized
  source 1..22: mol_type = other DNA
tttaatttttaaaagaatttaa

SEQ ID NO: 29525 - DNA, 22 bp, synthetic construct
  misc_feature 1..22: note = chemically synthesized
  source 1..22: mol_type = other DNA
aatttttaaaagaatttaagga

SEQ ID NO: 29526 - DNA, 22 bp, synthetic construct
  misc_feature 1..22: note = chemically synthesized
  source 1..22: mol_type = other DNA
atttttaaaagaatttaaggag

SEQ ID NO: 29527 - DNA, 22 bp, synthetic construct
  misc_feature 1..22: note = chemically synthesized
  source 1..22: mol_type = other DNA
ttaaaagaatttaaggagactt

SEQ ID NO: 29528 - DNA, 22 bp, synthetic construct
  misc_feature 1..22: note = chemically synthesized
  source 1..22: mol_type = other DNA
taaaagaatttaaggagacttg

SEQ ID NO: 29529 - DNA, 22 bp, synthetic construct
  misc_feature 1..22: note = chemically synthesized
  source 1..22: mol_type = other DNA
aaaagaatttaaggagacttgt

SEQ ID NO: 29530 - DNA, 22 bp, synthetic construct
  misc_feature 1..22: note = chemically synthesized
  source 1..22: mol_type = other DNA
aaagaatttaaggagacttgtt

SEQ ID NO: 29531 - DNA, 22 bp, synthetic construct
  misc_feature 1..22: note = chemically synthesized
  source 1..22: mol_type = other DNA
aaggagacttgttagttttctt

SEQ ID NO: 29532 - DNA, 22 bp, synthetic construct
  misc_feature 1..22: note = chemically synthesized
  source 1..22: mol_type = other DNA
aggagacttgttagttttcttt

SEQ ID NO: 29533 - DNA, 22 bp, synthetic construct
  misc_feature 1..22: note = chemically synthesized
  source 1..22: mol_type = other DNA
gttagttttctttgaaagtttg

SEQ ID NO: 29534 - DNA, 22 bp, synthetic construct
  misc_feature 1..22: note = chemically synthesized
  source 1..22: mol_type = other DNA
ttagttttctttgaaagtttgg

SEQ ID NO: 29535 - DNA, 22 bp, synthetic construct
  misc_feature 1..22: note = chemically synthesized
  source 1..22: mol_type = other DNA
gttttctttgaaagtttggtaa

SEQ ID NO: 29536 - DNA, 22 bp, synthetic construct
  misc_feature 1..22: note = chemically synthesized
  source 1..22: mol_type = other DNA
tctttgaaagtttggtaaaatt

SEQ ID NO: 29537 - DNA, 22 bp, synthetic construct
  misc_feature 1..22: note = chemically synthesized
  source 1..22: mol_type = other DNA
ctttgaaagtttggtaaaattt

SEQ ID NO: 29538 - DNA, 22 bp, synthetic construct
  misc_feature 1..22: note = chemically synthesized
  source 1..22: mol_type = other DNA
tttgaaagtttggtaaaatttg

SEQ ID NO: 29539 - DNA, 22 bp, synthetic construct
  misc_feature 1..22: note = chemically synthesized
  source 1..22: mol_type = other DNA
tgaaagtttggtaaaatttgac

SEQ ID NO: 29540 - DNA, 22 bp, synthetic construct
  misc_feature 1..22: note = chemically synthesized
  source 1..22: mol_type = other DNA
gaaagtttggtaaaatttgaca

SEQ ID NO: 29541 - DNA, 22 bp, synthetic construct
  misc_feature 1..22: note = chemically synthesized
  source 1..22: mol_type = other DNA
aaagtttggtaaaatttgacag

SEQ ID NO: 29542 - DNA, 22 bp, synthetic construct
  misc_feature 1..22: note = chemically synthesized
  source 1..22: mol_type = other DNA
ggtaaaatttgacagtaaagcc

SEQ ID NO: 29543 - DNA, 22 bp, synthetic construct
  misc_feature 1..22: note = chemically synthesized
  source 1..22: mol_type = other DNA
gtaaaatttgacagtaaagcca

SEQ ID NO: 29544 - DNA, 22 bp, synthetic construct
  misc_feature 1..22: note = chemically synthesized
  source 1..22: mol_type = other DNA
gacagtaaagccatctggtctt

SEQ ID NO: 29545 - DNA, 22 bp, synthetic construct
  misc_feature 1..22: note = chemically synthesized
  source 1..22: mol_type = other DNA
acagtaaagccatctggtcttg

SEQ ID NO: 29546 - DNA, 22 bp, synthetic construct
  misc_feature 1..22: note = chemically synthesized
  source 1..22: mol_type = other DNA
gtcttgaaattttcttttttgg

SEQ ID NO: 29547 - DNA, 22 bp, synthetic construct
  misc_feature 1..22: note = chemically synthesized
  source 1..22: mol_type = other DNA
gaaattttcttttttgggagac

SEQ ID NO: 29548 - DNA, 22 bp, synthetic construct
  misc_feature 1..22: note = chemically synthesized
  source 1..22: mol_type = other DNA
aaattttcttttttgggagact

SEQ ID NO: 29549 - DNA, 22 bp, synthetic construct
  misc_feature 1..22: note = chemically synthesized
  source 1..22: mol_type = other DNA
tcttttttgggagactttttac

SEQ ID NO: 29550 - DNA, 22 bp, synthetic construct
  misc_feature 1..22: note = chemically synthesized
  source 1..22: mol_type = other DNA
cttttttgggagactttttact

SEQ ID NO: 29551 - DNA, 22 bp, synthetic construct
  misc_feature 1..22: note = chemically synthesized
  source 1..22: mol_type = other DNA
ttttttgggagactttttacta

SEQ ID NO: 29552 - DNA, 22 bp, synthetic construct
  misc_feature 1..22: note = chemically synthesized
  source 1..22: mol_type = other DNA
ttttgggagactttttactact

SEQ ID NO: 29553 - DNA, 22 bp, synthetic construct
  misc_feature 1..22: note = chemically synthesized
  source 1..22: mol_type = other DNA
tttgggagactttttactactg

SEQ ID NO: 29554 - DNA, 22 bp, synthetic construct
  misc_feature 1..22: note = chemically synthesized
  source 1..22: mol_type = other DNA
ttgggagactttttactactga

SEQ ID NO: 29555 - DNA, 22 bp, synthetic construct
  misc_feature 1..22: note = chemically synthesized
  source 1..22: mol_type = other DNA
tgggagactttttactactgat

SEQ ID NO: 29556 - DNA, 22 bp, synthetic construct
  misc_feature 1..22: note = chemically synthesized
  source 1..22: mol_type = other DNA
gggagactttttactactgatt

SEQ ID NO: 29557 - DNA, 22 bp, synthetic construct
  misc_feature 1..22: note = chemically synthesized
  source 1..22: mol_type = other DNA
ggagactttttactactgattc

SEQ ID NO: 29558 - DNA, 22 bp, synthetic construct
  misc_feature 1..22: note = chemically synthesized
  source 1..22: mol_type = other DNA
tttactactgattcaatttcat

SEQ ID NO: 29559 - DNA, 22 bp, synthetic construct
  misc_feature 1..22: note = chemically synthesized
  source 1..22: mol_type = other DNA
ttactactgattcaatttcatt

SEQ ID NO: 29560 - DNA, 22 bp, synthetic construct
  misc_feature 1..22: note = chemically synthesized
  source 1..22: mol_type = other DNA
tactactgattcaatttcatta

SEQ ID NO: 29561 - DNA, 22 bp, synthetic construct
  misc_feature 1..22: note = chemically synthesized
  source 1..22: mol_type = other DNA
actactgattcaatttcattat

SEQ ID NO: 29562 - DNA, 22 bp, synthetic construct
  misc_feature 1..22: note = chemically synthesized
  source 1..22: mol_type = other DNA
ctactgattcaatttcattatt

SEQ ID NO: 29563 - DNA, 22 bp, synthetic construct
  misc_feature 1..22: note = chemically synthesized
  source 1..22: mol_type = other DNA
ctgattcaatttcattattcat

SEQ ID NO: 29564 - DNA, 22 bp, synthetic construct
  misc_feature 1..22: note = chemically synthesized
  source 1..22: mol_type = other DNA
attcaatttcattattcattac

SEQ ID NO: 29565 - DNA, 22 bp, synthetic construct
  misc_feature 1..22: note = chemically synthesized
  source 1..22: mol_type = other DNA
aatttcattattcattactggt

SEQ ID NO: 29566 - DNA, 22 bp, synthetic construct
  misc_feature 1..22: note = chemically synthesized
  source 1..22: mol_type = other DNA
cattattcattactggtctgtt

SEQ ID NO: 29567 - DNA, 22 bp, synthetic construct
  misc_feature 1..22: note = chemically synthesized
  source 1..22: mol_type = other DNA
attattcattactggtctgttc

SEQ ID NO: 29568 - DNA, 22 bp, synthetic construct
  misc_feature 1..22: note = chemically synthesized
  source 1..22: mol_type = other DNA
ttcattactggtctgttcaggt

SEQ ID NO: 29569 - DNA, 22 bp, synthetic construct
  misc_feature 1..22: note = chemically synthesized
  source 1..22: mol_type = other DNA
attactggtctgttcaggtttt

SEQ ID NO: 29570 - DNA, 22 bp, synthetic construct
  misc_feature 1..22: note = chemically synthesized
  source 1..22: mol_type = other DNA
ctggtctgttcaggttttctat

SEQ ID NO: 29571 - DNA, 22 bp, synthetic construct
  misc_feature 1..22: note = chemically synthesized
  source 1..22: mol_type = other DNA
gtctgttcaggttttctattct

SEQ ID NO: 29572 - DNA, 22 bp, synthetic construct
  misc_feature 1..22: note = chemically synthesized
  source 1..22: mol_type = other DNA
ttcaggttttctattctttctt

SEQ ID NO: 29573 - DNA, 22 bp, synthetic construct
  misc_feature 1..22: note = chemically synthesized
  source 1..22: mol_type = other DNA
aggttttctattctttcttaat

SEQ ID NO: 29574 - DNA, 22 bp, synthetic construct
  misc_feature 1..22: note = chemically synthesized
  source 1..22: mol_type = other DNA
tctattctttcttaattcaatc

SEQ ID NO: 29575 - DNA, 22 bp, synthetic construct
  misc_feature 1..22: note = chemically synthesized
  source 1..22: mol_type = other DNA
ctattctttcttaattcaatct

SEQ ID NO: 29576 - DNA, 22 bp, synthetic construct
  misc_feature 1..22: note = chemically synthesized
  source 1..22: mol_type = other DNA
tattctttcttaattcaatctt

SEQ ID NO: 29577 - DNA, 22 bp, synthetic construct
  misc_feature 1..22: note = chemically synthesized
  source 1..22: mol_type = other DNA
ttctttcttaattcaatcttgg

SEQ ID NO: 29578 - DNA, 22 bp, synthetic construct
  misc_feature 1..22: note = chemically synthesized
  source 1..22: mol_type = other DNA
tttcttaattcaatcttggtag

SEQ ID NO: 29579 - DNA, 22 bp, synthetic construct
  misc_feature 1..22: note = chemically synthesized
  source 1..22: mol_type = other DNA
tcttaattcaatcttggtaggt

SEQ ID NO: 29580 - DNA, 22 bp, synthetic construct
  misc_feature 1..22: note = chemically synthesized
  source 1..22: mol_type = other DNA
cttaattcaatcttggtaggtg

SEQ ID NO: 29581 - DNA, 22 bp, synthetic construct
  misc_feature 1..22: note = chemically synthesized
  source 1..22: mol_type = other DNA
ttaattcaatcttggtaggtgg

SEQ ID NO: 29582 - DNA, 22 bp, synthetic construct
  misc_feature 1..22: note = chemically synthesized
  source 1..22: mol_type = other DNA
aattcaatcttggtaggtggta

SEQ ID NO: 29583 - DNA, 22 bp, synthetic construct
  misc_feature 1..22: note = chemically synthesized
  source 1..22: mol_type = other DNA
attcaatcttggtaggtggtat

SEQ ID NO: 29584 - DNA, 22 bp, synthetic construct
  misc_feature 1..22: note = chemically synthesized
  source 1..22: mol_type = other DNA
aatcttggtaggtggtatgtgt

SEQ ID NO: 29585 - DNA, 22 bp, synthetic construct
  misc_feature 1..22: note = chemically synthesized
  source 1..22: mol_type = other DNA
ggtaggtggtatgtgtccagaa

SEQ ID NO: 29586 - DNA, 22 bp, synthetic construct
  misc_feature 1..22: note = chemically synthesized
  source 1..22: mol_type = other DNA
gtaggtggtatgtgtccagaaa

SEQ ID NO: 29587 - DNA, 22 bp, synthetic construct
  misc_feature 1..22: note = chemically synthesized
  source 1..22: mol_type = other DNA
attaatttcctctagatttttc

SEQ ID NO: 29588 - DNA, 22 bp, synthetic construct
  misc_feature 1..22: note = chemically synthesized
  source 1..22: mol_type = other DNA
ttaatttcctctagatttttca

SEQ ID NO: 29589 - DNA, 22 bp, synthetic construct
  misc_feature 1..22: note = chemically synthesized
  source 1..22: mol_type = other DNA
atttcctctagatttttcagtt

SEQ ID NO: 29590 - DNA, 22 bp, synthetic construct
  misc_feature 1..22: note = chemically synthesized
  source 1..22: mol_type = other DNA
cctctagatttttcagtttttt

SEQ ID NO: 29591 - DNA, 22 bp, synthetic construct
  misc_feature 1..22: note = chemically synthesized
  source 1..22: mol_type = other DNA
ctctagatttttcagtttttta

SEQ ID NO: 29592 - DNA, 22 bp, synthetic construct
  misc_feature 1..22: note = chemically synthesized
  source 1..22: mol_type = other DNA
tagatttttcagttttttagtg

SEQ ID NO: 29593 - DNA, 22 bp, synthetic construct
  misc_feature 1..22: note = chemically synthesized
  source 1..22: mol_type = other DNA
gatttttcagttttttagtgta

SEQ ID NO: 29594 - DNA, 22 bp, synthetic construct
  misc_feature 1..22: note = chemically synthesized
  source 1..22: mol_type = other DNA
ttcagttttttagtgtatggtt

SEQ ID NO: 29595 - DNA, 22 bp, synthetic construct
  misc_feature 1..22: note = chemically synthesized
  source 1..22: mol_type = other DNA
tcagttttttagtgtatggttg

SEQ ID NO: 29596 - DNA, 22 bp, synthetic construct
  misc_feature 1..22: note = chemically synthesized
  source 1..22: mol_type = other DNA
cagttttttagtgtatggttgt

SEQ ID NO: 29597 - DNA, 22 bp, synthetic construct
  misc_feature 1..22: note = chemically synthesized
  source 1..22: mol_type = other DNA
agttttttagtgtatggttgtt

SEQ ID NO: 29598 - DNA, 22 bp, synthetic construct
  misc_feature 1..22: note = chemically synthesized
  source 1..22: mol_type = other DNA
tttagtgtatggttgttcataa

SEQ ID NO: 29599 - DNA, 22 bp, synthetic construct
  misc_feature 1..22: note = chemically synthesized
  source 1..22: mol_type = other DNA
ttagtgtatggttgttcataat

SEQ ID NO: 29600 - DNA, 22 bp, synthetic construct
  misc_feature 1..22: note = chemically synthesized
  source 1..22: mol_type = other DNA
tagtgtatggttgttcataata

SEQ ID NO: 29601 - DNA, 22 bp, synthetic construct
  misc_feature 1..22: note = chemically synthesized
  source 1..22: mol_type = other DNA
agtgtatggttgttcataatag

SEQ ID NO: 29602 - DNA, 22 bp, synthetic construct
  misc_feature 1..22: note = chemically synthesized
  source 1..22: mol_type = other DNA
gtgtatggttgttcataatagt

SEQ ID NO: 29603 - DNA, 22 bp, synthetic construct
  misc_feature 1..22: note = chemically synthesized
  source 1..22: mol_type = other DNA
ttcataatagtctctgataatc

SEQ ID NO: 29604 - DNA, 22 bp, synthetic construct
  misc_feature 1..22: note = chemically synthesized
  source 1..22: mol_type = other DNA
ataatagtctctgataatcttt

SEQ ID NO: 29605 - DNA, 22 bp, synthetic construct
  misc_feature 1..22: note = chemically synthesized
  source 1..22: mol_type = other DNA
tgataatcttttctatttctgt

SEQ ID NO: 29606 - DNA, 22 bp, synthetic construct
  misc_feature 1..22: note = chemically synthesized
  source 1..22: mol_type = other DNA
ataatcttttctatttctgtgg

SEQ ID NO: 29607 - DNA, 22 bp, synthetic construct
  misc_feature 1..22: note = chemically synthesized
  source 1..22: mol_type = other DNA
ttctatttctgtggtatcggtt

SEQ ID NO: 29608 - DNA, 22 bp, synthetic construct
  misc_feature 1..22: note = chemically synthesized
  source 1..22: mol_type = other DNA
tctatttctgtggtatcggttg

SEQ ID NO: 29609 - DNA, 22 bp, synthetic construct
  misc_feature 1..22: note = chemically synthesized
  source 1..22: mol_type = other DNA
ctatttctgtggtatcggttgt

SEQ ID NO: 29610 - DNA, 22 bp, synthetic construct
  misc_feature 1..22: note = chemically synthesized
  source 1..22: mol_type = other DNA
tatttctgtggtatcggttgta

SEQ ID NO: 29611 - DNA, 22 bp, synthetic construct
  misc_feature 1..22: note = chemically synthesized
  source 1..22: mol_type = other DNA
tttctgtggtatcggttgtaat

SEQ ID NO: 29612 - DNA, 22 bp, synthetic construct
  misc_feature 1..22: note = chemically synthesized
  source 1..22: mol_type = other DNA
ctgtggtatcggttgtaatata

SEQ ID NO: 29613 - DNA, 22 bp, synthetic construct
  misc_feature 1..22: note = chemically synthesized
  source 1..22: mol_type = other DNA
tgtggtatcggttgtaatatat

SEQ ID NO: 29614 - DNA, 22 bp, synthetic construct
  misc_feature 1..22: note = chemically synthesized
  source 1..22: mol_type = other DNA
tggtatcggttgtaatatattt

SEQ ID NO: 29615 - DNA, 22 bp, synthetic construct
  misc_feature 1..22: note = chemically synthesized
  source 1..22: mol_type = other DNA
taatatattttcttttttattt

SEQ ID NO: 29616 - DNA, 22 bp, synthetic construct
  misc_feature 1..22: note = chemically synthesized
  source 1..22: mol_type = other DNA
tcttttttatttctgattttct

SEQ ID NO: 29617 - DNA, 22 bp, synthetic construct
  misc_feature 1..22: note = chemically synthesized
  source 1..22: mol_type = other DNA
cttttttatttctgattttctt

SEQ ID NO: 29618 - DNA, 22 bp, synthetic construct
  misc_feature 1..22: note = chemically synthesized
  source 1..22: mol_type = other DNA
ttttttatttctgattttcttt

SEQ ID NO: 29619 - DNA, 22 bp, synthetic construct
  misc_feature 1..22: note = chemically synthesized
  source 1..22: mol_type = other DNA
ttttatttctgattttctttat

SEQ ID NO: 29620 - DNA, 22 bp, synthetic construct
  misc_feature 1..22: note = chemically synthesized
  source 1..22: mol_type = other DNA
tttatttctgattttctttatt

SEQ ID NO: 29621 - DNA, 22 bp, synthetic construct
  misc_feature 1..22: note = chemically synthesized
  source 1..22: mol_type = other DNA
ttatttctgattttctttattt

SEQ ID NO: 29622 - DNA, 22 bp, synthetic construct
  misc_feature 1..22: note = chemically synthesized
  source 1..22: mol_type = other DNA
tatttctgattttctttatttc

SEQ ID NO: 29623 - DNA, 22 bp, synthetic construct
  misc_feature 1..22: note = chemically synthesized
  source 1..22: mol_type = other DNA
atttctgattttctttatttca

SEQ ID NO: 29624 - DNA, 22 bp, synthetic construct
  misc_feature 1..22: note = chemically synthesized
  source 1..22: mol_type = other DNA
tttctgattttctttatttcag

SEQ ID NO: 29625 - DNA, 22 bp, synthetic construct
  misc_feature 1..22: note = chemically synthesized
  source 1..22: mol_type = other DNA
ctgattttctttatttcagtct

SEQ ID NO: 29626 - DNA, 22 bp, synthetic construct
  misc_feature 1..22: note = chemically synthesized
  source 1..22: mol_type = other DNA
tgattttctttatttcagtctc

SEQ ID NO: 29627 - DNA, 22 bp, synthetic construct
  misc_feature 1..22: note = chemically synthesized
  source 1..22: mol_type = other DNA
attttctttatttcagtctctt

SEQ ID NO: 29628 - DNA, 22 bp, synthetic construct
  misc_feature 1..22: note = chemically synthesized
  source 1..22: mol_type = other DNA
tctttatttcagtctcttctct

SEQ ID NO: 29629 - DNA, 22 bp, synthetic construct
  misc_feature 1..22: note = chemically synthesized
  source 1..22: mol_type = other DNA
ctttatttcagtctcttctctt

SEQ ID NO: 29630 - DNA, 22 bp, synthetic construct
  misc_feature 1..22: note = chemically synthesized
  source 1..22: mol_type = other DNA
tttatttcagtctcttctcttt

SEQ ID NO: 29631 - DNA, 22 bp, synthetic construct
  misc_feature 1..22: note = chemically synthesized
  source 1..22: mol_type = other DNA
tatttcagtctcttctcttttt

SEQ ID NO: 29632 - DNA, 22 bp, synthetic construct
  misc_feature 1..22: note = chemically synthesized
  source 1..22: mol_type = other DNA
atttcagtctcttctctttttc

SEQ ID NO: 29633 - DNA, 22 bp, synthetic construct
  misc_feature 1..22: note = chemically synthesized
  source 1..22: mol_type = other DNA
tttcagtctcttctctttttct

SEQ ID NO: 29634 - DNA, 22 bp, synthetic construct
  misc_feature 1..22: note = chemically synthesized
  source 1..22: mol_type = other DNA
cagtctcttctctttttcttgg

SEQ ID NO: 29635 - DNA, 22 bp, synthetic construct
  misc_feature 1..22: note = chemically synthesized
  source 1..22: mol_type = other DNA
agtctcttctctttttcttggt

SEQ ID NO: 29636 - DNA, 22 bp, synthetic construct
  misc_feature 1..22: note = chemically synthesized
  source 1..22: mol_type = other DNA
ttctctttttcttggttagtct

SEQ ID NO: 29637 - DNA, 22 bp, synthetic construct
  misc_feature 1..22: note = chemically synthesized
  source 1..22: mol_type = other DNA
ctctttttcttggttagtctag

SEQ ID NO: 29638 - DNA, 22 bp, synthetic construct
  misc_feature 1..22: note = chemically synthesized
  source 1..22: mol_type = other DNA
tctttttcttggttagtctagc

SEQ ID NO: 29639 - DNA, 22 bp, synthetic construct
  misc_feature 1..22: note = chemically synthesized
  source 1..22: mol_type = other DNA
tttttcttggttagtctagcta

SEQ ID NO: 29640 - DNA, 22 bp, synthetic construct
  misc_feature 1..22: note = chemically synthesized
  source 1..22: mol_type = other DNA
tttcttggttagtctagctaga

SEQ ID NO: 29641 - DNA, 22 bp, synthetic construct
  misc_feature 1..22: note = chemically synthesized
  source 1..22: mol_type = other DNA
ttcttggttagtctagctagag

SEQ ID NO: 29642 - DNA, 22 bp, synthetic construct
  misc_feature 1..22: note = chemically synthesized
  source 1..22: mol_type = other DNA
tcttggttagtctagctagagc

SEQ ID NO: 29643 - DNA, 22 bp, synthetic construct
  misc_feature 1..22: note = chemically synthesized
  source 1..22: mol_type = other DNA
cttggttagtctagctagagct

SEQ ID NO: 29644 - DNA, 22 bp, synthetic construct
  misc_feature 1..22: note = chemically synthesized
  source 1..22: mol_type = other DNA
ttggttagtctagctagagcta

SEQ ID NO: 29645 - DNA, 22 bp, synthetic construct
  misc_feature 1..22: note = chemically synthesized
  source 1..22: mol_type = other DNA
ggttagtctagctagagctata

SEQ ID NO: 29646 - DNA, 22 bp, synthetic construct
  misc_feature 1..22: note = chemically synthesized
  source 1..22: mol_type = other DNA
gttagtctagctagagctatat

SEQ ID NO: 29647 - DNA, 22 bp, synthetic construct
  misc_feature 1..22: note = chemically synthesized
  source 1..22: mol_type = other DNA
gtctagctagagctatatccat

SEQ ID NO: 29648 - DNA, 22 bp, synthetic construct
  misc_feature 1..22: note = chemically synthesized
  source 1..22: mol_type = other DNA
gctagagctatatccattttat

SEQ ID NO: 29649 - DNA, 22 bp, synthetic construct
  misc_feature 1..22: note = chemically synthesized
  source 1..22: mol_type = other DNA
gagctatatccattttatcttt

SEQ ID NO: 29650 - DNA, 22 bp, synthetic construct
  misc_feature 1..22: note = chemically synthesized
  source 1..22: mol_type = other DNA
tatccattttatcttttttaaa

SEQ ID NO: 29651 - DNA, 22 bp, synthetic construct
  misc_feature 1..22: note = chemically synthesized
  source 1..22: mol_type = other DNA
tatcttttttaaataacaactt

SEQ ID NO: 29652 - DNA, 22 bp, synthetic construct
  misc_feature 1..22: note = chemically synthesized
  source 1..22: mol_type = other DNA
atcttttttaaataacaacttt

SEQ ID NO: 29653 - DNA, 22 bp, synthetic construct
  misc_feature 1..22: note = chemically synthesized
  source 1..22: mol_type = other DNA
tcttttttaaataacaactttt

SEQ ID NO: 29654 - DNA, 22 bp, synthetic construct
  misc_feature 1..22: note = chemically synthesized
  source 1..22: mol_type = other DNA
ttttaaataacaacttttcatt

SEQ ID NO: 29655 - DNA, 22 bp, synthetic construct
  misc_feature 1..22: note = chemically synthesized
  source 1..22: mol_type = other DNA
tttaaataacaacttttcattt

SEQ ID NO: 29656 - DNA, 22 bp, synthetic construct
  misc_feature 1..22: note = chemically synthesized
  source 1..22: mol_type = other DNA
ttaaataacaacttttcatttt

SEQ ID NO: 29657 - DNA, 22 bp, synthetic construct
  misc_feature 1..22: note = chemically synthesized
  source 1..22: mol_type = other DNA
taaataacaacttttcattttg

SEQ ID NO: 29658 - DNA, 22 bp, synthetic construct
  misc_feature 1..22: note = chemically synthesized
  source 1..22: mol_type = other DNA
aaataacaacttttcattttgc

SEQ ID NO: 29659 - DNA, 22 bp, synthetic construct
  misc_feature 1..22: note = chemically synthesized
  source 1..22: mol_type = other DNA
aataacaacttttcattttgct

SEQ ID NO: 29660 - DNA, 22 bp, synthetic construct
  misc_feature 1..22: note = chemically synthesized
  source 1..22: mol_type = other DNA
ttcattttgctaatcccttgtt

SEQ ID NO: 29661 - DNA, 22 bp, synthetic construct
  misc_feature 1..22: note = chemically synthesized
  source 1..22: mol_type = other DNA
tcattttgctaatcccttgttg

SEQ ID NO: 29662 - DNA, 22 bp, synthetic construct
  misc_feature 1..22: note = chemically synthesized
  source 1..22: mol_type = other DNA
cattttgctaatcccttgttgt

SEQ ID NO: 29663 - DNA, 22 bp, synthetic construct
  misc_feature 1..22: note = chemically synthesized
  source 1..22: mol_type = other DNA
attttgctaatcccttgttgtt

SEQ ID NO: 29664 - DNA, 22 bp, synthetic construct
  misc_feature 1..22: note = chemically synthesized
  source 1..22: mol_type = other DNA
tgctaatcccttgttgttgttt

SEQ ID NO: 29665 - DNA, 22 bp, synthetic construct
  misc_feature 1..22: note = chemically synthesized
  source 1..22: mol_type = other DNA
gctaatcccttgttgttgtttt

SEQ ID NO: 29666 - DNA, 22 bp, synthetic construct
  misc_feature 1..22: note = chemically synthesized
  source 1..22: mol_type = other DNA
ctaatcccttgttgttgttttt

SEQ ID NO: 29667 - DNA, 22 bp, synthetic construct
  misc_feature 1..22: note = chemically synthesized
  source 1..22: mol_type = other DNA
atcccttgttgttgtttttctc

SEQ ID NO: 29668 - DNA, 22 bp, synthetic construct
  misc_feature 1..22: note = chemically synthesized
  source 1..22: mol_type = other DNA
gttgttgtttttctctatttca

SEQ ID NO: 29669 - DNA, 22 bp, synthetic construct
  misc_feature 1..22: note = chemically synthesized
  source 1..22: mol_type = other DNA
ttgttgtttttctctatttcat

SEQ ID NO: 29670 - DNA, 22 bp, synthetic construct
  misc_feature 1..22: note = chemically synthesized
  source 1..22: mol_type = other DNA
ttgtttttctctatttcattaa

SEQ ID NO: 29671 - DNA, 22 bp, synthetic construct
  misc_feature 1..22: note = chemically synthesized
  source 1..22: mol_type = other DNA
tttttctctatttcattaagtt

SEQ ID NO: 29672 - DNA, 22 bp, synthetic construct
  misc_feature 1..22: note = chemically synthesized
  source 1..22: mol_type = other DNA
ttctctatttcattaagttctt

SEQ ID NO: 29673 - DNA, 22 bp, synthetic construct
  misc_feature 1..22: note = chemically synthesized
  source 1..22: mol_type = other DNA
tctctatttcattaagttcttc

SEQ ID NO: 29674 - DNA, 22 bp, synthetic construct
  misc_feature 1..22: note = chemically synthesized
  source 1..22: mol_type = other DNA
ctctatttcattaagttcttct

SEQ ID NO: 29675 - DNA, 22 bp, synthetic construct
  misc_feature 1..22: note = chemically synthesized
  source 1..22: mol_type = other DNA
tctatttcattaagttcttctg

SEQ ID NO: 29676 - DNA, 22 bp, synthetic construct
  misc_feature 1..22: note = chemically synthesized
  source 1..22: mol_type = other DNA
tatttcattaagttcttctgtt

SEQ ID NO: 29677 - DNA, 22 bp, synthetic construct
  misc_feature 1..22: note = chemically synthesized
  source 1..22: mol_type = other DNA
tttcattaagttcttctgttct

SEQ ID NO: 29678 - DNA, 22 bp, synthetic construct
  misc_feature 1..22: note = chemically synthesized
  source 1..22: mol_type = other DNA
cattaagttcttctgttcttca

SEQ ID NO: 29679 - DNA, 22 bp, synthetic construct
  misc_feature 1..22: note = chemically synthesized
  source 1..22: mol_type = other DNA
attaagttcttctgttcttcat

SEQ ID NO: 29680 - DNA, 22 bp, synthetic construct
  misc_feature 1..22: note = chemically synthesized
  source 1..22: mol_type = other DNA
agttcttctgttcttcattttt

SEQ ID NO: 29681 - DNA, 22 bp, synthetic construct
  misc_feature 1..22: note = chemically synthesized
  source 1..22: mol_type = other DNA
ttctgttcttcattttttcttt

SEQ ID NO: 29682 - DNA, 22 bp, synthetic construct
  misc_feature 1..22: note = chemically synthesized
  source 1..22: mol_type = other DNA
ctgttcttcattttttctttcc

SEQ ID NO: 29683 - DNA, 22 bp, synthetic construct
  misc_feature 1..22: note = chemically synthesized
  source 1..22: mol_type = other DNA
tgttcttcattttttctttcct

SEQ ID NO: 29684 - DNA, 22 bp, synthetic construct
  misc_feature 1..22: note = chemically synthesized
  source 1..22: mol_type = other DNA
ttcttcattttttctttccttc

SEQ ID NO: 29685 - DNA, 22 bp, synthetic construct
  misc_feature 1..22: note = chemically synthesized
  source 1..22: mol_type = other DNA
ttcattttttctttccttctgc

SEQ ID NO: 29686 - DNA, 22 bp, synthetic construct
  misc_feature 1..22: note = chemically synthesized
  source 1..22: mol_type = other DNA
cattttttctttccttctgcta

SEQ ID NO: 29687 - DNA, 22 bp, synthetic construct
  misc_feature 1..22: note = chemically synthesized
  source 1..22: mol_type = other DNA
attttttctttccttctgctag

SEQ ID NO: 29688 - DNA, 22 bp, synthetic construct
  misc_feature 1..22: note = chemically synthesized
  source 1..22: mol_type = other DNA
tttctttccttctgctagtttt

SEQ ID NO: 29689 - DNA, 22 bp, synthetic construct
  misc_feature 1..22: note = chemically synthesized
  source 1..22: mol_type = other DNA
ttctttccttctgctagttttg

SEQ ID NO: 29690 - DNA, 22 bp, synthetic construct
  misc_feature 1..22: note = chemically synthesized
  source 1..22: mol_type = other DNA
tctttccttctgctagttttgg

SEQ ID NO: 29691 - DNA, 22 bp, synthetic construct
  misc_feature 1..22: note = chemically synthesized
  source 1..22: mol_type = other DNA
ctttccttctgctagttttggg

SEQ ID NO: 29692 - DNA, 22 bp, synthetic construct
  misc_feature 1..22: note = chemically synthesized
  source 1..22: mol_type = other DNA
tttccttctgctagttttgggt

SEQ ID NO: 29693 - DNA, 22 bp, synthetic construct
  misc_feature 1..22: note = chemically synthesized
  source 1..22: mol_type = other DNA
tccttctgctagttttgggttt

SEQ ID NO: 29694 - DNA, 22 bp, synthetic construct
  misc_feature 1..22: note = chemically synthesized
  source 1..22: mol_type = other DNA
ccttctgctagttttgggtttt

SEQ ID NO: 29695 - DNA, 22 bp, synthetic construct
  misc_feature 1..22: note = chemically synthesized
  source 1..22: mol_type = other DNA
cttctgctagttttgggttttg

SEQ ID NO: 29696 - DNA, 22 bp, synthetic construct
  misc_feature 1..22: note = chemically synthesized
  source 1..22: mol_type = other DNA
ctgctagttttgggttttgttc

SEQ ID NO: 29697 - DNA, 22 bp, synthetic construct
  misc_feature 1..22: note = chemically synthesized
  source 1..22: mol_type = other DNA
tgctagttttgggttttgttct

SEQ ID NO: 29698 - DNA, 22 bp, synthetic construct
  misc_feature 1..22: note = chemically synthesized
  source 1..22: mol_type = other DNA
ctagttttgggttttgttcttg

SEQ ID NO: 29699 - DNA, 22 bp, synthetic construct
  misc_feature 1..22: note = chemically synthesized
  source 1..22: mol_type = other DNA
gttttgggttttgttcttgctt

SEQ ID NO: 29700 - DNA, 22 bp, synthetic construct
  misc_feature 1..22: note = chemically synthesized
  source 1..22: mol_type = other DNA
tgggttttgttcttgcttttct

SEQ ID NO: 29701 - DNA, 22 bp, synthetic construct
  misc_feature 1..22: note = chemically synthesized
  source 1..22: mol_type = other DNA
gggttttgttcttgcttttcta

SEQ ID NO: 29702 - DNA, 22 bp, synthetic construct
  misc_feature 1..22: note = chemically synthesized
  source 1..22: mol_type = other DNA
ggttttgttcttgcttttctag

SEQ ID NO: 29703 - DNA, 22 bp, synthetic construct
  misc_feature 1..22: note = chemically synthesized
  source 1..22: mol_type = other DNA
tgttcttgcttttctagcttgt

SEQ ID NO: 29704 - DNA, 22 bp, synthetic construct
  misc_feature 1..22: note = chemically synthesized
  source 1..22: mol_type = other DNA
gttcttgcttttctagcttgtt

SEQ ID NO: 29705 - DNA, 22 bp, synthetic construct
  misc_feature 1..22: note = chemically synthesized
  source 1..22: mol_type = other DNA
ttcttgcttttctagcttgttg

SEQ ID NO: 29706 - DNA, 22 bp, synthetic construct
  misc_feature 1..22: note = chemically synthesized
  source 1..22: mol_type = other DNA
ttgcttttctagcttgttgagg

SEQ ID NO: 29707 - DNA, 22 bp, synthetic construct
  misc_feature 1..22: note = chemically synthesized
  source 1..22: mol_type = other DNA
gcttttctagcttgttgaggta

SEQ ID NO: 29708 - DNA, 22 bp, synthetic construct
  misc_feature 1..22: note = chemically synthesized
  source 1..22: mol_type = other DNA
cttttctagcttgttgaggtac

SEQ ID NO: 29709 - DNA, 22 bp, synthetic construct
  misc_feature 1..22: note = chemically synthesized
  source 1..22: mol_type = other DNA
ttctagcttgttgaggtacatg

SEQ ID NO: 29710 - DNA, 22 bp, synthetic construct
  misc_feature 1..22: note = chemically synthesized
  source 1..22: mol_type = other DNA
tctagcttgttgaggtacatga

SEQ ID NO: 29711 - DNA, 22 bp, synthetic construct
  misc_feature 1..22: note = chemically synthesized
  source 1..22: mol_type = other DNA
ctagcttgttgaggtacatgat

SEQ ID NO: 29712 - DNA, 22 bp, synthetic construct
  misc_feature 1..22: note = chemically synthesized
  source 1..22: mol_type = other DNA
tagcttgttgaggtacatgatt

SEQ ID NO: 29713 - DNA, 22 bp, synthetic construct
  misc_feature 1..22: note = chemically synthesized
  source 1..22: mol_type = other DNA
gcttgttgaggtacatgattag

SEQ ID NO: 29714 - DNA, 22 bp, synthetic construct
  misc_feature 1..22: note = chemically synthesized
  source 1..22: mol_type = other DNA
gttgaggtacatgattagatta

SEQ ID NO: 29715 - DNA, 22 bp, synthetic construct
  misc_feature 1..22: note = chemically synthesized
  source 1..22: mol_type = other DNA
ttgaggtacatgattagattat

SEQ ID NO: 29716 - DNA, 22 bp, synthetic construct
  misc_feature 1..22: note = chemically synthesized
  source 1..22: mol_type = other DNA
aggtacatgattagattatata

SEQ ID NO: 29717 - DNA, 22 bp, synthetic construct
  misc_feature 1..22: note = chemically synthesized
  source 1..22: mol_type = other DNA
gattatatatttgaaatctttc

SEQ ID NO: 29718 - DNA, 22 bp, synthetic construct
  misc_feature 1..22: note = chemically synthesized
  source 1..22: mol_type = other DNA
tatatttgaaatctttctatgt

SEQ ID NO: 29719 - DNA, 22 bp, synthetic construct
  misc_feature 1..22: note = chemically synthesized
  source 1..22: mol_type = other DNA
gaaatctttctatgtttttaat

SEQ ID NO: 29720 - DNA, 22 bp, synthetic construct
  misc_feature 1..22: note = chemically synthesized
  source 1..22: mol_type = other DNA
aaatctttctatgtttttaatt

SEQ ID NO: 29721 - DNA, 22 bp, synthetic construct
  misc_feature 1..22: note = chemically synthesized
  source 1..22: mol_type = other DNA
tctatgtttttaatttaagtgt

SEQ ID NO: 29722 - DNA, 22 bp, synthetic construct
  misc_feature 1..22: note = chemically synthesized
  source 1..22: mol_type = other DNA
ctatgtttttaatttaagtgtt

SEQ ID NO: 29723 - DNA, 22 bp, synthetic construct
  misc_feature 1..22: note = chemically synthesized
  source 1..22: mol_type = other DNA
tatgtttttaatttaagtgttt

SEQ ID NO: 29724 - DNA, 22 bp, synthetic construct
  misc_feature 1..22: note = chemically synthesized
  source 1..22: mol_type = other DNA
tgtttttaatttaagtgtttat

SEQ ID NO: 29725 - DNA, 22 bp, synthetic construct
  misc_feature 1..22: note = chemically synthesized
  source 1..22: mol_type = other DNA
ttaatttaagtgtttattgata

SEQ ID NO: 29726 - DNA, 22 bp, synthetic construct
  misc_feature 1..22: note = chemically synthesized
  source 1..22: mol_type = other DNA
taatttaagtgtttattgataa

SEQ ID NO: 29727 - DNA, 22 bp, synthetic construct
  misc_feature 1..22: note = chemically synthesized
  source 1..22: mol_type = other DNA
aatttaagtgtttattgataag

SEQ ID NO: 29728 - DNA, 22 bp, synthetic construct
  misc_feature 1..22: note = chemically synthesized
  source 1..22: mol_type = other DNA
atttaagtgtttattgataagc

SEQ ID NO: 29729 - DNA, 22 bp, synthetic construct
  misc_feature 1..22: note = chemically synthesized
  source 1..22: mol_type = other DNA
aagtgtttattgataagcttct

SEQ ID NO: 29730 - DNA, 22 bp, synthetic construct
  misc_feature 1..22: note = chemically synthesized
  source 1..22: mol_type = other DNA
agtgtttattgataagcttctc

SEQ ID NO: 29731 - DNA, 22 bp, synthetic construct
  misc_feature 1..22: note = chemically synthesized
  source 1..22: mol_type = other DNA
attgataagcttctctcttagc

SEQ ID NO: 29732 - DNA, 22 bp, synthetic construct
  misc_feature 1..22: note = chemically synthesized
  source 1..22: mol_type = other DNA
ttgataagcttctctcttagca

SEQ ID NO: 29733 - DNA, 22 bp, synthetic construct
  misc_feature 1..22: note = chemically synthesized
  source 1..22: mol_type = other DNA
ataagcttctctcttagcactg

SEQ ID NO: 29734 - DNA, 22 bp, synthetic construct
  misc_feature 1..22: note = chemically synthesized
  source 1..22: mol_type = other DNA
ctctcttagcactgcttttgct

SEQ ID NO: 29735 - DNA, 22 bp, synthetic construct
  misc_feature 1..22: note = chemically synthesized
  source 1..22: mol_type = other DNA
tctcttagcactgcttttgctg

SEQ ID NO: 29736 - DNA, 22 bp, synthetic construct
  misc_feature 1..22: note = chemically synthesized
  source 1..22: mol_type = other DNA
tcttagcactgcttttgctgta

SEQ ID NO: 29737 - DNA, 22 bp, synthetic construct
  misc_feature 1..22: note = chemically synthesized
  source 1..22: mol_type = other DNA
ttagcactgcttttgctgtatc

SEQ ID NO: 29738 - DNA, 22 bp, synthetic construct
  misc_feature 1..22: note = chemically synthesized
  source 1..22: mol_type = other DNA
agcactgcttttgctgtatccc

SEQ ID NO: 29739 - DNA, 22 bp, synthetic construct
  misc_feature 1..22: note = chemically synthesized
  source 1..22: mol_type = other DNA
gcactgcttttgctgtatccca

SEQ ID NO: 29740 - DNA, 22 bp, synthetic construct
  misc_feature 1..22: note = chemically synthesized
  source 1..22: mol_type = other DNA
cttttgctgtatcccatggctt

SEQ ID NO: 29741 - DNA, 22 bp, synthetic construct
  misc_feature 1..22: note = chemically synthesized
  source 1..22: mol_type = other DNA
ttgctgtatcccatggcttttc

SEQ ID NO: 29742 - DNA, 22 bp, synthetic construct
  misc_feature 1..22: note = chemically synthesized
  source 1..22: mol_type = other DNA
tgctgtatcccatggcttttcc

SEQ ID NO: 29743 - DNA, 22 bp, synthetic construct
  misc_feature 1..22: note = chemically synthesized
  source 1..22: mol_type = other DNA
gctgtatcccatggcttttcct

SEQ ID NO: 29744 - DNA, 22 bp, synthetic construct
  misc_feature 1..22: note = chemically synthesized
  source 1..22: mol_type = other DNA
ctgtatcccatggcttttccta

SEQ ID NO: 29745 - DNA, 22 bp, synthetic construct
  misc_feature 1..22: note = chemically synthesized
  source 1..22: mol_type = other DNA
tatcccatggcttttcctatgt

SEQ ID NO: 29746 - DNA, 22 bp, synthetic construct
  misc_feature 1..22: note = chemically synthesized
  source 1..22: mol_type = other DNA
ttcctatgttgtatttcaattt

SEQ ID NO: 29747 - DNA, 22 bp, synthetic construct
  misc_feature 1..22: note = chemically synthesized
  source 1..22: mol_type = other DNA
tcctatgttgtatttcaatttt

SEQ ID NO: 29748 - DNA, 22 bp, synthetic construct
  misc_feature 1..22: note = chemically synthesized
  source 1..22: mol_type = other DNA
cctatgttgtatttcaattttc

SEQ ID NO: 29749 - DNA, 22 bp, synthetic construct
  misc_feature 1..22: note = chemically synthesized
  source 1..22: mol_type = other DNA
ctatgttgtatttcaattttca

SEQ ID NO: 29750 - DNA, 22 bp, synthetic construct
  misc_feature 1..22: note = chemically synthesized
  source 1..22: mol_type = other DNA
tgttgtatttcaattttcattt

SEQ ID NO: 29751 - DNA, 22 bp, synthetic construct
  misc_feature 1..22: note = chemically synthesized
  source 1..22: mol_type = other DNA
tatttcaattttcatttgtttc

SEQ ID NO: 29752 - DNA, 22 bp, synthetic construct
  misc_feature 1..22: note = chemically synthesized
  source 1..22: mol_type = other DNA
caattttcatttgtttcaaaaa

SEQ ID NO: 29753 - DNA, 22 bp, synthetic construct
  misc_feature 1..22: note = chemically synthesized
  source 1..22: mol_type = other DNA
aattttcatttgtttcaaaaaa

SEQ ID NO: 29754 - DNA, 22 bp, synthetic construct
  misc_feature 1..22: note = chemically synthesized
  source 1..22: mol_type = other DNA
tcatttgtttcaaaaaattttt

SEQ ID NO: 29755 - DNA, 22 bp, synthetic construct
  misc_feature 1..22: note = chemically synthesized
  source 1..22: mol_type = other DNA
catttgtttcaaaaaatttttg

SEQ ID NO: 29756 - DNA, 22 bp, synthetic construct
  misc_feature 1..22: note = chemically synthesized
  source 1..22: mol_type = other DNA
atttgtttcaaaaaatttttga

SEQ ID NO: 29757 - DNA, 22 bp, synthetic construct
  misc_feature 1..22: note = chemically synthesized
  source 1..22: mol_type = other DNA
gtttcaaaaaatttttgatttc

SEQ ID NO: 29758 - DNA, 22 bp, synthetic construct
  misc_feature 1..22: note = chemically synthesized
  source 1..22: mol_type = other DNA
tttcaaaaaatttttgatttcc

SEQ ID NO: 29759 - DNA, 22 bp, synthetic construct
  misc_feature 1..22: note = chemically synthesized
  source 1..22: mol_type = other DNA
caaaaaatttttgatttccttc

SEQ ID NO: 29760 - DNA, 22 bp, synthetic construct
  misc_feature 1..22: note = chemically synthesized
  source 1..22: mol_type = other DNA
aaaaaatttttgatttccttct

SEQ ID NO: 29761 - DNA, 22 bp, synthetic construct
  misc_feature 1..22: note = chemically synthesized
  source 1..22: mol_type = other DNA
ttgatttccttcttaattttct

SEQ ID NO: 29762 - DNA, 22 bp, synthetic construct
  misc_feature 1..22: note = chemically synthesized
  source 1..22: mol_type = other DNA
tgatttccttcttaattttctt

SEQ ID NO: 29763 - DNA, 22 bp, synthetic construct
  misc_feature 1..22: note = chemically synthesized
  source 1..22: mol_type = other DNA
gatttccttcttaattttcttc

SEQ ID NO: 29764 - DNA, 22 bp, synthetic construct
  misc_feature 1..22: note = chemically synthesized
  source 1..22: mol_type = other DNA
atttccttcttaattttcttct

SEQ ID NO: 29765 - DNA, 22 bp, synthetic construct
  misc_feature 1..22: note = chemically synthesized
  source 1..22: mol_type = other DNA
ccttcttaattttcttcttgac

SEQ ID NO: 29766 - DNA, 22 bp, synthetic construct
  misc_feature 1..22: note = chemically synthesized
  source 1..22: mol_type = other DNA
cttcttaattttcttcttgaca

SEQ ID NO: 29767 - DNA, 22 bp, synthetic construct
  misc_feature 1..22: note = chemically synthesized
  source 1..22: mol_type = other DNA
cttaattttcttcttgacataa

SEQ ID NO: 29768 - DNA, 22 bp, synthetic construct
  misc_feature 1..22: note = chemically synthesized
  source 1..22: mol_type = other DNA
ttaattttcttcttgacataac

SEQ ID NO: 29769 - DNA, 22 bp, synthetic construct
  misc_feature 1..22: note = chemically synthesized
  source 1..22: mol_type = other DNA
aattttcttcttgacataacgt

SEQ ID NO: 29770 - DNA, 22 bp, synthetic construct
  misc_feature 1..22: note = chemically synthesized
  source 1..22: mol_type = other DNA
attttcttcttgacataacgtt

SEQ ID NO: 29771 - DNA, 22 bp, synthetic construct
  misc_feature 1..22: note = chemically synthesized
  source 1..22: mol_type = other DNA
tcttcttgacataacgttcatt

SEQ ID NO: 29772 - DNA, 22 bp, synthetic construct
  misc_feature 1..22: note = chemically synthesized
  source 1..22: mol_type = other DNA
cttcttgacataacgttcattc

SEQ ID NO: 29773 - DNA, 22 bp, synthetic construct
  misc_feature 1..22: note = chemically synthesized
  source 1..22: mol_type = other DNA
ttcttgacataacgttcattca

SEQ ID NO: 29774 - DNA, 22 bp, synthetic construct
  misc_feature 1..22: note = chemically synthesized
  source 1..22: mol_type = other DNA
cttgacataacgttcattcagg

SEQ ID NO: 29775 - DNA, 22 bp, synthetic construct
  misc_feature 1..22: note = chemically synthesized
  source 1..22: mol_type = other DNA
ttgacataacgttcattcagga

SEQ ID NO: 29776 - DNA, 22 bp, synthetic construct
  misc_feature 1..22: note = chemically synthesized
  source 1..22: mol_type = other DNA
gacataacgttcattcaggagc

SEQ ID NO: 29777 - DNA, 22 bp, synthetic construct
  misc_feature 1..22: note = chemically synthesized
  source 1..22: mol_type = other DNA
acataacgttcattcaggagca

SEQ ID NO: 29778 - DNA, 22 bp, synthetic construct
  misc_feature 1..22: note = chemically synthesized
  source 1..22: mol_type = other DNA
attcaggagcatgttgtttaat

SEQ ID NO: 29779 - DNA, 22 bp, synthetic construct
  misc_feature 1..22: note = chemically synthesized
  source 1..22: mol_type = other DNA
aggagcatgttgtttaatttcc

SEQ ID NO: 29780 - DNA, 22 bp, synthetic construct
  misc_feature 1..22: note = chemically synthesized
  source 1..22: mol_type = other DNA
tttaatttccatgtatttgtat

SEQ ID NO: 29781 - DNA, 22 bp, synthetic construct
  misc_feature 1..22: note = chemically synthesized
  source 1..22: mol_type = other DNA
aatttccatgtatttgtatagg

SEQ ID NO: 29782 - DNA, 22 bp, synthetic construct
  misc_feature 1..22: note = chemically synthesized
  source 1..22: mol_type = other DNA
atttccatgtatttgtataggt

SEQ ID NO: 29783 - DNA, 22 bp, synthetic construct
  misc_feature 1..22: note = chemically synthesized
  source 1..22: mol_type = other DNA
ccatgtatttgtataggtttta

SEQ ID NO: 29784 - DNA, 22 bp, synthetic construct
  misc_feature 1..22: note = chemically synthesized
  source 1..22: mol_type = other DNA
catgtatttgtataggttttaa

SEQ ID NO: 29785 - DNA, 22 bp, synthetic construct
  misc_feature 1..22: note = chemically synthesized
  source 1..22: mol_type = other DNA
gtataggttttaaagtttttct

SEQ ID NO: 29786 - DNA, 22 bp, synthetic construct
  misc_feature 1..22: note = chemically synthesized
  source 1..22: mol_type = other DNA
tataggttttaaagtttttctt

SEQ ID NO: 29787 - DNA, 22 bp, synthetic construct
  misc_feature 1..22: note = chemically synthesized
  source 1..22: mol_type = other DNA
taaagtttttcttgttattgat

SEQ ID NO: 29788 - DNA, 22 bp, synthetic construct
  misc_feature 1..22: note = chemically synthesized
  source 1..22: mol_type = other DNA
aaagtttttcttgttattgatt

SEQ ID NO: 29789 - DNA, 22 bp, synthetic construct
  misc_feature 1..22: note = chemically synthesized
  source 1..22: mol_type = other DNA
aagtttttcttgttattgattt

SEQ ID NO: 29790 - DNA, 22 bp, synthetic construct
  misc_feature 1..22: note = chemically synthesized
  source 1..22: mol_type = other DNA
ttcttgttattgatttctagtt

SEQ ID NO: 29791 - DNA, 22 bp, synthetic construct
  misc_feature 1..22: note = chemically synthesized
  source 1..22: mol_type = other DNA
tcttgttattgatttctagttt

SEQ ID NO: 29792 - DNA, 22 bp, synthetic construct
  misc_feature 1..22: note = chemically synthesized
  source 1..22: mol_type = other DNA
cttgttattgatttctagtttt

SEQ ID NO: 29793 - DNA, 22 bp, synthetic construct
  misc_feature 1..22: note = chemically synthesized
  source 1..22: mol_type = other DNA
ttgttattgatttctagtttta

SEQ ID NO: 29794 - DNA, 22 bp, synthetic construct
  misc_feature 1..22: note = chemically synthesized
  source 1..22: mol_type = other DNA
gttattgatttctagttttatt

SEQ ID NO: 29795 - DNA, 22 bp, synthetic construct
  misc_feature 1..22: note = chemically synthesized
  source 1..22: mol_type = other DNA
ttattgatttctagttttattc

SEQ ID NO: 29796 - DNA, 22 bp, synthetic construct
  misc_feature 1..22: note = chemically synthesized
  source 1..22: mol_type = other DNA
ttgatttctagttttattccat

SEQ ID NO: 29797 - DNA, 22 bp, synthetic construct
  misc_feature 1..22: note = chemically synthesized
  source 1..22: mol_type = other DNA
atttctagttttattccattgt

SEQ ID NO: 29798 - DNA, 22 bp, synthetic construct
  misc_feature 1..22: note = chemically synthesized
  source 1..22: mol_type = other DNA
ctagttttattccattgtggtc

SEQ ID NO: 29799 - DNA, 22 bp, synthetic construct
  misc_feature 1..22: note = chemically synthesized
  source 1..22: mol_type = other DNA
tagttttattccattgtggtct

SEQ ID NO: 29800 - DNA, 22 bp, synthetic construct
  misc_feature 1..22: note = chemically synthesized
  source 1..22: mol_type = other DNA
gttttattccattgtggtctga

SEQ ID NO: 29801 - DNA, 22 bp, synthetic construct
  misc_feature 1..22: note = chemically synthesized
  source 1..22: mol_type = other DNA
tattccattgtggtctgagaag

SEQ ID NO: 29802 - DNA, 22 bp, synthetic construct
  misc_feature 1..22: note = chemically synthesized
  source 1..22: mol_type = other DNA
attccattgtggtctgagaaga

SEQ ID NO: 29803 - DNA, 22 bp, synthetic construct
  misc_feature 1..22: note = chemically synthesized
  source 1..22: mol_type = other DNA
ttccattgtggtctgagaagat

SEQ ID NO: 29804 - DNA, 22 bp, synthetic construct
  misc_feature 1..22: note = chemically synthesized
  source 1..22: mol_type = other DNA
cattgtggtctgagaagatgct

SEQ ID NO: 29805 - DNA, 22 bp, synthetic construct
  misc_feature 1..22: note = chemically synthesized
  source 1..22: mol_type = other DNA
tggtctgagaagatgcttaata

SEQ ID NO: 29806 - DNA, 22 bp, synthetic construct
  misc_feature 1..22: note = chemically synthesized
  source 1..22: mol_type = other DNA
agaagatgcttaatatgatttc

SEQ ID NO: 29807 - DNA, 22 bp, synthetic construct
  misc_feature 1..22: note = chemically synthesized
  source 1..22: mol_type = other DNA
aatatgatttcaaatatttcaa

SEQ ID NO: 29808 - DNA, 22 bp, synthetic construct
  misc_feature 1..22: note = chemically synthesized
  source 1..22: mol_type = other DNA
atatgatttcaaatatttcaaa

SEQ ID NO: 29809 - DNA, 22 bp, synthetic construct
  misc_feature 1..22: note = chemically synthesized
  source 1..22: mol_type = other DNA
caaatatttcaaattagttgag

SEQ ID NO: 29810 - DNA, 22 bp, synthetic construct
  misc_feature 1..22: note = chemically synthesized
  source 1..22: mol_type = other DNA
aaatatttcaaattagttgaga

SEQ ID NO: 29811 - DNA, 22 bp, synthetic construct
  misc_feature 1..22: note = chemically synthesized
  source 1..22: mol_type = other DNA
caaattagttgagacttctttt

SEQ ID NO: 29812 - DNA, 22 bp, synthetic construct
  misc_feature 1..22: note = chemically synthesized
  source 1..22: mol_type = other DNA
aaattagttgagacttcttttg

SEQ ID NO: 29813 - DNA, 22 bp, synthetic construct
  misc_feature 1..22: note = chemically synthesized
  source 1..22: mol_type = other DNA
gttgagacttcttttgtgttct

SEQ ID NO: 29814 - DNA, 22 bp, synthetic construct
  misc_feature 1..22: note = chemically synthesized
  source 1..22: mol_type = other DNA
agacttcttttgtgttctaaca

SEQ ID NO: 29815 - DNA, 22 bp, synthetic construct
  misc_feature 1..22: note = chemically synthesized
  source 1..22: mol_type = other DNA
cttttgtgttctaacatatggt

SEQ ID NO: 29816 - DNA, 22 bp, synthetic construct
  misc_feature 1..22: note = chemically synthesized
  source 1..22: mol_type = other DNA
ttttgtgttctaacatatggtg

SEQ ID NO: 29817 - DNA, 22 bp, synthetic construct
  misc_feature 1..22: note = chemically synthesized
  source 1..22: mol_type = other DNA
ttgtgttctaacatatggtgta

SEQ ID NO: 29818 - DNA, 22 bp, synthetic construct
  misc_feature 1..22: note = chemically synthesized
  source 1..22: mol_type = other DNA
tgtgttctaacatatggtgtat

SEQ ID NO: 29819 - DNA, 22 bp, synthetic construct
  misc_feature 1..22: note = chemically synthesized
  source 1..22: mol_type = other DNA
gtgttctaacatatggtgtatc

SEQ ID NO: 29820 - DNA, 22 bp, synthetic construct
  misc_feature 1..22: note = chemically synthesized
  source 1..22: mol_type = other DNA
tgttctaacatatggtgtatcc

SEQ ID NO: 29821 - DNA, 22 bp, synthetic construct
  misc_feature 1..22: note = chemically synthesized
  source 1..22: mol_type = other DNA
taacatatggtgtatcctgggg

SEQ ID NO: 29822 - DNA, 22 bp, synthetic construct
  misc_feature 1..22: note = chemically synthesized
  source 1..22: mol_type = other DNA
acatatggtgtatcctggggaa

SEQ ID NO: 29823 - DNA, 22 bp, synthetic construct
  misc_feature 1..22: note = chemically synthesized
  source 1..22: mol_type = other DNA
gggaatgcgtcatgtgctgatg

SEQ ID NO: 29824 - DNA, 22 bp, synthetic construct
  misc_feature 1..22: note = chemically synthesized
  source 1..22: mol_type = other DNA
atgagataaatatattctgtag

SEQ ID NO: 29825 - DNA, 22 bp, synthetic construct
  misc_feature 1..22: note = chemically synthesized
  source 1..22: mol_type = other DNA
tgtagctgttggatgaaatatt

SEQ ID NO: 29826 - DNA, 22 bp, synthetic construct
  misc_feature 1..22: note = chemically synthesized
  source 1..22: mol_type = other DNA
tagctgttggatgaaatattgt

SEQ ID NO: 29827 - DNA, 22 bp, synthetic construct
  misc_feature 1..22: note = chemically synthesized
  source 1..22: mol_type = other DNA
ttggatgaaatattgtgtaaat

SEQ ID NO: 29828 - DNA, 22 bp, synthetic construct
  misc_feature 1..22: note = chemically synthesized
  source 1..22: mol_type = other DNA
gatgaaatattgtgtaaatgtt

SEQ ID NO: 29829 - DNA, 22 bp, synthetic construct
  misc_feature 1..22: note = chemically synthesized
  source 1..22: mol_type = other DNA
tgtaaatgttagatccatttgg

SEQ ID NO: 29830 - DNA, 22 bp, synthetic construct
  misc_feature 1..22: note = chemically synthesized
  source 1..22: mol_type = other DNA
gatccatttggtctaaagtcaa

SEQ ID NO: 29831 - DNA, 22 bp, synthetic construct
  misc_feature 1..22: note = chemically synthesized
  source 1..22: mol_type = other DNA
ggtctaaagtcaagtttaaatc

SEQ ID NO: 29832 - DNA, 22 bp, synthetic construct
  misc_feature 1..22: note = chemically synthesized
  source 1..22: mol_type = other DNA
gtctaaagtcaagtttaaatcc

SEQ ID NO: 29833 - DNA, 22 bp, synthetic construct
  misc_feature 1..22: note = chemically synthesized
  source 1..22: mol_type = other DNA
aagtcaagtttaaatccaatgt

SEQ ID NO: 29834 - DNA, 22 bp, synthetic construct
  misc_feature 1..22: note = chemically synthesized
  source 1..22: mol_type = other DNA
aaatccaatgtttctttgttaa

SEQ ID NO: 29835 - DNA, 22 bp, synthetic construct
  misc_feature 1..22: note = chemically synthesized
  source 1..22: mol_type = other DNA
aatccaatgtttctttgttaat

SEQ ID NO: 29836 - DNA, 22 bp, synthetic construct
  misc_feature 1..22: note = chemically synthesized
  source 1..22: mol_type = other DNA
ctttgttaattttctgtctaga

SEQ ID NO: 29837 - DNA, 22 bp, synthetic construct
  misc_feature 1..22: note = chemically synthesized
  source 1..22: mol_type = other DNA
tttgttaattttctgtctagat

SEQ ID NO: 29838 - DNA, 22 bp, synthetic construct
  misc_feature 1..22: note = chemically synthesized
  source 1..22: mol_type = other DNA
tgttaattttctgtctagatga

SEQ ID NO: 29839 - DNA, 22 bp, synthetic construct
  misc_feature 1..22: note = chemically synthesized
  source 1..22: mol_type = other DNA
gttaattttctgtctagatgat

SEQ ID NO: 29840 - DNA, 22 bp, synthetic construct
  misc_feature 1..22: note = chemically synthesized
  source 1..22: mol_type = other DNA
ttaattttctgtctagatgatc

SEQ ID NO: 29841 - DNA, 22 bp, synthetic construct
  misc_feature 1..22: note = chemically synthesized
  source 1..22: mol_type = other DNA
attttctgtctagatgatctat

SEQ ID NO: 29842 - DNA, 22 bp, synthetic construct
  misc_feature 1..22: note = chemically synthesized
  source 1..22: mol_type = other DNA
tctgtctagatgatctatctga

SEQ ID NO: 29843 - DNA, 22 bp, synthetic construct
  misc_feature 1..22: note = chemically synthesized
  source 1..22: mol_type = other DNA
ctgtctagatgatctatctgat

SEQ ID NO: 29844 - DNA, 22 bp, synthetic construct
  misc_feature 1..22: note = chemically synthesized
  source 1..22: mol_type = other DNA
tgtctagatgatctatctgatg

SEQ ID NO: 29845 - DNA, 22 bp, synthetic construct
  misc_feature 1..22: note = chemically synthesized
  source 1..22: mol_type = other DNA
tctagatgatctatctgatgct

SEQ ID NO: 29846 - DNA, 22 bp, synthetic construct
  misc_feature 1..22: note = chemically synthesized
  source 1..22: mol_type = other DNA
gatgatctatctgatgctgaga

SEQ ID NO: 29847 - DNA, 22 bp, synthetic construct
  misc_feature 1..22: note = chemically synthesized
  source 1..22: mol_type = other DNA
tctgatgctgagattagaatgt

SEQ ID NO: 29848 - DNA, 22 bp, synthetic construct
  misc_feature 1..22: note = chemically synthesized
  source 1..22: mol_type = other DNA
atgctgagattagaatgttgaa

SEQ ID NO: 29849 - DNA, 22 bp, synthetic construct
  misc_feature 1..22: note = chemically synthesized
  source 1..22: mol_type = other DNA
agattagaatgttgaaatcccc

SEQ ID NO: 29850 - DNA, 22 bp, synthetic construct
  misc_feature 1..22: note = chemically synthesized
  source 1..22: mol_type = other DNA
gaatgttgaaatccccaactat

SEQ ID NO: 29851 - DNA, 22 bp, synthetic construct
  misc_feature 1..22: note = chemically synthesized
  source 1..22: mol_type = other DNA
aaatccccaactattattgtat

SEQ ID NO: 29852 - DNA, 22 bp, synthetic construct
  misc_feature 1..22: note = chemically synthesized
  source 1..22: mol_type = other DNA
ttattgtattggattctatttc

SEQ ID NO: 29853 - DNA, 22 bp, synthetic construct
  misc_feature 1..22: note = chemically synthesized
  source 1..22: mol_type = other DNA
ttgtattggattctatttcacc

SEQ ID NO: 29854 - DNA, 22 bp, synthetic construct
  misc_feature 1..22: note = chemically synthesized
  source 1..22: mol_type = other DNA
tattggattctatttcaccctt

SEQ ID NO: 29855 - DNA, 22 bp, synthetic construct
  misc_feature 1..22: note = chemically synthesized
  source 1..22: mol_type = other DNA
gattctatttcaccctttatat

SEQ ID NO: 29856 - DNA, 22 bp, synthetic construct
  misc_feature 1..22: note = chemically synthesized
  source 1..22: mol_type = other DNA
tatttcaccctttatatctaat

SEQ ID NO: 29857 - DNA, 22 bp, synthetic construct
  misc_feature 1..22: note = chemically synthesized
  source 1..22: mol_type = other DNA
tttcaccctttatatctaataa

SEQ ID NO: 29858 - DNA, 22 bp, synthetic construct
  misc_feature 1..22: note = chemically synthesized
  source 1..22: mol_type = other DNA
caccctttatatctaataacat

SEQ ID NO: 29859 - DNA, 22 bp, synthetic construct
  misc_feature 1..22: note = chemically synthesized
  source 1..22: mol_type = other DNA
accctttatatctaataacatt

SEQ ID NO: 29860 - DNA, 22 bp, synthetic construct
  misc_feature 1..22: note = chemically synthesized
  source 1..22: mol_type = other DNA
tatatctaataacatttgcttt

SEQ ID NO: 29861 - DNA, 22 bp, synthetic construct
  misc_feature 1..22: note = chemically synthesized
  source 1..22: mol_type = other DNA
atatctaataacatttgcttta

SEQ ID NO: 29862 - DNA, 22 bp, synthetic construct
  misc_feature 1..22: note = chemically synthesized
  source 1..22: mol_type = other DNA
tatctaataacatttgctttac

SEQ ID NO: 29863 - DNA, 22 bp, synthetic construct
  misc_feature 1..22: note = chemically synthesized
  source 1..22: mol_type = other DNA
ataacatttgctttacatatct

SEQ ID NO: 29864 - DNA, 22 bp, synthetic construct
  misc_feature 1..22: note = chemically synthesized
  source 1..22: mol_type = other DNA
gctttacatatctggatgctct

SEQ ID NO: 29865 - DNA, 22 bp, synthetic construct
  misc_feature 1..22: note = chemically synthesized
  source 1..22: mol_type = other DNA
ctttacatatctggatgctctg

SEQ ID NO: 29866 - DNA, 22 bp, synthetic construct
  misc_feature 1..22: note = chemically synthesized
  source 1..22: mol_type = other DNA
tacatatctggatgctctggtg

SEQ ID NO: 29867 - DNA, 22 bp, synthetic construct
  misc_feature 1..22: note = chemically synthesized
  source 1..22: mol_type = other DNA
acatatctggatgctctggtgt

SEQ ID NO: 29868 - DNA, 22 bp, synthetic construct
  misc_feature 1..22: note = chemically synthesized
  source 1..22: mol_type = other DNA
catatctggatgctctggtgtt

SEQ ID NO: 29869 - DNA, 22 bp, synthetic construct
  misc_feature 1..22: note = chemically synthesized
  source 1..22: mol_type = other DNA
gatgctctggtgttgagtgtga

SEQ ID NO: 29870 - DNA, 22 bp, synthetic construct
  misc_feature 1..22: note = chemically synthesized
  source 1..22: mol_type = other DNA
tggtgttgagtgtgaatgttta

SEQ ID NO: 29871 - DNA, 22 bp, synthetic construct
  misc_feature 1..22: note = chemically synthesized
  source 1..22: mol_type = other DNA
gtgttgagtgtgaatgtttaga

SEQ ID NO: 29872 - DNA, 22 bp, synthetic construct
  misc_feature 1..22: note = chemically synthesized
  source 1..22: mol_type = other DNA
agtgtgaatgtttagaattgtt

SEQ ID NO: 29873 - DNA, 22 bp, synthetic construct
  misc_feature 1..22: note = chemically synthesized
  source 1..22: mol_type = other DNA
agaattgttatatactcttgct

SEQ ID NO: 29874 - DNA, 22 bp, synthetic construct
  misc_feature 1..22: note = chemically synthesized
  source 1..22: mol_type = other DNA
gaattgttatatactcttgctg

SEQ ID NO: 29875 - DNA, 22 bp, synthetic construct
  misc_feature 1..22: note = chemically synthesized
  source 1..22: mol_type = other DNA
ttatatactcttgctgaattgt

SEQ ID NO: 29876 - DNA, 22 bp, synthetic construct
  misc_feature 1..22: note = chemically synthesized
  source 1..22: mol_type = other DNA
tatactcttgctgaattgttcc

SEQ ID NO: 29877 - DNA, 22 bp, synthetic construct
  misc_feature 1..22: note = chemically synthesized
  source 1..22: mol_type = other DNA
ttgctgaattgttccttttatc

SEQ ID NO: 29878 - DNA, 22 bp, synthetic construct
  misc_feature 1..22: note = chemically synthesized
  source 1..22: mol_type = other DNA
gctgaattgttccttttatcat

SEQ ID NO: 29879 - DNA, 22 bp, synthetic construct
  misc_feature 1..22: note = chemically synthesized
  source 1..22: mol_type = other DNA
ctgaattgttccttttatcatt

SEQ ID NO: 29880 - DNA, 22 bp, synthetic construct
  misc_feature 1..22: note = chemically synthesized
  source 1..22: mol_type = other DNA
aattgttccttttatcattatg

SEQ ID NO: 29881 - DNA, 22 bp, synthetic construct
  misc_feature 1..22: note = chemically synthesized
  source 1..22: mol_type = other DNA
ttccttttatcattatgtaatg

SEQ ID NO: 29882 - DNA, 22 bp, synthetic construct
  misc_feature 1..22: note = chemically synthesized
  source 1..22: mol_type = other DNA
cttttatcattatgtaatgact

SEQ ID NO: 29883 - DNA, 22 bp, synthetic construct
  misc_feature 1..22: note = chemically synthesized
  source 1..22: mol_type = other DNA
ttatcattatgtaatgactttt

SEQ ID NO: 29884 - DNA, 22 bp, synthetic construct
  misc_feature 1..22: note = chemically synthesized
  source 1..22: mol_type = other DNA
tatcattatgtaatgacttttg

SEQ ID NO: 29885 - DNA, 22 bp, synthetic construct
  misc_feature 1..22: note = chemically synthesized
  source 1..22: mol_type = other DNA
atcattatgtaatgacttttgt

SEQ ID NO: 29886 - DNA, 22 bp, synthetic construct
  misc_feature 1..22: note = chemically synthesized
  source 1..22: mol_type = other DNA
tcattatgtaatgacttttgtc

SEQ ID NO: 29887 - DNA, 22 bp, synthetic construct
  misc_feature 1..22: note = chemically synthesized
  source 1..22: mol_type = other DNA
tgtaatgacttttgtctcttag

SEQ ID NO: 29888 - DNA, 22 bp, synthetic construct
  misc_feature 1..22: note = chemically synthesized
  source 1..22: mol_type = other DNA
ttgtctcttagtgttttttatt

SEQ ID NO: 29889 - DNA, 22 bp, synthetic construct
  misc_feature 1..22: note = chemically synthesized
  source 1..22: mol_type = other DNA
tgtctcttagtgttttttattt

SEQ ID NO: 29890 - DNA, 22 bp, synthetic construct
  misc_feature 1..22: note = chemically synthesized
  source 1..22: mol_type = other DNA
gtctcttagtgttttttattta

SEQ ID NO: 29891 - DNA, 22 bp, synthetic construct
  misc_feature 1..22: note = chemically synthesized
  source 1..22: mol_type = other DNA
tctcttagtgttttttatttaa

SEQ ID NO: 29892 - DNA, 22 bp, synthetic construct
  misc_feature 1..22: note = chemically synthesized
  source 1..22: mol_type = other DNA
ttagtgttttttatttaaagtc

SEQ ID NO: 29893 - DNA, 22 bp, synthetic construct
  misc_feature 1..22: note = chemically synthesized
  source 1..22: mol_type = other DNA
agtgttttttatttaaagtcaa

SEQ ID NO: 29894 - DNA, 22 bp, synthetic construct
  misc_feature 1..22: note = chemically synthesized
  source 1..22: mol_type = other DNA
gtgttttttatttaaagtcaat

SEQ ID NO: 29895 - DNA, 22 bp, synthetic construct
  misc_feature 1..22: note = chemically synthesized
  source 1..22: mol_type = other DNA
tttatttaaagtcaattttatc

SEQ ID NO: 29896 - DNA, 22 bp, synthetic construct
  misc_feature 1..22: note = chemically synthesized
  source 1..22: mol_type = other DNA
ttatttaaagtcaattttatct

SEQ ID NO: 29897 - DNA, 22 bp, synthetic construct
  misc_feature 1..22: note = chemically synthesized
  source 1..22: mol_type = other DNA
tatttaaagtcaattttatctg

SEQ ID NO: 29898 - DNA, 22 bp, synthetic construct
  misc_feature 1..22: note = chemically synthesized
  source 1..22: mol_type = other DNA
atttaaagtcaattttatctgt

SEQ ID NO: 29899 - DNA, 22 bp, synthetic construct
  misc_feature 1..22: note = chemically synthesized
  source 1..22: mol_type = other DNA
tttaaagtcaattttatctgtt

SEQ ID NO: 29900 - DNA, 22 bp, synthetic construct
  misc_feature 1..22: note = chemically synthesized
  source 1..22: mol_type = other DNA
aaagtcaattttatctgttata

SEQ ID NO: 29901 - DNA, 22 bp, synthetic construct
  misc_feature 1..22: note = chemically synthesized
  source 1..22: mol_type = other DNA
aagtcaattttatctgttatag

SEQ ID NO: 29902 - DNA, 22 bp, synthetic construct
  misc_feature 1..22: note = chemically synthesized
  source 1..22: mol_type = other DNA
tatctgttataggtataactac

SEQ ID NO: 29903 - DNA, 22 bp, synthetic construct
  misc_feature 1..22: note = chemically synthesized
  source 1..22: mol_type = other DNA
atctgttataggtataactact

SEQ ID NO: 29904 - DNA, 22 bp, synthetic construct
  misc_feature 1..22: note = chemically synthesized
  source 1..22: mol_type = other DNA
tctgttataggtataactactt

SEQ ID NO: 29905 - DNA, 22 bp, synthetic construct
  misc_feature 1..22: note = chemically synthesized
  source 1..22: mol_type = other DNA
ttataggtataactacttttgc

SEQ ID NO: 29906 - DNA, 22 bp, synthetic construct
  misc_feature 1..22: note = chemically synthesized
  source 1..22: mol_type = other DNA
taggtataactacttttgctca

SEQ ID NO: 29907 - DNA, 22 bp, synthetic construct
  misc_feature 1..22: note = chemically synthesized
  source 1..22: mol_type = other DNA
cttttgctcatttttggtttct

SEQ ID NO: 29908 - DNA, 22 bp, synthetic construct
  misc_feature 1..22: note = chemically synthesized
  source 1..22: mol_type = other DNA
ttgctcatttttggtttctctt

SEQ ID NO: 29909 - DNA, 22 bp, synthetic construct
  misc_feature 1..22: note = chemically synthesized
  source 1..22: mol_type = other DNA
tgctcatttttggtttctcttt

SEQ ID NO: 29910 - DNA, 22 bp, synthetic construct
  misc_feature 1..22: note = chemically synthesized
  source 1..22: mol_type = other DNA
gctcatttttggtttctctttg

SEQ ID NO: 29911 - DNA, 22 bp, synthetic construct
  misc_feature 1..22: note = chemically synthesized
  source 1..22: mol_type = other DNA
ctcatttttggtttctctttgt

SEQ ID NO: 29912 - DNA, 22 bp, synthetic construct
  misc_feature 1..22: note = chemically synthesized
  source 1..22: mol_type = other DNA
atttttggtttctctttgtatg

SEQ ID NO: 29913 - DNA, 22 bp, synthetic construct
  misc_feature 1..22: note = chemically synthesized
  source 1..22: mol_type = other DNA
ttggtttctctttgtatggaag

SEQ ID NO: 29914 - DNA, 22 bp, synthetic construct
  misc_feature 1..22: note = chemically synthesized
  source 1..22: mol_type = other DNA
tggtttctctttgtatggaaga

SEQ ID NO: 29915 - DNA, 22 bp, synthetic construct
  misc_feature 1..22: note = chemically synthesized
  source 1..22: mol_type = other DNA
ggtttctctttgtatggaagat

SEQ ID NO: 29916 - DNA, 22 bp, synthetic construct
  misc_feature 1..22: note = chemically synthesized
  source 1..22: mol_type = other DNA
gtttctctttgtatggaagatc

SEQ ID NO: 29917 - DNA, 22 bp, synthetic construct
  misc_feature 1..22: note = chemically synthesized
  source 1..22: mol_type = other DNA
ctctttgtatggaagatctttc

SEQ ID NO: 29918 - DNA, 22 bp, synthetic construct
  misc_feature 1..22: note = chemically synthesized
  source 1..22: mol_type = other DNA
tctttgtatggaagatctttca

SEQ ID NO: 29919 - DNA, 22 bp, synthetic construct
  misc_feature 1..22: note = chemically synthesized
  source 1..22: mol_type = other DNA
tttgtatggaagatctttcatc

SEQ ID NO: 29920 - DNA, 22 bp, synthetic construct
  misc_feature 1..22: note = chemically synthesized
  source 1..22: mol_type = other DNA
tgtatggaagatctttcatctt

SEQ ID NO: 29921 - DNA, 22 bp, synthetic construct
  misc_feature 1..22: note = chemically synthesized
  source 1..22: mol_type = other DNA
gtatggaagatctttcatcttt

SEQ ID NO: 29922 - DNA, 22 bp, synthetic construct
  misc_feature 1..22: note = chemically synthesized
  source 1..22: mol_type = other DNA
tatggaagatctttcatctttt

SEQ ID NO: 29923 - DNA, 22 bp, synthetic construct
  misc_feature 1..22: note = chemically synthesized
  source 1..22: mol_type = other DNA
tcatctttttactttcagtcta

SEQ ID NO: 29924 - DNA, 22 bp, synthetic construct
  misc_feature 1..22: note = chemically synthesized
  source 1..22: mol_type = other DNA
catctttttactttcagtctat

SEQ ID NO: 29925 - DNA, 22 bp, synthetic construct
  misc_feature 1..22: note = chemically synthesized
  source 1..22: mol_type = other DNA
atctttttactttcagtctata

SEQ ID NO: 29926 - DNA, 22 bp, synthetic construct
  misc_feature 1..22: note = chemically synthesized
  source 1..22: mol_type = other DNA
tttactttcagtctatatttat

SEQ ID NO: 29927 - DNA, 22 bp, synthetic construct
  misc_feature 1..22: note = chemically synthesized
  source 1..22: mol_type = other DNA
ttactttcagtctatatttatc

SEQ ID NO: 29928 - DNA, 22 bp, synthetic construct
  misc_feature 1..22: note = chemically synthesized
  source 1..22: mol_type = other DNA
tactttcagtctatatttatct

SEQ ID NO: 29929 - DNA, 22 bp, synthetic construct
  misc_feature 1..22: note = chemically synthesized
  source 1..22: mol_type = other DNA
actttcagtctatatttatctt

SEQ ID NO: 29930 - DNA, 22 bp, synthetic construct
  misc_feature 1..22: note = chemically synthesized
  source 1..22: mol_type = other DNA
ctttcagtctatatttatcttt

SEQ ID NO: 29931 - DNA, 22 bp, synthetic construct
  misc_feature 1..22: note = chemically synthesized
  source 1..22: mol_type = other DNA
tcagtctatatttatctttaca

SEQ ID NO: 29932 - DNA, 22 bp, synthetic construct
  misc_feature 1..22: note = chemically synthesized
  source 1..22: mol_type = other DNA
cagtctatatttatctttacaa

SEQ ID NO: 29933 - DNA, 22 bp, synthetic construct
  misc_feature 1..22: note = chemically synthesized
  source 1..22: mol_type = other DNA
agtctatatttatctttacaag

SEQ ID NO: 29934 - DNA, 22 bp, synthetic construct
  misc_feature 1..22: note = chemically synthesized
  source 1..22: mol_type = other DNA
tatttatctttacaagtgagat

SEQ ID NO: 29935 - DNA, 22 bp, synthetic construct
  misc_feature 1..22: note = chemically synthesized
  source 1..22: mol_type = other DNA
atctttacaagtgagataagtt

SEQ ID NO: 29936 - DNA, 22 bp, synthetic construct
  misc_feature 1..22: note = chemically synthesized
  source 1..22: mol_type = other DNA
tctttacaagtgagataagttt

SEQ ID NO: 29937 - DNA, 22 bp, synthetic construct
  misc_feature 1..22: note = chemically synthesized
  source 1..22: mol_type = other DNA
tacaagtgagataagtttctta

SEQ ID NO: 29938 - DNA, 22 bp, synthetic construct
  misc_feature 1..22: note = chemically synthesized
  source 1..22: mol_type = other DNA
acaagtgagataagtttcttat

SEQ ID NO: 29939 - DNA, 22 bp, synthetic construct
  misc_feature 1..22: note = chemically synthesized
  source 1..22: mol_type = other DNA
caagtgagataagtttcttata

SEQ ID NO: 29940 - DNA, 22 bp, synthetic construct
  misc_feature 1..22: note = chemically synthesized
  source 1..22: mol_type = other DNA
cttataggcagcttacaactgg

SEQ ID NO: 29941 - DNA, 22 bp, synthetic construct
  misc_feature 1..22: note = chemically synthesized
  source 1..22: mol_type = other DNA
ttataggcagcttacaactggg

SEQ ID NO: 29942 - DNA, 22 bp, synthetic construct
  misc_feature 1..22: note = chemically synthesized
  source 1..22: mol_type = other DNA
ataggcagcttacaactgggtc

SEQ ID NO: 29943 - DNA, 22 bp, synthetic construct
  misc_feature 1..22: note = chemically synthesized
  source 1..22: mol_type = other DNA
taggcagcttacaactgggtca

SEQ ID NO: 29944 - DNA, 22 bp, synthetic construct
  misc_feature 1..22: note = chemically synthesized
  source 1..22: mol_type = other DNA
acaactgggtcatatttttgtt

SEQ ID NO: 29945 - DNA, 22 bp, synthetic construct
  misc_feature 1..22: note = chemically synthesized
  source 1..22: mol_type = other DNA
caactgggtcatatttttgttt

SEQ ID NO: 29946 - DNA, 22 bp, synthetic construct
  misc_feature 1..22: note = chemically synthesized
  source 1..22: mol_type = other DNA
ggtcatatttttgttttaaatc

SEQ ID NO: 29947 - DNA, 22 bp, synthetic construct
  misc_feature 1..22: note = chemically synthesized
  source 1..22: mol_type = other DNA
ttgttttaaatctatttagcca

SEQ ID NO: 29948 - DNA, 22 bp, synthetic construct
  misc_feature 1..22: note = chemically synthesized
  source 1..22: mol_type = other DNA
tgttttaaatctatttagccag

SEQ ID NO: 29949 - DNA, 22 bp, synthetic construct
  misc_feature 1..22: note = chemically synthesized
  source 1..22: mol_type = other DNA
gttttaaatctatttagccagt

SEQ ID NO: 29950 - DNA, 22 bp, synthetic construct
  misc_feature 1..22: note = chemically synthesized
  source 1..22: mol_type = other DNA
ttttaaatctatttagccagtc

SEQ ID NO: 29951 - DNA, 22 bp, synthetic construct
  misc_feature 1..22: note = chemically synthesized
  source 1..22: mol_type = other DNA
taaatctatttagccagtctat

SEQ ID NO: 29952 - DNA, 22 bp, synthetic construct
  misc_feature 1..22: note = chemically synthesized
  source 1..22: mol_type = other DNA
aaatctatttagccagtctata

SEQ ID NO: 29953 - DNA, 22 bp, synthetic construct
  misc_feature 1..22: note = chemically synthesized
  source 1..22: mol_type = other DNA
aatctatttagccagtctatat

SEQ ID NO: 29954 - DNA, 22 bp, synthetic construct
  misc_feature 1..22: note = chemically synthesized
  source 1..22: mol_type = other DNA
tttagccagtctatatctttca

SEQ ID NO: 29955 - DNA, 22 bp, synthetic construct
  misc_feature 1..22: note = chemically synthesized
  source 1..22: mol_type = other DNA
agccagtctatatctttcaagt

SEQ ID NO: 29956 - DNA, 22 bp, synthetic construct
  misc_feature 1..22: note = chemically synthesized
  source 1..22: mol_type = other DNA
gccagtctatatctttcaagta

SEQ ID NO: 29957 - DNA, 22 bp, synthetic construct
  misc_feature 1..22: note = chemically synthesized
  source 1..22: mol_type = other DNA
tatctttcaagtaacaatttaa

SEQ ID NO: 29958 - DNA, 22 bp, synthetic construct
  misc_feature 1..22: note = chemically synthesized
  source 1..22: mol_type = other DNA
tcaagtaacaatttaatccatt

SEQ ID NO: 29959 - DNA, 22 bp, synthetic construct
  misc_feature 1..22: note = chemically synthesized
  source 1..22: mol_type = other DNA
caagtaacaatttaatccattt

SEQ ID NO: 29960 - DNA, 22 bp, synthetic construct
  misc_feature 1..22: note = chemically synthesized
  source 1..22: mol_type = other DNA
aagtaacaatttaatccattta

SEQ ID NO: 29961 - DNA, 22 bp, synthetic construct
  misc_feature 1..22: note = chemically synthesized
  source 1..22: mol_type = other DNA
aatccatttacatgcaaggcta

SEQ ID NO: 29962 - DNA, 22 bp, synthetic construct
  misc_feature 1..22: note = chemically synthesized
  source 1..22: mol_type = other DNA
atccatttacatgcaaggctat

SEQ ID NO: 29963 - DNA, 22 bp, synthetic construct
  misc_feature 1..22: note = chemically synthesized
  source 1..22: mol_type = other DNA
acatgcaaggctattattgaca

SEQ ID NO: 29964 - DNA, 22 bp, synthetic construct
  misc_feature 1..22: note = chemically synthesized
  source 1..22: mol_type = other DNA
catgcaaggctattattgacat

SEQ ID NO: 29965 - DNA, 22 bp, synthetic construct
  misc_feature 1..22: note = chemically synthesized
  source 1..22: mol_type = other DNA
ttattgacatgtgagagcttat

SEQ ID NO: 29966 - DNA, 22 bp, synthetic construct
  misc_feature 1..22: note = chemically synthesized
  source 1..22: mol_type = other DNA
ttgacatgtgagagcttattcc

SEQ ID NO: 29967 - DNA, 22 bp, synthetic construct
  misc_feature 1..22: note = chemically synthesized
  source 1..22: mol_type = other DNA
acatgtgagagcttattcctgc

SEQ ID NO: 29968 - DNA, 22 bp, synthetic construct
  misc_feature 1..22: note = chemically synthesized
  source 1..22: mol_type = other DNA
attcctgccattttgttaattg

SEQ ID NO: 29969 - DNA, 22 bp, synthetic construct
  misc_feature 1..22: note = chemically synthesized
  source 1..22: mol_type = other DNA
ttcctgccattttgttaattga

SEQ ID NO: 29970 - DNA, 22 bp, synthetic construct
  misc_feature 1..22: note = chemically synthesized
  source 1..22: mol_type = other DNA
ctgccattttgttaattgattc

SEQ ID NO: 29971 - DNA, 22 bp, synthetic construct
  misc_feature 1..22: note = chemically synthesized
  source 1..22: mol_type = other DNA
ccattttgttaattgattcctg

SEQ ID NO: 29972 - DNA, 22 bp, synthetic construct
  misc_feature 1..22: note = chemically synthesized
  source 1..22: mol_type = other DNA
tgttaattgattcctggttgtt

SEQ ID NO: 29973 - DNA, 22 bp, synthetic construct
  misc_feature 1..22: note = chemically synthesized
  source 1..22: mol_type = other DNA
gttaattgattcctggttgttt

SEQ ID NO: 29974 - DNA, 22 bp, synthetic construct
  misc_feature 1..22: note = chemically synthesized
  source 1..22: mol_type = other DNA
ttaattgattcctggttgtttt

SEQ ID NO: 29975 - DNA, 22 bp, synthetic construct
  misc_feature 1..22: note = chemically synthesized
  source 1..22: mol_type = other DNA
attgattcctggttgttttgtt

SEQ ID NO: 29976 - DNA, 22 bp, synthetic construct
  misc_feature 1..22: note = chemically synthesized
  source 1..22: mol_type = other DNA
attcctggttgttttgtttttt

SEQ ID NO: 29977 - DNA, 22 bp, synthetic construct
  misc_feature 1..22: note = chemically synthesized
  source 1..22: mol_type = other DNA
ctggttgttttgtttttttttt

SEQ ID NO: 29978 - DNA, 22 bp, synthetic construct
  misc_feature 1..22: note = chemically synthesized
  source 1..22: mol_type = other DNA
gttgttttgttttttttttagt

SEQ ID NO: 29979 - DNA, 22 bp, synthetic construct
  misc_feature 1..22: note = chemically synthesized
  source 1..22: mol_type = other DNA
ttttgttttttttttagtttgt

SEQ ID NO: 29980 - DNA, 22 bp, synthetic construct
  misc_feature 1..22: note = chemically synthesized
  source 1..22: mol_type = other DNA
tgttttttttttagtttgtttg

SEQ ID NO: 29981 - DNA, 22 bp, synthetic construct
  misc_feature 1..22: note = chemically synthesized
  source 1..22: mol_type = other DNA
gttttttttttagtttgtttgt

SEQ ID NO: 29982 - DNA, 22 bp, synthetic construct
  misc_feature 1..22: note = chemically synthesized
  source 1..22: mol_type = other DNA
ttttttttttagtttgtttgtt

SEQ ID NO: 29983 - DNA, 22 bp, synthetic construct
  misc_feature 1..22: note = chemically synthesized
  source 1..22: mol_type = other DNA
tttttttagtttgtttgttttg

SEQ ID NO: 29984 - DNA, 22 bp, synthetic construct
  misc_feature 1..22: note = chemically synthesized
  source 1..22: mol_type = other DNA
ttttttagtttgtttgttttgt

SEQ ID NO: 29985 - DNA, 22 bp, synthetic construct
  misc_feature 1..22: note = chemically synthesized
  source 1..22: mol_type = other DNA
tttttagtttgtttgttttgtg

SEQ ID NO: 29986 - DNA, 22 bp, synthetic construct
  misc_feature 1..22: note = chemically synthesized
  source 1..22: mol_type = other DNA
ttttagtttgtttgttttgtgt

SEQ ID NO: 29987 - DNA, 22 bp, synthetic construct
  misc_feature 1..22: note = chemically synthesized
  source 1..22: mol_type = other DNA
tttagtttgtttgttttgtgtt

SEQ ID NO: 29988 - DNA, 22 bp, synthetic construct
  misc_feature 1..22: note = chemically synthesized
  source 1..22: mol_type = other DNA
ttagtttgtttgttttgtgttt

SEQ ID NO: 29989 - DNA, 22 bp, synthetic construct
  misc_feature 1..22: note = chemically synthesized
  source 1..22: mol_type = other DNA
tagtttgtttgttttgtgtttt

SEQ ID NO: 29990 - DNA, 22 bp, synthetic construct
  misc_feature 1..22: note = chemically synthesized
  source 1..22: mol_type = other DNA
agtttgtttgttttgtgttttt

SEQ ID NO: 29991 - DNA, 22 bp, synthetic construct
  misc_feature 1..22: note = chemically synthesized
  source 1..22: mol_type = other DNA
gtttgtttgttttgtgtttttt

SEQ ID NO: 29992 - DNA, 22 bp, synthetic construct
  misc_feature 1..22: note = chemically synthesized
  source 1..22: mol_type = other DNA
gtttgttttgtgtttttttctt

SEQ ID NO: 29993 - DNA, 22 bp, synthetic construct
  misc_feature 1..22: note = chemically synthesized
  source 1..22: mol_type = other DNA
tttgttttgtgtttttttcttc

SEQ ID NO: 29994 - DNA, 22 bp, synthetic construct
  misc_feature 1..22: note = chemically synthesized
  source 1..22: mol_type = other DNA
gttttgtgtttttttcttcctt

SEQ ID NO: 29995 - DNA, 22 bp, synthetic construct
  misc_feature 1..22: note = chemically synthesized
  source 1..22: mol_type = other DNA
ttttgtgtttttttcttccttc

SEQ ID NO: 29996 - DNA, 22 bp, synthetic construct
  misc_feature 1..22: note = chemically synthesized
  source 1..22: mol_type = other DNA
tgtgtttttttcttccttcctt

SEQ ID NO: 29997 - DNA, 22 bp, synthetic construct
  misc_feature 1..22: note = chemically synthesized
  source 1..22: mol_type = other DNA
gtgtttttttcttccttccttc

SEQ ID NO: 29998 - DNA, 22 bp, synthetic construct
  misc_feature 1..22: note = chemically synthesized
  source 1..22: mol_type = other DNA
tgtttttttcttccttccttcc

SEQ ID NO: 29999 - DNA, 22 bp, synthetic construct
  misc_feature 1..22: note = chemically synthesized
  source 1..22: mol_type = other DNA
ttttcttccttccttccttttc

SEQ ID NO: 30000 - DNA, 22 bp, synthetic construct
  misc_feature 1..22: note = chemically synthesized
  source 1..22: mol_type = other DNA
tttcttccttccttccttttct

SEQ ID NO: 30001 - DNA, 22 bp, synthetic construct
  misc_feature 1..22: note = chemically synthesized
  source 1..22: mol_type = other DNA
ttcttccttccttccttttctt

SEQ ID NO: 30002 - DNA, 22 bp, synthetic construct
  misc_feature 1..22: note = chemically synthesized
  source 1..22: mol_type = other DNA
tcttccttccttccttttcttt

SEQ ID NO: 30003 - DNA, 22 bp, synthetic construct
  misc_feature 1..22: note = chemically synthesized
  source 1..22: mol_type = other DNA
cttccttccttccttttctttc

SEQ ID NO: 30004 - DNA, 22 bp, synthetic construct
  misc_feature 1..22: note = chemically synthesized
  source 1..22: mol_type = other DNA
ttccttccttccttttctttct

SEQ ID NO: 30005 - DNA, 22 bp, synthetic construct
  misc_feature 1..22: note = chemically synthesized
  source 1..22: mol_type = other DNA
ccttccttccttttctttcttt

SEQ ID NO: 30006 - DNA, 22 bp, synthetic construct
  misc_feature 1..22: note = chemically synthesized
  source 1..22: mol_type = other DNA
cttccttccttttctttctttc

SEQ ID NO: 30007 - DNA, 22 bp, synthetic construct
  misc_feature 1..22: note = chemically synthesized
  source 1..22: mol_type = other DNA
ccttccttttctttctttcatt

SEQ ID NO: 30008 - DNA, 22 bp, synthetic construct
  misc_feature 1..22: note = chemically synthesized
  source 1..22: mol_type = other DNA
cttccttttctttctttcattc

SEQ ID NO: 30009 - DNA, 22 bp, synthetic construct
  misc_feature 1..22: note = chemically synthesized
  source 1..22: mol_type = other DNA
ccttttctttctttcattctct

SEQ ID NO: 30010 - DNA, 22 bp, synthetic construct
  misc_feature 1..22: note = chemically synthesized
  source 1..22: mol_type = other DNA
cttttctttctttcattctctc

SEQ ID NO: 30011 - DNA, 22 bp, synthetic construct
  misc_feature 1..22: note = chemically synthesized
  source 1..22: mol_type = other DNA
ttctttctttcattctctctct

SEQ ID NO: 30012 - DNA, 22 bp, synthetic construct
  misc_feature 1..22: note = chemically synthesized
  source 1..22: mol_type = other DNA
tctttctttcattctctctctc

SEQ ID NO: 30013 - DNA, 22 bp, synthetic construct
  misc_feature 1..22: note = chemically synthesized
  source 1..22: mol_type = other DNA
ctttctttcattctctctctct

SEQ ID NO: 30014 - DNA, 22 bp, synthetic construct
  misc_feature 1..22: note = chemically synthesized
  source 1..22: mol_type = other DNA
tttctttcattctctctctctc

SEQ ID NO: 30015 - DNA, 22 bp, synthetic construct
  misc_feature 1..22: note = chemically synthesized
  source 1..22: mol_type = other DNA
tctttcattctctctctctctc

SEQ ID NO: 30016 - DNA, 22 bp, synthetic construct
  misc_feature 1..22: note = chemically synthesized
  source 1..22: mol_type = other DNA
ctttcattctctctctctctct

SEQ ID NO: 30017 - DNA, 22 bp, synthetic construct
  misc_feature 1..22: note = chemically synthesized
  source 1..22: mol_type = other DNA
tttcattctctctctctctctc

SEQ ID NO: 30018 - DNA, 22 bp, synthetic construct
  misc_feature 1..22: note = chemically synthesized
  source 1..22: mol_type = other DNA
tcattctctctctctctctctt

SEQ ID NO: 30019 - DNA, 22 bp, synthetic construct
  misc_feature 1..22: note = chemically synthesized
  source 1..22: mol_type = other DNA
cattctctctctctctctcttt

SEQ ID NO: 30020 - DNA, 22 bp, synthetic construct
  misc_feature 1..22: note = chemically synthesized
  source 1..22: mol_type = other DNA
attctctctctctctctctttc

SEQ ID NO: 30021 - DNA, 22 bp, synthetic construct
  misc_feature 1..22: note = chemically synthesized
  source 1..22: mol_type = other DNA
tctctctctctctctttctttc

SEQ ID NO: 30022 - DNA, 22 bp, synthetic construct
  misc_feature 1..22: note = chemically synthesized
  source 1..22: mol_type = other DNA
tctctctctctctttctttctt

SEQ ID NO: 30023 - DNA, 22 bp, synthetic construct
  misc_feature 1..22: note = chemically synthesized
  source 1..22: mol_type = other DNA
tctctctctctttctttctttc

SEQ ID NO: 30024 - DNA, 22 bp, synthetic construct
  misc_feature 1..22: note = chemically synthesized
  source 1..22: mol_type = other DNA
tctctctctttctttctttctt

SEQ ID NO: 30025 - DNA, 22 bp, synthetic construct
  misc_feature 1..22: note = chemically synthesized
  source 1..22: mol_type = other DNA
tctctctttctttctttctttc

SEQ ID NO: 30026 - DNA, 22 bp, synthetic construct
  misc_feature 1..22: note = chemically synthesized
  source 1..22: mol_type = other DNA
tctctttctttctttctttctt

SEQ ID NO: 30027 - DNA, 22 bp, synthetic construct
  misc_feature 1..22: note = chemically synthesized
  source 1..22: mol_type = other DNA
tctttctttctttctttctttc

SEQ ID NO: 30028 - DNA, 22 bp, synthetic construct
  misc_feature 1..22: note = chemically synthesized
  source 1..22: mol_type = other DNA
tttctttctttctttctttctt

SEQ ID NO: 30029 - DNA, 22 bp, synthetic construct
  misc_feature 1..22: note = chemically synthesized
  source 1..22: mol_type = other DNA
tctttctttctttctttcttat

SEQ ID NO: 30030 - DNA, 22 bp, synthetic construct
  misc_feature 1..22: note = chemically synthesized
  source 1..22: mol_type = other DNA
ctttctttctttctttcttatt

SEQ ID NO: 30031 - DNA, 22 bp, synthetic construct
  misc_feature 1..22: note = chemically synthesized
  source 1..22: mol_type = other DNA
tttctttctttctttcttatta

SEQ ID NO: 30032 - DNA, 22 bp, synthetic construct
  misc_feature 1..22: note = chemically synthesized
  source 1..22: mol_type = other DNA
tctttctttctttcttattatt

SEQ ID NO: 30033 - DNA, 22 bp, synthetic construct
  misc_feature 1..22: note = chemically synthesized
  source 1..22: mol_type = other DNA
ctttctttctttcttattattt

SEQ ID NO: 30034 - DNA, 22 bp, synthetic construct
  misc_feature 1..22: note = chemically synthesized
  source 1..22: mol_type = other DNA
tttctttctttcttattattta

SEQ ID NO: 30035 - DNA, 22 bp, synthetic construct
  misc_feature 1..22: note = chemically synthesized
  source 1..22: mol_type = other DNA
tctttctttcttattatttatg

SEQ ID NO: 30036 - DNA, 22 bp, synthetic construct
  misc_feature 1..22: note = chemically synthesized
  source 1..22: mol_type = other DNA
ctttctttcttattatttatga

SEQ ID NO: 30037 - DNA, 22 bp, synthetic construct
  misc_feature 1..22: note = chemically synthesized
  source 1..22: mol_type = other DNA
tttctttcttattatttatgat

SEQ ID NO: 30038 - DNA, 22 bp, synthetic construct
  misc_feature 1..22: note = chemically synthesized
  source 1..22: mol_type = other DNA
tctttcttattatttatgattg

SEQ ID NO: 30039 - DNA, 22 bp, synthetic construct
  misc_feature 1..22: note = chemically synthesized
  source 1..22: mol_type = other DNA
ctttcttattatttatgattgt

SEQ ID NO: 30040 - DNA, 22 bp, synthetic construct
  misc_feature 1..22: note = chemically synthesized
  source 1..22: mol_type = other DNA
tttcttattatttatgattgtg

SEQ ID NO: 30041 - DNA, 22 bp, synthetic construct
  misc_feature 1..22: note = chemically synthesized
  source 1..22: mol_type = other DNA
tcttattatttatgattgtggt

SEQ ID NO: 30042 - DNA, 22 bp, synthetic construct
  misc_feature 1..22: note = chemically synthesized
  source 1..22: mol_type = other DNA
cttattatttatgattgtggtt

SEQ ID NO: 30043 - DNA, 22 bp, synthetic construct
  misc_feature 1..22: note = chemically synthesized
  source 1..22: mol_type = other DNA
ttattatttatgattgtggttt

SEQ ID NO: 30044 - DNA, 22 bp, synthetic construct
  misc_feature 1..22: note = chemically synthesized
  source 1..22: mol_type = other DNA
attatttatgattgtggtttgg

SEQ ID NO: 30045 - DNA, 22 bp, synthetic construct
  misc_feature 1..22: note = chemically synthesized
  source 1..22: mol_type = other DNA
ttatttatgattgtggtttggt

SEQ ID NO: 30046 - DNA, 22 bp, synthetic construct
  misc_feature 1..22: note = chemically synthesized
  source 1..22: mol_type = other DNA
tttatgattgtggtttggtgat

SEQ ID NO: 30047 - DNA, 22 bp, synthetic construct
  misc_feature 1..22: note = chemically synthesized
  source 1..22: mol_type = other DNA
atgattgtggtttggtgatttt

SEQ ID NO: 30048 - DNA, 22 bp, synthetic construct
  misc_feature 1..22: note = chemically synthesized
  source 1..22: mol_type = other DNA
tgattgtggtttggtgattttc

SEQ ID NO: 30049 - DNA, 22 bp, synthetic construct
  misc_feature 1..22: note = chemically synthesized
  source 1..22: mol_type = other DNA
tggtttggtgattttctgtagt

SEQ ID NO: 30050 - DNA, 22 bp, synthetic construct
  misc_feature 1..22: note = chemically synthesized
  source 1..22: mol_type = other DNA
ggtgattttctgtagtggtaac

SEQ ID NO: 30051 - DNA, 22 bp, synthetic construct
  misc_feature 1..22: note = chemically synthesized
  source 1..22: mol_type = other DNA
gtgattttctgtagtggtaacg

SEQ ID NO: 30052 - DNA, 22 bp, synthetic construct
  misc_feature 1..22: note = chemically synthesized
  source 1..22: mol_type = other DNA
tctgtagtggtaacgtttgagt

SEQ ID NO: 30053 - DNA, 22 bp, synthetic construct
  misc_feature 1..22: note = chemically synthesized
  source 1..22: mol_type = other DNA
ctgtagtggtaacgtttgagtt

SEQ ID NO: 30054 - DNA, 22 bp, synthetic construct
  misc_feature 1..22: note = chemically synthesized
  source 1..22: mol_type = other DNA
tgtagtggtaacgtttgagttc

SEQ ID NO: 30055 - DNA, 22 bp, synthetic construct
  misc_feature 1..22: note = chemically synthesized
  source 1..22: mol_type = other DNA
tagtggtaacgtttgagttctt

SEQ ID NO: 30056 - DNA, 22 bp, synthetic construct
  misc_feature 1..22: note = chemically synthesized
  source 1..22: mol_type = other DNA
gagttctttctcttctttattt

SEQ ID NO: 30057 - DNA, 22 bp, synthetic construct
  misc_feature 1..22: note = chemically synthesized
  source 1..22: mol_type = other DNA
agttctttctcttctttatttg

SEQ ID NO: 30058 - DNA, 22 bp, synthetic construct
  misc_feature 1..22: note = chemically synthesized
  source 1..22: mol_type = other DNA
tttctcttctttatttgtgttt

SEQ ID NO: 30059 - DNA, 22 bp, synthetic construct
  misc_feature 1..22: note = chemically synthesized
  source 1..22: mol_type = other DNA
tctcttctttatttgtgttttg

SEQ ID NO: 30060 - DNA, 22 bp, synthetic construct
  misc_feature 1..22: note = chemically synthesized
  source 1..22: mol_type = other DNA
ctcttctttatttgtgttttgc

SEQ ID NO: 30061 - DNA, 22 bp, synthetic construct
  misc_feature 1..22: note = chemically synthesized
  source 1..22: mol_type = other DNA
tcttctttatttgtgttttgct

SEQ ID NO: 30062 - DNA, 22 bp, synthetic construct
  misc_feature 1..22: note = chemically synthesized
  source 1..22: mol_type = other DNA
ttctttatttgtgttttgctct

SEQ ID NO: 30063 - DNA, 22 bp, synthetic construct
  misc_feature 1..22: note = chemically synthesized
  source 1..22: mol_type = other DNA
ctttatttgtgttttgctctac

SEQ ID NO: 30064 - DNA, 22 bp, synthetic construct
  misc_feature 1..22: note = chemically synthesized
  source 1..22: mol_type = other DNA
tttatttgtgttttgctctacc

SEQ ID NO: 30065 - DNA, 22 bp, synthetic construct
  misc_feature 1..22: note = chemically synthesized
  source 1..22: mol_type = other DNA
tatttgtgttttgctctaccag

SEQ ID NO: 30066 - DNA, 22 bp, synthetic construct
  misc_feature 1..22: note = chemically synthesized
  source 1..22: mol_type = other DNA
atttgtgttttgctctaccagt

SEQ ID NO: 30067 - DNA, 22 bp, synthetic construct
  misc_feature 1..22: note = chemically synthesized
  source 1..22: mol_type = other DNA
tttgtgttttgctctaccagtt

SEQ ID NO: 30068 - DNA, 22 bp, synthetic construct
  misc_feature 1..22: note = chemically synthesized
  source 1..22: mol_type = other DNA
gtgttttgctctaccagttagt

SEQ ID NO: 30069 - DNA, 22 bp, synthetic construct
  misc_feature 1..22: note = chemically synthesized
  source 1..22: mol_type = other DNA
tgttttgctctaccagttagtt

SEQ ID NO: 30070 - DNA, 22 bp, synthetic construct
  misc_feature 1..22: note = chemically synthesized
  source 1..22: mol_type = other DNA
tgctctaccagttagttgtata

SEQ ID NO: 30071 - DNA, 22 bp, synthetic construct
  misc_feature 1..22: note = chemically synthesized
  source 1..22: mol_type = other DNA
gctctaccagttagttgtatac

SEQ ID NO: 30072 - DNA, 22 bp, synthetic construct
  misc_feature 1..22: note = chemically synthesized
  source 1..22: mol_type = other DNA
ctctaccagttagttgtatacc

SEQ ID NO: 30073 - DNA, 22 bp, synthetic construct
  misc_feature 1..22: note = chemically synthesized
  source 1..22: mol_type = other DNA
taccagttagttgtataccttt

SEQ ID NO: 30074 - DNA, 22 bp, synthetic construct
  misc_feature 1..22: note = chemically synthesized
  source 1..22: mol_type = other DNA
ccagttagttgtatacctttgt

SEQ ID NO: 30075 - DNA, 22 bp, synthetic construct
  misc_feature 1..22: note = chemically synthesized
  source 1..22: mol_type = other DNA
gttgtatacctttgtgtgtctt

SEQ ID NO: 30076 - DNA, 22 bp, synthetic construct
  misc_feature 1..22: note = chemically synthesized
  source 1..22: mol_type = other DNA
tatacctttgtgtgtcttcata

SEQ ID NO: 30077 - DNA, 22 bp, synthetic construct
  misc_feature 1..22: note = chemically synthesized
  source 1..22: mol_type = other DNA
tgtgtgtcttcataatggcagt

SEQ ID NO: 30078 - DNA, 22 bp, synthetic construct
  misc_feature 1..22: note = chemically synthesized
  source 1..22: mol_type = other DNA
gtgtgtcttcataatggcagtg

SEQ ID NO: 30079 - DNA, 22 bp, synthetic construct
  misc_feature 1..22: note = chemically synthesized
  source 1..22: mol_type = other DNA
tgtgtcttcataatggcagtgt

SEQ ID NO: 30080 - DNA, 22 bp, synthetic construct
  misc_feature 1..22: note = chemically synthesized
  source 1..22: mol_type = other DNA
cataatggcagtgtcctgtcac

SEQ ID NO: 30081 - DNA, 22 bp, synthetic construct
  misc_feature 1..22: note = chemically synthesized
  source 1..22: mol_type = other DNA
ataatggcagtgtcctgtcact

SEQ ID NO: 30082 - DNA, 22 bp, synthetic construct
  misc_feature 1..22: note = chemically synthesized
  source 1..22: mol_type = other DNA
tcactttcatgtgtaggactcc

SEQ ID NO: 30083 - DNA, 22 bp, synthetic construct
  misc_feature 1..22: note = chemically synthesized
  source 1..22: mol_type = other DNA
tcatgtgtaggactcccttaaa

SEQ ID NO: 30084 - DNA, 22 bp, synthetic construct
  misc_feature 1..22: note = chemically synthesized
  source 1..22: mol_type = other DNA
catgtgtaggactcccttaaat

SEQ ID NO: 30085 - DNA, 22 bp, synthetic construct
  misc_feature 1..22: note = chemically synthesized
  source 1..22: mol_type = other DNA
atgtgtaggactcccttaaata

SEQ ID NO: 30086 - DNA, 22 bp, synthetic construct
  misc_feature 1..22: note = chemically synthesized
  source 1..22: mol_type = other DNA
ccttaaatatttcttgtaaagc

SEQ ID NO: 30087 - DNA, 22 bp, synthetic construct
  misc_feature 1..22: note = chemically synthesized
  source 1..22: mol_type = other DNA
aaatatttcttgtaaagccagt

SEQ ID NO: 30088 - DNA, 22 bp, synthetic construct
  misc_feature 1..22: note = chemically synthesized
  source 1..22: mol_type = other DNA
aatatttcttgtaaagccagtc

SEQ ID NO: 30089 - DNA, 22 bp, synthetic construct
  misc_feature 1..22: note = chemically synthesized
  source 1..22: mol_type = other DNA
cttgtaaagccagtctagtgat

SEQ ID NO: 30090 - DNA, 22 bp, synthetic construct
  misc_feature 1..22: note = chemically synthesized
  source 1..22: mol_type = other DNA
ttgtaaagccagtctagtgata

SEQ ID NO: 30091 - DNA, 22 bp, synthetic construct
  misc_feature 1..22: note = chemically synthesized
  source 1..22: mol_type = other DNA
gtaaagccagtctagtgatagt

SEQ ID NO: 30092 - DNA, 22 bp, synthetic construct
  misc_feature 1..22: note = chemically synthesized
  source 1..22: mol_type = other DNA
taaagccagtctagtgatagtg

SEQ ID NO: 30093 - DNA, 22 bp, synthetic construct
  misc_feature 1..22: note = chemically synthesized
  source 1..22: mol_type = other DNA
gtgatagtgaattccttcaaat

SEQ ID NO: 30094 - DNA, 22 bp, synthetic construct
  misc_feature 1..22: note = chemically synthesized
  source 1..22: mol_type = other DNA
cttcaaatttttcttgcccaga

SEQ ID NO: 30095 - DNA, 22 bp, synthetic construct
  misc_feature 1..22: note = chemically synthesized
  source 1..22: mol_type = other DNA
caaatttttcttgcccagaaaa

SEQ ID NO: 30096 - DNA, 22 bp, synthetic construct
  misc_feature 1..22: note = chemically synthesized
  source 1..22: mol_type = other DNA
aaatttttcttgcccagaaaag

SEQ ID NO: 30097 - DNA, 22 bp, synthetic construct
  misc_feature 1..22: note = chemically synthesized
  source 1..22: mol_type = other DNA
ttcttgcccagaaaagatttta

SEQ ID NO: 30098 - DNA, 22 bp, synthetic construct
  misc_feature 1..22: note = chemically synthesized
  source 1..22: mol_type = other DNA
tcttgcccagaaaagattttat

SEQ ID NO: 30099 - DNA, 22 bp, synthetic construct
  misc_feature 1..22: note = chemically synthesized
  source 1..22: mol_type = other DNA
cttgcccagaaaagattttatt

SEQ ID NO: 30100 - DNA, 22 bp, synthetic construct
  misc_feature 1..22: note = chemically synthesized
  source 1..22: mol_type = other DNA
ttgcccagaaaagattttattt

SEQ ID NO: 30101 - DNA, 22 bp, synthetic construct
  misc_feature 1..22: note = chemically synthesized
  source 1..22: mol_type = other DNA
gcccagaaaagattttatttat

SEQ ID NO: 30102 - DNA, 22 bp, synthetic construct
  misc_feature 1..22: note = chemically synthesized
  source 1..22: mol_type = other DNA
cccagaaaagattttatttatc

SEQ ID NO: 30103 - DNA, 22 bp, synthetic construct
  misc_feature 1..22: note = chemically synthesized
  source 1..22: mol_type = other DNA
tatttatccttcatttttgaag

SEQ ID NO: 30104 - DNA, 22 bp, synthetic construct
  misc_feature 1..22: note = chemically synthesized
  source 1..22: mol_type = other DNA
atttatccttcatttttgaaga

SEQ ID NO: 30105 - DNA, 22 bp, synthetic construct
  misc_feature 1..22: note = chemically synthesized
  source 1..22: mol_type = other DNA
tttatccttcatttttgaagaa

SEQ ID NO: 30106 - DNA, 22 bp, synthetic construct
  misc_feature 1..22: note = chemically synthesized
  source 1..22: mol_type = other DNA
atccttcatttttgaagaacaa

SEQ ID NO: 30107 - DNA, 22 bp, synthetic construct
  misc_feature 1..22: note = chemically synthesized
  source 1..22: mol_type = other DNA
tccttcatttttgaagaacaat

SEQ ID NO: 30108 - DNA, 22 bp, synthetic construct
  misc_feature 1..22: note = chemically synthesized
  source 1..22: mol_type = other DNA
catttttgaagaacaatgttgc

SEQ ID NO: 30109 - DNA, 22 bp, synthetic construct
  misc_feature 1..22: note = chemically synthesized
  source 1..22: mol_type = other DNA
atttttgaagaacaatgttgct

SEQ ID NO: 30110 - DNA, 22 bp, synthetic construct
  misc_feature 1..22: note = chemically synthesized
  source 1..22: mol_type = other DNA
ttgaagaacaatgttgctgggt

SEQ ID NO: 30111 - DNA, 22 bp, synthetic construct
  misc_feature 1..22: note = chemically synthesized
  source 1..22: mol_type = other DNA
tgaagaacaatgttgctgggta

SEQ ID NO: 30112 - DNA, 22 bp, synthetic construct
  misc_feature 1..22: note = chemically synthesized
  source 1..22: mol_type = other DNA
gaagaacaatgttgctgggtat

SEQ ID NO: 30113 - DNA, 22 bp, synthetic construct
  misc_feature 1..22: note = chemically synthesized
  source 1..22: mol_type = other DNA
aagaacaatgttgctgggtata

SEQ ID NO: 30114 - DNA, 22 bp, synthetic construct
  misc_feature 1..22: note = chemically synthesized
  source 1..22: mol_type = other DNA
ctgggtataacatccttggtgt

SEQ ID NO: 30115 - DNA, 22 bp, synthetic construct
  misc_feature 1..22: note = chemically synthesized
  source 1..22: mol_type = other DNA
ggtataacatccttggtgtcat

SEQ ID NO: 30116 - DNA, 22 bp, synthetic construct
  misc_feature 1..22: note = chemically synthesized
  source 1..22: mol_type = other DNA
ggtgtcatttttttctttcact

SEQ ID NO: 30117 - DNA, 22 bp, synthetic construct
  misc_feature 1..22: note = chemically synthesized
  source 1..22: mol_type = other DNA
gtgtcatttttttctttcacta

SEQ ID NO: 30118 - DNA, 22 bp, synthetic construct
  misc_feature 1..22: note = chemically synthesized
  source 1..22: mol_type = other DNA
ttttctttcactattttgaata

SEQ ID NO: 30119 - DNA, 22 bp, synthetic construct
  misc_feature 1..22: note = chemically synthesized
  source 1..22: mol_type = other DNA
tttctttcactattttgaatat

SEQ ID NO: 30120 - DNA, 22 bp, synthetic construct
  misc_feature 1..22: note = chemically synthesized
  source 1..22: mol_type = other DNA
ttctttcactattttgaatata

SEQ ID NO: 30121 - DNA, 22 bp, synthetic construct
  misc_feature 1..22: note = chemically synthesized
  source 1..22: mol_type = other DNA
tctttcactattttgaatatat

SEQ ID NO: 30122 - DNA, 22 bp, synthetic construct
  misc_feature 1..22: note = chemically synthesized
  source 1..22: mol_type = other DNA
ctttcactattttgaatatatc

SEQ ID NO: 30123 - DNA, 22 bp, synthetic construct
  misc_feature 1..22: note = chemically synthesized
  source 1..22: mol_type = other DNA
tttcactattttgaatatatca

SEQ ID NO: 30124 - DNA, 22 bp, synthetic construct
  misc_feature 1..22: note = chemically synthesized
  source 1..22: mol_type = other DNA
tcactattttgaatatatcatc

SEQ ID NO: 30125 - DNA, 22 bp, synthetic construct
  misc_feature 1..22: note = chemically synthesized
  source 1..22: mol_type = other DNA
cactattttgaatatatcatcc

SEQ ID NO: 30126 - DNA, 22 bp, synthetic construct
  misc_feature 1..22: note = chemically synthesized
  source 1..22: mol_type = other DNA
actattttgaatatatcatccc

SEQ ID NO: 30127 - DNA, 22 bp, synthetic construct
  misc_feature 1..22: note = chemically synthesized
  source 1..22: mol_type = other DNA
ttttgaatatatcatcccatct

SEQ ID NO: 30128 - DNA, 22 bp, synthetic construct
  misc_feature 1..22: note = chemically synthesized
  source 1..22: mol_type = other DNA
tgaatatatcatcccatcttct

SEQ ID NO: 30129 - DNA, 22 bp, synthetic construct
  misc_feature 1..22: note = chemically synthesized
  source 1..22: mol_type = other DNA
gaatatatcatcccatcttctc

SEQ ID NO: 30130 - DNA, 22 bp, synthetic construct
  misc_feature 1..22: note = chemically synthesized
  source 1..22: mol_type = other DNA
aatatatcatcccatcttctcc

SEQ ID NO: 30131 - DNA, 22 bp, synthetic construct
  misc_feature 1..22: note = chemically synthesized
  source 1..22: mol_type = other DNA
ctcctggcctgtgaggtttctg

SEQ ID NO: 30132 - DNA, 22 bp, synthetic construct
  misc_feature 1..22: note = chemically synthesized
  source 1..22: mol_type = other DNA
tcctggcctgtgaggtttctgc

SEQ ID NO: 30133 - DNA, 22 bp, synthetic construct
  misc_feature 1..22: note = chemically synthesized
  source 1..22: mol_type = other DNA
ctggcctgtgaggtttctgctg

SEQ ID NO: 30134 - DNA, 22 bp, synthetic construct
  misc_feature 1..22: note = chemically synthesized
  source 1..22: mol_type = other DNA
gcctgtgaggtttctgctgaga

SEQ ID NO: 30135 - DNA, 22 bp, synthetic construct
  misc_feature 1..22: note = chemically synthesized
  source 1..22: mol_type = other DNA
tgaggtttctgctgagaaatct

SEQ ID NO: 30136 - DNA, 22 bp, synthetic construct
  misc_feature 1..22: note = chemically synthesized
  source 1..22: mol_type = other DNA
ctgctgagaaatctgctgttaa

SEQ ID NO: 30137 - DNA, 22 bp, synthetic construct
  misc_feature 1..22: note = chemically synthesized
  source 1..22: mol_type = other DNA
tgctgagaaatctgctgttaat

SEQ ID NO: 30138 - DNA, 22 bp, synthetic construct
  misc_feature 1..22: note = chemically synthesized
  source 1..22: mol_type = other DNA
ctgagaaatctgctgttaatct

SEQ ID NO: 30139 - DNA, 22 bp, synthetic construct
  misc_feature 1..22: note = chemically synthesized
  source 1..22: mol_type = other DNA
agaaatctgctgttaatctgtt

SEQ ID NO: 30140 - DNA, 22 bp, synthetic construct
  misc_feature 1..22: note = chemically synthesized
  source 1..22: mol_type = other DNA
ctgttaatctgttaatcttgtg

SEQ ID NO: 30141 - DNA, 22 bp, synthetic construct
  misc_feature 1..22: note = chemically synthesized
  source 1..22: mol_type = other DNA
ttaatctgttaatcttgtggaa

SEQ ID NO: 30142 - DNA, 22 bp, synthetic construct
  misc_feature 1..22: note = chemically synthesized
  source 1..22: mol_type = other DNA
atctgttaatcttgtggaagtt

SEQ ID NO: 30143 - DNA, 22 bp, synthetic construct
  misc_feature 1..22: note = chemically synthesized
  source 1..22: mol_type = other DNA
ttaatcttgtggaagttccctt

SEQ ID NO: 30144 - DNA, 22 bp, synthetic construct
  misc_feature 1..22: note = chemically synthesized
  source 1..22: mol_type = other DNA
atcttgtggaagttcccttata

SEQ ID NO: 30145 - DNA, 22 bp, synthetic construct
  misc_feature 1..22: note = chemically synthesized
  source 1..22: mol_type = other DNA
gtggaagttcccttataagtga

SEQ ID NO: 30146 - DNA, 22 bp, synthetic construct
  misc_feature 1..22: note = chemically synthesized
  source 1..22: mol_type = other DNA
tggaagttcccttataagtgac

SEQ ID NO: 30147 - DNA, 22 bp, synthetic construct
  misc_feature 1..22: note = chemically synthesized
  source 1..22: mol_type = other DNA
ccttataagtgactagacattt

SEQ ID NO: 30148 - DNA, 22 bp, synthetic construct
  misc_feature 1..22: note = chemically synthesized
  source 1..22: mol_type = other DNA
ataagtgactagacattttgct

SEQ ID NO: 30149 - DNA, 22 bp, synthetic construct
  misc_feature 1..22: note = chemically synthesized
  source 1..22: mol_type = other DNA
taagtgactagacattttgctt

SEQ ID NO: 30150 - DNA, 22 bp, synthetic construct
  misc_feature 1..22: note = chemically synthesized
  source 1..22: mol_type = other DNA
gacattttgcttgctgttttag

SEQ ID NO: 30151 - DNA, 22 bp, synthetic construct
  misc_feature 1..22: note = chemically synthesized
  source 1..22: mol_type = other DNA
tgcttgctgttttagagttctt

SEQ ID NO: 30152 - DNA, 22 bp, synthetic construct
  misc_feature 1..22: note = chemically synthesized
  source 1..22: mol_type = other DNA
gcttgctgttttagagttctta

SEQ ID NO: 30153 - DNA, 22 bp, synthetic construct
  misc_feature 1..22: note = chemically synthesized
  source 1..22: mol_type = other DNA
cttgctgttttagagttcttac

SEQ ID NO: 30154 - DNA, 22 bp, synthetic construct
  misc_feature 1..22: note = chemically synthesized
  source 1..22: mol_type = other DNA
gctgttttagagttcttactct

SEQ ID NO: 30155 - DNA, 22 bp, synthetic construct
  misc_feature 1..22: note = chemically synthesized
  source 1..22: mol_type = other DNA
ctgttttagagttcttactctt

SEQ ID NO: 30156 - DNA, 22 bp, synthetic construct
  misc_feature 1..22: note = chemically synthesized
  source 1..22: mol_type = other DNA
ttttagagttcttactctttgg

SEQ ID NO: 30157 - DNA, 22 bp, synthetic construct
  misc_feature 1..22: note = chemically synthesized
  source 1..22: mol_type = other DNA
tagagttcttactctttggctt

SEQ ID NO: 30158 - DNA, 22 bp, synthetic construct
  misc_feature 1..22: note = chemically synthesized
  source 1..22: mol_type = other DNA
agagttcttactctttggcttt

SEQ ID NO: 30159 - DNA, 22 bp, synthetic construct
  misc_feature 1..22: note = chemically synthesized
  source 1..22: mol_type = other DNA
gagttcttactctttggctttt

SEQ ID NO: 30160 - DNA, 22 bp, synthetic construct
  misc_feature 1..22: note = chemically synthesized
  source 1..22: mol_type = other DNA
ttactctttggcttttgacagt

SEQ ID NO: 30161 - DNA, 22 bp, synthetic construct
  misc_feature 1..22: note = chemically synthesized
  source 1..22: mol_type = other DNA
actctttggcttttgacagttt

SEQ ID NO: 30162 - DNA, 22 bp, synthetic construct
  misc_feature 1..22: note = chemically synthesized
  source 1..22: mol_type = other DNA
ctctttggcttttgacagtttg

SEQ ID NO: 30163 - DNA, 22 bp, synthetic construct
  misc_feature 1..22: note = chemically synthesized
  source 1..22: mol_type = other DNA
tttggcttttgacagtttgact

SEQ ID NO: 30164 - DNA, 22 bp, synthetic construct
  misc_feature 1..22: note = chemically synthesized
  source 1..22: mol_type = other DNA
tggcttttgacagtttgactat

SEQ ID NO: 30165 - DNA, 22 bp, synthetic construct
  misc_feature 1..22: note = chemically synthesized
  source 1..22: mol_type = other DNA
ggcttttgacagtttgactata

SEQ ID NO: 30166 - DNA, 22 bp, synthetic construct
  misc_feature 1..22: note = chemically synthesized
  source 1..22: mol_type = other DNA
gcttttgacagtttgactataa

SEQ ID NO: 30167 - DNA, 22 bp, synthetic construct
  misc_feature 1..22: note = chemically synthesized
  source 1..22: mol_type = other DNA
ttgacagtttgactataatgtg

SEQ ID NO: 30168 - DNA, 22 bp, synthetic construct
  misc_feature 1..22: note = chemically synthesized
  source 1..22: mol_type = other DNA
tgacagtttgactataatgtgc

SEQ ID NO: 30169 - DNA, 22 bp, synthetic construct
  misc_feature 1..22: note = chemically synthesized
  source 1..22: mol_type = other DNA
gacagtttgactataatgtgct

SEQ ID NO: 30170 - DNA, 22 bp, synthetic construct
  misc_feature 1..22: note = chemically synthesized
  source 1..22: mol_type = other DNA
acagtttgactataatgtgctg

SEQ ID NO: 30171 - DNA, 22 bp, synthetic construct
  misc_feature 1..22: note = chemically synthesized
  source 1..22: mol_type = other DNA
gactataatgtgctgtggagaa

SEQ ID NO: 30172 - DNA, 22 bp, synthetic construct
  misc_feature 1..22: note = chemically synthesized
  source 1..22: mol_type = other DNA
actataatgtgctgtggagaag

SEQ ID NO: 30173 - DNA, 22 bp, synthetic construct
  misc_feature 1..22: note = chemically synthesized
  source 1..22: mol_type = other DNA
taatgtgctgtggagaagagct

SEQ ID NO: 30174 - DNA, 22 bp, synthetic construct
  misc_feature 1..22: note = chemically synthesized
  source 1..22: mol_type = other DNA
tggagaagagctttttgcatta

SEQ ID NO: 30175 - DNA, 22 bp, synthetic construct
  misc_feature 1..22: note = chemically synthesized
  source 1..22: mol_type = other DNA
tttgcattatattatttgggaa

SEQ ID NO: 30176 - DNA, 22 bp, synthetic construct
  misc_feature 1..22: note = chemically synthesized
  source 1..22: mol_type = other DNA
ttgcattatattatttgggaat

SEQ ID NO: 30177 - DNA, 22 bp, synthetic construct
  misc_feature 1..22: note = chemically synthesized
  source 1..22: mol_type = other DNA
tgcattatattatttgggaatt

SEQ ID NO: 30178 - DNA, 22 bp, synthetic construct
  misc_feature 1..22: note = chemically synthesized
  source 1..22: mol_type = other DNA
gcattatattatttgggaattt

SEQ ID NO: 30179 - DNA, 22 bp, synthetic construct
  misc_feature 1..22: note = chemically synthesized
  source 1..22: mol_type = other DNA
cattatattatttgggaatttc

SEQ ID NO: 30180 - DNA, 22 bp, synthetic construct
  misc_feature 1..22: note = chemically synthesized
  source 1..22: mol_type = other DNA
tattatttgggaatttctgatt

SEQ ID NO: 30181 - DNA, 22 bp, synthetic construct
  misc_feature 1..22: note = chemically synthesized
  source 1..22: mol_type = other DNA
tttgggaatttctgattttcat

SEQ ID NO: 30182 - DNA, 22 bp, synthetic construct
  misc_feature 1..22: note = chemically synthesized
  source 1..22: mol_type = other DNA
gggaatttctgattttcatttg

SEQ ID NO: 30183 - DNA, 22 bp, synthetic construct
  misc_feature 1..22: note = chemically synthesized
  source 1..22: mol_type = other DNA
ggaatttctgattttcatttgt

SEQ ID NO: 30184 - DNA, 22 bp, synthetic construct
  misc_feature 1..22: note = chemically synthesized
  source 1..22: mol_type = other DNA
ctgattttcatttgtctggatg

SEQ ID NO: 30185 - DNA, 22 bp, synthetic construct
  misc_feature 1..22: note = chemically synthesized
  source 1..22: mol_type = other DNA
tgattttcatttgtctggatgt

SEQ ID NO: 30186 - DNA, 22 bp, synthetic construct
  misc_feature 1..22: note = chemically synthesized
  source 1..22: mol_type = other DNA
attttcatttgtctggatgtct

SEQ ID NO: 30187 - DNA, 22 bp, synthetic construct
  misc_feature 1..22: note = chemically synthesized
  source 1..22: mol_type = other DNA
tcatttgtctggatgtctacat

SEQ ID NO: 30188 - DNA, 22 bp, synthetic construct
  misc_feature 1..22: note = chemically synthesized
  source 1..22: mol_type = other DNA
catttgtctggatgtctacatt

SEQ ID NO: 30189 - DNA, 22 bp, synthetic construct
  misc_feature 1..22: note = chemically synthesized
  source 1..22: mol_type = other DNA
atttgtctggatgtctacattt

SEQ ID NO: 30190 - DNA, 22 bp, synthetic construct
  misc_feature 1..22: note = chemically synthesized
  source 1..22: mol_type = other DNA
gtctggatgtctacatttcttg

SEQ ID NO: 30191 - DNA, 22 bp, synthetic construct
  misc_feature 1..22: note = chemically synthesized
  source 1..22: mol_type = other DNA
tctggatgtctacatttcttgc

SEQ ID NO: 30192 - DNA, 22 bp, synthetic construct
  misc_feature 1..22: note = chemically synthesized
  source 1..22: mol_type = other DNA
gatgtctacatttcttgctaga

SEQ ID NO: 30193 - DNA, 22 bp, synthetic construct
  misc_feature 1..22: note = chemically synthesized
  source 1..22: mol_type = other DNA
catttcttgctagacttgacaa

SEQ ID NO: 30194 - DNA, 22 bp, synthetic construct
  misc_feature 1..22: note = chemically synthesized
  source 1..22: mol_type = other DNA
cttgctagacttgacaagtttt

SEQ ID NO: 30195 - DNA, 22 bp, synthetic construct
  misc_feature 1..22: note = chemically synthesized
  source 1..22: mol_type = other DNA
ttgctagacttgacaagttttc

SEQ ID NO: 30196 - DNA, 22 bp, synthetic construct
  misc_feature 1..22: note = chemically synthesized
  source 1..22: mol_type = other DNA
gctagacttgacaagttttcag

SEQ ID NO: 30197 - DNA, 22 bp, synthetic construct
  misc_feature 1..22: note = chemically synthesized
  source 1..22: mol_type = other DNA
ctagacttgacaagttttcagc

SEQ ID NO: 30198 - DNA, 22 bp, synthetic construct
  misc_feature 1..22: note = chemically synthesized
  source 1..22: mol_type = other DNA
gacttgacaagttttcagctat

SEQ ID NO: 30199 - DNA, 22 bp, synthetic construct
  misc_feature 1..22: note = chemically synthesized
  source 1..22: mol_type = other DNA
gacaagttttcagctattgtgt

SEQ ID NO: 30200 - DNA, 22 bp, synthetic construct
  misc_feature 1..22: note = chemically synthesized
  source 1..22: mol_type = other DNA
acaagttttcagctattgtgtt

SEQ ID NO: 30201 - DNA, 22 bp, synthetic construct
  misc_feature 1..22: note = chemically synthesized
  source 1..22: mol_type = other DNA
tcagctattgtgttgttacgta

SEQ ID NO: 30202 - DNA, 22 bp, synthetic construct
  misc_feature 1..22: note = chemically synthesized
  source 1..22: mol_type = other DNA
cagctattgtgttgttacgtag

SEQ ID NO: 30203 - DNA, 22 bp, synthetic construct
  misc_feature 1..22: note = chemically synthesized
  source 1..22: mol_type = other DNA
agctattgtgttgttacgtagg

SEQ ID NO: 30204 - DNA, 22 bp, synthetic construct
  misc_feature 1..22: note = chemically synthesized
  source 1..22: mol_type = other DNA
ttgtgttgttacgtaggtttcc

SEQ ID NO: 30205 - DNA, 22 bp, synthetic construct
  misc_feature 1..22: note = chemically synthesized
  source 1..22: mol_type = other DNA
tgttgttacgtaggtttcctac

SEQ ID NO: 30206 - DNA, 22 bp, synthetic construct
  misc_feature 1..22: note = chemically synthesized
  source 1..22: mol_type = other DNA
ttacgtaggtttcctacacctt

SEQ ID NO: 30207 - DNA, 22 bp, synthetic construct
  misc_feature 1..22: note = chemically synthesized
  source 1..22: mol_type = other DNA
cgtaggtttcctacacctttca

SEQ ID NO: 30208 - DNA, 22 bp, synthetic construct
  misc_feature 1..22: note = chemically synthesized
  source 1..22: mol_type = other DNA
cctacacctttcatgttctctt

SEQ ID NO: 30209 - DNA, 22 bp, synthetic construct
  misc_feature 1..22: note = chemically synthesized
  source 1..22: mol_type = other DNA
ctacacctttcatgttctcttt

SEQ ID NO: 30210 - DNA, 22 bp, synthetic construct
  misc_feature 1..22: note = chemically synthesized
  source 1..22: mol_type = other DNA
cacctttcatgttctctttacc

SEQ ID NO: 30211 - DNA, 22 bp, synthetic construct
  misc_feature 1..22: note = chemically synthesized
  source 1..22: mol_type = other DNA
tcatgttctctttaccttctgg

SEQ ID NO: 30212 - DNA, 22 bp, synthetic construct
  misc_feature 1..22: note = chemically synthesized
  source 1..22: mol_type = other DNA
catgttctctttaccttctggg

SEQ ID NO: 30213 - DNA, 22 bp, synthetic construct
  misc_feature 1..22: note = chemically synthesized
  source 1..22: mol_type = other DNA
atgttctctttaccttctggga

SEQ ID NO: 30214 - DNA, 22 bp, synthetic construct
  misc_feature 1..22: note = chemically synthesized
  source 1..22: mol_type = other DNA
tctttaccttctgggaaactgc

SEQ ID NO: 30215 - DNA, 22 bp, synthetic construct
  misc_feature 1..22: note = chemically synthesized
  source 1..22: mol_type = other DNA
tttaccttctgggaaactgcaa

SEQ ID NO: 30216 - DNA, 22 bp, synthetic construct
  misc_feature 1..22: note = chemically synthesized
  source 1..22: mol_type = other DNA
taccttctgggaaactgcaaat

SEQ ID NO: 30217 - DNA, 22 bp, synthetic construct
  misc_feature 1..22: note = chemically synthesized
  source 1..22: mol_type = other DNA
accttctgggaaactgcaaatt

SEQ ID NO: 30218 - DNA, 22 bp, synthetic construct
  misc_feature 1..22: note = chemically synthesized
  source 1..22: mol_type = other DNA
ccttctgggaaactgcaaattt

SEQ ID NO: 30219 - DNA, 22 bp, synthetic construct
  misc_feature 1..22: note = chemically synthesized
  source 1..22: mol_type = other DNA
ctgggaaactgcaaatttgaat

SEQ ID NO: 30220 - DNA, 22 bp, synthetic construct
  misc_feature 1..22: note = chemically synthesized
  source 1..22: mol_type = other DNA
tgggaaactgcaaatttgaata

SEQ ID NO: 30221 - DNA, 22 bp, synthetic construct
  misc_feature 1..22: note = chemically synthesized
  source 1..22: mol_type = other DNA
ggaaactgcaaatttgaatatt

SEQ ID NO: 30222 - DNA, 22 bp, synthetic construct
  misc_feature 1..22: note = chemically synthesized
  source 1..22: mol_type = other DNA
caaatttgaatatttgttcact

SEQ ID NO: 30223 - DNA, 22 bp, synthetic construct
  misc_feature 1..22: note = chemically synthesized
  source 1..22: mol_type = other DNA
gaatatttgttcactttatagt

SEQ ID NO: 30224 - DNA, 22 bp, synthetic construct
  misc_feature 1..22: note = chemically synthesized
  source 1..22: mol_type = other DNA
aatatttgttcactttatagtg

SEQ ID NO: 30225 - DNA, 22 bp, synthetic construct
  misc_feature 1..22: note = chemically synthesized
  source 1..22: mol_type = other DNA
gttcactttatagtgcctcata

SEQ ID NO: 30226 - DNA, 22 bp, synthetic construct
  misc_feature 1..22: note = chemically synthesized
  source 1..22: mol_type = other DNA
ttcactttatagtgcctcatat

SEQ ID NO: 30227 - DNA, 22 bp, synthetic construct
  misc_feature 1..22: note = chemically synthesized
  source 1..22: mol_type = other DNA
actttatagtgcctcatatgtc

SEQ ID NO: 30228 - DNA, 22 bp, synthetic construct
  misc_feature 1..22: note = chemically synthesized
  source 1..22: mol_type = other DNA
tatagtgcctcatatgtcacat

SEQ ID NO: 30229 - DNA, 22 bp, synthetic construct
  misc_feature 1..22: note = chemically synthesized
  source 1..22: mol_type = other DNA
atagtgcctcatatgtcacata

SEQ ID NO: 30230 - DNA, 22 bp, synthetic construct
  misc_feature 1..22: note = chemically synthesized
  source 1..22: mol_type = other DNA
tagtgcctcatatgtcacatac

SEQ ID NO: 30231 - DNA, 22 bp, synthetic construct
  misc_feature 1..22: note = chemically synthesized
  source 1..22: mol_type = other DNA
atatgtcacatacactttgttc

SEQ ID NO: 30232 - DNA, 22 bp, synthetic construct
  misc_feature 1..22: note = chemically synthesized
  source 1..22: mol_type = other DNA
tgttcattctttttttttcctt

SEQ ID NO: 30233 - DNA, 22 bp, synthetic construct
  misc_feature 1..22: note = chemically synthesized
  source 1..22: mol_type = other DNA
gttcattctttttttttccttt

SEQ ID NO: 30234 - DNA, 22 bp, synthetic construct
  misc_feature 1..22: note = chemically synthesized
  source 1..22: mol_type = other DNA
ttcattctttttttttcctttc

SEQ ID NO: 30235 - DNA, 22 bp, synthetic construct
  misc_feature 1..22: note = chemically synthesized
  source 1..22: mol_type = other DNA
attctttttttttcctttctat

SEQ ID NO: 30236 - DNA, 22 bp, synthetic construct
  misc_feature 1..22: note = chemically synthesized
  source 1..22: mol_type = other DNA
tttttttttcctttctatcatt

SEQ ID NO: 30237 - DNA, 22 bp, synthetic construct
  misc_feature 1..22: note = chemically synthesized
  source 1..22: mol_type = other DNA
tttttttcctttctatcatttg

SEQ ID NO: 30238 - DNA, 22 bp, synthetic construct
  misc_feature 1..22: note = chemically synthesized
  source 1..22: mol_type = other DNA
ttttttcctttctatcatttga

SEQ ID NO: 30239 - DNA, 22 bp, synthetic construct
  misc_feature 1..22: note = chemically synthesized
  source 1..22: mol_type = other DNA
tttttcctttctatcatttgac

SEQ ID NO: 30240 - DNA, 22 bp, synthetic construct
  misc_feature 1..22: note = chemically synthesized
  source 1..22: mol_type = other DNA
ttttcctttctatcatttgacc

SEQ ID NO: 30241 - DNA, 22 bp, synthetic construct
  misc_feature 1..22: note = chemically synthesized
  source 1..22: mol_type = other DNA
tttcctttctatcatttgacca

SEQ ID NO: 30242 - DNA, 22 bp, synthetic construct
  misc_feature 1..22: note = chemically synthesized
  source 1..22: mol_type = other DNA
ttcctttctatcatttgaccag

SEQ ID NO: 30243 - DNA, 22 bp, synthetic construct
  misc_feature 1..22: note = chemically synthesized
  source 1..22: mol_type = other DNA
tcctttctatcatttgaccagc

SEQ ID NO: 30244 - DNA, 22 bp, synthetic construct
  misc_feature 1..22: note = chemically synthesized
  source 1..22: mol_type = other DNA
cctttctatcatttgaccagct

SEQ ID NO: 30245 - DNA, 22 bp, synthetic construct
  misc_feature 1..22: note = chemically synthesized
  source 1..22: mol_type = other DNA
ctttctatcatttgaccagcta

SEQ ID NO: 30246 - DNA, 22 bp, synthetic construct
  misc_feature 1..22: note = chemically synthesized
  source 1..22: mol_type = other DNA
tctatcatttgaccagctaatt

SEQ ID NO: 30247 - DNA, 22 bp, synthetic construct
  misc_feature 1..22: note = chemically synthesized
  source 1..22: mol_type = other DNA
ctatcatttgaccagctaattt

SEQ ID NO: 30248 - DNA, 22 bp, synthetic construct
  misc_feature 1..22: note = chemically synthesized
  source 1..22: mol_type = other DNA
tatcatttgaccagctaatttt

SEQ ID NO: 30249 - DNA, 22 bp, synthetic construct
  misc_feature 1..22: note = chemically synthesized
  source 1..22: mol_type = other DNA
tcatttgaccagctaattttaa

SEQ ID NO: 30250 - DNA, 22 bp, synthetic construct
  misc_feature 1..22: note = chemically synthesized
  source 1..22: mol_type = other DNA
gaccagctaattttaaaagacc

SEQ ID NO: 30251 - DNA, 22 bp, synthetic construct
  misc_feature 1..22: note = chemically synthesized
  source 1..22: mol_type = other DNA
accagctaattttaaaagacct

SEQ ID NO: 30252 - DNA, 22 bp, synthetic construct
  misc_feature 1..22: note = chemically synthesized
  source 1..22: mol_type = other DNA
attttaaaagacctgtcttcaa

SEQ ID NO: 30253 - DNA, 22 bp, synthetic construct
  misc_feature 1..22: note = chemically synthesized
  source 1..22: mol_type = other DNA
taaaagacctgtcttcaagttc

SEQ ID NO: 30254 - DNA, 22 bp, synthetic construct
  misc_feature 1..22: note = chemically synthesized
  source 1..22: mol_type = other DNA
aaaagacctgtcttcaagttct

SEQ ID NO: 30255 - DNA, 22 bp, synthetic construct
  misc_feature 1..22: note = chemically synthesized
  source 1..22: mol_type = other DNA
aaagacctgtcttcaagttctg

SEQ ID NO: 30256 - DNA, 22 bp, synthetic construct
  misc_feature 1..22: note = chemically synthesized
  source 1..22: mol_type = other DNA
tcttcaagttctgaaatttttc

SEQ ID NO: 30257 - DNA, 22 bp, synthetic construct
  misc_feature 1..22: note = chemically synthesized
  source 1..22: mol_type = other DNA
caagttctgaaatttttcttct

SEQ ID NO: 30258 - DNA, 22 bp, synthetic construct
  misc_feature 1..22: note = chemically synthesized
  source 1..22: mol_type = other DNA
aagttctgaaatttttcttctg

SEQ ID NO: 30259 - DNA, 22 bp, synthetic construct
  misc_feature 1..22: note = chemically synthesized
  source 1..22: mol_type = other DNA
tgaaatttttcttctgcttgat

SEQ ID NO: 30260 - DNA, 22 bp, synthetic construct
  misc_feature 1..22: note = chemically synthesized
  source 1..22: mol_type = other DNA
aaatttttcttctgcttgatct

SEQ ID NO: 30261 - DNA, 22 bp, synthetic construct
  misc_feature 1..22: note = chemically synthesized
  source 1..22: mol_type = other DNA
ttcttctgcttgatctgatcta

SEQ ID NO: 30262 - DNA, 22 bp, synthetic construct
  misc_feature 1..22: note = chemically synthesized
  source 1..22: mol_type = other DNA
tcttctgcttgatctgatctat

SEQ ID NO: 30263 - DNA, 22 bp, synthetic construct
  misc_feature 1..22: note = chemically synthesized
  source 1..22: mol_type = other DNA
cttctgcttgatctgatctatt

SEQ ID NO: 30264 - DNA, 22 bp, synthetic construct
  misc_feature 1..22: note = chemically synthesized
  source 1..22: mol_type = other DNA
ttctgcttgatctgatctattg

SEQ ID NO: 30265 - DNA, 22 bp, synthetic construct
  misc_feature 1..22: note = chemically synthesized
  source 1..22: mol_type = other DNA
ctgcttgatctgatctattgtt

SEQ ID NO: 30266 - DNA, 22 bp, synthetic construct
  misc_feature 1..22: note = chemically synthesized
  source 1..22: mol_type = other DNA
tgcttgatctgatctattgttg

SEQ ID NO: 30267 - DNA, 22 bp, synthetic construct
  misc_feature 1..22: note = chemically synthesized
  source 1..22: mol_type = other DNA
cttgatctgatctattgttgaa

SEQ ID NO: 30268 - DNA, 22 bp, synthetic construct
  misc_feature 1..22: note = chemically synthesized
  source 1..22: mol_type = other DNA
gatctgatctattgttgaagtt

SEQ ID NO: 30269 - DNA, 22 bp, synthetic construct
  misc_feature 1..22: note = chemically synthesized
  source 1..22: mol_type = other DNA
atctgatctattgttgaagttt

SEQ ID NO: 30270 - DNA, 22 bp, synthetic construct
  misc_feature 1..22: note = chemically synthesized
  source 1..22: mol_type = other DNA
atctattgttgaagtttttgaa

SEQ ID NO: 30271 - DNA, 22 bp, synthetic construct
  misc_feature 1..22: note = chemically synthesized
  source 1..22: mol_type = other DNA
ttgttgaagtttttgaatgtat

SEQ ID NO: 30272 - DNA, 22 bp, synthetic construct
  misc_feature 1..22: note = chemically synthesized
  source 1..22: mol_type = other DNA
ttgaagtttttgaatgtatttt

SEQ ID NO: 30273 - DNA, 22 bp, synthetic construct
  misc_feature 1..22: note = chemically synthesized
  source 1..22: mol_type = other DNA
aagtttttgaatgtattttgta

SEQ ID NO: 30274 - DNA, 22 bp, synthetic construct
  misc_feature 1..22: note = chemically synthesized
  source 1..22: mol_type = other DNA
ttgaatgtattttgtatttctt

SEQ ID NO: 30275 - DNA, 22 bp, synthetic construct
  misc_feature 1..22: note = chemically synthesized
  source 1..22: mol_type = other DNA
tgaatgtattttgtatttcttt

SEQ ID NO: 30276 - DNA, 22 bp, synthetic construct
  misc_feature 1..22: note = chemically synthesized
  source 1..22: mol_type = other DNA
gaatgtattttgtatttctttc

SEQ ID NO: 30277 - DNA, 22 bp, synthetic construct
  misc_feature 1..22: note = chemically synthesized
  source 1..22: mol_type = other DNA
aatgtattttgtatttctttca

SEQ ID NO: 30278 - DNA, 22 bp, synthetic construct
  misc_feature 1..22: note = chemically synthesized
  source 1..22: mol_type = other DNA
tgtatttctttcaataaactct

SEQ ID NO: 30279 - DNA, 22 bp, synthetic construct
  misc_feature 1..22: note = chemically synthesized
  source 1..22: mol_type = other DNA
gtatttctttcaataaactctt

SEQ ID NO: 30280 - DNA, 22 bp, synthetic construct
  misc_feature 1..22: note = chemically synthesized
  source 1..22: mol_type = other DNA
tatttctttcaataaactcttc

SEQ ID NO: 30281 - DNA, 22 bp, synthetic construct
  misc_feature 1..22: note = chemically synthesized
  source 1..22: mol_type = other DNA
ctttcaataaactcttcagtta

SEQ ID NO: 30282 - DNA, 22 bp, synthetic construct
  misc_feature 1..22: note = chemically synthesized
  source 1..22: mol_type = other DNA
tttcaataaactcttcagttac

SEQ ID NO: 30283 - DNA, 22 bp, synthetic construct
  misc_feature 1..22: note = chemically synthesized
  source 1..22: mol_type = other DNA
tcaataaactcttcagttacag

SEQ ID NO: 30284 - DNA, 22 bp, synthetic construct
  misc_feature 1..22: note = chemically synthesized
  source 1..22: mol_type = other DNA
caataaactcttcagttacaga

SEQ ID NO: 30285 - DNA, 22 bp, synthetic construct
  misc_feature 1..22: note = chemically synthesized
  source 1..22: mol_type = other DNA
aataaactcttcagttacagaa

SEQ ID NO: 30286 - DNA, 22 bp, synthetic construct
  misc_feature 1..22: note = chemically synthesized
  source 1..22: mol_type = other DNA
ttcagttacagaatttctgttt

SEQ ID NO: 30287 - DNA, 22 bp, synthetic construct
  misc_feature 1..22: note = chemically synthesized
  source 1..22: mol_type = other DNA
cagttacagaatttctgtttgg

SEQ ID NO: 30288 - DNA, 22 bp, synthetic construct
  misc_feature 1..22: note = chemically synthesized
  source 1..22: mol_type = other DNA
agttacagaatttctgtttggt

SEQ ID NO: 30289 - DNA, 22 bp, synthetic construct
  misc_feature 1..22: note = chemically synthesized
  source 1..22: mol_type = other DNA
cagaatttctgtttggttcatt

SEQ ID NO: 30290 - DNA, 22 bp, synthetic construct
  misc_feature 1..22: note = chemically synthesized
  source 1..22: mol_type = other DNA
ctgtttggttcattcttgttgt

SEQ ID NO: 30291 - DNA, 22 bp, synthetic construct
  misc_feature 1..22: note = chemically synthesized
  source 1..22: mol_type = other DNA
tgtttggttcattcttgttgta

SEQ ID NO: 30292 - DNA, 22 bp, synthetic construct
  misc_feature 1..22: note = chemically synthesized
  source 1..22: mol_type = other DNA
tttggttcattcttgttgtatc

SEQ ID NO: 30293 - DNA, 22 bp, synthetic construct
  misc_feature 1..22: note = chemically synthesized
  source 1..22: mol_type = other DNA
ggttcattcttgttgtatctat

SEQ ID NO: 30294 - DNA, 22 bp, synthetic construct
  misc_feature 1..22: note = chemically synthesized
  source 1..22: mol_type = other DNA
gttcattcttgttgtatctatc

SEQ ID NO: 30295 - DNA, 22 bp, synthetic construct
  misc_feature 1..22: note = chemically synthesized
  source 1..22: mol_type = other DNA
attcttgttgtatctatctctt

SEQ ID NO: 30296 - DNA, 22 bp, synthetic construct
  misc_feature 1..22: note = chemically synthesized
  source 1..22: mol_type = other DNA
ttgttgtatctatctcttgggt

SEQ ID NO: 30297 - DNA, 22 bp, synthetic construct
  misc_feature 1..22: note = chemically synthesized
  source 1..22: mol_type = other DNA
gttgtatctatctcttgggtaa

SEQ ID NO: 30298 - DNA, 22 bp, synthetic construct
  misc_feature 1..22: note = chemically synthesized
  source 1..22: mol_type = other DNA
ttgtatctatctcttgggtaaa

SEQ ID NO: 30299 - DNA, 22 bp, synthetic construct
  misc_feature 1..22: note = chemically synthesized
  source 1..22: mol_type = other DNA
tatctatctcttgggtaaattt

SEQ ID NO: 30300 - DNA, 22 bp, synthetic construct
  misc_feature 1..22: note = chemically synthesized
  source 1..22: mol_type = other DNA
tctcttgggtaaatttctcatt

SEQ ID NO: 30301 - DNA, 22 bp, synthetic construct
  misc_feature 1..22: note = chemically synthesized
  source 1..22: mol_type = other DNA
ttgggtaaatttctcattcata

SEQ ID NO: 30302 - DNA, 22 bp, synthetic construct
  misc_feature 1..22: note = chemically synthesized
  source 1..22: mol_type = other DNA
gggtaaatttctcattcatatc

SEQ ID NO: 30303 - DNA, 22 bp, synthetic construct
  misc_feature 1..22: note = chemically synthesized
  source 1..22: mol_type = other DNA
ggtaaatttctcattcatatcc

SEQ ID NO: 30304 - DNA, 22 bp, synthetic construct
  misc_feature 1..22: note = chemically synthesized
  source 1..22: mol_type = other DNA
ctcattcatatcctgaattgtt

SEQ ID NO: 30305 - DNA, 22 bp, synthetic construct
  misc_feature 1..22: note = chemically synthesized
  source 1..22: mol_type = other DNA
tcattcatatcctgaattgttt

SEQ ID NO: 30306 - DNA, 22 bp, synthetic construct
  misc_feature 1..22: note = chemically synthesized
  source 1..22: mol_type = other DNA
attcatatcctgaattgttttt

SEQ ID NO: 30307 - DNA, 22 bp, synthetic construct
  misc_feature 1..22: note = chemically synthesized
  source 1..22: mol_type = other DNA
atatcctgaattgtttttctga

SEQ ID NO: 30308 - DNA, 22 bp, synthetic construct
  misc_feature 1..22: note = chemically synthesized
  source 1..22: mol_type = other DNA
aattgtttttctgatttctttt

SEQ ID NO: 30309 - DNA, 22 bp, synthetic construct
  misc_feature 1..22: note = chemically synthesized
  source 1..22: mol_type = other DNA
tttttctgatttctttttattg

SEQ ID NO: 30310 - DNA, 22 bp, synthetic construct
  misc_feature 1..22: note = chemically synthesized
  source 1..22: mol_type = other DNA
ttctgatttctttttattgttt

SEQ ID NO: 30311 - DNA, 22 bp, synthetic construct
  misc_feature 1..22: note = chemically synthesized
  source 1..22: mol_type = other DNA
tctgatttctttttattgttta

SEQ ID NO: 30312 - DNA, 22 bp, synthetic construct
  misc_feature 1..22: note = chemically synthesized
  source 1..22: mol_type = other DNA
ctgatttctttttattgtttat

SEQ ID NO: 30313 - DNA, 22 bp, synthetic construct
  misc_feature 1..22: note = chemically synthesized
  source 1..22: mol_type = other DNA
tgatttctttttattgtttatc

SEQ ID NO: 30314 - DNA, 22 bp, synthetic construct
  misc_feature 1..22: note = chemically synthesized
  source 1..22: mol_type = other DNA
atttctttttattgtttatctg

SEQ ID NO: 30315 - DNA, 22 bp, synthetic construct
  misc_feature 1..22: note = chemically synthesized
  source 1..22: mol_type = other DNA
ctttttattgtttatctgagtt

SEQ ID NO: 30316 - DNA, 22 bp, synthetic construct
  misc_feature 1..22: note = chemically synthesized
  source 1..22: mol_type = other DNA
tttttattgtttatctgagttc

SEQ ID NO: 30317 - DNA, 22 bp, synthetic construct
  misc_feature 1..22: note = chemically synthesized
  source 1..22: mol_type = other DNA
tttattgtttatctgagttctc

SEQ ID NO: 30318 - DNA, 22 bp, synthetic construct
  misc_feature 1..22: note = chemically synthesized
  source 1..22: mol_type = other DNA
ttattgtttatctgagttctct

SEQ ID NO: 30319 - DNA, 22 bp, synthetic construct
  misc_feature 1..22: note = chemically synthesized
  source 1..22: mol_type = other DNA
tattgtttatctgagttctctt

SEQ ID NO: 30320 - DNA, 22 bp, synthetic construct
  misc_feature 1..22: note = chemically synthesized
  source 1..22: mol_type = other DNA
attgtttatctgagttctcttg

SEQ ID NO: 30321 - DNA, 22 bp, synthetic construct
  misc_feature 1..22: note = chemically synthesized
  source 1..22: mol_type = other DNA
ttgtttatctgagttctcttgt

SEQ ID NO: 30322 - DNA, 22 bp, synthetic construct
  misc_feature 1..22: note = chemically synthesized
  source 1..22: mol_type = other DNA
tttatctgagttctcttgtgtc

SEQ ID NO: 30323 - DNA, 22 bp, synthetic construct
  misc_feature 1..22: note = chemically synthesized
  source 1..22: mol_type = other DNA
atctgagttctcttgtgtctca

SEQ ID NO: 30324 - DNA, 22 bp, synthetic construct
  misc_feature 1..22: note = chemically synthesized
  source 1..22: mol_type = other DNA
tctgagttctcttgtgtctcac

SEQ ID NO: 30325 - DNA, 22 bp, synthetic construct
  misc_feature 1..22: note = chemically synthesized
  source 1..22: mol_type = other DNA
agttctcttgtgtctcactgag

SEQ ID NO: 30326 - DNA, 22 bp, synthetic construct
  misc_feature 1..22: note = chemically synthesized
  source 1..22: mol_type = other DNA
tcttgtgtctcactgagcttcc

SEQ ID NO: 30327 - DNA, 22 bp, synthetic construct
  misc_feature 1..22: note = chemically synthesized
  source 1..22: mol_type = other DNA
ttgtgtctcactgagcttcctt

SEQ ID NO: 30328 - DNA, 22 bp, synthetic construct
  misc_feature 1..22: note = chemically synthesized
  source 1..22: mol_type = other DNA
gtgtctcactgagcttccttaa

SEQ ID NO: 30329 - DNA, 22 bp, synthetic construct
  misc_feature 1..22: note = chemically synthesized
  source 1..22: mol_type = other DNA
tgtctcactgagcttccttaat

SEQ ID NO: 30330 - DNA, 22 bp, synthetic construct
  misc_feature 1..22: note = chemically synthesized
  source 1..22: mol_type = other DNA
actgagcttccttaatatcaac

SEQ ID NO: 30331 - DNA, 22 bp, synthetic construct
  misc_feature 1..22: note = chemically synthesized
  source 1..22: mol_type = other DNA
agcttccttaatatcaacattt

SEQ ID NO: 30332 - DNA, 22 bp, synthetic construct
  misc_feature 1..22: note = chemically synthesized
  source 1..22: mol_type = other DNA
ccttaatatcaacattttggat

SEQ ID NO: 30333 - DNA, 22 bp, synthetic construct
  misc_feature 1..22: note = chemically synthesized
  source 1..22: mol_type = other DNA
cttaatatcaacattttggatt

SEQ ID NO: 30334 - DNA, 22 bp, synthetic construct
  misc_feature 1..22: note = chemically synthesized
  source 1..22: mol_type = other DNA
aatatcaacattttggattctt

SEQ ID NO: 30335 - DNA, 22 bp, synthetic construct
  misc_feature 1..22: note = chemically synthesized
  source 1..22: mol_type = other DNA
atatcaacattttggattcttt

SEQ ID NO: 30336 - DNA, 22 bp, synthetic construct
  misc_feature 1..22: note = chemically synthesized
  source 1..22: mol_type = other DNA
tggattcttttttccagaattt

SEQ ID NO: 30337 - DNA, 22 bp, synthetic construct
  misc_feature 1..22: note = chemically synthesized
  source 1..22: mol_type = other DNA
ggattcttttttccagaatttt

SEQ ID NO: 30338 - DNA, 22 bp, synthetic construct
  misc_feature 1..22: note = chemically synthesized
  source 1..22: mol_type = other DNA
gattcttttttccagaatttta

SEQ ID NO: 30339 - DNA, 22 bp, synthetic construct
  misc_feature 1..22: note = chemically synthesized
  source 1..22: mol_type = other DNA
ttttttccagaattttataaat

SEQ ID NO: 30340 - DNA, 22 bp, synthetic construct
  misc_feature 1..22: note = chemically synthesized
  source 1..22: mol_type = other DNA
ttttccagaattttataaatgt

SEQ ID NO: 30341 - DNA, 22 bp, synthetic construct
  misc_feature 1..22: note = chemically synthesized
  source 1..22: mol_type = other DNA
tttccagaattttataaatgtc

SEQ ID NO: 30342 - DNA, 22 bp, synthetic construct
  misc_feature 1..22: note = chemically synthesized
  source 1..22: mol_type = other DNA
ttccagaattttataaatgtct

SEQ ID NO: 30343 - DNA, 22 bp, synthetic construct
  misc_feature 1..22: note = chemically synthesized
  source 1..22: mol_type = other DNA
tccagaattttataaatgtctt

SEQ ID NO: 30344 - DNA, 22 bp, synthetic construct
  misc_feature 1..22: note = chemically synthesized
  source 1..22: mol_type = other DNA
ccagaattttataaatgtcttt

SEQ ID NO: 30345 - DNA, 22 bp, synthetic construct
  misc_feature 1..22: note = chemically synthesized
  source 1..22: mol_type = other DNA
cagaattttataaatgtctttt

SEQ ID NO: 30346 - DNA, 22 bp, synthetic construct
  misc_feature 1..22: note = chemically synthesized
  source 1..22: mol_type = other DNA
tataaatgtcttttttttccac

SEQ ID NO: 30347 - DNA, 22 bp, synthetic construct
  misc_feature 1..22: note = chemically synthesized
  source 1..22: mol_type = other DNA
ataaatgtcttttttttccact

SEQ ID NO: 30348 - DNA, 22 bp, synthetic construct
  misc_feature 1..22: note = chemically synthesized
  source 1..22: mol_type = other DNA
taaatgtcttttttttccactg

SEQ ID NO: 30349 - DNA, 22 bp, synthetic construct
  misc_feature 1..22: note = chemically synthesized
  source 1..22: mol_type = other DNA
ttttttccactggcttatgttg

SEQ ID NO: 30350 - DNA, 22 bp, synthetic construct
  misc_feature 1..22: note = chemically synthesized
  source 1..22: mol_type = other DNA
tttttccactggcttatgttgc

SEQ ID NO: 30351 - DNA, 22 bp, synthetic construct
  misc_feature 1..22: note = chemically synthesized
  source 1..22: mol_type = other DNA
ttttccactggcttatgttgct

SEQ ID NO: 30352 - DNA, 22 bp, synthetic construct
  misc_feature 1..22: note = chemically synthesized
  source 1..22: mol_type = other DNA
tttccactggcttatgttgctg

SEQ ID NO: 30353 - DNA, 22 bp, synthetic construct
  misc_feature 1..22: note = chemically synthesized
  source 1..22: mol_type = other DNA
ttccactggcttatgttgctga

SEQ ID NO: 30354 - DNA, 22 bp, synthetic construct
  misc_feature 1..22: note = chemically synthesized
  source 1..22: mol_type = other DNA
tccactggcttatgttgctgaa

SEQ ID NO: 30355 - DNA, 22 bp, synthetic construct
  misc_feature 1..22: note = chemically synthesized
  source 1..22: mol_type = other DNA
ccactggcttatgttgctgaag

SEQ ID NO: 30356 - DNA, 22 bp, synthetic construct
  misc_feature 1..22: note = chemically synthesized
  source 1..22: mol_type = other DNA
cactggcttatgttgctgaaga

SEQ ID NO: 30357 - DNA, 22 bp, synthetic construct
  misc_feature 1..22: note = chemically synthesized
  source 1..22: mol_type = other DNA
gcttatgttgctgaagaattat

SEQ ID NO: 30358 - DNA, 22 bp, synthetic construct
  misc_feature 1..22: note = chemically synthesized
  source 1..22: mol_type = other DNA
atgttgctgaagaattattaaa

SEQ ID NO: 30359 - DNA, 22 bp, synthetic construct
  misc_feature 1..22: note = chemically synthesized
  source 1..22: mol_type = other DNA
tgttgctgaagaattattaaat

SEQ ID NO: 30360 - DNA, 22 bp, synthetic construct
  misc_feature 1..22: note = chemically synthesized
  source 1..22: mol_type = other DNA
ctgaagaattattaaattcctt

SEQ ID NO: 30361 - DNA, 22 bp, synthetic construct
  misc_feature 1..22: note = chemically synthesized
  source 1..22: mol_type = other DNA
aagaattattaaattcctttgg

SEQ ID NO: 30362 - DNA, 22 bp, synthetic construct
  misc_feature 1..22: note = chemically synthesized
  source 1..22: mol_type = other DNA
ttaaattcctttggaagtgtca

SEQ ID NO: 30363 - DNA, 22 bp, synthetic construct
  misc_feature 1..22: note = chemically synthesized
  source 1..22: mol_type = other DNA
aattcctttggaagtgtcatat

SEQ ID NO: 30364 - DNA, 22 bp, synthetic construct
  misc_feature 1..22: note = chemically synthesized
  source 1..22: mol_type = other DNA
ctttggaagtgtcatatttctt

SEQ ID NO: 30365 - DNA, 22 bp, synthetic construct
  misc_feature 1..22: note = chemically synthesized
  source 1..22: mol_type = other DNA
tggaagtgtcatatttcttcac

SEQ ID NO: 30366 - DNA, 22 bp, synthetic construct
  misc_feature 1..22: note = chemically synthesized
  source 1..22: mol_type = other DNA
ggaagtgtcatatttcttcacc

SEQ ID NO: 30367 - DNA, 22 bp, synthetic construct
  misc_feature 1..22: note = chemically synthesized
  source 1..22: mol_type = other DNA
gaagtgtcatatttcttcacct

SEQ ID NO: 30368 - DNA, 22 bp, synthetic construct
  misc_feature 1..22: note = chemically synthesized
  source 1..22: mol_type = other DNA
cttcacctttttatgtttattt

SEQ ID NO: 30369 - DNA, 22 bp, synthetic construct
  misc_feature 1..22: note = chemically synthesized
  source 1..22: mol_type = other DNA
ttcacctttttatgtttatttt

SEQ ID NO: 30370 - DNA, 22 bp, synthetic construct
  misc_feature 1..22: note = chemically synthesized
  source 1..22: mol_type = other DNA
cacctttttatgtttattttgt

SEQ ID NO: 30371 - DNA, 22 bp, synthetic construct
  misc_feature 1..22: note = chemically synthesized
  source 1..22: mol_type = other DNA
acctttttatgtttattttgtt

SEQ ID NO: 30372 - DNA, 22 bp, synthetic construct
  misc_feature 1..22: note = chemically synthesized
  source 1..22: mol_type = other DNA
tttatgtttattttgttcttgc

SEQ ID NO: 30373 - DNA, 22 bp, synthetic construct
  misc_feature 1..22: note = chemically synthesized
  source 1..22: mol_type = other DNA
ttatgtttattttgttcttgca

SEQ ID NO: 30374 - DNA, 22 bp, synthetic construct
  misc_feature 1..22: note = chemically synthesized
  source 1..22: mol_type = other DNA
tatgtttattttgttcttgcat

SEQ ID NO: 30375 - DNA, 22 bp, synthetic construct
  misc_feature 1..22: note = chemically synthesized
  source 1..22: mol_type = other DNA
atgtttattttgttcttgcatt

SEQ ID NO: 30376 - DNA, 22 bp, synthetic construct
  misc_feature 1..22: note = chemically synthesized
  source 1..22: mol_type = other DNA
tgtttattttgttcttgcattg

SEQ ID NO: 30377 - DNA, 22 bp, synthetic construct
  misc_feature 1..22: note = chemically synthesized
  source 1..22: mol_type = other DNA
attttgttcttgcattgatatc

SEQ ID NO: 30378 - DNA, 22 bp, synthetic construct
  misc_feature 1..22: note = chemically synthesized
  source 1..22: mol_type = other DNA
ttttgttcttgcattgatatct

SEQ ID NO: 30379 - DNA, 22 bp, synthetic construct
  misc_feature 1..22: note = chemically synthesized
  source 1..22: mol_type = other DNA
tgttcttgcattgatatctctg

SEQ ID NO: 30380 - DNA, 22 bp, synthetic construct
  misc_feature 1..22: note = chemically synthesized
  source 1..22: mol_type = other DNA
gttcttgcattgatatctctgc

SEQ ID NO: 30381 - DNA, 22 bp, synthetic construct
  misc_feature 1..22: note = chemically synthesized
  source 1..22: mol_type = other DNA
ttcttgcattgatatctctgca

SEQ ID NO: 30382 - DNA, 22 bp, synthetic construct
  misc_feature 1..22: note = chemically synthesized
  source 1..22: mol_type = other DNA
ttgcattgatatctctgcatct

SEQ ID NO: 30383 - DNA, 22 bp, synthetic construct
  misc_feature 1..22: note = chemically synthesized
  source 1..22: mol_type = other DNA
gcattgatatctctgcatctgg

SEQ ID NO: 30384 - DNA, 22 bp, synthetic construct
  misc_feature 1..22: note = chemically synthesized
  source 1..22: mol_type = other DNA
cattgatatctctgcatctggt

SEQ ID NO: 30385 - DNA, 22 bp, synthetic construct
  misc_feature 1..22: note = chemically synthesized
  source 1..22: mol_type = other DNA
atatctctgcatctggtgtaat

SEQ ID NO: 30386 - DNA, 22 bp, synthetic construct
  misc_feature 1..22: note = chemically synthesized
  source 1..22: mol_type = other DNA
tgcatctggtgtaatgattgct

SEQ ID NO: 30387 - DNA, 22 bp, synthetic construct
  misc_feature 1..22: note = chemically synthesized
  source 1..22: mol_type = other DNA
catctggtgtaatgattgctgc

SEQ ID NO: 30388 - DNA, 22 bp, synthetic construct
  misc_feature 1..22: note = chemically synthesized
  source 1..22: mol_type = other DNA
gtgtaatgattgctgcttccag

SEQ ID NO: 30389 - DNA, 22 bp, synthetic construct
  misc_feature 1..22: note = chemically synthesized
  source 1..22: mol_type = other DNA
ctgcttccagttttgtaaattt

SEQ ID NO: 30390 - DNA, 22 bp, synthetic construct
  misc_feature 1..22: note = chemically synthesized
  source 1..22: mol_type = other DNA
cttccagttttgtaaatttgtt

SEQ ID NO: 30391 - DNA, 22 bp, synthetic construct
  misc_feature 1..22: note = chemically synthesized
  source 1..22: mol_type = other DNA
ccagttttgtaaatttgttttt

SEQ ID NO: 30392 - DNA, 22 bp, synthetic construct
  misc_feature 1..22: note = chemically synthesized
  source 1..22: mol_type = other DNA
cagttttgtaaatttgtttttg

SEQ ID NO: 30393 - DNA, 22 bp, synthetic construct
  misc_feature 1..22: note = chemically synthesized
  source 1..22: mol_type = other DNA
tgtaaatttgtttttgtagggg

SEQ ID NO: 30394 - DNA, 22 bp, synthetic construct
  misc_feature 1..22: note = chemically synthesized
  source 1..22: mol_type = other DNA
gtaaatttgtttttgtagggga

SEQ ID NO: 30395 - DNA, 22 bp, synthetic construct
  misc_feature 1..22: note = chemically synthesized
  source 1..22: mol_type = other DNA
taaatttgtttttgtaggggaa

SEQ ID NO: 30396 - DNA, 22 bp, synthetic construct
  misc_feature 1..22: note = chemically synthesized
  source 1..22: mol_type = other DNA
gtttttgtaggggaagactttt

SEQ ID NO: 30397 - DNA, 22 bp, synthetic construct
  misc_feature 1..22: note = chemically synthesized
  source 1..22: mol_type = other DNA
tttttgtaggggaagacttttt

SEQ ID NO: 30398 - DNA, 22 bp, synthetic construct
  misc_feature 1..22: note = chemically synthesized
  source 1..22: mol_type = other DNA
ttgtaggggaagacttttttct

SEQ ID NO: 30399 - DNA, 22 bp, synthetic construct
  misc_feature 1..22: note = chemically synthesized
  source 1..22: mol_type = other DNA
tgtaggggaagacttttttctg

SEQ ID NO: 30400 - DNA, 22 bp, synthetic construct
  misc_feature 1..22: note = chemically synthesized
  source 1..22: mol_type = other DNA
gtaggggaagacttttttctga

SEQ ID NO: 30401 - DNA, 22 bp, synthetic construct
  misc_feature 1..22: note = chemically synthesized
  source 1..22: mol_type = other DNA
taggggaagacttttttctgaa

SEQ ID NO: 30402 - DNA, 22 bp, synthetic construct
  misc_feature 1..22: note = chemically synthesized
  source 1..22: mol_type = other DNA
ttttctgaagatgtatcttggt

SEQ ID NO: 30403 - DNA, 22 bp, synthetic construct
  misc_feature 1..22: note = chemically synthesized
  source 1..22: mol_type = other DNA
tttctgaagatgtatcttggtg

SEQ ID NO: 30404 - DNA, 22 bp, synthetic construct
  misc_feature 1..22: note = chemically synthesized
  source 1..22: mol_type = other DNA
ttctgaagatgtatcttggtgt

SEQ ID NO: 30405 - DNA, 22 bp, synthetic construct
  misc_feature 1..22: note = chemically synthesized
  source 1..22: mol_type = other DNA
tctgaagatgtatcttggtgtt

SEQ ID NO: 30406 - DNA, 22 bp, synthetic construct
  misc_feature 1..22: note = chemically synthesized
  source 1..22: mol_type = other DNA
ctgaagatgtatcttggtgttg

SEQ ID NO: 30407 - DNA, 22 bp, synthetic construct
  misc_feature 1..22: note = chemically synthesized
  source 1..22: mol_type = other DNA
tgaagatgtatcttggtgttga

SEQ ID NO: 30408 - DNA, 22 bp, synthetic construct
  misc_feature 1..22: note = chemically synthesized
  source 1..22: mol_type = other DNA
aagatgtatcttggtgttgatt

SEQ ID NO: 30409 - DNA, 22 bp, synthetic construct
  misc_feature 1..22: note = chemically synthesized
  source 1..22: mol_type = other DNA
ggtgttgattgagtagggcact

SEQ ID NO: 30410 - DNA, 22 bp, synthetic construct
  misc_feature 1..22: note = chemically synthesized
  source 1..22: mol_type = other DNA
gtgttgattgagtagggcactt

SEQ ID NO: 30411 - DNA, 22 bp, synthetic construct
  misc_feature 1..22: note = chemically synthesized
  source 1..22: mol_type = other DNA
attgagtagggcactttgattt

SEQ ID NO: 30412 - DNA, 22 bp, synthetic construct
  misc_feature 1..22: note = chemically synthesized
  source 1..22: mol_type = other DNA
agtagggcactttgattttgat

SEQ ID NO: 30413 - DNA, 22 bp, synthetic construct
  misc_feature 1..22: note = chemically synthesized
  source 1..22: mol_type = other DNA
tgattttgatttctaggtgcat

SEQ ID NO: 30414 - DNA, 22 bp, synthetic construct
  misc_feature 1..22: note = chemically synthesized
  source 1..22: mol_type = other DNA
gattttgatttctaggtgcata

SEQ ID NO: 30415 - DNA, 22 bp, synthetic construct
  misc_feature 1..22: note = chemically synthesized
  source 1..22: mol_type = other DNA
attttgatttctaggtgcatac

SEQ ID NO: 30416 - DNA, 22 bp, synthetic construct
  misc_feature 1..22: note = chemically synthesized
  source 1..22: mol_type = other DNA
tgatttctaggtgcatacagca

SEQ ID NO: 30417 - DNA, 22 bp, synthetic construct
  misc_feature 1..22: note = chemically synthesized
  source 1..22: mol_type = other DNA
gatttctaggtgcatacagcag

SEQ ID NO: 30418 - DNA, 22 bp, synthetic construct
  misc_feature 1..22: note = chemically synthesized
  source 1..22: mol_type = other DNA
atttctaggtgcatacagcagc

SEQ ID NO: 30419 - DNA, 22 bp, synthetic construct
  misc_feature 1..22: note = chemically synthesized
  source 1..22: mol_type = other DNA
ctaggtgcatacagcagcatag

SEQ ID NO: 30420 - DNA, 22 bp, synthetic construct
  misc_feature 1..22: note = chemically synthesized
  source 1..22: mol_type = other DNA
taggtgcatacagcagcatagt

SEQ ID NO: 30421 - DNA, 22 bp, synthetic construct
  misc_feature 1..22: note = chemically synthesized
  source 1..22: mol_type = other DNA
ggtgcatacagcagcatagtct

SEQ ID NO: 30422 - DNA, 22 bp, synthetic construct
  misc_feature 1..22: note = chemically synthesized
  source 1..22: mol_type = other DNA
catattattttttttcagctgc

SEQ ID NO: 30423 - DNA, 22 bp, synthetic construct
  misc_feature 1..22: note = chemically synthesized
  source 1..22: mol_type = other DNA
atattattttttttcagctgcc

SEQ ID NO: 30424 - DNA, 22 bp, synthetic construct
  misc_feature 1..22: note = chemically synthesized
  source 1..22: mol_type = other DNA
ttttttttcagctgccaacagt

SEQ ID NO: 30425 - DNA, 22 bp, synthetic construct
  misc_feature 1..22: note = chemically synthesized
  source 1..22: mol_type = other DNA
tttttcagctgccaacagtatc

SEQ ID NO: 30426 - DNA, 22 bp, synthetic construct
  misc_feature 1..22: note = chemically synthesized
  source 1..22: mol_type = other DNA
ttttcagctgccaacagtatca

SEQ ID NO: 30427 - DNA, 22 bp, synthetic construct
  misc_feature 1..22: note = chemically synthesized
  source 1..22: mol_type = other DNA
tttcagctgccaacagtatcat

SEQ ID NO: 30428 - DNA, 22 bp, synthetic construct
  misc_feature 1..22: note = chemically synthesized
  source 1..22: mol_type = other DNA
ttcagctgccaacagtatcatc

SEQ ID NO: 30429 - DNA, 22 bp, synthetic construct
  misc_feature 1..22: note = chemically synthesized
  source 1..22: mol_type = other DNA
tcagctgccaacagtatcatca

SEQ ID NO: 30430 - DNA, 22 bp, synthetic construct
  misc_feature 1..22: note = chemically synthesized
  source 1..22: mol_type = other DNA
cagctgccaacagtatcatcag

SEQ ID NO: 30431 - DNA, 22 bp, synthetic construct
  misc_feature 1..22: note = chemically synthesized
  source 1..22: mol_type = other DNA
agctgccaacagtatcatcagt

SEQ ID NO: 30432 - DNA, 22 bp, synthetic construct
  misc_feature 1..22: note = chemically synthesized
  source 1..22: mol_type = other DNA
ccaacagtatcatcagtgtctg

SEQ ID NO: 30433 - DNA, 22 bp, synthetic construct
  misc_feature 1..22: note = chemically synthesized
  source 1..22: mol_type = other DNA
tgattttttcagtggcttaggg

SEQ ID NO: 30434 - DNA, 22 bp, synthetic construct
  misc_feature 1..22: note = chemically synthesized
  source 1..22: mol_type = other DNA
tttcagtggcttagggtgcatt

SEQ ID NO: 30435 - DNA, 22 bp, synthetic construct
  misc_feature 1..22: note = chemically synthesized
  source 1..22: mol_type = other DNA
ttcagtggcttagggtgcattt

SEQ ID NO: 30436 - DNA, 22 bp, synthetic construct
  misc_feature 1..22: note = chemically synthesized
  source 1..22: mol_type = other DNA
tcagtggcttagggtgcatttg

SEQ ID NO: 30437 - DNA, 22 bp, synthetic construct
  misc_feature 1..22: note = chemically synthesized
  source 1..22: mol_type = other DNA
cagtggcttagggtgcatttgt

SEQ ID NO: 30438 - DNA, 22 bp, synthetic construct
  misc_feature 1..22: note = chemically synthesized
  source 1..22: mol_type = other DNA
agtggcttagggtgcatttgtt

SEQ ID NO: 30439 - DNA, 22 bp, synthetic construct
  misc_feature 1..22: note = chemically synthesized
  source 1..22: mol_type = other DNA
agggtgcatttgttagtgaagg

SEQ ID NO: 30440 - DNA, 22 bp, synthetic construct
  misc_feature 1..22: note = chemically synthesized
  source 1..22: mol_type = other DNA
gggtgcatttgttagtgaaggt

SEQ ID NO: 30441 - DNA, 22 bp, synthetic construct
  misc_feature 1..22: note = chemically synthesized
  source 1..22: mol_type = other DNA
gttagtgaaggtggtgatgagg

SEQ ID NO: 30442 - DNA, 22 bp, synthetic construct
  misc_feature 1..22: note = chemically synthesized
  source 1..22: mol_type = other DNA
ttagtgaaggtggtgatgaggt

SEQ ID NO: 30443 - DNA, 22 bp, synthetic construct
  misc_feature 1..22: note = chemically synthesized
  source 1..22: mol_type = other DNA
gtgaaggtggtgatgaggttgt

SEQ ID NO: 30444 - DNA, 22 bp, synthetic construct
  misc_feature 1..22: note = chemically synthesized
  source 1..22: mol_type = other DNA
tgctggagacaagaatatcaag

SEQ ID NO: 30445 - DNA, 22 bp, synthetic construct
  misc_feature 1..22: note = chemically synthesized
  source 1..22: mol_type = other DNA
gagacaagaatatcaagtgggc

SEQ ID NO: 30446 - DNA, 22 bp, synthetic construct
  misc_feature 1..22: note = chemically synthesized
  source 1..22: mol_type = other DNA
ggccccagtggtggtggtgggc

SEQ ID NO: 30447 - DNA, 22 bp, synthetic construct
  misc_feature 1..22: note = chemically synthesized
  source 1..22: mol_type = other DNA
gccccagtggtggtggtgggcc

SEQ ID NO: 30448 - DNA, 22 bp, synthetic construct
  misc_feature 1..22: note = chemically synthesized
  source 1..22: mol_type = other DNA
gcattcctgtccttgggcccca

SEQ ID NO: 30449 - DNA, 22 bp, synthetic construct
  misc_feature 1..22: note = chemically synthesized
  source 1..22: mol_type = other DNA
ctgtccttgggccccatggctg

SEQ ID NO: 30450 - DNA, 22 bp, synthetic construct
  misc_feature 1..22: note = chemically synthesized
  source 1..22: mol_type = other DNA
tccttgggccccatggctgtgt

SEQ ID NO: 30451 - DNA, 22 bp, synthetic construct
  misc_feature 1..22: note = chemically synthesized
  source 1..22: mol_type = other DNA
gggccccatggctgtgtacatt

SEQ ID NO: 30452 - DNA, 22 bp, synthetic construct
  misc_feature 1..22: note = chemically synthesized
  source 1..22: mol_type = other DNA
ggccccatggctgtgtacattg

SEQ ID NO: 30453 - DNA, 22 bp, synthetic construct
  misc_feature 1..22: note = chemically synthesized
  source 1..22: mol_type = other DNA
tgtacattggcactgatggtaa

SEQ ID NO: 30454 - DNA, 22 bp, synthetic construct
  misc_feature 1..22: note = chemically synthesized
  source 1..22: mol_type = other DNA
gcactgatggtaatgagtctag

SEQ ID NO: 30455 - DNA, 22 bp, synthetic construct
  misc_feature 1..22: note = chemically synthesized
  source 1..22: mol_type = other DNA
atggtaatgagtctagttgggt

SEQ ID NO: 30456 - DNA, 22 bp, synthetic construct
  misc_feature 1..22: note = chemically synthesized
  source 1..22: mol_type = other DNA
gttgggttgattctttggcctt

SEQ ID NO: 30457 - DNA, 22 bp, synthetic construct
  misc_feature 1..22: note = chemically synthesized
  source 1..22: mol_type = other DNA
ggttgattctttggccttcagg

SEQ ID NO: 30458 - DNA, 22 bp, synthetic construct
  misc_feature 1..22: note = chemically synthesized
  source 1..22: mol_type = other DNA
attctttggccttcaggcagtt

SEQ ID NO: 30459 - DNA, 22 bp, synthetic construct
  misc_feature 1..22: note = chemically synthesized
  source 1..22: mol_type = other DNA
tttggccttcaggcagtttgct

SEQ ID NO: 30460 - DNA, 22 bp, synthetic construct
  misc_feature 1..22: note = chemically synthesized
  source 1..22: mol_type = other DNA
tggccttcaggcagtttgcttg

SEQ ID NO: 30461 - DNA, 22 bp, synthetic construct
  misc_feature 1..22: note = chemically synthesized
  source 1..22: mol_type = other DNA
ggccttcaggcagtttgcttgg

SEQ ID NO: 30462 - DNA, 22 bp, synthetic construct
  misc_feature 1..22: note = chemically synthesized
  source 1..22: mol_type = other DNA
gccttcaggcagtttgcttggg

SEQ ID NO: 30463 - DNA, 22 bp, synthetic construct
  misc_feature 1..22: note = chemically synthesized
  source 1..22: mol_type = other DNA
caggcagtttgcttgggtgtca

SEQ ID NO: 30464 - DNA, 22 bp, synthetic construct
  misc_feature 1..22: note = chemically synthesized
  source 1..22: mol_type = other DNA
aggcagtttgcttgggtgtcag

SEQ ID NO: 30465 - DNA, 22 bp, synthetic construct
  misc_feature 1..22: note = chemically synthesized
  source 1..22: mol_type = other DNA
gcttgggtgtcagtagtggcca

SEQ ID NO: 30466 - DNA, 22 bp, synthetic construct
  misc_feature 1..22: note = chemically synthesized
  source 1..22: mol_type = other DNA
cttgggtgtcagtagtggccat

SEQ ID NO: 30467 - DNA, 22 bp, synthetic construct
  misc_feature 1..22: note = chemically synthesized
  source 1..22: mol_type = other DNA
gggtgtcagtagtggccatagt

SEQ ID NO: 30468 - DNA, 22 bp, synthetic construct
  misc_feature 1..22: note = chemically synthesized
  source 1..22: mol_type = other DNA
ggtgtcagtagtggccatagta

SEQ ID NO: 30469 - DNA, 22 bp, synthetic construct
  misc_feature 1..22: note = chemically synthesized
  source 1..22: mol_type = other DNA
ggctggtgtgtgggtcctcagg

SEQ ID NO: 30470 - DNA, 22 bp, synthetic construct
  misc_feature 1..22: note = chemically synthesized
  source 1..22: mol_type = other DNA
gtgtgtgggtcctcaggcttct

SEQ ID NO: 30471 - DNA, 22 bp, synthetic construct
  misc_feature 1..22: note = chemically synthesized
  source 1..22: mol_type = other DNA
aggcttctggacagtgggtgtg

SEQ ID NO: 30472 - DNA, 22 bp, synthetic construct
  misc_feature 1..22: note = chemically synthesized
  source 1..22: mol_type = other DNA
ctggacagtgggtgtggtgtgg

SEQ ID NO: 30473 - DNA, 22 bp, synthetic construct
  misc_feature 1..22: note = chemically synthesized
  source 1..22: mol_type = other DNA
tggacagtgggtgtggtgtggg

SEQ ID NO: 30474 - DNA, 22 bp, synthetic construct
  misc_feature 1..22: note = chemically synthesized
  source 1..22: mol_type = other DNA
gacagtgggtgtggtgtgggtg

SEQ ID NO: 30475 - DNA, 22 bp, synthetic construct
  misc_feature 1..22: note = chemically synthesized
  source 1..22: mol_type = other DNA
tagcaactgcaggacaaccctc

SEQ ID NO: 30476 - DNA, 22 bp, synthetic construct
  misc_feature 1..22: note = chemically synthesized
  source 1..22: mol_type = other DNA
caggacaaccctctggctccca

SEQ ID NO: 30477 - DNA, 22 bp, synthetic construct
  misc_feature 1..22: note = chemically synthesized
  source 1..22: mol_type = other DNA
tggctcccaagcagtctgcact

SEQ ID NO: 30478 - DNA, 22 bp, synthetic construct
  misc_feature 1..22: note = chemically synthesized
  source 1..22: mol_type = other DNA
gctcccaagcagtctgcactgg

SEQ ID NO: 30479 - DNA, 22 bp, synthetic construct
  misc_feature 1..22: note = chemically synthesized
  source 1..22: mol_type = other DNA
ccaagcagtctgcactggtgtt

SEQ ID NO: 30480 - DNA, 22 bp, synthetic construct
  misc_feature 1..22: note = chemically synthesized
  source 1..22: mol_type = other DNA
cactggtgttggtggtggctgc

SEQ ID NO: 30481 - DNA, 22 bp, synthetic construct
  misc_feature 1..22: note = chemically synthesized
  source 1..22: mol_type = other DNA
gtgttggtggtggctgcaaggg

SEQ ID NO: 30482 - DNA, 22 bp, synthetic construct
  misc_feature 1..22: note = chemically synthesized
  source 1..22: mol_type = other DNA
gtggtggctgcaagggctgaat

SEQ ID NO: 30483 - DNA, 22 bp, synthetic construct
  misc_feature 1..22: note = chemically synthesized
  source 1..22: mol_type = other DNA
caagggctgaatgagccagtct

SEQ ID NO: 30484 - DNA, 22 bp, synthetic construct
  misc_feature 1..22: note = chemically synthesized
  source 1..22: mol_type = other DNA
aatgagccagtcttcagaccca

SEQ ID NO: 30485 - DNA, 22 bp, synthetic construct
  misc_feature 1..22: note = chemically synthesized
  source 1..22: mol_type = other DNA
cagacccacaggtggcacatgc

SEQ ID NO: 30486 - DNA, 22 bp, synthetic construct
  misc_feature 1..22: note = chemically synthesized
  source 1..22: mol_type = other DNA
agacccacaggtggcacatgca

SEQ ID NO: 30487 - DNA, 22 bp, synthetic construct
  misc_feature 1..22: note = chemically synthesized
  source 1..22: mol_type = other DNA
tgatggcagtggcagattgggt

SEQ ID NO: 30488 - DNA, 22 bp, synthetic construct
  misc_feature 1..22: note = chemically synthesized
  source 1..22: mol_type = other DNA
ggtaggcccatcatcaggcttc

SEQ ID NO: 30489 - DNA, 22 bp, synthetic construct
  misc_feature 1..22: note = chemically synthesized
  source 1..22: mol_type = other DNA
ctgggagggttgcttaggtacc

SEQ ID NO: 30490 - DNA, 22 bp, synthetic construct
  misc_feature 1..22: note = chemically synthesized
  source 1..22: mol_type = other DNA
tgggagggttgcttaggtacca

SEQ ID NO: 30491 - DNA, 22 bp, synthetic construct
  misc_feature 1..22: note = chemically synthesized
  source 1..22: mol_type = other DNA
ggagggttgcttaggtaccagt

SEQ ID NO: 30492 - DNA, 22 bp, synthetic construct
  misc_feature 1..22: note = chemically synthesized
  source 1..22: mol_type = other DNA
cttaggtaccagtcatggtgga

SEQ ID NO: 30493 - DNA, 22 bp, synthetic construct
  misc_feature 1..22: note = chemically synthesized
  source 1..22: mol_type = other DNA
aggtaccagtcatggtggatgg

SEQ ID NO: 30494 - DNA, 22 bp, synthetic construct
  misc_feature 1..22: note = chemically synthesized
  source 1..22: mol_type = other DNA
ggtaccagtcatggtggatggc

SEQ ID NO: 30495 - DNA, 22 bp, synthetic construct
  misc_feature 1..22: note = chemically synthesized
  source 1..22: mol_type = other DNA
tctctgggttcccagacaactt

SEQ ID NO: 30496 - DNA, 22 bp, synthetic construct
  misc_feature 1..22: note = chemically synthesized
  source 1..22: mol_type = other DNA
tgggttcccagacaacttgctt

SEQ ID NO: 30497 - DNA, 22 bp, synthetic construct
  misc_feature 1..22: note = chemically synthesized
  source 1..22: mol_type = other DNA
ggttcccagacaacttgcttag

SEQ ID NO: 30498 - DNA, 22 bp, synthetic construct
  misc_feature 1..22: note = chemically synthesized
  source 1..22: mol_type = other DNA
ccagacaacttgcttaggcatt

SEQ ID NO: 30499 - DNA, 22 bp, synthetic construct
  misc_feature 1..22: note = chemically synthesized
  source 1..22: mol_type = other DNA
gcttaggcattgaggaaggcaa

SEQ ID NO: 30500 - DNA, 22 bp, synthetic construct
  misc_feature 1..22: note = chemically synthesized
  source 1..22: mol_type = other DNA
cttaggcattgaggaaggcaaa

SEQ ID NO: 30501 - DNA, 22 bp, synthetic construct
  misc_feature 1..22: note = chemically synthesized
  source 1..22: mol_type = other DNA
aggcattgaggaaggcaaagcc

SEQ ID NO: 30502 - DNA, 22 bp, synthetic construct
  misc_feature 1..22: note = chemically synthesized
  source 1..22: mol_type = other DNA
ggcattgaggaaggcaaagcca

SEQ ID NO: 30503 - DNA, 22 bp, synthetic construct
  misc_feature 1..22: note = chemically synthesized
  source 1..22: mol_type = other DNA
aggaaggcaaagccaggctggg

SEQ ID NO: 30504 - DNA, 22 bp, synthetic construct
  misc_feature 1..22: note = chemically synthesized
  source 1..22: mol_type = other DNA
ggtgttcctgacctcaggccac

SEQ ID NO: 30505 - DNA, 22 bp, synthetic construct
  misc_feature 1..22: note = chemically synthesized
  source 1..22: mol_type = other DNA
ctgacctcaggccactcagtgg

SEQ ID NO: 30506 - DNA, 22 bp, synthetic construct
  misc_feature 1..22: note = chemically synthesized
  source 1..22: mol_type = other DNA
acctcaggccactcagtggtgt

SEQ ID NO: 30507 - DNA, 22 bp, synthetic construct
  misc_feature 1..22: note = chemically synthesized
  source 1..22: mol_type = other DNA
aggccactcagtggtgtgtgtg

SEQ ID NO: 30508 - DNA, 22 bp, synthetic construct
  misc_feature 1..22: note = chemically synthesized
  source 1..22: mol_type = other DNA
agtggtgtgtgtggacaccggc

SEQ ID NO: 30509 - DNA, 22 bp, synthetic construct
  misc_feature 1..22: note = chemically synthesized
  source 1..22: mol_type = other DNA
tcataggctggagtggagtgat

SEQ ID NO: 30510 - DNA, 22 bp, synthetic construct
  misc_feature 1..22: note = chemically synthesized
  source 1..22: mol_type = other DNA
gagtggagtgatcctcaggccc

SEQ ID NO: 30511 - DNA, 22 bp, synthetic construct
  misc_feature 1..22: note = chemically synthesized
  source 1..22: mol_type = other DNA
aggcccccagcagaatgcctga

SEQ ID NO: 30512 - DNA, 22 bp, synthetic construct
  misc_feature 1..22: note = chemically synthesized
  source 1..22: mol_type = other DNA
agtgaattagcagctactgcat

SEQ ID NO: 30513 - DNA, 22 bp, synthetic construct
  misc_feature 1..22: note = chemically synthesized
  source 1..22: mol_type = other DNA
gcagctactgcattgttgccct

SEQ ID NO: 30514 - DNA, 22 bp, synthetic construct
  misc_feature 1..22: note = chemically synthesized
  source 1..22: mol_type = other DNA
ctgcattgttgccctgctcttg

SEQ ID NO: 30515 - DNA, 22 bp, synthetic construct
  misc_feature 1..22: note = chemically synthesized
  source 1..22: mol_type = other DNA
cattgttgccctgctcttgaag

SEQ ID NO: 30516 - DNA, 22 bp, synthetic construct
  misc_feature 1..22: note = chemically synthesized
  source 1..22: mol_type = other DNA
ttgccctgctcttgaaggggtg

SEQ ID NO: 30517 - DNA, 22 bp, synthetic construct
  misc_feature 1..22: note = chemically synthesized
  source 1..22: mol_type = other DNA
ccctgctcttgaaggggtgcgg

SEQ ID NO: 30518 - DNA, 22 bp, synthetic construct
  misc_feature 1..22: note = chemically synthesized
  source 1..22: mol_type = other DNA
ctcttgaaggggtgcggggtgt

SEQ ID NO: 30519 - DNA, 22 bp, synthetic construct
  misc_feature 1..22: note = chemically synthesized
  source 1..22: mol_type = other DNA
ttgaaggggtgcggggtgtgtt

SEQ ID NO: 30520 - DNA, 22 bp, synthetic construct
  misc_feature 1..22: note = chemically synthesized
  source 1..22: mol_type = other DNA
gaaggggtgcggggtgtgttgc

SEQ ID NO: 30521 - DNA, 22 bp, synthetic construct
  misc_feature 1..22: note = chemically synthesized
  source 1..22: mol_type = other DNA
aaggggtgcggggtgtgttgct

SEQ ID NO: 30522 - DNA, 22 bp, synthetic construct
  misc_feature 1..22: note = chemically synthesized
  source 1..22: mol_type = other DNA
ctttcagtggcagcagctataa

SEQ ID NO: 30523 - DNA, 22 bp, synthetic construct
  misc_feature 1..22: note = chemically synthesized
  source 1..22: mol_type = other DNA
tcagtggcagcagctataaatg

SEQ ID NO: 30524 - DNA, 22 bp, synthetic construct
  misc_feature 1..22: note = chemically synthesized
  source 1..22: mol_type = other DNA
cagtggcagcagctataaatgg

SEQ ID NO: 30525 - DNA, 22 bp, synthetic construct
  misc_feature 1..22: note = chemically synthesized
  source 1..22: mol_type = other DNA
agtggcagcagctataaatggg

SEQ ID NO: 30526 - DNA, 22 bp, synthetic construct
  misc_feature 1..22: note = chemically synthesized
  source 1..22: mol_type = other DNA
taaatgggttgctggtgggcat

SEQ ID NO: 30527 - DNA, 22 bp, synthetic construct
  misc_feature 1..22: note = chemically synthesized
  source 1..22: mol_type = other DNA
ctggtgggcatgtgtttcagcc

SEQ ID NO: 30528 - DNA, 22 bp, synthetic construct
  misc_feature 1..22: note = chemically synthesized
  source 1..22: mol_type = other DNA
gtgggcatgtgtttcagcccca

SEQ ID NO: 30529 - DNA, 22 bp, synthetic construct
  misc_feature 1..22: note = chemically synthesized
  source 1..22: mol_type = other DNA
cagccccagatggtggctgcaa

SEQ ID NO: 30530 - DNA, 22 bp, synthetic construct
  misc_feature 1..22: note = chemically synthesized
  source 1..22: mol_type = other DNA
agccccagatggtggctgcaag

SEQ ID NO: 30531 - DNA, 22 bp, synthetic construct
  misc_feature 1..22: note = chemically synthesized
  source 1..22: mol_type = other DNA
caagtggggtagcattttctta

SEQ ID NO: 30532 - DNA, 22 bp, synthetic construct
  misc_feature 1..22: note = chemically synthesized
  source 1..22: mol_type = other DNA
tcttagggagcttataaatgtg

SEQ ID NO: 30533 - DNA, 22 bp, synthetic construct
  misc_feature 1..22: note = chemically synthesized
  source 1..22: mol_type = other DNA
cttagggagcttataaatgtgt

SEQ ID NO: 30534 - DNA, 22 bp, synthetic construct
  misc_feature 1..22: note = chemically synthesized
  source 1..22: mol_type = other DNA
ttagggagcttataaatgtgta

SEQ ID NO: 30535 - DNA, 22 bp, synthetic construct
  misc_feature 1..22: note = chemically synthesized
  source 1..22: mol_type = other DNA
agggagcttataaatgtgtagc

SEQ ID NO: 30536 - DNA, 22 bp, synthetic construct
  misc_feature 1..22: note = chemically synthesized
  source 1..22: mol_type = other DNA
gggagcttataaatgtgtagca

SEQ ID NO: 30537 - DNA, 22 bp, synthetic construct
  misc_feature 1..22: note = chemically synthesized
  source 1..22: mol_type = other DNA
ataaatgtgtagcagccctgct

SEQ ID NO: 30538 - DNA, 22 bp, synthetic construct
  misc_feature 1..22: note = chemically synthesized
  source 1..22: mol_type = other DNA
taaatgtgtagcagccctgcta

SEQ ID NO: 30539 - DNA, 22 bp, synthetic construct
  misc_feature 1..22: note = chemically synthesized
  source 1..22: mol_type = other DNA
ctactgggggtgggggagtcca

SEQ ID NO: 30540 - DNA, 22 bp, synthetic construct
  misc_feature 1..22: note = chemically synthesized
  source 1..22: mol_type = other DNA
ctgggggtgggggagtccactt

SEQ ID NO: 30541 - DNA, 22 bp, synthetic construct
  misc_feature 1..22: note = chemically synthesized
  source 1..22: mol_type = other DNA
ggggtgggggagtccacttcta

SEQ ID NO: 30542 - DNA, 22 bp, synthetic construct
  misc_feature 1..22: note = chemically synthesized
  source 1..22: mol_type = other DNA
ctaatgacacactttatccctg

SEQ ID NO: 30543 - DNA, 22 bp, synthetic construct
  misc_feature 1..22: note = chemically synthesized
  source 1..22: mol_type = other DNA
taatgacacactttatccctgg

SEQ ID NO: 30544 - DNA, 22 bp, synthetic construct
  misc_feature 1..22: note = chemically synthesized
  source 1..22: mol_type = other DNA
atgacacactttatccctggtg

SEQ ID NO: 30545 - DNA, 22 bp, synthetic construct
  misc_feature 1..22: note = chemically synthesized
  source 1..22: mol_type = other DNA
tatccctggtgacagcagccag

SEQ ID NO: 30546 - DNA, 22 bp, synthetic construct
  misc_feature 1..22: note = chemically synthesized
  source 1..22: mol_type = other DNA
atccctggtgacagcagccagc

SEQ ID NO: 30547 - DNA, 22 bp, synthetic construct
  misc_feature 1..22: note = chemically synthesized
  source 1..22: mol_type = other DNA
tccctggtgacagcagccagca

SEQ ID NO: 30548 - DNA, 22 bp, synthetic construct
  misc_feature 1..22: note = chemically synthesized
  source 1..22: mol_type = other DNA
gtgacagcagccagcagtagca

SEQ ID NO: 30549 - DNA, 22 bp, synthetic construct
  misc_feature 1..22: note = chemically synthesized
  source 1..22: mol_type = other DNA
agctgtgggtgggggatgtcag

SEQ ID NO: 30550 - DNA, 22 bp, synthetic construct
  misc_feature 1..22: note = chemically synthesized
  source 1..22: mol_type = other DNA
tgggtgggggatgtcagcagag

SEQ ID NO: 30551 - DNA, 22 bp, synthetic construct
  misc_feature 1..22: note = chemically synthesized
  source 1..22: mol_type = other DNA
cagggatgtagagatgcagatg

SEQ ID NO: 30552 - DNA, 22 bp, synthetic construct
  misc_feature 1..22: note = chemically synthesized
  source 1..22: mol_type = other DNA
agggatgtagagatgcagatga

SEQ ID NO: 30553 - DNA, 22 bp, synthetic construct
  misc_feature 1..22: note = chemically synthesized
  source 1..22: mol_type = other DNA
gggtctgaggaacgatgtcatc

SEQ ID NO: 30554 - DNA, 22 bp, synthetic construct
  misc_feature 1..22: note = chemically synthesized
  source 1..22: mol_type = other DNA
aggaacgatgtcatctggtggg

SEQ ID NO: 30555 - DNA, 22 bp, synthetic construct
  misc_feature 1..22: note = chemically synthesized
  source 1..22: mol_type = other DNA
gtgggtgttgggctctcaaaat

SEQ ID NO: 30556 - DNA, 22 bp, synthetic construct
  misc_feature 1..22: note = chemically synthesized
  source 1..22: mol_type = other DNA
ggctctcaaaatggcaccttgc

SEQ ID NO: 30557 - DNA, 22 bp, synthetic construct
  misc_feature 1..22: note = chemically synthesized
  source 1..22: mol_type = other DNA
tcaaaatggcaccttgctgctc

SEQ ID NO: 30558 - DNA, 22 bp, synthetic construct
  misc_feature 1..22: note = chemically synthesized
  source 1..22: mol_type = other DNA
aaaatggcaccttgctgctcag

SEQ ID NO: 30559 - DNA, 22 bp, synthetic construct
  misc_feature 1..22: note = chemically synthesized
  source 1..22: mol_type = other DNA
gctgctcagtaatggggatggc

SEQ ID NO: 30560 - DNA, 22 bp, synthetic construct
  misc_feature 1..22: note = chemically synthesized
  source 1..22: mol_type = other DNA
ctgctcagtaatggggatggca

SEQ ID NO: 30561 - DNA, 22 bp, synthetic construct
  misc_feature 1..22: note = chemically synthesized
  source 1..22: mol_type = other DNA
ctcagtaatggggatggcaggg

SEQ ID NO: 30562 - DNA, 22 bp, synthetic construct
  misc_feature 1..22: note = chemically synthesized
  source 1..22: mol_type = other DNA
agtaatggggatggcaggggtg

SEQ ID NO: 30563 - DNA, 22 bp, synthetic construct
  misc_feature 1..22: note = chemically synthesized
  source 1..22: mol_type = other DNA
cttctctggagcaatgcctttg

SEQ ID NO: 30564 - DNA, 22 bp, synthetic construct
  misc_feature 1..22: note = chemically synthesized
  source 1..22: mol_type = other DNA
ctctggagcaatgcctttgtgc

SEQ ID NO: 30565 - DNA, 22 bp, synthetic construct
  misc_feature 1..22: note = chemically synthesized
  source 1..22: mol_type = other DNA
tctggagcaatgcctttgtgcg

SEQ ID NO: 30566 - DNA, 22 bp, synthetic construct
  misc_feature 1..22: note = chemically synthesized
  source 1..22: mol_type = other DNA
tggagcaatgcctttgtgcgat

SEQ ID NO: 30567 - DNA, 22 bp, synthetic construct
  misc_feature 1..22: note = chemically synthesized
  source 1..22: mol_type = other DNA
gagcaatgcctttgtgcgattg

SEQ ID NO: 30568 - DNA, 22 bp, synthetic construct
  misc_feature 1..22: note = chemically synthesized
  source 1..22: mol_type = other DNA
tgtgcgattgctgggcagttcc

SEQ ID NO: 30569 - DNA, 22 bp, synthetic construct
  misc_feature 1..22: note = chemically synthesized
  source 1..22: mol_type = other DNA
gtgcgattgctgggcagttcct

SEQ ID NO: 30570 - DNA, 22 bp, synthetic construct
  misc_feature 1..22: note = chemically synthesized
  source 1..22: mol_type = other DNA
tgcgattgctgggcagttcctt

SEQ ID NO: 30571 - DNA, 22 bp, synthetic construct
  misc_feature 1..22: note = chemically synthesized
  source 1..22: mol_type = other DNA
ctgggcagttccttatgatagt

SEQ ID NO: 30572 - DNA, 22 bp, synthetic construct
  misc_feature 1..22: note = chemically synthesized
  source 1..22: mol_type = other DNA
ggcagttccttatgatagtctc

SEQ ID NO: 30573 - DNA, 22 bp, synthetic construct
  misc_feature 1..22: note = chemically synthesized
  source 1..22: mol_type = other DNA
cttatgatagtctcaaggcctg

SEQ ID NO: 30574 - DNA, 22 bp, synthetic construct
  misc_feature 1..22: note = chemically synthesized
  source 1..22: mol_type = other DNA
atgatagtctcaaggcctgcat

SEQ ID NO: 30575 - DNA, 22 bp, synthetic construct
  misc_feature 1..22: note = chemically synthesized
  source 1..22: mol_type = other DNA
tgatagtctcaaggcctgcatg

SEQ ID NO: 30576 - DNA, 22 bp, synthetic construct
  misc_feature 1..22: note = chemically synthesized
  source 1..22: mol_type = other DNA
aaggcctgcatggtcaagggac

SEQ ID NO: 30577 - DNA, 22 bp, synthetic construct
  misc_feature 1..22: note = chemically synthesized
  source 1..22: mol_type = other DNA
catggtcaagggactctcctgt

SEQ ID NO: 30578 - DNA, 22 bp, synthetic construct
  misc_feature 1..22: note = chemically synthesized
  source 1..22: mol_type = other DNA
tcctgtggctaggattcctgga

SEQ ID NO: 30579 - DNA, 22 bp, synthetic construct
  misc_feature 1..22: note = chemically synthesized
  source 1..22: mol_type = other DNA
ctgtggctaggattcctggagt

SEQ ID NO: 30580 - DNA, 22 bp, synthetic construct
  misc_feature 1..22: note = chemically synthesized
  source 1..22: mol_type = other DNA
tggctaggattcctggagtcca

SEQ ID NO: 30581 - DNA, 22 bp, synthetic construct
  misc_feature 1..22: note = chemically synthesized
  source 1..22: mol_type = other DNA
ggattcctggagtccataatgc

SEQ ID NO: 30582 - DNA, 22 bp, synthetic construct
  misc_feature 1..22: note = chemically synthesized
  source 1..22: mol_type = other DNA
ctggagtccataatgcagatgt

SEQ ID NO: 30583 - DNA, 22 bp, synthetic construct
  misc_feature 1..22: note = chemically synthesized
  source 1..22: mol_type = other DNA
gagtccataatgcagatgtgga

SEQ ID NO: 30584 - DNA, 22 bp, synthetic construct
  misc_feature 1..22: note = chemically synthesized
  source 1..22: mol_type = other DNA
ggagtcagtcacttaactttcg

SEQ ID NO: 30585 - DNA, 22 bp, synthetic construct
  misc_feature 1..22: note = chemically synthesized
  source 1..22: mol_type = other DNA
aactttcgatgcactggggagc

SEQ ID NO: 30586 - DNA, 22 bp, synthetic construct
  misc_feature 1..22: note = chemically synthesized
  source 1..22: mol_type = other DNA
actttcgatgcactggggagcc

SEQ ID NO: 30587 - DNA, 22 bp, synthetic construct
  misc_feature 1..22: note = chemically synthesized
  source 1..22: mol_type = other DNA
tcgatgcactggggagcctctc

SEQ ID NO: 30588 - DNA, 22 bp, synthetic construct
  misc_feature 1..22: note = chemically synthesized
  source 1..22: mol_type = other DNA
cgatgcactggggagcctctct

SEQ ID NO: 30589 - DNA, 22 bp, synthetic construct
  misc_feature 1..22: note = chemically synthesized
  source 1..22: mol_type = other DNA
gatgcactggggagcctctctg

SEQ ID NO: 30590 - DNA, 22 bp, synthetic construct
  misc_feature 1..22: note = chemically synthesized
  source 1..22: mol_type = other DNA
gggagcctctctggcctcacag

SEQ ID NO: 30591 - DNA, 22 bp, synthetic construct
  misc_feature 1..22: note = chemically synthesized
  source 1..22: mol_type = other DNA
tctggcctcacagaggatccct

SEQ ID NO: 30592 - DNA, 22 bp, synthetic construct
  misc_feature 1..22: note = chemically synthesized
  source 1..22: mol_type = other DNA
tggcctcacagaggatccctac

SEQ ID NO: 30593 - DNA, 22 bp, synthetic construct
  misc_feature 1..22: note = chemically synthesized
  source 1..22: mol_type = other DNA
gcctcacagaggatccctactg

SEQ ID NO: 30594 - DNA, 22 bp, synthetic construct
  misc_feature 1..22: note = chemically synthesized
  source 1..22: mol_type = other DNA
acagaggatccctactgggtag

SEQ ID NO: 30595 - DNA, 22 bp, synthetic construct
  misc_feature 1..22: note = chemically synthesized
  source 1..22: mol_type = other DNA
ctgggtaggcttccttgcttcc

SEQ ID NO: 30596 - DNA, 22 bp, synthetic construct
  misc_feature 1..22: note = chemically synthesized
  source 1..22: mol_type = other DNA
ggtaggcttccttgcttccctc

SEQ ID NO: 30597 - DNA, 22 bp, synthetic construct
  misc_feature 1..22: note = chemically synthesized
  source 1..22: mol_type = other DNA
ccttgcttccctccccttcatt

SEQ ID NO: 30598 - DNA, 22 bp, synthetic construct
  misc_feature 1..22: note = chemically synthesized
  source 1..22: mol_type = other DNA
cttgcttccctccccttcattg

SEQ ID NO: 30599 - DNA, 22 bp, synthetic construct
  misc_feature 1..22: note = chemically synthesized
  source 1..22: mol_type = other DNA
gcttccctccccttcattgcct

SEQ ID NO: 30600 - DNA, 22 bp, synthetic construct
  misc_feature 1..22: note = chemically synthesized
  source 1..22: mol_type = other DNA
cttccctccccttcattgcctt

SEQ ID NO: 30601 - DNA, 22 bp, synthetic construct
  misc_feature 1..22: note = chemically synthesized
  source 1..22: mol_type = other DNA
ccctccccttcattgccttaga

SEQ ID NO: 30602 - DNA, 22 bp, synthetic construct
  misc_feature 1..22: note = chemically synthesized
  source 1..22: mol_type = other DNA
cctccccttcattgccttagat

SEQ ID NO: 30603 - DNA, 22 bp, synthetic construct
  misc_feature 1..22: note = chemically synthesized
  source 1..22: mol_type = other DNA
cccttcattgccttagatgctt

SEQ ID NO: 30604 - DNA, 22 bp, synthetic construct
  misc_feature 1..22: note = chemically synthesized
  source 1..22: mol_type = other DNA
cattgccttagatgcttcctgt

SEQ ID NO: 30605 - DNA, 22 bp, synthetic construct
  misc_feature 1..22: note = chemically synthesized
  source 1..22: mol_type = other DNA
attgccttagatgcttcctgtc

SEQ ID NO: 30606 - DNA, 22 bp, synthetic construct
  misc_feature 1..22: note = chemically synthesized
  source 1..22: mol_type = other DNA
ccttagatgcttcctgtcactt

SEQ ID NO: 30607 - DNA, 22 bp, synthetic construct
  misc_feature 1..22: note = chemically synthesized
  source 1..22: mol_type = other DNA
agatgcttcctgtcacttctct

SEQ ID NO: 30608 - DNA, 22 bp, synthetic construct
  misc_feature 1..22: note = chemically synthesized
  source 1..22: mol_type = other DNA
gatgcttcctgtcacttctctg

SEQ ID NO: 30609 - DNA, 22 bp, synthetic construct
  misc_feature 1..22: note = chemically synthesized
  source 1..22: mol_type = other DNA
cctgtcacttctctgttgaatt

SEQ ID NO: 30610 - DNA, 22 bp, synthetic construct
  misc_feature 1..22: note = chemically synthesized
  source 1..22: mol_type = other DNA
ctgtcacttctctgttgaattc

SEQ ID NO: 30611 - DNA, 22 bp, synthetic construct
  misc_feature 1..22: note = chemically synthesized
  source 1..22: mol_type = other DNA
tcacttctctgttgaattccag

SEQ ID NO: 30612 - DNA, 22 bp, synthetic construct
  misc_feature 1..22: note = chemically synthesized
  source 1..22: mol_type = other DNA
ctctgttgaattccagaattct

SEQ ID NO: 30613 - DNA, 22 bp, synthetic construct
  misc_feature 1..22: note = chemically synthesized
  source 1..22: mol_type = other DNA
tctgttgaattccagaattctc

SEQ ID NO: 30614 - DNA, 22 bp, synthetic construct
  misc_feature 1..22: note = chemically synthesized
  source 1..22: mol_type = other DNA
tgttgaattccagaattctctc

SEQ ID NO: 30615 - DNA, 22 bp, synthetic construct
  misc_feature 1..22: note = chemically synthesized
  source 1..22: mol_type = other DNA
ttgaattccagaattctctctt

SEQ ID NO: 30616 - DNA, 22 bp, synthetic construct
  misc_feature 1..22: note = chemically synthesized
  source 1..22: mol_type = other DNA
aattccagaattctctcttatg

SEQ ID NO: 30617 - DNA, 22 bp, synthetic construct
  misc_feature 1..22: note = chemically synthesized
  source 1..22: mol_type = other DNA
cagaattctctcttatgtggga

SEQ ID NO: 30618 - DNA, 22 bp, synthetic construct
  misc_feature 1..22: note = chemically synthesized
  source 1..22: mol_type = other DNA
tctcttatgtgggattttctac

SEQ ID NO: 30619 - DNA, 22 bp, synthetic construct
  misc_feature 1..22: note = chemically synthesized
  source 1..22: mol_type = other DNA
tcttatgtgggattttctactt

SEQ ID NO: 30620 - DNA, 22 bp, synthetic construct
  misc_feature 1..22: note = chemically synthesized
  source 1..22: mol_type = other DNA
ttatgtgggattttctacttac

SEQ ID NO: 30621 - DNA, 22 bp, synthetic construct
  misc_feature 1..22: note = chemically synthesized
  source 1..22: mol_type = other DNA
atgtgggattttctacttacta

SEQ ID NO: 30622 - DNA, 22 bp, synthetic construct
  misc_feature 1..22: note = chemically synthesized
  source 1..22: mol_type = other DNA
tgtgggattttctacttactat

SEQ ID NO: 30623 - DNA, 22 bp, synthetic construct
  misc_feature 1..22: note = chemically synthesized
  source 1..22: mol_type = other DNA
tctacttactattttggttctt

SEQ ID NO: 30624 - DNA, 22 bp, synthetic construct
  misc_feature 1..22: note = chemically synthesized
  source 1..22: mol_type = other DNA
ctacttactattttggttcttt

SEQ ID NO: 30625 - DNA, 22 bp, synthetic construct
  misc_feature 1..22: note = chemically synthesized
  source 1..22: mol_type = other DNA
tacttactattttggttctttg

SEQ ID NO: 30626 - DNA, 22 bp, synthetic construct
  misc_feature 1..22: note = chemically synthesized
  source 1..22: mol_type = other DNA
cttactattttggttctttgtg

SEQ ID NO: 30627 - DNA, 22 bp, synthetic construct
  misc_feature 1..22: note = chemically synthesized
  source 1..22: mol_type = other DNA
actattttggttctttgtggag

SEQ ID NO: 30628 - DNA, 22 bp, synthetic construct
  misc_feature 1..22: note = chemically synthesized
  source 1..22: mol_type = other DNA
ctattttggttctttgtggagg

SEQ ID NO: 30629 - DNA, 22 bp, synthetic construct
  misc_feature 1..22: note = chemically synthesized
  source 1..22: mol_type = other DNA
ttttggttctttgtggaggagg

SEQ ID NO: 30630 - DNA, 22 bp, synthetic construct
  misc_feature 1..22: note = chemically synthesized
  source 1..22: mol_type = other DNA
tggttctttgtggaggaggtga

SEQ ID NO: 30631 - DNA, 22 bp, synthetic construct
  misc_feature 1..22: note = chemically synthesized
  source 1..22: mol_type = other DNA
ggttctttgtggaggaggtgag

SEQ ID NO: 30632 - DNA, 22 bp, synthetic construct
  misc_feature 1..22: note = chemically synthesized
  source 1..22: mol_type = other DNA
gttctttgtggaggaggtgagt

SEQ ID NO: 30633 - DNA, 22 bp, synthetic construct
  misc_feature 1..22: note = chemically synthesized
  source 1..22: mol_type = other DNA
tttgtggaggaggtgagtgtca

SEQ ID NO: 30634 - DNA, 22 bp, synthetic construct
  misc_feature 1..22: note = chemically synthesized
  source 1..22: mol_type = other DNA
tgtggaggaggtgagtgtcagc

SEQ ID NO: 30635 - DNA, 22 bp, synthetic construct
  misc_feature 1..22: note = chemically synthesized
  source 1..22: mol_type = other DNA
gtggaggaggtgagtgtcagct

SEQ ID NO: 30636 - DNA, 22 bp, synthetic construct
  misc_feature 1..22: note = chemically synthesized
  source 1..22: mol_type = other DNA
tggaggaggtgagtgtcagctg

SEQ ID NO: 30637 - DNA, 22 bp, synthetic construct
  misc_feature 1..22: note = chemically synthesized
  source 1..22: mol_type = other DNA
cccttagtcagtaatcttcaag

SEQ ID NO: 30638 - DNA, 22 bp, synthetic construct
  misc_feature 1..22: note = chemically synthesized
  source 1..22: mol_type = other DNA
agtcagtaatcttcaagcccct

SEQ ID NO: 30639 - DNA, 22 bp, synthetic construct
  misc_feature 1..22: note = chemically synthesized
  source 1..22: mol_type = other DNA
gtcagtaatcttcaagcccctt

SEQ ID NO: 30640 - DNA, 22 bp, synthetic construct
  misc_feature 1..22: note = chemically synthesized
  source 1..22: mol_type = other DNA
caagccccttcccttgaaattt

SEQ ID NO: 30641 - DNA, 22 bp, synthetic construct
  misc_feature 1..22: note = chemically synthesized
  source 1..22: mol_type = other DNA
aagccccttcccttgaaatttt

SEQ ID NO: 30642 - DNA, 22 bp, synthetic construct
  misc_feature 1..22: note = chemically synthesized
  source 1..22: mol_type = other DNA
cccttgaaattttttaagcttt

SEQ ID NO: 30643 - DNA, 22 bp, synthetic construct
  misc_feature 1..22: note = chemically synthesized
  source 1..22: mol_type = other DNA
ccttgaaattttttaagcttta

SEQ ID NO: 30644 - DNA, 22 bp, synthetic construct
  misc_feature 1..22: note = chemically synthesized
  source 1..22: mol_type = other DNA
gaaattttttaagctttatgtt

SEQ ID NO: 30645 - DNA, 22 bp, synthetic construct
  misc_feature 1..22: note = chemically synthesized
  source 1..22: mol_type = other DNA
aaattttttaagctttatgttt

SEQ ID NO: 30646 - DNA, 22 bp, synthetic construct
  misc_feature 1..22: note = chemically synthesized
  source 1..22: mol_type = other DNA
tttaagctttatgtttttattt

SEQ ID NO: 30647 - DNA, 22 bp, synthetic construct
  misc_feature 1..22: note = chemically synthesized
  source 1..22: mol_type = other DNA
ttaagctttatgtttttatttc

SEQ ID NO: 30648 - DNA, 22 bp, synthetic construct
  misc_feature 1..22: note = chemically synthesized
  source 1..22: mol_type = other DNA
taagctttatgtttttatttct

SEQ ID NO: 30649 - DNA, 22 bp, synthetic construct
  misc_feature 1..22: note = chemically synthesized
  source 1..22: mol_type = other DNA
aagctttatgtttttatttcta

SEQ ID NO: 30650 - DNA, 22 bp, synthetic construct
  misc_feature 1..22: note = chemically synthesized
  source 1..22: mol_type = other DNA
agctttatgtttttatttctaa

SEQ ID NO: 30651 - DNA, 22 bp, synthetic construct
  misc_feature 1..22: note = chemically synthesized
  source 1..22: mol_type = other DNA
tatgtttttatttctaatagac

SEQ ID NO: 30652 - DNA, 22 bp, synthetic construct
  misc_feature 1..22: note = chemically synthesized
  source 1..22: mol_type = other DNA
atgtttttatttctaatagact

SEQ ID NO: 30653 - DNA, 22 bp, synthetic construct
  misc_feature 1..22: note = chemically synthesized
  source 1..22: mol_type = other DNA
tgtttttatttctaatagactg

SEQ ID NO: 30654 - DNA, 22 bp, synthetic construct
  misc_feature 1..22: note = chemically synthesized
  source 1..22: mol_type = other DNA
ttatttctaatagactgaaaga

SEQ ID NO: 30655 - DNA, 22 bp, synthetic construct
  misc_feature 1..22: note = chemically synthesized
  source 1..22: mol_type = other DNA
tatttctaatagactgaaagag

SEQ ID NO: 30656 - DNA, 22 bp, synthetic construct
  misc_feature 1..22: note = chemically synthesized
  source 1..22: mol_type = other DNA
atttctaatagactgaaagagc

SEQ ID NO: 30657 - DNA, 22 bp, synthetic construct
  misc_feature 1..22: note = chemically synthesized
  source 1..22: mol_type = other DNA
tttctaatagactgaaagagca

SEQ ID NO: 30658 - DNA, 22 bp, synthetic construct
  misc_feature 1..22: note = chemically synthesized
  source 1..22: mol_type = other DNA
ctaatagactgaaagagcataa

SEQ ID NO: 30659 - DNA, 22 bp, synthetic construct
  misc_feature 1..22: note = chemically synthesized
  source 1..22: mol_type = other DNA
taatagactgaaagagcataat

SEQ ID NO: 30660 - DNA, 22 bp, synthetic construct
  misc_feature 1..22: note = chemically synthesized
  source 1..22: mol_type = other DNA
atagactgaaagagcataatca

SEQ ID NO: 30661 - DNA, 22 bp, synthetic construct
  misc_feature 1..22: note = chemically synthesized
  source 1..22: mol_type = other DNA
aaagagcataatcatattttaa

SEQ ID NO: 30662 - DNA, 22 bp, synthetic construct
  misc_feature 1..22: note = chemically synthesized
  source 1..22: mol_type = other DNA
taaacactctaaggctatatgg

SEQ ID NO: 30663 - DNA, 22 bp, synthetic construct
  misc_feature 1..22: note = chemically synthesized
  source 1..22: mol_type = other DNA
aaacactctaaggctatatggg

SEQ ID NO: 30664 - DNA, 22 bp, synthetic construct
  misc_feature 1..22: note = chemically synthesized
  source 1..22: mol_type = other DNA
aacactctaaggctatatgggg

SEQ ID NO: 30665 - DNA, 22 bp, synthetic construct
  misc_feature 1..22: note = chemically synthesized
  source 1..22: mol_type = other DNA
taaggctatatgggggactatc

SEQ ID NO: 30666 - DNA, 22 bp, synthetic construct
  misc_feature 1..22: note = chemically synthesized
  source 1..22: mol_type = other DNA
aggctatatgggggactatctg

SEQ ID NO: 30667 - DNA, 22 bp, synthetic construct
  misc_feature 1..22: note = chemically synthesized
  source 1..22: mol_type = other DNA
tatgggggactatctgaaggcc

SEQ ID NO: 30668 - DNA, 22 bp, synthetic construct
  misc_feature 1..22: note = chemically synthesized
  source 1..22: mol_type = other DNA
tctgaaggcctcagatgagtaa

SEQ ID NO: 30669 - DNA, 22 bp, synthetic construct
  misc_feature 1..22: note = chemically synthesized
  source 1..22: mol_type = other DNA
aaggcctcagatgagtaaaaga

SEQ ID NO: 30670 - DNA, 22 bp, synthetic construct
  misc_feature 1..22: note = chemically synthesized
  source 1..22: mol_type = other DNA
agatgagtaaaagaagtagcga

SEQ ID NO: 30671 - DNA, 22 bp, synthetic construct
  misc_feature 1..22: note = chemically synthesized
  source 1..22: mol_type = other DNA
gttaactatgtttttcttttca

SEQ ID NO: 30672 - DNA, 22 bp, synthetic construct
  misc_feature 1..22: note = chemically synthesized
  source 1..22: mol_type = other DNA
actatgtttttcttttcatttc

SEQ ID NO: 30673 - DNA, 22 bp, synthetic construct
  misc_feature 1..22: note = chemically synthesized
  source 1..22: mol_type = other DNA
tgtttttcttttcatttcattt

SEQ ID NO: 30674 - DNA, 22 bp, synthetic construct
  misc_feature 1..22: note = chemically synthesized
  source 1..22: mol_type = other DNA
ttcttttcatttcatttcccaa

SEQ ID NO: 30675 - DNA, 22 bp, synthetic construct
  misc_feature 1..22: note = chemically synthesized
  source 1..22: mol_type = other DNA
tcttttcatttcatttcccaaa

SEQ ID NO: 30676 - DNA, 22 bp, synthetic construct
  misc_feature 1..22: note = chemically synthesized
  source 1..22: mol_type = other DNA
cttttcatttcatttcccaaat

SEQ ID NO: 30677 - DNA, 22 bp, synthetic construct
  misc_feature 1..22: note = chemically synthesized
  source 1..22: mol_type = other DNA
ttttcatttcatttcccaaatc

SEQ ID NO: 30678 - DNA, 22 bp, synthetic construct
  misc_feature 1..22: note = chemically synthesized
  source 1..22: mol_type = other DNA
ttcatttcatttcccaaatcaa

SEQ ID NO: 30679 - DNA, 22 bp, synthetic construct
  misc_feature 1..22: note = chemically synthesized
  source 1..22: mol_type = other DNA
tcatttcatttcccaaatcaaa

SEQ ID NO: 30680 - DNA, 22 bp, synthetic construct
  misc_feature 1..22: note = chemically synthesized
  source 1..22: mol_type = other DNA
catttcatttcccaaatcaaat

SEQ ID NO: 30681 - DNA, 22 bp, synthetic construct
  misc_feature 1..22: note = chemically synthesized
  source 1..22: mol_type = other DNA
atttcatttcccaaatcaaatc

SEQ ID NO: 30682 - DNA, 22 bp, synthetic construct
  misc_feature 1..22: note = chemically synthesized
  source 1..22: mol_type = other DNA
catttcccaaatcaaatcattt

SEQ ID NO: 30683 - DNA, 22 bp, synthetic construct
  misc_feature 1..22: note = chemically synthesized
  source 1..22: mol_type = other DNA
atttcccaaatcaaatcatttg

SEQ ID NO: 30684 - DNA, 22 bp, synthetic construct
  misc_feature 1..22: note = chemically synthesized
  source 1..22: mol_type = other DNA
cccaaatcaaatcatttgtttc

SEQ ID NO: 30685 - DNA, 22 bp, synthetic construct
  misc_feature 1..22: note = chemically synthesized
  source 1..22: mol_type = other DNA
ccaaatcaaatcatttgtttct

SEQ ID NO: 30686 - DNA, 22 bp, synthetic construct
  misc_feature 1..22: note = chemically synthesized
  source 1..22: mol_type = other DNA
gtttcttcaaataaagaatctc

SEQ ID NO: 30687 - DNA, 22 bp, synthetic construct
  misc_feature 1..22: note = chemically synthesized
  source 1..22: mol_type = other DNA
tttcttcaaataaagaatctct

SEQ ID NO: 30688 - DNA, 22 bp, synthetic construct
  misc_feature 1..22: note = chemically synthesized
  source 1..22: mol_type = other DNA
cttcaaataaagaatctctatt

SEQ ID NO: 30689 - DNA, 22 bp, synthetic construct
  misc_feature 1..22: note = chemically synthesized
  source 1..22: mol_type = other DNA
ttcaaataaagaatctctattt

SEQ ID NO: 30690 - DNA, 22 bp, synthetic construct
  misc_feature 1..22: note = chemically synthesized
  source 1..22: mol_type = other DNA
caaataaagaatctctatttcc

SEQ ID NO: 30691 - DNA, 22 bp, synthetic construct
  misc_feature 1..22: note = chemically synthesized
  source 1..22: mol_type = other DNA
aaataaagaatctctatttccc

SEQ ID NO: 30692 - DNA, 22 bp, synthetic construct
  misc_feature 1..22: note = chemically synthesized
  source 1..22: mol_type = other DNA
tatttcccccttatgttcttca

SEQ ID NO: 30693 - DNA, 22 bp, synthetic construct
  misc_feature 1..22: note = chemically synthesized
  source 1..22: mol_type = other DNA
tttcccccttatgttcttcagc

SEQ ID NO: 30694 - DNA, 22 bp, synthetic construct
  misc_feature 1..22: note = chemically synthesized
  source 1..22: mol_type = other DNA
cccccttatgttcttcagcaaa

SEQ ID NO: 30695 - DNA, 22 bp, synthetic construct
  misc_feature 1..22: note = chemically synthesized
  source 1..22: mol_type = other DNA
ccccttatgttcttcagcaaat

SEQ ID NO: 30696 - DNA, 22 bp, synthetic construct
  misc_feature 1..22: note = chemically synthesized
  source 1..22: mol_type = other DNA
atgttcttcagcaaataaaaat

SEQ ID NO: 30697 - DNA, 22 bp, synthetic construct
  misc_feature 1..22: note = chemically synthesized
  source 1..22: mol_type = other DNA
tgttcttcagcaaataaaaatg

SEQ ID NO: 30698 - DNA, 22 bp, synthetic construct
  misc_feature 1..22: note = chemically synthesized
  source 1..22: mol_type = other DNA
ttcagcaaataaaaatgtttgc

SEQ ID NO: 30699 - DNA, 22 bp, synthetic construct
  misc_feature 1..22: note = chemically synthesized
  source 1..22: mol_type = other DNA
cagcaaataaaaatgtttgcat

SEQ ID NO: 30700 - DNA, 22 bp, synthetic construct
  misc_feature 1..22: note = chemically synthesized
  source 1..22: mol_type = other DNA
agcaaataaaaatgtttgcatc

SEQ ID NO: 30701 - DNA, 22 bp, synthetic construct
  misc_feature 1..22: note = chemically synthesized
  source 1..22: mol_type = other DNA
gcatctaccaaagtgtatatga

SEQ ID NO: 30702 - DNA, 22 bp, synthetic construct
  misc_feature 1..22: note = chemically synthesized
  source 1..22: mol_type = other DNA
catctaccaaagtgtatatgaa

SEQ ID NO: 30703 - DNA, 22 bp, synthetic construct
  misc_feature 1..22: note = chemically synthesized
  source 1..22: mol_type = other DNA
ccaaagtgtatatgaatttgaa

SEQ ID NO: 30704 - DNA, 22 bp, synthetic construct
  misc_feature 1..22: note = chemically synthesized
  source 1..22: mol_type = other DNA
gaaatacgtaatctaacaaaca

SEQ ID NO: 30705 - DNA, 22 bp, synthetic construct
  misc_feature 1..22: note = chemically synthesized
  source 1..22: mol_type = other DNA
aaatacgtaatctaacaaacaa

SEQ ID NO: 30706 - DNA, 22 bp, synthetic construct
  misc_feature 1..22: note = chemically synthesized
  source 1..22: mol_type = other DNA
acaaacaaggatgttttaagat

SEQ ID NO: 30707 - DNA, 22 bp, synthetic construct
  misc_feature 1..22: note = chemically synthesized
  source 1..22: mol_type = other DNA
taagatctctgagtaagatgca

SEQ ID NO: 30708 - DNA, 22 bp, synthetic construct
  misc_feature 1..22: note = chemically synthesized
  source 1..22: mol_type = other DNA
aagatctctgagtaagatgcat

SEQ ID NO: 30709 - DNA, 22 bp, synthetic construct
  misc_feature 1..22: note = chemically synthesized
  source 1..22: mol_type = other DNA
agatctctgagtaagatgcata

SEQ ID NO: 30710 - DNA, 22 bp, synthetic construct
  misc_feature 1..22: note = chemically synthesized
  source 1..22: mol_type = other DNA
tgagtaagatgcatagttgcaa

SEQ ID NO: 30711 - DNA, 22 bp, synthetic construct
  misc_feature 1..22: note = chemically synthesized
  source 1..22: mol_type = other DNA
agtaagatgcatagttgcaaat

SEQ ID NO: 30712 - DNA, 22 bp, synthetic construct
  misc_feature 1..22: note = chemically synthesized
  source 1..22: mol_type = other DNA
caaataaaaggagttttcaagg

SEQ ID NO: 30713 - DNA, 22 bp, synthetic construct
  misc_feature 1..22: note = chemically synthesized
  source 1..22: mol_type = other DNA
tcaaggataaaaaatgtaaata

SEQ ID NO: 30714 - DNA, 22 bp, synthetic construct
  misc_feature 1..22: note = chemically synthesized
  source 1..22: mol_type = other DNA
caaggataaaaaatgtaaataa

SEQ ID NO: 30715 - DNA, 22 bp, synthetic construct
  misc_feature 1..22: note = chemically synthesized
  source 1..22: mol_type = other DNA
aaggataaaaaatgtaaataaa

SEQ ID NO: 30716 - DNA, 22 bp, synthetic construct
  misc_feature 1..22: note = chemically synthesized
  source 1..22: mol_type = other DNA
ataaatgtgtaccatcagaaac

SEQ ID NO: 30717 - DNA, 22 bp, synthetic construct
  misc_feature 1..22: note = chemically synthesized
  source 1..22: mol_type = other DNA
atggtatattctcctggaaaag

SEQ ID NO: 30718 - DNA, 22 bp, synthetic construct
  misc_feature 1..22: note = chemically synthesized
  source 1..22: mol_type = other DNA
tggtatattctcctggaaaaga

SEQ ID NO: 30719 - DNA, 22 bp, synthetic construct
  misc_feature 1..22: note = chemically synthesized
  source 1..22: mol_type = other DNA
tcctggaaaagatgaagatgaa

SEQ ID NO: 30720 - DNA, 22 bp, synthetic construct
  misc_feature 1..22: note = chemically synthesized
  source 1..22: mol_type = other DNA
ctggaaaagatgaagatgaaga

SEQ ID NO: 30721 - DNA, 22 bp, synthetic construct
  misc_feature 1..22: note = chemically synthesized
  source 1..22: mol_type = other DNA
gaaaagatgaagatgaagaaaa

SEQ ID NO: 30722 - DNA, 22 bp, synthetic construct
  misc_feature 1..22: note = chemically synthesized
  source 1..22: mol_type = other DNA
cagaagaggagaaattctttgg

SEQ ID NO: 30723 - DNA, 22 bp, synthetic construct
  misc_feature 1..22: note = chemically synthesized
  source 1..22: mol_type = other DNA
tttggaaattttgcatttttgt

SEQ ID NO: 30724 - DNA, 22 bp, synthetic construct
  misc_feature 1..22: note = chemically synthesized
  source 1..22: mol_type = other DNA
tggaaattttgcatttttgtgg

SEQ ID NO: 30725 - DNA, 22 bp, synthetic construct
  misc_feature 1..22: note = chemically synthesized
  source 1..22: mol_type = other DNA
ggaaattttgcatttttgtgga

SEQ ID NO: 30726 - DNA, 22 bp, synthetic construct
  misc_feature 1..22: note = chemically synthesized
  source 1..22: mol_type = other DNA
gaaattttgcatttttgtggat

SEQ ID NO: 30727 - DNA, 22 bp, synthetic construct
  misc_feature 1..22: note = chemically synthesized
  source 1..22: mol_type = other DNA
tgcatttttgtggatagtggtt

SEQ ID NO: 30728 - DNA, 22 bp, synthetic construct
  misc_feature 1..22: note = chemically synthesized
  source 1..22: mol_type = other DNA
gcatttttgtggatagtggttt

SEQ ID NO: 30729 - DNA, 22 bp, synthetic construct
  misc_feature 1..22: note = chemically synthesized
  source 1..22: mol_type = other DNA
catttttgtggatagtggtttt

SEQ ID NO: 30730 - DNA, 22 bp, synthetic construct
  misc_feature 1..22: note = chemically synthesized
  source 1..22: mol_type = other DNA
ttgtggatagtggttttgaaga

SEQ ID NO: 30731 - DNA, 22 bp, synthetic construct
  misc_feature 1..22: note = chemically synthesized
  source 1..22: mol_type = other DNA
tgtggatagtggttttgaagaa

SEQ ID NO: 30732 - DNA, 22 bp, synthetic construct
  misc_feature 1..22: note = chemically synthesized
  source 1..22: mol_type = other DNA
gtggatagtggttttgaagaaa

SEQ ID NO: 30733 - DNA, 22 bp, synthetic construct
  misc_feature 1..22: note = chemically synthesized
  source 1..22: mol_type = other DNA
tggatagtggttttgaagaaag

SEQ ID NO: 30734 - DNA, 22 bp, synthetic construct
  misc_feature 1..22: note = chemically synthesized
  source 1..22: mol_type = other DNA
tgaagaaagcttagatatattt

SEQ ID NO: 30735 - DNA, 22 bp, synthetic construct
  misc_feature 1..22: note = chemically synthesized
  source 1..22: mol_type = other DNA
gaagaaagcttagatatattta

SEQ ID NO: 30736 - DNA, 22 bp, synthetic construct
  misc_feature 1..22: note = chemically synthesized
  source 1..22: mol_type = other DNA
aagaaagcttagatatatttaa

SEQ ID NO: 30737 - DNA, 22 bp, synthetic construct
  misc_feature 1..22: note = chemically synthesized
  source 1..22: mol_type = other DNA
agatatatttaaatatgttgct

SEQ ID NO: 30738 - DNA, 22 bp, synthetic construct
  misc_feature 1..22: note = chemically synthesized
  source 1..22: mol_type = other DNA
gatatatttaaatatgttgcta

SEQ ID NO: 30739 - DNA, 22 bp, synthetic construct
  misc_feature 1..22: note = chemically synthesized
  source 1..22: mol_type = other DNA
aaatatgttgctaagatgtgac

SEQ ID NO: 30740 - DNA, 22 bp, synthetic construct
  misc_feature 1..22: note = chemically synthesized
  source 1..22: mol_type = other DNA
aatatgttgctaagatgtgact

SEQ ID NO: 30741 - DNA, 22 bp, synthetic construct
  misc_feature 1..22: note = chemically synthesized
  source 1..22: mol_type = other DNA
ctaagatgtgactcccacactt

SEQ ID NO: 30742 - DNA, 22 bp, synthetic construct
  misc_feature 1..22: note = chemically synthesized
  source 1..22: mol_type = other DNA
agatgtgactcccacactttaa

SEQ ID NO: 30743 - DNA, 22 bp, synthetic construct
  misc_feature 1..22: note = chemically synthesized
  source 1..22: mol_type = other DNA
ccacactttaaagaaaagttct

SEQ ID NO: 30744 - DNA, 22 bp, synthetic construct
  misc_feature 1..22: note = chemically synthesized
  source 1..22: mol_type = other DNA
taaagaaaagttcttcatttta

SEQ ID NO: 30745 - DNA, 22 bp, synthetic construct
  misc_feature 1..22: note = chemically synthesized
  source 1..22: mol_type = other DNA
aaagaaaagttcttcattttag

SEQ ID NO: 30746 - DNA, 22 bp, synthetic construct
  misc_feature 1..22: note = chemically synthesized
  source 1..22: mol_type = other DNA
aagaaaagttcttcattttagt

SEQ ID NO: 30747 - DNA, 22 bp, synthetic construct
  misc_feature 1..22: note = chemically synthesized
  source 1..22: mol_type = other DNA
ttcattttagttgcccttgcaa

SEQ ID NO: 30748 - DNA, 22 bp, synthetic construct
  misc_feature 1..22: note = chemically synthesized
  source 1..22: mol_type = other DNA
cattttagttgcccttgcaaat

SEQ ID NO: 30749 - DNA, 22 bp, synthetic construct
  misc_feature 1..22: note = chemically synthesized
  source 1..22: mol_type = other DNA
attttagttgcccttgcaaatt

SEQ ID NO: 30750 - DNA, 22 bp, synthetic construct
  misc_feature 1..22: note = chemically synthesized
  source 1..22: mol_type = other DNA
tagttgcccttgcaaattggct

SEQ ID NO: 30751 - DNA, 22 bp, synthetic construct
  misc_feature 1..22: note = chemically synthesized
  source 1..22: mol_type = other DNA
agttgcccttgcaaattggcta

SEQ ID NO: 30752 - DNA, 22 bp, synthetic construct
  misc_feature 1..22: note = chemically synthesized
  source 1..22: mol_type = other DNA
gttgcccttgcaaattggctaa

SEQ ID NO: 30753 - DNA, 22 bp, synthetic construct
  misc_feature 1..22: note = chemically synthesized
  source 1..22: mol_type = other DNA
cccttgcaaattggctaagttt

SEQ ID NO: 30754 - DNA, 22 bp, synthetic construct
  misc_feature 1..22: note = chemically synthesized
  source 1..22: mol_type = other DNA
gcaaattggctaagtttatttt

SEQ ID NO: 30755 - DNA, 22 bp, synthetic construct
  misc_feature 1..22: note = chemically synthesized
  source 1..22: mol_type = other DNA
caaattggctaagtttattttt

SEQ ID NO: 30756 - DNA, 22 bp, synthetic construct
  misc_feature 1..22: note = chemically synthesized
  source 1..22: mol_type = other DNA
gctaagtttatttttcctcaac

SEQ ID NO: 30757 - DNA, 22 bp, synthetic construct
  misc_feature 1..22: note = chemically synthesized
  source 1..22: mol_type = other DNA
agtttatttttcctcaacaaat

SEQ ID NO: 30758 - DNA, 22 bp, synthetic construct
  misc_feature 1..22: note = chemically synthesized
  source 1..22: mol_type = other DNA
atttttcctcaacaaataattt

SEQ ID NO: 30759 - DNA, 22 bp, synthetic construct
  misc_feature 1..22: note = chemically synthesized
  source 1..22: mol_type = other DNA
tttttcctcaacaaataatttt

SEQ ID NO: 30760 - DNA, 22 bp, synthetic construct
  misc_feature 1..22: note = chemically synthesized
  source 1..22: mol_type = other DNA
ttcctcaacaaataattttgat

SEQ ID NO: 30761 - DNA, 22 bp, synthetic construct
  misc_feature 1..22: note = chemically synthesized
  source 1..22: mol_type = other DNA
tcctcaacaaataattttgatg

SEQ ID NO: 30762 - DNA, 22 bp, synthetic construct
  misc_feature 1..22: note = chemically synthesized
  source 1..22: mol_type = other DNA
cctcaacaaataattttgatgg

SEQ ID NO: 30763 - DNA, 22 bp, synthetic construct
  misc_feature 1..22: note = chemically synthesized
  source 1..22: mol_type = other DNA
ctcaacaaataattttgatggt

SEQ ID NO: 30764 - DNA, 22 bp, synthetic construct
  misc_feature 1..22: note = chemically synthesized
  source 1..22: mol_type = other DNA
aacaaataattttgatggtttc

SEQ ID NO: 30765 - DNA, 22 bp, synthetic construct
  misc_feature 1..22: note = chemically synthesized
  source 1..22: mol_type = other DNA
tgatggtttctaaaattgtcca

SEQ ID NO: 30766 - DNA, 22 bp, synthetic construct
  misc_feature 1..22: note = chemically synthesized
  source 1..22: mol_type = other DNA
gatggtttctaaaattgtccag

SEQ ID NO: 30767 - DNA, 22 bp, synthetic construct
  misc_feature 1..22: note = chemically synthesized
  source 1..22: mol_type = other DNA
atggtttctaaaattgtccaga

SEQ ID NO: 30768 - DNA, 22 bp, synthetic construct
  misc_feature 1..22: note = chemically synthesized
  source 1..22: mol_type = other DNA
ctaaaattgtccagaatttgag

SEQ ID NO: 30769 - DNA, 22 bp, synthetic construct
  misc_feature 1..22: note = chemically synthesized
  source 1..22: mol_type = other DNA
taaaattgtccagaatttgagg

SEQ ID NO: 30770 - DNA, 22 bp, synthetic construct
  misc_feature 1..22: note = chemically synthesized
  source 1..22: mol_type = other DNA
aaattgtccagaatttgaggaa

SEQ ID NO: 30771 - DNA, 22 bp, synthetic construct
  misc_feature 1..22: note = chemically synthesized
  source 1..22: mol_type = other DNA
tccagaatttgaggaaatactt

SEQ ID NO: 30772 - DNA, 22 bp, synthetic construct
  misc_feature 1..22: note = chemically synthesized
  source 1..22: mol_type = other DNA
gaggaaatacttagatgtagta

SEQ ID NO: 30773 - DNA, 22 bp, synthetic construct
  misc_feature 1..22: note = chemically synthesized
  source 1..22: mol_type = other DNA
aggaaatacttagatgtagtag

SEQ ID NO: 30774 - DNA, 22 bp, synthetic construct
  misc_feature 1..22: note = chemically synthesized
  source 1..22: mol_type = other DNA
agatgtagtagatgacatcaat

SEQ ID NO: 30775 - DNA, 22 bp, synthetic construct
  misc_feature 1..22: note = chemically synthesized
  source 1..22: mol_type = other DNA
gatgtagtagatgacatcaatt

SEQ ID NO: 30776 - DNA, 22 bp, synthetic construct
  misc_feature 1..22: note = chemically synthesized
  source 1..22: mol_type = other DNA
atgttaacttagatttattgtt

SEQ ID NO: 30777 - DNA, 22 bp, synthetic construct
  misc_feature 1..22: note = chemically synthesized
  source 1..22: mol_type = other DNA
tgttaacttagatttattgttg

SEQ ID NO: 30778 - DNA, 22 bp, synthetic construct
  misc_feature 1..22: note = chemically synthesized
  source 1..22: mol_type = other DNA
acttagatttattgttggatgg

SEQ ID NO: 30779 - DNA, 22 bp, synthetic construct
  misc_feature 1..22: note = chemically synthesized
  source 1..22: mol_type = other DNA
agatttattgttggatggttaa

SEQ ID NO: 30780 - DNA, 22 bp, synthetic construct
  misc_feature 1..22: note = chemically synthesized
  source 1..22: mol_type = other DNA
gatttattgttggatggttaag

SEQ ID NO: 30781 - DNA, 22 bp, synthetic construct
  misc_feature 1..22: note = chemically synthesized
  source 1..22: mol_type = other DNA
attgttggatggttaagttaat

SEQ ID NO: 30782 - DNA, 22 bp, synthetic construct
  misc_feature 1..22: note = chemically synthesized
  source 1..22: mol_type = other DNA
ttgttggatggttaagttaatc

SEQ ID NO: 30783 - DNA, 22 bp, synthetic construct
  misc_feature 1..22: note = chemically synthesized
  source 1..22: mol_type = other DNA
ttggatggttaagttaatcatg

SEQ ID NO: 30784 - DNA, 22 bp, synthetic construct
  misc_feature 1..22: note = chemically synthesized
  source 1..22: mol_type = other DNA
gatggttaagttaatcatgtct

SEQ ID NO: 30785 - DNA, 22 bp, synthetic construct
  misc_feature 1..22: note = chemically synthesized
  source 1..22: mol_type = other DNA
agttaatcatgtctgttcttgt

SEQ ID NO: 30786 - DNA, 22 bp, synthetic construct
  misc_feature 1..22: note = chemically synthesized
  source 1..22: mol_type = other DNA
atcatgtctgttcttgtccagt

SEQ ID NO: 30787 - DNA, 22 bp, synthetic construct
  misc_feature 1..22: note = chemically synthesized
  source 1..22: mol_type = other DNA
ttcttgtccagtctagaagttt

SEQ ID NO: 30788 - DNA, 22 bp, synthetic construct
  misc_feature 1..22: note = chemically synthesized
  source 1..22: mol_type = other DNA
ttgtccagtctagaagtttctg

SEQ ID NO: 30789 - DNA, 22 bp, synthetic construct
  misc_feature 1..22: note = chemically synthesized
  source 1..22: mol_type = other DNA
gtccagtctagaagtttctgct

SEQ ID NO: 30790 - DNA, 22 bp, synthetic construct
  misc_feature 1..22: note = chemically synthesized
  source 1..22: mol_type = other DNA
tccagtctagaagtttctgctt

SEQ ID NO: 30791 - DNA, 22 bp, synthetic construct
  misc_feature 1..22: note = chemically synthesized
  source 1..22: mol_type = other DNA
gaagtttctgcttcctcctcat

SEQ ID NO: 30792 - DNA, 22 bp, synthetic construct
  misc_feature 1..22: note = chemically synthesized
  source 1..22: mol_type = other DNA
ctgcttcctcctcatgtgttct

SEQ ID NO: 30793 - DNA, 22 bp, synthetic construct
  misc_feature 1..22: note = chemically synthesized
  source 1..22: mol_type = other DNA
tgcttcctcctcatgtgttcta

SEQ ID NO: 30794 - DNA, 22 bp, synthetic construct
  misc_feature 1..22: note = chemically synthesized
  source 1..22: mol_type = other DNA
cttcctcctcatgtgttctatt

SEQ ID NO: 30795 - DNA, 22 bp, synthetic construct
  misc_feature 1..22: note = chemically synthesized
  source 1..22: mol_type = other DNA
cctcctcatgtgttctattctg

SEQ ID NO: 30796 - DNA, 22 bp, synthetic construct
  misc_feature 1..22: note = chemically synthesized
  source 1..22: mol_type = other DNA
ctcctcatgtgttctattctgt

SEQ ID NO: 30797 - DNA, 22 bp, synthetic construct
  misc_feature 1..22: note = chemically synthesized
  source 1..22: mol_type = other DNA
ctcatgtgttctattctgtcct

SEQ ID NO: 30798 - DNA, 22 bp, synthetic construct
  misc_feature 1..22: note = chemically synthesized
  source 1..22: mol_type = other DNA
atgtgttctattctgtcctcat

SEQ ID NO: 30799 - DNA, 22 bp, synthetic construct
  misc_feature 1..22: note = chemically synthesized
  source 1..22: mol_type = other DNA
tattctgtcctcatcacataac

SEQ ID NO: 30800 - DNA, 22 bp, synthetic construct
  misc_feature 1..22: note = chemically synthesized
  source 1..22: mol_type = other DNA
ttctgtcctcatcacataacat

SEQ ID NO: 30801 - DNA, 22 bp, synthetic construct
  misc_feature 1..22: note = chemically synthesized
  source 1..22: mol_type = other DNA
tgtcctcatcacataacatctg

SEQ ID NO: 30802 - DNA, 22 bp, synthetic construct
  misc_feature 1..22: note = chemically synthesized
  source 1..22: mol_type = other DNA
tcctcatcacataacatctgaa

SEQ ID NO: 30803 - DNA, 22 bp, synthetic construct
  misc_feature 1..22: note = chemically synthesized
  source 1..22: mol_type = other DNA
atcacataacatctgaactgtg

SEQ ID NO: 30804 - DNA, 22 bp, synthetic construct
  misc_feature 1..22: note = chemically synthesized
  source 1..22: mol_type = other DNA
aactgtgatttgacagtgtcct

SEQ ID NO: 30805 - DNA, 22 bp, synthetic construct
  misc_feature 1..22: note = chemically synthesized
  source 1..22: mol_type = other DNA
tgatttgacagtgtccttatta

SEQ ID NO: 30806 - DNA, 22 bp, synthetic construct
  misc_feature 1..22: note = chemically synthesized
  source 1..22: mol_type = other DNA
gacagtgtccttattatcagac

SEQ ID NO: 30807 - DNA, 22 bp, synthetic construct
  misc_feature 1..22: note = chemically synthesized
  source 1..22: mol_type = other DNA
acagtgtccttattatcagact

SEQ ID NO: 30808 - DNA, 22 bp, synthetic construct
  misc_feature 1..22: note = chemically synthesized
  source 1..22: mol_type = other DNA
attatcagactctgctcaatga

SEQ ID NO: 30809 - DNA, 22 bp, synthetic construct
  misc_feature 1..22: note = chemically synthesized
  source 1..22: mol_type = other DNA
ttatcagactctgctcaatgac

SEQ ID NO: 30810 - DNA, 22 bp, synthetic construct
  misc_feature 1..22: note = chemically synthesized
  source 1..22: mol_type = other DNA
tcagactctgctcaatgacagt

SEQ ID NO: 30811 - DNA, 22 bp, synthetic construct
  misc_feature 1..22: note = chemically synthesized
  source 1..22: mol_type = other DNA
tgctcaatgacagtttaaactt

SEQ ID NO: 30812 - DNA, 22 bp, synthetic construct
  misc_feature 1..22: note = chemically synthesized
  source 1..22: mol_type = other DNA
ctcaatgacagtttaaacttct

SEQ ID NO: 30813 - DNA, 22 bp, synthetic construct
  misc_feature 1..22: note = chemically synthesized
  source 1..22: mol_type = other DNA
aatgacagtttaaacttctttt

SEQ ID NO: 30814 - DNA, 22 bp, synthetic construct
  misc_feature 1..22: note = chemically synthesized
  source 1..22: mol_type = other DNA
aaacttctttttgatacagtaa

SEQ ID NO: 30815 - DNA, 22 bp, synthetic construct
  misc_feature 1..22: note = chemically synthesized
  source 1..22: mol_type = other DNA
aacttctttttgatacagtaaa

SEQ ID NO: 30816 - DNA, 22 bp, synthetic construct
  misc_feature 1..22: note = chemically synthesized
  source 1..22: mol_type = other DNA
ctttttgatacagtaaaaaact

SEQ ID NO: 30817 - DNA, 22 bp, synthetic construct
  misc_feature 1..22: note = chemically synthesized
  source 1..22: mol_type = other DNA
tttttgatacagtaaaaaactt

SEQ ID NO: 30818 - DNA, 22 bp, synthetic construct
  misc_feature 1..22: note = chemically synthesized
  source 1..22: mol_type = other DNA
tttgatacagtaaaaaactttt

SEQ ID NO: 30819 - DNA, 22 bp, synthetic construct
  misc_feature 1..22: note = chemically synthesized
  source 1..22: mol_type = other DNA
ttgatacagtaaaaaacttttc

SEQ ID NO: 30820 - DNA, 22 bp, synthetic construct
  misc_feature 1..22: note = chemically synthesized
  source 1..22: mol_type = other DNA
tgatacagtaaaaaacttttcc

SEQ ID NO: 30821 - DNA, 22 bp, synthetic construct
  misc_feature 1..22: note = chemically synthesized
  source 1..22: mol_type = other DNA
gatacagtaaaaaacttttcct

SEQ ID NO: 30822 - DNA, 22 bp, synthetic construct
  misc_feature 1..22: note = chemically synthesized
  source 1..22: mol_type = other DNA
atacagtaaaaaacttttcctt

SEQ ID NO: 30823 - DNA, 22 bp, synthetic construct
  misc_feature 1..22: note = chemically synthesized
  source 1..22: mol_type = other DNA
ttccttaaagatgaaattctta

SEQ ID NO: 30824 - DNA, 22 bp, synthetic construct
  misc_feature 1..22: note = chemically synthesized
  source 1..22: mol_type = other DNA
tccttaaagatgaaattcttaa

SEQ ID NO: 30825 - DNA, 22 bp, synthetic construct
  misc_feature 1..22: note = chemically synthesized
  source 1..22: mol_type = other DNA
ccttaaagatgaaattcttaag

SEQ ID NO: 30826 - DNA, 22 bp, synthetic construct
  misc_feature 1..22: note = chemically synthesized
  source 1..22: mol_type = other DNA
cttaaagatgaaattcttaagg

SEQ ID NO: 30827 - DNA, 22 bp, synthetic construct
  misc_feature 1..22: note = chemically synthesized
  source 1..22: mol_type = other DNA
aaagatgaaattcttaaggaca

SEQ ID NO: 30828 - DNA, 22 bp, synthetic construct
  misc_feature 1..22: note = chemically synthesized
  source 1..22: mol_type = other DNA
aagatgaaattcttaaggacaa

SEQ ID NO: 30829 - DNA, 22 bp, synthetic construct
  misc_feature 1..22: note = chemically synthesized
  source 1..22: mol_type = other DNA
ttaaggacaattagcttgtgta

SEQ ID NO: 30830 - DNA, 22 bp, synthetic construct
  misc_feature 1..22: note = chemically synthesized
  source 1..22: mol_type = other DNA
aaggacaattagcttgtgtaga

SEQ ID NO: 30831 - DNA, 22 bp, synthetic construct
  misc_feature 1..22: note = chemically synthesized
  source 1..22: mol_type = other DNA
aggacaattagcttgtgtagac

SEQ ID NO: 30832 - DNA, 22 bp, synthetic construct
  misc_feature 1..22: note = chemically synthesized
  source 1..22: mol_type = other DNA
gcttgtgtagactcatatgaaa

SEQ ID NO: 30833 - DNA, 22 bp, synthetic construct
  misc_feature 1..22: note = chemically synthesized
  source 1..22: mol_type = other DNA
gtgtagactcatatgaaaattg

SEQ ID NO: 30834 - DNA, 22 bp, synthetic construct
  misc_feature 1..22: note = chemically synthesized
  source 1..22: mol_type = other DNA
tgtagactcatatgaaaattgc

SEQ ID NO: 30835 - DNA, 22 bp, synthetic construct
  misc_feature 1..22: note = chemically synthesized
  source 1..22: mol_type = other DNA
atatgaaaattgcttgcatttt

SEQ ID NO: 30836 - DNA, 22 bp, synthetic construct
  misc_feature 1..22: note = chemically synthesized
  source 1..22: mol_type = other DNA
cttgcattttggagttacatta

SEQ ID NO: 30837 - DNA, 22 bp, synthetic construct
  misc_feature 1..22: note = chemically synthesized
  source 1..22: mol_type = other DNA
gcattttggagttacattagct

SEQ ID NO: 30838 - DNA, 22 bp, synthetic construct
  misc_feature 1..22: note = chemically synthesized
  source 1..22: mol_type = other DNA
cattttggagttacattagctc

SEQ ID NO: 30839 - DNA, 22 bp, synthetic construct
  misc_feature 1..22: note = chemically synthesized
  source 1..22: mol_type = other DNA
tggagttacattagctcttctc

SEQ ID NO: 30840 - DNA, 22 bp, synthetic construct
  misc_feature 1..22: note = chemically synthesized
  source 1..22: mol_type = other DNA
ggagttacattagctcttctcc

SEQ ID NO: 30841 - DNA, 22 bp, synthetic construct
  misc_feature 1..22: note = chemically synthesized
  source 1..22: mol_type = other DNA
gagttacattagctcttctcct

SEQ ID NO: 30842 - DNA, 22 bp, synthetic construct
  misc_feature 1..22: note = chemically synthesized
  source 1..22: mol_type = other DNA
cattagctcttctcctttataa

SEQ ID NO: 30843 - DNA, 22 bp, synthetic construct
  misc_feature 1..22: note = chemically synthesized
  source 1..22: mol_type = other DNA
gctcttctcctttataaattaa

SEQ ID NO: 30844 - DNA, 22 bp, synthetic construct
  misc_feature 1..22: note = chemically synthesized
  source 1..22: mol_type = other DNA
ttctcctttataaattaatgaa

SEQ ID NO: 30845 - DNA, 22 bp, synthetic construct
  misc_feature 1..22: note = chemically synthesized
  source 1..22: mol_type = other DNA
ctcctttataaattaatgaatc

SEQ ID NO: 30846 - DNA, 22 bp, synthetic construct
  misc_feature 1..22: note = chemically synthesized
  source 1..22: mol_type = other DNA
tcctttataaattaatgaatcc

SEQ ID NO: 30847 - DNA, 22 bp, synthetic construct
  misc_feature 1..22: note = chemically synthesized
  source 1..22: mol_type = other DNA
ctttataaattaatgaatccta

SEQ ID NO: 30848 - DNA, 22 bp, synthetic construct
  misc_feature 1..22: note = chemically synthesized
  source 1..22: mol_type = other DNA
tataaattaatgaatcctattg

SEQ ID NO: 30849 - DNA, 22 bp, synthetic construct
  misc_feature 1..22: note = chemically synthesized
  source 1..22: mol_type = other DNA
ataaattaatgaatcctattgg

SEQ ID NO: 30850 - DNA, 22 bp, synthetic construct
  misc_feature 1..22: note = chemically synthesized
  source 1..22: mol_type = other DNA
taaattaatgaatcctattggt

SEQ ID NO: 30851 - DNA, 22 bp, synthetic construct
  misc_feature 1..22: note = chemically synthesized
  source 1..22: mol_type = other DNA
atgaatcctattggtaccatat

SEQ ID NO: 30852 - DNA, 22 bp, synthetic construct
  misc_feature 1..22: note = chemically synthesized
  source 1..22: mol_type = other DNA
ttggtaccatataatagcatca

SEQ ID NO: 30853 - DNA, 22 bp, synthetic construct
  misc_feature 1..22: note = chemically synthesized
  source 1..22: mol_type = other DNA
gtaccatataatagcatcaaca

SEQ ID NO: 30854 - DNA, 22 bp, synthetic construct
  misc_feature 1..22: note = chemically synthesized
  source 1..22: mol_type = other DNA
gccttttgtgtctcgcctttca

SEQ ID NO: 30855 - DNA, 22 bp, synthetic construct
  misc_feature 1..22: note = chemically synthesized
  source 1..22: mol_type = other DNA
ccttttgtgtctcgcctttcaa

SEQ ID NO: 30856 - DNA, 22 bp, synthetic construct
  misc_feature 1..22: note = chemically synthesized
  source 1..22: mol_type = other DNA
ttgtgtctcgcctttcaaaggg

SEQ ID NO: 30857 - DNA, 22 bp, synthetic construct
  misc_feature 1..22: note = chemically synthesized
  source 1..22: mol_type = other DNA
tgtgtctcgcctttcaaagggc

SEQ ID NO: 30858 - DNA, 22 bp, synthetic construct
  misc_feature 1..22: note = chemically synthesized
  source 1..22: mol_type = other DNA
gtgtctcgcctttcaaagggca

SEQ ID NO: 30859 - DNA, 22 bp, synthetic construct
  misc_feature 1..22: note = chemically synthesized
  source 1..22: mol_type = other DNA
tgtctcgcctttcaaagggcaa

SEQ ID NO: 30860 - DNA, 22 bp, synthetic construct
  misc_feature 1..22: note = chemically synthesized
  source 1..22: mol_type = other DNA
gcctttcaaagggcaattttcc

SEQ ID NO: 30861 - DNA, 22 bp, synthetic construct
  misc_feature 1..22: note = chemically synthesized
  source 1..22: mol_type = other DNA
tcaaagggcaattttccaaaaa

SEQ ID NO: 30862 - DNA, 22 bp, synthetic construct
  misc_feature 1..22: note = chemically synthesized
  source 1..22: mol_type = other DNA
caaagggcaattttccaaaaag

SEQ ID NO: 30863 - DNA, 22 bp, synthetic construct
  misc_feature 1..22: note = chemically synthesized
  source 1..22: mol_type = other DNA
aaagggcaattttccaaaaagt

SEQ ID NO: 30864 - DNA, 22 bp, synthetic construct
  misc_feature 1..22: note = chemically synthesized
  source 1..22: mol_type = other DNA
tccaaaaagtatattttgcatg

SEQ ID NO: 30865 - DNA, 22 bp, synthetic construct
  misc_feature 1..22: note = chemically synthesized
  source 1..22: mol_type = other DNA
ccaaaaagtatattttgcatgg

SEQ ID NO: 30866 - DNA, 22 bp, synthetic construct
  misc_feature 1..22: note = chemically synthesized
  source 1..22: mol_type = other DNA
caaaaagtatattttgcatggc

SEQ ID NO: 30867 - DNA, 22 bp, synthetic construct
  misc_feature 1..22: note = chemically synthesized
  source 1..22: mol_type = other DNA
tgcatggctcaggctaaaagta

SEQ ID NO: 30868 - DNA, 22 bp, synthetic construct
  misc_feature 1..22: note = chemically synthesized
  source 1..22: mol_type = other DNA
gcatggctcaggctaaaagtaa

SEQ ID NO: 30869 - DNA, 22 bp, synthetic construct
  misc_feature 1..22: note = chemically synthesized
  source 1..22: mol_type = other DNA
catggctcaggctaaaagtaat

SEQ ID NO: 30870 - DNA, 22 bp, synthetic construct
  misc_feature 1..22: note = chemically synthesized
  source 1..22: mol_type = other DNA
aggctaaaagtaatgtctccag

SEQ ID NO: 30871 - DNA, 22 bp, synthetic construct
  misc_feature 1..22: note = chemically synthesized
  source 1..22: mol_type = other DNA
aaagtaatgtctccagatgaag

SEQ ID NO: 30872 - DNA, 22 bp, synthetic construct
  misc_feature 1..22: note = chemically synthesized
  source 1..22: mol_type = other DNA
cagatgaagttctactttgtga

SEQ ID NO: 30873 - DNA, 22 bp, synthetic construct
  misc_feature 1..22: note = chemically synthesized
  source 1..22: mol_type = other DNA
tactttgtgaccattgattgtg

SEQ ID NO: 30874 - DNA, 22 bp, synthetic construct
  misc_feature 1..22: note = chemically synthesized
  source 1..22: mol_type = other DNA
ctttgtgaccattgattgtgac

SEQ ID NO: 30875 - DNA, 22 bp, synthetic construct
  misc_feature 1..22: note = chemically synthesized
  source 1..22: mol_type = other DNA
tgtgaccattgattgtgactat

SEQ ID NO: 30876 - DNA, 22 bp, synthetic construct
  misc_feature 1..22: note = chemically synthesized
  source 1..22: mol_type = other DNA
gtgaccattgattgtgactatt

SEQ ID NO: 30877 - DNA, 22 bp, synthetic construct
  misc_feature 1..22: note = chemically synthesized
  source 1..22: mol_type = other DNA
tgaccattgattgtgactattg

SEQ ID NO: 30878 - DNA, 22 bp, synthetic construct
  misc_feature 1..22: note = chemically synthesized
  source 1..22: mol_type = other DNA
attgtgactattgataagattt

SEQ ID NO: 30879 - DNA, 22 bp, synthetic construct
  misc_feature 1..22: note = chemically synthesized
  source 1..22: mol_type = other DNA
tgactattgataagatttacta

SEQ ID NO: 30880 - DNA, 22 bp, synthetic construct
  misc_feature 1..22: note = chemically synthesized
  source 1..22: mol_type = other DNA
ttgataagatttactatgtaaa

SEQ ID NO: 30881 - DNA, 22 bp, synthetic construct
  misc_feature 1..22: note = chemically synthesized
  source 1..22: mol_type = other DNA
ataagatttactatgtaaagta

SEQ ID NO: 30882 - DNA, 22 bp, synthetic construct
  misc_feature 1..22: note = chemically synthesized
  source 1..22: mol_type = other DNA
actatgtaaagtataagttact

SEQ ID NO: 30883 - DNA, 22 bp, synthetic construct
  misc_feature 1..22: note = chemically synthesized
  source 1..22: mol_type = other DNA
ctatgtaaagtataagttactg

SEQ ID NO: 30884 - DNA, 22 bp, synthetic construct
  misc_feature 1..22: note = chemically synthesized
  source 1..22: mol_type = other DNA
tgtaaagtataagttactggaa

SEQ ID NO: 30885 - DNA, 22 bp, synthetic construct
  misc_feature 1..22: note = chemically synthesized
  source 1..22: mol_type = other DNA
ctggaataatacatttaagaaa

SEQ ID NO: 30886 - DNA, 22 bp, synthetic construct
  misc_feature 1..22: note = chemically synthesized
  source 1..22: mol_type = other DNA
gaataatacatttaagaaatat

SEQ ID NO: 30887 - DNA, 22 bp, synthetic construct
  misc_feature 1..22: note = chemically synthesized
  source 1..22: mol_type = other DNA
aagaaatatagtagctattaaa

SEQ ID NO: 30888 - DNA, 22 bp, synthetic construct
  misc_feature 1..22: note = chemically synthesized
  source 1..22: mol_type = other DNA
agaaatatagtagctattaaaa

SEQ ID NO: 30889 - DNA, 22 bp, synthetic construct
  misc_feature 1..22: note = chemically synthesized
  source 1..22: mol_type = other DNA
ttaaaacctgtagtctgatgaa

SEQ ID NO: 30890 - DNA, 22 bp, synthetic construct
  misc_feature 1..22: note = chemically synthesized
  source 1..22: mol_type = other DNA
aaacctgtagtctgatgaaatg

SEQ ID NO: 30891 - DNA, 22 bp, synthetic construct
  misc_feature 1..22: note = chemically synthesized
  source 1..22: mol_type = other DNA
tagtctgatgaaatggaatatg

SEQ ID NO: 30892 - DNA, 22 bp, synthetic construct
  misc_feature 1..22: note = chemically synthesized
  source 1..22: mol_type = other DNA
atgaaatggaatatgttttgaa

SEQ ID NO: 30893 - DNA, 22 bp, synthetic construct
  misc_feature 1..22: note = chemically synthesized
  source 1..22: mol_type = other DNA
tgaaagacagcagtgaaaaatg

SEQ ID NO: 30894 - DNA, 22 bp, synthetic construct
  misc_feature 1..22: note = chemically synthesized
  source 1..22: mol_type = other DNA
gaaagacagcagtgaaaaatga

SEQ ID NO: 30895 - DNA, 22 bp, synthetic construct
  misc_feature 1..22: note = chemically synthesized
  source 1..22: mol_type = other DNA
aaagacagcagtgaaaaatgag

SEQ ID NO: 30896 - DNA, 22 bp, synthetic construct
  misc_feature 1..22: note = chemically synthesized
  source 1..22: mol_type = other DNA
ctttttgcaattgagttgaaga

SEQ ID NO: 30897 - DNA, 22 bp, synthetic construct
  misc_feature 1..22: note = chemically synthesized
  source 1..22: mol_type = other DNA
tttgcaattgagttgaagattg

SEQ ID NO: 30898 - DNA, 22 bp, synthetic construct
  misc_feature 1..22: note = chemically synthesized
  source 1..22: mol_type = other DNA
ttgcaattgagttgaagattga

SEQ ID NO: 30899 - DNA, 22 bp, synthetic construct
  misc_feature 1..22: note = chemically synthesized
  source 1..22: mol_type = other DNA
tgcaattgagttgaagattgat

SEQ ID NO: 30900 - DNA, 22 bp, synthetic construct
  misc_feature 1..22: note = chemically synthesized
  source 1..22: mol_type = other DNA
gcaattgagttgaagattgatg

SEQ ID NO: 30901 - DNA, 22 bp, synthetic construct
  misc_feature 1..22: note = chemically synthesized
  source 1..22: mol_type = other DNA
caattgagttgaagattgatgc

SEQ ID NO: 30902 - DNA, 22 bp, synthetic construct
  misc_feature 1..22: note = chemically synthesized
  source 1..22: mol_type = other DNA
agttgaagattgatgccaggat

SEQ ID NO: 30903 - DNA, 22 bp, synthetic construct
  misc_feature 1..22: note = chemically synthesized
  source 1..22: mol_type = other DNA
aagattgatgccaggatcttat

SEQ ID NO: 30904 - DNA, 22 bp, synthetic construct
  misc_feature 1..22: note = chemically synthesized
  source 1..22: mol_type = other DNA
atgccaggatcttattacctcc

SEQ ID NO: 30905 - DNA, 22 bp, synthetic construct
  misc_feature 1..22: note = chemically synthesized
  source 1..22: mol_type = other DNA
attacctccaggatttcacaaa

SEQ ID NO: 30906 - DNA, 22 bp, synthetic construct
  misc_feature 1..22: note = chemically synthesized
  source 1..22: mol_type = other DNA
ttacctccaggatttcacaaag

SEQ ID NO: 30907 - DNA, 22 bp, synthetic construct
  misc_feature 1..22: note = chemically synthesized
  source 1..22: mol_type = other DNA
cctccaggatttcacaaaggat

SEQ ID NO: 30908 - DNA, 22 bp, synthetic construct
  misc_feature 1..22: note = chemically synthesized
  source 1..22: mol_type = other DNA
caggatttcacaaaggatttct

SEQ ID NO: 30909 - DNA, 22 bp, synthetic construct
  misc_feature 1..22: note = chemically synthesized
  source 1..22: mol_type = other DNA
cacaaaggatttcttgagtcat

SEQ ID NO: 30910 - DNA, 22 bp, synthetic construct
  misc_feature 1..22: note = chemically synthesized
  source 1..22: mol_type = other DNA
acaaaggatttcttgagtcatc

SEQ ID NO: 30911 - DNA, 22 bp, synthetic construct
  misc_feature 1..22: note = chemically synthesized
  source 1..22: mol_type = other DNA
cttgagtcatccccttgctcta

SEQ ID NO: 30912 - DNA, 22 bp, synthetic construct
  misc_feature 1..22: note = chemically synthesized
  source 1..22: mol_type = other DNA
ttgagtcatccccttgctctag

SEQ ID NO: 30913 - DNA, 22 bp, synthetic construct
  misc_feature 1..22: note = chemically synthesized
  source 1..22: mol_type = other DNA
gagtcatccccttgctctagct

SEQ ID NO: 30914 - DNA, 22 bp, synthetic construct
  misc_feature 1..22: note = chemically synthesized
  source 1..22: mol_type = other DNA
agtcatccccttgctctagctc

SEQ ID NO: 30915 - DNA, 22 bp, synthetic construct
  misc_feature 1..22: note = chemically synthesized
  source 1..22: mol_type = other DNA
gctctagctcatgaacaaagta

SEQ ID NO: 30916 - DNA, 22 bp, synthetic construct
  misc_feature 1..22: note = chemically synthesized
  source 1..22: mol_type = other DNA
ctctagctcatgaacaaagtat

SEQ ID NO: 30917 - DNA, 22 bp, synthetic construct
  misc_feature 1..22: note = chemically synthesized
  source 1..22: mol_type = other DNA
tagctcatgaacaaagtattgc

SEQ ID NO: 30918 - DNA, 22 bp, synthetic construct
  misc_feature 1..22: note = chemically synthesized
  source 1..22: mol_type = other DNA
gctcatgaacaaagtattgctc

SEQ ID NO: 30919 - DNA, 22 bp, synthetic construct
  misc_feature 1..22: note = chemically synthesized
  source 1..22: mol_type = other DNA
atgaacaaagtattgctcaagt

SEQ ID NO: 30920 - DNA, 22 bp, synthetic construct
  misc_feature 1..22: note = chemically synthesized
  source 1..22: mol_type = other DNA
ctcaagtaatcgacagattatt

SEQ ID NO: 30921 - DNA, 22 bp, synthetic construct
  misc_feature 1..22: note = chemically synthesized
  source 1..22: mol_type = other DNA
aagtaatcgacagattatttgt

SEQ ID NO: 30922 - DNA, 22 bp, synthetic construct
  misc_feature 1..22: note = chemically synthesized
  source 1..22: mol_type = other DNA
tttgtgtattctcacatgtgat

SEQ ID NO: 30923 - DNA, 22 bp, synthetic construct
  misc_feature 1..22: note = chemically synthesized
  source 1..22: mol_type = other DNA
gtgtattctcacatgtgattat

SEQ ID NO: 30924 - DNA, 22 bp, synthetic construct
  misc_feature 1..22: note = chemically synthesized
  source 1..22: mol_type = other DNA
tgtattctcacatgtgattatt

SEQ ID NO: 30925 - DNA, 22 bp, synthetic construct
  misc_feature 1..22: note = chemically synthesized
  source 1..22: mol_type = other DNA
tcacatgtgattattatttagt

SEQ ID NO: 30926 - DNA, 22 bp, synthetic construct
  misc_feature 1..22: note = chemically synthesized
  source 1..22: mol_type = other DNA
acatgtgattattatttagtgc

SEQ ID NO: 30927 - DNA, 22 bp, synthetic construct
  misc_feature 1..22: note = chemically synthesized
  source 1..22: mol_type = other DNA
ttatttagtgctgtcacgggaa

SEQ ID NO: 30928 - DNA, 22 bp, synthetic construct
  misc_feature 1..22: note = chemically synthesized
  source 1..22: mol_type = other DNA
tttagtgctgtcacgggaaata

SEQ ID NO: 30929 - DNA, 22 bp, synthetic construct
  misc_feature 1..22: note = chemically synthesized
  source 1..22: mol_type = other DNA
agtgctgtcacgggaaatatcc

SEQ ID NO: 30930 - DNA, 22 bp, synthetic construct
  misc_feature 1..22: note = chemically synthesized
  source 1..22: mol_type = other DNA
gtgctgtcacgggaaatatcct

SEQ ID NO: 30931 - DNA, 22 bp, synthetic construct
  misc_feature 1..22: note = chemically synthesized
  source 1..22: mol_type = other DNA
tcacgggaaatatcctgcctaa

SEQ ID NO: 30932 - DNA, 22 bp, synthetic construct
  misc_feature 1..22: note = chemically synthesized
  source 1..22: mol_type = other DNA
cctaagtttactggaggtcttc

SEQ ID NO: 30933 - DNA, 22 bp, synthetic construct
  misc_feature 1..22: note = chemically synthesized
  source 1..22: mol_type = other DNA
agtttactggaggtcttcctcc

SEQ ID NO: 30934 - DNA, 22 bp, synthetic construct
  misc_feature 1..22: note = chemically synthesized
  source 1..22: mol_type = other DNA
actggaggtcttcctcccctta

SEQ ID NO: 30935 - DNA, 22 bp, synthetic construct
  misc_feature 1..22: note = chemically synthesized
  source 1..22: mol_type = other DNA
ctggaggtcttcctccccttac

SEQ ID NO: 30936 - DNA, 22 bp, synthetic construct
  misc_feature 1..22: note = chemically synthesized
  source 1..22: mol_type = other DNA
gaggtcttcctccccttacccc

SEQ ID NO: 30937 - DNA, 22 bp, synthetic construct
  misc_feature 1..22: note = chemically synthesized
  source 1..22: mol_type = other DNA
cctccccttacccctccctatg

SEQ ID NO: 30938 - DNA, 22 bp, synthetic construct
  misc_feature 1..22: note = chemically synthesized
  source 1..22: mol_type = other DNA
ctccccttacccctccctatgt

SEQ ID NO: 30939 - DNA, 22 bp, synthetic construct
  misc_feature 1..22: note = chemically synthesized
  source 1..22: mol_type = other DNA
cccttacccctccctatgtcct

SEQ ID NO: 30940 - DNA, 22 bp, synthetic construct
  misc_feature 1..22: note = chemically synthesized
  source 1..22: mol_type = other DNA
acccctccctatgtcctcctac

SEQ ID NO: 30941 - DNA, 22 bp, synthetic construct
  misc_feature 1..22: note = chemically synthesized
  source 1..22: mol_type = other DNA
cccctccctatgtcctcctacc

SEQ ID NO: 30942 - DNA, 22 bp, synthetic construct
  misc_feature 1..22: note = chemically synthesized
  source 1..22: mol_type = other DNA
cctatgtcctcctacctggtta

SEQ ID NO: 30943 - DNA, 22 bp, synthetic construct
  misc_feature 1..22: note = chemically synthesized
  source 1..22: mol_type = other DNA
tgtcctcctacctggttatcct

SEQ ID NO: 30944 - DNA, 22 bp, synthetic construct
  misc_feature 1..22: note = chemically synthesized
  source 1..22: mol_type = other DNA
ctacctggttatccttttcaat

SEQ ID NO: 30945 - DNA, 22 bp, synthetic construct
  misc_feature 1..22: note = chemically synthesized
  source 1..22: mol_type = other DNA
cctggttatccttttcaatcct

SEQ ID NO: 30946 - DNA, 22 bp, synthetic construct
  misc_feature 1..22: note = chemically synthesized
  source 1..22: mol_type = other DNA
gttatccttttcaatcctatta

SEQ ID NO: 30947 - DNA, 22 bp, synthetic construct
  misc_feature 1..22: note = chemically synthesized
  source 1..22: mol_type = other DNA
tccttttcaatcctattactct

SEQ ID NO: 30948 - DNA, 22 bp, synthetic construct
  misc_feature 1..22: note = chemically synthesized
  source 1..22: mol_type = other DNA
ttcaatcctattactctttcct

SEQ ID NO: 30949 - DNA, 22 bp, synthetic construct
  misc_feature 1..22: note = chemically synthesized
  source 1..22: mol_type = other DNA
tcaatcctattactctttcctt

SEQ ID NO: 30950 - DNA, 22 bp, synthetic construct
  misc_feature 1..22: note = chemically synthesized
  source 1..22: mol_type = other DNA
caatcctattactctttccttg

SEQ ID NO: 30951 - DNA, 22 bp, synthetic construct
  misc_feature 1..22: note = chemically synthesized
  source 1..22: mol_type = other DNA
aatcctattactctttccttgc

SEQ ID NO: 30952 - DNA, 22 bp, synthetic construct
  misc_feature 1..22: note = chemically synthesized
  source 1..22: mol_type = other DNA
ttactctttccttgcacactct

SEQ ID NO: 30953 - DNA, 22 bp, synthetic construct
  misc_feature 1..22: note = chemically synthesized
  source 1..22: mol_type = other DNA
ctctttccttgcacactctact

SEQ ID NO: 30954 - DNA, 22 bp, synthetic construct
  misc_feature 1..22: note = chemically synthesized
  source 1..22: mol_type = other DNA
tttccttgcacactctactcca

SEQ ID NO: 30955 - DNA, 22 bp, synthetic construct
  misc_feature 1..22: note = chemically synthesized
  source 1..22: mol_type = other DNA
tccttgcacactctactccagc

SEQ ID NO: 30956 - DNA, 22 bp, synthetic construct
  misc_feature 1..22: note = chemically synthesized
  source 1..22: mol_type = other DNA
ccttgcacactctactccagct

SEQ ID NO: 30957 - DNA, 22 bp, synthetic construct
  misc_feature 1..22: note = chemically synthesized
  source 1..22: mol_type = other DNA
cttgcacactctactccagctt

SEQ ID NO: 30958 - DNA, 22 bp, synthetic construct
  misc_feature 1..22: note = chemically synthesized
  source 1..22: mol_type = other DNA
gcacactctactccagcttagg

SEQ ID NO: 30959 - DNA, 22 bp, synthetic construct
  misc_feature 1..22: note = chemically synthesized
  source 1..22: mol_type = other DNA
cacactctactccagcttaggg

SEQ ID NO: 30960 - DNA, 22 bp, synthetic construct
  misc_feature 1..22: note = chemically synthesized
  source 1..22: mol_type = other DNA
tactccagcttagggcctgggc

SEQ ID NO: 30961 - DNA, 22 bp, synthetic construct
  misc_feature 1..22: note = chemically synthesized
  source 1..22: mol_type = other DNA
ctccagcttagggcctgggctc

SEQ ID NO: 30962 - DNA, 22 bp, synthetic construct
  misc_feature 1..22: note = chemically synthesized
  source 1..22: mol_type = other DNA
cagcttagggcctgggctctga

SEQ ID NO: 30963 - DNA, 22 bp, synthetic construct
  misc_feature 1..22: note = chemically synthesized
  source 1..22: mol_type = other DNA
agggcctgggctctgaccatta

SEQ ID NO: 30964 - DNA, 22 bp, synthetic construct
  misc_feature 1..22: note = chemically synthesized
  source 1..22: mol_type = other DNA
gggcctgggctctgaccattac

SEQ ID NO: 30965 - DNA, 22 bp, synthetic construct
  misc_feature 1..22: note = chemically synthesized
  source 1..22: mol_type = other DNA
ggctctgaccattacctctgcc

SEQ ID NO: 30966 - DNA, 22 bp, synthetic construct
  misc_feature 1..22: note = chemically synthesized
  source 1..22: mol_type = other DNA
tgaccattacctctgcctaaaa

SEQ ID NO: 30967 - DNA, 22 bp, synthetic construct
  misc_feature 1..22: note = chemically synthesized
  source 1..22: mol_type = other DNA
accattacctctgcctaaaaat

SEQ ID NO: 30968 - DNA, 22 bp, synthetic construct
  misc_feature 1..22: note = chemically synthesized
  source 1..22: mol_type = other DNA
cctctgcctaaaaattcctcct

SEQ ID NO: 30969 - DNA, 22 bp, synthetic construct
  misc_feature 1..22: note = chemically synthesized
  source 1..22: mol_type = other DNA
tgcctaaaaattcctcctcatg

SEQ ID NO: 30970 - DNA, 22 bp, synthetic construct
  misc_feature 1..22: note = chemically synthesized
  source 1..22: mol_type = other DNA
cctaaaaattcctcctcatgac

SEQ ID NO: 30971 - DNA, 22 bp, synthetic construct
  misc_feature 1..22: note = chemically synthesized
  source 1..22: mol_type = other DNA
aaaattcctcctcatgacatcc

SEQ ID NO: 30972 - DNA, 22 bp, synthetic construct
  misc_feature 1..22: note = chemically synthesized
  source 1..22: mol_type = other DNA
ctcctcatgacatccatttgcc

SEQ ID NO: 30973 - DNA, 22 bp, synthetic construct
  misc_feature 1..22: note = chemically synthesized
  source 1..22: mol_type = other DNA
ctcatgacatccatttgcccaa

SEQ ID NO: 30974 - DNA, 22 bp, synthetic construct
  misc_feature 1..22: note = chemically synthesized
  source 1..22: mol_type = other DNA
atgacatccatttgcccaattt

SEQ ID NO: 30975 - DNA, 22 bp, synthetic construct
  misc_feature 1..22: note = chemically synthesized
  source 1..22: mol_type = other DNA
gcccaatttcttcaccctttta

SEQ ID NO: 30976 - DNA, 22 bp, synthetic construct
  misc_feature 1..22: note = chemically synthesized
  source 1..22: mol_type = other DNA
cccaatttcttcacccttttaa

SEQ ID NO: 30977 - DNA, 22 bp, synthetic construct
  misc_feature 1..22: note = chemically synthesized
  source 1..22: mol_type = other DNA
cttcacccttttaattacccca

SEQ ID NO: 30978 - DNA, 22 bp, synthetic construct
  misc_feature 1..22: note = chemically synthesized
  source 1..22: mol_type = other DNA
ttcacccttttaattaccccat

SEQ ID NO: 30979 - DNA, 22 bp, synthetic construct
  misc_feature 1..22: note = chemically synthesized
  source 1..22: mol_type = other DNA
cacccttttaattaccccatta

SEQ ID NO: 30980 - DNA, 22 bp, synthetic construct
  misc_feature 1..22: note = chemically synthesized
  source 1..22: mol_type = other DNA
acccttttaattaccccattaa

SEQ ID NO: 30981 - DNA, 22 bp, synthetic construct
  misc_feature 1..22: note = chemically synthesized
  source 1..22: mol_type = other DNA
ttaattaccccattaagtgata

SEQ ID NO: 30982 - DNA, 22 bp, synthetic construct
  misc_feature 1..22: note = chemically synthesized
  source 1..22: mol_type = other DNA
taattaccccattaagtgatat

SEQ ID NO: 30983 - DNA, 22 bp, synthetic construct
  misc_feature 1..22: note = chemically synthesized
  source 1..22: mol_type = other DNA
aattaccccattaagtgatatt

SEQ ID NO: 30984 - DNA, 22 bp, synthetic construct
  misc_feature 1..22: note = chemically synthesized
  source 1..22: mol_type = other DNA
attaccccattaagtgatattt

SEQ ID NO: 30985 - DNA, 22 bp, synthetic construct
  misc_feature 1..22: note = chemically synthesized
  source 1..22: mol_type = other DNA
ccccattaagtgatattttgct

SEQ ID NO: 30986 - DNA, 22 bp, synthetic construct
  misc_feature 1..22: note = chemically synthesized
  source 1..22: mol_type = other DNA
agtgatattttgcttgctcaat

SEQ ID NO: 30987 - DNA, 22 bp, synthetic construct
  misc_feature 1..22: note = chemically synthesized
  source 1..22: mol_type = other DNA
tgcttgctcaatttttgccttt

SEQ ID NO: 30988 - DNA, 22 bp, synthetic construct
  misc_feature 1..22: note = chemically synthesized
  source 1..22: mol_type = other DNA
gcttgctcaatttttgcctttt

SEQ ID NO: 30989 - DNA, 22 bp, synthetic construct
  misc_feature 1..22: note = chemically synthesized
  source 1..22: mol_type = other DNA
cttgctcaatttttgccttttc

SEQ ID NO: 30990 - DNA, 22 bp, synthetic construct
  misc_feature 1..22: note = chemically synthesized
  source 1..22: mol_type = other DNA
gctcaatttttgccttttcaat

SEQ ID NO: 30991 - DNA, 22 bp, synthetic construct
  misc_feature 1..22: note = chemically synthesized
  source 1..22: mol_type = other DNA
ctcaatttttgccttttcaatc

SEQ ID NO: 30992 - DNA, 22 bp, synthetic construct
  misc_feature 1..22: note = chemically synthesized
  source 1..22: mol_type = other DNA
aatttttgccttttcaatcaga

SEQ ID NO: 30993 - DNA, 22 bp, synthetic construct
  misc_feature 1..22: note = chemically synthesized
  source 1..22: mol_type = other DNA
ttgccttttcaatcagatctaa

SEQ ID NO: 30994 - DNA, 22 bp, synthetic construct
  misc_feature 1..22: note = chemically synthesized
  source 1..22: mol_type = other DNA
tgccttttcaatcagatctaat

SEQ ID NO: 30995 - DNA, 22 bp, synthetic construct
  misc_feature 1..22: note = chemically synthesized
  source 1..22: mol_type = other DNA
gccttttcaatcagatctaatt

SEQ ID NO: 30996 - DNA, 22 bp, synthetic construct
  misc_feature 1..22: note = chemically synthesized
  source 1..22: mol_type = other DNA
ccttttcaatcagatctaattt

SEQ ID NO: 30997 - DNA, 22 bp, synthetic construct
  misc_feature 1..22: note = chemically synthesized
  source 1..22: mol_type = other DNA
ttcaatcagatctaatttattt

SEQ ID NO: 30998 - DNA, 22 bp, synthetic construct
  misc_feature 1..22: note = chemically synthesized
  source 1..22: mol_type = other DNA
tcaatcagatctaatttatttt

SEQ ID NO: 30999 - DNA, 22 bp, synthetic construct
  misc_feature 1..22: note = chemically synthesized
  source 1..22: mol_type = other DNA
caatcagatctaatttatttta

SEQ ID NO: 31000 - DNA, 22 bp, synthetic construct
  misc_feature 1..22: note = chemically synthesized
  source 1..22: mol_type = other DNA
aatcagatctaatttattttat

SEQ ID NO: 31001 - DNA, 22 bp, synthetic construct
  misc_feature 1..22: note = chemically synthesized
  source 1..22: mol_type = other DNA
atttattttatatttttaaaat

SEQ ID NO: 31002 - DNA, 22 bp, synthetic construct
  misc_feature 1..22: note = chemically synthesized
  source 1..22: mol_type = other DNA
attttatatttttaaaatttat

SEQ ID NO: 31003 - DNA, 22 bp, synthetic construct
  misc_feature 1..22: note = chemically synthesized
  source 1..22: mol_type = other DNA
ttttatatttttaaaatttatt

SEQ ID NO: 31004 - DNA, 22 bp, synthetic construct
  misc_feature 1..22: note = chemically synthesized
  source 1..22: mol_type = other DNA
tatatttttaaaatttatttat

SEQ ID NO: 31005 - DNA, 22 bp, synthetic construct
  misc_feature 1..22: note = chemically synthesized
  source 1..22: mol_type = other DNA
atatttttaaaatttatttata

SEQ ID NO: 31006 - DNA, 22 bp, synthetic construct
  misc_feature 1..22: note = chemically synthesized
  source 1..22: mol_type = other DNA
tatttttaaaatttatttatat

SEQ ID NO: 31007 - DNA, 22 bp, synthetic construct
  misc_feature 1..22: note = chemically synthesized
  source 1..22: mol_type = other DNA
ttaaaatttatttatatatatt

SEQ ID NO: 31008 - DNA, 22 bp, synthetic construct
  misc_feature 1..22: note = chemically synthesized
  source 1..22: mol_type = other DNA
taaaatttatttatatatattt

SEQ ID NO: 31009 - DNA, 22 bp, synthetic construct
  misc_feature 1..22: note = chemically synthesized
  source 1..22: mol_type = other DNA
aaaatttatttatatatattta

SEQ ID NO: 31010 - DNA, 22 bp, synthetic construct
  misc_feature 1..22: note = chemically synthesized
  source 1..22: mol_type = other DNA
aaatttatttatatatatttag

SEQ ID NO: 31011 - DNA, 22 bp, synthetic construct
  misc_feature 1..22: note = chemically synthesized
  source 1..22: mol_type = other DNA
atttatatatatttagaaggta

SEQ ID NO: 31012 - DNA, 22 bp, synthetic construct
  misc_feature 1..22: note = chemically synthesized
  source 1..22: mol_type = other DNA
tttatatatatttagaaggtat

SEQ ID NO: 31013 - DNA, 22 bp, synthetic construct
  misc_feature 1..22: note = chemically synthesized
  source 1..22: mol_type = other DNA
atatatatttagaaggtatgta

SEQ ID NO: 31014 - DNA, 22 bp, synthetic construct
  misc_feature 1..22: note = chemically synthesized
  source 1..22: mol_type = other DNA
tatatatttagaaggtatgtac

SEQ ID NO: 31015 - DNA, 22 bp, synthetic construct
  misc_feature 1..22: note = chemically synthesized
  source 1..22: mol_type = other DNA
agaaggtatgtactagttcgtt

SEQ ID NO: 31016 - DNA, 22 bp, synthetic construct
  misc_feature 1..22: note = chemically synthesized
  source 1..22: mol_type = other DNA
gaaggtatgtactagttcgtta

SEQ ID NO: 31017 - DNA, 22 bp, synthetic construct
  misc_feature 1..22: note = chemically synthesized
  source 1..22: mol_type = other DNA
gttcgttatcatgctgcttata

SEQ ID NO: 31018 - DNA, 22 bp, synthetic construct
  misc_feature 1..22: note = chemically synthesized
  source 1..22: mol_type = other DNA
gttatcatgctgcttataaaga

SEQ ID NO: 31019 - DNA, 22 bp, synthetic construct
  misc_feature 1..22: note = chemically synthesized
  source 1..22: mol_type = other DNA
tcatgctgcttataaagacata

SEQ ID NO: 31020 - DNA, 22 bp, synthetic construct
  misc_feature 1..22: note = chemically synthesized
  source 1..22: mol_type = other DNA
cttataaagacatacctgagac

SEQ ID NO: 31021 - DNA, 22 bp, synthetic construct
  misc_feature 1..22: note = chemically synthesized
  source 1..22: mol_type = other DNA
ataaagacatacctgagactgg

SEQ ID NO: 31022 - DNA, 22 bp, synthetic construct
  misc_feature 1..22: note = chemically synthesized
  source 1..22: mol_type = other DNA
taaagacatacctgagactggg

SEQ ID NO: 31023 - DNA, 22 bp, synthetic construct
  misc_feature 1..22: note = chemically synthesized
  source 1..22: mol_type = other DNA
agactgggtaatttataaggaa

SEQ ID NO: 31024 - DNA, 22 bp, synthetic construct
  misc_feature 1..22: note = chemically synthesized
  source 1..22: mol_type = other DNA
ggtaatttataaggaaaaaacg

SEQ ID NO: 31025 - DNA, 22 bp, synthetic construct
  misc_feature 1..22: note = chemically synthesized
  source 1..22: mol_type = other DNA
ataaggaaaaaacgtttaattg

SEQ ID NO: 31026 - DNA, 22 bp, synthetic construct
  misc_feature 1..22: note = chemically synthesized
  source 1..22: mol_type = other DNA
taaggaaaaaacgtttaattgt

SEQ ID NO: 31027 - DNA, 22 bp, synthetic construct
  misc_feature 1..22: note = chemically synthesized
  source 1..22: mol_type = other DNA
aattgtctcacagttccacagg

SEQ ID NO: 31028 - DNA, 22 bp, synthetic construct
  misc_feature 1..22: note = chemically synthesized
  source 1..22: mol_type = other DNA
attgtctcacagttccacaggg

SEQ ID NO: 31029 - DNA, 22 bp, synthetic construct
  misc_feature 1..22: note = chemically synthesized
  source 1..22: mol_type = other DNA
tctcacagttccacagggctgg

SEQ ID NO: 31030 - DNA, 22 bp, synthetic construct
  misc_feature 1..22: note = chemically synthesized
  source 1..22: mol_type = other DNA
acagttccacagggctggggag

SEQ ID NO: 31031 - DNA, 22 bp, synthetic construct
  misc_feature 1..22: note = chemically synthesized
  source 1..22: mol_type = other DNA
cacagggctggggaggcctcgg

SEQ ID NO: 31032 - DNA, 22 bp, synthetic construct
  misc_feature 1..22: note = chemically synthesized
  source 1..22: mol_type = other DNA
gggaggcctcgggaaacttaca

SEQ ID NO: 31033 - DNA, 22 bp, synthetic construct
  misc_feature 1..22: note = chemically synthesized
  source 1..22: mol_type = other DNA
gggaaacttacaatcatggcag

SEQ ID NO: 31034 - DNA, 22 bp, synthetic construct
  misc_feature 1..22: note = chemically synthesized
  source 1..22: mol_type = other DNA
acaatcatggcagaagaagaaa

SEQ ID NO: 31035 - DNA, 22 bp, synthetic construct
  misc_feature 1..22: note = chemically synthesized
  source 1..22: mol_type = other DNA
caatcatggcagaagaagaaac

SEQ ID NO: 31036 - DNA, 22 bp, synthetic construct
  misc_feature 1..22: note = chemically synthesized
  source 1..22: mol_type = other DNA
cttcacatggcagcagcaagta

SEQ ID NO: 31037 - DNA, 22 bp, synthetic construct
  misc_feature 1..22: note = chemically synthesized
  source 1..22: mol_type = other DNA
ttcacatggcagcagcaagtag

SEQ ID NO: 31038 - DNA, 22 bp, synthetic construct
  misc_feature 1..22: note = chemically synthesized
  source 1..22: mol_type = other DNA
cacatggcagcagcaagtagaa

SEQ ID NO: 31039 - DNA, 22 bp, synthetic construct
  misc_feature 1..22: note = chemically synthesized
  source 1..22: mol_type = other DNA
acatggcagcagcaagtagaag

SEQ ID NO: 31040 - DNA, 22 bp, synthetic construct
  misc_feature 1..22: note = chemically synthesized
  source 1..22: mol_type = other DNA
ataaaaccatcagatcttgtaa

SEQ ID NO: 31041 - DNA, 22 bp, synthetic construct
  misc_feature 1..22: note = chemically synthesized
  source 1..22: mol_type = other DNA
taaaaccatcagatcttgtaag

SEQ ID NO: 31042 - DNA, 22 bp, synthetic construct
  misc_feature 1..22: note = chemically synthesized
  source 1..22: mol_type = other DNA
gtaagaactcactatcacgaga

SEQ ID NO: 31043 - DNA, 22 bp, synthetic construct
  misc_feature 1..22: note = chemically synthesized
  source 1..22: mol_type = other DNA
taagaactcactatcacgagaa

SEQ ID NO: 31044 - DNA, 22 bp, synthetic construct
  misc_feature 1..22: note = chemically synthesized
  source 1..22: mol_type = other DNA
actatcacgagaagagcatgag

SEQ ID NO: 31045 - DNA, 22 bp, synthetic construct
  misc_feature 1..22: note = chemically synthesized
  source 1..22: mol_type = other DNA
tcacgagaagagcatgagagta

SEQ ID NO: 31046 - DNA, 22 bp, synthetic construct
  misc_feature 1..22: note = chemically synthesized
  source 1..22: mol_type = other DNA
ctctatgattcaattacctccc

SEQ ID NO: 31047 - DNA, 22 bp, synthetic construct
  misc_feature 1..22: note = chemically synthesized
  source 1..22: mol_type = other DNA
tatgattcaattacctccctcc

SEQ ID NO: 31048 - DNA, 22 bp, synthetic construct
  misc_feature 1..22: note = chemically synthesized
  source 1..22: mol_type = other DNA
tgattcaattacctccctccaa

SEQ ID NO: 31049 - DNA, 22 bp, synthetic construct
  misc_feature 1..22: note = chemically synthesized
  source 1..22: mol_type = other DNA
aattacctccctccaaatccct

SEQ ID NO: 31050 - DNA, 22 bp, synthetic construct
  misc_feature 1..22: note = chemically synthesized
  source 1..22: mol_type = other DNA
cctccctccaaatccctcccac

SEQ ID NO: 31051 - DNA, 22 bp, synthetic construct
  misc_feature 1..22: note = chemically synthesized
  source 1..22: mol_type = other DNA
cctccaaatccctcccacaaca

SEQ ID NO: 31052 - DNA, 22 bp, synthetic construct
  misc_feature 1..22: note = chemically synthesized
  source 1..22: mol_type = other DNA
caaatccctcccacaacacgtg

SEQ ID NO: 31053 - DNA, 22 bp, synthetic construct
  misc_feature 1..22: note = chemically synthesized
  source 1..22: mol_type = other DNA
ccacaacacgtgaggattatgg

SEQ ID NO: 31054 - DNA, 22 bp, synthetic construct
  misc_feature 1..22: note = chemically synthesized
  source 1..22: mol_type = other DNA
tgggaactacaattcaagatga

SEQ ID NO: 31055 - DNA, 22 bp, synthetic construct
  misc_feature 1..22: note = chemically synthesized
  source 1..22: mol_type = other DNA
caattcaagatgagatttgggt

SEQ ID NO: 31056 - DNA, 22 bp, synthetic construct
  misc_feature 1..22: note = chemically synthesized
  source 1..22: mol_type = other DNA
aagatgagatttgggtggggac

SEQ ID NO: 31057 - DNA, 22 bp, synthetic construct
  misc_feature 1..22: note = chemically synthesized
  source 1..22: mol_type = other DNA
gggtggggacacagtcaagctg

SEQ ID NO: 31058 - DNA, 22 bp, synthetic construct
  misc_feature 1..22: note = chemically synthesized
  source 1..22: mol_type = other DNA
ggtggggacacagtcaagctgt

SEQ ID NO: 31059 - DNA, 22 bp, synthetic construct
  misc_feature 1..22: note = chemically synthesized
  source 1..22: mol_type = other DNA
tatcagggtacaagctcgggtt

SEQ ID NO: 31060 - DNA, 22 bp, synthetic construct
  misc_feature 1..22: note = chemically synthesized
  source 1..22: mol_type = other DNA
gggttccttacatatgtatgtt

SEQ ID NO: 31061 - DNA, 22 bp, synthetic construct
  misc_feature 1..22: note = chemically synthesized
  source 1..22: mol_type = other DNA
cttacatatgtatgttgcatag

SEQ ID NO: 31062 - DNA, 22 bp, synthetic construct
  misc_feature 1..22: note = chemically synthesized
  source 1..22: mol_type = other DNA
acatatgtatgttgcatagtgg

SEQ ID NO: 31063 - DNA, 22 bp, synthetic construct
  misc_feature 1..22: note = chemically synthesized
  source 1..22: mol_type = other DNA
catatgtatgttgcatagtggt

SEQ ID NO: 31064 - DNA, 22 bp, synthetic construct
  misc_feature 1..22: note = chemically synthesized
  source 1..22: mol_type = other DNA
catagtggtgaagtctgagctt

SEQ ID NO: 31065 - DNA, 22 bp, synthetic construct
  misc_feature 1..22: note = chemically synthesized
  source 1..22: mol_type = other DNA
agcttttagtggaccatcacct

SEQ ID NO: 31066 - DNA, 22 bp, synthetic construct
  misc_feature 1..22: note = chemically synthesized
  source 1..22: mol_type = other DNA
ttagtggaccatcacctgaaaa

SEQ ID NO: 31067 - DNA, 22 bp, synthetic construct
  misc_feature 1..22: note = chemically synthesized
  source 1..22: mol_type = other DNA
tagtggaccatcacctgaaaag

SEQ ID NO: 31068 - DNA, 22 bp, synthetic construct
  misc_feature 1..22: note = chemically synthesized
  source 1..22: mol_type = other DNA
agtggaccatcacctgaaaagt

SEQ ID NO: 31069 - DNA, 22 bp, synthetic construct
  misc_feature 1..22: note = chemically synthesized
  source 1..22: mol_type = other DNA
gtggaccatcacctgaaaagtg

SEQ ID NO: 31070 - DNA, 22 bp, synthetic construct
  misc_feature 1..22: note = chemically synthesized
  source 1..22: mol_type = other DNA
aaaagtgaatgttgtatccaat

SEQ ID NO: 31071 - DNA, 22 bp, synthetic construct
  misc_feature 1..22: note = chemically synthesized
  source 1..22: mol_type = other DNA
tatccaatccgtagtttttcag

SEQ ID NO: 31072 - DNA, 22 bp, synthetic construct
  misc_feature 1..22: note = chemically synthesized
  source 1..22: mol_type = other DNA
ttcagtcctcaccatactccta

SEQ ID NO: 31073 - DNA, 22 bp, synthetic construct
  misc_feature 1..22: note = chemically synthesized
  source 1..22: mol_type = other DNA
tcagtcctcaccatactcctat

SEQ ID NO: 31074 - DNA, 22 bp, synthetic construct
  misc_feature 1..22: note = chemically synthesized
  source 1..22: mol_type = other DNA
cagtcctcaccatactcctatc

SEQ ID NO: 31075 - DNA, 22 bp, synthetic construct
  misc_feature 1..22: note = chemically synthesized
  source 1..22: mol_type = other DNA
agtcctcaccatactcctatcc

SEQ ID NO: 31076 - DNA, 22 bp, synthetic construct
  misc_feature 1..22: note = chemically synthesized
  source 1..22: mol_type = other DNA
accatactcctatcctcccacc

SEQ ID NO: 31077 - DNA, 22 bp, synthetic construct
  misc_feature 1..22: note = chemically synthesized
  source 1..22: mol_type = other DNA
ctatcctcccacctttctctag

SEQ ID NO: 31078 - DNA, 22 bp, synthetic construct
  misc_feature 1..22: note = chemically synthesized
  source 1..22: mol_type = other DNA
tcctcccacctttctctagtct

SEQ ID NO: 31079 - DNA, 22 bp, synthetic construct
  misc_feature 1..22: note = chemically synthesized
  source 1..22: mol_type = other DNA
ccacctttctctagtctcaagt

SEQ ID NO: 31080 - DNA, 22 bp, synthetic construct
  misc_feature 1..22: note = chemically synthesized
  source 1..22: mol_type = other DNA
tctctagtctcaagtgtctatt

SEQ ID NO: 31081 - DNA, 22 bp, synthetic construct
  misc_feature 1..22: note = chemically synthesized
  source 1..22: mol_type = other DNA
ctctagtctcaagtgtctatta

SEQ ID NO: 31082 - DNA, 22 bp, synthetic construct
  misc_feature 1..22: note = chemically synthesized
  source 1..22: mol_type = other DNA
tctagtctcaagtgtctattat

SEQ ID NO: 31083 - DNA, 22 bp, synthetic construct
  misc_feature 1..22: note = chemically synthesized
  source 1..22: mol_type = other DNA
tagtctcaagtgtctattattt

SEQ ID NO: 31084 - DNA, 22 bp, synthetic construct
  misc_feature 1..22: note = chemically synthesized
  source 1..22: mol_type = other DNA
gtctcaagtgtctattatttca

SEQ ID NO: 31085 - DNA, 22 bp, synthetic construct
  misc_feature 1..22: note = chemically synthesized
  source 1..22: mol_type = other DNA
aagtgtctattatttcattcta

SEQ ID NO: 31086 - DNA, 22 bp, synthetic construct
  misc_feature 1..22: note = chemically synthesized
  source 1..22: mol_type = other DNA
ttatttcattctatatgtctat

SEQ ID NO: 31087 - DNA, 22 bp, synthetic construct
  misc_feature 1..22: note = chemically synthesized
  source 1..22: mol_type = other DNA
tttcattctatatgtctatgct

SEQ ID NO: 31088 - DNA, 22 bp, synthetic construct
  misc_feature 1..22: note = chemically synthesized
  source 1..22: mol_type = other DNA
cattctatatgtctatgcttac

SEQ ID NO: 31089 - DNA, 22 bp, synthetic construct
  misc_feature 1..22: note = chemically synthesized
  source 1..22: mol_type = other DNA
attctatatgtctatgcttact

SEQ ID NO: 31090 - DNA, 22 bp, synthetic construct
  misc_feature 1..22: note = chemically synthesized
  source 1..22: mol_type = other DNA
tatatgtctatgcttactcatc

SEQ ID NO: 31091 - DNA, 22 bp, synthetic construct
  misc_feature 1..22: note = chemically synthesized
  source 1..22: mol_type = other DNA
tatgtctatgcttactcatcgt

SEQ ID NO: 31092 - DNA, 22 bp, synthetic construct
  misc_feature 1..22: note = chemically synthesized
  source 1..22: mol_type = other DNA
tgcttactcatcgtttagctcc

SEQ ID NO: 31093 - DNA, 22 bp, synthetic construct
  misc_feature 1..22: note = chemically synthesized
  source 1..22: mol_type = other DNA
actcatcgtttagctcccactt

SEQ ID NO: 31094 - DNA, 22 bp, synthetic construct
  misc_feature 1..22: note = chemically synthesized
  source 1..22: mol_type = other DNA
ctcatcgtttagctcccacttg

SEQ ID NO: 31095 - DNA, 22 bp, synthetic construct
  misc_feature 1..22: note = chemically synthesized
  source 1..22: mol_type = other DNA
atcgtttagctcccacttggct

SEQ ID NO: 31096 - DNA, 22 bp, synthetic construct
  misc_feature 1..22: note = chemically synthesized
  source 1..22: mol_type = other DNA
agctcccacttggctctcacta

SEQ ID NO: 31097 - DNA, 22 bp, synthetic construct
  misc_feature 1..22: note = chemically synthesized
  source 1..22: mol_type = other DNA
gctcccacttggctctcactaa

SEQ ID NO: 31098 - DNA, 22 bp, synthetic construct
  misc_feature 1..22: note = chemically synthesized
  source 1..22: mol_type = other DNA
ccacttggctctcactaaatga

SEQ ID NO: 31099 - DNA, 22 bp, synthetic construct
  misc_feature 1..22: note = chemically synthesized
  source 1..22: mol_type = other DNA
ggctctcactaaatgagaacat

SEQ ID NO: 31100 - DNA, 22 bp, synthetic construct
  misc_feature 1..22: note = chemically synthesized
  source 1..22: mol_type = other DNA
gctctcactaaatgagaacata

SEQ ID NO: 31101 - DNA, 22 bp, synthetic construct
  misc_feature 1..22: note = chemically synthesized
  source 1..22: mol_type = other DNA
tcactaaatgagaacatactgt

SEQ ID NO: 31102 - DNA, 22 bp, synthetic construct
  misc_feature 1..22: note = chemically synthesized
  source 1..22: mol_type = other DNA
actaaatgagaacatactgtgt

SEQ ID NO: 31103 - DNA, 22 bp, synthetic construct
  misc_feature 1..22: note = chemically synthesized
  source 1..22: mol_type = other DNA
aatgagaacatactgtgtttga

SEQ ID NO: 31104 - DNA, 22 bp, synthetic construct
  misc_feature 1..22: note = chemically synthesized
  source 1..22: mol_type = other DNA
tgtttgactttctgtttctgag

SEQ ID NO: 31105 - DNA, 22 bp, synthetic construct
  misc_feature 1..22: note = chemically synthesized
  source 1..22: mol_type = other DNA
gactttctgtttctgagttatt

SEQ ID NO: 31106 - DNA, 22 bp, synthetic construct
  misc_feature 1..22: note = chemically synthesized
  source 1..22: mol_type = other DNA
actttctgtttctgagttattt

SEQ ID NO: 31107 - DNA, 22 bp, synthetic construct
  misc_feature 1..22: note = chemically synthesized
  source 1..22: mol_type = other DNA
tctgtttctgagttatttcact

SEQ ID NO: 31108 - DNA, 22 bp, synthetic construct
  misc_feature 1..22: note = chemically synthesized
  source 1..22: mol_type = other DNA
ctgtttctgagttatttcactg

SEQ ID NO: 31109 - DNA, 22 bp, synthetic construct
  misc_feature 1..22: note = chemically synthesized
  source 1..22: mol_type = other DNA
tgtttctgagttatttcactga

SEQ ID NO: 31110 - DNA, 22 bp, synthetic construct
  misc_feature 1..22: note = chemically synthesized
  source 1..22: mol_type = other DNA
tttctgagttatttcactgagg

SEQ ID NO: 31111 - DNA, 22 bp, synthetic construct
  misc_feature 1..22: note = chemically synthesized
  source 1..22: mol_type = other DNA
ctgagttatttcactgaggata

SEQ ID NO: 31112 - DNA, 22 bp, synthetic construct
  misc_feature 1..22: note = chemically synthesized
  source 1..22: mol_type = other DNA
tgagttatttcactgaggataa

SEQ ID NO: 31113 - DNA, 22 bp, synthetic construct
  misc_feature 1..22: note = chemically synthesized
  source 1..22: mol_type = other DNA
agttatttcactgaggataatg

SEQ ID NO: 31114 - DNA, 22 bp, synthetic construct
  misc_feature 1..22: note = chemically synthesized
  source 1..22: mol_type = other DNA
tttcactgaggataatgtcctc

SEQ ID NO: 31115 - DNA, 22 bp, synthetic construct
  misc_feature 1..22: note = chemically synthesized
  source 1..22: mol_type = other DNA
cactgaggataatgtcctccag

SEQ ID NO: 31116 - DNA, 22 bp, synthetic construct
  misc_feature 1..22: note = chemically synthesized
  source 1..22: mol_type = other DNA
actgaggataatgtcctccagt

SEQ ID NO: 31117 - DNA, 22 bp, synthetic construct
  misc_feature 1..22: note = chemically synthesized
  source 1..22: mol_type = other DNA
aggataatgtcctccagttcta

SEQ ID NO: 31118 - DNA, 22 bp, synthetic construct
  misc_feature 1..22: note = chemically synthesized
  source 1..22: mol_type = other DNA
cagttctaaccatgtttctaga

SEQ ID NO: 31119 - DNA, 22 bp, synthetic construct
  misc_feature 1..22: note = chemically synthesized
  source 1..22: mol_type = other DNA
taaccatgtttctagagaagac

SEQ ID NO: 31120 - DNA, 22 bp, synthetic construct
  misc_feature 1..22: note = chemically synthesized
  source 1..22: mol_type = other DNA
accatgtttctagagaagacat

SEQ ID NO: 31121 - DNA, 22 bp, synthetic construct
  misc_feature 1..22: note = chemically synthesized
  source 1..22: mol_type = other DNA
ctagagaagacatgatttcatt

SEQ ID NO: 31122 - DNA, 22 bp, synthetic construct
  misc_feature 1..22: note = chemically synthesized
  source 1..22: mol_type = other DNA
tagagaagacatgatttcattc

SEQ ID NO: 31123 - DNA, 22 bp, synthetic construct
  misc_feature 1..22: note = chemically synthesized
  source 1..22: mol_type = other DNA
gagaagacatgatttcattctt

SEQ ID NO: 31124 - DNA, 22 bp, synthetic construct
  misc_feature 1..22: note = chemically synthesized
  source 1..22: mol_type = other DNA
cattcttttttatggctgagta

SEQ ID NO: 31125 - DNA, 22 bp, synthetic construct
  misc_feature 1..22: note = chemically synthesized
  source 1..22: mol_type = other DNA
attcttttttatggctgagtaa

SEQ ID NO: 31126 - DNA, 22 bp, synthetic construct
  misc_feature 1..22: note = chemically synthesized
  source 1..22: mol_type = other DNA
ttttttatggctgagtaatata

SEQ ID NO: 31127 - DNA, 22 bp, synthetic construct
  misc_feature 1..22: note = chemically synthesized
  source 1..22: mol_type = other DNA
ttttatggctgagtaatatata

SEQ ID NO: 31128 - DNA, 22 bp, synthetic construct
  misc_feature 1..22: note = chemically synthesized
  source 1..22: mol_type = other DNA
tttatggctgagtaatatatat

SEQ ID NO: 31129 - DNA, 22 bp, synthetic construct
  misc_feature 1..22: note = chemically synthesized
  source 1..22: mol_type = other DNA
ttatggctgagtaatatatatg

SEQ ID NO: 31130 - DNA, 22 bp, synthetic construct
  misc_feature 1..22: note = chemically synthesized
  source 1..22: mol_type = other DNA
tatggctgagtaatatatatgt

SEQ ID NO: 31131 - DNA, 22 bp, synthetic construct
  misc_feature 1..22: note = chemically synthesized
  source 1..22: mol_type = other DNA
atggctgagtaatatatatgta

SEQ ID NO: 31132 - DNA, 22 bp, synthetic construct
  misc_feature 1..22: note = chemically synthesized
  source 1..22: mol_type = other DNA
tggctgagtaatatatatgtat

SEQ ID NO: 31133 - DNA, 22 bp, synthetic construct
  misc_feature 1..22: note = chemically synthesized
  source 1..22: mol_type = other DNA
agtaatatatatgtatataaat

SEQ ID NO: 31134 - DNA, 22 bp, synthetic construct
  misc_feature 1..22: note = chemically synthesized
  source 1..22: mol_type = other DNA
tctttatccaatcgtccattgg

SEQ ID NO: 31135 - DNA, 22 bp, synthetic construct
  misc_feature 1..22: note = chemically synthesized
  source 1..22: mol_type = other DNA
ctttatccaatcgtccattggt

SEQ ID NO: 31136 - DNA, 22 bp, synthetic construct
  misc_feature 1..22: note = chemically synthesized
  source 1..22: mol_type = other DNA
tttatccaatcgtccattggta

SEQ ID NO: 31137 - DNA, 22 bp, synthetic construct
  misc_feature 1..22: note = chemically synthesized
  source 1..22: mol_type = other DNA
tatccaatcgtccattggtaga

SEQ ID NO: 31138 - DNA, 22 bp, synthetic construct
  misc_feature 1..22: note = chemically synthesized
  source 1..22: mol_type = other DNA
atccaatcgtccattggtagac

SEQ ID NO: 31139 - DNA, 22 bp, synthetic construct
  misc_feature 1..22: note = chemically synthesized
  source 1..22: mol_type = other DNA
tccaatcgtccattggtagaca

SEQ ID NO: 31140 - DNA, 22 bp, synthetic construct
  misc_feature 1..22: note = chemically synthesized
  source 1..22: mol_type = other DNA
gtagacatttaggttgattcca

SEQ ID NO: 31141 - DNA, 22 bp, synthetic construct
  misc_feature 1..22: note = chemically synthesized
  source 1..22: mol_type = other DNA
aggttgattccatatctttgct

SEQ ID NO: 31142 - DNA, 22 bp, synthetic construct
  misc_feature 1..22: note = chemically synthesized
  source 1..22: mol_type = other DNA
ggttgattccatatctttgcta

SEQ ID NO: 31143 - DNA, 22 bp, synthetic construct
  misc_feature 1..22: note = chemically synthesized
  source 1..22: mol_type = other DNA
attccatatctttgctattggg

SEQ ID NO: 31144 - DNA, 22 bp, synthetic construct
  misc_feature 1..22: note = chemically synthesized
  source 1..22: mol_type = other DNA
catatctttgctattgggaaca

SEQ ID NO: 31145 - DNA, 22 bp, synthetic construct
  misc_feature 1..22: note = chemically synthesized
  source 1..22: mol_type = other DNA
tgctattgggaacagtgctact

SEQ ID NO: 31146 - DNA, 22 bp, synthetic construct
  misc_feature 1..22: note = chemically synthesized
  source 1..22: mol_type = other DNA
gctattgggaacagtgctactt

SEQ ID NO: 31147 - DNA, 22 bp, synthetic construct
  misc_feature 1..22: note = chemically synthesized
  source 1..22: mol_type = other DNA
ctattgggaacagtgctacttt

SEQ ID NO: 31148 - DNA, 22 bp, synthetic construct
  misc_feature 1..22: note = chemically synthesized
  source 1..22: mol_type = other DNA
ttgggaacagtgctactttgaa

SEQ ID NO: 31149 - DNA, 22 bp, synthetic construct
  misc_feature 1..22: note = chemically synthesized
  source 1..22: mol_type = other DNA
ggaacagtgctactttgaacat

SEQ ID NO: 31150 - DNA, 22 bp, synthetic construct
  misc_feature 1..22: note = chemically synthesized
  source 1..22: mol_type = other DNA
ctttgaacatactaatgcagat

SEQ ID NO: 31151 - DNA, 22 bp, synthetic construct
  misc_feature 1..22: note = chemically synthesized
  source 1..22: mol_type = other DNA
tgaacatactaatgcagatatc

SEQ ID NO: 31152 - DNA, 22 bp, synthetic construct
  misc_feature 1..22: note = chemically synthesized
  source 1..22: mol_type = other DNA
gaacatactaatgcagatatct

SEQ ID NO: 31153 - DNA, 22 bp, synthetic construct
  misc_feature 1..22: note = chemically synthesized
  source 1..22: mol_type = other DNA
aacatactaatgcagatatctt

SEQ ID NO: 31154 - DNA, 22 bp, synthetic construct
  misc_feature 1..22: note = chemically synthesized
  source 1..22: mol_type = other DNA
atgcagatatcttttttaatat

SEQ ID NO: 31155 - DNA, 22 bp, synthetic construct
  misc_feature 1..22: note = chemically synthesized
  source 1..22: mol_type = other DNA
ttttaatatgatctctttcact

SEQ ID NO: 31156 - DNA, 22 bp, synthetic construct
  misc_feature 1..22: note = chemically synthesized
  source 1..22: mol_type = other DNA
tttaatatgatctctttcactt

SEQ ID NO: 31157 - DNA, 22 bp, synthetic construct
  misc_feature 1..22: note = chemically synthesized
  source 1..22: mol_type = other DNA
ttaatatgatctctttcacttt

SEQ ID NO: 31158 - DNA, 22 bp, synthetic construct
  misc_feature 1..22: note = chemically synthesized
  source 1..22: mol_type = other DNA
taatatgatctctttcactttg

SEQ ID NO: 31159 - DNA, 22 bp, synthetic construct
  misc_feature 1..22: note = chemically synthesized
  source 1..22: mol_type = other DNA
aatatgatctctttcactttgg

SEQ ID NO: 31160 - DNA, 22 bp, synthetic construct
  misc_feature 1..22: note = chemically synthesized
  source 1..22: mol_type = other DNA
atatgatctctttcactttggg

SEQ ID NO: 31161 - DNA, 22 bp, synthetic construct
  misc_feature 1..22: note = chemically synthesized
  source 1..22: mol_type = other DNA
tttcactttgggtccataccca

SEQ ID NO: 31162 - DNA, 22 bp, synthetic construct
  misc_feature 1..22: note = chemically synthesized
  source 1..22: mol_type = other DNA
tcactttgggtccatacccagt

SEQ ID NO: 31163 - DNA, 22 bp, synthetic construct
  misc_feature 1..22: note = chemically synthesized
  source 1..22: mol_type = other DNA
cactttgggtccatacccagta

SEQ ID NO: 31164 - DNA, 22 bp, synthetic construct
  misc_feature 1..22: note = chemically synthesized
  source 1..22: mol_type = other DNA
actttgggtccatacccagtag

SEQ ID NO: 31165 - DNA, 22 bp, synthetic construct
  misc_feature 1..22: note = chemically synthesized
  source 1..22: mol_type = other DNA
tgggtccatacccagtagtggg

SEQ ID NO: 31166 - DNA, 22 bp, synthetic construct
  misc_feature 1..22: note = chemically synthesized
  source 1..22: mol_type = other DNA
gggtccatacccagtagtggga

SEQ ID NO: 31167 - DNA, 22 bp, synthetic construct
  misc_feature 1..22: note = chemically synthesized
  source 1..22: mol_type = other DNA
ggtccatacccagtagtgggat

SEQ ID NO: 31168 - DNA, 22 bp, synthetic construct
  misc_feature 1..22: note = chemically synthesized
  source 1..22: mol_type = other DNA
caggattgaatggtagttctgt

SEQ ID NO: 31169 - DNA, 22 bp, synthetic construct
  misc_feature 1..22: note = chemically synthesized
  source 1..22: mol_type = other DNA
aatggtagttctgtttctagtt

SEQ ID NO: 31170 - DNA, 22 bp, synthetic construct
  misc_feature 1..22: note = chemically synthesized
  source 1..22: mol_type = other DNA
tgtttctagttctttaagaaat

SEQ ID NO: 31171 - DNA, 22 bp, synthetic construct
  misc_feature 1..22: note = chemically synthesized
  source 1..22: mol_type = other DNA
tttctagttctttaagaaatct

SEQ ID NO: 31172 - DNA, 22 bp, synthetic construct
  misc_feature 1..22: note = chemically synthesized
  source 1..22: mol_type = other DNA
ctagttctttaagaaatcttca

SEQ ID NO: 31173 - DNA, 22 bp, synthetic construct
  misc_feature 1..22: note = chemically synthesized
  source 1..22: mol_type = other DNA
tagttctttaagaaatcttcat

SEQ ID NO: 31174 - DNA, 22 bp, synthetic construct
  misc_feature 1..22: note = chemically synthesized
  source 1..22: mol_type = other DNA
gttctttaagaaatcttcatgc

SEQ ID NO: 31175 - DNA, 22 bp, synthetic construct
  misc_feature 1..22: note = chemically synthesized
  source 1..22: mol_type = other DNA
tttaagaaatcttcatgctgtc

SEQ ID NO: 31176 - DNA, 22 bp, synthetic construct
  misc_feature 1..22: note = chemically synthesized
  source 1..22: mol_type = other DNA
taagaaatcttcatgctgtctt

SEQ ID NO: 31177 - DNA, 22 bp, synthetic construct
  misc_feature 1..22: note = chemically synthesized
  source 1..22: mol_type = other DNA
aagaaatcttcatgctgtcttc

SEQ ID NO: 31178 - DNA, 22 bp, synthetic construct
  misc_feature 1..22: note = chemically synthesized
  source 1..22: mol_type = other DNA
agaaatcttcatgctgtcttcc

SEQ ID NO: 31179 - DNA, 22 bp, synthetic construct
  misc_feature 1..22: note = chemically synthesized
  source 1..22: mol_type = other DNA
catgctgtcttccataaagttt

SEQ ID NO: 31180 - DNA, 22 bp, synthetic construct
  misc_feature 1..22: note = chemically synthesized
  source 1..22: mol_type = other DNA
atgctgtcttccataaagtttg

SEQ ID NO: 31181 - DNA, 22 bp, synthetic construct
  misc_feature 1..22: note = chemically synthesized
  source 1..22: mol_type = other DNA
tcttccataaagtttgtactaa

SEQ ID NO: 31182 - DNA, 22 bp, synthetic construct
  misc_feature 1..22: note = chemically synthesized
  source 1..22: mol_type = other DNA
ccataaagtttgtactaattta

SEQ ID NO: 31183 - DNA, 22 bp, synthetic construct
  misc_feature 1..22: note = chemically synthesized
  source 1..22: mol_type = other DNA
cataaagtttgtactaatttac

SEQ ID NO: 31184 - DNA, 22 bp, synthetic construct
  misc_feature 1..22: note = chemically synthesized
  source 1..22: mol_type = other DNA
gtactaatttacattcttacca

SEQ ID NO: 31185 - DNA, 22 bp, synthetic construct
  misc_feature 1..22: note = chemically synthesized
  source 1..22: mol_type = other DNA
tactaatttacattcttaccaa

SEQ ID NO: 31186 - DNA, 22 bp, synthetic construct
  misc_feature 1..22: note = chemically synthesized
  source 1..22: mol_type = other DNA
atttacattcttaccaacagtg

SEQ ID NO: 31187 - DNA, 22 bp, synthetic construct
  misc_feature 1..22: note = chemically synthesized
  source 1..22: mol_type = other DNA
acattcttaccaacagtgtata

SEQ ID NO: 31188 - DNA, 22 bp, synthetic construct
  misc_feature 1..22: note = chemically synthesized
  source 1..22: mol_type = other DNA
cattcttaccaacagtgtataa

SEQ ID NO: 31189 - DNA, 22 bp, synthetic construct
  misc_feature 1..22: note = chemically synthesized
  source 1..22: mol_type = other DNA
ttaccaacagtgtataagcatt

SEQ ID NO: 31190 - DNA, 22 bp, synthetic construct
  misc_feature 1..22: note = chemically synthesized
  source 1..22: mol_type = other DNA
accaacagtgtataagcatttt

SEQ ID NO: 31191 - DNA, 22 bp, synthetic construct
  misc_feature 1..22: note = chemically synthesized
  source 1..22: mol_type = other DNA
ccaacagtgtataagcattttc

SEQ ID NO: 31192 - DNA, 22 bp, synthetic construct
  misc_feature 1..22: note = chemically synthesized
  source 1..22: mol_type = other DNA
tcttgtctccacatcctcacca

SEQ ID NO: 31193 - DNA, 22 bp, synthetic construct
  misc_feature 1..22: note = chemically synthesized
  source 1..22: mol_type = other DNA
cttgtctccacatcctcaccaa

SEQ ID NO: 31194 - DNA, 22 bp, synthetic construct
  misc_feature 1..22: note = chemically synthesized
  source 1..22: mol_type = other DNA
ttgtctccacatcctcaccaac

SEQ ID NO: 31195 - DNA, 22 bp, synthetic construct
  misc_feature 1..22: note = chemically synthesized
  source 1..22: mol_type = other DNA
gtctccacatcctcaccaacat

SEQ ID NO: 31196 - DNA, 22 bp, synthetic construct
  misc_feature 1..22: note = chemically synthesized
  source 1..22: mol_type = other DNA
tctccacatcctcaccaacatc

SEQ ID NO: 31197 - DNA, 22 bp, synthetic construct
  misc_feature 1..22: note = chemically synthesized
  source 1..22: mol_type = other DNA
cacatcctcaccaacatctgct

SEQ ID NO: 31198 - DNA, 22 bp, synthetic construct
  misc_feature 1..22: note = chemically synthesized
  source 1..22: mol_type = other DNA
accaacatctgctgtttttgaa

SEQ ID NO: 31199 - DNA, 22 bp, synthetic construct
  misc_feature 1..22: note = chemically synthesized
  source 1..22: mol_type = other DNA
ctgtttttgaactttataatga

SEQ ID NO: 31200 - DNA, 22 bp, synthetic construct
  misc_feature 1..22: note = chemically synthesized
  source 1..22: mol_type = other DNA
tttttgaactttataatgatag

SEQ ID NO: 31201 - DNA, 22 bp, synthetic construct
  misc_feature 1..22: note = chemically synthesized
  source 1..22: mol_type = other DNA
ttgaactttataatgatagcca

SEQ ID NO: 31202 - DNA, 22 bp, synthetic construct
  misc_feature 1..22: note = chemically synthesized
  source 1..22: mol_type = other DNA
tgaactttataatgatagccat

SEQ ID NO: 31203 - DNA, 22 bp, synthetic construct
  misc_feature 1..22: note = chemically synthesized
  source 1..22: mol_type = other DNA
gaactttataatgatagccatt

SEQ ID NO: 31204 - DNA, 22 bp, synthetic construct
  misc_feature 1..22: note = chemically synthesized
  source 1..22: mol_type = other DNA
aactttataatgatagccattc

SEQ ID NO: 31205 - DNA, 22 bp, synthetic construct
  misc_feature 1..22: note = chemically synthesized
  source 1..22: mol_type = other DNA
tataatgatagccattctgact

SEQ ID NO: 31206 - DNA, 22 bp, synthetic construct
  misc_feature 1..22: note = chemically synthesized
  source 1..22: mol_type = other DNA
ataatgatagccattctgactg

SEQ ID NO: 31207 - DNA, 22 bp, synthetic construct
  misc_feature 1..22: note = chemically synthesized
  source 1..22: mol_type = other DNA
taatgatagccattctgactgg

SEQ ID NO: 31208 - DNA, 22 bp, synthetic construct
  misc_feature 1..22: note = chemically synthesized
  source 1..22: mol_type = other DNA
tgactggcataaggaggtatca

SEQ ID NO: 31209 - DNA, 22 bp, synthetic construct
  misc_feature 1..22: note = chemically synthesized
  source 1..22: mol_type = other DNA
actggcataaggaggtatcata

SEQ ID NO: 31210 - DNA, 22 bp, synthetic construct
  misc_feature 1..22: note = chemically synthesized
  source 1..22: mol_type = other DNA
gcataaggaggtatcatatggt

SEQ ID NO: 31211 - DNA, 22 bp, synthetic construct
  misc_feature 1..22: note = chemically synthesized
  source 1..22: mol_type = other DNA
taatttgcattctctgattatt

SEQ ID NO: 31212 - DNA, 22 bp, synthetic construct
  misc_feature 1..22: note = chemically synthesized
  source 1..22: mol_type = other DNA
aatttgcattctctgattatta

SEQ ID NO: 31213 - DNA, 22 bp, synthetic construct
  misc_feature 1..22: note = chemically synthesized
  source 1..22: mol_type = other DNA
atttgcattctctgattattag

SEQ ID NO: 31214 - DNA, 22 bp, synthetic construct
  misc_feature 1..22: note = chemically synthesized
  source 1..22: mol_type = other DNA
gcattctctgattattagtgat

SEQ ID NO: 31215 - DNA, 22 bp, synthetic construct
  misc_feature 1..22: note = chemically synthesized
  source 1..22: mol_type = other DNA
cattctctgattattagtgatg

SEQ ID NO: 31216 - DNA, 22 bp, synthetic construct
  misc_feature 1..22: note = chemically synthesized
  source 1..22: mol_type = other DNA
tctgattattagtgatgttgaa

SEQ ID NO: 31217 - DNA, 22 bp, synthetic construct
  misc_feature 1..22: note = chemically synthesized
  source 1..22: mol_type = other DNA
tgattattagtgatgttgaact

SEQ ID NO: 31218 - DNA, 22 bp, synthetic construct
  misc_feature 1..22: note = chemically synthesized
  source 1..22: mol_type = other DNA
attattagtgatgttgaacttt

SEQ ID NO: 31219 - DNA, 22 bp, synthetic construct
  misc_feature 1..22: note = chemically synthesized
  source 1..22: mol_type = other DNA
ttagtgatgttgaacttttttt

SEQ ID NO: 31220 - DNA, 22 bp, synthetic construct
  misc_feature 1..22: note = chemically synthesized
  source 1..22: mol_type = other DNA
gtgatgttgaacttttttttga

SEQ ID NO: 31221 - DNA, 22 bp, synthetic construct
  misc_feature 1..22: note = chemically synthesized
  source 1..22: mol_type = other DNA
aacttttttttgacgtttattg

SEQ ID NO: 31222 - DNA, 22 bp, synthetic construct
  misc_feature 1..22: note = chemically synthesized
  source 1..22: mol_type = other DNA
ttttttgacgtttattggccac

SEQ ID NO: 31223 - DNA, 22 bp, synthetic construct
  misc_feature 1..22: note = chemically synthesized
  source 1..22: mol_type = other DNA
tttttgacgtttattggccact

SEQ ID NO: 31224 - DNA, 22 bp, synthetic construct
  misc_feature 1..22: note = chemically synthesized
  source 1..22: mol_type = other DNA
ttttgacgtttattggccactt

SEQ ID NO: 31225 - DNA, 22 bp, synthetic construct
  misc_feature 1..22: note = chemically synthesized
  source 1..22: mol_type = other DNA
tttgacgtttattggccacttg

SEQ ID NO: 31226 - DNA, 22 bp, synthetic construct
  misc_feature 1..22: note = chemically synthesized
  source 1..22: mol_type = other DNA
ttgacgtttattggccacttgt

SEQ ID NO: 31227 - DNA, 22 bp, synthetic construct
  misc_feature 1..22: note = chemically synthesized
  source 1..22: mol_type = other DNA
tgacgtttattggccacttgta

SEQ ID NO: 31228 - DNA, 22 bp, synthetic construct
  misc_feature 1..22: note = chemically synthesized
  source 1..22: mol_type = other DNA
gacgtttattggccacttgtat

SEQ ID NO: 31229 - DNA, 22 bp, synthetic construct
  misc_feature 1..22: note = chemically synthesized
  source 1..22: mol_type = other DNA
acgtttattggccacttgtatg

SEQ ID NO: 31230 - DNA, 22 bp, synthetic construct
  misc_feature 1..22: note = chemically synthesized
  source 1..22: mol_type = other DNA
attggccacttgtatgtcttct

SEQ ID NO: 31231 - DNA, 22 bp, synthetic construct
  misc_feature 1..22: note = chemically synthesized
  source 1..22: mol_type = other DNA
ttggccacttgtatgtcttctt

SEQ ID NO: 31232 - DNA, 22 bp, synthetic construct
  misc_feature 1..22: note = chemically synthesized
  source 1..22: mol_type = other DNA
gccacttgtatgtcttcttttg

SEQ ID NO: 31233 - DNA, 22 bp, synthetic construct
  misc_feature 1..22: note = chemically synthesized
  source 1..22: mol_type = other DNA
gtatgtcttcttttggaaaatg

SEQ ID NO: 31234 - DNA, 22 bp, synthetic construct
  misc_feature 1..22: note = chemically synthesized
  source 1..22: mol_type = other DNA
tatgtcttcttttggaaaatgt

SEQ ID NO: 31235 - DNA, 22 bp, synthetic construct
  misc_feature 1..22: note = chemically synthesized
  source 1..22: mol_type = other DNA
cttttggaaaatgtctgctcag

SEQ ID NO: 31236 - DNA, 22 bp, synthetic construct
  misc_feature 1..22: note = chemically synthesized
  source 1..22: mol_type = other DNA
ttttggaaaatgtctgctcagg

SEQ ID NO: 31237 - DNA, 22 bp, synthetic construct
  misc_feature 1..22: note = chemically synthesized
  source 1..22: mol_type = other DNA
ttggaaaatgtctgctcaggac

SEQ ID NO: 31238 - DNA, 22 bp, synthetic construct
  misc_feature 1..22: note = chemically synthesized
  source 1..22: mol_type = other DNA
tggaaaatgtctgctcaggacc

SEQ ID NO: 31239 - DNA, 22 bp, synthetic construct
  misc_feature 1..22: note = chemically synthesized
  source 1..22: mol_type = other DNA
ggaaaatgtctgctcaggacct

SEQ ID NO: 31240 - DNA, 22 bp, synthetic construct
  misc_feature 1..22: note = chemically synthesized
  source 1..22: mol_type = other DNA
gaaaatgtctgctcaggacctg

SEQ ID NO: 31241 - DNA, 22 bp, synthetic construct
  misc_feature 1..22: note = chemically synthesized
  source 1..22: mol_type = other DNA
ctcaggacctgagctcactgta

SEQ ID NO: 31242 - DNA, 22 bp, synthetic construct
  misc_feature 1..22: note = chemically synthesized
  source 1..22: mol_type = other DNA
aggacctgagctcactgtattt

SEQ ID NO: 31243 - DNA, 22 bp, synthetic construct
  misc_feature 1..22: note = chemically synthesized
  source 1..22: mol_type = other DNA
agctcactgtatttgtcagggt

SEQ ID NO: 31244 - DNA, 22 bp, synthetic construct
  misc_feature 1..22: note = chemically synthesized
  source 1..22: mol_type = other DNA
actgtatttgtcagggttccct

SEQ ID NO: 31245 - DNA, 22 bp, synthetic construct
  misc_feature 1..22: note = chemically synthesized
  source 1..22: mol_type = other DNA
tatttgtcagggttccctagag

SEQ ID NO: 31246 - DNA, 22 bp, synthetic construct
  misc_feature 1..22: note = chemically synthesized
  source 1..22: mol_type = other DNA
gtcagggttccctagagagaca

SEQ ID NO: 31247 - DNA, 22 bp, synthetic construct
  misc_feature 1..22: note = chemically synthesized
  source 1..22: mol_type = other DNA
tcagggttccctagagagacag

SEQ ID NO: 31248 - DNA, 22 bp, synthetic construct
  misc_feature 1..22: note = chemically synthesized
  source 1..22: mol_type = other DNA
cctagagagacagaactaatag

SEQ ID NO: 31249 - DNA, 22 bp, synthetic construct
  misc_feature 1..22: note = chemically synthesized
  source 1..22: mol_type = other DNA
gagagacagaactaataggaga

SEQ ID NO: 31250 - DNA, 22 bp, synthetic construct
  misc_feature 1..22: note = chemically synthesized
  source 1..22: mol_type = other DNA
ataggagatagatagatagata

SEQ ID NO: 31251 - DNA, 22 bp, synthetic construct
  misc_feature 1..22: note = chemically synthesized
  source 1..22: mol_type = other DNA
agatataaaagggagtttatta

SEQ ID NO: 31252 - DNA, 22 bp, synthetic construct
  misc_feature 1..22: note = chemically synthesized
  source 1..22: mol_type = other DNA
gatataaaagggagtttattaa

SEQ ID NO: 31253 - DNA, 22 bp, synthetic construct
  misc_feature 1..22: note = chemically synthesized
  source 1..22: mol_type = other DNA
attaagtagtgttaacttacac

SEQ ID NO: 31254 - DNA, 22 bp, synthetic construct
  misc_feature 1..22: note = chemically synthesized
  source 1..22: mol_type = other DNA
ttaagtagtgttaacttacaca

SEQ ID NO: 31255 - DNA, 22 bp, synthetic construct
  misc_feature 1..22: note = chemically synthesized
  source 1..22: mol_type = other DNA
agtagtgttaacttacacaatc

SEQ ID NO: 31256 - DNA, 22 bp, synthetic construct
  misc_feature 1..22: note = chemically synthesized
  source 1..22: mol_type = other DNA
acttacacaatcacaaggtccc

SEQ ID NO: 31257 - DNA, 22 bp, synthetic construct
  misc_feature 1..22: note = chemically synthesized
  source 1..22: mol_type = other DNA
acacaatcacaaggtcccacaa

SEQ ID NO: 31258 - DNA, 22 bp, synthetic construct
  misc_feature 1..22: note = chemically synthesized
  source 1..22: mol_type = other DNA
cacaatcacaaggtcccacaat

SEQ ID NO: 31259 - DNA, 22 bp, synthetic construct
  misc_feature 1..22: note = chemically synthesized
  source 1..22: mol_type = other DNA
caagcagaggagcaaggaagcc

SEQ ID NO: 31260 - DNA, 22 bp, synthetic construct
  misc_feature 1..22: note = chemically synthesized
  source 1..22: mol_type = other DNA
aaggacttggagtccaatgttt

SEQ ID NO: 31261 - DNA, 22 bp, synthetic construct
  misc_feature 1..22: note = chemically synthesized
  source 1..22: mol_type = other DNA
ggagtccaatgtttgagggcag

SEQ ID NO: 31262 - DNA, 22 bp, synthetic construct
  misc_feature 1..22: note = chemically synthesized
  source 1..22: mol_type = other DNA
gagtccaatgtttgagggcagg

SEQ ID NO: 31263 - DNA, 22 bp, synthetic construct
  misc_feature 1..22: note = chemically synthesized
  source 1..22: mol_type = other DNA
gagggcaggaagcatccagcat

SEQ ID NO: 31264 - DNA, 22 bp, synthetic construct
  misc_feature 1..22: note = chemically synthesized
  source 1..22: mol_type = other DNA
agggcaggaagcatccagcatg

SEQ ID NO: 31265 - DNA, 22 bp, synthetic construct
  misc_feature 1..22: note = chemically synthesized
  source 1..22: mol_type = other DNA
ggaggctaagccagtccaggat

SEQ ID NO: 31266 - DNA, 22 bp, synthetic construct
  misc_feature 1..22: note = chemically synthesized
  source 1..22: mol_type = other DNA
gaggctaagccagtccaggatt

SEQ ID NO: 31267 - DNA, 22 bp, synthetic construct
  misc_feature 1..22: note = chemically synthesized
  source 1..22: mol_type = other DNA
agccagtccaggattttcacat

SEQ ID NO: 31268 - DNA, 22 bp, synthetic construct
  misc_feature 1..22: note = chemically synthesized
  source 1..22: mol_type = other DNA
tcacatgttttttttctgcctg

SEQ ID NO: 31269 - DNA, 22 bp, synthetic construct
  misc_feature 1..22: note = chemically synthesized
  source 1..22: mol_type = other DNA
cacatgttttttttctgcctgc

SEQ ID NO: 31270 - DNA, 22 bp, synthetic construct
  misc_feature 1..22: note = chemically synthesized
  source 1..22: mol_type = other DNA
acatgttttttttctgcctgct

SEQ ID NO: 31271 - DNA, 22 bp, synthetic construct
  misc_feature 1..22: note = chemically synthesized
  source 1..22: mol_type = other DNA
tttttctgcctgctttatatcc

SEQ ID NO: 31272 - DNA, 22 bp, synthetic construct
  misc_feature 1..22: note = chemically synthesized
  source 1..22: mol_type = other DNA
ttttctgcctgctttatatcct

SEQ ID NO: 31273 - DNA, 22 bp, synthetic construct
  misc_feature 1..22: note = chemically synthesized
  source 1..22: mol_type = other DNA
tttctgcctgctttatatcctg

SEQ ID NO: 31274 - DNA, 22 bp, synthetic construct
  misc_feature 1..22: note = chemically synthesized
  source 1..22: mol_type = other DNA
ttctgcctgctttatatcctgg

SEQ ID NO: 31275 - DNA, 22 bp, synthetic construct
  misc_feature 1..22: note = chemically synthesized
  source 1..22: mol_type = other DNA
tctgcctgctttatatcctggc

SEQ ID NO: 31276 - DNA, 22 bp, synthetic construct
  misc_feature 1..22: note = chemically synthesized
  source 1..22: mol_type = other DNA
ctgcctgctttatatcctggcc

SEQ ID NO: 31277 - DNA, 22 bp, synthetic construct
  misc_feature 1..22: note = chemically synthesized
  source 1..22: mol_type = other DNA
tgcctgctttatatcctggcca

SEQ ID NO: 31278 - DNA, 22 bp, synthetic construct
  misc_feature 1..22: note = chemically synthesized
  source 1..22: mol_type = other DNA
cctgctttatatcctggccaca

SEQ ID NO: 31279 - DNA, 22 bp, synthetic construct
  misc_feature 1..22: note = chemically synthesized
  source 1..22: mol_type = other DNA
ctttatatcctggccacactgg

SEQ ID NO: 31280 - DNA, 22 bp, synthetic construct
  misc_feature 1..22: note = chemically synthesized
  source 1..22: mol_type = other DNA
tatatcctggccacactggcaa

SEQ ID NO: 31281 - DNA, 22 bp, synthetic construct
  misc_feature 1..22: note = chemically synthesized
  source 1..22: mol_type = other DNA
atatcctggccacactggcaac

SEQ ID NO: 31282 - DNA, 22 bp, synthetic construct
  misc_feature 1..22: note = chemically synthesized
  source 1..22: mol_type = other DNA
tatcctggccacactggcaact

SEQ ID NO: 31283 - DNA, 22 bp, synthetic construct
  misc_feature 1..22: note = chemically synthesized
  source 1..22: mol_type = other DNA
gccacactggcaactgattaga

SEQ ID NO: 31284 - DNA, 22 bp, synthetic construct
  misc_feature 1..22: note = chemically synthesized
  source 1..22: mol_type = other DNA
gcaactgattagatggtgccca

SEQ ID NO: 31285 - DNA, 22 bp, synthetic construct
  misc_feature 1..22: note = chemically synthesized
  source 1..22: mol_type = other DNA
attagatggtgcccacccagat

SEQ ID NO: 31286 - DNA, 22 bp, synthetic construct
  misc_feature 1..22: note = chemically synthesized
  source 1..22: mol_type = other DNA
gatggtgcccacccagattaag

SEQ ID NO: 31287 - DNA, 22 bp, synthetic construct
  misc_feature 1..22: note = chemically synthesized
  source 1..22: mol_type = other DNA
agggtgggtctgcctttcccag

SEQ ID NO: 31288 - DNA, 22 bp, synthetic construct
  misc_feature 1..22: note = chemically synthesized
  source 1..22: mol_type = other DNA
cctttcccagcccactgactaa

SEQ ID NO: 31289 - DNA, 22 bp, synthetic construct
  misc_feature 1..22: note = chemically synthesized
  source 1..22: mol_type = other DNA
tcccagcccactgactaaaatg

SEQ ID NO: 31290 - DNA, 22 bp, synthetic construct
  misc_feature 1..22: note = chemically synthesized
  source 1..22: mol_type = other DNA
cccagcccactgactaaaatgt

SEQ ID NO: 31291 - DNA, 22 bp, synthetic construct
  misc_feature 1..22: note = chemically synthesized
  source 1..22: mol_type = other DNA
ccagcccactgactaaaatgtt

SEQ ID NO: 31292 - DNA, 22 bp, synthetic construct
  misc_feature 1..22: note = chemically synthesized
  source 1..22: mol_type = other DNA
actaaaatgttaatctcctttg

SEQ ID NO: 31293 - DNA, 22 bp, synthetic construct
  misc_feature 1..22: note = chemically synthesized
  source 1..22: mol_type = other DNA
aaatgttaatctcctttggcaa

SEQ ID NO: 31294 - DNA, 22 bp, synthetic construct
  misc_feature 1..22: note = chemically synthesized
  source 1..22: mol_type = other DNA
atctcctttggcaataccctca

SEQ ID NO: 31295 - DNA, 22 bp, synthetic construct
  misc_feature 1..22: note = chemically synthesized
  source 1..22: mol_type = other DNA
ctttggcaataccctcacagac

SEQ ID NO: 31296 - DNA, 22 bp, synthetic construct
  misc_feature 1..22: note = chemically synthesized
  source 1..22: mol_type = other DNA
tggcaataccctcacagacaca

SEQ ID NO: 31297 - DNA, 22 bp, synthetic construct
  misc_feature 1..22: note = chemically synthesized
  source 1..22: mol_type = other DNA
ggcaataccctcacagacacac

SEQ ID NO: 31298 - DNA, 22 bp, synthetic construct
  misc_feature 1..22: note = chemically synthesized
  source 1..22: mol_type = other DNA
gcaataccctcacagacacact

SEQ ID NO: 31299 - DNA, 22 bp, synthetic construct
  misc_feature 1..22: note = chemically synthesized
  source 1..22: mol_type = other DNA
acagacacactcaggatcaata

SEQ ID NO: 31300 - DNA, 22 bp, synthetic construct
  misc_feature 1..22: note = chemically synthesized
  source 1..22: mol_type = other DNA
aggatcaatactttgcacactt

SEQ ID NO: 31301 - DNA, 22 bp, synthetic construct
  misc_feature 1..22: note = chemically synthesized
  source 1..22: mol_type = other DNA
tgcacacttcaatccaatcaag

SEQ ID NO: 31302 - DNA, 22 bp, synthetic construct
  misc_feature 1..22: note = chemically synthesized
  source 1..22: mol_type = other DNA
gcacacttcaatccaatcaagt

SEQ ID NO: 31303 - DNA, 22 bp, synthetic construct
  misc_feature 1..22: note = chemically synthesized
  source 1..22: mol_type = other DNA
cacacttcaatccaatcaagtt

SEQ ID NO: 31304 - DNA, 22 bp, synthetic construct
  misc_feature 1..22: note = chemically synthesized
  source 1..22: mol_type = other DNA
caatccaatcaagttgacactc

SEQ ID NO: 31305 - DNA, 22 bp, synthetic construct
  misc_feature 1..22: note = chemically synthesized
  source 1..22: mol_type = other DNA
aatccaatcaagttgacactca

SEQ ID NO: 31306 - DNA, 22 bp, synthetic construct
  misc_feature 1..22: note = chemically synthesized
  source 1..22: mol_type = other DNA
acactcagtattaaccatcaca

SEQ ID NO: 31307 - DNA, 22 bp, synthetic construct
  misc_feature 1..22: note = chemically synthesized
  source 1..22: mol_type = other DNA
agtattaaccatcacaagtcca

SEQ ID NO: 31308 - DNA, 22 bp, synthetic construct
  misc_feature 1..22: note = chemically synthesized
  source 1..22: mol_type = other DNA
accatcacaagtccatcgcttg

SEQ ID NO: 31309 - DNA, 22 bp, synthetic construct
  misc_feature 1..22: note = chemically synthesized
  source 1..22: mol_type = other DNA
gtcaacttgagcctatacacat

SEQ ID NO: 31310 - DNA, 22 bp, synthetic construct
  misc_feature 1..22: note = chemically synthesized
  source 1..22: mol_type = other DNA
tcaacttgagcctatacacatc

SEQ ID NO: 31311 - DNA, 22 bp, synthetic construct
  misc_feature 1..22: note = chemically synthesized
  source 1..22: mol_type = other DNA
gagcctatacacatcccctgag

SEQ ID NO: 31312 - DNA, 22 bp, synthetic construct
  misc_feature 1..22: note = chemically synthesized
  source 1..22: mol_type = other DNA
agcctatacacatcccctgagg

SEQ ID NO: 31313 - DNA, 22 bp, synthetic construct
  misc_feature 1..22: note = chemically synthesized
  source 1..22: mol_type = other DNA
tacacatcccctgaggtcatac

SEQ ID NO: 31314 - DNA, 22 bp, synthetic construct
  misc_feature 1..22: note = chemically synthesized
  source 1..22: mol_type = other DNA
aggtcatacattatcttcaaat

SEQ ID NO: 31315 - DNA, 22 bp, synthetic construct
  misc_feature 1..22: note = chemically synthesized
  source 1..22: mol_type = other DNA
tcttcaaataaagacaacaata

SEQ ID NO: 31316 - DNA, 22 bp, synthetic construct
  misc_feature 1..22: note = chemically synthesized
  source 1..22: mol_type = other DNA
caaataaagacaacaataagtc

SEQ ID NO: 31317 - DNA, 22 bp, synthetic construct
  misc_feature 1..22: note = chemically synthesized
  source 1..22: mol_type = other DNA
aaataaagacaacaataagtca

SEQ ID NO: 31318 - DNA, 22 bp, synthetic construct
  misc_feature 1..22: note = chemically synthesized
  source 1..22: mol_type = other DNA
tgcctaacatactaaaactatc

SEQ ID NO: 31319 - DNA, 22 bp, synthetic construct
  misc_feature 1..22: note = chemically synthesized
  source 1..22: mol_type = other DNA
acatactaaaactatccttcgt

SEQ ID NO: 31320 - DNA, 22 bp, synthetic construct
  misc_feature 1..22: note = chemically synthesized
  source 1..22: mol_type = other DNA
aaactatccttcgtgcaattga

SEQ ID NO: 31321 - DNA, 22 bp, synthetic construct
  misc_feature 1..22: note = chemically synthesized
  source 1..22: mol_type = other DNA
tccttcgtgcaattgaaaatgc

SEQ ID NO: 31322 - DNA, 22 bp, synthetic construct
  misc_feature 1..22: note = chemically synthesized
  source 1..22: mol_type = other DNA
cgtgcaattgaaaatgcaccaa

SEQ ID NO: 31323 - DNA, 22 bp, synthetic construct
  misc_feature 1..22: note = chemically synthesized
  source 1..22: mol_type = other DNA
gtgcaattgaaaatgcaccaat

SEQ ID NO: 31324 - DNA, 22 bp, synthetic construct
  misc_feature 1..22: note = chemically synthesized
  source 1..22: mol_type = other DNA
aaaatgcaccaatccccattgc

SEQ ID NO: 31325 - DNA, 22 bp, synthetic construct
  misc_feature 1..22: note = chemically synthesized
  source 1..22: mol_type = other DNA
caaatgctattacataaactta

SEQ ID NO: 31326 - DNA, 22 bp, synthetic construct
  misc_feature 1..22: note = chemically synthesized
  source 1..22: mol_type = other DNA
ttacataaacttaacaatactt

SEQ ID NO: 31327 - DNA, 22 bp, synthetic construct
  misc_feature 1..22: note = chemically synthesized
  source 1..22: mol_type = other DNA
cataaacttaacaatacttaaa

SEQ ID NO: 31328 - DNA, 22 bp, synthetic construct
  misc_feature 1..22: note = chemically synthesized
  source 1..22: mol_type = other DNA
aacaatacttaaatgctgatat

SEQ ID NO: 31329 - DNA, 22 bp, synthetic construct
  misc_feature 1..22: note = chemically synthesized
  source 1..22: mol_type = other DNA
acaatacttaaatgctgatatg

SEQ ID NO: 31330 - DNA, 22 bp, synthetic construct
  misc_feature 1..22: note = chemically synthesized
  source 1..22: mol_type = other DNA
aaatgctgatatgaagtcaata

SEQ ID NO: 31331 - DNA, 22 bp, synthetic construct
  misc_feature 1..22: note = chemically synthesized
  source 1..22: mol_type = other DNA
aatgctgatatgaagtcaataa

SEQ ID NO: 31332 - DNA, 22 bp, synthetic construct
  misc_feature 1..22: note = chemically synthesized
  source 1..22: mol_type = other DNA
atatgaagtcaataaatcttat

SEQ ID NO: 31333 - DNA, 22 bp, synthetic construct
  misc_feature 1..22: note = chemically synthesized
  source 1..22: mol_type = other DNA
atgtcacatgataaaggaaaaa

SEQ ID NO: 31334 - DNA, 22 bp, synthetic construct
  misc_feature 1..22: note = chemically synthesized
  source 1..22: mol_type = other DNA
tgtcacatgataaaggaaaaag

SEQ ID NO: 31335 - DNA, 22 bp, synthetic construct
  misc_feature 1..22: note = chemically synthesized
  source 1..22: mol_type = other DNA
tcttagtacaagtgtatacaga

SEQ ID NO: 31336 - DNA, 22 bp, synthetic construct
  misc_feature 1..22: note = chemically synthesized
  source 1..22: mol_type = other DNA
cttagtacaagtgtatacagac

SEQ ID NO: 31337 - DNA, 22 bp, synthetic construct
  misc_feature 1..22: note = chemically synthesized
  source 1..22: mol_type = other DNA
ttagtacaagtgtatacagaca

SEQ ID NO: 31338 - DNA, 22 bp, synthetic construct
  misc_feature 1..22: note = chemically synthesized
  source 1..22: mol_type = other DNA
agtacaagtgtatacagacacg

SEQ ID NO: 31339 - DNA, 22 bp, synthetic construct
  misc_feature 1..22: note = chemically synthesized
  source 1..22: mol_type = other DNA
gtacaagtgtatacagacacga

SEQ ID NO: 31340 - DNA, 22 bp, synthetic construct
  misc_feature 1..22: note = chemically synthesized
  source 1..22: mol_type = other DNA
ttaacaaaagaaggaggaaata

SEQ ID NO: 31341 - DNA, 22 bp, synthetic construct
  misc_feature 1..22: note = chemically synthesized
  source 1..22: mol_type = other DNA
taacaaaagaaggaggaaatac

SEQ ID NO: 31342 - DNA, 22 bp, synthetic construct
  misc_feature 1..22: note = chemically synthesized
  source 1..22: mol_type = other DNA
aacaaaagaaggaggaaatact

SEQ ID NO: 31343 - DNA, 22 bp, synthetic construct
  misc_feature 1..22: note = chemically synthesized
  source 1..22: mol_type = other DNA
acaaaagaaggaggaaatactc

SEQ ID NO: 31344 - DNA, 22 bp, synthetic construct
  misc_feature 1..22: note = chemically synthesized
  source 1..22: mol_type = other DNA
atgacaattacagtccttgtat

SEQ ID NO: 31345 - DNA, 22 bp, synthetic construct
  misc_feature 1..22: note = chemically synthesized
  source 1..22: mol_type = other DNA
cagtccttgtatctgcaattgg

SEQ ID NO: 31346 - DNA, 22 bp, synthetic construct
  misc_feature 1..22: note = chemically synthesized
  source 1..22: mol_type = other DNA
gtatctgcaattggtcacgtga

SEQ ID NO: 31347 - DNA, 22 bp, synthetic construct
  misc_feature 1..22: note = chemically synthesized
  source 1..22: mol_type = other DNA
tatctgcaattggtcacgtgat

SEQ ID NO: 31348 - DNA, 22 bp, synthetic construct
  misc_feature 1..22: note = chemically synthesized
  source 1..22: mol_type = other DNA
caattggtcacgtgatcgtagc

SEQ ID NO: 31349 - DNA, 22 bp, synthetic construct
  misc_feature 1..22: note = chemically synthesized
  source 1..22: mol_type = other DNA
gtcacgtgatcgtagctggtat

SEQ ID NO: 31350 - DNA, 22 bp, synthetic construct
  misc_feature 1..22: note = chemically synthesized
  source 1..22: mol_type = other DNA
gtattgatgactaccttcttct

SEQ ID NO: 31351 - DNA, 22 bp, synthetic construct
  misc_feature 1..22: note = chemically synthesized
  source 1..22: mol_type = other DNA
atgactaccttcttctgctaca

SEQ ID NO: 31352 - DNA, 22 bp, synthetic construct
  misc_feature 1..22: note = chemically synthesized
  source 1..22: mol_type = other DNA
ccttcttctgctacatattctg

SEQ ID NO: 31353 - DNA, 22 bp, synthetic construct
  misc_feature 1..22: note = chemically synthesized
  source 1..22: mol_type = other DNA
cttctgctacatattctgtatt

SEQ ID NO: 31354 - DNA, 22 bp, synthetic construct
  misc_feature 1..22: note = chemically synthesized
  source 1..22: mol_type = other DNA
ttctgctacatattctgtattc

SEQ ID NO: 31355 - DNA, 22 bp, synthetic construct
  misc_feature 1..22: note = chemically synthesized
  source 1..22: mol_type = other DNA
ctgctacatattctgtattccc

SEQ ID NO: 31356 - DNA, 22 bp, synthetic construct
  misc_feature 1..22: note = chemically synthesized
  source 1..22: mol_type = other DNA
tgctacatattctgtattccct

SEQ ID NO: 31357 - DNA, 22 bp, synthetic construct
  misc_feature 1..22: note = chemically synthesized
  source 1..22: mol_type = other DNA
ctacatattctgtattcccttt

SEQ ID NO: 31358 - DNA, 22 bp, synthetic construct
  misc_feature 1..22: note = chemically synthesized
  source 1..22: mol_type = other DNA
catattctgtattccctttgcc

SEQ ID NO: 31359 - DNA, 22 bp, synthetic construct
  misc_feature 1..22: note = chemically synthesized
  source 1..22: mol_type = other DNA
tgtattccctttgccctcagca

SEQ ID NO: 31360 - DNA, 22 bp, synthetic construct
  misc_feature 1..22: note = chemically synthesized
  source 1..22: mol_type = other DNA
tattccctttgccctcagcaag

SEQ ID NO: 31361 - DNA, 22 bp, synthetic construct
  misc_feature 1..22: note = chemically synthesized
  source 1..22: mol_type = other DNA
cctttgccctcagcaagcacct

SEQ ID NO: 31362 - DNA, 22 bp, synthetic construct
  misc_feature 1..22: note = chemically synthesized
  source 1..22: mol_type = other DNA
tgccctcagcaagcacctcagc

SEQ ID NO: 31363 - DNA, 22 bp, synthetic construct
  misc_feature 1..22: note = chemically synthesized
  source 1..22: mol_type = other DNA
gccctcagcaagcacctcagca

SEQ ID NO: 31364 - DNA, 22 bp, synthetic construct
  misc_feature 1..22: note = chemically synthesized
  source 1..22: mol_type = other DNA
ccctcagcaagcacctcagcag

SEQ ID NO: 31365 - DNA, 22 bp, synthetic construct
  misc_feature 1..22: note = chemically synthesized
  source 1..22: mol_type = other DNA
agcaagcacctcagcaggtctt

SEQ ID NO: 31366 - DNA, 22 bp, synthetic construct
  misc_feature 1..22: note = chemically synthesized
  source 1..22: mol_type = other DNA
agcaggtcttgtcttttttttt

SEQ ID NO: 31367 - DNA, 22 bp, synthetic construct
  misc_feature 1..22: note = chemically synthesized
  source 1..22: mol_type = other DNA
gtcttttttttttttttttttc

SEQ ID NO: 31368 - DNA, 22 bp, synthetic construct
  misc_feature 1..22: note = chemically synthesized
  source 1..22: mol_type = other DNA
tcttttttttttttttttttcc

SEQ ID NO: 31369 - DNA, 22 bp, synthetic construct
  misc_feature 1..22: note = chemically synthesized
  source 1..22: mol_type = other DNA
ttttttttttttttttcctggt

SEQ ID NO: 31370 - DNA, 22 bp, synthetic construct
  misc_feature 1..22: note = chemically synthesized
  source 1..22: mol_type = other DNA
tttttttttttttttcctggtg

SEQ ID NO: 31371 - DNA, 22 bp, synthetic construct
  misc_feature 1..22: note = chemically synthesized
  source 1..22: mol_type = other DNA
ttttttttttttttcctggtgg

SEQ ID NO: 31372 - DNA, 22 bp, synthetic construct
  misc_feature 1..22: note = chemically synthesized
  source 1..22: mol_type = other DNA
tttttttttttttcctggtgga

SEQ ID NO: 31373 - DNA, 22 bp, synthetic construct
  misc_feature 1..22: note = chemically synthesized
  source 1..22: mol_type = other DNA
ttttttttttttcctggtggag

SEQ ID NO: 31374 - DNA, 22 bp, synthetic construct
  misc_feature 1..22: note = chemically synthesized
  source 1..22: mol_type = other DNA
tttttttttttcctggtggagt

SEQ ID NO: 31375 - DNA, 22 bp, synthetic construct
  misc_feature 1..22: note = chemically synthesized
  source 1..22: mol_type = other DNA
ttttttttttcctggtggagtg

SEQ ID NO: 31376 - DNA, 22 bp, synthetic construct
  misc_feature 1..22: note = chemically synthesized
  source 1..22: mol_type = other DNA
tttttttttcctggtggagtga

SEQ ID NO: 31377 - DNA, 22 bp, synthetic construct
  misc_feature 1..22: note = chemically synthesized
  source 1..22: mol_type = other DNA
ttttttttcctggtggagtgac

SEQ ID NO: 31378 - DNA, 22 bp, synthetic construct
  misc_feature 1..22: note = chemically synthesized
  source 1..22: mol_type = other DNA
tttttttcctggtggagtgacc

SEQ ID NO: 31379 - DNA, 22 bp, synthetic construct
  misc_feature 1..22: note = chemically synthesized
  source 1..22: mol_type = other DNA
ttttttcctggtggagtgaccc

SEQ ID NO: 31380 - DNA, 22 bp, synthetic construct
  misc_feature 1..22: note = chemically synthesized
  source 1..22: mol_type = other DNA
tttttcctggtggagtgaccca

SEQ ID NO: 31381 - DNA, 22 bp, synthetic construct
  misc_feature 1..22: note = chemically synthesized
  source 1..22: mol_type = other DNA
ttttcctggtggagtgacccaa

SEQ ID NO: 31382 - DNA, 22 bp, synthetic construct
  misc_feature 1..22: note = chemically synthesized
  source 1..22: mol_type = other DNA
tttcctggtggagtgacccaaa

SEQ ID NO: 31383 - DNA, 22 bp, synthetic construct
  misc_feature 1..22: note = chemically synthesized
  source 1..22: mol_type = other DNA
ttcctggtggagtgacccaaac

SEQ ID NO: 31384 - DNA, 22 bp, synthetic construct
  misc_feature 1..22: note = chemically synthesized
  source 1..22: mol_type = other DNA
tcctggtggagtgacccaaacc

SEQ ID NO: 31385 - DNA, 22 bp, synthetic construct
  misc_feature 1..22: note = chemically synthesized
  source 1..22: mol_type = other DNA
cctggtggagtgacccaaacct

SEQ ID NO: 31386 - DNA, 22 bp, synthetic construct
  misc_feature 1..22: note = chemically synthesized
  source 1..22: mol_type = other DNA
ctggtggagtgacccaaacctt

SEQ ID NO: 31387 - DNA, 22 bp, synthetic construct
  misc_feature 1..22: note = chemically synthesized
  source 1..22: mol_type = other DNA
gtggagtgacccaaacctttat

SEQ ID NO: 31388 - DNA, 22 bp, synthetic construct
  misc_feature 1..22: note = chemically synthesized
  source 1..22: mol_type = other DNA
tatttgtagtcctgcctggaat

SEQ ID NO: 31389 - DNA, 22 bp, synthetic construct
  misc_feature 1..22: note = chemically synthesized
  source 1..22: mol_type = other DNA
atttgtagtcctgcctggaatg

SEQ ID NO: 31390 - DNA, 22 bp, synthetic construct
  misc_feature 1..22: note = chemically synthesized
  source 1..22: mol_type = other DNA
tttgtagtcctgcctggaatgg

SEQ ID NO: 31391 - DNA, 22 bp, synthetic construct
  misc_feature 1..22: note = chemically synthesized
  source 1..22: mol_type = other DNA
gtagtcctgcctggaatggcct

SEQ ID NO: 31392 - DNA, 22 bp, synthetic construct
  misc_feature 1..22: note = chemically synthesized
  source 1..22: mol_type = other DNA
tagtcctgcctggaatggcctg

SEQ ID NO: 31393 - DNA, 22 bp, synthetic construct
  misc_feature 1..22: note = chemically synthesized
  source 1..22: mol_type = other DNA
cctggaatggcctgtagtagtt

SEQ ID NO: 31394 - DNA, 22 bp, synthetic construct
  misc_feature 1..22: note = chemically synthesized
  source 1..22: mol_type = other DNA
gaatggcctgtagtagtttccc

SEQ ID NO: 31395 - DNA, 22 bp, synthetic construct
  misc_feature 1..22: note = chemically synthesized
  source 1..22: mol_type = other DNA
tagtagtttcccactgacctta

SEQ ID NO: 31396 - DNA, 22 bp, synthetic construct
  misc_feature 1..22: note = chemically synthesized
  source 1..22: mol_type = other DNA
cccactgaccttaattccagga

SEQ ID NO: 31397 - DNA, 22 bp, synthetic construct
  misc_feature 1..22: note = chemically synthesized
  source 1..22: mol_type = other DNA
ccactgaccttaattccaggac

SEQ ID NO: 31398 - DNA, 22 bp, synthetic construct
  misc_feature 1..22: note = chemically synthesized
  source 1..22: mol_type = other DNA
accttaattccaggacatggta

SEQ ID NO: 31399 - DNA, 22 bp, synthetic construct
  misc_feature 1..22: note = chemically synthesized
  source 1..22: mol_type = other DNA
aattccaggacatggtaaaact

SEQ ID NO: 31400 - DNA, 22 bp, synthetic construct
  misc_feature 1..22: note = chemically synthesized
  source 1..22: mol_type = other DNA
attccaggacatggtaaaacta

SEQ ID NO: 31401 - DNA, 22 bp, synthetic construct
  misc_feature 1..22: note = chemically synthesized
  source 1..22: mol_type = other DNA
caggacatggtaaaactaagag

SEQ ID NO: 31402 - DNA, 22 bp, synthetic construct
  misc_feature 1..22: note = chemically synthesized
  source 1..22: mol_type = other DNA
agagacaccctaatggatctcc

SEQ ID NO: 31403 - DNA, 22 bp, synthetic construct
  misc_feature 1..22: note = chemically synthesized
  source 1..22: mol_type = other DNA
atggatctcctatattccatgc

SEQ ID NO: 31404 - DNA, 22 bp, synthetic construct
  misc_feature 1..22: note = chemically synthesized
  source 1..22: mol_type = other DNA
ctatattccatgcatacgcttc

SEQ ID NO: 31405 - DNA, 22 bp, synthetic construct
  misc_feature 1..22: note = chemically synthesized
  source 1..22: mol_type = other DNA
tattccatgcatacgcttcctt

SEQ ID NO: 31406 - DNA, 22 bp, synthetic construct
  misc_feature 1..22: note = chemically synthesized
  source 1..22: mol_type = other DNA
catgcatacgcttccttacctc

SEQ ID NO: 31407 - DNA, 22 bp, synthetic construct
  misc_feature 1..22: note = chemically synthesized
  source 1..22: mol_type = other DNA
ccttacctccattgtggagttg

SEQ ID NO: 31408 - DNA, 22 bp, synthetic construct
  misc_feature 1..22: note = chemically synthesized
  source 1..22: mol_type = other DNA
cttacctccattgtggagttgt

SEQ ID NO: 31409 - DNA, 22 bp, synthetic construct
  misc_feature 1..22: note = chemically synthesized
  source 1..22: mol_type = other DNA
acctccattgtggagttgtaga

SEQ ID NO: 31410 - DNA, 22 bp, synthetic construct
  misc_feature 1..22: note = chemically synthesized
  source 1..22: mol_type = other DNA
cctccattgtggagttgtagac

SEQ ID NO: 31411 - DNA, 22 bp, synthetic construct
  misc_feature 1..22: note = chemically synthesized
  source 1..22: mol_type = other DNA
cattgtggagttgtagactgat

SEQ ID NO: 31412 - DNA, 22 bp, synthetic construct
  misc_feature 1..22: note = chemically synthesized
  source 1..22: mol_type = other DNA
tggagttgtagactgatttcat

SEQ ID NO: 31413 - DNA, 22 bp, synthetic construct
  misc_feature 1..22: note = chemically synthesized
  source 1..22: mol_type = other DNA
tagactgatttcatcttgatag

SEQ ID NO: 31414 - DNA, 22 bp, synthetic construct
  misc_feature 1..22: note = chemically synthesized
  source 1..22: mol_type = other DNA
atttcatcttgatagtctgggt

SEQ ID NO: 31415 - DNA, 22 bp, synthetic construct
  misc_feature 1..22: note = chemically synthesized
  source 1..22: mol_type = other DNA
catcttgatagtctgggttaat

SEQ ID NO: 31416 - DNA, 22 bp, synthetic construct
  misc_feature 1..22: note = chemically synthesized
  source 1..22: mol_type = other DNA
atcttgatagtctgggttaatc

SEQ ID NO: 31417 - DNA, 22 bp, synthetic construct
  misc_feature 1..22: note = chemically synthesized
  source 1..22: mol_type = other DNA
gatagtctgggttaatcaccgc

SEQ ID NO: 31418 - DNA, 22 bp, synthetic construct
  misc_feature 1..22: note = chemically synthesized
  source 1..22: mol_type = other DNA
atagtctgggttaatcaccgca

SEQ ID NO: 31419 - DNA, 22 bp, synthetic construct
  misc_feature 1..22: note = chemically synthesized
  source 1..22: mol_type = other DNA
ggttaatcaccgcagccaacac

SEQ ID NO: 31420 - DNA, 22 bp, synthetic construct
  misc_feature 1..22: note = chemically synthesized
  source 1..22: mol_type = other DNA
atcaccgcagccaacactgtaa

SEQ ID NO: 31421 - DNA, 22 bp, synthetic construct
  misc_feature 1..22: note = chemically synthesized
  source 1..22: mol_type = other DNA
taactctcttcttagcctgttg

SEQ ID NO: 31422 - DNA, 22 bp, synthetic construct
  misc_feature 1..22: note = chemically synthesized
  source 1..22: mol_type = other DNA
tcttcttagcctgttgacttaa

SEQ ID NO: 31423 - DNA, 22 bp, synthetic construct
  misc_feature 1..22: note = chemically synthesized
  source 1..22: mol_type = other DNA
ttcttagcctgttgacttaaag

SEQ ID NO: 31424 - DNA, 22 bp, synthetic construct
  misc_feature 1..22: note = chemically synthesized
  source 1..22: mol_type = other DNA
cttagcctgttgacttaaaggt

SEQ ID NO: 31425 - DNA, 22 bp, synthetic construct
  misc_feature 1..22: note = chemically synthesized
  source 1..22: mol_type = other DNA
ttagcctgttgacttaaaggtg

SEQ ID NO: 31426 - DNA, 22 bp, synthetic construct
  misc_feature 1..22: note = chemically synthesized
  source 1..22: mol_type = other DNA
agcctgttgacttaaaggtggg

SEQ ID NO: 31427 - DNA, 22 bp, synthetic construct
  misc_feature 1..22: note = chemically synthesized
  source 1..22: mol_type = other DNA
gcctgttgacttaaaggtggga

SEQ ID NO: 31428 - DNA, 22 bp, synthetic construct
  misc_feature 1..22: note = chemically synthesized
  source 1..22: mol_type = other DNA
ttgacttaaaggtgggaggagc

SEQ ID NO: 31429 - DNA, 22 bp, synthetic construct
  misc_feature 1..22: note = chemically synthesized
  source 1..22: mol_type = other DNA
acttaaaggtgggaggagccca

SEQ ID NO: 31430 - DNA, 22 bp, synthetic construct
  misc_feature 1..22: note = chemically synthesized
  source 1..22: mol_type = other DNA
aaaggtgggaggagcccaaagt

SEQ ID NO: 31431 - DNA, 22 bp, synthetic construct
  misc_feature 1..22: note = chemically synthesized
  source 1..22: mol_type = other DNA
aaggtgggaggagcccaaagtg

SEQ ID NO: 31432 - DNA, 22 bp, synthetic construct
  misc_feature 1..22: note = chemically synthesized
  source 1..22: mol_type = other DNA
aatttgcagtttaatggaatca

SEQ ID NO: 31433 - DNA, 22 bp, synthetic construct
  misc_feature 1..22: note = chemically synthesized
  source 1..22: mol_type = other DNA
atttgcagtttaatggaatcat

SEQ ID NO: 31434 - DNA, 22 bp, synthetic construct
  misc_feature 1..22: note = chemically synthesized
  source 1..22: mol_type = other DNA
gcagtttaatggaatcattatt

SEQ ID NO: 31435 - DNA, 22 bp, synthetic construct
  misc_feature 1..22: note = chemically synthesized
  source 1..22: mol_type = other DNA
cagtttaatggaatcattattg

SEQ ID NO: 31436 - DNA, 22 bp, synthetic construct
  misc_feature 1..22: note = chemically synthesized
  source 1..22: mol_type = other DNA
aatggaatcattattgtgtcac

SEQ ID NO: 31437 - DNA, 22 bp, synthetic construct
  misc_feature 1..22: note = chemically synthesized
  source 1..22: mol_type = other DNA
atggaatcattattgtgtcacc

SEQ ID NO: 31438 - DNA, 22 bp, synthetic construct
  misc_feature 1..22: note = chemically synthesized
  source 1..22: mol_type = other DNA
ttgtgtcacctggcggcagtgt

SEQ ID NO: 31439 - DNA, 22 bp, synthetic construct
  misc_feature 1..22: note = chemically synthesized
  source 1..22: mol_type = other DNA
tgtcacctggcggcagtgttcc

SEQ ID NO: 31440 - DNA, 22 bp, synthetic construct
  misc_feature 1..22: note = chemically synthesized
  source 1..22: mol_type = other DNA
gcggcagtgttcctccctctgg

SEQ ID NO: 31441 - DNA, 22 bp, synthetic construct
  misc_feature 1..22: note = chemically synthesized
  source 1..22: mol_type = other DNA
ctccctctggaactaagacctc

SEQ ID NO: 31442 - DNA, 22 bp, synthetic construct
  misc_feature 1..22: note = chemically synthesized
  source 1..22: mol_type = other DNA
cctctggaactaagacctctaa

SEQ ID NO: 31443 - DNA, 22 bp, synthetic construct
  misc_feature 1..22: note = chemically synthesized
  source 1..22: mol_type = other DNA
tggaactaagacctctaagcca

SEQ ID NO: 31444 - DNA, 22 bp, synthetic construct
  misc_feature 1..22: note = chemically synthesized
  source 1..22: mol_type = other DNA
gaactaagacctctaagccagc

SEQ ID NO: 31445 - DNA, 22 bp, synthetic construct
  misc_feature 1..22: note = chemically synthesized
  source 1..22: mol_type = other DNA
agacctctaagccagcagaaca

SEQ ID NO: 31446 - DNA, 22 bp, synthetic construct
  misc_feature 1..22: note = chemically synthesized
  source 1..22: mol_type = other DNA
taagccagcagaacataatgcc

SEQ ID NO: 31447 - DNA, 22 bp, synthetic construct
  misc_feature 1..22: note = chemically synthesized
  source 1..22: mol_type = other DNA
agccagcagaacataatgccat

SEQ ID NO: 31448 - DNA, 22 bp, synthetic construct
  misc_feature 1..22: note = chemically synthesized
  source 1..22: mol_type = other DNA
tgctagtggaacactaggggtg

SEQ ID NO: 31449 - DNA, 22 bp, synthetic construct
  misc_feature 1..22: note = chemically synthesized
  source 1..22: mol_type = other DNA
gctagtggaacactaggggtga

SEQ ID NO: 31450 - DNA, 22 bp, synthetic construct
  misc_feature 1..22: note = chemically synthesized
  source 1..22: mol_type = other DNA
ctagtggaacactaggggtgat

SEQ ID NO: 31451 - DNA, 22 bp, synthetic construct
  misc_feature 1..22: note = chemically synthesized
  source 1..22: mol_type = other DNA
gtggaacactaggggtgatggt

SEQ ID NO: 31452 - DNA, 22 bp, synthetic construct
  misc_feature 1..22: note = chemically synthesized
  source 1..22: mol_type = other DNA
ggggtgatggtgagtggtgcca

SEQ ID NO: 31453 - DNA, 22 bp, synthetic construct
  misc_feature 1..22: note = chemically synthesized
  source 1..22: mol_type = other DNA
ccacttccacttccaccctttg

SEQ ID NO: 31454 - DNA, 22 bp, synthetic construct
  misc_feature 1..22: note = chemically synthesized
  source 1..22: mol_type = other DNA
cacttccacttccaccctttga

SEQ ID NO: 31455 - DNA, 22 bp, synthetic construct
  misc_feature 1..22: note = chemically synthesized
  source 1..22: mol_type = other DNA
ccacttccaccctttgattcct

SEQ ID NO: 31456 - DNA, 22 bp, synthetic construct
  misc_feature 1..22: note = chemically synthesized
  source 1..22: mol_type = other DNA
cacttccaccctttgattcctg

SEQ ID NO: 31457 - DNA, 22 bp, synthetic construct
  misc_feature 1..22: note = chemically synthesized
  source 1..22: mol_type = other DNA
ccaccctttgattcctggaccc

SEQ ID NO: 31458 - DNA, 22 bp, synthetic construct
  misc_feature 1..22: note = chemically synthesized
  source 1..22: mol_type = other DNA
caccctttgattcctggacccg

SEQ ID NO: 31459 - DNA, 22 bp, synthetic construct
  misc_feature 1..22: note = chemically synthesized
  source 1..22: mol_type = other DNA
tgattcctggacccgtgaatcc

SEQ ID NO: 31460 - DNA, 22 bp, synthetic construct
  misc_feature 1..22: note = chemically synthesized
  source 1..22: mol_type = other DNA
gattcctggacccgtgaatcct

SEQ ID NO: 31461 - DNA, 22 bp, synthetic construct
  misc_feature 1..22: note = chemically synthesized
  source 1..22: mol_type = other DNA
attcctggacccgtgaatcctg

SEQ ID NO: 31462 - DNA, 22 bp, synthetic construct
  misc_feature 1..22: note = chemically synthesized
  source 1..22: mol_type = other DNA
ctggacccgtgaatcctgtcta

SEQ ID NO: 31463 - DNA, 22 bp, synthetic construct
  misc_feature 1..22: note = chemically synthesized
  source 1..22: mol_type = other DNA
gacccgtgaatcctgtctatgg

SEQ ID NO: 31464 - DNA, 22 bp, synthetic construct
  misc_feature 1..22: note = chemically synthesized
  source 1..22: mol_type = other DNA
tctatgggagaaacagtaccat

SEQ ID NO: 31465 - DNA, 22 bp, synthetic construct
  misc_feature 1..22: note = chemically synthesized
  source 1..22: mol_type = other DNA
tgggagaaacagtaccatatat

SEQ ID NO: 31466 - DNA, 22 bp, synthetic construct
  misc_feature 1..22: note = chemically synthesized
  source 1..22: mol_type = other DNA
gacactgattcagagcatacac

SEQ ID NO: 31467 - DNA, 22 bp, synthetic construct
  misc_feature 1..22: note = chemically synthesized
  source 1..22: mol_type = other DNA
attcagagcatacacagccttc

SEQ ID NO: 31468 - DNA, 22 bp, synthetic construct
  misc_feature 1..22: note = chemically synthesized
  source 1..22: mol_type = other DNA
agagcatacacagccttctgga

SEQ ID NO: 31469 - DNA, 22 bp, synthetic construct
  misc_feature 1..22: note = chemically synthesized
  source 1..22: mol_type = other DNA
ctggagaactttgccccaggcc

SEQ ID NO: 31470 - DNA, 22 bp, synthetic construct
  misc_feature 1..22: note = chemically synthesized
  source 1..22: mol_type = other DNA
tggagaactttgccccaggcct

SEQ ID NO: 31471 - DNA, 22 bp, synthetic construct
  misc_feature 1..22: note = chemically synthesized
  source 1..22: mol_type = other DNA
gagaactttgccccaggcctgc

SEQ ID NO: 31472 - DNA, 22 bp, synthetic construct
  misc_feature 1..22: note = chemically synthesized
  source 1..22: mol_type = other DNA
tgccccaggcctgcaaagtatt

SEQ ID NO: 31473 - DNA, 22 bp, synthetic construct
  misc_feature 1..22: note = chemically synthesized
  source 1..22: mol_type = other DNA
gccccaggcctgcaaagtattg

SEQ ID NO: 31474 - DNA, 22 bp, synthetic construct
  misc_feature 1..22: note = chemically synthesized
  source 1..22: mol_type = other DNA
ccccaggcctgcaaagtattgt

SEQ ID NO: 31475 - DNA, 22 bp, synthetic construct
  misc_feature 1..22: note = chemically synthesized
  source 1..22: mol_type = other DNA
caaagtattgtcacctagttgg

SEQ ID NO: 31476 - DNA, 22 bp, synthetic construct
  misc_feature 1..22: note = chemically synthesized
  source 1..22: mol_type = other DNA
tcacctagttggcattgtaatc

SEQ ID NO: 31477 - DNA, 22 bp, synthetic construct
  misc_feature 1..22: note = chemically synthesized
  source 1..22: mol_type = other DNA
gttggcattgtaatcgtgactt

SEQ ID NO: 31478 - DNA, 22 bp, synthetic construct
  misc_feature 1..22: note = chemically synthesized
  source 1..22: mol_type = other DNA
gcattgtaatcgtgacttcaaa

SEQ ID NO: 31479 - DNA, 22 bp, synthetic construct
  misc_feature 1..22: note = chemically synthesized
  source 1..22: mol_type = other DNA
taatcgtgacttcaaaaggcca

SEQ ID NO: 31480 - DNA, 22 bp, synthetic construct
  misc_feature 1..22: note = chemically synthesized
  source 1..22: mol_type = other DNA
caaaaggccattcaaaagctgc

SEQ ID NO: 31481 - DNA, 22 bp, synthetic construct
  misc_feature 1..22: note = chemically synthesized
  source 1..22: mol_type = other DNA
aaaaggccattcaaaagctgct

SEQ ID NO: 31482 - DNA, 22 bp, synthetic construct
  misc_feature 1..22: note = chemically synthesized
  source 1..22: mol_type = other DNA
aaaagctgcttcaggatgatag

SEQ ID NO: 31483 - DNA, 22 bp, synthetic construct
  misc_feature 1..22: note = chemically synthesized
  source 1..22: mol_type = other DNA
cttcaggatgatagggatcatg

SEQ ID NO: 31484 - DNA, 22 bp, synthetic construct
  misc_feature 1..22: note = chemically synthesized
  source 1..22: mol_type = other DNA
caggatgatagggatcatggta

SEQ ID NO: 31485 - DNA, 22 bp, synthetic construct
  misc_feature 1..22: note = chemically synthesized
  source 1..22: mol_type = other DNA
aggatgatagggatcatggtaa

SEQ ID NO: 31486 - DNA, 22 bp, synthetic construct
  misc_feature 1..22: note = chemically synthesized
  source 1..22: mol_type = other DNA
catgagcatgagcccactgtca

SEQ ID NO: 31487 - DNA, 22 bp, synthetic construct
  misc_feature 1..22: note = chemically synthesized
  source 1..22: mol_type = other DNA
tcacacttctttagccataaag

SEQ ID NO: 31488 - DNA, 22 bp, synthetic construct
  misc_feature 1..22: note = chemically synthesized
  source 1..22: mol_type = other DNA
ctttagccataaagtgagtggc

SEQ ID NO: 31489 - DNA, 22 bp, synthetic construct
  misc_feature 1..22: note = chemically synthesized
  source 1..22: mol_type = other DNA
tttagccataaagtgagtggct

SEQ ID NO: 31490 - DNA, 22 bp, synthetic construct
  misc_feature 1..22: note = chemically synthesized
  source 1..22: mol_type = other DNA
tagccataaagtgagtggcttg

SEQ ID NO: 31491 - DNA, 22 bp, synthetic construct
  misc_feature 1..22: note = chemically synthesized
  source 1..22: mol_type = other DNA
agccataaagtgagtggcttgg

SEQ ID NO: 31492 - DNA, 22 bp, synthetic construct
  misc_feature 1..22: note = chemically synthesized
  source 1..22: mol_type = other DNA
gccataaagtgagtggcttggt

SEQ ID NO: 31493 - DNA, 22 bp, synthetic construct
  misc_feature 1..22: note = chemically synthesized
  source 1..22: mol_type = other DNA
ggtcagaagcaatgctgtgtgg

SEQ ID NO: 31494 - DNA, 22 bp, synthetic construct
  misc_feature 1..22: note = chemically synthesized
  source 1..22: mol_type = other DNA
gtcagaagcaatgctgtgtgga

SEQ ID NO: 31495 - DNA, 22 bp, synthetic construct
  misc_feature 1..22: note = chemically synthesized
  source 1..22: mol_type = other DNA
tgtggaataccatgacagtgga

SEQ ID NO: 31496 - DNA, 22 bp, synthetic construct
  misc_feature 1..22: note = chemically synthesized
  source 1..22: mol_type = other DNA
tgtgattccatggatggtagtc

SEQ ID NO: 31497 - DNA, 22 bp, synthetic construct
  misc_feature 1..22: note = chemically synthesized
  source 1..22: mol_type = other DNA
tgattccatggatggtagtctt

SEQ ID NO: 31498 - DNA, 22 bp, synthetic construct
  misc_feature 1..22: note = chemically synthesized
  source 1..22: mol_type = other DNA
catggatggtagtcttggcata

SEQ ID NO: 31499 - DNA, 22 bp, synthetic construct
  misc_feature 1..22: note = chemically synthesized
  source 1..22: mol_type = other DNA
ggcataagcattgagttcagga

SEQ ID NO: 31500 - DNA, 22 bp, synthetic construct
  misc_feature 1..22: note = chemically synthesized
  source 1..22: mol_type = other DNA
gcataagcattgagttcaggat

SEQ ID NO: 31501 - DNA, 22 bp, synthetic construct
  misc_feature 1..22: note = chemically synthesized
  source 1..22: mol_type = other DNA
agttcaggattgggaaacccat

SEQ ID NO: 31502 - DNA, 22 bp, synthetic construct
  misc_feature 1..22: note = chemically synthesized
  source 1..22: mol_type = other DNA
aggattgggaaacccatatcca

SEQ ID NO: 31503 - DNA, 22 bp, synthetic construct
  misc_feature 1..22: note = chemically synthesized
  source 1..22: mol_type = other DNA
ggaaacccatatccagagtaag

SEQ ID NO: 31504 - DNA, 22 bp, synthetic construct
  misc_feature 1..22: note = chemically synthesized
  source 1..22: mol_type = other DNA
ttccagtgaggacaagcctctg

SEQ ID NO: 31505 - DNA, 22 bp, synthetic construct
  misc_feature 1..22: note = chemically synthesized
  source 1..22: mol_type = other DNA
cagtgaggacaagcctctgccc

SEQ ID NO: 31506 - DNA, 22 bp, synthetic construct
  misc_feature 1..22: note = chemically synthesized
  source 1..22: mol_type = other DNA
tgccctttccatgatggaagag

SEQ ID NO: 31507 - DNA, 22 bp, synthetic construct
  misc_feature 1..22: note = chemically synthesized
  source 1..22: mol_type = other DNA
ccctttccatgatggaagaggt

SEQ ID NO: 31508 - DNA, 22 bp, synthetic construct
  misc_feature 1..22: note = chemically synthesized
  source 1..22: mol_type = other DNA
tccatgatggaagaggtccaat

SEQ ID NO: 31509 - DNA, 22 bp, synthetic construct
  misc_feature 1..22: note = chemically synthesized
  source 1..22: mol_type = other DNA
ccatgatggaagaggtccaata

SEQ ID NO: 31510 - DNA, 22 bp, synthetic construct
  misc_feature 1..22: note = chemically synthesized
  source 1..22: mol_type = other DNA
catgatggaagaggtccaatat

SEQ ID NO: 31511 - DNA, 22 bp, synthetic construct
  misc_feature 1..22: note = chemically synthesized
  source 1..22: mol_type = other DNA
ccaccaggtagctggctgatca

SEQ ID NO: 31512 - DNA, 22 bp, synthetic construct
  misc_feature 1..22: note = chemically synthesized
  source 1..22: mol_type = other DNA
gctgatcaccccgaggaatggt

SEQ ID NO: 31513 - DNA, 22 bp, synthetic construct
  misc_feature 1..22: note = chemically synthesized
  source 1..22: mol_type = other DNA
atcaccccgaggaatggtgcca

SEQ ID NO: 31514 - DNA, 22 bp, synthetic construct
  misc_feature 1..22: note = chemically synthesized
  source 1..22: mol_type = other DNA
agtgttggtctctgatgctggc

SEQ ID NO: 31515 - DNA, 22 bp, synthetic construct
  misc_feature 1..22: note = chemically synthesized
  source 1..22: mol_type = other DNA
gtgttggtctctgatgctggca

SEQ ID NO: 31516 - DNA, 22 bp, synthetic construct
  misc_feature 1..22: note = chemically synthesized
  source 1..22: mol_type = other DNA
gtctctgatgctggcaagcagt

SEQ ID NO: 31517 - DNA, 22 bp, synthetic construct
  misc_feature 1..22: note = chemically synthesized
  source 1..22: mol_type = other DNA
tgatgctggcaagcagtggctg

SEQ ID NO: 31518 - DNA, 22 bp, synthetic construct
  misc_feature 1..22: note = chemically synthesized
  source 1..22: mol_type = other DNA
atgctggcaagcagtggctgtg

SEQ ID NO: 31519 - DNA, 22 bp, synthetic construct
  misc_feature 1..22: note = chemically synthesized
  source 1..22: mol_type = other DNA
gcaagcagtggctgtggccagg

SEQ ID NO: 31520 - DNA, 22 bp, synthetic construct
  misc_feature 1..22: note = chemically synthesized
  source 1..22: mol_type = other DNA
tggccaggtcagctttggtgag

SEQ ID NO: 31521 - DNA, 22 bp, synthetic construct
  misc_feature 1..22: note = chemically synthesized
  source 1..22: mol_type = other DNA
tggtgagtggaagtccatgttg

SEQ ID NO: 31522 - DNA, 22 bp, synthetic construct
  misc_feature 1..22: note = chemically synthesized
  source 1..22: mol_type = other DNA
ggtgagtggaagtccatgttgc

SEQ ID NO: 31523 - DNA, 22 bp, synthetic construct
  misc_feature 1..22: note = chemically synthesized
  source 1..22: mol_type = other DNA
gtgagtggaagtccatgttgct

SEQ ID NO: 31524 - DNA, 22 bp, synthetic construct
  misc_feature 1..22: note = chemically synthesized
  source 1..22: mol_type = other DNA
ctgagcccaagcataacttcca

SEQ ID NO: 31525 - DNA, 22 bp, synthetic construct
  misc_feature 1..22: note = chemically synthesized
  source 1..22: mol_type = other DNA
agcccaagcataacttccatcc

SEQ ID NO: 31526 - DNA, 22 bp, synthetic construct
  misc_feature 1..22: note = chemically synthesized
  source 1..22: mol_type = other DNA
ccatccctgcaactgtggccac

SEQ ID NO: 31527 - DNA, 22 bp, synthetic construct
  misc_feature 1..22: note = chemically synthesized
  source 1..22: mol_type = other DNA
catccctgcaactgtggccact

SEQ ID NO: 31528 - DNA, 22 bp, synthetic construct
  misc_feature 1..22: note = chemically synthesized
  source 1..22: mol_type = other DNA
caactgtggccactttgttcat

SEQ ID NO: 31529 - DNA, 22 bp, synthetic construct
  misc_feature 1..22: note = chemically synthesized
  source 1..22: mol_type = other DNA
tggccactttgttcatgggtcc

SEQ ID NO: 31530 - DNA, 22 bp, synthetic construct
  misc_feature 1..22: note = chemically synthesized
  source 1..22: mol_type = other DNA
tgttcatgggtccattggacga

SEQ ID NO: 31531 - DNA, 22 bp, synthetic construct
  misc_feature 1..22: note = chemically synthesized
  source 1..22: mol_type = other DNA
gttcatgggtccattggacgat

SEQ ID NO: 31532 - DNA, 22 bp, synthetic construct
  misc_feature 1..22: note = chemically synthesized
  source 1..22: mol_type = other DNA
ttcatgggtccattggacgatg

SEQ ID NO: 31533 - DNA, 22 bp, synthetic construct
  misc_feature 1..22: note = chemically synthesized
  source 1..22: mol_type = other DNA
atgggtccattggacgatgaca

SEQ ID NO: 31534 - DNA, 22 bp, synthetic construct
  misc_feature 1..22: note = chemically synthesized
  source 1..22: mol_type = other DNA
gacgatgacatgagtggcctgg

SEQ ID NO: 31535 - DNA, 22 bp, synthetic construct
  misc_feature 1..22: note = chemically synthesized
  source 1..22: mol_type = other DNA
ggaaaaggctgagtggtgtcca

SEQ ID NO: 31536 - DNA, 22 bp, synthetic construct
  misc_feature 1..22: note = chemically synthesized
  source 1..22: mol_type = other DNA
agtggtgtccacagaattgatc

SEQ ID NO: 31537 - DNA, 22 bp, synthetic construct
  misc_feature 1..22: note = chemically synthesized
  source 1..22: mol_type = other DNA
atcatcctatccacttgattat

SEQ ID NO: 31538 - DNA, 22 bp, synthetic construct
  misc_feature 1..22: note = chemically synthesized
  source 1..22: mol_type = other DNA
tccacttgattattaaaatcct

SEQ ID NO: 31539 - DNA, 22 bp, synthetic construct
  misc_feature 1..22: note = chemically synthesized
  source 1..22: mol_type = other DNA
gattattaaaatcctcttctgc

SEQ ID NO: 31540 - DNA, 22 bp, synthetic construct
  misc_feature 1..22: note = chemically synthesized
  source 1..22: mol_type = other DNA
attattaaaatcctcttctgct

SEQ ID NO: 31541 - DNA, 22 bp, synthetic construct
  misc_feature 1..22: note = chemically synthesized
  source 1..22: mol_type = other DNA
ttaaaatcctcttctgctgagg

SEQ ID NO: 31542 - DNA, 22 bp, synthetic construct
  misc_feature 1..22: note = chemically synthesized
  source 1..22: mol_type = other DNA
aaatcctcttctgctgaggtca

SEQ ID NO: 31543 - DNA, 22 bp, synthetic construct
  misc_feature 1..22: note = chemically synthesized
  source 1..22: mol_type = other DNA
ttctgctgaggtcacccattgg

SEQ ID NO: 31544 - DNA, 22 bp, synthetic construct
  misc_feature 1..22: note = chemically synthesized
  source 1..22: mol_type = other DNA
ctgctgaggtcacccattggtg

SEQ ID NO: 31545 - DNA, 22 bp, synthetic construct
  misc_feature 1..22: note = chemically synthesized
  source 1..22: mol_type = other DNA
tgctgaggtcacccattggtga

SEQ ID NO: 31546 - DNA, 22 bp, synthetic construct
  misc_feature 1..22: note = chemically synthesized
  source 1..22: mol_type = other DNA
ctgaggtcacccattggtgagc

SEQ ID NO: 31547 - DNA, 22 bp, synthetic construct
  misc_feature 1..22: note = chemically synthesized
  source 1..22: mol_type = other DNA
aggtcacccattggtgagcact

SEQ ID NO: 31548 - DNA, 22 bp, synthetic construct
  misc_feature 1..22: note = chemically synthesized
  source 1..22: mol_type = other DNA
gtgagcactcacatgggatgaa

SEQ ID NO: 31549 - DNA, 22 bp, synthetic construct
  misc_feature 1..22: note = chemically synthesized
  source 1..22: mol_type = other DNA
acatgggatgaaaatatctttg

SEQ ID NO: 31550 - DNA, 22 bp, synthetic construct
  misc_feature 1..22: note = chemically synthesized
  source 1..22: mol_type = other DNA
tgtagtttttgactaatcatag

SEQ ID NO: 31551 - DNA, 22 bp, synthetic construct
  misc_feature 1..22: note = chemically synthesized
  source 1..22: mol_type = other DNA
gtagtttttgactaatcataga

SEQ ID NO: 31552 - DNA, 22 bp, synthetic construct
  misc_feature 1..22: note = chemically synthesized
  source 1..22: mol_type = other DNA
tagtttttgactaatcatagag

SEQ ID NO: 31553 - DNA, 22 bp, synthetic construct
  misc_feature 1..22: note = chemically synthesized
  source 1..22: mol_type = other DNA
ttgactaatcatagaggtccat

SEQ ID NO: 31554 - DNA, 22 bp, synthetic construct
  misc_feature 1..22: note = chemically synthesized
  source 1..22: mol_type = other DNA
tgactaatcatagaggtccatc

SEQ ID NO: 31555 - DNA, 22 bp, synthetic construct
  misc_feature 1..22: note = chemically synthesized
  source 1..22: mol_type = other DNA
gactaatcatagaggtccatcc

SEQ ID NO: 31556 - DNA, 22 bp, synthetic construct
  misc_feature 1..22: note = chemically synthesized
  source 1..22: mol_type = other DNA
actaatcatagaggtccatcca

SEQ ID NO: 31557 - DNA, 22 bp, synthetic construct
  misc_feature 1..22: note = chemically synthesized
  source 1..22: mol_type = other DNA
atcatagaggtccatccacata

SEQ ID NO: 31558 - DNA, 22 bp, synthetic construct
  misc_feature 1..22: note = chemically synthesized
  source 1..22: mol_type = other DNA
ttccccaaatttctttgtcatc

SEQ ID NO: 31559 - DNA, 22 bp, synthetic construct
  misc_feature 1..22: note = chemically synthesized
  source 1..22: mol_type = other DNA
ccccaaatttctttgtcatcaa

SEQ ID NO: 31560 - DNA, 22 bp, synthetic construct
  misc_feature 1..22: note = chemically synthesized
  source 1..22: mol_type = other DNA
cccaaatttctttgtcatcaat

SEQ ID NO: 31561 - DNA, 22 bp, synthetic construct
  misc_feature 1..22: note = chemically synthesized
  source 1..22: mol_type = other DNA
ctttgtcatcaattttccagtc

SEQ ID NO: 31562 - DNA, 22 bp, synthetic construct
  misc_feature 1..22: note = chemically synthesized
  source 1..22: mol_type = other DNA
tttgtcatcaattttccagtca

SEQ ID NO: 31563 - DNA, 22 bp, synthetic construct
  misc_feature 1..22: note = chemically synthesized
  source 1..22: mol_type = other DNA
tgtcatcaattttccagtcatg

SEQ ID NO: 31564 - DNA, 22 bp, synthetic construct
  misc_feature 1..22: note = chemically synthesized
  source 1..22: mol_type = other DNA
gtcatcaattttccagtcatgc

SEQ ID NO: 31565 - DNA, 22 bp, synthetic construct
  misc_feature 1..22: note = chemically synthesized
  source 1..22: mol_type = other DNA
tcatcaattttccagtcatgct

SEQ ID NO: 31566 - DNA, 22 bp, synthetic construct
  misc_feature 1..22: note = chemically synthesized
  source 1..22: mol_type = other DNA
tccagtcatgctttttccaagt

SEQ ID NO: 31567 - DNA, 22 bp, synthetic construct
  misc_feature 1..22: note = chemically synthesized
  source 1..22: mol_type = other DNA
ccagtcatgctttttccaagtc

SEQ ID NO: 31568 - DNA, 22 bp, synthetic construct
  misc_feature 1..22: note = chemically synthesized
  source 1..22: mol_type = other DNA
cagtcatgctttttccaagtcc

SEQ ID NO: 31569 - DNA, 22 bp, synthetic construct
  misc_feature 1..22: note = chemically synthesized
  source 1..22: mol_type = other DNA
tttccaagtccctgaccatcta

SEQ ID NO: 31570 - DNA, 22 bp, synthetic construct
  misc_feature 1..22: note = chemically synthesized
  source 1..22: mol_type = other DNA
ttccaagtccctgaccatctag

SEQ ID NO: 31571 - DNA, 22 bp, synthetic construct
  misc_feature 1..22: note = chemically synthesized
  source 1..22: mol_type = other DNA
tccaagtccctgaccatctagc

SEQ ID NO: 31572 - DNA, 22 bp, synthetic construct
  misc_feature 1..22: note = chemically synthesized
  source 1..22: mol_type = other DNA
ccaagtccctgaccatctagcc

SEQ ID NO: 31573 - DNA, 22 bp, synthetic construct
  misc_feature 1..22: note = chemically synthesized
  source 1..22: mol_type = other DNA
caagtccctgaccatctagcca

SEQ ID NO: 31574 - DNA, 22 bp, synthetic construct
  misc_feature 1..22: note = chemically synthesized
  source 1..22: mol_type = other DNA
accatctagccaaacctttggc

SEQ ID NO: 31575 - DNA, 22 bp, synthetic construct
  misc_feature 1..22: note = chemically synthesized
  source 1..22: mol_type = other DNA
gccaaacctttggctacagccc

SEQ ID NO: 31576 - DNA, 22 bp, synthetic construct
  misc_feature 1..22: note = chemically synthesized
  source 1..22: mol_type = other DNA
tggctacagcccatgaataagt

SEQ ID NO: 31577 - DNA, 22 bp, synthetic construct
  misc_feature 1..22: note = chemically synthesized
  source 1..22: mol_type = other DNA
ggctacagcccatgaataagta

SEQ ID NO: 31578 - DNA, 22 bp, synthetic construct
  misc_feature 1..22: note = chemically synthesized
  source 1..22: mol_type = other DNA
gctacagcccatgaataagtat

SEQ ID NO: 31579 - DNA, 22 bp, synthetic construct
  misc_feature 1..22: note = chemically synthesized
  source 1..22: mol_type = other DNA
cagcccatgaataagtatataa

SEQ ID NO: 31580 - DNA, 22 bp, synthetic construct
  misc_feature 1..22: note = chemically synthesized
  source 1..22: mol_type = other DNA
gccatttctccttctgtgcaaa

SEQ ID NO: 31581 - DNA, 22 bp, synthetic construct
  misc_feature 1..22: note = chemically synthesized
  source 1..22: mol_type = other DNA
ctccttctgtgcaaagtgcaca

SEQ ID NO: 31582 - DNA, 22 bp, synthetic construct
  misc_feature 1..22: note = chemically synthesized
  source 1..22: mol_type = other DNA
tccttctgtgcaaagtgcacaa

SEQ ID NO: 31583 - DNA, 22 bp, synthetic construct
  misc_feature 1..22: note = chemically synthesized
  source 1..22: mol_type = other DNA
cttctgtgcaaagtgcacaacc

SEQ ID NO: 31584 - DNA, 22 bp, synthetic construct
  misc_feature 1..22: note = chemically synthesized
  source 1..22: mol_type = other DNA
ctgtgcaaagtgcacaaccagg

SEQ ID NO: 31585 - DNA, 22 bp, synthetic construct
  misc_feature 1..22: note = chemically synthesized
  source 1..22: mol_type = other DNA
tgtgcaaagtgcacaaccaggc

SEQ ID NO: 31586 - DNA, 22 bp, synthetic construct
  misc_feature 1..22: note = chemically synthesized
  source 1..22: mol_type = other DNA
tgcaaagtgcacaaccaggcac

SEQ ID NO: 31587 - DNA, 22 bp, synthetic construct
  misc_feature 1..22: note = chemically synthesized
  source 1..22: mol_type = other DNA
ctcaaagttctgccaactagga

SEQ ID NO: 31588 - DNA, 22 bp, synthetic construct
  misc_feature 1..22: note = chemically synthesized
  source 1..22: mol_type = other DNA
aaagttctgccaactaggaaga

SEQ ID NO: 31589 - DNA, 22 bp, synthetic construct
  misc_feature 1..22: note = chemically synthesized
  source 1..22: mol_type = other DNA
tgccaactaggaagatttccct

SEQ ID NO: 31590 - DNA, 22 bp, synthetic construct
  misc_feature 1..22: note = chemically synthesized
  source 1..22: mol_type = other DNA
ccaactaggaagatttcccttc

SEQ ID NO: 31591 - DNA, 22 bp, synthetic construct
  misc_feature 1..22: note = chemically synthesized
  source 1..22: mol_type = other DNA
ggaagatttcccttcaccgttg

SEQ ID NO: 31592 - DNA, 22 bp, synthetic construct
  misc_feature 1..22: note = chemically synthesized
  source 1..22: mol_type = other DNA
cccttcaccgttgtccttcagg

SEQ ID NO: 31593 - DNA, 22 bp, synthetic construct
  misc_feature 1..22: note = chemically synthesized
  source 1..22: mol_type = other DNA
ccttcaccgttgtccttcaggg

SEQ ID NO: 31594 - DNA, 22 bp, synthetic construct
  misc_feature 1..22: note = chemically synthesized
  source 1..22: mol_type = other DNA
caccgttgtccttcagggatgt

SEQ ID NO: 31595 - DNA, 22 bp, synthetic construct
  misc_feature 1..22: note = chemically synthesized
  source 1..22: mol_type = other DNA
accgttgtccttcagggatgtc

SEQ ID NO: 31596 - DNA, 22 bp, synthetic construct
  misc_feature 1..22: note = chemically synthesized
  source 1..22: mol_type = other DNA
tccttcagggatgtcctagaaa

SEQ ID NO: 31597 - DNA, 22 bp, synthetic construct
  misc_feature 1..22: note = chemically synthesized
  source 1..22: mol_type = other DNA
cagggatgtcctagaaaggggc

SEQ ID NO: 31598 - DNA, 22 bp, synthetic construct
  misc_feature 1..22: note = chemically synthesized
  source 1..22: mol_type = other DNA
agggatgtcctagaaaggggct

SEQ ID NO: 31599 - DNA, 22 bp, synthetic construct
  misc_feature 1..22: note = chemically synthesized
  source 1..22: mol_type = other DNA
gaaaggggctgtagtgctgcgg

SEQ ID NO: 31600 - DNA, 22 bp, synthetic construct
  misc_feature 1..22: note = chemically synthesized
  source 1..22: mol_type = other DNA
tagtgctgcggctgtccacttt

SEQ ID NO: 31601 - DNA, 22 bp, synthetic construct
  misc_feature 1..22: note = chemically synthesized
  source 1..22: mol_type = other DNA
cggctgtccacttttgggtggt

SEQ ID NO: 31602 - DNA, 22 bp, synthetic construct
  misc_feature 1..22: note = chemically synthesized
  source 1..22: mol_type = other DNA
tccacttttgggtggtgcctgc

SEQ ID NO: 31603 - DNA, 22 bp, synthetic construct
  misc_feature 1..22: note = chemically synthesized
  source 1..22: mol_type = other DNA
ttgggtggtgcctgcatatcgt

SEQ ID NO: 31604 - DNA, 22 bp, synthetic construct
  misc_feature 1..22: note = chemically synthesized
  source 1..22: mol_type = other DNA
tgggtggtgcctgcatatcgtg

SEQ ID NO: 31605 - DNA, 22 bp, synthetic construct
  misc_feature 1..22: note = chemically synthesized
  source 1..22: mol_type = other DNA
gggtggtgcctgcatatcgtgc

SEQ ID NO: 31606 - DNA, 22 bp, synthetic construct
  misc_feature 1..22: note = chemically synthesized
  source 1..22: mol_type = other DNA
ggtggtgcctgcatatcgtgca

SEQ ID NO: 31607 - DNA, 22 bp, synthetic construct
  misc_feature 1..22: note = chemically synthesized
  source 1..22: mol_type = other DNA
catatcgtgcagaactatctgt

SEQ ID NO: 31608 - DNA, 22 bp, synthetic construct
  misc_feature 1..22: note = chemically synthesized
  source 1..22: mol_type = other DNA
tctgtgaaccaggacctagtct

SEQ ID NO: 31609 - DNA, 22 bp, synthetic construct
  misc_feature 1..22: note = chemically synthesized
  source 1..22: mol_type = other DNA
tgaaccaggacctagtcttctc

SEQ ID NO: 31610 - DNA, 22 bp, synthetic construct
  misc_feature 1..22: note = chemically synthesized
  source 1..22: mol_type = other DNA
gtcttctcttcctctgtcagct

SEQ ID NO: 31611 - DNA, 22 bp, synthetic construct
  misc_feature 1..22: note = chemically synthesized
  source 1..22: mol_type = other DNA
ctcttcctctgtcagctgatca

SEQ ID NO: 31612 - DNA, 22 bp, synthetic construct
  misc_feature 1..22: note = chemically synthesized
  source 1..22: mol_type = other DNA
tcttcctctgtcagctgatcat

SEQ ID NO: 31613 - DNA, 22 bp, synthetic construct
  misc_feature 1..22: note = chemically synthesized
  source 1..22: mol_type = other DNA
ttcctctgtcagctgatcatag

SEQ ID NO: 31614 - DNA, 22 bp, synthetic construct
  misc_feature 1..22: note = chemically synthesized
  source 1..22: mol_type = other DNA
cctctgtcagctgatcataggg

SEQ ID NO: 31615 - DNA, 22 bp, synthetic construct
  misc_feature 1..22: note = chemically synthesized
  source 1..22: mol_type = other DNA
ctctgtcagctgatcataggga

SEQ ID NO: 31616 - DNA, 22 bp, synthetic construct
  misc_feature 1..22: note = chemically synthesized
  source 1..22: mol_type = other DNA
tgtcagctgatcatagggaact

SEQ ID NO: 31617 - DNA, 22 bp, synthetic construct
  misc_feature 1..22: note = chemically synthesized
  source 1..22: mol_type = other DNA
tcagctgatcatagggaactcc

SEQ ID NO: 31618 - DNA, 22 bp, synthetic construct
  misc_feature 1..22: note = chemically synthesized
  source 1..22: mol_type = other DNA
atcatagggaactccccatgag

SEQ ID NO: 31619 - DNA, 22 bp, synthetic construct
  misc_feature 1..22: note = chemically synthesized
  source 1..22: mol_type = other DNA
cccatgagaccatcggtgcagt

SEQ ID NO: 31620 - DNA, 22 bp, synthetic construct
  misc_feature 1..22: note = chemically synthesized
  source 1..22: mol_type = other DNA
agggagagaaagcagtgtgtca

SEQ ID NO: 31621 - DNA, 22 bp, synthetic construct
  misc_feature 1..22: note = chemically synthesized
  source 1..22: mol_type = other DNA
gagcccctttctcatgtaactt

SEQ ID NO: 31622 - DNA, 22 bp, synthetic construct
  misc_feature 1..22: note = chemically synthesized
  source 1..22: mol_type = other DNA
agcccctttctcatgtaactta

SEQ ID NO: 31623 - DNA, 22 bp, synthetic construct
  misc_feature 1..22: note = chemically synthesized
  source 1..22: mol_type = other DNA
tctcatgtaacttactagtgcc

SEQ ID NO: 31624 - DNA, 22 bp, synthetic construct
  misc_feature 1..22: note = chemically synthesized
  source 1..22: mol_type = other DNA
ctcatgtaacttactagtgcct

SEQ ID NO: 31625 - DNA, 22 bp, synthetic construct
  misc_feature 1..22: note = chemically synthesized
  source 1..22: mol_type = other DNA
tcatgtaacttactagtgcctt

SEQ ID NO: 31626 - DNA, 22 bp, synthetic construct
  misc_feature 1..22: note = chemically synthesized
  source 1..22: mol_type = other DNA
atgtaacttactagtgccttca

SEQ ID NO: 31627 - DNA, 22 bp, synthetic construct
  misc_feature 1..22: note = chemically synthesized
  source 1..22: mol_type = other DNA
actagtgccttcaggatctgct

SEQ ID NO: 31628 - DNA, 22 bp, synthetic construct
  misc_feature 1..22: note = chemically synthesized
  source 1..22: mol_type = other DNA
ctagtgccttcaggatctgctc

SEQ ID NO: 31629 - DNA, 22 bp, synthetic construct
  misc_feature 1..22: note = chemically synthesized
  source 1..22: mol_type = other DNA
gtgccttcaggatctgctcaag

SEQ ID NO: 31630 - DNA, 22 bp, synthetic construct
  misc_feature 1..22: note = chemically synthesized
  source 1..22: mol_type = other DNA
caggatctgctcaagcccaatc

SEQ ID NO: 31631 - DNA, 22 bp, synthetic construct
  misc_feature 1..22: note = chemically synthesized
  source 1..22: mol_type = other DNA
aggatctgctcaagcccaatcg

SEQ ID NO: 31632 - DNA, 22 bp, synthetic construct
  misc_feature 1..22: note = chemically synthesized
  source 1..22: mol_type = other DNA
ctcaagcccaatcgcatatata

SEQ ID NO: 31633 - DNA, 22 bp, synthetic construct
  misc_feature 1..22: note = chemically synthesized
  source 1..22: mol_type = other DNA
aagcccaatcgcatatatacca

SEQ ID NO: 31634 - DNA, 22 bp, synthetic construct
  misc_feature 1..22: note = chemically synthesized
  source 1..22: mol_type = other DNA
ccatttgctgatgcaatgctgc

SEQ ID NO: 31635 - DNA, 22 bp, synthetic construct
  misc_feature 1..22: note = chemically synthesized
  source 1..22: mol_type = other DNA
catttgctgatgcaatgctgct

SEQ ID NO: 31636 - DNA, 22 bp, synthetic construct
  misc_feature 1..22: note = chemically synthesized
  source 1..22: mol_type = other DNA
gctgatgcaatgctgctgtgca

SEQ ID NO: 31637 - DNA, 22 bp, synthetic construct
  misc_feature 1..22: note = chemically synthesized
  source 1..22: mol_type = other DNA
ctgatgcaatgctgctgtgcac

SEQ ID NO: 31638 - DNA, 22 bp, synthetic construct
  misc_feature 1..22: note = chemically synthesized
  source 1..22: mol_type = other DNA
atgcaatgctgctgtgcacagc

SEQ ID NO: 31639 - DNA, 22 bp, synthetic construct
  misc_feature 1..22: note = chemically synthesized
  source 1..22: mol_type = other DNA
ctgtgcacagcccactttatgg

SEQ ID NO: 31640 - DNA, 22 bp, synthetic construct
  misc_feature 1..22: note = chemically synthesized
  source 1..22: mol_type = other DNA
tgcacagcccactttatggcta

SEQ ID NO: 31641 - DNA, 22 bp, synthetic construct
  misc_feature 1..22: note = chemically synthesized
  source 1..22: mol_type = other DNA
tatggctagatggatcagaaag

SEQ ID NO: 31642 - DNA, 22 bp, synthetic construct
  misc_feature 1..22: note = chemically synthesized
  source 1..22: mol_type = other DNA
atggctagatggatcagaaagc

SEQ ID NO: 31643 - DNA, 22 bp, synthetic construct
  misc_feature 1..22: note = chemically synthesized
  source 1..22: mol_type = other DNA
tggctagatggatcagaaagca

SEQ ID NO: 31644 - DNA, 22 bp, synthetic construct
  misc_feature 1..22: note = chemically synthesized
  source 1..22: mol_type = other DNA
gatggatcagaaagcacccagt

SEQ ID NO: 31645 - DNA, 22 bp, synthetic construct
  misc_feature 1..22: note = chemically synthesized
  source 1..22: mol_type = other DNA
atgataggcagttcaggtcaca

SEQ ID NO: 31646 - DNA, 22 bp, synthetic construct
  misc_feature 1..22: note = chemically synthesized
  source 1..22: mol_type = other DNA
aggtcacatggtgacttgatga

SEQ ID NO: 31647 - DNA, 22 bp, synthetic construct
  misc_feature 1..22: note = chemically synthesized
  source 1..22: mol_type = other DNA
gatgactcatagtcaaatattt

SEQ ID NO: 31648 - DNA, 22 bp, synthetic construct
  misc_feature 1..22: note = chemically synthesized
  source 1..22: mol_type = other DNA
atgactcatagtcaaatatttc

SEQ ID NO: 31649 - DNA, 22 bp, synthetic construct
  misc_feature 1..22: note = chemically synthesized
  source 1..22: mol_type = other DNA
atagtcaaatatttcgtttcca

SEQ ID NO: 31650 - DNA, 22 bp, synthetic construct
  misc_feature 1..22: note = chemically synthesized
  source 1..22: mol_type = other DNA
cgtttccaccaaagcccagtaa

SEQ ID NO: 31651 - DNA, 22 bp, synthetic construct
  misc_feature 1..22: note = chemically synthesized
  source 1..22: mol_type = other DNA
gtttccaccaaagcccagtaac

SEQ ID NO: 31652 - DNA, 22 bp, synthetic construct
  misc_feature 1..22: note = chemically synthesized
  source 1..22: mol_type = other DNA
ccaccaaagcccagtaacaggc

SEQ ID NO: 31653 - DNA, 22 bp, synthetic construct
  misc_feature 1..22: note = chemically synthesized
  source 1..22: mol_type = other DNA
caccaaagcccagtaacaggcc

SEQ ID NO: 31654 - DNA, 22 bp, synthetic construct
  misc_feature 1..22: note = chemically synthesized
  source 1..22: mol_type = other DNA
tctccctaaaagagagtagtta

SEQ ID NO: 31655 - DNA, 22 bp, synthetic construct
  misc_feature 1..22: note = chemically synthesized
  source 1..22: mol_type = other DNA
ctccctaaaagagagtagttat

SEQ ID NO: 31656 - DNA, 22 bp, synthetic construct
  misc_feature 1..22: note = chemically synthesized
  source 1..22: mol_type = other DNA
tccctaaaagagagtagttatc

SEQ ID NO: 31657 - DNA, 22 bp, synthetic construct
  misc_feature 1..22: note = chemically synthesized
  source 1..22: mol_type = other DNA
cctaaaagagagtagttatctg

SEQ ID NO: 31658 - DNA, 22 bp, synthetic construct
  misc_feature 1..22: note = chemically synthesized
  source 1..22: mol_type = other DNA
aaagagagtagttatctgcaga

SEQ ID NO: 31659 - DNA, 22 bp, synthetic construct
  misc_feature 1..22: note = chemically synthesized
  source 1..22: mol_type = other DNA
tctgcagaagatggcagggcct

SEQ ID NO: 31660 - DNA, 22 bp, synthetic construct
  misc_feature 1..22: note = chemically synthesized
  source 1..22: mol_type = other DNA
cagaagatggcagggccttgct

SEQ ID NO: 31661 - DNA, 22 bp, synthetic construct
  misc_feature 1..22: note = chemically synthesized
  source 1..22: mol_type = other DNA
gctccaaaatcctagaggcctc

SEQ ID NO: 31662 - DNA, 22 bp, synthetic construct
  misc_feature 1..22: note = chemically synthesized
  source 1..22: mol_type = other DNA
ctccaaaatcctagaggcctcc

SEQ ID NO: 31663 - DNA, 22 bp, synthetic construct
  misc_feature 1..22: note = chemically synthesized
  source 1..22: mol_type = other DNA
caaaatcctagaggcctccgct

SEQ ID NO: 31664 - DNA, 22 bp, synthetic construct
  misc_feature 1..22: note = chemically synthesized
  source 1..22: mol_type = other DNA
gaggcctccgctgtgattcagc

SEQ ID NO: 31665 - DNA, 22 bp, synthetic construct
  misc_feature 1..22: note = chemically synthesized
  source 1..22: mol_type = other DNA
cgctgtgattcagcctgccaaa

SEQ ID NO: 31666 - DNA, 22 bp, synthetic construct
  misc_feature 1..22: note = chemically synthesized
  source 1..22: mol_type = other DNA
tgattcagcctgccaaatgctc

SEQ ID NO: 31667 - DNA, 22 bp, synthetic construct
  misc_feature 1..22: note = chemically synthesized
  source 1..22: mol_type = other DNA
agcctgccaaatgctccaaaca

SEQ ID NO: 31668 - DNA, 22 bp, synthetic construct
  misc_feature 1..22: note = chemically synthesized
  source 1..22: mol_type = other DNA
ccaaatgctccaaacagcatcc

SEQ ID NO: 31669 - DNA, 22 bp, synthetic construct
  misc_feature 1..22: note = chemically synthesized
  source 1..22: mol_type = other DNA
caaacagcatccctatctggca

SEQ ID NO: 31670 - DNA, 22 bp, synthetic construct
  misc_feature 1..22: note = chemically synthesized
  source 1..22: mol_type = other DNA
tctggcactgacacctcaagca

SEQ ID NO: 31671 - DNA, 22 bp, synthetic construct
  misc_feature 1..22: note = chemically synthesized
  source 1..22: mol_type = other DNA
gcactgacacctcaagcatcat

SEQ ID NO: 31672 - DNA, 22 bp, synthetic construct
  misc_feature 1..22: note = chemically synthesized
  source 1..22: mol_type = other DNA
acacctcaagcatcattggatc

SEQ ID NO: 31673 - DNA, 22 bp, synthetic construct
  misc_feature 1..22: note = chemically synthesized
  source 1..22: mol_type = other DNA
aagcatcattggatctgctagg

SEQ ID NO: 31674 - DNA, 22 bp, synthetic construct
  misc_feature 1..22: note = chemically synthesized
  source 1..22: mol_type = other DNA
gatctgctaggtcatatggccc

SEQ ID NO: 31675 - DNA, 22 bp, synthetic construct
  misc_feature 1..22: note = chemically synthesized
  source 1..22: mol_type = other DNA
ctaggtcatatggcccaagtgg

SEQ ID NO: 31676 - DNA, 22 bp, synthetic construct
  misc_feature 1..22: note = chemically synthesized
  source 1..22: mol_type = other DNA
ggtcatatggcccaagtggcat

SEQ ID NO: 31677 - DNA, 22 bp, synthetic construct
  misc_feature 1..22: note = chemically synthesized
  source 1..22: mol_type = other DNA
gcacagcagcctggacctgtgg

SEQ ID NO: 31678 - DNA, 22 bp, synthetic construct
  misc_feature 1..22: note = chemically synthesized
  source 1..22: mol_type = other DNA
cacagcagcctggacctgtggc

SEQ ID NO: 31679 - DNA, 22 bp, synthetic construct
  misc_feature 1..22: note = chemically synthesized
  source 1..22: mol_type = other DNA
gacctgtggcagagccttctgt

SEQ ID NO: 31680 - DNA, 22 bp, synthetic construct
  misc_feature 1..22: note = chemically synthesized
  source 1..22: mol_type = other DNA
tggcagagccttctgttctgga

SEQ ID NO: 31681 - DNA, 22 bp, synthetic construct
  misc_feature 1..22: note = chemically synthesized
  source 1..22: mol_type = other DNA
ctgttctggactccactcaaaa

SEQ ID NO: 31682 - DNA, 22 bp, synthetic construct
  misc_feature 1..22: note = chemically synthesized
  source 1..22: mol_type = other DNA
tgttctggactccactcaaaac

SEQ ID NO: 31683 - DNA, 22 bp, synthetic construct
  misc_feature 1..22: note = chemically synthesized
  source 1..22: mol_type = other DNA
ttctggactccactcaaaactg

SEQ ID NO: 31684 - DNA, 22 bp, synthetic construct
  misc_feature 1..22: note = chemically synthesized
  source 1..22: mol_type = other DNA
tggactccactcaaaactggca

SEQ ID NO: 31685 - DNA, 22 bp, synthetic construct
  misc_feature 1..22: note = chemically synthesized
  source 1..22: mol_type = other DNA
gactccactcaaaactggcagc

SEQ ID NO: 31686 - DNA, 22 bp, synthetic construct
  misc_feature 1..22: note = chemically synthesized
  source 1..22: mol_type = other DNA
cactcaaaactggcagcctttt

SEQ ID NO: 31687 - DNA, 22 bp, synthetic construct
  misc_feature 1..22: note = chemically synthesized
  source 1..22: mol_type = other DNA
aaaactggcagccttttggatc

SEQ ID NO: 31688 - DNA, 22 bp, synthetic construct
  misc_feature 1..22: note = chemically synthesized
  source 1..22: mol_type = other DNA
gcagccttttggatcactcgat

SEQ ID NO: 31689 - DNA, 22 bp, synthetic construct
  misc_feature 1..22: note = chemically synthesized
  source 1..22: mol_type = other DNA
ttggatcactcgataaatgggc

SEQ ID NO: 31690 - DNA, 22 bp, synthetic construct
  misc_feature 1..22: note = chemically synthesized
  source 1..22: mol_type = other DNA
tggatcactcgataaatgggcc

SEQ ID NO: 31691 - DNA, 22 bp, synthetic construct
  misc_feature 1..22: note = chemically synthesized
  source 1..22: mol_type = other DNA
ggatcactcgataaatgggcca

SEQ ID NO: 31692 - DNA, 22 bp, synthetic construct
  misc_feature 1..22: note = chemically synthesized
  source 1..22: mol_type = other DNA
gatcactcgataaatgggccag

SEQ ID NO: 31693 - DNA, 22 bp, synthetic construct
  misc_feature 1..22: note = chemically synthesized
  source 1..22: mol_type = other DNA
gataaatgggccagagtaacac

SEQ ID NO: 31694 - DNA, 22 bp, synthetic construct
  misc_feature 1..22: note = chemically synthesized
  source 1..22: mol_type = other DNA
cctccaaaatccaaataggccc

SEQ ID NO: 31695 - DNA, 22 bp, synthetic construct
  misc_feature 1..22: note = chemically synthesized
  source 1..22: mol_type = other DNA
caaaatccaaataggcccacta

SEQ ID NO: 31696 - DNA, 22 bp, synthetic construct
  misc_feature 1..22: note = chemically synthesized
  source 1..22: mol_type = other DNA
ggcgttgtgcctatttcttggt

SEQ ID NO: 31697 - DNA, 22 bp, synthetic construct
  misc_feature 1..22: note = chemically synthesized
  source 1..22: mol_type = other DNA
tgcctatttcttggttgtaaga

SEQ ID NO: 31698 - DNA, 22 bp, synthetic construct
  misc_feature 1..22: note = chemically synthesized
  source 1..22: mol_type = other DNA
tttcttggttgtaagagtggcc

SEQ ID NO: 31699 - DNA, 22 bp, synthetic construct
  misc_feature 1..22: note = chemically synthesized
  source 1..22: mol_type = other DNA
cttggttgtaagagtggccaaa

SEQ ID NO: 31700 - DNA, 22 bp, synthetic construct
  misc_feature 1..22: note = chemically synthesized
  source 1..22: mol_type = other DNA
ttggttgtaagagtggccaaat

SEQ ID NO: 31701 - DNA, 22 bp, synthetic construct
  misc_feature 1..22: note = chemically synthesized
  source 1..22: mol_type = other DNA
ggttgtaagagtggccaaatgc

SEQ ID NO: 31702 - DNA, 22 bp, synthetic construct
  misc_feature 1..22: note = chemically synthesized
  source 1..22: mol_type = other DNA
gttgtaagagtggccaaatgca

SEQ ID NO: 31703 - DNA, 22 bp, synthetic construct
  misc_feature 1..22: note = chemically synthesized
  source 1..22: mol_type = other DNA
taagagtggccaaatgcagcaa

SEQ ID NO: 31704 - DNA, 22 bp, synthetic construct
  misc_feature 1..22: note = chemically synthesized
  source 1..22: mol_type = other DNA
tccttcactttagaaggaatat

SEQ ID NO: 31705 - DNA, 22 bp, synthetic construct
  misc_feature 1..22: note = chemically synthesized
  source 1..22: mol_type = other DNA
cactttagaaggaatatctcaa

SEQ ID NO: 31706 - DNA, 22 bp, synthetic construct
  misc_feature 1..22: note = chemically synthesized
  source 1..22: mol_type = other DNA
actttagaaggaatatctcaaa

SEQ ID NO: 31707 - DNA, 22 bp, synthetic construct
  misc_feature 1..22: note = chemically synthesized
  source 1..22: mol_type = other DNA
tagaaggaatatctcaaagagc

SEQ ID NO: 31708 - DNA, 22 bp, synthetic construct
  misc_feature 1..22: note = chemically synthesized
  source 1..22: mol_type = other DNA
agaaggaatatctcaaagagcc

SEQ ID NO: 31709 - DNA, 22 bp, synthetic construct
  misc_feature 1..22: note = chemically synthesized
  source 1..22: mol_type = other DNA
gaaggaatatctcaaagagccc

SEQ ID NO: 31710 - DNA, 22 bp, synthetic construct
  misc_feature 1..22: note = chemically synthesized
  source 1..22: mol_type = other DNA
aaagagccccaaaccattggac

SEQ ID NO: 31711 - DNA, 22 bp, synthetic construct
  misc_feature 1..22: note = chemically synthesized
  source 1..22: mol_type = other DNA
gacccctataaattttactgag

SEQ ID NO: 31712 - DNA, 22 bp, synthetic construct
  misc_feature 1..22: note = chemically synthesized
  source 1..22: mol_type = other DNA
taaattttactgaggtagaagg

SEQ ID NO: 31713 - DNA, 22 bp, synthetic construct
  misc_feature 1..22: note = chemically synthesized
  source 1..22: mol_type = other DNA
tactgaggtagaaggtccctga

SEQ ID NO: 31714 - DNA, 22 bp, synthetic construct
  misc_feature 1..22: note = chemically synthesized
  source 1..22: mol_type = other DNA
actgaggtagaaggtccctgaa

SEQ ID NO: 31715 - DNA, 22 bp, synthetic construct
  misc_feature 1..22: note = chemically synthesized
  source 1..22: mol_type = other DNA
ctgaggtagaaggtccctgaat

SEQ ID NO: 31716 - DNA, 22 bp, synthetic construct
  misc_feature 1..22: note = chemically synthesized
  source 1..22: mol_type = other DNA
aggtagaaggtccctgaattta

SEQ ID NO: 31717 - DNA, 22 bp, synthetic construct
  misc_feature 1..22: note = chemically synthesized
  source 1..22: mol_type = other DNA
aatttaatcagatttatttccc

SEQ ID NO: 31718 - DNA, 22 bp, synthetic construct
  misc_feature 1..22: note = chemically synthesized
  source 1..22: mol_type = other DNA
aatcagatttatttcccatcct

SEQ ID NO: 31719 - DNA, 22 bp, synthetic construct
  misc_feature 1..22: note = chemically synthesized
  source 1..22: mol_type = other DNA
atcagatttatttcccatcctc

SEQ ID NO: 31720 - DNA, 22 bp, synthetic construct
  misc_feature 1..22: note = chemically synthesized
  source 1..22: mol_type = other DNA
atttcccatcctctgtcccaca

SEQ ID NO: 31721 - DNA, 22 bp, synthetic construct
  misc_feature 1..22: note = chemically synthesized
  source 1..22: mol_type = other DNA
tttcccatcctctgtcccacaa

SEQ ID NO: 31722 - DNA, 22 bp, synthetic construct
  misc_feature 1..22: note = chemically synthesized
  source 1..22: mol_type = other DNA
cccatcctctgtcccacaaatg

SEQ ID NO: 31723 - DNA, 22 bp, synthetic construct
  misc_feature 1..22: note = chemically synthesized
  source 1..22: mol_type = other DNA
ccatcctctgtcccacaaatgt

SEQ ID NO: 31724 - DNA, 22 bp, synthetic construct
  misc_feature 1..22: note = chemically synthesized
  source 1..22: mol_type = other DNA
tgtcccacaaatgtctcatcaa

SEQ ID NO: 31725 - DNA, 22 bp, synthetic construct
  misc_feature 1..22: note = chemically synthesized
  source 1..22: mol_type = other DNA
tcccacaaatgtctcatcaata

SEQ ID NO: 31726 - DNA, 22 bp, synthetic construct
  misc_feature 1..22: note = chemically synthesized
  source 1..22: mol_type = other DNA
atcaataaatccagtgtgtttg

SEQ ID NO: 31727 - DNA, 22 bp, synthetic construct
  misc_feature 1..22: note = chemically synthesized
  source 1..22: mol_type = other DNA
gctacttcttgctcactagttc

SEQ ID NO: 31728 - DNA, 22 bp, synthetic construct
  misc_feature 1..22: note = chemically synthesized
  source 1..22: mol_type = other DNA
ctacttcttgctcactagttcc

SEQ ID NO: 31729 - DNA, 22 bp, synthetic construct
  misc_feature 1..22: note = chemically synthesized
  source 1..22: mol_type = other DNA
cttcttgctcactagttccagt

SEQ ID NO: 31730 - DNA, 22 bp, synthetic construct
  misc_feature 1..22: note = chemically synthesized
  source 1..22: mol_type = other DNA
cttgctcactagttccagtcag

SEQ ID NO: 31731 - DNA, 22 bp, synthetic construct
  misc_feature 1..22: note = chemically synthesized
  source 1..22: mol_type = other DNA
ttgctcactagttccagtcagc

SEQ ID NO: 31732 - DNA, 22 bp, synthetic construct
  misc_feature 1..22: note = chemically synthesized
  source 1..22: mol_type = other DNA
gctcactagttccagtcagcat

SEQ ID NO: 31733 - DNA, 22 bp, synthetic construct
  misc_feature 1..22: note = chemically synthesized
  source 1..22: mol_type = other DNA
ctcactagttccagtcagcatg

SEQ ID NO: 31734 - DNA, 22 bp, synthetic construct
  misc_feature 1..22: note = chemically synthesized
  source 1..22: mol_type = other DNA
actagttccagtcagcatgtca

SEQ ID NO: 31735 - DNA, 22 bp, synthetic construct
  misc_feature 1..22: note = chemically synthesized
  source 1..22: mol_type = other DNA
gttccagtcagcatgtcatcaa

SEQ ID NO: 31736 - DNA, 22 bp, synthetic construct
  misc_feature 1..22: note = chemically synthesized
  source 1..22: mol_type = other DNA
cagtcagcatgtcatcaatgta

SEQ ID NO: 31737 - DNA, 22 bp, synthetic construct
  misc_feature 1..22: note = chemically synthesized
  source 1..22: mol_type = other DNA
tgatatcttgtggaagtgaaag

SEQ ID NO: 31738 - DNA, 22 bp, synthetic construct
  misc_feature 1..22: note = chemically synthesized
  source 1..22: mol_type = other DNA
gtggaagtgaaaggtgagcaag

SEQ ID NO: 31739 - DNA, 22 bp, synthetic construct
  misc_feature 1..22: note = chemically synthesized
  source 1..22: mol_type = other DNA
tggaagtgaaaggtgagcaagt

SEQ ID NO: 31740 - DNA, 22 bp, synthetic construct
  misc_feature 1..22: note = chemically synthesized
  source 1..22: mol_type = other DNA
tctccaaataagattatggcac

SEQ ID NO: 31741 - DNA, 22 bp, synthetic construct
  misc_feature 1..22: note = chemically synthesized
  source 1..22: mol_type = other DNA
tccaaataagattatggcacaa

SEQ ID NO: 31742 - DNA, 22 bp, synthetic construct
  misc_feature 1..22: note = chemically synthesized
  source 1..22: mol_type = other DNA
caaataagattatggcacaaag

SEQ ID NO: 31743 - DNA, 22 bp, synthetic construct
  misc_feature 1..22: note = chemically synthesized
  source 1..22: mol_type = other DNA
tggcacaaagctggagagttga

SEQ ID NO: 31744 - DNA, 22 bp, synthetic construct
  misc_feature 1..22: note = chemically synthesized
  source 1..22: mol_type = other DNA
gagagttgatatactcctgagt

SEQ ID NO: 31745 - DNA, 22 bp, synthetic construct
  misc_feature 1..22: note = chemically synthesized
  source 1..22: mol_type = other DNA
atatactcctgagttcatcatt

SEQ ID NO: 31746 - DNA, 22 bp, synthetic construct
  misc_feature 1..22: note = chemically synthesized
  source 1..22: mol_type = other DNA
ctgagttcatcattttctttca

SEQ ID NO: 31747 - DNA, 22 bp, synthetic construct
  misc_feature 1..22: note = chemically synthesized
  source 1..22: mol_type = other DNA
agttcatcattttctttcatca

SEQ ID NO: 31748 - DNA, 22 bp, synthetic construct
  misc_feature 1..22: note = chemically synthesized
  source 1..22: mol_type = other DNA
atcattttctttcatcactttg

SEQ ID NO: 31749 - DNA, 22 bp, synthetic construct
  misc_feature 1..22: note = chemically synthesized
  source 1..22: mol_type = other DNA
tctttcatcactttgtccagcg

SEQ ID NO: 31750 - DNA, 22 bp, synthetic construct
  misc_feature 1..22: note = chemically synthesized
  source 1..22: mol_type = other DNA
ctttcatcactttgtccagcga

SEQ ID NO: 31751 - DNA, 22 bp, synthetic construct
  misc_feature 1..22: note = chemically synthesized
  source 1..22: mol_type = other DNA
tttcatcactttgtccagcgaa

SEQ ID NO: 31752 - DNA, 22 bp, synthetic construct
  misc_feature 1..22: note = chemically synthesized
  source 1..22: mol_type = other DNA
tcatcactttgtccagcgaact

SEQ ID NO: 31753 - DNA, 22 bp, synthetic construct
  misc_feature 1..22: note = chemically synthesized
  source 1..22: mol_type = other DNA
catcactttgtccagcgaactt

SEQ ID NO: 31754 - DNA, 22 bp, synthetic construct
  misc_feature 1..22: note = chemically synthesized
  source 1..22: mol_type = other DNA
atcactttgtccagcgaactta

SEQ ID NO: 31755 - DNA, 22 bp, synthetic construct
  misc_feature 1..22: note = chemically synthesized
  source 1..22: mol_type = other DNA
tgtccagcgaacttacaagcaa

SEQ ID NO: 31756 - DNA, 22 bp, synthetic construct
  misc_feature 1..22: note = chemically synthesized
  source 1..22: mol_type = other DNA
gtccagcgaacttacaagcaac

SEQ ID NO: 31757 - DNA, 22 bp, synthetic construct
  misc_feature 1..22: note = chemically synthesized
  source 1..22: mol_type = other DNA
tccagcgaacttacaagcaacc

SEQ ID NO: 31758 - DNA, 22 bp, synthetic construct
  misc_feature 1..22: note = chemically synthesized
  source 1..22: mol_type = other DNA
acaagcaaccaaccaacttcac

SEQ ID NO: 31759 - DNA, 22 bp, synthetic construct
  misc_feature 1..22: note = chemically synthesized
  source 1..22: mol_type = other DNA
caagcaaccaaccaacttcact

SEQ ID NO: 31760 - DNA, 22 bp, synthetic construct
  misc_feature 1..22: note = chemically synthesized
  source 1..22: mol_type = other DNA
cactatgttccttgattctcca

SEQ ID NO: 31761 - DNA, 22 bp, synthetic construct
  misc_feature 1..22: note = chemically synthesized
  source 1..22: mol_type = other DNA
actatgttccttgattctccac

SEQ ID NO: 31762 - DNA, 22 bp, synthetic construct
  misc_feature 1..22: note = chemically synthesized
  source 1..22: mol_type = other DNA
tgttccttgattctccacatat

SEQ ID NO: 31763 - DNA, 22 bp, synthetic construct
  misc_feature 1..22: note = chemically synthesized
  source 1..22: mol_type = other DNA
cttgattctccacatatagtca

SEQ ID NO: 31764 - DNA, 22 bp, synthetic construct
  misc_feature 1..22: note = chemically synthesized
  source 1..22: mol_type = other DNA
gattctccacatatagtcaaaa

SEQ ID NO: 31765 - DNA, 22 bp, synthetic construct
  misc_feature 1..22: note = chemically synthesized
  source 1..22: mol_type = other DNA
attctccacatatagtcaaaag

SEQ ID NO: 31766 - DNA, 22 bp, synthetic construct
  misc_feature 1..22: note = chemically synthesized
  source 1..22: mol_type = other DNA
tccacatatagtcaaaagtatt

SEQ ID NO: 31767 - DNA, 22 bp, synthetic construct
  misc_feature 1..22: note = chemically synthesized
  source 1..22: mol_type = other DNA
cacatatagtcaaaagtattat

SEQ ID NO: 31768 - DNA, 22 bp, synthetic construct
  misc_feature 1..22: note = chemically synthesized
  source 1..22: mol_type = other DNA
tgtatacagtagctaaattcct

SEQ ID NO: 31769 - DNA, 22 bp, synthetic construct
  misc_feature 1..22: note = chemically synthesized
  source 1..22: mol_type = other DNA
aattccttgcctctcacaagcg

SEQ ID NO: 31770 - DNA, 22 bp, synthetic construct
  misc_feature 1..22: note = chemically synthesized
  source 1..22: mol_type = other DNA
cttgcctctcacaagcgttgaa

SEQ ID NO: 31771 - DNA, 22 bp, synthetic construct
  misc_feature 1..22: note = chemically synthesized
  source 1..22: mol_type = other DNA
gcctctcacaagcgttgaatca

SEQ ID NO: 31772 - DNA, 22 bp, synthetic construct
  misc_feature 1..22: note = chemically synthesized
  source 1..22: mol_type = other DNA
cctctcacaagcgttgaatcaa

SEQ ID NO: 31773 - DNA, 22 bp, synthetic construct
  misc_feature 1..22: note = chemically synthesized
  source 1..22: mol_type = other DNA
tcacaagcgttgaatcaagagt

SEQ ID NO: 31774 - DNA, 22 bp, synthetic construct
  misc_feature 1..22: note = chemically synthesized
  source 1..22: mol_type = other DNA
acaagcgttgaatcaagagtgt

SEQ ID NO: 31775 - DNA, 22 bp, synthetic construct
  misc_feature 1..22: note = chemically synthesized
  source 1..22: mol_type = other DNA
aatcaagagtgtcaaatgcatt

SEQ ID NO: 31776 - DNA, 22 bp, synthetic construct
  misc_feature 1..22: note = chemically synthesized
  source 1..22: mol_type = other DNA
attttgcataactctctaaaca

SEQ ID NO: 31777 - DNA, 22 bp, synthetic construct
  misc_feature 1..22: note = chemically synthesized
  source 1..22: mol_type = other DNA
ttttgcataactctctaaacaa

SEQ ID NO: 31778 - DNA, 22 bp, synthetic construct
  misc_feature 1..22: note = chemically synthesized
  source 1..22: mol_type = other DNA
tgcataactctctaaacaattg

SEQ ID NO: 31779 - DNA, 22 bp, synthetic construct
  misc_feature 1..22: note = chemically synthesized
  source 1..22: mol_type = other DNA
gcataactctctaaacaattga

SEQ ID NO: 31780 - DNA, 22 bp, synthetic construct
  misc_feature 1..22: note = chemically synthesized
  source 1..22: mol_type = other DNA
cataactctctaaacaattgat

SEQ ID NO: 31781 - DNA, 22 bp, synthetic construct
  misc_feature 1..22: note = chemically synthesized
  source 1..22: mol_type = other DNA
tctaaacaattgatgccaagga

SEQ ID NO: 31782 - DNA, 22 bp, synthetic construct
  misc_feature 1..22: note = chemically synthesized
  source 1..22: mol_type = other DNA
taaacaattgatgccaaggatt

SEQ ID NO: 31783 - DNA, 22 bp, synthetic construct
  misc_feature 1..22: note = chemically synthesized
  source 1..22: mol_type = other DNA
aacaattgatgccaaggattat

SEQ ID NO: 31784 - DNA, 22 bp, synthetic construct
  misc_feature 1..22: note = chemically synthesized
  source 1..22: mol_type = other DNA
atgccaaggattatcagtgttc

SEQ ID NO: 31785 - DNA, 22 bp, synthetic construct
  misc_feature 1..22: note = chemically synthesized
  source 1..22: mol_type = other DNA
tcagtgttctccataccattag

SEQ ID NO: 31786 - DNA, 22 bp, synthetic construct
  misc_feature 1..22: note = chemically synthesized
  source 1..22: mol_type = other DNA
tccataccattagaagaagagt

SEQ ID NO: 31787 - DNA, 22 bp, synthetic construct
  misc_feature 1..22: note = chemically synthesized
  source 1..22: mol_type = other DNA
cataccattagaagaagagtcc

SEQ ID NO: 31788 - DNA, 22 bp, synthetic construct
  misc_feature 1..22: note = chemically synthesized
  source 1..22: mol_type = other DNA
gaagaagagtccttagcatatt

SEQ ID NO: 31789 - DNA, 22 bp, synthetic construct
  misc_feature 1..22: note = chemically synthesized
  source 1..22: mol_type = other DNA
agcatatttgggtctaatcata

SEQ ID NO: 31790 - DNA, 22 bp, synthetic construct
  misc_feature 1..22: note = chemically synthesized
  source 1..22: mol_type = other DNA
gcatatttgggtctaatcatat

SEQ ID NO: 31791 - DNA, 22 bp, synthetic construct
  misc_feature 1..22: note = chemically synthesized
  source 1..22: mol_type = other DNA
gggtctaatcatattaagcagc

SEQ ID NO: 31792 - DNA, 22 bp, synthetic construct
  misc_feature 1..22: note = chemically synthesized
  source 1..22: mol_type = other DNA
ggtctaatcatattaagcagcc

SEQ ID NO: 31793 - DNA, 22 bp, synthetic construct
  misc_feature 1..22: note = chemically synthesized
  source 1..22: mol_type = other DNA
atcatattaagcagccaactcc

SEQ ID NO: 31794 - DNA, 22 bp, synthetic construct
  misc_feature 1..22: note = chemically synthesized
  source 1..22: mol_type = other DNA
agcagccaactccagaaacccc

SEQ ID NO: 31795 - DNA, 22 bp, synthetic construct
  misc_feature 1..22: note = chemically synthesized
  source 1..22: mol_type = other DNA
cagaaaccccaaaaccaatgaa

SEQ ID NO: 31796 - DNA, 22 bp, synthetic construct
  misc_feature 1..22: note = chemically synthesized
  source 1..22: mol_type = other DNA
catccttaatattctgttcctc

SEQ ID NO: 31797 - DNA, 22 bp, synthetic construct
  misc_feature 1..22: note = chemically synthesized
  source 1..22: mol_type = other DNA
aatattctgttcctctagaacc

SEQ ID NO: 31798 - DNA, 22 bp, synthetic construct
  misc_feature 1..22: note = chemically synthesized
  source 1..22: mol_type = other DNA
atattctgttcctctagaacca

SEQ ID NO: 31799 - DNA, 22 bp, synthetic construct
  misc_feature 1..22: note = chemically synthesized
  source 1..22: mol_type = other DNA
tgttcctctagaaccactcctg

SEQ ID NO: 31800 - DNA, 22 bp, synthetic construct
  misc_feature 1..22: note = chemically synthesized
  source 1..22: mol_type = other DNA
ttcctctagaaccactcctggt

SEQ ID NO: 31801 - DNA, 22 bp, synthetic construct
  misc_feature 1..22: note = chemically synthesized
  source 1..22: mol_type = other DNA
ctctagaaccactcctggtacc

SEQ ID NO: 31802 - DNA, 22 bp, synthetic construct
  misc_feature 1..22: note = chemically synthesized
  source 1..22: mol_type = other DNA
tagaaccactcctggtaccaaa

SEQ ID NO: 31803 - DNA, 22 bp, synthetic construct
  misc_feature 1..22: note = chemically synthesized
  source 1..22: mol_type = other DNA
gaaccactcctggtaccaaaat

SEQ ID NO: 31804 - DNA, 22 bp, synthetic construct
  misc_feature 1..22: note = chemically synthesized
  source 1..22: mol_type = other DNA
ctggtaccaaaatctgtattag

SEQ ID NO: 31805 - DNA, 22 bp, synthetic construct
  misc_feature 1..22: note = chemically synthesized
  source 1..22: mol_type = other DNA
gtaccaaaatctgtattagggt

SEQ ID NO: 31806 - DNA, 22 bp, synthetic construct
  misc_feature 1..22: note = chemically synthesized
  source 1..22: mol_type = other DNA
tattagggttctacagagaaac

SEQ ID NO: 31807 - DNA, 22 bp, synthetic construct
  misc_feature 1..22: note = chemically synthesized
  source 1..22: mol_type = other DNA
gggttctacagagaaacagaat

SEQ ID NO: 31808 - DNA, 22 bp, synthetic construct
  misc_feature 1..22: note = chemically synthesized
  source 1..22: mol_type = other DNA
tacagagaaacagaattaatag

SEQ ID NO: 31809 - DNA, 22 bp, synthetic construct
  misc_feature 1..22: note = chemically synthesized
  source 1..22: mol_type = other DNA
cagagaaacagaattaatagga

SEQ ID NO: 31810 - DNA, 22 bp, synthetic construct
  misc_feature 1..22: note = chemically synthesized
  source 1..22: mol_type = other DNA
ataggagatatatatctatatc

SEQ ID NO: 31811 - DNA, 22 bp, synthetic construct
  misc_feature 1..22: note = chemically synthesized
  source 1..22: mol_type = other DNA
tatctatatctatatctatatc

SEQ ID NO: 31812 - DNA, 22 bp, synthetic construct
  misc_feature 1..22: note = chemically synthesized
  source 1..22: mol_type = other DNA
tatctatatctatatctatatc

SEQ ID NO: 31813 - DNA, 22 bp, synthetic construct
  misc_feature 1..22: note = chemically synthesized
  source 1..22: mol_type = other DNA
tatctatatctatatctatatc

SEQ ID NO: 31814 - DNA, 22 bp, synthetic construct
  misc_feature 1..22: note = chemically synthesized
  source 1..22: mol_type = other DNA
tatctatatctatatctatctc

SEQ ID NO: 31815 - DNA, 22 bp, synthetic construct
  misc_feature 1..22: note = chemically synthesized
  source 1..22: mol_type = other DNA
tatctatatctatctctatatc

SEQ ID NO: 31816 - DNA, 22 bp, synthetic construct
  misc_feature 1..22: note = chemically synthesized
  source 1..22: mol_type = other DNA
tatctatctctatatctatctc

SEQ ID NO: 31817 - DNA, 22 bp, synthetic construct
  misc_feature 1..22: note = chemically synthesized
  source 1..22: mol_type = other DNA
tctctatatctatctctatatc

SEQ ID NO: 31818 - DNA, 22 bp, synthetic construct
  misc_feature 1..22: note = chemically synthesized
  source 1..22: mol_type = other DNA
tatatctatctctatatctata

SEQ ID NO: 31819 - DNA, 22 bp, synthetic construct
  misc_feature 1..22: note = chemically synthesized
  source 1..22: mol_type = other DNA
tatctatctctatatctatatc

SEQ ID NO: 31820 - DNA, 22 bp, synthetic construct
  misc_feature 1..22: note = chemically synthesized
  source 1..22: mol_type = other DNA
tctctatatctatatctatatg

SEQ ID NO: 31821 - DNA, 22 bp, synthetic construct
  misc_feature 1..22: note = chemically synthesized
  source 1..22: mol_type = other DNA
tatatctatatctatatgagag

SEQ ID NO: 31822 - DNA, 22 bp, synthetic construct
  misc_feature 1..22: note = chemically synthesized
  source 1..22: mol_type = other DNA
tatctatatctatatgagagtt

SEQ ID NO: 31823 - DNA, 22 bp, synthetic construct
  misc_feature 1..22: note = chemically synthesized
  source 1..22: mol_type = other DNA
tatctatatgagagtttattat

SEQ ID NO: 31824 - DNA, 22 bp, synthetic construct
  misc_feature 1..22: note = chemically synthesized
  source 1..22: mol_type = other DNA
tatgagagtttattatgtagta

SEQ ID NO: 31825 - DNA, 22 bp, synthetic construct
  misc_feature 1..22: note = chemically synthesized
  source 1..22: mol_type = other DNA
attatgtagtattgactcacat

SEQ ID NO: 31826 - DNA, 22 bp, synthetic construct
  misc_feature 1..22: note = chemically synthesized
  source 1..22: mol_type = other DNA
ttatgtagtattgactcacatg

SEQ ID NO: 31827 - DNA, 22 bp, synthetic construct
  misc_feature 1..22: note = chemically synthesized
  source 1..22: mol_type = other DNA
tgtagtattgactcacatgttc

SEQ ID NO: 31828 - DNA, 22 bp, synthetic construct
  misc_feature 1..22: note = chemically synthesized
  source 1..22: mol_type = other DNA
actcacatgttcacaaggtccc

SEQ ID NO: 31829 - DNA, 22 bp, synthetic construct
  misc_feature 1..22: note = chemically synthesized
  source 1..22: mol_type = other DNA
acatgttcacaaggtcccaaaa

SEQ ID NO: 31830 - DNA, 22 bp, synthetic construct
  misc_feature 1..22: note = chemically synthesized
  source 1..22: mol_type = other DNA
acaaggtcccaaaacaggccat

SEQ ID NO: 31831 - DNA, 22 bp, synthetic construct
  misc_feature 1..22: note = chemically synthesized
  source 1..22: mol_type = other DNA
ccagctgaggaacaaggaagct

SEQ ID NO: 31832 - DNA, 22 bp, synthetic construct
  misc_feature 1..22: note = chemically synthesized
  source 1..22: mol_type = other DNA
aggaacaaggaagctagtcgga

SEQ ID NO: 31833 - DNA, 22 bp, synthetic construct
  misc_feature 1..22: note = chemically synthesized
  source 1..22: mol_type = other DNA
gtcggagtcccaaagctgaaga

SEQ ID NO: 31834 - DNA, 22 bp, synthetic construct
  misc_feature 1..22: note = chemically synthesized
  source 1..22: mol_type = other DNA
aagaacctggagttcaatgttc

SEQ ID NO: 31835 - DNA, 22 bp, synthetic construct
  misc_feature 1..22: note = chemically synthesized
  source 1..22: mol_type = other DNA
gagttcaatgttccagggcagg

SEQ ID NO: 31836 - DNA, 22 bp, synthetic construct
  misc_feature 1..22: note = chemically synthesized
  source 1..22: mol_type = other DNA
aatgttccagggcaggaagaat

SEQ ID NO: 31837 - DNA, 22 bp, synthetic construct
  misc_feature 1..22: note = chemically synthesized
  source 1..22: mol_type = other DNA
cagggcaggaagaatccagcat

SEQ ID NO: 31838 - DNA, 22 bp, synthetic construct
  misc_feature 1..22: note = chemically synthesized
  source 1..22: mol_type = other DNA
ggatgccaagccaatctagcct

SEQ ID NO: 31839 - DNA, 22 bp, synthetic construct
  misc_feature 1..22: note = chemically synthesized
  source 1..22: mol_type = other DNA
gccttttcacatttttctgcct

SEQ ID NO: 31840 - DNA, 22 bp, synthetic construct
  misc_feature 1..22: note = chemically synthesized
  source 1..22: mol_type = other DNA
ttcacatttttctgcctgcttt

SEQ ID NO: 31841 - DNA, 22 bp, synthetic construct
  misc_feature 1..22: note = chemically synthesized
  source 1..22: mol_type = other DNA
tcacatttttctgcctgcttta

SEQ ID NO: 31842 - DNA, 22 bp, synthetic construct
  misc_feature 1..22: note = chemically synthesized
  source 1..22: mol_type = other DNA
cacatttttctgcctgctttat

SEQ ID NO: 31843 - DNA, 22 bp, synthetic construct
  misc_feature 1..22: note = chemically synthesized
  source 1..22: mol_type = other DNA
acatttttctgcctgctttata

SEQ ID NO: 31844 - DNA, 22 bp, synthetic construct
  misc_feature 1..22: note = chemically synthesized
  source 1..22: mol_type = other DNA
ttctgcctgctttatatcctgg

SEQ ID NO: 31845 - DNA, 22 bp, synthetic construct
  misc_feature 1..22: note = chemically synthesized
  source 1..22: mol_type = other DNA
tctgcctgctttatatcctggc

SEQ ID NO: 31846 - DNA, 22 bp, synthetic construct
  misc_feature 1..22: note = chemically synthesized
  source 1..22: mol_type = other DNA
ctgcctgctttatatcctggct

SEQ ID NO: 31847 - DNA, 22 bp, synthetic construct
  misc_feature 1..22: note = chemically synthesized
  source 1..22: mol_type = other DNA
tgcctgctttatatcctggctg

SEQ ID NO: 31848 - DNA, 22 bp, synthetic construct
  misc_feature 1..22: note = chemically synthesized
  source 1..22: mol_type = other DNA
cctgctttatatcctggctgtg

SEQ ID NO: 31849 - DNA, 22 bp, synthetic construct
  misc_feature 1..22: note = chemically synthesized
  source 1..22: mol_type = other DNA
ctttatatcctggctgtgctgg

SEQ ID NO: 31850 - DNA, 22 bp, synthetic construct
  misc_feature 1..22: note = chemically synthesized
  source 1..22: mol_type = other DNA
tatatcctggctgtgctggcaa

SEQ ID NO: 31851 - DNA, 22 bp, synthetic construct
  misc_feature 1..22: note = chemically synthesized
  source 1..22: mol_type = other DNA
atatcctggctgtgctggcaac

SEQ ID NO: 31852 - DNA, 22 bp, synthetic construct
  misc_feature 1..22: note = chemically synthesized
  source 1..22: mol_type = other DNA
tatcctggctgtgctggcaact

SEQ ID NO: 31853 - DNA, 22 bp, synthetic construct
  misc_feature 1..22: note = chemically synthesized
  source 1..22: mol_type = other DNA
gctgtgctggcaactgattaga

SEQ ID NO: 31854 - DNA, 22 bp, synthetic construct
  misc_feature 1..22: note = chemically synthesized
  source 1..22: mol_type = other DNA
tgctggcaactgattagatggt

SEQ ID NO: 31855 - DNA, 22 bp, synthetic construct
  misc_feature 1..22: note = chemically synthesized
  source 1..22: mol_type = other DNA
gcaactgattagatggtgccca

SEQ ID NO: 31856 - DNA, 22 bp, synthetic construct
  misc_feature 1..22: note = chemically synthesized
  source 1..22: mol_type = other DNA
attagatggtgcccacccagat

SEQ ID NO: 31857 - DNA, 22 bp, synthetic construct
  misc_feature 1..22: note = chemically synthesized
  source 1..22: mol_type = other DNA
gatggtgcccacccagattaag

SEQ ID NO: 31858 - DNA, 22 bp, synthetic construct
  misc_feature 1..22: note = chemically synthesized
  source 1..22: mol_type = other DNA
agggtgggtctgccttccccag

SEQ ID NO: 31859 - DNA, 22 bp, synthetic construct
  misc_feature 1..22: note = chemically synthesized
  source 1..22: mol_type = other DNA
ccttccccagcccactgactga

SEQ ID NO: 31860 - DNA, 22 bp, synthetic construct
  misc_feature 1..22: note = chemically synthesized
  source 1..22: mol_type = other DNA
ccccagcccactgactgaaata

SEQ ID NO: 31861 - DNA, 22 bp, synthetic construct
  misc_feature 1..22: note = chemically synthesized
  source 1..22: mol_type = other DNA
cccagcccactgactgaaatat

SEQ ID NO: 31862 - DNA, 22 bp, synthetic construct
  misc_feature 1..22: note = chemically synthesized
  source 1..22: mol_type = other DNA
actgaaatattaatctcctttg

SEQ ID NO: 31863 - DNA, 22 bp, synthetic construct
  misc_feature 1..22: note = chemically synthesized
  source 1..22: mol_type = other DNA
aaatattaatctcctttggtaa

SEQ ID NO: 31864 - DNA, 22 bp, synthetic construct
  misc_feature 1..22: note = chemically synthesized
  source 1..22: mol_type = other DNA
atctcctttggtaacaccctca

SEQ ID NO: 31865 - DNA, 22 bp, synthetic construct
  misc_feature 1..22: note = chemically synthesized
  source 1..22: mol_type = other DNA
ctttggtaacaccctcacagac

SEQ ID NO: 31866 - DNA, 22 bp, synthetic construct
  misc_feature 1..22: note = chemically synthesized
  source 1..22: mol_type = other DNA
tggtaacaccctcacagacaca

SEQ ID NO: 31867 - DNA, 22 bp, synthetic construct
  misc_feature 1..22: note = chemically synthesized
  source 1..22: mol_type = other DNA
ggtaacaccctcacagacacac

SEQ ID NO: 31868 - DNA, 22 bp, synthetic construct
  misc_feature 1..22: note = chemically synthesized
  source 1..22: mol_type = other DNA
gtaacaccctcacagacacacc

SEQ ID NO: 31869 - DNA, 22 bp, synthetic construct
  misc_feature 1..22: note = chemically synthesized
  source 1..22: mol_type = other DNA
acagacacacccaagatcatta

SEQ ID NO: 31870 - DNA, 22 bp, synthetic construct
  misc_feature 1..22: note = chemically synthesized
  source 1..22: mol_type = other DNA
ctttgcatccttcagtccaatc

SEQ ID NO: 31871 - DNA, 22 bp, synthetic construct
  misc_feature 1..22: note = chemically synthesized
  source 1..22: mol_type = other DNA
tgcatccttcagtccaatcaag

SEQ ID NO: 31872 - DNA, 22 bp, synthetic construct
  misc_feature 1..22: note = chemically synthesized
  source 1..22: mol_type = other DNA
gcatccttcagtccaatcaagt

SEQ ID NO: 31873 - DNA, 22 bp, synthetic construct
  misc_feature 1..22: note = chemically synthesized
  source 1..22: mol_type = other DNA
catccttcagtccaatcaagtt

SEQ ID NO: 31874 - DNA, 22 bp, synthetic construct
  misc_feature 1..22: note = chemically synthesized
  source 1..22: mol_type = other DNA
cagtccaatcaagttgacactc

SEQ ID NO: 31875 - DNA, 22 bp, synthetic construct
  misc_feature 1..22: note = chemically synthesized
  source 1..22: mol_type = other DNA
agtccaatcaagttgacactca

SEQ ID NO: 31876 - DNA, 22 bp, synthetic construct
  misc_feature 1..22: note = chemically synthesized
  source 1..22: mol_type = other DNA
acactcagtattaaccatcaca

SEQ ID NO: 31877 - DNA, 22 bp, synthetic construct
  misc_feature 1..22: note = chemically synthesized
  source 1..22: mol_type = other DNA
agtattaaccatcacagtcact

SEQ ID NO: 31878 - DNA, 22 bp, synthetic construct
  misc_feature 1..22: note = chemically synthesized
  source 1..22: mol_type = other DNA
accatcacagtcactttctaat

SEQ ID NO: 31879 - DNA, 22 bp, synthetic construct
  misc_feature 1..22: note = chemically synthesized
  source 1..22: mol_type = other DNA
tctaatgaggttggtttttttg

SEQ ID NO: 31880 - DNA, 22 bp, synthetic construct
  misc_feature 1..22: note = chemically synthesized
  source 1..22: mol_type = other DNA
ctaatgaggttggtttttttgt

SEQ ID NO: 31881 - DNA, 22 bp, synthetic construct
  misc_feature 1..22: note = chemically synthesized
  source 1..22: mol_type = other DNA
taatgaggttggtttttttgtt

SEQ ID NO: 31882 - DNA, 22 bp, synthetic construct
  misc_feature 1..22: note = chemically synthesized
  source 1..22: mol_type = other DNA
atgaggttggtttttttgttgt

SEQ ID NO: 31883 - DNA, 22 bp, synthetic construct
  misc_feature 1..22: note = chemically synthesized
  source 1..22: mol_type = other DNA
gtttttttgttgttgagttcct

SEQ ID NO: 31884 - DNA, 22 bp, synthetic construct
  misc_feature 1..22: note = chemically synthesized
  source 1..22: mol_type = other DNA
ttttgttgttgagttccttgta

SEQ ID NO: 31885 - DNA, 22 bp, synthetic construct
  misc_feature 1..22: note = chemically synthesized
  source 1..22: mol_type = other DNA
tttgttgttgagttccttgtag

SEQ ID NO: 31886 - DNA, 22 bp, synthetic construct
  misc_feature 1..22: note = chemically synthesized
  source 1..22: mol_type = other DNA
ttgttgttgagttccttgtaga

SEQ ID NO: 31887 - DNA, 22 bp, synthetic construct
  misc_feature 1..22: note = chemically synthesized
  source 1..22: mol_type = other DNA
tgttgttgagttccttgtagat

SEQ ID NO: 31888 - DNA, 22 bp, synthetic construct
  misc_feature 1..22: note = chemically synthesized
  source 1..22: mol_type = other DNA
gttgttgagttccttgtagatt

SEQ ID NO: 31889 - DNA, 22 bp, synthetic construct
  misc_feature 1..22: note = chemically synthesized
  source 1..22: mol_type = other DNA
ttgttgagttccttgtagattc

SEQ ID NO: 31890 - DNA, 22 bp, synthetic construct
  misc_feature 1..22: note = chemically synthesized
  source 1..22: mol_type = other DNA
ttgagttccttgtagattctgt

SEQ ID NO: 31891 - DNA, 22 bp, synthetic construct
  misc_feature 1..22: note = chemically synthesized
  source 1..22: mol_type = other DNA
agttccttgtagattctgtata

SEQ ID NO: 31892 - DNA, 22 bp, synthetic construct
  misc_feature 1..22: note = chemically synthesized
  source 1..22: mol_type = other DNA
cttgtagattctgtatattagc

SEQ ID NO: 31893 - DNA, 22 bp, synthetic construct
  misc_feature 1..22: note = chemically synthesized
  source 1..22: mol_type = other DNA
gtagattctgtatattagcctt

SEQ ID NO: 31894 - DNA, 22 bp, synthetic construct
  misc_feature 1..22: note = chemically synthesized
  source 1..22: mol_type = other DNA
tagattctgtatattagccttt

SEQ ID NO: 31895 - DNA, 22 bp, synthetic construct
  misc_feature 1..22: note = chemically synthesized
  source 1..22: mol_type = other DNA
tgtatattagccttttgttgca

SEQ ID NO: 31896 - DNA, 22 bp, synthetic construct
  misc_feature 1..22: note = chemically synthesized
  source 1..22: mol_type = other DNA
tatattagccttttgttgcatt

SEQ ID NO: 31897 - DNA, 22 bp, synthetic construct
  misc_feature 1..22: note = chemically synthesized
  source 1..22: mol_type = other DNA
gccttttgttgcattcatagtt

SEQ ID NO: 31898 - DNA, 22 bp, synthetic construct
  misc_feature 1..22: note = chemically synthesized
  source 1..22: mol_type = other DNA
ttgttgcattcatagtttgcaa

SEQ ID NO: 31899 - DNA, 22 bp, synthetic construct
  misc_feature 1..22: note = chemically synthesized
  source 1..22: mol_type = other DNA
tgttgcattcatagtttgcaat

SEQ ID NO: 31900 - DNA, 22 bp, synthetic construct
  misc_feature 1..22: note = chemically synthesized
  source 1..22: mol_type = other DNA
gttgcattcatagtttgcaatt

SEQ ID NO: 31901 - DNA, 22 bp, synthetic construct
  misc_feature 1..22: note = chemically synthesized
  source 1..22: mol_type = other DNA
ttgcattcatagtttgcaattt

SEQ ID NO: 31902 - DNA, 22 bp, synthetic construct
  misc_feature 1..22: note = chemically synthesized
  source 1..22: mol_type = other DNA
cattcatagtttgcaatttttt

SEQ ID NO: 31903 - DNA, 22 bp, synthetic construct
  misc_feature 1..22: note = chemically synthesized
  source 1..22: mol_type = other DNA
atagtttgcaatttttttttct

SEQ ID NO: 31904 - DNA, 22 bp, synthetic construct
  misc_feature 1..22: note = chemically synthesized
  source 1..22: mol_type = other DNA
gcaatttttttttctcattctg

SEQ ID NO: 31905 - DNA, 22 bp, synthetic construct
  misc_feature 1..22: note = chemically synthesized
  source 1..22: mol_type = other DNA
caatttttttttctcattctgt

SEQ ID NO: 31906 - DNA, 22 bp, synthetic construct
  misc_feature 1..22: note = chemically synthesized
  source 1..22: mol_type = other DNA
ttttttctcattctgtaggtta

SEQ ID NO: 31907 - DNA, 22 bp, synthetic construct
  misc_feature 1..22: note = chemically synthesized
  source 1..22: mol_type = other DNA
tttttctcattctgtaggttat

SEQ ID NO: 31908 - DNA, 22 bp, synthetic construct
  misc_feature 1..22: note = chemically synthesized
  source 1..22: mol_type = other DNA
ttttctcattctgtaggttatc

SEQ ID NO: 31909 - DNA, 22 bp, synthetic construct
  misc_feature 1..22: note = chemically synthesized
  source 1..22: mol_type = other DNA
tttctcattctgtaggttatcc

SEQ ID NO: 31910 - DNA, 22 bp, synthetic construct
  misc_feature 1..22: note = chemically synthesized
  source 1..22: mol_type = other DNA
ttctcattctgtaggttatccg

SEQ ID NO: 31911 - DNA, 22 bp, synthetic construct
  misc_feature 1..22: note = chemically synthesized
  source 1..22: mol_type = other DNA
tctcattctgtaggttatccgt

SEQ ID NO: 31912 - DNA, 22 bp, synthetic construct
  misc_feature 1..22: note = chemically synthesized
  source 1..22: mol_type = other DNA
ctcattctgtaggttatccgtt

SEQ ID NO: 31913 - DNA, 22 bp, synthetic construct
  misc_feature 1..22: note = chemically synthesized
  source 1..22: mol_type = other DNA
tcattctgtaggttatccgttt

SEQ ID NO: 31914 - DNA, 22 bp, synthetic construct
  misc_feature 1..22: note = chemically synthesized
  source 1..22: mol_type = other DNA
attctgtaggttatccgtttac

SEQ ID NO: 31915 - DNA, 22 bp, synthetic construct
  misc_feature 1..22: note = chemically synthesized
  source 1..22: mol_type = other DNA
tgtaggttatccgtttactctg

SEQ ID NO: 31916 - DNA, 22 bp, synthetic construct
  misc_feature 1..22: note = chemically synthesized
  source 1..22: mol_type = other DNA
taggttatccgtttactctgtt

SEQ ID NO: 31917 - DNA, 22 bp, synthetic construct
  misc_feature 1..22: note = chemically synthesized
  source 1..22: mol_type = other DNA
tccgtttactctgttgattcgg

SEQ ID NO: 31918 - DNA, 22 bp, synthetic construct
  misc_feature 1..22: note = chemically synthesized
  source 1..22: mol_type = other DNA
actctgttgattcggtcttttg

SEQ ID NO: 31919 - DNA, 22 bp, synthetic construct
  misc_feature 1..22: note = chemically synthesized
  source 1..22: mol_type = other DNA
ctctgttgattcggtcttttgc

SEQ ID NO: 31920 - DNA, 22 bp, synthetic construct
  misc_feature 1..22: note = chemically synthesized
  source 1..22: mol_type = other DNA
tgttgattcggtcttttgcggt

SEQ ID NO: 31921 - DNA, 22 bp, synthetic construct
  misc_feature 1..22: note = chemically synthesized
  source 1..22: mol_type = other DNA
ttgattcggtcttttgcggtgc

SEQ ID NO: 31922 - DNA, 22 bp, synthetic construct
  misc_feature 1..22: note = chemically synthesized
  source 1..22: mol_type = other DNA
attcggtcttttgcggtgcaga

SEQ ID NO: 31923 - DNA, 22 bp, synthetic construct
  misc_feature 1..22: note = chemically synthesized
  source 1..22: mol_type = other DNA
ggtcttttgcggtgcagaagca

SEQ ID NO: 31924 - DNA, 22 bp, synthetic construct
  misc_feature 1..22: note = chemically synthesized
  source 1..22: mol_type = other DNA
ttgcggtgcagaagcattttag

SEQ ID NO: 31925 - DNA, 22 bp, synthetic construct
  misc_feature 1..22: note = chemically synthesized
  source 1..22: mol_type = other DNA
tgcggtgcagaagcattttagt

SEQ ID NO: 31926 - DNA, 22 bp, synthetic construct
  misc_feature 1..22: note = chemically synthesized
  source 1..22: mol_type = other DNA
gcggtgcagaagcattttagtt

SEQ ID NO: 31927 - DNA, 22 bp, synthetic construct
  misc_feature 1..22: note = chemically synthesized
  source 1..22: mol_type = other DNA
cggtgcagaagcattttagttt

SEQ ID NO: 31928 - DNA, 22 bp, synthetic construct
  misc_feature 1..22: note = chemically synthesized
  source 1..22: mol_type = other DNA
tagtttaattaagtcccatttg

SEQ ID NO: 31929 - DNA, 22 bp, synthetic construct
  misc_feature 1..22: note = chemically synthesized
  source 1..22: mol_type = other DNA
agtttaattaagtcccatttgt

SEQ ID NO: 31930 - DNA, 22 bp, synthetic construct
  misc_feature 1..22: note = chemically synthesized
  source 1..22: mol_type = other DNA
gtttaattaagtcccatttgtc

SEQ ID NO: 31931 - DNA, 22 bp, synthetic construct
  misc_feature 1..22: note = chemically synthesized
  source 1..22: mol_type = other DNA
aattaagtcccatttgtctgtt

SEQ ID NO: 31932 - DNA, 22 bp, synthetic construct
  misc_feature 1..22: note = chemically synthesized
  source 1..22: mol_type = other DNA
attaagtcccatttgtctgttt

SEQ ID NO: 31933 - DNA, 22 bp, synthetic construct
  misc_feature 1..22: note = chemically synthesized
  source 1..22: mol_type = other DNA
agtcccatttgtctgtttttgt

SEQ ID NO: 31934 - DNA, 22 bp, synthetic construct
  misc_feature 1..22: note = chemically synthesized
  source 1..22: mol_type = other DNA
gtctgtttttgtttttgttgtg

SEQ ID NO: 31935 - DNA, 22 bp, synthetic construct
  misc_feature 1..22: note = chemically synthesized
  source 1..22: mol_type = other DNA
tctgtttttgtttttgttgtgt

SEQ ID NO: 31936 - DNA, 22 bp, synthetic construct
  misc_feature 1..22: note = chemically synthesized
  source 1..22: mol_type = other DNA
tttttgtttttgttgtgtttag

SEQ ID NO: 31937 - DNA, 22 bp, synthetic construct
  misc_feature 1..22: note = chemically synthesized
  source 1..22: mol_type = other DNA
ttgtttttgttgtgtttagttt

SEQ ID NO: 31938 - DNA, 22 bp, synthetic construct
  misc_feature 1..22: note = chemically synthesized
  source 1..22: mol_type = other DNA
tgtttttgttgtgtttagtttt

SEQ ID NO: 31939 - DNA, 22 bp, synthetic construct
  misc_feature 1..22: note = chemically synthesized
  source 1..22: mol_type = other DNA
gtttttgttgtgtttagttttg

SEQ ID NO: 31940 - DNA, 22 bp, synthetic construct
  misc_feature 1..22: note = chemically synthesized
  source 1..22: mol_type = other DNA
tttttgttgtgtttagttttga

SEQ ID NO: 31941 - DNA, 22 bp, synthetic construct
  misc_feature 1..22: note = chemically synthesized
  source 1..22: mol_type = other DNA
ttgttgtgtttagttttgagga

SEQ ID NO: 31942 - DNA, 22 bp, synthetic construct
  misc_feature 1..22: note = chemically synthesized
  source 1..22: mol_type = other DNA
tgttgtgtttagttttgaggac

SEQ ID NO: 31943 - DNA, 22 bp, synthetic construct
  misc_feature 1..22: note = chemically synthesized
  source 1..22: mol_type = other DNA
gttgtgtttagttttgaggact

SEQ ID NO: 31944 - DNA, 22 bp, synthetic construct
  misc_feature 1..22: note = chemically synthesized
  source 1..22: mol_type = other DNA
ttgtgtttagttttgaggactt

SEQ ID NO: 31945 - DNA, 22 bp, synthetic construct
  misc_feature 1..22: note = chemically synthesized
  source 1..22: mol_type = other DNA
tgtttagttttgaggacttggt

SEQ ID NO: 31946 - DNA, 22 bp, synthetic construct
  misc_feature 1..22: note = chemically synthesized
  source 1..22: mol_type = other DNA
agttttgaggacttggtcataa

SEQ ID NO: 31947 - DNA, 22 bp, synthetic construct
  misc_feature 1..22: note = chemically synthesized
  source 1..22: mol_type = other DNA
gttttgaggacttggtcataaa

SEQ ID NO: 31948 - DNA, 22 bp, synthetic construct
  misc_feature 1..22: note = chemically synthesized
  source 1..22: mol_type = other DNA
tgaggacttggtcataaattct

SEQ ID NO: 31949 - DNA, 22 bp, synthetic construct
  misc_feature 1..22: note = chemically synthesized
  source 1..22: mol_type = other DNA
gaggacttggtcataaattctt

SEQ ID NO: 31950 - DNA, 22 bp, synthetic construct
  misc_feature 1..22: note = chemically synthesized
  source 1..22: mol_type = other DNA
aggacttggtcataaattcttt

SEQ ID NO: 31951 - DNA, 22 bp, synthetic construct
  misc_feature 1..22: note = chemically synthesized
  source 1..22: mol_type = other DNA
ggtcataaattctttgcctagg

SEQ ID NO: 31952 - DNA, 22 bp, synthetic construct
  misc_feature 1..22: note = chemically synthesized
  source 1..22: mol_type = other DNA
gtcataaattctttgcctaggc

SEQ ID NO: 31953 - DNA, 22 bp, synthetic construct
  misc_feature 1..22: note = chemically synthesized
  source 1..22: mol_type = other DNA
tttgcctaggccacatctaatt

SEQ ID NO: 31954 - DNA, 22 bp, synthetic construct
  misc_feature 1..22: note = chemically synthesized
  source 1..22: mol_type = other DNA
tgcctaggccacatctaatttt

SEQ ID NO: 31955 - DNA, 22 bp, synthetic construct
  misc_feature 1..22: note = chemically synthesized
  source 1..22: mol_type = other DNA
gcctaggccacatctaattttt

SEQ ID NO: 31956 - DNA, 22 bp, synthetic construct
  misc_feature 1..22: note = chemically synthesized
  source 1..22: mol_type = other DNA
cctaggccacatctaattttta

SEQ ID NO: 31957 - DNA, 22 bp, synthetic construct
  misc_feature 1..22: note = chemically synthesized
  source 1..22: mol_type = other DNA
ggccacatctaatttttaatcc

SEQ ID NO: 31958 - DNA, 22 bp, synthetic construct
  misc_feature 1..22: note = chemically synthesized
  source 1..22: mol_type = other DNA
atttttaatcctcttttagagc

SEQ ID NO: 31959 - DNA, 22 bp, synthetic construct
  misc_feature 1..22: note = chemically synthesized
  source 1..22: mol_type = other DNA
ttaatcctcttttagagcctgt

SEQ ID NO: 31960 - DNA, 22 bp, synthetic construct
  misc_feature 1..22: note = chemically synthesized
  source 1..22: mol_type = other DNA
taatcctcttttagagcctgtc

SEQ ID NO: 31961 - DNA, 22 bp, synthetic construct
  misc_feature 1..22: note = chemically synthesized
  source 1..22: mol_type = other DNA
aatcctcttttagagcctgtct

SEQ ID NO: 31962 - DNA, 22 bp, synthetic construct
  misc_feature 1..22: note = chemically synthesized
  source 1..22: mol_type = other DNA
atcctcttttagagcctgtctt

SEQ ID NO: 31963 - DNA, 22 bp, synthetic construct
  misc_feature 1..22: note = chemically synthesized
  source 1..22: mol_type = other DNA
ttttagagcctgtctttccctc

SEQ ID NO: 31964 - DNA, 22 bp, synthetic construct
  misc_feature 1..22: note = chemically synthesized
  source 1..22: mol_type = other DNA
ttagagcctgtctttccctcca

SEQ ID NO: 31965 - DNA, 22 bp, synthetic construct
  misc_feature 1..22: note = chemically synthesized
  source 1..22: mol_type = other DNA
tagagcctgtctttccctccaa

SEQ ID NO: 31966 - DNA, 22 bp, synthetic construct
  misc_feature 1..22: note = chemically synthesized
  source 1..22: mol_type = other DNA
agagcctgtctttccctccaaa

SEQ ID NO: 31967 - DNA, 22 bp, synthetic construct
  misc_feature 1..22: note = chemically synthesized
  source 1..22: mol_type = other DNA
gagcctgtctttccctccaaac

SEQ ID NO: 31968 - DNA, 22 bp, synthetic construct
  misc_feature 1..22: note = chemically synthesized
  source 1..22: mol_type = other DNA
tctttccctccaaactaaatat

SEQ ID NO: 31969 - DNA, 22 bp, synthetic construct
  misc_feature 1..22: note = chemically synthesized
  source 1..22: mol_type = other DNA
tccctccaaactaaatattatt

SEQ ID NO: 31970 - DNA, 22 bp, synthetic construct
  misc_feature 1..22: note = chemically synthesized
  source 1..22: mol_type = other DNA
ccctccaaactaaatattattt

SEQ ID NO: 31971 - DNA, 22 bp, synthetic construct
  misc_feature 1..22: note = chemically synthesized
  source 1..22: mol_type = other DNA
cctccaaactaaatattatttt

SEQ ID NO: 31972 - DNA, 22 bp, synthetic construct
  misc_feature 1..22: note = chemically synthesized
  source 1..22: mol_type = other DNA
caaactaaatattattttaccc

SEQ ID NO: 31973 - DNA, 22 bp, synthetic construct
  misc_feature 1..22: note = chemically synthesized
  source 1..22: mol_type = other DNA
aatattattttacccccatttg

SEQ ID NO: 31974 - DNA, 22 bp, synthetic construct
  misc_feature 1..22: note = chemically synthesized
  source 1..22: mol_type = other DNA
ttttacccccatttgacacatg

SEQ ID NO: 31975 - DNA, 22 bp, synthetic construct
  misc_feature 1..22: note = chemically synthesized
  source 1..22: mol_type = other DNA
tacccccatttgacacatgagc

SEQ ID NO: 31976 - DNA, 22 bp, synthetic construct
  misc_feature 1..22: note = chemically synthesized
  source 1..22: mol_type = other DNA
acccccatttgacacatgagct

SEQ ID NO: 31977 - DNA, 22 bp, synthetic construct
  misc_feature 1..22: note = chemically synthesized
  source 1..22: mol_type = other DNA
cccccatttgacacatgagcta

SEQ ID NO: 31978 - DNA, 22 bp, synthetic construct
  misc_feature 1..22: note = chemically synthesized
  source 1..22: mol_type = other DNA
gacacatgagctaattgagcct

SEQ ID NO: 31979 - DNA, 22 bp, synthetic construct
  misc_feature 1..22: note = chemically synthesized
  source 1..22: mol_type = other DNA
acacatgagctaattgagcctt

SEQ ID NO: 31980 - DNA, 22 bp, synthetic construct
  misc_feature 1..22: note = chemically synthesized
  source 1..22: mol_type = other DNA
attgagccttctgtctgttaag

SEQ ID NO: 31981 - DNA, 22 bp, synthetic construct
  misc_feature 1..22: note = chemically synthesized
  source 1..22: mol_type = other DNA
agccttctgtctgttaagtaag

SEQ ID NO: 31982 - DNA, 22 bp, synthetic construct
  misc_feature 1..22: note = chemically synthesized
  source 1..22: mol_type = other DNA
ctgtctgttaagtaagttgact

SEQ ID NO: 31983 - DNA, 22 bp, synthetic construct
  misc_feature 1..22: note = chemically synthesized
  source 1..22: mol_type = other DNA
tgtctgttaagtaagttgacta

SEQ ID NO: 31984 - DNA, 22 bp, synthetic construct
  misc_feature 1..22: note = chemically synthesized
  source 1..22: mol_type = other DNA
tctgttaagtaagttgactagt

SEQ ID NO: 31985 - DNA, 22 bp, synthetic construct
  misc_feature 1..22: note = chemically synthesized
  source 1..22: mol_type = other DNA
ttaagtaagttgactagttcag

SEQ ID NO: 31986 - DNA, 22 bp, synthetic construct
  misc_feature 1..22: note = chemically synthesized
  source 1..22: mol_type = other DNA
agtaagttgactagttcagtgt

SEQ ID NO: 31987 - DNA, 22 bp, synthetic construct
  misc_feature 1..22: note = chemically synthesized
  source 1..22: mol_type = other DNA
actagttcagtgtaagttgttt

SEQ ID NO: 31988 - DNA, 22 bp, synthetic construct
  misc_feature 1..22: note = chemically synthesized
  source 1..22: mol_type = other DNA
gttcagtgtaagttgtttctaa

SEQ ID NO: 31989 - DNA, 22 bp, synthetic construct
  misc_feature 1..22: note = chemically synthesized
  source 1..22: mol_type = other DNA
agtgtaagttgtttctaatttt

SEQ ID NO: 31990 - DNA, 22 bp, synthetic construct
  misc_feature 1..22: note = chemically synthesized
  source 1..22: mol_type = other DNA
tttctaattttttgccatcata

SEQ ID NO: 31991 - DNA, 22 bp, synthetic construct
  misc_feature 1..22: note = chemically synthesized
  source 1..22: mol_type = other DNA
ctaattttttgccatcataatg

SEQ ID NO: 31992 - DNA, 22 bp, synthetic construct
  misc_feature 1..22: note = chemically synthesized
  source 1..22: mol_type = other DNA
taattttttgccatcataatgc

SEQ ID NO: 31993 - DNA, 22 bp, synthetic construct
  misc_feature 1..22: note = chemically synthesized
  source 1..22: mol_type = other DNA
attttttgccatcataatgctt

SEQ ID NO: 31994 - DNA, 22 bp, synthetic construct
  misc_feature 1..22: note = chemically synthesized
  source 1..22: mol_type = other DNA
tttgccatcataatgctttagt

SEQ ID NO: 31995 - DNA, 22 bp, synthetic construct
  misc_feature 1..22: note = chemically synthesized
  source 1..22: mol_type = other DNA
ttgccatcataatgctttagta

SEQ ID NO: 31996 - DNA, 22 bp, synthetic construct
  misc_feature 1..22: note = chemically synthesized
  source 1..22: mol_type = other DNA
tgccatcataatgctttagtaa

SEQ ID NO: 31997 - DNA, 22 bp, synthetic construct
  misc_feature 1..22: note = chemically synthesized
  source 1..22: mol_type = other DNA
gccatcataatgctttagtaaa

SEQ ID NO: 31998 - DNA, 22 bp, synthetic construct
  misc_feature 1..22: note = chemically synthesized
  source 1..22: mol_type = other DNA
ccatcataatgctttagtaaac

SEQ ID NO: 31999 - DNA, 22 bp, synthetic construct
  misc_feature 1..22: note = chemically synthesized
  source 1..22: mol_type = other DNA
tagtaaacatccttttcatact

SEQ ID NO: 32000 - DNA, 22 bp, synthetic construct
  misc_feature 1..22: note = chemically synthesized
  source 1..22: mol_type = other DNA
agtaaacatccttttcatactc

SEQ ID NO: 32001 - DNA, 22 bp, synthetic construct
  misc_feature 1..22: note = chemically synthesized
  source 1..22: mol_type = other DNA
gtaaacatccttttcatactct

SEQ ID NO: 32002 - DNA, 22 bp, synthetic construct
  misc_feature 1..22: note = chemically synthesized
  source 1..22: mol_type = other DNA
ttcatactctccttaattttcc

SEQ ID NO: 32003 - DNA, 22 bp, synthetic construct
  misc_feature 1..22: note = chemically synthesized
  source 1..22: mol_type = other DNA
tcatactctccttaattttccc

SEQ ID NO: 32004 - DNA, 22 bp, synthetic construct
  misc_feature 1..22: note = chemically synthesized
  source 1..22: mol_type = other DNA
catactctccttaattttcccc

SEQ ID NO: 32005 - DNA, 22 bp, synthetic construct
  misc_feature 1..22: note = chemically synthesized
  source 1..22: mol_type = other DNA
atactctccttaattttccccc

SEQ ID NO: 32006 - DNA, 22 bp, synthetic construct
  misc_feature 1..22: note = chemically synthesized
  source 1..22: mol_type = other DNA
tccttaattttcccccaggatg

SEQ ID NO: 32007 - DNA, 22 bp, synthetic construct
  misc_feature 1..22: note = chemically synthesized
  source 1..22: mol_type = other DNA
cttaattttcccccaggatggt

SEQ ID NO: 32008 - DNA, 22 bp, synthetic construct
  misc_feature 1..22: note = chemically synthesized
  source 1..22: mol_type = other DNA
aattttcccccaggatggtttt

SEQ ID NO: 32009 - DNA, 22 bp, synthetic construct
  misc_feature 1..22: note = chemically synthesized
  source 1..22: mol_type = other DNA
attttcccccaggatggttttc

SEQ ID NO: 32010 - DNA, 22 bp, synthetic construct
  misc_feature 1..22: note = chemically synthesized
  source 1..22: mol_type = other DNA
tcccccaggatggttttctaga

SEQ ID NO: 32011 - DNA, 22 bp, synthetic construct
  misc_feature 1..22: note = chemically synthesized
  source 1..22: mol_type = other DNA
cccccaggatggttttctagat

SEQ ID NO: 32012 - DNA, 22 bp, synthetic construct
  misc_feature 1..22: note = chemically synthesized
  source 1..22: mol_type = other DNA
ccccaggatggttttctagatg

SEQ ID NO: 32013 - DNA, 22 bp, synthetic construct
  misc_feature 1..22: note = chemically synthesized
  source 1..22: mol_type = other DNA
tctagatgtggacttgctggat

SEQ ID NO: 32014 - DNA, 22 bp, synthetic construct
  misc_feature 1..22: note = chemically synthesized
  source 1..22: mol_type = other DNA
ctagatgtggacttgctggatc

SEQ ID NO: 32015 - DNA, 22 bp, synthetic construct
  misc_feature 1..22: note = chemically synthesized
  source 1..22: mol_type = other DNA
tagatgtggacttgctggatcc

SEQ ID NO: 32016 - DNA, 22 bp, synthetic construct
  misc_feature 1..22: note = chemically synthesized
  source 1..22: mol_type = other DNA
gatgtggacttgctggatccaa

SEQ ID NO: 32017 - DNA, 22 bp, synthetic construct
  misc_feature 1..22: note = chemically synthesized
  source 1..22: mol_type = other DNA
gctggatccaaagtgtgcatat

SEQ ID NO: 32018 - DNA, 22 bp, synthetic construct
  misc_feature 1..22: note = chemically synthesized
  source 1..22: mol_type = other DNA
ctggatccaaagtgtgcatatt

SEQ ID NO: 32019 - DNA, 22 bp, synthetic construct
  misc_feature 1..22: note = chemically synthesized
  source 1..22: mol_type = other DNA
gatccaaagtgtgcatattttc

SEQ ID NO: 32020 - DNA, 22 bp, synthetic construct
  misc_feature 1..22: note = chemically synthesized
  source 1..22: mol_type = other DNA
tccaaatgtatccatatattgt

SEQ ID NO: 32021 - DNA, 22 bp, synthetic construct
  misc_feature 1..22: note = chemically synthesized
  source 1..22: mol_type = other DNA
ccaaatgtatccatatattgtg

SEQ ID NO: 32022 - DNA, 22 bp, synthetic construct
  misc_feature 1..22: note = chemically synthesized
  source 1..22: mol_type = other DNA
caaatgtatccatatattgtgg

SEQ ID NO: 32023 - DNA, 22 bp, synthetic construct
  misc_feature 1..22: note = chemically synthesized
  source 1..22: mol_type = other DNA
tggctttgtgttttaatagagg

SEQ ID NO: 32024 - DNA, 22 bp, synthetic construct
  misc_feature 1..22: note = chemically synthesized
  source 1..22: mol_type = other DNA
tgtgttttaatagaggtagcag

SEQ ID NO: 32025 - DNA, 22 bp, synthetic construct
  misc_feature 1..22: note = chemically synthesized
  source 1..22: mol_type = other DNA
gtgttttaatagaggtagcagc

SEQ ID NO: 32026 - DNA, 22 bp, synthetic construct
  misc_feature 1..22: note = chemically synthesized
  source 1..22: mol_type = other DNA
tgttttaatagaggtagcagca

SEQ ID NO: 32027 - DNA, 22 bp, synthetic construct
  misc_feature 1..22: note = chemically synthesized
  source 1..22: mol_type = other DNA
taatagaggtagcagcaatatt

SEQ ID NO: 32028 - DNA, 22 bp, synthetic construct
  misc_feature 1..22: note = chemically synthesized
  source 1..22: mol_type = other DNA
aatagaggtagcagcaatatta

SEQ ID NO: 32029 - DNA, 22 bp, synthetic construct
  misc_feature 1..22: note = chemically synthesized
  source 1..22: mol_type = other DNA
atagaggtagcagcaatattag

SEQ ID NO: 32030 - DNA, 22 bp, synthetic construct
  misc_feature 1..22: note = chemically synthesized
  source 1..22: mol_type = other DNA
gaggagagaattaaggaacgat

SEQ ID NO: 32031 - DNA, 22 bp, synthetic construct
  misc_feature 1..22: note = chemically synthesized
  source 1..22: mol_type = other DNA
aggaacgattctagtgtagcag

SEQ ID NO: 32032 - DNA, 22 bp, synthetic construct
  misc_feature 1..22: note = chemically synthesized
  source 1..22: mol_type = other DNA
tagtgtagcaggacaagctgca

SEQ ID NO: 32033 - DNA, 22 bp, synthetic construct
  misc_feature 1..22: note = chemically synthesized
  source 1..22: mol_type = other DNA
gtgtagcaggacaagctgcata

SEQ ID NO: 32034 - DNA, 22 bp, synthetic construct
  misc_feature 1..22: note = chemically synthesized
  source 1..22: mol_type = other DNA
catacaaaacccctcagacacc

SEQ ID NO: 32035 - DNA, 22 bp, synthetic construct
  misc_feature 1..22: note = chemically synthesized
  source 1..22: mol_type = other DNA
agacaccgagttaaagaaggaa

SEQ ID NO: 32036 - DNA, 22 bp, synthetic construct
  misc_feature 1..22: note = chemically synthesized
  source 1..22: mol_type = other DNA
aagaaggaagggctttattcgg

SEQ ID NO: 32037 - DNA, 22 bp, synthetic construct
  misc_feature 1..22: note = chemically synthesized
  source 1..22: mol_type = other DNA
tattcggctgggagcttgggca

SEQ ID NO: 32038 - DNA, 22 bp, synthetic construct
  misc_feature 1..22: note = chemically synthesized
  source 1..22: mol_type = other DNA
attcggctgggagcttgggcaa

SEQ ID NO: 32039 - DNA, 22 bp, synthetic construct
  misc_feature 1..22: note = chemically synthesized
  source 1..22: mol_type = other DNA
ttcggctgggagcttgggcaag

SEQ ID NO: 32040 - DNA, 22 bp, synthetic construct
  misc_feature 1..22: note = chemically synthesized
  source 1..22: mol_type = other DNA
ggctgggagcttgggcaagact

SEQ ID NO: 32041 - DNA, 22 bp, synthetic construct
  misc_feature 1..22: note = chemically synthesized
  source 1..22: mol_type = other DNA
ggagcttgggcaagactcacat

SEQ ID NO: 32042 - DNA, 22 bp, synthetic construct
  misc_feature 1..22: note = chemically synthesized
  source 1..22: mol_type = other DNA
gggcaagactcacatctccaac

SEQ ID NO: 32043 - DNA, 22 bp, synthetic construct
  misc_feature 1..22: note = chemically synthesized
  source 1..22: mol_type = other DNA
ggcaagactcacatctccaaca

SEQ ID NO: 32044 - DNA, 22 bp, synthetic construct
  misc_feature 1..22: note = chemically synthesized
  source 1..22: mol_type = other DNA
acatctccaacaaccaagctct

SEQ ID NO: 32045 - DNA, 22 bp, synthetic construct
  misc_feature 1..22: note = chemically synthesized
  source 1..22: mol_type = other DNA
caacaaccaagctctcagagtg

SEQ ID NO: 32046 - DNA, 22 bp, synthetic construct
  misc_feature 1..22: note = chemically synthesized
  source 1..22: mol_type = other DNA
tcagagtgagcaattcctgtcc

SEQ ID NO: 32047 - DNA, 22 bp, synthetic construct
  misc_feature 1..22: note = chemically synthesized
  source 1..22: mol_type = other DNA
agagtgagcaattcctgtccct

SEQ ID NO: 32048 - DNA, 22 bp, synthetic construct
  misc_feature 1..22: note = chemically synthesized
  source 1..22: mol_type = other DNA
ctgtcccttttaagggcttaca

SEQ ID NO: 32049 - DNA, 22 bp, synthetic construct
  misc_feature 1..22: note = chemically synthesized
  source 1..22: mol_type = other DNA
tcccttttaagggcttacaact

SEQ ID NO: 32050 - DNA, 22 bp, synthetic construct
  misc_feature 1..22: note = chemically synthesized
  source 1..22: mol_type = other DNA
ttaagggcttacaactctaagg

SEQ ID NO: 32051 - DNA, 22 bp, synthetic construct
  misc_feature 1..22: note = chemically synthesized
  source 1..22: mol_type = other DNA
taagggcttacaactctaaggg

SEQ ID NO: 32052 - DNA, 22 bp, synthetic construct
  misc_feature 1..22: note = chemically synthesized
  source 1..22: mol_type = other DNA
aagggcttacaactctaagggg

SEQ ID NO: 32053 - DNA, 22 bp, synthetic construct
  misc_feature 1..22: note = chemically synthesized
  source 1..22: mol_type = other DNA
agggcttacaactctaaggggg

SEQ ID NO: 32054 - DNA, 22 bp, synthetic construct
  misc_feature 1..22: note = chemically synthesized
  source 1..22: mol_type = other DNA
acaactctaagggggtacatga

SEQ ID NO: 32055 - DNA, 22 bp, synthetic construct
  misc_feature 1..22: note = chemically synthesized
  source 1..22: mol_type = other DNA
caactctaagggggtacatgac

SEQ ID NO: 32056 - DNA, 22 bp, synthetic construct
  misc_feature 1..22: note = chemically synthesized
  source 1..22: mol_type = other DNA
taagggggtacatgactggggg

SEQ ID NO: 32057 - DNA, 22 bp, synthetic construct
  misc_feature 1..22: note = chemically synthesized
  source 1..22: mol_type = other DNA
agggggtacatgactgggggct

SEQ ID NO: 32058 - DNA, 22 bp, synthetic construct
  misc_feature 1..22: note = chemically synthesized
  source 1..22: mol_type = other DNA
ggggctgcatgcactggtcatc

SEQ ID NO: 32059 - DNA, 22 bp, synthetic construct
  misc_feature 1..22: note = chemically synthesized
  source 1..22: mol_type = other DNA
catgcactggtcatcagaatgg

SEQ ID NO: 32060 - DNA, 22 bp, synthetic construct
  misc_feature 1..22: note = chemically synthesized
  source 1..22: mol_type = other DNA
gtcatcagaatggaacagaaca

SEQ ID NO: 32061 - DNA, 22 bp, synthetic construct
  misc_feature 1..22: note = chemically synthesized
  source 1..22: mol_type = other DNA
tcacactgcttttccatacagt

SEQ ID NO: 32062 - DNA, 22 bp, synthetic construct
  misc_feature 1..22: note = chemically synthesized
  source 1..22: mol_type = other DNA
cacactgcttttccatacagtg

SEQ ID NO: 32063 - DNA, 22 bp, synthetic construct
  misc_feature 1..22: note = chemically synthesized
  source 1..22: mol_type = other DNA
acactgcttttccatacagtgt

SEQ ID NO: 32064 - DNA, 22 bp, synthetic construct
  misc_feature 1..22: note = chemically synthesized
  source 1..22: mol_type = other DNA
cttttccatacagtgtctggaa

SEQ ID NO: 32065 - DNA, 22 bp, synthetic construct
  misc_feature 1..22: note = chemically synthesized
  source 1..22: mol_type = other DNA
ttccatacagtgtctggaatct

SEQ ID NO: 32066 - DNA, 22 bp, synthetic construct
  misc_feature 1..22: note = chemically synthesized
  source 1..22: mol_type = other DNA
tccatacagtgtctggaatcta

SEQ ID NO: 32067 - DNA, 22 bp, synthetic construct
  misc_feature 1..22: note = chemically synthesized
  source 1..22: mol_type = other DNA
ccatacagtgtctggaatctat

SEQ ID NO: 32068 - DNA, 22 bp, synthetic construct
  misc_feature 1..22: note = chemically synthesized
  source 1..22: mol_type = other DNA
catacagtgtctggaatctata

SEQ ID NO: 32069 - DNA, 22 bp, synthetic construct
  misc_feature 1..22: note = chemically synthesized
  source 1..22: mol_type = other DNA
gaatctatagataacataactg

SEQ ID NO: 32070 - DNA, 22 bp, synthetic construct
  misc_feature 1..22: note = chemically synthesized
  source 1..22: mol_type = other DNA
tagataacataactggccaggt

SEQ ID NO: 32071 - DNA, 22 bp, synthetic construct
  misc_feature 1..22: note = chemically synthesized
  source 1..22: mol_type = other DNA
gccaggtcaggggtctatcttt

SEQ ID NO: 32072 - DNA, 22 bp, synthetic construct
  misc_feature 1..22: note = chemically synthesized
  source 1..22: mol_type = other DNA
tctttaaccaggcccaggatgt

SEQ ID NO: 32073 - DNA, 22 bp, synthetic construct
  misc_feature 1..22: note = chemically synthesized
  source 1..22: mol_type = other DNA
taaccaggcccaggatgtggtc

SEQ ID NO: 32074 - DNA, 22 bp, synthetic construct
  misc_feature 1..22: note = chemically synthesized
  source 1..22: mol_type = other DNA
aaccaggcccaggatgtggtct

SEQ ID NO: 32075 - DNA, 22 bp, synthetic construct
  misc_feature 1..22: note = chemically synthesized
  source 1..22: mol_type = other DNA
accaggcccaggatgtggtctc

SEQ ID NO: 32076 - DNA, 22 bp, synthetic construct
  misc_feature 1..22: note = chemically synthesized
  source 1..22: mol_type = other DNA
aggctgtttgcctgtggatttc

SEQ ID NO: 32077 - DNA, 22 bp, synthetic construct
  misc_feature 1..22: note = chemically synthesized
  source 1..22: mol_type = other DNA
tttgcctgtggatttcatttct

SEQ ID NO: 32078 - DNA, 22 bp, synthetic construct
  misc_feature 1..22: note = chemically synthesized
  source 1..22: mol_type = other DNA
gcctgtggatttcatttctgcc

SEQ ID NO: 32079 - DNA, 22 bp, synthetic construct
  misc_feature 1..22: note = chemically synthesized
  source 1..22: mol_type = other DNA
cctgtggatttcatttctgcct

SEQ ID NO: 32080 - DNA, 22 bp, synthetic construct
  misc_feature 1..22: note = chemically synthesized
  source 1..22: mol_type = other DNA
tggatttcatttctgcctttta

SEQ ID NO: 32081 - DNA, 22 bp, synthetic construct
  misc_feature 1..22: note = chemically synthesized
  source 1..22: mol_type = other DNA
catttctgccttttagttttta

SEQ ID NO: 32082 - DNA, 22 bp, synthetic construct
  misc_feature 1..22: note = chemically synthesized
  source 1..22: mol_type = other DNA
atttctgccttttagtttttac

SEQ ID NO: 32083 - DNA, 22 bp, synthetic construct
  misc_feature 1..22: note = chemically synthesized
  source 1..22: mol_type = other DNA
ctgccttttagtttttacttct

SEQ ID NO: 32084 - DNA, 22 bp, synthetic construct
  misc_feature 1..22: note = chemically synthesized
  source 1..22: mol_type = other DNA
tgccttttagtttttacttctt

SEQ ID NO: 32085 - DNA, 22 bp, synthetic construct
  misc_feature 1..22: note = chemically synthesized
  source 1..22: mol_type = other DNA
ccttttagtttttacttcttct

SEQ ID NO: 32086 - DNA, 22 bp, synthetic construct
  misc_feature 1..22: note = chemically synthesized
  source 1..22: mol_type = other DNA
ttagtttttacttcttctttct

SEQ ID NO: 32087 - DNA, 22 bp, synthetic construct
  misc_feature 1..22: note = chemically synthesized
  source 1..22: mol_type = other DNA
tagtttttacttcttctttctt

SEQ ID NO: 32088 - DNA, 22 bp, synthetic construct
  misc_feature 1..22: note = chemically synthesized
  source 1..22: mol_type = other DNA
agtttttacttcttctttcttt

SEQ ID NO: 32089 - DNA, 22 bp, synthetic construct
  misc_feature 1..22: note = chemically synthesized
  source 1..22: mol_type = other DNA
gtttttacttcttctttctttg

SEQ ID NO: 32090 - DNA, 22 bp, synthetic construct
  misc_feature 1..22: note = chemically synthesized
  source 1..22: mol_type = other DNA
ttacttcttctttctttggagg

SEQ ID NO: 32091 - DNA, 22 bp, synthetic construct
  misc_feature 1..22: note = chemically synthesized
  source 1..22: mol_type = other DNA
tacttcttctttctttggaggc

SEQ ID NO: 32092 - DNA, 22 bp, synthetic construct
  misc_feature 1..22: note = chemically synthesized
  source 1..22: mol_type = other DNA
acttcttctttctttggaggca

SEQ ID NO: 32093 - DNA, 22 bp, synthetic construct
  misc_feature 1..22: note = chemically synthesized
  source 1..22: mol_type = other DNA
cttcttctttctttggaggcag

SEQ ID NO: 32094 - DNA, 22 bp, synthetic construct
  misc_feature 1..22: note = chemically synthesized
  source 1..22: mol_type = other DNA
cttctttctttggaggcagaaa

SEQ ID NO: 32095 - DNA, 22 bp, synthetic construct
  misc_feature 1..22: note = chemically synthesized
  source 1..22: mol_type = other DNA
ttctttctttggaggcagaaat

SEQ ID NO: 32096 - DNA, 22 bp, synthetic construct
  misc_feature 1..22: note = chemically synthesized
  source 1..22: mol_type = other DNA
ctttctttggaggcagaaattg

SEQ ID NO: 32097 - DNA, 22 bp, synthetic construct
  misc_feature 1..22: note = chemically synthesized
  source 1..22: mol_type = other DNA
tttctttggaggcagaaattgg

SEQ ID NO: 32098 - DNA, 22 bp, synthetic construct
  misc_feature 1..22: note = chemically synthesized
  source 1..22: mol_type = other DNA
tctttggaggcagaaattgggc

SEQ ID NO: 32099 - DNA, 22 bp, synthetic construct
  misc_feature 1..22: note = chemically synthesized
  source 1..22: mol_type = other DNA
ctttggaggcagaaattgggca

SEQ ID NO: 32100 - DNA, 22 bp, synthetic construct
  misc_feature 1..22: note = chemically synthesized
  source 1..22: mol_type = other DNA
tttggaggcagaaattgggcat

SEQ ID NO: 32101 - DNA, 22 bp, synthetic construct
  misc_feature 1..22: note = chemically synthesized
  source 1..22: mol_type = other DNA
tggaggcagaaattgggcataa

SEQ ID NO: 32102 - DNA, 22 bp, synthetic construct
  misc_feature 1..22: note = chemically synthesized
  source 1..22: mol_type = other DNA
ggaggcagaaattgggcataaa

SEQ ID NO: 32103 - DNA, 22 bp, synthetic construct
  misc_feature 1..22: note = chemically synthesized
  source 1..22: mol_type = other DNA
gaggcagaaattgggcataaaa

SEQ ID NO: 32104 - DNA, 22 bp, synthetic construct
  misc_feature 1..22: note = chemically synthesized
  source 1..22: mol_type = other DNA
ggcataaaacaatatgaagggt

SEQ ID NO: 32105 - DNA, 22 bp, synthetic construct
  misc_feature 1..22: note = chemically synthesized
  source 1..22: mol_type = other DNA
ctcccttactaggaagagagaa

SEQ ID NO: 32106 - DNA, 22 bp, synthetic construct
  misc_feature 1..22: note = chemically synthesized
  source 1..22: mol_type = other DNA
ccttactaggaagagagaaata

SEQ ID NO: 32107 - DNA, 22 bp, synthetic construct
  misc_feature 1..22: note = chemically synthesized
  source 1..22: mol_type = other DNA
actaggaagagagaaataccat

SEQ ID NO: 32108 - DNA, 22 bp, synthetic construct
  misc_feature 1..22: note = chemically synthesized
  source 1..22: mol_type = other DNA
ctaggaagagagaaataccatg

SEQ ID NO: 32109 - DNA, 22 bp, synthetic construct
  misc_feature 1..22: note = chemically synthesized
  source 1..22: mol_type = other DNA
ggaagagagaaataccatgtga

SEQ ID NO: 32110 - DNA, 22 bp, synthetic construct
  misc_feature 1..22: note = chemically synthesized
  source 1..22: mol_type = other DNA
gtgttattggatttgacatcgg

SEQ ID NO: 32111 - DNA, 22 bp, synthetic construct
  misc_feature 1..22: note = chemically synthesized
  source 1..22: mol_type = other DNA
tgttattggatttgacatcggg

SEQ ID NO: 32112 - DNA, 22 bp, synthetic construct
  misc_feature 1..22: note = chemically synthesized
  source 1..22: mol_type = other DNA
ttggatttgacatcggggttgg

SEQ ID NO: 32113 - DNA, 22 bp, synthetic construct
  misc_feature 1..22: note = chemically synthesized
  source 1..22: mol_type = other DNA
gatttgacatcggggttggacc

SEQ ID NO: 32114 - DNA, 22 bp, synthetic construct
  misc_feature 1..22: note = chemically synthesized
  source 1..22: mol_type = other DNA
gacatcggggttggaccaagca

SEQ ID NO: 32115 - DNA, 22 bp, synthetic construct
  misc_feature 1..22: note = chemically synthesized
  source 1..22: mol_type = other DNA
acatcggggttggaccaagcat

SEQ ID NO: 32116 - DNA, 22 bp, synthetic construct
  misc_feature 1..22: note = chemically synthesized
  source 1..22: mol_type = other DNA
gaccaagcatcttctatgaaca

SEQ ID NO: 32117 - DNA, 22 bp, synthetic construct
  misc_feature 1..22: note = chemically synthesized
  source 1..22: mol_type = other DNA
ctatgaacatctataagcacgt

SEQ ID NO: 32118 - DNA, 22 bp, synthetic construct
  misc_feature 1..22: note = chemically synthesized
  source 1..22: mol_type = other DNA
tatgaacatctataagcacgtt

SEQ ID NO: 32119 - DNA, 22 bp, synthetic construct
  misc_feature 1..22: note = chemically synthesized
  source 1..22: mol_type = other DNA
tgaacatctataagcacgttct

SEQ ID NO: 32120 - DNA, 22 bp, synthetic construct
  misc_feature 1..22: note = chemically synthesized
  source 1..22: mol_type = other DNA
taagcacgttctccttatcaaa

SEQ ID NO: 32121 - DNA, 22 bp, synthetic construct
  misc_feature 1..22: note = chemically synthesized
  source 1..22: mol_type = other DNA
tccttatcaaaaggtactttgc

SEQ ID NO: 32122 - DNA, 22 bp, synthetic construct
  misc_feature 1..22: note = chemically synthesized
  source 1..22: mol_type = other DNA
cttatcaaaaggtactttgctt

SEQ ID NO: 32123 - DNA, 22 bp, synthetic construct
  misc_feature 1..22: note = chemically synthesized
  source 1..22: mol_type = other DNA
atcaaaaggtactttgcttggt

SEQ ID NO: 32124 - DNA, 22 bp, synthetic construct
  misc_feature 1..22: note = chemically synthesized
  source 1..22: mol_type = other DNA
tcaaaaggtactttgcttggtg

SEQ ID NO: 32125 - DNA, 22 bp, synthetic construct
  misc_feature 1..22: note = chemically synthesized
  source 1..22: mol_type = other DNA
tgcttggtgctttaaaagataa

SEQ ID NO: 32126 - DNA, 22 bp, synthetic construct
  misc_feature 1..22: note = chemically synthesized
  source 1..22: mol_type = other DNA
gcttggtgctttaaaagataaa

SEQ ID NO: 32127 - DNA, 22 bp, synthetic construct
  misc_feature 1..22: note = chemically synthesized
  source 1..22: mol_type = other DNA
cttggtgctttaaaagataaat

SEQ ID NO: 32128 - DNA, 22 bp, synthetic construct
  misc_feature 1..22: note = chemically synthesized
  source 1..22: mol_type = other DNA
ggtgctttaaaagataaatgac

SEQ ID NO: 32129 - DNA, 22 bp, synthetic construct
  misc_feature 1..22: note = chemically synthesized
  source 1..22: mol_type = other DNA
gtgctttaaaagataaatgact

SEQ ID NO: 32130 - DNA, 22 bp, synthetic construct
  misc_feature 1..22: note = chemically synthesized
  source 1..22: mol_type = other DNA
taaaagataaatgactatgtag

SEQ ID NO: 32131 - DNA, 22 bp, synthetic construct
  misc_feature 1..22: note = chemically synthesized
  source 1..22: mol_type = other DNA
aaaagataaatgactatgtagc

SEQ ID NO: 32132 - DNA, 22 bp, synthetic construct
  misc_feature 1..22: note = chemically synthesized
  source 1..22: mol_type = other DNA
aaagataaatgactatgtagct

SEQ ID NO: 32133 - DNA, 22 bp, synthetic construct
  misc_feature 1..22: note = chemically synthesized
  source 1..22: mol_type = other DNA
tgtagcttaggagatttcttca

SEQ ID NO: 32134 - DNA, 22 bp, synthetic construct
  misc_feature 1..22: note = chemically synthesized
  source 1..22: mol_type = other DNA
aggagatttcttcataattgaa

SEQ ID NO: 32135 - DNA, 22 bp, synthetic construct
  misc_feature 1..22: note = chemically synthesized
  source 1..22: mol_type = other DNA
ggagatttcttcataattgaaa

SEQ ID NO: 32136 - DNA, 22 bp, synthetic construct
  misc_feature 1..22: note = chemically synthesized
  source 1..22: mol_type = other DNA
cttcataattgaaaaccacagc

SEQ ID NO: 32137 - DNA, 22 bp, synthetic construct
  misc_feature 1..22: note = chemically synthesized
  source 1..22: mol_type = other DNA
ttcataattgaaaaccacagca

SEQ ID NO: 32138 - DNA, 22 bp, synthetic construct
  misc_feature 1..22: note = chemically synthesized
  source 1..22: mol_type = other DNA
cataattgaaaaccacagcagc

SEQ ID NO: 32139 - DNA, 22 bp, synthetic construct
  misc_feature 1..22: note = chemically synthesized
  source 1..22: mol_type = other DNA
ataattgaaaaccacagcagct

SEQ ID NO: 32140 - DNA, 22 bp, synthetic construct
  misc_feature 1..22: note = chemically synthesized
  source 1..22: mol_type = other DNA
aaaaccacagcagctgttattt

SEQ ID NO: 32141 - DNA, 22 bp, synthetic construct
  misc_feature 1..22: note = chemically synthesized
  source 1..22: mol_type = other DNA
ttatttgaacatacctgagccc

SEQ ID NO: 32142 - DNA, 22 bp, synthetic construct
  misc_feature 1..22: note = chemically synthesized
  source 1..22: mol_type = other DNA
tttgaacatacctgagcccctt

SEQ ID NO: 32143 - DNA, 22 bp, synthetic construct
  misc_feature 1..22: note = chemically synthesized
  source 1..22: mol_type = other DNA
gaacatacctgagccccttctg

SEQ ID NO: 32144 - DNA, 22 bp, synthetic construct
  misc_feature 1..22: note = chemically synthesized
  source 1..22: mol_type = other DNA
aacatacctgagccccttctgg

SEQ ID NO: 32145 - DNA, 22 bp, synthetic construct
  misc_feature 1..22: note = chemically synthesized
  source 1..22: mol_type = other DNA
agccccttctggaccactgtag

SEQ ID NO: 32146 - DNA, 22 bp, synthetic construct
  misc_feature 1..22: note = chemically synthesized
  source 1..22: mol_type = other DNA
ctggaccactgtaggagaagga

SEQ ID NO: 32147 - DNA, 22 bp, synthetic construct
  misc_feature 1..22: note = chemically synthesized
  source 1..22: mol_type = other DNA
tggaccactgtaggagaaggag

SEQ ID NO: 32148 - DNA, 22 bp, synthetic construct
  misc_feature 1..22: note = chemically synthesized
  source 1..22: mol_type = other DNA
gaccactgtaggagaaggagga

SEQ ID NO: 32149 - DNA, 22 bp, synthetic construct
  misc_feature 1..22: note = chemically synthesized
  source 1..22: mol_type = other DNA
taggagaaggaggaagagaggt

SEQ ID NO: 32150 - DNA, 22 bp, synthetic construct
  misc_feature 1..22: note = chemically synthesized
  source 1..22: mol_type = other DNA
ctgctgctgagggcatgtatga

SEQ ID NO: 32151 - DNA, 22 bp, synthetic construct
  misc_feature 1..22: note = chemically synthesized
  source 1..22: mol_type = other DNA
tgctgctgagggcatgtatgat

SEQ ID NO: 32152 - DNA, 22 bp, synthetic construct
  misc_feature 1..22: note = chemically synthesized
  source 1..22: mol_type = other DNA
ctgctgagggcatgtatgatga

SEQ ID NO: 32153 - DNA, 22 bp, synthetic construct
  misc_feature 1..22: note = chemically synthesized
  source 1..22: mol_type = other DNA
ctgagggcatgtatgatgacaa

SEQ ID NO: 32154 - DNA, 22 bp, synthetic construct
  misc_feature 1..22: note = chemically synthesized
  source 1..22: mol_type = other DNA
agggcatgtatgatgacaatgg

SEQ ID NO: 32155 - DNA, 22 bp, synthetic construct
  misc_feature 1..22: note = chemically synthesized
  source 1..22: mol_type = other DNA
gtcctaactttgacactacaaa

SEQ ID NO: 32156 - DNA, 22 bp, synthetic construct
  misc_feature 1..22: note = chemically synthesized
  source 1..22: mol_type = other DNA
tcctaactttgacactacaaag

SEQ ID NO: 32157 - DNA, 22 bp, synthetic construct
  misc_feature 1..22: note = chemically synthesized
  source 1..22: mol_type = other DNA
actttgacactacaaagtgact

SEQ ID NO: 32158 - DNA, 22 bp, synthetic construct
  misc_feature 1..22: note = chemically synthesized
  source 1..22: mol_type = other DNA
tgacactacaaagtgactggag

SEQ ID NO: 32159 - DNA, 22 bp, synthetic construct
  misc_feature 1..22: note = chemically synthesized
  source 1..22: mol_type = other DNA
gacactacaaagtgactggagc

SEQ ID NO: 32160 - DNA, 22 bp, synthetic construct
  misc_feature 1..22: note = chemically synthesized
  source 1..22: mol_type = other DNA
acactacaaagtgactggagct

SEQ ID NO: 32161 - DNA, 22 bp, synthetic construct
  misc_feature 1..22: note = chemically synthesized
  source 1..22: mol_type = other DNA
caaagtgactggagctttaggc

SEQ ID NO: 32162 - DNA, 22 bp, synthetic construct
  misc_feature 1..22: note = chemically synthesized
  source 1..22: mol_type = other DNA
gagctttaggcaagtagttact

SEQ ID NO: 32163 - DNA, 22 bp, synthetic construct
  misc_feature 1..22: note = chemically synthesized
  source 1..22: mol_type = other DNA
taggcaagtagttactccaatt

SEQ ID NO: 32164 - DNA, 22 bp, synthetic construct
  misc_feature 1..22: note = chemically synthesized
  source 1..22: mol_type = other DNA
aggcaagtagttactccaattg

SEQ ID NO: 32165 - DNA, 22 bp, synthetic construct
  misc_feature 1..22: note = chemically synthesized
  source 1..22: mol_type = other DNA
ggcaagtagttactccaattgt

SEQ ID NO: 32166 - DNA, 22 bp, synthetic construct
  misc_feature 1..22: note = chemically synthesized
  source 1..22: mol_type = other DNA
ctccaattgtcttttcagactc

SEQ ID NO: 32167 - DNA, 22 bp, synthetic construct
  misc_feature 1..22: note = chemically synthesized
  source 1..22: mol_type = other DNA
caattgtcttttcagactcttt

SEQ ID NO: 32168 - DNA, 22 bp, synthetic construct
  misc_feature 1..22: note = chemically synthesized
  source 1..22: mol_type = other DNA
tcttttcagactctttcttttt

SEQ ID NO: 32169 - DNA, 22 bp, synthetic construct
  misc_feature 1..22: note = chemically synthesized
  source 1..22: mol_type = other DNA
ttcagactctttctttttgagg

SEQ ID NO: 32170 - DNA, 22 bp, synthetic construct
  misc_feature 1..22: note = chemically synthesized
  source 1..22: mol_type = other DNA
tcagactctttctttttgaggt

SEQ ID NO: 32171 - DNA, 22 bp, synthetic construct
  misc_feature 1..22: note = chemically synthesized
  source 1..22: mol_type = other DNA
cagactctttctttttgaggta

SEQ ID NO: 32172 - DNA, 22 bp, synthetic construct
  misc_feature 1..22: note = chemically synthesized
  source 1..22: mol_type = other DNA
agactctttctttttgaggtat

SEQ ID NO: 32173 - DNA, 22 bp, synthetic construct
  misc_feature 1..22: note = chemically synthesized
  source 1..22: mol_type = other DNA
tttctttttgaggtatttgacc

SEQ ID NO: 32174 - DNA, 22 bp, synthetic construct
  misc_feature 1..22: note = chemically synthesized
  source 1..22: mol_type = other DNA
tctttttgaggtatttgacctc

SEQ ID NO: 32175 - DNA, 22 bp, synthetic construct
  misc_feature 1..22: note = chemically synthesized
  source 1..22: mol_type = other DNA
ctttttgaggtatttgacctct

SEQ ID NO: 32176 - DNA, 22 bp, synthetic construct
  misc_feature 1..22: note = chemically synthesized
  source 1..22: mol_type = other DNA
tttttgaggtatttgacctctt

SEQ ID NO: 32177 - DNA, 22 bp, synthetic construct
  misc_feature 1..22: note = chemically synthesized
  source 1..22: mol_type = other DNA
tttgaggtatttgacctctttg

SEQ ID NO: 32178 - DNA, 22 bp, synthetic construct
  misc_feature 1..22: note = chemically synthesized
  source 1..22: mol_type = other DNA
ttgaggtatttgacctctttgc

SEQ ID NO: 32179 - DNA, 22 bp, synthetic construct
  misc_feature 1..22: note = chemically synthesized
  source 1..22: mol_type = other DNA
tgaggtatttgacctctttgcg

SEQ ID NO: 32180 - DNA, 22 bp, synthetic construct
  misc_feature 1..22: note = chemically synthesized
  source 1..22: mol_type = other DNA
gaggtatttgacctctttgcgg

SEQ ID NO: 32181 - DNA, 22 bp, synthetic construct
  misc_feature 1..22: note = chemically synthesized
  source 1..22: mol_type = other DNA
aggtatttgacctctttgcggc

SEQ ID NO: 32182 - DNA, 22 bp, synthetic construct
  misc_feature 1..22: note = chemically synthesized
  source 1..22: mol_type = other DNA
gacctctttgcggcatcagcct

SEQ ID NO: 32183 - DNA, 22 bp, synthetic construct
  misc_feature 1..22: note = chemically synthesized
  source 1..22: mol_type = other DNA
acctctttgcggcatcagcctg

SEQ ID NO: 32184 - DNA, 22 bp, synthetic construct
  misc_feature 1..22: note = chemically synthesized
  source 1..22: mol_type = other DNA
tttgcggcatcagcctgctgct

SEQ ID NO: 32185 - DNA, 22 bp, synthetic construct
  misc_feature 1..22: note = chemically synthesized
  source 1..22: mol_type = other DNA
tgcggcatcagcctgctgctat

SEQ ID NO: 32186 - DNA, 22 bp, synthetic construct
  misc_feature 1..22: note = chemically synthesized
  source 1..22: mol_type = other DNA
gcggcatcagcctgctgctatt

SEQ ID NO: 32187 - DNA, 22 bp, synthetic construct
  misc_feature 1..22: note = chemically synthesized
  source 1..22: mol_type = other DNA
cggcatcagcctgctgctattt

SEQ ID NO: 32188 - DNA, 22 bp, synthetic construct
  misc_feature 1..22: note = chemically synthesized
  source 1..22: mol_type = other DNA
ctgctatttcacatgcacctag

SEQ ID NO: 32189 - DNA, 22 bp, synthetic construct
  misc_feature 1..22: note = chemically synthesized
  source 1..22: mol_type = other DNA
ctatttcacatgcacctagaag

SEQ ID NO: 32190 - DNA, 22 bp, synthetic construct
  misc_feature 1..22: note = chemically synthesized
  source 1..22: mol_type = other DNA
tttcacatgcacctagaaggga

SEQ ID NO: 32191 - DNA, 22 bp, synthetic construct
  misc_feature 1..22: note = chemically synthesized
  source 1..22: mol_type = other DNA
cacatgcacctagaagggactt

SEQ ID NO: 32192 - DNA, 22 bp, synthetic construct
  misc_feature 1..22: note = chemically synthesized
  source 1..22: mol_type = other DNA
acatgcacctagaagggacttt

SEQ ID NO: 32193 - DNA, 22 bp, synthetic construct
  misc_feature 1..22: note = chemically synthesized
  source 1..22: mol_type = other DNA
gaagggactttaaaacatgcac

SEQ ID NO: 32194 - DNA, 22 bp, synthetic construct
  misc_feature 1..22: note = chemically synthesized
  source 1..22: mol_type = other DNA
taaaacatgcacagaattgaac

SEQ ID NO: 32195 - DNA, 22 bp, synthetic construct
  misc_feature 1..22: note = chemically synthesized
  source 1..22: mol_type = other DNA
aaaacatgcacagaattgaaca

SEQ ID NO: 32196 - DNA, 22 bp, synthetic construct
  misc_feature 1..22: note = chemically synthesized
  source 1..22: mol_type = other DNA
aaacatgcacagaattgaacaa

SEQ ID NO: 32197 - DNA, 22 bp, synthetic construct
  misc_feature 1..22: note = chemically synthesized
  source 1..22: mol_type = other DNA
aacaaagcagtaaccattcgtt

SEQ ID NO: 32198 - DNA, 22 bp, synthetic construct
  misc_feature 1..22: note = chemically synthesized
  source 1..22: mol_type = other DNA
gttggtgtcccttaacaatatg

SEQ ID NO: 32199 - DNA, 22 bp, synthetic construct
  misc_feature 1..22: note = chemically synthesized
  source 1..22: mol_type = other DNA
gtgtcccttaacaatatgtcaa

SEQ ID NO: 32200 - DNA, 22 bp, synthetic construct
  misc_feature 1..22: note = chemically synthesized
  source 1..22: mol_type = other DNA
aacaatatgtcaaatactatta

SEQ ID NO: 32201 - DNA, 22 bp, synthetic construct
  misc_feature 1..22: note = chemically synthesized
  source 1..22: mol_type = other DNA
acaatatgtcaaatactattat

SEQ ID NO: 32202 - DNA, 22 bp, synthetic construct
  misc_feature 1..22: note = chemically synthesized
  source 1..22: mol_type = other DNA
ttatttttgaaaggtaaataaa

SEQ ID NO: 32203 - DNA, 22 bp, synthetic construct
  misc_feature 1..22: note = chemically synthesized
  source 1..22: mol_type = other DNA
tttttgaaaggtaaataaatcc

SEQ ID NO: 32204 - DNA, 22 bp, synthetic construct
  misc_feature 1..22: note = chemically synthesized
  source 1..22: mol_type = other DNA
ttgaaaggtaaataaatccttg

SEQ ID NO: 32205 - DNA, 22 bp, synthetic construct
  misc_feature 1..22: note = chemically synthesized
  source 1..22: mol_type = other DNA
tgaaaggtaaataaatccttgg

SEQ ID NO: 32206 - DNA, 22 bp, synthetic construct
  misc_feature 1..22: note = chemically synthesized
  source 1..22: mol_type = other DNA
gaaaggtaaataaatccttggg

SEQ ID NO: 32207 - DNA, 22 bp, synthetic construct
  misc_feature 1..22: note = chemically synthesized
  source 1..22: mol_type = other DNA
aaaggtaaataaatccttgggc

SEQ ID NO: 32208 - DNA, 22 bp, synthetic construct
  misc_feature 1..22: note = chemically synthesized
  source 1..22: mol_type = other DNA
gggcttagtggatcctaaatgc

SEQ ID NO: 32209 - DNA, 22 bp, synthetic construct
  misc_feature 1..22: note = chemically synthesized
  source 1..22: mol_type = other DNA
ggcttagtggatcctaaatgct

SEQ ID NO: 32210 - DNA, 22 bp, synthetic construct
  misc_feature 1..22: note = chemically synthesized
  source 1..22: mol_type = other DNA
agtggatcctaaatgctaattt

SEQ ID NO: 32211 - DNA, 22 bp, synthetic construct
  misc_feature 1..22: note = chemically synthesized
  source 1..22: mol_type = other DNA
gtggatcctaaatgctaattta

SEQ ID NO: 32212 - DNA, 22 bp, synthetic construct
  misc_feature 1..22: note = chemically synthesized
  source 1..22: mol_type = other DNA
aatgctaatttaaaaatctgaa

SEQ ID NO: 32213 - DNA, 22 bp, synthetic construct
  misc_feature 1..22: note = chemically synthesized
  source 1..22: mol_type = other DNA
atttaaaaatctgaactcattt

SEQ ID NO: 32214 - DNA, 22 bp, synthetic construct
  misc_feature 1..22: note = chemically synthesized
  source 1..22: mol_type = other DNA
aaaaatctgaactcatttccat

SEQ ID NO: 32215 - DNA, 22 bp, synthetic construct
  misc_feature 1..22: note = chemically synthesized
  source 1..22: mol_type = other DNA
aaaatctgaactcatttccatc

SEQ ID NO: 32216 - DNA, 22 bp, synthetic construct
  misc_feature 1..22: note = chemically synthesized
  source 1..22: mol_type = other DNA
aactcatttccatcccttatta

SEQ ID NO: 32217 - DNA, 22 bp, synthetic construct
  misc_feature 1..22: note = chemically synthesized
  source 1..22: mol_type = other DNA
atttccatcccttattacttta

SEQ ID NO: 32218 - DNA, 22 bp, synthetic construct
  misc_feature 1..22: note = chemically synthesized
  source 1..22: mol_type = other DNA
ccatcccttattactttaaaca

SEQ ID NO: 32219 - DNA, 22 bp, synthetic construct
  misc_feature 1..22: note = chemically synthesized
  source 1..22: mol_type = other DNA
catcccttattactttaaacaa

SEQ ID NO: 32220 - DNA, 22 bp, synthetic construct
  misc_feature 1..22: note = chemically synthesized
  source 1..22: mol_type = other DNA
attactttaaacaaattgctaa

SEQ ID NO: 32221 - DNA, 22 bp, synthetic construct
  misc_feature 1..22: note = chemically synthesized
  source 1..22: mol_type = other DNA
ttactttaaacaaattgctaac

SEQ ID NO: 32222 - DNA, 22 bp, synthetic construct
  misc_feature 1..22: note = chemically synthesized
  source 1..22: mol_type = other DNA
ctttaaacaaattgctaacctg

SEQ ID NO: 32223 - DNA, 22 bp, synthetic construct
  misc_feature 1..22: note = chemically synthesized
  source 1..22: mol_type = other DNA
taaacaaattgctaacctgaat

SEQ ID NO: 32224 - DNA, 22 bp, synthetic construct
  misc_feature 1..22: note = chemically synthesized
  source 1..22: mol_type = other DNA
aaacaaattgctaacctgaatg

SEQ ID NO: 32225 - DNA, 22 bp, synthetic construct
  misc_feature 1..22: note = chemically synthesized
  source 1..22: mol_type = other DNA
aacaaattgctaacctgaatga

SEQ ID NO: 32226 - DNA, 22 bp, synthetic construct
  misc_feature 1..22: note = chemically synthesized
  source 1..22: mol_type = other DNA
ctaacctgaatgataatagaaa

SEQ ID NO: 32227 - DNA, 22 bp, synthetic construct
  misc_feature 1..22: note = chemically synthesized
  source 1..22: mol_type = other DNA
acctgaatgataatagaaactt

SEQ ID NO: 32228 - DNA, 22 bp, synthetic construct
  misc_feature 1..22: note = chemically synthesized
  source 1..22: mol_type = other DNA
aatgataatagaaacttttttc

SEQ ID NO: 32229 - DNA, 22 bp, synthetic construct
  misc_feature 1..22: note = chemically synthesized
  source 1..22: mol_type = other DNA
ttttccttttaacagttggagg

SEQ ID NO: 32230 - DNA, 22 bp, synthetic construct
  misc_feature 1..22: note = chemically synthesized
  source 1..22: mol_type = other DNA
tttccttttaacagttggaggc

SEQ ID NO: 32231 - DNA, 22 bp, synthetic construct
  misc_feature 1..22: note = chemically synthesized
  source 1..22: mol_type = other DNA
ttccttttaacagttggaggca

SEQ ID NO: 32232 - DNA, 22 bp, synthetic construct
  misc_feature 1..22: note = chemically synthesized
  source 1..22: mol_type = other DNA
tccttttaacagttggaggcat

SEQ ID NO: 32233 - DNA, 22 bp, synthetic construct
  misc_feature 1..22: note = chemically synthesized
  source 1..22: mol_type = other DNA
ccttttaacagttggaggcatc

SEQ ID NO: 32234 - DNA, 22 bp, synthetic construct
  misc_feature 1..22: note = chemically synthesized
  source 1..22: mol_type = other DNA
cttttaacagttggaggcatct

SEQ ID NO: 32235 - DNA, 22 bp, synthetic construct
  misc_feature 1..22: note = chemically synthesized
  source 1..22: mol_type = other DNA
ttaacagttggaggcatctata

SEQ ID NO: 32236 - DNA, 22 bp, synthetic construct
  misc_feature 1..22: note = chemically synthesized
  source 1..22: mol_type = other DNA
taacagttggaggcatctatac

SEQ ID NO: 32237 - DNA, 22 bp, synthetic construct
  misc_feature 1..22: note = chemically synthesized
  source 1..22: mol_type = other DNA
aacagttggaggcatctatact

SEQ ID NO: 32238 - DNA, 22 bp, synthetic construct
  misc_feature 1..22: note = chemically synthesized
  source 1..22: mol_type = other DNA
acagttggaggcatctatactg

SEQ ID NO: 32239 - DNA, 22 bp, synthetic construct
  misc_feature 1..22: note = chemically synthesized
  source 1..22: mol_type = other DNA
gaggcatctatactgtgattca

SEQ ID NO: 32240 - DNA, 22 bp, synthetic construct
  misc_feature 1..22: note = chemically synthesized
  source 1..22: mol_type = other DNA
tactgtgattcagacaaaggcc

SEQ ID NO: 32241 - DNA, 22 bp, synthetic construct
  misc_feature 1..22: note = chemically synthesized
  source 1..22: mol_type = other DNA
tgattcagacaaaggccaaaac

SEQ ID NO: 32242 - DNA, 22 bp, synthetic construct
  misc_feature 1..22: note = chemically synthesized
  source 1..22: mol_type = other DNA
agacaaaggccaaaacaacagc

SEQ ID NO: 32243 - DNA, 22 bp, synthetic construct
  misc_feature 1..22: note = chemically synthesized
  source 1..22: mol_type = other DNA
ttttctgataggtccatatttt

SEQ ID NO: 32244 - DNA, 22 bp, synthetic construct
  misc_feature 1..22: note = chemically synthesized
  source 1..22: mol_type = other DNA
tctgataggtccatattttgag

SEQ ID NO: 32245 - DNA, 22 bp, synthetic construct
  misc_feature 1..22: note = chemically synthesized
  source 1..22: mol_type = other DNA
ctgataggtccatattttgagc

SEQ ID NO: 32246 - DNA, 22 bp, synthetic construct
  misc_feature 1..22: note = chemically synthesized
  source 1..22: mol_type = other DNA
tgataggtccatattttgagca

SEQ ID NO: 32247 - DNA, 22 bp, synthetic construct
  misc_feature 1..22: note = chemically synthesized
  source 1..22: mol_type = other DNA
ataggtccatattttgagcata

SEQ ID NO: 32248 - DNA, 22 bp, synthetic construct
  misc_feature 1..22: note = chemically synthesized
  source 1..22: mol_type = other DNA
tgagcataatatgaagactcag

SEQ ID NO: 32249 - DNA, 22 bp, synthetic construct
  misc_feature 1..22: note = chemically synthesized
  source 1..22: mol_type = other DNA
gagcataatatgaagactcagg

SEQ ID NO: 32250 - DNA, 22 bp, synthetic construct
  misc_feature 1..22: note = chemically synthesized
  source 1..22: mol_type = other DNA
agcataatatgaagactcaggt

SEQ ID NO: 32251 - DNA, 22 bp, synthetic construct
  misc_feature 1..22: note = chemically synthesized
  source 1..22: mol_type = other DNA
aggtggaacagtgtgaacctgt

SEQ ID NO: 32252 - DNA, 22 bp, synthetic construct
  misc_feature 1..22: note = chemically synthesized
  source 1..22: mol_type = other DNA
taaatgatgctgtcagaagagc

SEQ ID NO: 32253 - DNA, 22 bp, synthetic construct
  misc_feature 1..22: note = chemically synthesized
  source 1..22: mol_type = other DNA
tcagaagagcagtggacgcaat

SEQ ID NO: 32254 - DNA, 20 bp, synthetic construct
  misc_feature 1..20: note = chemically synthesized
  source 1..20: mol_type = other DNA
tgtccttctggcagggaacc

SEQ ID NO: 32255 - DNA, 20 bp, synthetic construct
  misc_feature 1..20: note = chemically synthesized
  source 1..20: mol_type = other DNA
gtccttctggcagggaacct

SEQ ID NO: 32256 - DNA, 20 bp, synthetic construct
  misc_feature 1..20: note = chemically synthesized
  source 1..20: mol_type = other DNA
cttctggcagggaacctggg

SEQ ID NO: 32257 - DNA, 20 bp, synthetic construct
  misc_feature 1..20: note = chemically synthesized
  source 1..20: mol_type = other DNA
tggcagggaacctgggcagc

SEQ ID NO: 32258 - DNA, 20 bp, synthetic construct
  misc_feature 1..20: note = chemically synthesized
  source 1..20: mol_type = other DNA
ggcagggaacctgggcagcg

SEQ ID NO: 32259 - DNA, 20 bp, synthetic construct
  misc_feature 1..20: note = chemically synthesized
  source 1..20: mol_type = other DNA
tgggcagcgaggatcctctg

SEQ ID NO: 32260 - DNA, 20 bp, synthetic construct
  misc_feature 1..20: note = chemically synthesized
  source 1..20: mol_type = other DNA
agaacactcattcccaaatc

SEQ ID NO: 32261 - DNA, 20 bp, synthetic construct
  misc_feature 1..20: note = chemically synthesized
  source 1..20: mol_type = other DNA
ccaaatccagaaatgtactg

SEQ ID NO: 32262 - DNA, 20 bp, synthetic construct
  misc_feature 1..20: note = chemically synthesized
  source 1..20: mol_type = other DNA
caaatccagaaatgtactgt

SEQ ID NO: 32263 - DNA, 20 bp, synthetic construct
  misc_feature 1..20: note = chemically synthesized
  source 1..20: mol_type = other DNA
gaaatgtactgtaggtgaca

SEQ ID NO: 32264 - DNA, 20 bp, synthetic construct
  misc_feature 1..20: note = chemically synthesized
  source 1..20: mol_type = other DNA
aaagacacaaatgccaccat

SEQ ID NO: 32265 - DNA, 20 bp, synthetic construct
  misc_feature 1..20: note = chemically synthesized
  source 1..20: mol_type = other DNA
gacacaaatgccaccattag

SEQ ID NO: 32266 - DNA, 20 bp, synthetic construct
  misc_feature 1..20: note = chemically synthesized
  source 1..20: mol_type = other DNA
acacaaatgccaccattagc

SEQ ID NO: 32267 - DNA, 20 bp, synthetic construct
  misc_feature 1..20: note = chemically synthesized
  source 1..20: mol_type = other DNA
gccaccattagcaggattta

SEQ ID NO: 32268 - DNA, 20 bp, synthetic construct
  misc_feature 1..20: note = chemically synthesized
  source 1..20: mol_type = other DNA
caccattagcaggatttaaa

SEQ ID NO: 32269 - DNA, 20 bp, synthetic construct
  misc_feature 1..20: note = chemically synthesized
  source 1..20: mol_type = other DNA
gcaggatttaaagagcattt

SEQ ID NO: 32270 - DNA, 20 bp, synthetic construct
  misc_feature 1..20: note = chemically synthesized
  source 1..20: mol_type = other DNA
taaagagcatttcagaaaat

SEQ ID NO: 32271 - DNA, 20 bp, synthetic construct
  misc_feature 1..20: note = chemically synthesized
  source 1..20: mol_type = other DNA
agagcatttcagaaaattgg

SEQ ID NO: 32272 - DNA, 20 bp, synthetic construct
  misc_feature 1..20: note = chemically synthesized
  source 1..20: mol_type = other DNA
cagaaaattggcagtttact

SEQ ID NO: 32273 - DNA, 20 bp, synthetic construct
  misc_feature 1..20: note = chemically synthesized
  source 1..20: mol_type = other DNA
agaaaattggcagtttacta

SEQ ID NO: 32274 - DNA, 20 bp, synthetic construct
  misc_feature 1..20: note = chemically synthesized
  source 1..20: mol_type = other DNA
aattggcagtttactaaggt

SEQ ID NO: 32275 - DNA, 20 bp, synthetic construct
  misc_feature 1..20: note = chemically synthesized
  source 1..20: mol_type = other DNA
ctaaggtaagaatttctata

SEQ ID NO: 32276 - DNA, 20 bp, synthetic construct
  misc_feature 1..20: note = chemically synthesized
  source 1..20: mol_type = other DNA
gtcttgacatatgaatcatt

SEQ ID NO: 32277 - DNA, 20 bp, synthetic construct
  misc_feature 1..20: note = chemically synthesized
  source 1..20: mol_type = other DNA
tcttgacatatgaatcattt

SEQ ID NO: 32278 - DNA, 20 bp, synthetic construct
  misc_feature 1..20: note = chemically synthesized
  source 1..20: mol_type = other DNA
cttgacatatgaatcattta

SEQ ID NO: 32279 - DNA, 20 bp, synthetic construct
  misc_feature 1..20: note = chemically synthesized
  source 1..20: mol_type = other DNA
gacatatgaatcatttaggg

SEQ ID NO: 32280 - DNA, 20 bp, synthetic construct
  misc_feature 1..20: note = chemically synthesized
  source 1..20: mol_type = other DNA
atcatttagggaagacaata

SEQ ID NO: 32281 - DNA, 20 bp, synthetic construct
  misc_feature 1..20: note = chemically synthesized
  source 1..20: mol_type = other DNA
tatggtttctgtgaatttta

SEQ ID NO: 32282 - DNA, 20 bp, synthetic construct
  misc_feature 1..20: note = chemically synthesized
  source 1..20: mol_type = other DNA
tttaaagacttctaattaat

SEQ ID NO: 32283 - DNA, 20 bp, synthetic construct
  misc_feature 1..20: note = chemically synthesized
  source 1..20: mol_type = other DNA
aaagacttctaattaatcag

SEQ ID NO: 32284 - DNA, 20 bp, synthetic construct
  misc_feature 1..20: note = chemically synthesized
  source 1..20: mol_type = other DNA
agacttctaattaatcagaa

SEQ ID NO: 32285 - DNA, 20 bp, synthetic construct
  misc_feature 1..20: note = chemically synthesized
  source 1..20: mol_type = other DNA
ctaattaatcagaagagtgc

SEQ ID NO: 32286 - DNA, 20 bp, synthetic construct
  misc_feature 1..20: note = chemically synthesized
  source 1..20: mol_type = other DNA
gaagagtgctggatattgca

SEQ ID NO: 32287 - DNA, 20 bp, synthetic construct
  misc_feature 1..20: note = chemically synthesized
  source 1..20: mol_type = other DNA
tgcatagacttctccaccct

SEQ ID NO: 32288 - DNA, 20 bp, synthetic construct
  misc_feature 1..20: note = chemically synthesized
  source 1..20: mol_type = other DNA
tctccacccttagctgtact

SEQ ID NO: 32289 - DNA, 20 bp, synthetic construct
  misc_feature 1..20: note = chemically synthesized
  source 1..20: mol_type = other DNA
agctgtacttagctgatttg

SEQ ID NO: 32290 - DNA, 20 bp, synthetic construct
  misc_feature 1..20: note = chemically synthesized
  source 1..20: mol_type = other DNA
gctgtacttagctgatttgt

SEQ ID NO: 32291 - DNA, 20 bp, synthetic construct
  misc_feature 1..20: note = chemically synthesized
  source 1..20: mol_type = other DNA
actgtaacctccctgaactt

SEQ ID NO: 32292 - DNA, 20 bp, synthetic construct
  misc_feature 1..20: note = chemically synthesized
  source 1..20: mol_type = other DNA
tccatttccctttcaaactc

SEQ ID NO: 32293 - DNA, 20 bp, synthetic construct
  misc_feature 1..20: note = chemically synthesized
  source 1..20: mol_type = other DNA
ccatttccctttcaaactct

SEQ ID NO: 32294 - DNA, 20 bp, synthetic construct
  misc_feature 1..20: note = chemically synthesized
  source 1..20: mol_type = other DNA
tttcaaactctgggaaaaaa

SEQ ID NO: 32295 - DNA, 20 bp, synthetic construct
  misc_feature 1..20: note = chemically synthesized
  source 1..20: mol_type = other DNA
actctgggaaaaaaaagaaa

SEQ ID NO: 32296 - DNA, 20 bp, synthetic construct
  misc_feature 1..20: note = chemically synthesized
  source 1..20: mol_type = other DNA
aaaaagaaaaagcatctatg

SEQ ID NO: 32297 - DNA, 20 bp, synthetic construct
  misc_feature 1..20: note = chemically synthesized
  source 1..20: mol_type = other DNA
aaagaaaaagcatctatgaa

SEQ ID NO: 32298 - DNA, 20 bp, synthetic construct
  misc_feature 1..20: note = chemically synthesized
  source 1..20: mol_type = other DNA
aagaaaaagcatctatgaag

SEQ ID NO: 32299 - DNA, 20 bp, synthetic construct
  misc_feature 1..20: note = chemically synthesized
  source 1..20: mol_type = other DNA
agcatctatgaagaggtgtg

SEQ ID NO: 32300 - DNA, 20 bp, synthetic construct
  misc_feature 1..20: note = chemically synthesized
  source 1..20: mol_type = other DNA
gcatctatgaagaggtgtgt

SEQ ID NO: 32301 - DNA, 20 bp, synthetic construct
  misc_feature 1..20: note = chemically synthesized
  source 1..20: mol_type = other DNA
gtgtgtgggtccaaccctga

SEQ ID NO: 32302 - DNA, 20 bp, synthetic construct
  misc_feature 1..20: note = chemically synthesized
  source 1..20: mol_type = other DNA
cagcaaaaccctctccaaac

SEQ ID NO: 32303 - DNA, 20 bp, synthetic construct
  misc_feature 1..20: note = chemically synthesized
  source 1..20: mol_type = other DNA
tctccaaactagccttgctg

SEQ ID NO: 32304 - DNA, 20 bp, synthetic construct
  misc_feature 1..20: note = chemically synthesized
  source 1..20: mol_type = other DNA
ctccaaactagccttgctgt

SEQ ID NO: 32305 - DNA, 20 bp, synthetic construct
  misc_feature 1..20: note = chemically synthesized
  source 1..20: mol_type = other DNA
caaactagccttgctgtagg

SEQ ID NO: 32306 - DNA, 20 bp, synthetic construct
  misc_feature 1..20: note = chemically synthesized
  source 1..20: mol_type = other DNA
actagccttgctgtaggcag

SEQ ID NO: 32307 - DNA, 20 bp, synthetic construct
  misc_feature 1..20: note = chemically synthesized
  source 1..20: mol_type = other DNA
tctgctatctgcctcatcta

SEQ ID NO: 32308 - DNA, 20 bp, synthetic construct
  misc_feature 1..20: note = chemically synthesized
  source 1..20: mol_type = other DNA
tgtgcgaatgcatgaaaata

SEQ ID NO: 32309 - DNA, 20 bp, synthetic construct
  misc_feature 1..20: note = chemically synthesized
  source 1..20: mol_type = other DNA
atgcatgaaaataaagttta

SEQ ID NO: 32310 - DNA, 20 bp, synthetic construct
  misc_feature 1..20: note = chemically synthesized
  source 1..20: mol_type = other DNA
gaaaataaagtttaaagata

SEQ ID NO: 32311 - DNA, 20 bp, synthetic construct
  misc_feature 1..20: note = chemically synthesized
  source 1..20: mol_type = other DNA
aaaataaagtttaaagatat

SEQ ID NO: 32312 - DNA, 20 bp, synthetic construct
  misc_feature 1..20: note = chemically synthesized
  source 1..20: mol_type = other DNA
ataaagtttaaagatatggg

SEQ ID NO: 32313 - DNA, 20 bp, synthetic construct
  misc_feature 1..20: note = chemically synthesized
  source 1..20: mol_type = other DNA
ttaaagatatgggtggcctt

SEQ ID NO: 32314 - DNA, 20 bp, synthetic construct
  misc_feature 1..20: note = chemically synthesized
  source 1..20: mol_type = other DNA
taaagatatgggtggccttc

SEQ ID NO: 32315 - DNA, 20 bp, synthetic construct
  misc_feature 1..20: note = chemically synthesized
  source 1..20: mol_type = other DNA
aagatatgggtggccttcag

SEQ ID NO: 32316 - DNA, 20 bp, synthetic construct
  misc_feature 1..20: note = chemically synthesized
  source 1..20: mol_type = other DNA
gtggccttcaggagacacgc

SEQ ID NO: 32317 - DNA, 20 bp, synthetic construct
  misc_feature 1..20: note = chemically synthesized
  source 1..20: mol_type = other DNA
cttcaggagacacgccagcc

SEQ ID NO: 32318 - DNA, 20 bp, synthetic construct
  misc_feature 1..20: note = chemically synthesized
  source 1..20: mol_type = other DNA
atcttttcacaatgacacaa

SEQ ID NO: 32319 - DNA, 20 bp, synthetic construct
  misc_feature 1..20: note = chemically synthesized
  source 1..20: mol_type = other DNA
ccatctcttcactttacacc

SEQ ID NO: 32320 - DNA, 20 bp, synthetic construct
  misc_feature 1..20: note = chemically synthesized
  source 1..20: mol_type = other DNA
atctcttcactttacaccca

SEQ ID NO: 32321 - DNA, 20 bp, synthetic construct
  misc_feature 1..20: note = chemically synthesized
  source 1..20: mol_type = other DNA
tctcttcactttacacccag

SEQ ID NO: 32322 - DNA, 20 bp, synthetic construct
  misc_feature 1..20: note = chemically synthesized
  source 1..20: mol_type = other DNA
ttacacccagaggaaaaaaa

SEQ ID NO: 32323 - DNA, 20 bp, synthetic construct
  misc_feature 1..20: note = chemically synthesized
  source 1..20: mol_type = other DNA
ccagaggaaaaaaaaagtta

SEQ ID NO: 32324 - DNA, 20 bp, synthetic construct
  misc_feature 1..20: note = chemically synthesized
  source 1..20: mol_type = other DNA
cagaggaaaaaaaaagttaa

SEQ ID NO: 32325 - DNA, 20 bp, synthetic construct
  misc_feature 1..20: note = chemically synthesized
  source 1..20: mol_type = other DNA
agaggaaaaaaaaagttaaa

SEQ ID NO: 32326 - DNA, 20 bp, synthetic construct
  misc_feature 1..20: note = chemically synthesized
  source 1..20: mol_type = other DNA
aagttaaagggtttctcaac

SEQ ID NO: 32327 - DNA, 20 bp, synthetic construct
  misc_feature 1..20: note = chemically synthesized
  source 1..20: mol_type = other DNA
agttaaagggtttctcaacc

SEQ ID NO: 32328 - DNA, 20 bp, synthetic construct
  misc_feature 1..20: note = chemically synthesized
  source 1..20: mol_type = other DNA
aaagggtttctcaaccaggt

SEQ ID NO: 32329 - DNA, 20 bp, synthetic construct
  misc_feature 1..20: note = chemically synthesized
  source 1..20: mol_type = other DNA
tttctcaaccaggtaagtca

SEQ ID NO: 32330 - DNA, 20 bp, synthetic construct
  misc_feature 1..20: note = chemically synthesized
  source 1..20: mol_type = other DNA
tctcaaccaggtaagtcatg

SEQ ID NO: 32331 - DNA, 20 bp, synthetic construct
  misc_feature 1..20: note = chemically synthesized
  source 1..20: mol_type = other DNA
tcaaccaggtaagtcatgga

SEQ ID NO: 32332 - DNA, 20 bp, synthetic construct
  misc_feature 1..20: note = chemically synthesized
  source 1..20: mol_type = other DNA
gcaacactcaacacacttgt

SEQ ID NO: 32333 - DNA, 20 bp, synthetic construct
  misc_feature 1..20: note = chemically synthesized
  source 1..20: mol_type = other DNA
gtgagttcttgtgcactgtc

SEQ ID NO: 32334 - DNA, 20 bp, synthetic construct
  misc_feature 1..20: note = chemically synthesized
  source 1..20: mol_type = other DNA
gcactgtctggcttttttgc

SEQ ID NO: 32335 - DNA, 20 bp, synthetic construct
  misc_feature 1..20: note = chemically synthesized
  source 1..20: mol_type = other DNA
tggcttttttgctagcctat

SEQ ID NO: 32336 - DNA, 20 bp, synthetic construct
  misc_feature 1..20: note = chemically synthesized
  source 1..20: mol_type = other DNA
gctagcctataagctgcatg

SEQ ID NO: 32337 - DNA, 20 bp, synthetic construct
  misc_feature 1..20: note = chemically synthesized
  source 1..20: mol_type = other DNA
ctagcctataagctgcatga

SEQ ID NO: 32338 - DNA, 20 bp, synthetic construct
  misc_feature 1..20: note = chemically synthesized
  source 1..20: mol_type = other DNA
ctataagctgcatgaaggct

SEQ ID NO: 32339 - DNA, 20 bp, synthetic construct
  misc_feature 1..20: note = chemically synthesized
  source 1..20: mol_type = other DNA
ctgcatgaaggctgagacta

SEQ ID NO: 32340 - DNA, 20 bp, synthetic construct
  misc_feature 1..20: note = chemically synthesized
  source 1..20: mol_type = other DNA
catgaaggctgagactatgg

SEQ ID NO: 32341 - DNA, 20 bp, synthetic construct
  misc_feature 1..20: note = chemically synthesized
  source 1..20: mol_type = other DNA
ggctgagactatggcagtct

SEQ ID NO: 32342 - DNA, 20 bp, synthetic construct
  misc_feature 1..20: note = chemically synthesized
  source 1..20: mol_type = other DNA
actatggcagtcttggctca

SEQ ID NO: 32343 - DNA, 20 bp, synthetic construct
  misc_feature 1..20: note = chemically synthesized
  source 1..20: mol_type = other DNA
atggcagtcttggctcatag

SEQ ID NO: 32344 - DNA, 20 bp, synthetic construct
  misc_feature 1..20: note = chemically synthesized
  source 1..20: mol_type = other DNA
tggcagtcttggctcataga

SEQ ID NO: 32345 - DNA, 20 bp, synthetic construct
  misc_feature 1..20: note = chemically synthesized
  source 1..20: mol_type = other DNA
cttggctcatagaaggtaat

SEQ ID NO: 32346 - DNA, 20 bp, synthetic construct
  misc_feature 1..20: note = chemically synthesized
  source 1..20: mol_type = other DNA
ggctcatagaaggtaatcag

SEQ ID NO: 32347 - DNA, 20 bp, synthetic construct
  misc_feature 1..20: note = chemically synthesized
  source 1..20: mol_type = other DNA
ttgattgaatttttccctta

SEQ ID NO: 32348 - DNA, 20 bp, synthetic construct
  misc_feature 1..20: note = chemically synthesized
  source 1..20: mol_type = other DNA
cttaaagccaattctaatgt

SEQ ID NO: 32349 - DNA, 20 bp, synthetic construct
  misc_feature 1..20: note = chemically synthesized
  source 1..20: mol_type = other DNA
tgtatgtgtgctgctgtaaa

SEQ ID NO: 32350 - DNA, 20 bp, synthetic construct
  misc_feature 1..20: note = chemically synthesized
  source 1..20: mol_type = other DNA
gtatgtgtgctgctgtaaat

SEQ ID NO: 32351 - DNA, 20 bp, synthetic construct
  misc_feature 1..20: note = chemically synthesized
  source 1..20: mol_type = other DNA
tatgtgtgctgctgtaaata

SEQ ID NO: 32352 - DNA, 20 bp, synthetic construct
  misc_feature 1..20: note = chemically synthesized
  source 1..20: mol_type = other DNA
tgtgctgctgtaaatagggt

SEQ ID NO: 32353 - DNA, 20 bp, synthetic construct
  misc_feature 1..20: note = chemically synthesized
  source 1..20: mol_type = other DNA
acttaaataccaattgattt

SEQ ID NO: 32354 - DNA, 20 bp, synthetic construct
  misc_feature 1..20: note = chemically synthesized
  source 1..20: mol_type = other DNA
aataccaattgattttagcc

SEQ ID NO: 32355 - DNA, 20 bp, synthetic construct
  misc_feature 1..20: note = chemically synthesized
  source 1..20: mol_type = other DNA
ataccaattgattttagccc

SEQ ID NO: 32356 - DNA, 20 bp, synthetic construct
  misc_feature 1..20: note = chemically synthesized
  source 1..20: mol_type = other DNA
agcccaggataatgaaaatg

SEQ ID NO: 32357 - DNA, 20 bp, synthetic construct
  misc_feature 1..20: note = chemically synthesized
  source 1..20: mol_type = other DNA
aatgaaaatgcagtcttgct

SEQ ID NO: 32358 - DNA, 20 bp, synthetic construct
  misc_feature 1..20: note = chemically synthesized
  source 1..20: mol_type = other DNA
aaaatgcagtcttgctcagc

SEQ ID NO: 32359 - DNA, 20 bp, synthetic construct
  misc_feature 1..20: note = chemically synthesized
  source 1..20: mol_type = other DNA
gaaatgtaaccatctgaaca

SEQ ID NO: 32360 - DNA, 20 bp, synthetic construct
  misc_feature 1..20: note = chemically synthesized
  source 1..20: mol_type = other DNA
ccatctgaacacagctcctt

SEQ ID NO: 32361 - DNA, 20 bp, synthetic construct
  misc_feature 1..20: note = chemically synthesized
  source 1..20: mol_type = other DNA
atctgaacacagctccttaa

SEQ ID NO: 32362 - DNA, 20 bp, synthetic construct
  misc_feature 1..20: note = chemically synthesized
  source 1..20: mol_type = other DNA
cacagctccttaagagatat

SEQ ID NO: 32363 - DNA, 20 bp, synthetic construct
  misc_feature 1..20: note = chemically synthesized
  source 1..20: mol_type = other DNA
agctccttaagagatataag

SEQ ID NO: 32364 - DNA, 20 bp, synthetic construct
  misc_feature 1..20: note = chemically synthesized
  source 1..20: mol_type = other DNA
gctccttaagagatataaga

SEQ ID NO: 32365 - DNA, 20 bp, synthetic construct
  misc_feature 1..20: note = chemically synthesized
  source 1..20: mol_type = other DNA
ctccttaagagatataagaa

SEQ ID NO: 32366 - DNA, 20 bp, synthetic construct
  misc_feature 1..20: note = chemically synthesized
  source 1..20: mol_type = other DNA
cttaagagatataagaaggg

SEQ ID NO: 32367 - DNA, 20 bp, synthetic construct
  misc_feature 1..20: note = chemically synthesized
  source 1..20: mol_type = other DNA
aagagatataagaagggtgg

SEQ ID NO: 32368 - DNA, 20 bp, synthetic construct
  misc_feature 1..20: note = chemically synthesized
  source 1..20: mol_type = other DNA
agatataagaagggtggaag

SEQ ID NO: 32369 - DNA, 20 bp, synthetic construct
  misc_feature 1..20: note = chemically synthesized
  source 1..20: mol_type = other DNA
gatataagaagggtggaagt

SEQ ID NO: 32370 - DNA, 20 bp, synthetic construct
  misc_feature 1..20: note = chemically synthesized
  source 1..20: mol_type = other DNA
aagaagggtggaagtgggtg

SEQ ID NO: 32371 - DNA, 20 bp, synthetic construct
  misc_feature 1..20: note = chemically synthesized
  source 1..20: mol_type = other DNA
agaagggtggaagtgggtga

SEQ ID NO: 32372 - DNA, 20 bp, synthetic construct
  misc_feature 1..20: note = chemically synthesized
  source 1..20: mol_type = other DNA
gaagggtggaagtgggtgaa

SEQ ID NO: 32373 - DNA, 20 bp, synthetic construct
  misc_feature 1..20: note = chemically synthesized
  source 1..20: mol_type = other DNA
gggtggaagtgggtgaaggg

SEQ ID NO: 32374 - DNA, 20 bp, synthetic construct
  misc_feature 1..20: note = chemically synthesized
  source 1..20: mol_type = other DNA
ggtggaagtgggtgaagggt

SEQ ID NO: 32375 - DNA, 20 bp, synthetic construct
  misc_feature 1..20: note = chemically synthesized
  source 1..20: mol_type = other DNA
tgggtgaagggtaggccctc

SEQ ID NO: 32376 - DNA, 20 bp, synthetic construct
  misc_feature 1..20: note = chemically synthesized
  source 1..20: mol_type = other DNA
ggtgaagggtaggccctcca

SEQ ID NO: 32377 - DNA, 20 bp, synthetic construct
  misc_feature 1..20: note = chemically synthesized
  source 1..20: mol_type = other DNA
ggtaggccctccagagttct

SEQ ID NO: 32378 - DNA, 20 bp, synthetic construct
  misc_feature 1..20: note = chemically synthesized
  source 1..20: mol_type = other DNA
tccagagttctcagttgttg

SEQ ID NO: 32379 - DNA, 20 bp, synthetic construct
  misc_feature 1..20: note = chemically synthesized
  source 1..20: mol_type = other DNA
ccagagttctcagttgttgc

SEQ ID NO: 32380 - DNA, 20 bp, synthetic construct
  misc_feature 1..20: note = chemically synthesized
  source 1..20: mol_type = other DNA
gagttctcagttgttgcggg

SEQ ID NO: 32381 - DNA, 20 bp, synthetic construct
  misc_feature 1..20: note = chemically synthesized
  source 1..20: mol_type = other DNA
ctcagttgttgcgggaagtc

SEQ ID NO: 32382 - DNA, 20 bp, synthetic construct
  misc_feature 1..20: note = chemically synthesized
  source 1..20: mol_type = other DNA
tcagttgttgcgggaagtct

SEQ ID NO: 32383 - DNA, 20 bp, synthetic construct
  misc_feature 1..20: note = chemically synthesized
  source 1..20: mol_type = other DNA
gggaagtctgggactccaaa

SEQ ID NO: 32384 - DNA, 20 bp, synthetic construct
  misc_feature 1..20: note = chemically synthesized
  source 1..20: mol_type = other DNA
gaagtctgggactccaaacg

SEQ ID NO: 32385 - DNA, 20 bp, synthetic construct
  misc_feature 1..20: note = chemically synthesized
  source 1..20: mol_type = other DNA
aagtctgggactccaaacgg

SEQ ID NO: 32386 - DNA, 20 bp, synthetic construct
  misc_feature 1..20: note = chemically synthesized
  source 1..20: mol_type = other DNA
agtctgggactccaaacgga

SEQ ID NO: 32387 - DNA, 20 bp, synthetic construct
  misc_feature 1..20: note = chemically synthesized
  source 1..20: mol_type = other DNA
gggactccaaacggagggat

SEQ ID NO: 32388 - DNA, 20 bp, synthetic construct
  misc_feature 1..20: note = chemically synthesized
  source 1..20: mol_type = other DNA
ccaaacggagggatcagctg

SEQ ID NO: 32389 - DNA, 20 bp, synthetic construct
  misc_feature 1..20: note = chemically synthesized
  source 1..20: mol_type = other DNA
ggagggatcagctgaagcca

SEQ ID NO: 32390 - DNA, 20 bp, synthetic construct
  misc_feature 1..20: note = chemically synthesized
  source 1..20: mol_type = other DNA
gggatcagctgaagccatgg

SEQ ID NO: 32391 - DNA, 20 bp, synthetic construct
  misc_feature 1..20: note = chemically synthesized
  source 1..20: mol_type = other DNA
atcagctgaagccatggcag

SEQ ID NO: 32392 - DNA, 20 bp, synthetic construct
  misc_feature 1..20: note = chemically synthesized
  source 1..20: mol_type = other DNA
gaagccatggcagaagttcg

SEQ ID NO: 32393 - DNA, 20 bp, synthetic construct
  misc_feature 1..20: note = chemically synthesized
  source 1..20: mol_type = other DNA
gcagaagttcgtggattgtg

SEQ ID NO: 32394 - DNA, 20 bp, synthetic construct
  misc_feature 1..20: note = chemically synthesized
  source 1..20: mol_type = other DNA
cgtggattgtgaagatttca

SEQ ID NO: 32395 - DNA, 20 bp, synthetic construct
  misc_feature 1..20: note = chemically synthesized
  source 1..20: mol_type = other DNA
aagatttcatggacatttat

SEQ ID NO: 32396 - DNA, 20 bp, synthetic construct
  misc_feature 1..20: note = chemically synthesized
  source 1..20: mol_type = other DNA
atctctaaacataaattgta

SEQ ID NO: 32397 - DNA, 20 bp, synthetic construct
  misc_feature 1..20: note = chemically synthesized
  source 1..20: mol_type = other DNA
cataaattgtaaagatttca

SEQ ID NO: 32398 - DNA, 20 bp, synthetic construct
  misc_feature 1..20: note = chemically synthesized
  source 1..20: mol_type = other DNA
atggacacttatcacttccc

SEQ ID NO: 32399 - DNA, 20 bp, synthetic construct
  misc_feature 1..20: note = chemically synthesized
  source 1..20: mol_type = other DNA
ctttaatctcttaatcctgt

SEQ ID NO: 32400 - DNA, 20 bp, synthetic construct
  misc_feature 1..20: note = chemically synthesized
  source 1..20: mol_type = other DNA
atctcttaatcctgtcagct

SEQ ID NO: 32401 - DNA, 20 bp, synthetic construct
  misc_feature 1..20: note = chemically synthesized
  source 1..20: mol_type = other DNA
tctcttaatcctgtcagctg

SEQ ID NO: 32402 - DNA, 20 bp, synthetic construct
  misc_feature 1..20: note = chemically synthesized
  source 1..20: mol_type = other DNA
tcttaatcctgtcagctgag

SEQ ID NO: 32403 - DNA, 20 bp, synthetic construct
  misc_feature 1..20: note = chemically synthesized
  source 1..20: mol_type = other DNA
cttaatcctgtcagctgagg

SEQ ID NO: 32404 - DNA, 20 bp, synthetic construct
  misc_feature 1..20: note = chemically synthesized
  source 1..20: mol_type = other DNA
gaggaggatgtatattgcct

SEQ ID NO: 32405 - DNA, 20 bp, synthetic construct
  misc_feature 1..20: note = chemically synthesized
  source 1..20: mol_type = other DNA
aggaggatgtatattgcctc

SEQ ID NO: 32406 - DNA, 20 bp, synthetic construct
  misc_feature 1..20: note = chemically synthesized
  source 1..20: mol_type = other DNA
cattaactgcacaaattgta

SEQ ID NO: 32407 - DNA, 20 bp, synthetic construct
  misc_feature 1..20: note = chemically synthesized
  source 1..20: mol_type = other DNA
attgtacagcatgtgtgttt

SEQ ID NO: 32408 - DNA, 20 bp, synthetic construct
  misc_feature 1..20: note = chemically synthesized
  source 1..20: mol_type = other DNA
tgtttgagcaacatgaaatg

SEQ ID NO: 32409 - DNA, 20 bp, synthetic construct
  misc_feature 1..20: note = chemically synthesized
  source 1..20: mol_type = other DNA
aaatgtggacaccttgaaaa

SEQ ID NO: 32410 - DNA, 20 bp, synthetic construct
  misc_feature 1..20: note = chemically synthesized
  source 1..20: mol_type = other DNA
tggacaccttgaaaaaagaa

SEQ ID NO: 32411 - DNA, 20 bp, synthetic construct
  misc_feature 1..20: note = chemically synthesized
  source 1..20: mol_type = other DNA
ggacaccttgaaaaaagaac

SEQ ID NO: 32412 - DNA, 20 bp, synthetic construct
  misc_feature 1..20: note = chemically synthesized
  source 1..20: mol_type = other DNA
ttgaaaaaagaacaggataa

SEQ ID NO: 32413 - DNA, 20 bp, synthetic construct
  misc_feature 1..20: note = chemically synthesized
  source 1..20: mol_type = other DNA
acaggataacagcaattgtt

SEQ ID NO: 32414 - DNA, 20 bp, synthetic construct
  misc_feature 1..20: note = chemically synthesized
  source 1..20: mol_type = other DNA
caggataacagcaattgttc

SEQ ID NO: 32415 - DNA, 20 bp, synthetic construct
  misc_feature 1..20: note = chemically synthesized
  source 1..20: mol_type = other DNA
aggataacagcaattgttca

SEQ ID NO: 32416 - DNA, 20 bp, synthetic construct
  misc_feature 1..20: note = chemically synthesized
  source 1..20: mol_type = other DNA
acagcaattgttcagggaat

SEQ ID NO: 32417 - DNA, 20 bp, synthetic construct
  misc_feature 1..20: note = chemically synthesized
  source 1..20: mol_type = other DNA
agcaattgttcagggaataa

SEQ ID NO: 32418 - DNA, 20 bp, synthetic construct
  misc_feature 1..20: note = chemically synthesized
  source 1..20: mol_type = other DNA
caattgttcagggaataaga

SEQ ID NO: 32419 - DNA, 20 bp, synthetic construct
  misc_feature 1..20: note = chemically synthesized
  source 1..20: mol_type = other DNA
taaccttaaactctgactgc

SEQ ID NO: 32420 - DNA, 20 bp, synthetic construct
  misc_feature 1..20: note = chemically synthesized
  source 1..20: mol_type = other DNA
cttaaactctgactgctggt

SEQ ID NO: 32421 - DNA, 20 bp, synthetic construct
  misc_feature 1..20: note = chemically synthesized
  source 1..20: mol_type = other DNA
aactctgactgctggtgagc

SEQ ID NO: 32422 - DNA, 20 bp, synthetic construct
  misc_feature 1..20: note = chemically synthesized
  source 1..20: mol_type = other DNA
actctgactgctggtgagcc

SEQ ID NO: 32423 - DNA, 20 bp, synthetic construct
  misc_feature 1..20: note = chemically synthesized
  source 1..20: mol_type = other DNA
ctgactgctggtgagccagg

SEQ ID NO: 32424 - DNA, 20 bp, synthetic construct
  misc_feature 1..20: note = chemically synthesized
  source 1..20: mol_type = other DNA
tgctggtgagccaggcagaa

SEQ ID NO: 32425 - DNA, 20 bp, synthetic construct
  misc_feature 1..20: note = chemically synthesized
  source 1..20: mol_type = other DNA
ctggtgagccaggcagaaca

SEQ ID NO: 32426 - DNA, 20 bp, synthetic construct
  misc_feature 1..20: note = chemically synthesized
  source 1..20: mol_type = other DNA
ccatatttctcttctttcaa

SEQ ID NO: 32427 - DNA, 20 bp, synthetic construct
  misc_feature 1..20: note = chemically synthesized
  source 1..20: mol_type = other DNA
tctcttctttcaaaagcaaa

SEQ ID NO: 32428 - DNA, 20 bp, synthetic construct
  misc_feature 1..20: note = chemically synthesized
  source 1..20: mol_type = other DNA
ctcttctttcaaaagcaaat

SEQ ID NO: 32429 - DNA, 20 bp, synthetic construct
  misc_feature 1..20: note = chemically synthesized
  source 1..20: mol_type = other DNA
cttctttcaaaagcaaatgg

SEQ ID NO: 32430 - DNA, 20 bp, synthetic construct
  misc_feature 1..20: note = chemically synthesized
  source 1..20: mol_type = other DNA
tatcgctgaattctttttct

SEQ ID NO: 32431 - DNA, 20 bp, synthetic construct
  misc_feature 1..20: note = chemically synthesized
  source 1..20: mol_type = other DNA
ctgaattctttttctcagca

SEQ ID NO: 32432 - DNA, 20 bp, synthetic construct
  misc_feature 1..20: note = chemically synthesized
  source 1..20: mol_type = other DNA
tctcagcatggaacatccct

SEQ ID NO: 32433 - DNA, 20 bp, synthetic construct
  misc_feature 1..20: note = chemically synthesized
  source 1..20: mol_type = other DNA
agcatggaacatccctgaga

SEQ ID NO: 32434 - DNA, 20 bp, synthetic construct
  misc_feature 1..20: note = chemically synthesized
  source 1..20: mol_type = other DNA
catggaacatccctgagaaa

SEQ ID NO: 32435 - DNA, 20 bp, synthetic construct
  misc_feature 1..20: note = chemically synthesized
  source 1..20: mol_type = other DNA
atccctgagaaagagaatac

SEQ ID NO: 32436 - DNA, 20 bp, synthetic construct
  misc_feature 1..20: note = chemically synthesized
  source 1..20: mol_type = other DNA
ctgagaaagagaatacgagc

SEQ ID NO: 32437 - DNA, 20 bp, synthetic construct
  misc_feature 1..20: note = chemically synthesized
  source 1..20: mol_type = other DNA
tgagaaagagaatacgagcc

SEQ ID NO: 32438 - DNA, 20 bp, synthetic construct
  misc_feature 1..20: note = chemically synthesized
  source 1..20: mol_type = other DNA
agaaagagaatacgagccag

SEQ ID NO: 32439 - DNA, 20 bp, synthetic construct
  misc_feature 1..20: note = chemically synthesized
  source 1..20: mol_type = other DNA
gaaagagaatacgagccagg

SEQ ID NO: 32440 - DNA, 20 bp, synthetic construct
  misc_feature 1..20: note = chemically synthesized
  source 1..20: mol_type = other DNA
agaatacgagccaggaggta

SEQ ID NO: 32441 - DNA, 20 bp, synthetic construct
  misc_feature 1..20: note = chemically synthesized
  source 1..20: mol_type = other DNA
gaatacgagccaggaggtat

SEQ ID NO: 32442 - DNA, 20 bp, synthetic construct
  misc_feature 1..20: note = chemically synthesized
  source 1..20: mol_type = other DNA
aggaggtataggcttataaa

SEQ ID NO: 32443 - DNA, 20 bp, synthetic construct
  misc_feature 1..20: note = chemically synthesized
  source 1..20: mol_type = other DNA
gcttataaacagcccccctc

SEQ ID NO: 32444 - DNA, 20 bp, synthetic construct
  misc_feature 1..20: note = chemically synthesized
  source 1..20: mol_type = other DNA
cttataaacagcccccctcc

SEQ ID NO: 32445 - DNA, 20 bp, synthetic construct
  misc_feature 1..20: note = chemically synthesized
  source 1..20: mol_type = other DNA
ccaggtgcgcctgtctctta

SEQ ID NO: 32446 - DNA, 20 bp, synthetic construct
  misc_feature 1..20: note = chemically synthesized
  source 1..20: mol_type = other DNA
tgcgcctgtctcttatggtc

SEQ ID NO: 32447 - DNA, 20 bp, synthetic construct
  misc_feature 1..20: note = chemically synthesized
  source 1..20: mol_type = other DNA
gtctcttatggtcgagactg

SEQ ID NO: 32448 - DNA, 20 bp, synthetic construct
  misc_feature 1..20: note = chemically synthesized
  source 1..20: mol_type = other DNA
tctcttatggtcgagactgc

SEQ ID NO: 32449 - DNA, 20 bp, synthetic construct
  misc_feature 1..20: note = chemically synthesized
  source 1..20: mol_type = other DNA
ctcttatggtcgagactgca

SEQ ID NO: 32450 - DNA, 20 bp, synthetic construct
  misc_feature 1..20: note = chemically synthesized
  source 1..20: mol_type = other DNA
tcttatggtcgagactgcag

SEQ ID NO: 32451 - DNA, 20 bp, synthetic construct
  misc_feature 1..20: note = chemically synthesized
  source 1..20: mol_type = other DNA
tcgagactgcaggggtgaaa

SEQ ID NO: 32452 - DNA, 20 bp, synthetic construct
  misc_feature 1..20: note = chemically synthesized
  source 1..20: mol_type = other DNA
tgcaggggtgaaatagaccc

SEQ ID NO: 32453 - DNA, 20 bp, synthetic construct
  misc_feature 1..20: note = chemically synthesized
  source 1..20: mol_type = other DNA
aaatagaccccagtctccca

SEQ ID NO: 32454 - DNA, 20 bp, synthetic construct
  misc_feature 1..20: note = chemically synthesized
  source 1..20: mol_type = other DNA
ccagtctcccacagcgctcc

SEQ ID NO: 32455 - DNA, 20 bp, synthetic construct
  misc_feature 1..20: note = chemically synthesized
  source 1..20: mol_type = other DNA
cagtctcccacagcgctccc

SEQ ID NO: 32456 - DNA, 20 bp, synthetic construct
  misc_feature 1..20: note = chemically synthesized
  source 1..20: mol_type = other DNA
cacagcgctcccaggcttat

SEQ ID NO: 32457 - DNA, 20 bp, synthetic construct
  misc_feature 1..20: note = chemically synthesized
  source 1..20: mol_type = other DNA
acagcgctcccaggcttatt

SEQ ID NO: 32458 - DNA, 20 bp, synthetic construct
  misc_feature 1..20: note = chemically synthesized
  source 1..20: mol_type = other DNA
gcgctcccaggcttattagg

SEQ ID NO: 32459 - DNA, 20 bp, synthetic construct
  misc_feature 1..20: note = chemically synthesized
  source 1..20: mol_type = other DNA
gctcccaggcttattaggaa

SEQ ID NO: 32460 - DNA, 20 bp, synthetic construct
  misc_feature 1..20: note = chemically synthesized
  source 1..20: mol_type = other DNA
ctcccaggcttattaggaag

SEQ ID NO: 32461 - DNA, 20 bp, synthetic construct
  misc_feature 1..20: note = chemically synthesized
  source 1..20: mol_type = other DNA
aattcccgcctaataaattt

SEQ ID NO: 32462 - DNA, 20 bp, synthetic construct
  misc_feature 1..20: note = chemically synthesized
  source 1..20: mol_type = other DNA
cccgcctaataaattttggt

SEQ ID NO: 32463 - DNA, 20 bp, synthetic construct
  misc_feature 1..20: note = chemically synthesized
  source 1..20: mol_type = other DNA
ctaataaattttggtcagac

SEQ ID NO: 32464 - DNA, 20 bp, synthetic construct
  misc_feature 1..20: note = chemically synthesized
  source 1..20: mol_type = other DNA
taaaaaccctgtctcctgat

SEQ ID NO: 32465 - DNA, 20 bp, synthetic construct
  misc_feature 1..20: note = chemically synthesized
  source 1..20: mol_type = other DNA
taagatgttatcaatgacaa

SEQ ID NO: 32466 - DNA, 20 bp, synthetic construct
  misc_feature 1..20: note = chemically synthesized
  source 1..20: mol_type = other DNA
aatggtgcccgaaacttcat

SEQ ID NO: 32467 - DNA, 20 bp, synthetic construct
  misc_feature 1..20: note = chemically synthesized
  source 1..20: mol_type = other DNA
tagcaattttaatttcgcct

SEQ ID NO: 32468 - DNA, 20 bp, synthetic construct
  misc_feature 1..20: note = chemically synthesized
  source 1..20: mol_type = other DNA
ttaatttcgcctcggtcctg

SEQ ID NO: 32469 - DNA, 20 bp, synthetic construct
  misc_feature 1..20: note = chemically synthesized
  source 1..20: mol_type = other DNA
tgatattctattaccttgta

SEQ ID NO: 32470 - DNA, 20 bp, synthetic construct
  misc_feature 1..20: note = chemically synthesized
  source 1..20: mol_type = other DNA
aatccctaatacaaacttgc

SEQ ID NO: 32471 - DNA, 20 bp, synthetic construct
  misc_feature 1..20: note = chemically synthesized
  source 1..20: mol_type = other DNA
tacaaacttgctggtttttg

SEQ ID NO: 32472 - DNA, 20 bp, synthetic construct
  misc_feature 1..20: note = chemically synthesized
  source 1..20: mol_type = other DNA
ttgctggtttttgtggcttg

SEQ ID NO: 32473 - DNA, 20 bp, synthetic construct
  misc_feature 1..20: note = chemically synthesized
  source 1..20: mol_type = other DNA
tgctggtttttgtggcttgt

SEQ ID NO: 32474 - DNA, 20 bp, synthetic construct
  misc_feature 1..20: note = chemically synthesized
  source 1..20: mol_type = other DNA
gctggtttttgtggcttgtg

SEQ ID NO: 32475 - DNA, 20 bp, synthetic construct
  misc_feature 1..20: note = chemically synthesized
  source 1..20: mol_type = other DNA
ttgtggcttgtggggcatca

SEQ ID NO: 32476 - DNA, 20 bp, synthetic construct
  misc_feature 1..20: note = chemically synthesized
  source 1..20: mol_type = other DNA
ccgaaatgtgatgcctcccc

SEQ ID NO: 32477 - DNA, 20 bp, synthetic construct
  misc_feature 1..20: note = chemically synthesized
  source 1..20: mol_type = other DNA
tgatgcctcccccggatgcc

SEQ ID NO: 32478 - DNA, 20 bp, synthetic construct
  misc_feature 1..20: note = chemically synthesized
  source 1..20: mol_type = other DNA
actctgtccctttatttcta

SEQ ID NO: 32479 - DNA, 20 bp, synthetic construct
  misc_feature 1..20: note = chemically synthesized
  source 1..20: mol_type = other DNA
tgtccctttatttctaaagt

SEQ ID NO: 32480 - DNA, 20 bp, synthetic construct
  misc_feature 1..20: note = chemically synthesized
  source 1..20: mol_type = other DNA
ttctaaagttggccgacgct

SEQ ID NO: 32481 - DNA, 20 bp, synthetic construct
  misc_feature 1..20: note = chemically synthesized
  source 1..20: mol_type = other DNA
tctaaagttggccgacgctt

SEQ ID NO: 32482 - DNA, 20 bp, synthetic construct
  misc_feature 1..20: note = chemically synthesized
  source 1..20: mol_type = other DNA
ctaaagttggccgacgctta

SEQ ID NO: 32483 - DNA, 20 bp, synthetic construct
  misc_feature 1..20: note = chemically synthesized
  source 1..20: mol_type = other DNA
tggccgacgcttagggaaaa

SEQ ID NO: 32484 - DNA, 20 bp, synthetic construct
  misc_feature 1..20: note = chemically synthesized
  source 1..20: mol_type = other DNA
gacgcttagggaaaatagaa

SEQ ID NO: 32485 - DNA, 20 bp, synthetic construct
  misc_feature 1..20: note = chemically synthesized
  source 1..20: mol_type = other DNA
aaaagaacctacgtgaatat

SEQ ID NO: 32486 - DNA, 20 bp, synthetic construct
  misc_feature 1..20: note = chemically synthesized
  source 1..20: mol_type = other DNA
aaagaacctacgtgaatatt

SEQ ID NO: 32487 - DNA, 20 bp, synthetic construct
  misc_feature 1..20: note = chemically synthesized
  source 1..20: mol_type = other DNA
aagaacctacgtgaatattg

SEQ ID NO: 32488 - DNA, 20 bp, synthetic construct
  misc_feature 1..20: note = chemically synthesized
  source 1..20: mol_type = other DNA
aacctacgtgaatattgggg

SEQ ID NO: 32489 - DNA, 20 bp, synthetic construct
  misc_feature 1..20: note = chemically synthesized
  source 1..20: mol_type = other DNA
acctacgtgaatattggggc

SEQ ID NO: 32490 - DNA, 20 bp, synthetic construct
  misc_feature 1..20: note = chemically synthesized
  source 1..20: mol_type = other DNA
ggggcaggttccctgatact

SEQ ID NO: 32491 - DNA, 20 bp, synthetic construct
  misc_feature 1..20: note = chemically synthesized
  source 1..20: mol_type = other DNA
gcaggttccctgatactcag

SEQ ID NO: 32492 - DNA, 20 bp, synthetic construct
  misc_feature 1..20: note = chemically synthesized
  source 1..20: mol_type = other DNA
ttccctgatactcagtggcg

SEQ ID NO: 32493 - DNA, 20 bp, synthetic construct
  misc_feature 1..20: note = chemically synthesized
  source 1..20: mol_type = other DNA
ccctgatactcagtggcgtg

SEQ ID NO: 32494 - DNA, 20 bp, synthetic construct
  misc_feature 1..20: note = chemically synthesized
  source 1..20: mol_type = other DNA
cagtggcgtggagatgtaac

SEQ ID NO: 32495 - DNA, 20 bp, synthetic construct
  misc_feature 1..20: note = chemically synthesized
  source 1..20: mol_type = other DNA
gcgtggagatgtaacaagcc

SEQ ID NO: 32496 - DNA, 20 bp, synthetic construct
  misc_feature 1..20: note = chemically synthesized
  source 1..20: mol_type = other DNA
tgtaacaagcctggatgtgt

SEQ ID NO: 32497 - DNA, 20 bp, synthetic construct
  misc_feature 1..20: note = chemically synthesized
  source 1..20: mol_type = other DNA
ctggatgtgtgagtgatgat

SEQ ID NO: 32498 - DNA, 20 bp, synthetic construct
  misc_feature 1..20: note = chemically synthesized
  source 1..20: mol_type = other DNA
tggatgtgtgagtgatgatc

SEQ ID NO: 32499 - DNA, 20 bp, synthetic construct
  misc_feature 1..20: note = chemically synthesized
  source 1..20: mol_type = other DNA
agtgatgatcaggccaacaa

SEQ ID NO: 32500 - DNA, 20 bp, synthetic construct
  misc_feature 1..20: note = chemically synthesized
  source 1..20: mol_type = other DNA
ggccaacaacagtctgtatt

SEQ ID NO: 32501 - DNA, 20 bp, synthetic construct
  misc_feature 1..20: note = chemically synthesized
  source 1..20: mol_type = other DNA
caacaacagtctgtatttgg

SEQ ID NO: 32502 - DNA, 20 bp, synthetic construct
  misc_feature 1..20: note = chemically synthesized
  source 1..20: mol_type = other DNA
tctgtatttggaagaaatat

SEQ ID NO: 32503 - DNA, 20 bp, synthetic construct
  misc_feature 1..20: note = chemically synthesized
  source 1..20: mol_type = other DNA
cagatgtgaatgttatgacc

SEQ ID NO: 32504 - DNA, 20 bp, synthetic construct
  misc_feature 1..20: note = chemically synthesized
  source 1..20: mol_type = other DNA
agatgtgaatgttatgacct

SEQ ID NO: 32505 - DNA, 20 bp, synthetic construct
  misc_feature 1..20: note = chemically synthesized
  source 1..20: mol_type = other DNA
tgtgaatgttatgacctagg

SEQ ID NO: 32506 - DNA, 20 bp, synthetic construct
  misc_feature 1..20: note = chemically synthesized
  source 1..20: mol_type = other DNA
tgttatgacctaggaagcaa

SEQ ID NO: 32507 - DNA, 20 bp, synthetic construct
  misc_feature 1..20: note = chemically synthesized
  source 1..20: mol_type = other DNA
tatgacctaggaagcaatgg

SEQ ID NO: 32508 - DNA, 20 bp, synthetic construct
  misc_feature 1..20: note = chemically synthesized
  source 1..20: mol_type = other DNA
aaaattattctttttgcctt

SEQ ID NO: 32509 - DNA, 20 bp, synthetic construct
  misc_feature 1..20: note = chemically synthesized
  source 1..20: mol_type = other DNA
ttgtcaacacaaaaaatact

SEQ ID NO: 32510 - DNA, 20 bp, synthetic construct
  misc_feature 1..20: note = chemically synthesized
  source 1..20: mol_type = other DNA
gttgtatactgatttgttaa

SEQ ID NO: 32511 - DNA, 20 bp, synthetic construct
  misc_feature 1..20: note = chemically synthesized
  source 1..20: mol_type = other DNA
gtatactgatttgttaaaag

SEQ ID NO: 32512 - DNA, 20 bp, synthetic construct
  misc_feature 1..20: note = chemically synthesized
  source 1..20: mol_type = other DNA
tactgatttgttaaaagcag

SEQ ID NO: 32513 - DNA, 20 bp, synthetic construct
  misc_feature 1..20: note = chemically synthesized
  source 1..20: mol_type = other DNA
ttgttaaaagcagcagcatg

SEQ ID NO: 32514 - DNA, 20 bp, synthetic construct
  misc_feature 1..20: note = chemically synthesized
  source 1..20: mol_type = other DNA
taaaagcagcagcatgcagt

SEQ ID NO: 32515 - DNA, 20 bp, synthetic construct
  misc_feature 1..20: note = chemically synthesized
  source 1..20: mol_type = other DNA
aaaagcagcagcatgcagtt

SEQ ID NO: 32516 - DNA, 20 bp, synthetic construct
  misc_feature 1..20: note = chemically synthesized
  source 1..20: mol_type = other DNA
tgcagttaggatgatatctt

SEQ ID NO: 32517 - DNA, 20 bp, synthetic construct
  misc_feature 1..20: note = chemically synthesized
  source 1..20: mol_type = other DNA
gcagttaggatgatatcttt

SEQ ID NO: 32518 - DNA, 20 bp, synthetic construct
  misc_feature 1..20: note = chemically synthesized
  source 1..20: mol_type = other DNA
cagttaggatgatatctttg

SEQ ID NO: 32519 - DNA, 20 bp, synthetic construct
  misc_feature 1..20: note = chemically synthesized
  source 1..20: mol_type = other DNA
ggatgatatctttggggaaa

SEQ ID NO: 32520 - DNA, 20 bp, synthetic construct
  misc_feature 1..20: note = chemically synthesized
  source 1..20: mol_type = other DNA
tgatatctttggggaaatgg

SEQ ID NO: 32521 - DNA, 20 bp, synthetic construct
  misc_feature 1..20: note = chemically synthesized
  source 1..20: mol_type = other DNA
atatctttggggaaatggca

SEQ ID NO: 32522 - DNA, 20 bp, synthetic construct
  misc_feature 1..20: note = chemically synthesized
  source 1..20: mol_type = other DNA
aaccccatgctcaccatcaa

SEQ ID NO: 32523 - DNA, 20 bp, synthetic construct
  misc_feature 1..20: note = chemically synthesized
  source 1..20: mol_type = other DNA
accccatgctcaccatcaac

SEQ ID NO: 32524 - DNA, 20 bp, synthetic construct
  misc_feature 1..20: note = chemically synthesized
  source 1..20: mol_type = other DNA
ccatcaacgggattgaattt

SEQ ID NO: 32525 - DNA, 20 bp, synthetic construct
  misc_feature 1..20: note = chemically synthesized
  source 1..20: mol_type = other DNA
gggattgaatttgagctgct

SEQ ID NO: 32526 - DNA, 20 bp, synthetic construct
  misc_feature 1..20: note = chemically synthesized
  source 1..20: mol_type = other DNA
gaatttgagctgctgagaat

SEQ ID NO: 32527 - DNA, 20 bp, synthetic construct
  misc_feature 1..20: note = chemically synthesized
  source 1..20: mol_type = other DNA
ttatcttcaattctgtgaaa

SEQ ID NO: 32528 - DNA, 20 bp, synthetic construct
  misc_feature 1..20: note = chemically synthesized
  source 1..20: mol_type = other DNA
aattctgtgaaatggaattt

SEQ ID NO: 32529 - DNA, 20 bp, synthetic construct
  misc_feature 1..20: note = chemically synthesized
  source 1..20: mol_type = other DNA
tgtgaaatggaattttagac

SEQ ID NO: 32530 - DNA, 20 bp, synthetic construct
  misc_feature 1..20: note = chemically synthesized
  source 1..20: mol_type = other DNA
tttagaccagcctgtgactg

SEQ ID NO: 32531 - DNA, 20 bp, synthetic construct
  misc_feature 1..20: note = chemically synthesized
  source 1..20: mol_type = other DNA
cagcctgtgactgaagccac

SEQ ID NO: 32532 - DNA, 20 bp, synthetic construct
  misc_feature 1..20: note = chemically synthesized
  source 1..20: mol_type = other DNA
agcctgtgactgaagccact

SEQ ID NO: 32533 - DNA, 20 bp, synthetic construct
  misc_feature 1..20: note = chemically synthesized
  source 1..20: mol_type = other DNA
actgaagccactgggcatta

SEQ ID NO: 32534 - DNA, 20 bp, synthetic construct
  misc_feature 1..20: note = chemically synthesized
  source 1..20: mol_type = other DNA
gccgcattgtttctctctgc

SEQ ID NO: 32535 - DNA, 20 bp, synthetic construct
  misc_feature 1..20: note = chemically synthesized
  source 1..20: mol_type = other DNA
cgcattgtttctctctgcaa

SEQ ID NO: 32536 - DNA, 20 bp, synthetic construct
  misc_feature 1..20: note = chemically synthesized
  source 1..20: mol_type = other DNA
cattgtttctctctgcaaga

SEQ ID NO: 32537 - DNA, 20 bp, synthetic construct
  misc_feature 1..20: note = chemically synthesized
  source 1..20: mol_type = other DNA
attgtttctctctgcaagag

SEQ ID NO: 32538 - DNA, 20 bp, synthetic construct
  misc_feature 1..20: note = chemically synthesized
  source 1..20: mol_type = other DNA
gtttctctctgcaagagagg

SEQ ID NO: 32539 - DNA, 20 bp, synthetic construct
  misc_feature 1..20: note = chemically synthesized
  source 1..20: mol_type = other DNA
tttctctctgcaagagagga

SEQ ID NO: 32540 - DNA, 20 bp, synthetic construct
  misc_feature 1..20: note = chemically synthesized
  source 1..20: mol_type = other DNA
ctctctgcaagagaggaagg

SEQ ID NO: 32541 - DNA, 20 bp, synthetic construct
  misc_feature 1..20: note = chemically synthesized
  source 1..20: mol_type = other DNA
tctctgcaagagaggaagga

SEQ ID NO: 32542 - DNA, 20 bp, synthetic construct
  misc_feature 1..20: note = chemically synthesized
  source 1..20: mol_type = other DNA
tgcaagagaggaaggaaggc

SEQ ID NO: 32543 - DNA, 20 bp, synthetic construct
  misc_feature 1..20: note = chemically synthesized
  source 1..20: mol_type = other DNA
caagagaggaaggaaggctg

SEQ ID NO: 32544 - DNA, 20 bp, synthetic construct
  misc_feature 1..20: note = chemically synthesized
  source 1..20: mol_type = other DNA
gaggaaggaaggctggagta

SEQ ID NO: 32545 - DNA, 20 bp, synthetic construct
  misc_feature 1..20: note = chemically synthesized
  source 1..20: mol_type = other DNA
aggaaggctggagtacagct

SEQ ID NO: 32546 - DNA, 20 bp, synthetic construct
  misc_feature 1..20: note = chemically synthesized
  source 1..20: mol_type = other DNA
tggagtacagctgagctttc

SEQ ID NO: 32547 - DNA, 20 bp, synthetic construct
  misc_feature 1..20: note = chemically synthesized
  source 1..20: mol_type = other DNA
agtacagctgagctttctgg

SEQ ID NO: 32548 - DNA, 20 bp, synthetic construct
  misc_feature 1..20: note = chemically synthesized
  source 1..20: mol_type = other DNA
gtacagctgagctttctggc

SEQ ID NO: 32549 - DNA, 20 bp, synthetic construct
  misc_feature 1..20: note = chemically synthesized
  source 1..20: mol_type = other DNA
ctgagctttctggcaggcac

SEQ ID NO: 32550 - DNA, 20 bp, synthetic construct
  misc_feature 1..20: note = chemically synthesized
  source 1..20: mol_type = other DNA
agctttctggcaggcactgg

SEQ ID NO: 32551 - DNA, 20 bp, synthetic construct
  misc_feature 1..20: note = chemically synthesized
  source 1..20: mol_type = other DNA
ctttctggcaggcactggtg

SEQ ID NO: 32552 - DNA, 20 bp, synthetic construct
  misc_feature 1..20: note = chemically synthesized
  source 1..20: mol_type = other DNA
ccttccccattctttgtaac

SEQ ID NO: 32553 - DNA, 20 bp, synthetic construct
  misc_feature 1..20: note = chemically synthesized
  source 1..20: mol_type = other DNA
tccccattctttgtaactgg

SEQ ID NO: 32554 - DNA, 20 bp, synthetic construct
  misc_feature 1..20: note = chemically synthesized
  source 1..20: mol_type = other DNA
ttctttgtaactggtggcct

SEQ ID NO: 32555 - DNA, 20 bp, synthetic construct
  misc_feature 1..20: note = chemically synthesized
  source 1..20: mol_type = other DNA
tttgtaactggtggccttag

SEQ ID NO: 32556 - DNA, 20 bp, synthetic construct
  misc_feature 1..20: note = chemically synthesized
  source 1..20: mol_type = other DNA
tgtaactggtggccttagaa

SEQ ID NO: 32557 - DNA, 20 bp, synthetic construct
  misc_feature 1..20: note = chemically synthesized
  source 1..20: mol_type = other DNA
gtaactggtggccttagaag

SEQ ID NO: 32558 - DNA, 20 bp, synthetic construct
  misc_feature 1..20: note = chemically synthesized
  source 1..20: mol_type = other DNA
taactggtggccttagaaga

SEQ ID NO: 32559 - DNA, 20 bp, synthetic construct
  misc_feature 1..20: note = chemically synthesized
  source 1..20: mol_type = other DNA
ggtggccttagaagagggtt

SEQ ID NO: 32560 - DNA, 20 bp, synthetic construct
  misc_feature 1..20: note = chemically synthesized
  source 1..20: mol_type = other DNA
gtggccttagaagagggttc

SEQ ID NO: 32561 - DNA, 20 bp, synthetic construct
  misc_feature 1..20: note = chemically synthesized
  source 1..20: mol_type = other DNA
tggccttagaagagggttca

SEQ ID NO: 32562 - DNA, 20 bp, synthetic construct
  misc_feature 1..20: note = chemically synthesized
  source 1..20: mol_type = other DNA
agggttcagggttatgtgtt

SEQ ID NO: 32563 - DNA, 20 bp, synthetic construct
  misc_feature 1..20: note = chemically synthesized
  source 1..20: mol_type = other DNA
gggttatgtgtttggaacac

SEQ ID NO: 32564 - DNA, 20 bp, synthetic construct
  misc_feature 1..20: note = chemically synthesized
  source 1..20: mol_type = other DNA
tatgtgtttggaacacgagt

SEQ ID NO: 32565 - DNA, 20 bp, synthetic construct
  misc_feature 1..20: note = chemically synthesized
  source 1..20: mol_type = other DNA
ggaacacgagttagtataaa

SEQ ID NO: 32566 - DNA, 20 bp, synthetic construct
  misc_feature 1..20: note = chemically synthesized
  source 1..20: mol_type = other DNA
agttagtataaatggttctg

SEQ ID NO: 32567 - DNA, 20 bp, synthetic construct
  misc_feature 1..20: note = chemically synthesized
  source 1..20: mol_type = other DNA
tggttctgaagcacttgatt

SEQ ID NO: 32568 - DNA, 20 bp, synthetic construct
  misc_feature 1..20: note = chemically synthesized
  source 1..20: mol_type = other DNA
tcagactgtgctttaaaaaa

SEQ ID NO: 32569 - DNA, 20 bp, synthetic construct
  misc_feature 1..20: note = chemically synthesized
  source 1..20: mol_type = other DNA
cagactgtgctttaaaaaat

SEQ ID NO: 32570 - DNA, 20 bp, synthetic construct
  misc_feature 1..20: note = chemically synthesized
  source 1..20: mol_type = other DNA
ctgtgctttaaaaaatagga

SEQ ID NO: 32571 - DNA, 20 bp, synthetic construct
  misc_feature 1..20: note = chemically synthesized
  source 1..20: mol_type = other DNA
gctttaaaaaataggaaaga

SEQ ID NO: 32572 - DNA, 20 bp, synthetic construct
  misc_feature 1..20: note = chemically synthesized
  source 1..20: mol_type = other DNA
ttaaaaaataggaaagaaag

SEQ ID NO: 32573 - DNA, 20 bp, synthetic construct
  misc_feature 1..20: note = chemically synthesized
  source 1..20: mol_type = other DNA
aaaataggaaagaaagtaga

SEQ ID NO: 32574 - DNA, 20 bp, synthetic construct
  misc_feature 1..20: note = chemically synthesized
  source 1..20: mol_type = other DNA
aggaaagaaagtagaaagaa

SEQ ID NO: 32575 - DNA, 20 bp, synthetic construct
  misc_feature 1..20: note = chemically synthesized
  source 1..20: mol_type = other DNA
aaagtagaaagaacagctga

SEQ ID NO: 32576 - DNA, 20 bp, synthetic construct
  misc_feature 1..20: note = chemically synthesized
  source 1..20: mol_type = other DNA
agaaagaacagctgatggtt

SEQ ID NO: 32577 - DNA, 20 bp, synthetic construct
  misc_feature 1..20: note = chemically synthesized
  source 1..20: mol_type = other DNA
aagaacagctgatggtttgg

SEQ ID NO: 32578 - DNA, 20 bp, synthetic construct
  misc_feature 1..20: note = chemically synthesized
  source 1..20: mol_type = other DNA
agaacagctgatggtttgga

SEQ ID NO: 32579 - DNA, 20 bp, synthetic construct
  misc_feature 1..20: note = chemically synthesized
  source 1..20: mol_type = other DNA
gaacagctgatggtttggaa

SEQ ID NO: 32580 - DNA, 20 bp, synthetic construct
  misc_feature 1..20: note = chemically synthesized
  source 1..20: mol_type = other DNA
acagctgatggtttggaagg

SEQ ID NO: 32581 - DNA, 20 bp, synthetic construct
  misc_feature 1..20: note = chemically synthesized
  source 1..20: mol_type = other DNA
tggtttggaagggagccacc

SEQ ID NO: 32582 - DNA, 20 bp, synthetic construct
  misc_feature 1..20: note = chemically synthesized
  source 1..20: mol_type = other DNA
gaagggagccaccaagcacc

SEQ ID NO: 32583 - DNA, 20 bp, synthetic construct
  misc_feature 1..20: note = chemically synthesized
  source 1..20: mol_type = other DNA
agggagccaccaagcaccaa

SEQ ID NO: 32584 - DNA, 20 bp, synthetic construct
  misc_feature 1..20: note = chemically synthesized
  source 1..20: mol_type = other DNA
gggagccaccaagcaccaag

SEQ ID NO: 32585 - DNA, 20 bp, synthetic construct
  misc_feature 1..20: note = chemically synthesized
  source 1..20: mol_type = other DNA
caccaagcaccaagaggtgt

SEQ ID NO: 32586 - DNA, 20 bp, synthetic construct
  misc_feature 1..20: note = chemically synthesized
  source 1..20: mol_type = other DNA
ctgaatccgtttctcaatct

SEQ ID NO: 32587 - DNA, 20 bp, synthetic construct
  misc_feature 1..20: note = chemically synthesized
  source 1..20: mol_type = other DNA
ccgtttctcaatcttagctg

SEQ ID NO: 32588 - DNA, 20 bp, synthetic construct
  misc_feature 1..20: note = chemically synthesized
  source 1..20: mol_type = other DNA
cgtttctcaatcttagctgc

SEQ ID NO: 32589 - DNA, 20 bp, synthetic construct
  misc_feature 1..20: note = chemically synthesized
  source 1..20: mol_type = other DNA
gtttctcaatcttagctgca

SEQ ID NO: 32590 - DNA, 20 bp, synthetic construct
  misc_feature 1..20: note = chemically synthesized
  source 1..20: mol_type = other DNA
caatcttagctgcagggcat

SEQ ID NO: 32591 - DNA, 20 bp, synthetic construct
  misc_feature 1..20: note = chemically synthesized
  source 1..20: mol_type = other DNA
tagctgcagggcattggcta

SEQ ID NO: 32592 - DNA, 20 bp, synthetic construct
  misc_feature 1..20: note = chemically synthesized
  source 1..20: mol_type = other DNA
gctgcagggcattggctaaa

SEQ ID NO: 32593 - DNA, 20 bp, synthetic construct
  misc_feature 1..20: note = chemically synthesized
  source 1..20: mol_type = other DNA
ctgcagggcattggctaaag

SEQ ID NO: 32594 - DNA, 20 bp, synthetic construct
  misc_feature 1..20: note = chemically synthesized
  source 1..20: mol_type = other DNA
cagggcattggctaaagagg

SEQ ID NO: 32595 - DNA, 20 bp, synthetic construct
  misc_feature 1..20: note = chemically synthesized
  source 1..20: mol_type = other DNA
agggcattggctaaagagga

SEQ ID NO: 32596 - DNA, 20 bp, synthetic construct
  misc_feature 1..20: note = chemically synthesized
  source 1..20: mol_type = other DNA
agaggaaggtgaaaactgct

SEQ ID NO: 32597 - DNA, 20 bp, synthetic construct
  misc_feature 1..20: note = chemically synthesized
  source 1..20: mol_type = other DNA
tgagtcactatcaaatcaat

SEQ ID NO: 32598 - DNA, 20 bp, synthetic construct
  misc_feature 1..20: note = chemically synthesized
  source 1..20: mol_type = other DNA
attggtttttctaatcccct

SEQ ID NO: 32599 - DNA, 20 bp, synthetic construct
  misc_feature 1..20: note = chemically synthesized
  source 1..20: mol_type = other DNA
tggtttttctaatcccctga

SEQ ID NO: 32600 - DNA, 20 bp, synthetic construct
  misc_feature 1..20: note = chemically synthesized
  source 1..20: mol_type = other DNA
ttctaatcccctgagagaaa

SEQ ID NO: 32601 - DNA, 20 bp, synthetic construct
  misc_feature 1..20: note = chemically synthesized
  source 1..20: mol_type = other DNA
atcccctgagagaaaaagta

SEQ ID NO: 32602 - DNA, 20 bp, synthetic construct
  misc_feature 1..20: note = chemically synthesized
  source 1..20: mol_type = other DNA
cccctgagagaaaaagtaca

SEQ ID NO: 32603 - DNA, 20 bp, synthetic construct
  misc_feature 1..20: note = chemically synthesized
  source 1..20: mol_type = other DNA
aaaaagtacagagtttattg

SEQ ID NO: 32604 - DNA, 20 bp, synthetic construct
  misc_feature 1..20: note = chemically synthesized
  source 1..20: mol_type = other DNA
ttaaaatgccatgcccctca

SEQ ID NO: 32605 - DNA, 20 bp, synthetic construct
  misc_feature 1..20: note = chemically synthesized
  source 1..20: mol_type = other DNA
tgccatgcccctcacggcca

SEQ ID NO: 32606 - DNA, 20 bp, synthetic construct
  misc_feature 1..20: note = chemically synthesized
  source 1..20: mol_type = other DNA
gccatgcccctcacggccaa

SEQ ID NO: 32607 - DNA, 20 bp, synthetic construct
  misc_feature 1..20: note = chemically synthesized
  source 1..20: mol_type = other DNA
cggccaaaggcatctgaatt

SEQ ID NO: 32608 - DNA, 20 bp, synthetic construct
  misc_feature 1..20: note = chemically synthesized
  source 1..20: mol_type = other DNA
ggccaaaggcatctgaatta

SEQ ID NO: 32609 - DNA, 20 bp, synthetic construct
  misc_feature 1..20: note = chemically synthesized
  source 1..20: mol_type = other DNA
caaaggcatctgaattaagg

SEQ ID NO: 32610 - DNA, 20 bp, synthetic construct
  misc_feature 1..20: note = chemically synthesized
  source 1..20: mol_type = other DNA
aggcatctgaattaaggaag

SEQ ID NO: 32611 - DNA, 20 bp, synthetic construct
  misc_feature 1..20: note = chemically synthesized
  source 1..20: mol_type = other DNA
aattaaggaagcagtattca

SEQ ID NO: 32612 - DNA, 20 bp, synthetic construct
  misc_feature 1..20: note = chemically synthesized
  source 1..20: mol_type = other DNA
gtattcacagctgctttctc

SEQ ID NO: 32613 - DNA, 20 bp, synthetic construct
  misc_feature 1..20: note = chemically synthesized
  source 1..20: mol_type = other DNA
agctgctttctccagacatt

SEQ ID NO: 32614 - DNA, 20 bp, synthetic construct
  misc_feature 1..20: note = chemically synthesized
  source 1..20: mol_type = other DNA
tttctccagacattgagctc

SEQ ID NO: 32615 - DNA, 20 bp, synthetic construct
  misc_feature 1..20: note = chemically synthesized
  source 1..20: mol_type = other DNA
ttctccagacattgagctca

SEQ ID NO: 32616 - DNA, 20 bp, synthetic construct
  misc_feature 1..20: note = chemically synthesized
  source 1..20: mol_type = other DNA
ccagacattgagctcaagga

SEQ ID NO: 32617 - DNA, 20 bp, synthetic construct
  misc_feature 1..20: note = chemically synthesized
  source 1..20: mol_type = other DNA
aatctgaactctgcttttat

SEQ ID NO: 32618 - DNA, 20 bp, synthetic construct
  misc_feature 1..20: note = chemically synthesized
  source 1..20: mol_type = other DNA
tttatcagctgcgaaaatcc

SEQ ID NO: 32619 - DNA, 20 bp, synthetic construct
  misc_feature 1..20: note = chemically synthesized
  source 1..20: mol_type = other DNA
aaaatccaagcattcatttc

SEQ ID NO: 32620 - DNA, 20 bp, synthetic construct
  misc_feature 1..20: note = chemically synthesized
  source 1..20: mol_type = other DNA
tccaagcattcatttccagc

SEQ ID NO: 32621 - DNA, 20 bp, synthetic construct
  misc_feature 1..20: note = chemically synthesized
  source 1..20: mol_type = other DNA
gcattcatttccagctggtt

SEQ ID NO: 32622 - DNA, 20 bp, synthetic construct
  misc_feature 1..20: note = chemically synthesized
  source 1..20: mol_type = other DNA
ctggttcagtgcctatgtaa

SEQ ID NO: 32623 - DNA, 20 bp, synthetic construct
  misc_feature 1..20: note = chemically synthesized
  source 1..20: mol_type = other DNA
agtatactgtgtacaaaaat

SEQ ID NO: 32624 - DNA, 20 bp, synthetic construct
  misc_feature 1..20: note = chemically synthesized
  source 1..20: mol_type = other DNA
tgtacaaaaataagattaaa

SEQ ID NO: 32625 - DNA, 20 bp, synthetic construct
  misc_feature 1..20: note = chemically synthesized
  source 1..20: mol_type = other DNA
aagattaaaaagctaacatt

SEQ ID NO: 32626 - DNA, 20 bp, synthetic construct
  misc_feature 1..20: note = chemically synthesized
  source 1..20: mol_type = other DNA
ttaaaaagctaacattaagc

SEQ ID NO: 32627 - DNA, 20 bp, synthetic construct
  misc_feature 1..20: note = chemically synthesized
  source 1..20: mol_type = other DNA
gtgtgtttgtatgttttcta

SEQ ID NO: 32628 - DNA, 20 bp, synthetic construct
  misc_feature 1..20: note = chemically synthesized
  source 1..20: mol_type = other DNA
tttgtatgttttctacagtt

SEQ ID NO: 32629 - DNA, 20 bp, synthetic construct
  misc_feature 1..20: note = chemically synthesized
  source 1..20: mol_type = other DNA
ttctgaataatttgatccga

SEQ ID NO: 32630 - DNA, 20 bp, synthetic construct
  misc_feature 1..20: note = chemically synthesized
  source 1..20: mol_type = other DNA
atatgatttcatttcttttc

SEQ ID NO: 32631 - DNA, 20 bp, synthetic construct
  misc_feature 1..20: note = chemically synthesized
  source 1..20: mol_type = other DNA
atgatttcatttcttttcga

SEQ ID NO: 32632 - DNA, 20 bp, synthetic construct
  misc_feature 1..20: note = chemically synthesized
  source 1..20: mol_type = other DNA
tatgcatactttctaaatgc

SEQ ID NO: 32633 - DNA, 20 bp, synthetic construct
  misc_feature 1..20: note = chemically synthesized
  source 1..20: mol_type = other DNA
aaatgcaagaataaattcct

SEQ ID NO: 32634 - DNA, 20 bp, synthetic construct
  misc_feature 1..20: note = chemically synthesized
  source 1..20: mol_type = other DNA
tcctgagctccatgtgactt

SEQ ID NO: 32635 - DNA, 20 bp, synthetic construct
  misc_feature 1..20: note = chemically synthesized
  source 1..20: mol_type = other DNA
ccatgtgacttcagtaccat

SEQ ID NO: 32636 - DNA, 20 bp, synthetic construct
  misc_feature 1..20: note = chemically synthesized
  source 1..20: mol_type = other DNA
cttcagtaccatcagctctt

SEQ ID NO: 32637 - DNA, 20 bp, synthetic construct
  misc_feature 1..20: note = chemically synthesized
  source 1..20: mol_type = other DNA
cagtaccatcagctctttgg

SEQ ID NO: 32638 - DNA, 20 bp, synthetic construct
  misc_feature 1..20: note = chemically synthesized
  source 1..20: mol_type = other DNA
tcagctctttggcagcttat

SEQ ID NO: 32639 - DNA, 20 bp, synthetic construct
  misc_feature 1..20: note = chemically synthesized
  source 1..20: mol_type = other DNA
tttggcagcttatgagtata

SEQ ID NO: 32640 - DNA, 20 bp, synthetic construct
  misc_feature 1..20: note = chemically synthesized
  source 1..20: mol_type = other DNA
acagctttttaattctcacc

SEQ ID NO: 32641 - DNA, 20 bp, synthetic construct
  misc_feature 1..20: note = chemically synthesized
  source 1..20: mol_type = other DNA
tttaattctcacctggtccc

SEQ ID NO: 32642 - DNA, 20 bp, synthetic construct
  misc_feature 1..20: note = chemically synthesized
  source 1..20: mol_type = other DNA
ttaattctcacctggtcccc

SEQ ID NO: 32643 - DNA, 20 bp, synthetic construct
  misc_feature 1..20: note = chemically synthesized
  source 1..20: mol_type = other DNA
ctcacctggtccccaggata

SEQ ID NO: 32644 - DNA, 20 bp, synthetic construct
  misc_feature 1..20: note = chemically synthesized
  source 1..20: mol_type = other DNA
ccaggatatggtttacttgt

SEQ ID NO: 32645 - DNA, 20 bp, synthetic construct
  misc_feature 1..20: note = chemically synthesized
  source 1..20: mol_type = other DNA
aggatatggtttacttgtca

SEQ ID NO: 32646 - DNA, 20 bp, synthetic construct
  misc_feature 1..20: note = chemically synthesized
  source 1..20: mol_type = other DNA
atatggtttacttgtcagag

SEQ ID NO: 32647 - DNA, 20 bp, synthetic construct
  misc_feature 1..20: note = chemically synthesized
  source 1..20: mol_type = other DNA
acttgtcagagtagttttat

SEQ ID NO: 32648 - DNA, 20 bp, synthetic construct
  misc_feature 1..20: note = chemically synthesized
  source 1..20: mol_type = other DNA
cttgtcagagtagttttatg

SEQ ID NO: 32649 - DNA, 20 bp, synthetic construct
  misc_feature 1..20: note = chemically synthesized
  source 1..20: mol_type = other DNA
ctttctcctgactctgattc

SEQ ID NO: 32650 - DNA, 20 bp, synthetic construct
  misc_feature 1..20: note = chemically synthesized
  source 1..20: mol_type = other DNA
tttctcctgactctgattct

SEQ ID NO: 32651 - DNA, 20 bp, synthetic construct
  misc_feature 1..20: note = chemically synthesized
  source 1..20: mol_type = other DNA
gattctaggtaacacctgat

SEQ ID NO: 32652 - DNA, 20 bp, synthetic construct
  misc_feature 1..20: note = chemically synthesized
  source 1..20: mol_type = other DNA
gtaacacctgatgagatgaa

SEQ ID NO: 32653 - DNA, 20 bp, synthetic construct
  misc_feature 1..20: note = chemically synthesized
  source 1..20: mol_type = other DNA
cacctgatgagatgaacaga

SEQ ID NO: 32654 - DNA, 20 bp, synthetic construct
  misc_feature 1..20: note = chemically synthesized
  source 1..20: mol_type = other DNA
tgcacctcacttcctcttac

SEQ ID NO: 32655 - DNA, 20 bp, synthetic construct
  misc_feature 1..20: note = chemically synthesized
  source 1..20: mol_type = other DNA
gcacctcacttcctcttact

SEQ ID NO: 32656 - DNA, 20 bp, synthetic construct
  misc_feature 1..20: note = chemically synthesized
  source 1..20: mol_type = other DNA
acttcctcttactgggcatg

SEQ ID NO: 32657 - DNA, 20 bp, synthetic construct
  misc_feature 1..20: note = chemically synthesized
  source 1..20: mol_type = other DNA
cttcctcttactgggcatga

SEQ ID NO: 32658 - DNA, 20 bp, synthetic construct
  misc_feature 1..20: note = chemically synthesized
  source 1..20: mol_type = other DNA
ctcttactgggcatgaagga

SEQ ID NO: 32659 - DNA, 20 bp, synthetic construct
  misc_feature 1..20: note = chemically synthesized
  source 1..20: mol_type = other DNA
cttactgggcatgaaggaaa

SEQ ID NO: 32660 - DNA, 20 bp, synthetic construct
  misc_feature 1..20: note = chemically synthesized
  source 1..20: mol_type = other DNA
tactgggcatgaaggaaaga

SEQ ID NO: 32661 - DNA, 20 bp, synthetic construct
  misc_feature 1..20: note = chemically synthesized
  source 1..20: mol_type = other DNA
ctgggcatgaaggaaagaga

SEQ ID NO: 32662 - DNA, 20 bp, synthetic construct
  misc_feature 1..20: note = chemically synthesized
  source 1..20: mol_type = other DNA
ggcatgaaggaaagagagag

SEQ ID NO: 32663 - DNA, 20 bp, synthetic construct
  misc_feature 1..20: note = chemically synthesized
  source 1..20: mol_type = other DNA
tgaaggaaagagagagaagt

SEQ ID NO: 32664 - DNA, 20 bp, synthetic construct
  misc_feature 1..20: note = chemically synthesized
  source 1..20: mol_type = other DNA
gaaggaaagagagagaagtc

SEQ ID NO: 32665 - DNA, 20 bp, synthetic construct
  misc_feature 1..20: note = chemically synthesized
  source 1..20: mol_type = other DNA
aaggaaagagagagaagtca

SEQ ID NO: 32666 - DNA, 20 bp, synthetic construct
  misc_feature 1..20: note = chemically synthesized
  source 1..20: mol_type = other DNA
gaaagagagagaagtcaggg

SEQ ID NO: 32667 - DNA, 20 bp, synthetic construct
  misc_feature 1..20: note = chemically synthesized
  source 1..20: mol_type = other DNA
aagagagagaagtcagggta

SEQ ID NO: 32668 - DNA, 20 bp, synthetic construct
  misc_feature 1..20: note = chemically synthesized
  source 1..20: mol_type = other DNA
tgctacattttttttttctg

SEQ ID NO: 32669 - DNA, 20 bp, synthetic construct
  misc_feature 1..20: note = chemically synthesized
  source 1..20: mol_type = other DNA
attttttttttctgtggaaa

SEQ ID NO: 32670 - DNA, 20 bp, synthetic construct
  misc_feature 1..20: note = chemically synthesized
  source 1..20: mol_type = other DNA
tttttttttctgtggaaaaa

SEQ ID NO: 32671 - DNA, 20 bp, synthetic construct
  misc_feature 1..20: note = chemically synthesized
  source 1..20: mol_type = other DNA
atatttctaattaaccttga

SEQ ID NO: 32672 - DNA, 20 bp, synthetic construct
  misc_feature 1..20: note = chemically synthesized
  source 1..20: mol_type = other DNA
tatttctaattaaccttgat

SEQ ID NO: 32673 - DNA, 20 bp, synthetic construct
  misc_feature 1..20: note = chemically synthesized
  source 1..20: mol_type = other DNA
aattaaccttgatgggaaca

SEQ ID NO: 32674 - DNA, 20 bp, synthetic construct
  misc_feature 1..20: note = chemically synthesized
  source 1..20: mol_type = other DNA
cttgatgggaacatagaaca

SEQ ID NO: 32675 - DNA, 20 bp, synthetic construct
  misc_feature 1..20: note = chemically synthesized
  source 1..20: mol_type = other DNA
aacatagaacatagattgta

SEQ ID NO: 32676 - DNA, 20 bp, synthetic construct
  misc_feature 1..20: note = chemically synthesized
  source 1..20: mol_type = other DNA
acatagaacatagattgtaa

SEQ ID NO: 32677 - DNA, 20 bp, synthetic construct
  misc_feature 1..20: note = chemically synthesized
  source 1..20: mol_type = other DNA
catagaacatagattgtaaa

SEQ ID NO: 32678 - DNA, 20 bp, synthetic construct
  misc_feature 1..20: note = chemically synthesized
  source 1..20: mol_type = other DNA
agggaacttgcacattatcg

SEQ ID NO: 32679 - DNA, 20 bp, synthetic construct
  misc_feature 1..20: note = chemically synthesized
  source 1..20: mol_type = other DNA
gaacttgcacattatcgcag

SEQ ID NO: 32680 - DNA, 20 bp, synthetic construct
  misc_feature 1..20: note = chemically synthesized
  source 1..20: mol_type = other DNA
aacttgcacattatcgcagt

SEQ ID NO: 32681 - DNA, 20 bp, synthetic construct
  misc_feature 1..20: note = chemically synthesized
  source 1..20: mol_type = other DNA
tatcgcagtaggctgaataa

SEQ ID NO: 32682 - DNA, 20 bp, synthetic construct
  misc_feature 1..20: note = chemically synthesized
  source 1..20: mol_type = other DNA
gtaggctgaataatggctaa

SEQ ID NO: 32683 - DNA, 20 bp, synthetic construct
  misc_feature 1..20: note = chemically synthesized
  source 1..20: mol_type = other DNA
tggctaatggctcactctga

SEQ ID NO: 32684 - DNA, 20 bp, synthetic construct
  misc_feature 1..20: note = chemically synthesized
  source 1..20: mol_type = other DNA
ctcactctgaaagatatgta

SEQ ID NO: 32685 - DNA, 20 bp, synthetic construct
  misc_feature 1..20: note = chemically synthesized
  source 1..20: mol_type = other DNA
gcttaacccctgaaacctgt

SEQ ID NO: 32686 - DNA, 20 bp, synthetic construct
  misc_feature 1..20: note = chemically synthesized
  source 1..20: mol_type = other DNA
cctgtgagtattatcttttc

SEQ ID NO: 32687 - DNA, 20 bp, synthetic construct
  misc_feature 1..20: note = chemically synthesized
  source 1..20: mol_type = other DNA
tattatcttttctagccaaa

SEQ ID NO: 32688 - DNA, 20 bp, synthetic construct
  misc_feature 1..20: note = chemically synthesized
  source 1..20: mol_type = other DNA
agacttttgcatatataatt

SEQ ID NO: 32689 - DNA, 20 bp, synthetic construct
  misc_feature 1..20: note = chemically synthesized
  source 1..20: mol_type = other DNA
gacttttgcatatataatta

SEQ ID NO: 32690 - DNA, 20 bp, synthetic construct
  misc_feature 1..20: note = chemically synthesized
  source 1..20: mol_type = other DNA
gcatatataattaaggatct

SEQ ID NO: 32691 - DNA, 20 bp, synthetic construct
  misc_feature 1..20: note = chemically synthesized
  source 1..20: mol_type = other DNA
catatataattaaggatctt

SEQ ID NO: 32692 - DNA, 20 bp, synthetic construct
  misc_feature 1..20: note = chemically synthesized
  source 1..20: mol_type = other DNA
tataattaaggatcttggga

SEQ ID NO: 32693 - DNA, 20 bp, synthetic construct
  misc_feature 1..20: note = chemically synthesized
  source 1..20: mol_type = other DNA
ataattaaggatcttgggat

SEQ ID NO: 32694 - DNA, 20 bp, synthetic construct
  misc_feature 1..20: note = chemically synthesized
  source 1..20: mol_type = other DNA
taattaaggatcttgggatg

SEQ ID NO: 32695 - DNA, 20 bp, synthetic construct
  misc_feature 1..20: note = chemically synthesized
  source 1..20: mol_type = other DNA
attaaggatcttgggatggg

SEQ ID NO: 32696 - DNA, 20 bp, synthetic construct
  misc_feature 1..20: note = chemically synthesized
  source 1..20: mol_type = other DNA
ggggagatatcctaattatt

SEQ ID NO: 32697 - DNA, 20 bp, synthetic construct
  misc_feature 1..20: note = chemically synthesized
  source 1..20: mol_type = other DNA
gggagatatcctaattattt

SEQ ID NO: 32698 - DNA, 20 bp, synthetic construct
  misc_feature 1..20: note = chemically synthesized
  source 1..20: mol_type = other DNA
tgtatcctaaatgtaatcac

SEQ ID NO: 32699 - DNA, 20 bp, synthetic construct
  misc_feature 1..20: note = chemically synthesized
  source 1..20: mol_type = other DNA
gtaatcacaagtgtcattat

SEQ ID NO: 32700 - DNA, 20 bp, synthetic construct
  misc_feature 1..20: note = chemically synthesized
  source 1..20: mol_type = other DNA
aatcacaagtgtcattataa

SEQ ID NO: 32701 - DNA, 20 bp, synthetic construct
  misc_feature 1..20: note = chemically synthesized
  source 1..20: mol_type = other DNA
atcacaagtgtcattataag

SEQ ID NO: 32702 - DNA, 20 bp, synthetic construct
  misc_feature 1..20: note = chemically synthesized
  source 1..20: mol_type = other DNA
tcacaagtgtcattataaga

SEQ ID NO: 32703 - DNA, 20 bp, synthetic construct
  misc_feature 1..20: note = chemically synthesized
  source 1..20: mol_type = other DNA
acaagtgtcattataagagg

SEQ ID NO: 32704 - DNA, 20 bp, synthetic construct
  misc_feature 1..20: note = chemically synthesized
  source 1..20: mol_type = other DNA
caagtgtcattataagaggg

SEQ ID NO: 32705 - DNA, 20 bp, synthetic construct
  misc_feature 1..20: note = chemically synthesized
  source 1..20: mol_type = other DNA
gtcattataagagggaggca

SEQ ID NO: 32706 - DNA, 20 bp, synthetic construct
  misc_feature 1..20: note = chemically synthesized
  source 1..20: mol_type = other DNA
tcattataagagggaggcaa

SEQ ID NO: 32707 - DNA, 20 bp, synthetic construct
  misc_feature 1..20: note = chemically synthesized
  source 1..20: mol_type = other DNA
cattataagagggaggcaaa

SEQ ID NO: 32708 - DNA, 20 bp, synthetic construct
  misc_feature 1..20: note = chemically synthesized
  source 1..20: mol_type = other DNA
ttataagagggaggcaaagg

SEQ ID NO: 32709 - DNA, 20 bp, synthetic construct
  misc_feature 1..20: note = chemically synthesized
  source 1..20: mol_type = other DNA
caaagggagatttgacttat

SEQ ID NO: 32710 - DNA, 20 bp, synthetic construct
  misc_feature 1..20: note = chemically synthesized
  source 1..20: mol_type = other DNA
aagggagatttgacttataa

SEQ ID NO: 32711 - DNA, 20 bp, synthetic construct
  misc_feature 1..20: note = chemically synthesized
  source 1..20: mol_type = other DNA
agggagatttgacttataag

SEQ ID NO: 32712 - DNA, 20 bp, synthetic construct
  misc_feature 1..20: note = chemically synthesized
  source 1..20: mol_type = other DNA
ggagatttgacttataagag

SEQ ID NO: 32713 - DNA, 20 bp, synthetic construct
  misc_feature 1..20: note = chemically synthesized
  source 1..20: mol_type = other DNA
aaaatgtgacgtgattacaa

SEQ ID NO: 32714 - DNA, 20 bp, synthetic construct
  misc_feature 1..20: note = chemically synthesized
  source 1..20: mol_type = other DNA
atgtgacgtgattacaaaag

SEQ ID NO: 32715 - DNA, 20 bp, synthetic construct
  misc_feature 1..20: note = chemically synthesized
  source 1..20: mol_type = other DNA
gtgacgtgattacaaaagca

SEQ ID NO: 32716 - DNA, 20 bp, synthetic construct
  misc_feature 1..20: note = chemically synthesized
  source 1..20: mol_type = other DNA
agcagagatacatttttttg

SEQ ID NO: 32717 - DNA, 20 bp, synthetic construct
  misc_feature 1..20: note = chemically synthesized
  source 1..20: mol_type = other DNA
gatacatttttttgaagatc

SEQ ID NO: 32718 - DNA, 20 bp, synthetic construct
  misc_feature 1..20: note = chemically synthesized
  source 1..20: mol_type = other DNA
atacatttttttgaagatcg

SEQ ID NO: 32719 - DNA, 20 bp, synthetic construct
  misc_feature 1..20: note = chemically synthesized
  source 1..20: mol_type = other DNA
catttttttgaagatcgagg

SEQ ID NO: 32720 - DNA, 20 bp, synthetic construct
  misc_feature 1..20: note = chemically synthesized
  source 1..20: mol_type = other DNA
tttttttgaagatcgaggaa

SEQ ID NO: 32721 - DNA, 20 bp, synthetic construct
  misc_feature 1..20: note = chemically synthesized
  source 1..20: mol_type = other DNA
ttttttgaagatcgaggaag

SEQ ID NO: 32722 - DNA, 20 bp, synthetic construct
  misc_feature 1..20: note = chemically synthesized
  source 1..20: mol_type = other DNA
cgaggaagaggctacaaacc

SEQ ID NO: 32723 - DNA, 20 bp, synthetic construct
  misc_feature 1..20: note = chemically synthesized
  source 1..20: mol_type = other DNA
gaggaagaggctacaaacca

SEQ ID NO: 32724 - DNA, 20 bp, synthetic construct
  misc_feature 1..20: note = chemically synthesized
  source 1..20: mol_type = other DNA
aggctacaaaccaaggaatg

SEQ ID NO: 32725 - DNA, 20 bp, synthetic construct
  misc_feature 1..20: note = chemically synthesized
  source 1..20: mol_type = other DNA
ggctacaaaccaaggaatgt

SEQ ID NO: 32726 - DNA, 20 bp, synthetic construct
  misc_feature 1..20: note = chemically synthesized
  source 1..20: mol_type = other DNA
tacaaaccaaggaatgtggg

SEQ ID NO: 32727 - DNA, 20 bp, synthetic construct
  misc_feature 1..20: note = chemically synthesized
  source 1..20: mol_type = other DNA
caaggaatgtgggtagcctc

SEQ ID NO: 32728 - DNA, 20 bp, synthetic construct
  misc_feature 1..20: note = chemically synthesized
  source 1..20: mol_type = other DNA
ggaatgtgggtagcctctag

SEQ ID NO: 32729 - DNA, 20 bp, synthetic construct
  misc_feature 1..20: note = chemically synthesized
  source 1..20: mol_type = other DNA
aatgtgggtagcctctagaa

SEQ ID NO: 32730 - DNA, 20 bp, synthetic construct
  misc_feature 1..20: note = chemically synthesized
  source 1..20: mol_type = other DNA
atgtgggtagcctctagaag

SEQ ID NO: 32731 - DNA, 20 bp, synthetic construct
  misc_feature 1..20: note = chemically synthesized
  source 1..20: mol_type = other DNA
gtagcctctagaagaggaaa

SEQ ID NO: 32732 - DNA, 20 bp, synthetic construct
  misc_feature 1..20: note = chemically synthesized
  source 1..20: mol_type = other DNA
agaagaggaaacagaatcca

SEQ ID NO: 32733 - DNA, 20 bp, synthetic construct
  misc_feature 1..20: note = chemically synthesized
  source 1..20: mol_type = other DNA
aggaaacagaatccatggaa

SEQ ID NO: 32734 - DNA, 20 bp, synthetic construct
  misc_feature 1..20: note = chemically synthesized
  source 1..20: mol_type = other DNA
ggaaacagaatccatggaaa

SEQ ID NO: 32735 - DNA, 20 bp, synthetic construct
  misc_feature 1..20: note = chemically synthesized
  source 1..20: mol_type = other DNA
aacagaatccatggaaaagg

SEQ ID NO: 32736 - DNA, 20 bp, synthetic construct
  misc_feature 1..20: note = chemically synthesized
  source 1..20: mol_type = other DNA
acagaatccatggaaaaggc

SEQ ID NO: 32737 - DNA, 20 bp, synthetic construct
  misc_feature 1..20: note = chemically synthesized
  source 1..20: mol_type = other DNA
caggaaaacacaatctctca

SEQ ID NO: 32738 - DNA, 20 bp, synthetic construct
  misc_feature 1..20: note = chemically synthesized
  source 1..20: mol_type = other DNA
ggaaaacacaatctctcata

SEQ ID NO: 32739 - DNA, 20 bp, synthetic construct
  misc_feature 1..20: note = chemically synthesized
  source 1..20: mol_type = other DNA
acaatctctcatagagtctc

SEQ ID NO: 32740 - DNA, 20 bp, synthetic construct
  misc_feature 1..20: note = chemically synthesized
  source 1..20: mol_type = other DNA
atctctcatagagtctccag

SEQ ID NO: 32741 - DNA, 20 bp, synthetic construct
  misc_feature 1..20: note = chemically synthesized
  source 1..20: mol_type = other DNA
catagagtctccagaagaaa

SEQ ID NO: 32742 - DNA, 20 bp, synthetic construct
  misc_feature 1..20: note = chemically synthesized
  source 1..20: mol_type = other DNA
ccacactgacacctcgactt

SEQ ID NO: 32743 - DNA, 20 bp, synthetic construct
  misc_feature 1..20: note = chemically synthesized
  source 1..20: mol_type = other DNA
ctgacacctcgactttagcc

SEQ ID NO: 32744 - DNA, 20 bp, synthetic construct
  misc_feature 1..20: note = chemically synthesized
  source 1..20: mol_type = other DNA
tagcccagtgaaaccgattt

SEQ ID NO: 32745 - DNA, 20 bp, synthetic construct
  misc_feature 1..20: note = chemically synthesized
  source 1..20: mol_type = other DNA
cttctgacctccacaacttc

SEQ ID NO: 32746 - DNA, 20 bp, synthetic construct
  misc_feature 1..20: note = chemically synthesized
  source 1..20: mol_type = other DNA
taatacatttgtgttgtttt

SEQ ID NO: 32747 - DNA, 20 bp, synthetic construct
  misc_feature 1..20: note = chemically synthesized
  source 1..20: mol_type = other DNA
gttttaagccaataaatttg

SEQ ID NO: 32748 - DNA, 20 bp, synthetic construct
  misc_feature 1..20: note = chemically synthesized
  source 1..20: mol_type = other DNA
aaatttgtggtaatttttta

SEQ ID NO: 32749 - DNA, 20 bp, synthetic construct
  misc_feature 1..20: note = chemically synthesized
  source 1..20: mol_type = other DNA
tttgtggtaattttttacag

SEQ ID NO: 32750 - DNA, 20 bp, synthetic construct
  misc_feature 1..20: note = chemically synthesized
  source 1..20: mol_type = other DNA
tggtaattttttacagcagc

SEQ ID NO: 32751 - DNA, 20 bp, synthetic construct
  misc_feature 1..20: note = chemically synthesized
  source 1..20: mol_type = other DNA
gtaattttttacagcagcaa

SEQ ID NO: 32752 - DNA, 20 bp, synthetic construct
  misc_feature 1..20: note = chemically synthesized
  source 1..20: mol_type = other DNA
taattttttacagcagcaag

SEQ ID NO: 32753 - DNA, 20 bp, synthetic construct
  misc_feature 1..20: note = chemically synthesized
  source 1..20: mol_type = other DNA
ttacagcagcaagaggaaat

SEQ ID NO: 32754 - DNA, 20 bp, synthetic construct
  misc_feature 1..20: note = chemically synthesized
  source 1..20: mol_type = other DNA
gcaagaggaaatcagttacg

SEQ ID NO: 32755 - DNA, 20 bp, synthetic construct
  misc_feature 1..20: note = chemically synthesized
  source 1..20: mol_type = other DNA
aggaaatcagttacgtagaa

SEQ ID NO: 32756 - DNA, 20 bp, synthetic construct
  misc_feature 1..20: note = chemically synthesized
  source 1..20: mol_type = other DNA
aaatcagttacgtagaatag

SEQ ID NO: 32757 - DNA, 20 bp, synthetic construct
  misc_feature 1..20: note = chemically synthesized
  source 1..20: mol_type = other DNA
aatcagttacgtagaatagt

SEQ ID NO: 32758 - DNA, 20 bp, synthetic construct
  misc_feature 1..20: note = chemically synthesized
  source 1..20: mol_type = other DNA
agaatagtaggtcctgtctc

SEQ ID NO: 32759 - DNA, 20 bp, synthetic construct
  misc_feature 1..20: note = chemically synthesized
  source 1..20: mol_type = other DNA
tcctgtctctggctaatcat

SEQ ID NO: 32760 - DNA, 20 bp, synthetic construct
  misc_feature 1..20: note = chemically synthesized
  source 1..20: mol_type = other DNA
gctaatcattagaatcactc

SEQ ID NO: 32761 - DNA, 20 bp, synthetic construct
  misc_feature 1..20: note = chemically synthesized
  source 1..20: mol_type = other DNA
aatcattagaatcactccag

SEQ ID NO: 32762 - DNA, 20 bp, synthetic construct
  misc_feature 1..20: note = chemically synthesized
  source 1..20: mol_type = other DNA
ctccagaagcttgttacata

SEQ ID NO: 32763 - DNA, 20 bp, synthetic construct
  misc_feature 1..20: note = chemically synthesized
  source 1..20: mol_type = other DNA
aagcttgttacatacagacc

SEQ ID NO: 32764 - DNA, 20 bp, synthetic construct
  misc_feature 1..20: note = chemically synthesized
  source 1..20: mol_type = other DNA
gcttgttacatacagaccca

SEQ ID NO: 32765 - DNA, 20 bp, synthetic construct
  misc_feature 1..20: note = chemically synthesized
  source 1..20: mol_type = other DNA
gttacatacagacccagagc

SEQ ID NO: 32766 - DNA, 20 bp, synthetic construct
  misc_feature 1..20: note = chemically synthesized
  source 1..20: mol_type = other DNA
agacccagagccagtgaatc

SEQ ID NO: 32767 - DNA, 20 bp, synthetic construct
  misc_feature 1..20: note = chemically synthesized
  source 1..20: mol_type = other DNA
gacccagagccagtgaatca

SEQ ID NO: 32768 - DNA, 20 bp, synthetic construct
  misc_feature 1..20: note = chemically synthesized
  source 1..20: mol_type = other DNA
gagccagtgaatcaaggatt

SEQ ID NO: 32769 - DNA, 20 bp, synthetic construct
  misc_feature 1..20: note = chemically synthesized
  source 1..20: mol_type = other DNA
ccagtgaatcaaggatttgg

SEQ ID NO: 32770 - DNA, 20 bp, synthetic construct
  misc_feature 1..20: note = chemically synthesized
  source 1..20: mol_type = other DNA
gtgaatcaaggatttggtgg

SEQ ID NO: 32771 - DNA, 20 bp, synthetic construct
  misc_feature 1..20: note = chemically synthesized
  source 1..20: mol_type = other DNA
tgaatcaaggatttggtggt

SEQ ID NO: 32772 - DNA, 20 bp, synthetic construct
  misc_feature 1..20: note = chemically synthesized
  source 1..20: mol_type = other DNA
gaatcaaggatttggtggtg

SEQ ID NO: 32773 - DNA, 20 bp, synthetic construct
  misc_feature 1..20: note = chemically synthesized
  source 1..20: mol_type = other DNA
aaggatttggtggtggggcc

SEQ ID NO: 32774 - DNA, 20 bp, synthetic construct
  misc_feature 1..20: note = chemically synthesized
  source 1..20: mol_type = other DNA
ggatttggtggtggggccca

SEQ ID NO: 32775 - DNA, 20 bp, synthetic construct
  misc_feature 1..20: note = chemically synthesized
  source 1..20: mol_type = other DNA
gggcccagagcctgaatatt

SEQ ID NO: 32776 - DNA, 20 bp, synthetic construct
  misc_feature 1..20: note = chemically synthesized
  source 1..20: mol_type = other DNA
ccagagcctgaatattaagc

SEQ ID NO: 32777 - DNA, 20 bp, synthetic construct
  misc_feature 1..20: note = chemically synthesized
  source 1..20: mol_type = other DNA
attaagcaagttcttcgttt

SEQ ID NO: 32778 - DNA, 20 bp, synthetic construct
  misc_feature 1..20: note = chemically synthesized
  source 1..20: mol_type = other DNA
aagttcttcgttttagaaat

SEQ ID NO: 32779 - DNA, 20 bp, synthetic construct
  misc_feature 1..20: note = chemically synthesized
  source 1..20: mol_type = other DNA
agttcttcgttttagaaatg

SEQ ID NO: 32780 - DNA, 20 bp, synthetic construct
  misc_feature 1..20: note = chemically synthesized
  source 1..20: mol_type = other DNA
gttttagaaatgaggaaacc

SEQ ID NO: 32781 - DNA, 20 bp, synthetic construct
  misc_feature 1..20: note = chemically synthesized
  source 1..20: mol_type = other DNA
ttttagaaatgaggaaacca

SEQ ID NO: 32782 - DNA, 20 bp, synthetic construct
  misc_feature 1..20: note = chemically synthesized
  source 1..20: mol_type = other DNA
agaaatgaggaaaccaaggt

SEQ ID NO: 32783 - DNA, 20 bp, synthetic construct
  misc_feature 1..20: note = chemically synthesized
  source 1..20: mol_type = other DNA
gaaatgaggaaaccaaggtt

SEQ ID NO: 32784 - DNA, 20 bp, synthetic construct
  misc_feature 1..20: note = chemically synthesized
  source 1..20: mol_type = other DNA
aatgaggaaaccaaggttgg

SEQ ID NO: 32785 - DNA, 20 bp, synthetic construct
  misc_feature 1..20: note = chemically synthesized
  source 1..20: mol_type = other DNA
gaggaaaccaaggttgggag

SEQ ID NO: 32786 - DNA, 20 bp, synthetic construct
  misc_feature 1..20: note = chemically synthesized
  source 1..20: mol_type = other DNA
aaccaaggttgggagaagct

SEQ ID NO: 32787 - DNA, 20 bp, synthetic construct
  misc_feature 1..20: note = chemically synthesized
  source 1..20: mol_type = other DNA
aagcaacttactcaaataca

SEQ ID NO: 32788 - DNA, 20 bp, synthetic construct
  misc_feature 1..20: note = chemically synthesized
  source 1..20: mol_type = other DNA
agcaacttactcaaatacat

SEQ ID NO: 32789 - DNA, 20 bp, synthetic construct
  misc_feature 1..20: note = chemically synthesized
  source 1..20: mol_type = other DNA
gcaacttactcaaatacata

SEQ ID NO: 32790 - DNA, 20 bp, synthetic construct
  misc_feature 1..20: note = chemically synthesized
  source 1..20: mol_type = other DNA
tcttttgaattttcttaccc

SEQ ID NO: 32791 - DNA, 20 bp, synthetic construct
  misc_feature 1..20: note = chemically synthesized
  source 1..20: mol_type = other DNA
tgtaaatgtgatttcattta

SEQ ID NO: 32792 - DNA, 20 bp, synthetic construct
  misc_feature 1..20: note = chemically synthesized
  source 1..20: mol_type = other DNA
ttgacatattcattaaaatg

SEQ ID NO: 32793 - DNA, 20 bp, synthetic construct
  misc_feature 1..20: note = chemically synthesized
  source 1..20: mol_type = other DNA
tcattaaaatgaagaaataa

SEQ ID NO: 32794 - DNA, 20 bp, synthetic construct
  misc_feature 1..20: note = chemically synthesized
  source 1..20: mol_type = other DNA
aaaatgaagaaataaaagat

SEQ ID NO: 32795 - DNA, 20 bp, synthetic construct
  misc_feature 1..20: note = chemically synthesized
  source 1..20: mol_type = other DNA
aagaaataaaagatgagaaa

SEQ ID NO: 32796 - DNA, 20 bp, synthetic construct
  misc_feature 1..20: note = chemically synthesized
  source 1..20: mol_type = other DNA
attatataatgtttattgat

SEQ ID NO: 32797 - DNA, 20 bp, synthetic construct
  misc_feature 1..20: note = chemically synthesized
  source 1..20: mol_type = other DNA
agaatgaatatgatgcaatc

SEQ ID NO: 32798 - DNA, 20 bp, synthetic construct
  misc_feature 1..20: note = chemically synthesized
  source 1..20: mol_type = other DNA
gcaatctggttttctgtgtt

SEQ ID NO: 32799 - DNA, 20 bp, synthetic construct
  misc_feature 1..20: note = chemically synthesized
  source 1..20: mol_type = other DNA
gtgttcagattcctgacctc

SEQ ID NO: 32800 - DNA, 20 bp, synthetic construct
  misc_feature 1..20: note = chemically synthesized
  source 1..20: mol_type = other DNA
gttcagattcctgacctctg

SEQ ID NO: 32801 - DNA, 20 bp, synthetic construct
  misc_feature 1..20: note = chemically synthesized
  source 1..20: mol_type = other DNA
ggagttaacctttctttgta

SEQ ID NO: 32802 - DNA, 20 bp, synthetic construct
  misc_feature 1..20: note = chemically synthesized
  source 1..20: mol_type = other DNA
taacctttctttgtaaagat

SEQ ID NO: 32803 - DNA, 20 bp, synthetic construct
  misc_feature 1..20: note = chemically synthesized
  source 1..20: mol_type = other DNA
ctttctttgtaaagattaga

SEQ ID NO: 32804 - DNA, 20 bp, synthetic construct
  misc_feature 1..20: note = chemically synthesized
  source 1..20: mol_type = other DNA
tctttgtaaagattagacag

SEQ ID NO: 32805 - DNA, 20 bp, synthetic construct
  misc_feature 1..20: note = chemically synthesized
  source 1..20: mol_type = other DNA
ctttgtaaagattagacagc

SEQ ID NO: 32806 - DNA, 20 bp, synthetic construct
  misc_feature 1..20: note = chemically synthesized
  source 1..20: mol_type = other DNA
tgtaaagattagacagcagg

SEQ ID NO: 32807 - DNA, 20 bp, synthetic construct
  misc_feature 1..20: note = chemically synthesized
  source 1..20: mol_type = other DNA
gtaaagattagacagcaggc

SEQ ID NO: 32808 - DNA, 20 bp, synthetic construct
  misc_feature 1..20: note = chemically synthesized
  source 1..20: mol_type = other DNA
taaagattagacagcaggca

SEQ ID NO: 32809 - DNA, 20 bp, synthetic construct
  misc_feature 1..20: note = chemically synthesized
  source 1..20: mol_type = other DNA
agattagacagcaggcaggg

SEQ ID NO: 32810 - DNA, 20 bp, synthetic construct
  misc_feature 1..20: note = chemically synthesized
  source 1..20: mol_type = other DNA
ggaagaatgcctttgaaact

SEQ ID NO: 32811 - DNA, 20 bp, synthetic construct
  misc_feature 1..20: note = chemically synthesized
  source 1..20: mol_type = other DNA
aagaatgcctttgaaactga

SEQ ID NO: 32812 - DNA, 20 bp, synthetic construct
  misc_feature 1..20: note = chemically synthesized
  source 1..20: mol_type = other DNA
tgcctttgaaactgagagca

SEQ ID NO: 32813 - DNA, 20 bp, synthetic construct
  misc_feature 1..20: note = chemically synthesized
  source 1..20: mol_type = other DNA
ttgaaactgagagcaaagac

SEQ ID NO: 32814 - DNA, 20 bp, synthetic construct
  misc_feature 1..20: note = chemically synthesized
  source 1..20: mol_type = other DNA
tgcaatttacattgatgtcc

SEQ ID NO: 32815 - DNA, 20 bp, synthetic construct
  misc_feature 1..20: note = chemically synthesized
  source 1..20: mol_type = other DNA
gtcctggtgctgtgcataat

SEQ ID NO: 32816 - DNA, 20 bp, synthetic construct
  misc_feature 1..20: note = chemically synthesized
  source 1..20: mol_type = other DNA
aataagttgcttaaacatga

SEQ ID NO: 32817 - DNA, 20 bp, synthetic construct
  misc_feature 1..20: note = chemically synthesized
  source 1..20: mol_type = other DNA
aagttgcttaaacatgacag

SEQ ID NO: 32818 - DNA, 20 bp, synthetic construct
  misc_feature 1..20: note = chemically synthesized
  source 1..20: mol_type = other DNA
agttgcttaaacatgacagc

SEQ ID NO: 32819 - DNA, 20 bp, synthetic construct
  misc_feature 1..20: note = chemically synthesized
  source 1..20: mol_type = other DNA
gcttaaacatgacagcagga

SEQ ID NO: 32820 - DNA, 20 bp, synthetic construct
  misc_feature 1..20: note = chemically synthesized
  source 1..20: mol_type = other DNA
cttaaacatgacagcaggat

SEQ ID NO: 32821 - DNA, 20 bp, synthetic construct
  misc_feature 1..20: note = chemically synthesized
  source 1..20: mol_type = other DNA
acataaaatttatttataaa

SEQ ID NO: 32822 - DNA, 20 bp, synthetic construct
  misc_feature 1..20: note = chemically synthesized
  source 1..20: mol_type = other DNA
aaatttatttataaatggta

SEQ ID NO: 32823 - DNA, 20 bp, synthetic construct
  misc_feature 1..20: note = chemically synthesized
  source 1..20: mol_type = other DNA
acctctgctgaacttcctca

SEQ ID NO: 32824 - DNA, 20 bp, synthetic construct
  misc_feature 1..20: note = chemically synthesized
  source 1..20: mol_type = other DNA
cttcctcatagaatgttcat

SEQ ID NO: 32825 - DNA, 20 bp, synthetic construct
  misc_feature 1..20: note = chemically synthesized
  source 1..20: mol_type = other DNA
agaatgttcatcagaaaaca

SEQ ID NO: 32826 - DNA, 20 bp, synthetic construct
  misc_feature 1..20: note = chemically synthesized
  source 1..20: mol_type = other DNA
ttctatctactctttcttcc

SEQ ID NO: 32827 - DNA, 20 bp, synthetic construct
  misc_feature 1..20: note = chemically synthesized
  source 1..20: mol_type = other DNA
accactgacatcatgaccct

SEQ ID NO: 32828 - DNA, 20 bp, synthetic construct
  misc_feature 1..20: note = chemically synthesized
  source 1..20: mol_type = other DNA
gaccctcagttctattcccc

SEQ ID NO: 32829 - DNA, 20 bp, synthetic construct
  misc_feature 1..20: note = chemically synthesized
  source 1..20: mol_type = other DNA
ctgcccactcccctgaaatc

SEQ ID NO: 32830 - DNA, 20 bp, synthetic construct
  misc_feature 1..20: note = chemically synthesized
  source 1..20: mol_type = other DNA
ccataaatccaaccaccgcc

SEQ ID NO: 32831 - DNA, 20 bp, synthetic construct
  misc_feature 1..20: note = chemically synthesized
  source 1..20: mol_type = other DNA
cataaatccaaccaccgcct

SEQ ID NO: 32832 - DNA, 20 bp, synthetic construct
  misc_feature 1..20: note = chemically synthesized
  source 1..20: mol_type = other DNA
caaccaccgcctgggtatct

SEQ ID NO: 32833 - DNA, 20 bp, synthetic construct
  misc_feature 1..20: note = chemically synthesized
  source 1..20: mol_type = other DNA
accgcctgggtatctcagtt

SEQ ID NO: 32834 - DNA, 20 bp, synthetic construct
  misc_feature 1..20: note = chemically synthesized
  source 1..20: mol_type = other DNA
tccctccatcaactcaaatt

SEQ ID NO: 32835 - DNA, 20 bp, synthetic construct
  misc_feature 1..20: note = chemically synthesized
  source 1..20: mol_type = other DNA
caactcaaatttggctgaca

SEQ ID NO: 32836 - DNA, 20 bp, synthetic construct
  misc_feature 1..20: note = chemically synthesized
  source 1..20: mol_type = other DNA
aaatttggctgacacagttt

SEQ ID NO: 32837 - DNA, 20 bp, synthetic construct
  misc_feature 1..20: note = chemically synthesized
  source 1..20: mol_type = other DNA
gctgacacagttttggattc

SEQ ID NO: 32838 - DNA, 20 bp, synthetic construct
  misc_feature 1..20: note = chemically synthesized
  source 1..20: mol_type = other DNA
tgacacagttttggattcta

SEQ ID NO: 32839 - DNA, 20 bp, synthetic construct
  misc_feature 1..20: note = chemically synthesized
  source 1..20: mol_type = other DNA
gttttggattctagagcatg

SEQ ID NO: 32840 - DNA, 20 bp, synthetic construct
  misc_feature 1..20: note = chemically synthesized
  source 1..20: mol_type = other DNA
ttttggattctagagcatgc

SEQ ID NO: 32841 - DNA, 20 bp, synthetic construct
  misc_feature 1..20: note = chemically synthesized
  source 1..20: mol_type = other DNA
tttgcactcactcttccctc

SEQ ID NO: 32842 - DNA, 20 bp, synthetic construct
  misc_feature 1..20: note = chemically synthesized
  source 1..20: mol_type = other DNA
cccgtccttcctcactttgc

SEQ ID NO: 32843 - DNA, 20 bp, synthetic construct
  misc_feature 1..20: note = chemically synthesized
  source 1..20: mol_type = other DNA
ccagttccaacttctctctg

SEQ ID NO: 32844 - DNA, 20 bp, synthetic construct
  misc_feature 1..20: note = chemically synthesized
  source 1..20: mol_type = other DNA
ccaacttctctctgaagact

SEQ ID NO: 32845 - DNA, 20 bp, synthetic construct
  misc_feature 1..20: note = chemically synthesized
  source 1..20: mol_type = other DNA
ttctctctgaagactcagtt

SEQ ID NO: 32846 - DNA, 20 bp, synthetic construct
  misc_feature 1..20: note = chemically synthesized
  source 1..20: mol_type = other DNA
tctctctgaagactcagttt

SEQ ID NO: 32847 - DNA, 20 bp, synthetic construct
  misc_feature 1..20: note = chemically synthesized
  source 1..20: mol_type = other DNA
ctgaagactcagtttaggta

SEQ ID NO: 32848 - DNA, 20 bp, synthetic construct
  misc_feature 1..20: note = chemically synthesized
  source 1..20: mol_type = other DNA
tgaagactcagtttaggtac

SEQ ID NO: 32849 - DNA, 20 bp, synthetic construct
  misc_feature 1..20: note = chemically synthesized
  source 1..20: mol_type = other DNA
agtttaggtacaggctcctt

SEQ ID NO: 32850 - DNA, 20 bp, synthetic construct
  misc_feature 1..20: note = chemically synthesized
  source 1..20: mol_type = other DNA
gtttaggtacaggctccttt

SEQ ID NO: 32851 - DNA, 20 bp, synthetic construct
  misc_feature 1..20: note = chemically synthesized
  source 1..20: mol_type = other DNA
aatttttttttgactctacc

SEQ ID NO: 32852 - DNA, 20 bp, synthetic construct
  misc_feature 1..20: note = chemically synthesized
  source 1..20: mol_type = other DNA
ttttttgactctacctagcc

SEQ ID NO: 32853 - DNA, 20 bp, synthetic construct
  misc_feature 1..20: note = chemically synthesized
  source 1..20: mol_type = other DNA
gactctacctagcccagact

SEQ ID NO: 32854 - DNA, 20 bp, synthetic construct
  misc_feature 1..20: note = chemically synthesized
  source 1..20: mol_type = other DNA
tcatctacgatattaatctg

SEQ ID NO: 32855 - DNA, 20 bp, synthetic construct
  misc_feature 1..20: note = chemically synthesized
  source 1..20: mol_type = other DNA
taatctgcagtgtcatgcac

SEQ ID NO: 32856 - DNA, 20 bp, synthetic construct
  misc_feature 1..20: note = chemically synthesized
  source 1..20: mol_type = other DNA
acaaaatatttgctgaatga

SEQ ID NO: 32857 - DNA, 20 bp, synthetic construct
  misc_feature 1..20: note = chemically synthesized
  source 1..20: mol_type = other DNA
tatttgctgaatgaaagaat

SEQ ID NO: 32858 - DNA, 20 bp, synthetic construct
  misc_feature 1..20: note = chemically synthesized
  source 1..20: mol_type = other DNA
tttgctgaatgaaagaatga

SEQ ID NO: 32859 - DNA, 20 bp, synthetic construct
  misc_feature 1..20: note = chemically synthesized
  source 1..20: mol_type = other DNA
aaagaatgagagttaacttt

SEQ ID NO: 32860 - DNA, 20 bp, synthetic construct
  misc_feature 1..20: note = chemically synthesized
  source 1..20: mol_type = other DNA
aatgagagttaacttttagt

SEQ ID NO: 32861 - DNA, 20 bp, synthetic construct
  misc_feature 1..20: note = chemically synthesized
  source 1..20: mol_type = other DNA
atgagagttaacttttagtc

SEQ ID NO: 32862 - DNA, 20 bp, synthetic construct
  misc_feature 1..20: note = chemically synthesized
  source 1..20: mol_type = other DNA
ttaacttttagtcaggcata

SEQ ID NO: 32863 - DNA, 20 bp, synthetic construct
  misc_feature 1..20: note = chemically synthesized
  source 1..20: mol_type = other DNA
ggcataaagataaaaaacca

SEQ ID NO: 32864 - DNA, 20 bp, synthetic construct
  misc_feature 1..20: note = chemically synthesized
  source 1..20: mol_type = other DNA
aaaaccaaagtcttttactc

SEQ ID NO: 32865 - DNA, 20 bp, synthetic construct
  misc_feature 1..20: note = chemically synthesized
  source 1..20: mol_type = other DNA
caaagtcttttactccggtg

SEQ ID NO: 32866 - DNA, 20 bp, synthetic construct
  misc_feature 1..20: note = chemically synthesized
  source 1..20: mol_type = other DNA
aagtcttttactccggtgtg

SEQ ID NO: 32867 - DNA, 20 bp, synthetic construct
  misc_feature 1..20: note = chemically synthesized
  source 1..20: mol_type = other DNA
actccggtgtggagtgtttt

SEQ ID NO: 32868 - DNA, 20 bp, synthetic construct
  misc_feature 1..20: note = chemically synthesized
  source 1..20: mol_type = other DNA
ctccggtgtggagtgttttc

SEQ ID NO: 32869 - DNA, 20 bp, synthetic construct
  misc_feature 1..20: note = chemically synthesized
  source 1..20: mol_type = other DNA
ttttcaggattcctaccaat

SEQ ID NO: 32870 - DNA, 20 bp, synthetic construct
  misc_feature 1..20: note = chemically synthesized
  source 1..20: mol_type = other DNA
tttcaggattcctaccaatt

SEQ ID NO: 32871 - DNA, 20 bp, synthetic construct
  misc_feature 1..20: note = chemically synthesized
  source 1..20: mol_type = other DNA
caggattcctaccaattagg

SEQ ID NO: 32872 - DNA, 20 bp, synthetic construct
  misc_feature 1..20: note = chemically synthesized
  source 1..20: mol_type = other DNA
aggattcctaccaattagga

SEQ ID NO: 32873 - DNA, 20 bp, synthetic construct
  misc_feature 1..20: note = chemically synthesized
  source 1..20: mol_type = other DNA
ggtgtttgattcttcaaact

SEQ ID NO: 32874 - DNA, 20 bp, synthetic construct
  misc_feature 1..20: note = chemically synthesized
  source 1..20: mol_type = other DNA
aaacacctccccttaactga

SEQ ID NO: 32875 - DNA, 20 bp, synthetic construct
  misc_feature 1..20: note = chemically synthesized
  source 1..20: mol_type = other DNA
actgatggattcttcaaact

SEQ ID NO: 32876 - DNA, 20 bp, synthetic construct
  misc_feature 1..20: note = chemically synthesized
  source 1..20: mol_type = other DNA
ggattcttcaaactcagcat

SEQ ID NO: 32877 - DNA, 20 bp, synthetic construct
  misc_feature 1..20: note = chemically synthesized
  source 1..20: mol_type = other DNA
tcttcaaactcagcatcagt

SEQ ID NO: 32878 - DNA, 20 bp, synthetic construct
  misc_feature 1..20: note = chemically synthesized
  source 1..20: mol_type = other DNA
ttcaaactcagcatcagtta

SEQ ID NO: 32879 - DNA, 20 bp, synthetic construct
  misc_feature 1..20: note = chemically synthesized
  source 1..20: mol_type = other DNA
tcaaactcagcatcagttag

SEQ ID NO: 32880 - DNA, 20 bp, synthetic construct
  misc_feature 1..20: note = chemically synthesized
  source 1..20: mol_type = other DNA
caaactcagcatcagttaga

SEQ ID NO: 32881 - DNA, 20 bp, synthetic construct
  misc_feature 1..20: note = chemically synthesized
  source 1..20: mol_type = other DNA
cagcatcagttagagggcat

SEQ ID NO: 32882 - DNA, 20 bp, synthetic construct
  misc_feature 1..20: note = chemically synthesized
  source 1..20: mol_type = other DNA
agcatcagttagagggcatt

SEQ ID NO: 32883 - DNA, 20 bp, synthetic construct
  misc_feature 1..20: note = chemically synthesized
  source 1..20: mol_type = other DNA
gcatcagttagagggcatta

SEQ ID NO: 32884 - DNA, 20 bp, synthetic construct
  misc_feature 1..20: note = chemically synthesized
  source 1..20: mol_type = other DNA
cacttctcaaaccctgcatt

SEQ ID NO: 32885 - DNA, 20 bp, synthetic construct
  misc_feature 1..20: note = chemically synthesized
  source 1..20: mol_type = other DNA
acttctcaaaccctgcattc

SEQ ID NO: 32886 - DNA, 20 bp, synthetic construct
  misc_feature 1..20: note = chemically synthesized
  source 1..20: mol_type = other DNA
cttctcaaaccctgcattca

SEQ ID NO: 32887 - DNA, 20 bp, synthetic construct
  misc_feature 1..20: note = chemically synthesized
  source 1..20: mol_type = other DNA
ctcaaaccctgcattcaggg

SEQ ID NO: 32888 - DNA, 20 bp, synthetic construct
  misc_feature 1..20: note = chemically synthesized
  source 1..20: mol_type = other DNA
ttcagggaagatgtctgttg

SEQ ID NO: 32889 - DNA, 20 bp, synthetic construct
  misc_feature 1..20: note = chemically synthesized
  source 1..20: mol_type = other DNA
tcagggaagatgtctgttgt

SEQ ID NO: 32890 - DNA, 20 bp, synthetic construct
  misc_feature 1..20: note = chemically synthesized
  source 1..20: mol_type = other DNA
cagggaagatgtctgttgtg

SEQ ID NO: 32891 - DNA, 20 bp, synthetic construct
  misc_feature 1..20: note = chemically synthesized
  source 1..20: mol_type = other DNA
ggaagatgtctgttgtgggg

SEQ ID NO: 32892 - DNA, 20 bp, synthetic construct
  misc_feature 1..20: note = chemically synthesized
  source 1..20: mol_type = other DNA
atgtctgttgtggggtggtc

SEQ ID NO: 32893 - DNA, 20 bp, synthetic construct
  misc_feature 1..20: note = chemically synthesized
  source 1..20: mol_type = other DNA
gtggggtggtctggcctact

SEQ ID NO: 32894 - DNA, 20 bp, synthetic construct
  misc_feature 1..20: note = chemically synthesized
  source 1..20: mol_type = other DNA
tggtctggcctacttggcct

SEQ ID NO: 32895 - DNA, 20 bp, synthetic construct
  misc_feature 1..20: note = chemically synthesized
  source 1..20: mol_type = other DNA
tggcctacttggcctgagcc

SEQ ID NO: 32896 - DNA, 20 bp, synthetic construct
  misc_feature 1..20: note = chemically synthesized
  source 1..20: mol_type = other DNA
ggcctacttggcctgagcca

SEQ ID NO: 32897 - DNA, 20 bp, synthetic construct
  misc_feature 1..20: note = chemically synthesized
  source 1..20: mol_type = other DNA
cttggcctgagccaaggttc

SEQ ID NO: 32898 - DNA, 20 bp, synthetic construct
  misc_feature 1..20: note = chemically synthesized
  source 1..20: mol_type = other DNA
ttggcctgagccaaggttct

SEQ ID NO: 32899 - DNA, 20 bp, synthetic construct
  misc_feature 1..20: note = chemically synthesized
  source 1..20: mol_type = other DNA
gcctgagccaaggttctggg

SEQ ID NO: 32900 - DNA, 20 bp, synthetic construct
  misc_feature 1..20: note = chemically synthesized
  source 1..20: mol_type = other DNA
aggttctgggcagttctgtt

SEQ ID NO: 32901 - DNA, 20 bp, synthetic construct
  misc_feature 1..20: note = chemically synthesized
  source 1..20: mol_type = other DNA
cagttacacatgcatgcgtt

SEQ ID NO: 32902 - DNA, 20 bp, synthetic construct
  misc_feature 1..20: note = chemically synthesized
  source 1..20: mol_type = other DNA
catgcgttgagcattgattc

SEQ ID NO: 32903 - DNA, 20 bp, synthetic construct
  misc_feature 1..20: note = chemically synthesized
  source 1..20: mol_type = other DNA
gttgagcattgattcaagcc

SEQ ID NO: 32904 - DNA, 20 bp, synthetic construct
  misc_feature 1..20: note = chemically synthesized
  source 1..20: mol_type = other DNA
gcattgattcaagcctggcc

SEQ ID NO: 32905 - DNA, 20 bp, synthetic construct
  misc_feature 1..20: note = chemically synthesized
  source 1..20: mol_type = other DNA
cattgattcaagcctggcct

SEQ ID NO: 32906 - DNA, 20 bp, synthetic construct
  misc_feature 1..20: note = chemically synthesized
  source 1..20: mol_type = other DNA
ttcaagcctggcctgggcac

SEQ ID NO: 32907 - DNA, 20 bp, synthetic construct
  misc_feature 1..20: note = chemically synthesized
  source 1..20: mol_type = other DNA
tcaagcctggcctgggcact

SEQ ID NO: 32908 - DNA, 20 bp, synthetic construct
  misc_feature 1..20: note = chemically synthesized
  source 1..20: mol_type = other DNA
cctggcctgggcactaggca

SEQ ID NO: 32909 - DNA, 20 bp, synthetic construct
  misc_feature 1..20: note = chemically synthesized
  source 1..20: mol_type = other DNA
ctgggcactaggcatggttt

SEQ ID NO: 32910 - DNA, 20 bp, synthetic construct
  misc_feature 1..20: note = chemically synthesized
  source 1..20: mol_type = other DNA
ctaggcatggttttagatat

SEQ ID NO: 32911 - DNA, 20 bp, synthetic construct
  misc_feature 1..20: note = chemically synthesized
  source 1..20: mol_type = other DNA
taggcatggttttagatatt

SEQ ID NO: 32912 - DNA, 20 bp, synthetic construct
  misc_feature 1..20: note = chemically synthesized
  source 1..20: mol_type = other DNA
aggcatggttttagatatta

SEQ ID NO: 32913 - DNA, 20 bp, synthetic construct
  misc_feature 1..20: note = chemically synthesized
  source 1..20: mol_type = other DNA
tattctgttttccttgcctt

SEQ ID NO: 32914 - DNA, 20 bp, synthetic construct
  misc_feature 1..20: note = chemically synthesized
  source 1..20: mol_type = other DNA
ttttccttgccttaagatac

SEQ ID NO: 32915 - DNA, 20 bp, synthetic construct
  misc_feature 1..20: note = chemically synthesized
  source 1..20: mol_type = other DNA
cttgccttaagataccagtc

SEQ ID NO: 32916 - DNA, 20 bp, synthetic construct
  misc_feature 1..20: note = chemically synthesized
  source 1..20: mol_type = other DNA
gccttaagataccagtctag

SEQ ID NO: 32917 - DNA, 20 bp, synthetic construct
  misc_feature 1..20: note = chemically synthesized
  source 1..20: mol_type = other DNA
ccttaagataccagtctagt

SEQ ID NO: 32918 - DNA, 20 bp, synthetic construct
  misc_feature 1..20: note = chemically synthesized
  source 1..20: mol_type = other DNA
ttaagataccagtctagtag

SEQ ID NO: 32919 - DNA, 20 bp, synthetic construct
  misc_feature 1..20: note = chemically synthesized
  source 1..20: mol_type = other DNA
ccagtctagtaggagccact

SEQ ID NO: 32920 - DNA, 20 bp, synthetic construct
  misc_feature 1..20: note = chemically synthesized
  source 1..20: mol_type = other DNA
cagtctagtaggagccacta

SEQ ID NO: 32921 - DNA, 20 bp, synthetic construct
  misc_feature 1..20: note = chemically synthesized
  source 1..20: mol_type = other DNA
agccactaaggccccttttt

SEQ ID NO: 32922 - DNA, 20 bp, synthetic construct
  misc_feature 1..20: note = chemically synthesized
  source 1..20: mol_type = other DNA
ctaaggcccctttttgagcc

SEQ ID NO: 32923 - DNA, 20 bp, synthetic construct
  misc_feature 1..20: note = chemically synthesized
  source 1..20: mol_type = other DNA
aacataccctgcttctaatc

SEQ ID NO: 32924 - DNA, 20 bp, synthetic construct
  misc_feature 1..20: note = chemically synthesized
  source 1..20: mol_type = other DNA
cttctaatcaagtcatctat

SEQ ID NO: 32925 - DNA, 20 bp, synthetic construct
  misc_feature 1..20: note = chemically synthesized
  source 1..20: mol_type = other DNA
ctaatcaagtcatctattgg

SEQ ID NO: 32926 - DNA, 20 bp, synthetic construct
  misc_feature 1..20: note = chemically synthesized
  source 1..20: mol_type = other DNA
tcatctattggcagtgacct

SEQ ID NO: 32927 - DNA, 20 bp, synthetic construct
  misc_feature 1..20: note = chemically synthesized
  source 1..20: mol_type = other DNA
catctattggcagtgacctt

SEQ ID NO: 32928 - DNA, 20 bp, synthetic construct
  misc_feature 1..20: note = chemically synthesized
  source 1..20: mol_type = other DNA
cagtgaccttgggcaaatca

SEQ ID NO: 32929 - DNA, 20 bp, synthetic construct
  misc_feature 1..20: note = chemically synthesized
  source 1..20: mol_type = other DNA
gggcaaatcatagtctctcc

SEQ ID NO: 32930 - DNA, 20 bp, synthetic construct
  misc_feature 1..20: note = chemically synthesized
  source 1..20: mol_type = other DNA
attacttttctaattgaaac

SEQ ID NO: 32931 - DNA, 20 bp, synthetic construct
  misc_feature 1..20: note = chemically synthesized
  source 1..20: mol_type = other DNA
aagaacctctctctataccc

SEQ ID NO: 32932 - DNA, 20 bp, synthetic construct
  misc_feature 1..20: note = chemically synthesized
  source 1..20: mol_type = other DNA
ctataccccagatttatttt

SEQ ID NO: 32933 - DNA, 20 bp, synthetic construct
  misc_feature 1..20: note = chemically synthesized
  source 1..20: mol_type = other DNA
tataccccagatttattttg

SEQ ID NO: 32934 - DNA, 20 bp, synthetic construct
  misc_feature 1..20: note = chemically synthesized
  source 1..20: mol_type = other DNA
agatttattttgaggattat

SEQ ID NO: 32935 - DNA, 20 bp, synthetic construct
  misc_feature 1..20: note = chemically synthesized
  source 1..20: mol_type = other DNA
gaggattatgagttaattca

SEQ ID NO: 32936 - DNA, 20 bp, synthetic construct
  misc_feature 1..20: note = chemically synthesized
  source 1..20: mol_type = other DNA
taattcatagctaaaatgct

SEQ ID NO: 32937 - DNA, 20 bp, synthetic construct
  misc_feature 1..20: note = chemically synthesized
  source 1..20: mol_type = other DNA
ctaaaatgcttagcacctaa

SEQ ID NO: 32938 - DNA, 20 bp, synthetic construct
  misc_feature 1..20: note = chemically synthesized
  source 1..20: mol_type = other DNA
ttcaattgcgtattactaaa

SEQ ID NO: 32939 - DNA, 20 bp, synthetic construct
  misc_feature 1..20: note = chemically synthesized
  source 1..20: mol_type = other DNA
aattgcgtattactaaaaag

SEQ ID NO: 32940 - DNA, 20 bp, synthetic construct
  misc_feature 1..20: note = chemically synthesized
  source 1..20: mol_type = other DNA
attgcgtattactaaaaaga

SEQ ID NO: 32941 - DNA, 20 bp, synthetic construct
  misc_feature 1..20: note = chemically synthesized
  source 1..20: mol_type = other DNA
aaaaagaaggaatgatttcc

SEQ ID NO: 32942 - DNA, 20 bp, synthetic construct
  misc_feature 1..20: note = chemically synthesized
  source 1..20: mol_type = other DNA
aaagaaggaatgatttccta

SEQ ID NO: 32943 - DNA, 20 bp, synthetic construct
  misc_feature 1..20: note = chemically synthesized
  source 1..20: mol_type = other DNA
aagaaggaatgatttcctag

SEQ ID NO: 32944 - DNA, 20 bp, synthetic construct
  misc_feature 1..20: note = chemically synthesized
  source 1..20: mol_type = other DNA
gaaggaatgatttcctagag

SEQ ID NO: 32945 - DNA, 20 bp, synthetic construct
  misc_feature 1..20: note = chemically synthesized
  source 1..20: mol_type = other DNA
aaggaatgatttcctagagg

SEQ ID NO: 32946 - DNA, 20 bp, synthetic construct
  misc_feature 1..20: note = chemically synthesized
  source 1..20: mol_type = other DNA
cctagaggaggtgcttcttc

SEQ ID NO: 32947 - DNA, 20 bp, synthetic construct
  misc_feature 1..20: note = chemically synthesized
  source 1..20: mol_type = other DNA
aggaggtgcttcttctggcc

SEQ ID NO: 32948 - DNA, 20 bp, synthetic construct
  misc_feature 1..20: note = chemically synthesized
  source 1..20: mol_type = other DNA
ggaggtgcttcttctggcca

SEQ ID NO: 32949 - DNA, 20 bp, synthetic construct
  misc_feature 1..20: note = chemically synthesized
  source 1..20: mol_type = other DNA
gaggtgcttcttctggccaa

SEQ ID NO: 32950 - DNA, 20 bp, synthetic construct
  misc_feature 1..20: note = chemically synthesized
  source 1..20: mol_type = other DNA
cttctggccaagggctgatt

SEQ ID NO: 32951 - DNA, 20 bp, synthetic construct
  misc_feature 1..20: note = chemically synthesized
  source 1..20: mol_type = other DNA
tctggccaagggctgattca

SEQ ID NO: 32952 - DNA, 20 bp, synthetic construct
  misc_feature 1..20: note = chemically synthesized
  source 1..20: mol_type = other DNA
cagagccttaattaactaaa

SEQ ID NO: 32953 - DNA, 20 bp, synthetic construct
  misc_feature 1..20: note = chemically synthesized
  source 1..20: mol_type = other DNA
cttaattaactaaatagatc

SEQ ID NO: 32954 - DNA, 20 bp, synthetic construct
  misc_feature 1..20: note = chemically synthesized
  source 1..20: mol_type = other DNA
atagatcaagcatatctaac

SEQ ID NO: 32955 - DNA, 20 bp, synthetic construct
  misc_feature 1..20: note = chemically synthesized
  source 1..20: mol_type = other DNA
aagcatatctaactggtcac

SEQ ID NO: 32956 - DNA, 20 bp, synthetic construct
  misc_feature 1..20: note = chemically synthesized
  source 1..20: mol_type = other DNA
catatctaactggtcaccgg

SEQ ID NO: 32957 - DNA, 20 bp, synthetic construct
  misc_feature 1..20: note = chemically synthesized
  source 1..20: mol_type = other DNA
atctaactggtcaccggaag

SEQ ID NO: 32958 - DNA, 20 bp, synthetic construct
  misc_feature 1..20: note = chemically synthesized
  source 1..20: mol_type = other DNA
ggtcaccggaagtggtccat

SEQ ID NO: 32959 - DNA, 20 bp, synthetic construct
  misc_feature 1..20: note = chemically synthesized
  source 1..20: mol_type = other DNA
gtcaccggaagtggtccatg

SEQ ID NO: 32960 - DNA, 20 bp, synthetic construct
  misc_feature 1..20: note = chemically synthesized
  source 1..20: mol_type = other DNA
ggaagtggtccatgaggctg

SEQ ID NO: 32961 - DNA, 20 bp, synthetic construct
  misc_feature 1..20: note = chemically synthesized
  source 1..20: mol_type = other DNA
ggtccatgaggctgcagcaa

SEQ ID NO: 32962 - DNA, 20 bp, synthetic construct
  misc_feature 1..20: note = chemically synthesized
  source 1..20: mol_type = other DNA
gtccatgaggctgcagcaat

SEQ ID NO: 32963 - DNA, 20 bp, synthetic construct
  misc_feature 1..20: note = chemically synthesized
  source 1..20: mol_type = other DNA
catgaggctgcagcaatggg

SEQ ID NO: 32964 - DNA, 20 bp, synthetic construct
  misc_feature 1..20: note = chemically synthesized
  source 1..20: mol_type = other DNA
atgaggctgcagcaatggga

SEQ ID NO: 32965 - DNA, 20 bp, synthetic construct
  misc_feature 1..20: note = chemically synthesized
  source 1..20: mol_type = other DNA
ctgcagcaatgggaaggtgt

SEQ ID NO: 32966 - DNA, 20 bp, synthetic construct
  misc_feature 1..20: note = chemically synthesized
  source 1..20: mol_type = other DNA
gcagcaatgggaaggtgtca

SEQ ID NO: 32967 - DNA, 20 bp, synthetic construct
  misc_feature 1..20: note = chemically synthesized
  source 1..20: mol_type = other DNA
gcaatgggaaggtgtcagag

SEQ ID NO: 32968 - DNA, 20 bp, synthetic construct
  misc_feature 1..20: note = chemically synthesized
  source 1..20: mol_type = other DNA
caatgggaaggtgtcagagc

SEQ ID NO: 32969 - DNA, 20 bp, synthetic construct
  misc_feature 1..20: note = chemically synthesized
  source 1..20: mol_type = other DNA
aatgggaaggtgtcagagca

SEQ ID NO: 32970 - DNA, 20 bp, synthetic construct
  misc_feature 1..20: note = chemically synthesized
  source 1..20: mol_type = other DNA
atgggaaggtgtcagagcag

SEQ ID NO: 32971 - DNA, 20 bp, synthetic construct
  misc_feature 1..20: note = chemically synthesized
  source 1..20: mol_type = other DNA
gaaggtgtcagagcaggggt

SEQ ID NO: 32972 - DNA, 20 bp, synthetic construct
  misc_feature 1..20: note = chemically synthesized
  source 1..20: mol_type = other DNA
aaggtgtcagagcaggggtt

SEQ ID NO: 32973 - DNA, 20 bp, synthetic construct
  misc_feature 1..20: note = chemically synthesized
  source 1..20: mol_type = other DNA
tcagagcaggggttgggaaa

SEQ ID NO: 32974 - DNA, 20 bp, synthetic construct
  misc_feature 1..20: note = chemically synthesized
  source 1..20: mol_type = other DNA
caggggttgggaaaaagaca

SEQ ID NO: 32975 - DNA, 20 bp, synthetic construct
  misc_feature 1..20: note = chemically synthesized
  source 1..20: mol_type = other DNA
ggggttgggaaaaagacata

SEQ ID NO: 32976 - DNA, 20 bp, synthetic construct
  misc_feature 1..20: note = chemically synthesized
  source 1..20: mol_type = other DNA
ggttgggaaaaagacataga

SEQ ID NO: 32977 - DNA, 20 bp, synthetic construct
  misc_feature 1..20: note = chemically synthesized
  source 1..20: mol_type = other DNA
gagagaaacgtgcatgtccg

SEQ ID NO: 32978 - DNA, 20 bp, synthetic construct
  misc_feature 1..20: note = chemically synthesized
  source 1..20: mol_type = other DNA
agaaacgtgcatgtccgtag

SEQ ID NO: 32979 - DNA, 20 bp, synthetic construct
  misc_feature 1..20: note = chemically synthesized
  source 1..20: mol_type = other DNA
aaacgtgcatgtccgtagtg

SEQ ID NO: 32980 - DNA, 20 bp, synthetic construct
  misc_feature 1..20: note = chemically synthesized
  source 1..20: mol_type = other DNA
aacgtgcatgtccgtagtgg

SEQ ID NO: 32981 - DNA, 20 bp, synthetic construct
  misc_feature 1..20: note = chemically synthesized
  source 1..20: mol_type = other DNA
acgtgcatgtccgtagtgga

SEQ ID NO: 32982 - DNA, 20 bp, synthetic construct
  misc_feature 1..20: note = chemically synthesized
  source 1..20: mol_type = other DNA
cgtgcatgtccgtagtggag

SEQ ID NO: 32983 - DNA, 20 bp, synthetic construct
  misc_feature 1..20: note = chemically synthesized
  source 1..20: mol_type = other DNA
tgcatgtccgtagtggaggg

SEQ ID NO: 32984 - DNA, 20 bp, synthetic construct
  misc_feature 1..20: note = chemically synthesized
  source 1..20: mol_type = other DNA
ccgtagtggaggggagctct

SEQ ID NO: 32985 - DNA, 20 bp, synthetic construct
  misc_feature 1..20: note = chemically synthesized
  source 1..20: mol_type = other DNA
cgtagtggaggggagctctt

SEQ ID NO: 32986 - DNA, 20 bp, synthetic construct
  misc_feature 1..20: note = chemically synthesized
  source 1..20: mol_type = other DNA
gggagctcttaggatgtcta

SEQ ID NO: 32987 - DNA, 20 bp, synthetic construct
  misc_feature 1..20: note = chemically synthesized
  source 1..20: mol_type = other DNA
taggatgtctacagatttcc

SEQ ID NO: 32988 - DNA, 20 bp, synthetic construct
  misc_feature 1..20: note = chemically synthesized
  source 1..20: mol_type = other DNA
gacaataattgaaatgaaca

SEQ ID NO: 32989 - DNA, 20 bp, synthetic construct
  misc_feature 1..20: note = chemically synthesized
  source 1..20: mol_type = other DNA
acaataattgaaatgaacaa

SEQ ID NO: 32990 - DNA, 20 bp, synthetic construct
  misc_feature 1..20: note = chemically synthesized
  source 1..20: mol_type = other DNA
taattgaaatgaacaaaggc

SEQ ID NO: 32991 - DNA, 20 bp, synthetic construct
  misc_feature 1..20: note = chemically synthesized
  source 1..20: mol_type = other DNA
aattgaaatgaacaaaggca

SEQ ID NO: 32992 - DNA, 20 bp, synthetic construct
  misc_feature 1..20: note = chemically synthesized
  source 1..20: mol_type = other DNA
attgaaatgaacaaaggcaa

SEQ ID NO: 32993 - DNA, 20 bp, synthetic construct
  misc_feature 1..20: note = chemically synthesized
  source 1..20: mol_type = other DNA
aaaggcaagggatgaccaat

SEQ ID NO: 32994 - DNA, 20 bp, synthetic construct
  misc_feature 1..20: note = chemically synthesized
  source 1..20: mol_type = other DNA
aggcaagggatgaccaataa

SEQ ID NO: 32995 - DNA, 20 bp, synthetic construct
  misc_feature 1..20: note = chemically synthesized
  source 1..20: mol_type = other DNA
atcacctttcccttgttctt

SEQ ID NO: 32996 - DNA, 20 bp, synthetic construct
  misc_feature 1..20: note = chemically synthesized
  source 1..20: mol_type = other DNA
tttcccttgttcttcagctc

SEQ ID NO: 32997 - DNA, 20 bp, synthetic construct
  misc_feature 1..20: note = chemically synthesized
  source 1..20: mol_type = other DNA
ttcagctccagctgtgccca

SEQ ID NO: 32998 - DNA, 20 bp, synthetic construct
  misc_feature 1..20: note = chemically synthesized
  source 1..20: mol_type = other DNA
agctgtgcccacagacacca

SEQ ID NO: 32999 - DNA, 20 bp, synthetic construct
  misc_feature 1..20: note = chemically synthesized
  source 1..20: mol_type = other DNA
gctgtgcccacagacaccac

SEQ ID NO: 33000 - DNA, 20 bp, synthetic construct
  misc_feature 1..20: note = chemically synthesized
  source 1..20: mol_type = other DNA
ctgtgcccacagacaccaca

SEQ ID NO: 33001 - DNA, 20 bp, synthetic construct
  misc_feature 1..20: note = chemically synthesized
  source 1..20: mol_type = other DNA
tgcccacagacaccacaggg

SEQ ID NO: 33002 - DNA, 20 bp, synthetic construct
  misc_feature 1..20: note = chemically synthesized
  source 1..20: mol_type = other DNA
cacagggaagcctctgaaca

SEQ ID NO: 33003 - DNA, 20 bp, synthetic construct
  misc_feature 1..20: note = chemically synthesized
  source 1..20: mol_type = other DNA
acagggaagcctctgaacac

SEQ ID NO: 33004 - DNA, 20 bp, synthetic construct
  misc_feature 1..20: note = chemically synthesized
  source 1..20: mol_type = other DNA
cagggaagcctctgaacaca

SEQ ID NO: 33005 - DNA, 20 bp, synthetic construct
  misc_feature 1..20: note = chemically synthesized
  source 1..20: mol_type = other DNA
agggaagcctctgaacacag

SEQ ID NO: 33006 - DNA, 20 bp, synthetic construct
  misc_feature 1..20: note = chemically synthesized
  source 1..20: mol_type = other DNA
ctgaacacaggggtttgaac

SEQ ID NO: 33007 - DNA, 20 bp, synthetic construct
  misc_feature 1..20: note = chemically synthesized
  source 1..20: mol_type = other DNA
tgaacacaggggtttgaacc

SEQ ID NO: 33008 - DNA, 20 bp, synthetic construct
  misc_feature 1..20: note = chemically synthesized
  source 1..20: mol_type = other DNA
gaacacaggggtttgaacca

SEQ ID NO: 33009 - DNA, 20 bp, synthetic construct
  misc_feature 1..20: note = chemically synthesized
  source 1..20: mol_type = other DNA
gtttgaaccagggcctctct

SEQ ID NO: 33010 - DNA, 20 bp, synthetic construct
  misc_feature 1..20: note = chemically synthesized
  source 1..20: mol_type = other DNA
tttccaactctgataccctg

SEQ ID NO: 33011 - DNA, 20 bp, synthetic construct
  misc_feature 1..20: note = chemically synthesized
  source 1..20: mol_type = other DNA
ctctgataccctgaagttct

SEQ ID NO: 33012 - DNA, 20 bp, synthetic construct
  misc_feature 1..20: note = chemically synthesized
  source 1..20: mol_type = other DNA
tcagaaacttccataaattt

SEQ ID NO: 33013 - DNA, 20 bp, synthetic construct
  misc_feature 1..20: note = chemically synthesized
  source 1..20: mol_type = other DNA
acttccataaattttggctg

SEQ ID NO: 33014 - DNA, 20 bp, synthetic construct
  misc_feature 1..20: note = chemically synthesized
  source 1..20: mol_type = other DNA
tccataaattttggctgaag

SEQ ID NO: 33015 - DNA, 20 bp, synthetic construct
  misc_feature 1..20: note = chemically synthesized
  source 1..20: mol_type = other DNA
aattttggctgaagaagcca

SEQ ID NO: 33016 - DNA, 20 bp, synthetic construct
  misc_feature 1..20: note = chemically synthesized
  source 1..20: mol_type = other DNA
agaagccatagcaaacttgt

SEQ ID NO: 33017 - DNA, 20 bp, synthetic construct
  misc_feature 1..20: note = chemically synthesized
  source 1..20: mol_type = other DNA
gccatagcaaacttgtcaga

SEQ ID NO: 33018 - DNA, 20 bp, synthetic construct
  misc_feature 1..20: note = chemically synthesized
  source 1..20: mol_type = other DNA
atggtttcttacctttaact

SEQ ID NO: 33019 - DNA, 20 bp, synthetic construct
  misc_feature 1..20: note = chemically synthesized
  source 1..20: mol_type = other DNA
ttttctctctcctctatgtg

SEQ ID NO: 33020 - DNA, 20 bp, synthetic construct
  misc_feature 1..20: note = chemically synthesized
  source 1..20: mol_type = other DNA
tcctctatgtgtggtgactt

SEQ ID NO: 33021 - DNA, 20 bp, synthetic construct
  misc_feature 1..20: note = chemically synthesized
  source 1..20: mol_type = other DNA
cctctatgtgtggtgacttc

SEQ ID NO: 33022 - DNA, 20 bp, synthetic construct
  misc_feature 1..20: note = chemically synthesized
  source 1..20: mol_type = other DNA
tgtggtgacttcaggaaacc

SEQ ID NO: 33023 - DNA, 20 bp, synthetic construct
  misc_feature 1..20: note = chemically synthesized
  source 1..20: mol_type = other DNA
gtggtgacttcaggaaaccc

SEQ ID NO: 33024 - DNA, 20 bp, synthetic construct
  misc_feature 1..20: note = chemically synthesized
  source 1..20: mol_type = other DNA
gacttcaggaaacccaggcc

SEQ ID NO: 33025 - DNA, 20 bp, synthetic construct
  misc_feature 1..20: note = chemically synthesized
  source 1..20: mol_type = other DNA
cttcaggaaacccaggccca

SEQ ID NO: 33026 - DNA, 20 bp, synthetic construct
  misc_feature 1..20: note = chemically synthesized
  source 1..20: mol_type = other DNA
ttcaggaaacccaggcccag

SEQ ID NO: 33027 - DNA, 20 bp, synthetic construct
  misc_feature 1..20: note = chemically synthesized
  source 1..20: mol_type = other DNA
acccaggcccagaggatata

SEQ ID NO: 33028 - DNA, 20 bp, synthetic construct
  misc_feature 1..20: note = chemically synthesized
  source 1..20: mol_type = other DNA
ttctccttcaaaccactctt

SEQ ID NO: 33029 - DNA, 20 bp, synthetic construct
  misc_feature 1..20: note = chemically synthesized
  source 1..20: mol_type = other DNA
aaaccactctttggatattc

SEQ ID NO: 33030 - DNA, 20 bp, synthetic construct
  misc_feature 1..20: note = chemically synthesized
  source 1..20: mol_type = other DNA
actgcttcactgcgcttcac

SEQ ID NO: 33031 - DNA, 20 bp, synthetic construct
  misc_feature 1..20: note = chemically synthesized
  source 1..20: mol_type = other DNA
cttcactgcgcttcactggt

SEQ ID NO: 33032 - DNA, 20 bp, synthetic construct
  misc_feature 1..20: note = chemically synthesized
  source 1..20: mol_type = other DNA
ggtcagtgcgtcactcaaac

SEQ ID NO: 33033 - DNA, 20 bp, synthetic construct
  misc_feature 1..20: note = chemically synthesized
  source 1..20: mol_type = other DNA
gcgtcactcaaactagctga

SEQ ID NO: 33034 - DNA, 20 bp, synthetic construct
  misc_feature 1..20: note = chemically synthesized
  source 1..20: mol_type = other DNA
agaattgtctaactcataca

SEQ ID NO: 33035 - DNA, 20 bp, synthetic construct
  misc_feature 1..20: note = chemically synthesized
  source 1..20: mol_type = other DNA
gaattgtctaactcatacac

SEQ ID NO: 33036 - DNA, 20 bp, synthetic construct
  misc_feature 1..20: note = chemically synthesized
  source 1..20: mol_type = other DNA
aattgtctaactcatacaca

SEQ ID NO: 33037 - DNA, 20 bp, synthetic construct
  misc_feature 1..20: note = chemically synthesized
  source 1..20: mol_type = other DNA
ctaactcatacacagggaca

SEQ ID NO: 33038 - DNA, 20 bp, synthetic construct
  misc_feature 1..20: note = chemically synthesized
  source 1..20: mol_type = other DNA
tcatacacagggacaaagtc

SEQ ID NO: 33039 - DNA, 20 bp, synthetic construct
  misc_feature 1..20: note = chemically synthesized
  source 1..20: mol_type = other DNA
acacagggacaaagtccagc

SEQ ID NO: 33040 - DNA, 20 bp, synthetic construct
  misc_feature 1..20: note = chemically synthesized
  source 1..20: mol_type = other DNA
gtccagcaagcttatttaac

SEQ ID NO: 33041 - DNA, 20 bp, synthetic construct
  misc_feature 1..20: note = chemically synthesized
  source 1..20: mol_type = other DNA
accggttacacaattgcctt

SEQ ID NO: 33042 - DNA, 20 bp, synthetic construct
  misc_feature 1..20: note = chemically synthesized
  source 1..20: mol_type = other DNA
acaattgcctttggttttta

SEQ ID NO: 33043 - DNA, 20 bp, synthetic construct
  misc_feature 1..20: note = chemically synthesized
  source 1..20: mol_type = other DNA
ggtttttacagtttgttcct

SEQ ID NO: 33044 - DNA, 20 bp, synthetic construct
  misc_feature 1..20: note = chemically synthesized
  source 1..20: mol_type = other DNA
agtttgttcctaagtgtttc

SEQ ID NO: 33045 - DNA, 20 bp, synthetic construct
  misc_feature 1..20: note = chemically synthesized
  source 1..20: mol_type = other DNA
tttgttcctaagtgtttcca

SEQ ID NO: 33046 - DNA, 20 bp, synthetic construct
  misc_feature 1..20: note = chemically synthesized
  source 1..20: mol_type = other DNA
ttgttcctaagtgtttccag

SEQ ID NO: 33047 - DNA, 20 bp, synthetic construct
  misc_feature 1..20: note = chemically synthesized
  source 1..20: mol_type = other DNA
cctaagtgtttccagaggct

SEQ ID NO: 33048 - DNA, 20 bp, synthetic construct
  misc_feature 1..20: note = chemically synthesized
  source 1..20: mol_type = other DNA
ggcttggttcctcttcacct

SEQ ID NO: 33049 - DNA, 20 bp, synthetic construct
  misc_feature 1..20: note = chemically synthesized
  source 1..20: mol_type = other DNA
gcttggttcctcttcacctg

SEQ ID NO: 33050 - DNA, 20 bp, synthetic construct
  misc_feature 1..20: note = chemically synthesized
  source 1..20: mol_type = other DNA
tggttcctcttcacctgagg

SEQ ID NO: 33051 - DNA, 20 bp, synthetic construct
  misc_feature 1..20: note = chemically synthesized
  source 1..20: mol_type = other DNA
gttcctcttcacctgaggta

SEQ ID NO: 33052 - DNA, 20 bp, synthetic construct
  misc_feature 1..20: note = chemically synthesized
  source 1..20: mol_type = other DNA
gattgaccaattatttattc

SEQ ID NO: 33053 - DNA, 20 bp, synthetic construct
  misc_feature 1..20: note = chemically synthesized
  source 1..20: mol_type = other DNA
caattatttattccagttaa

SEQ ID NO: 33054 - DNA, 20 bp, synthetic construct
  misc_feature 1..20: note = chemically synthesized
  source 1..20: mol_type = other DNA
ttatttattccagttaaaag

SEQ ID NO: 33055 - DNA, 20 bp, synthetic construct
  misc_feature 1..20: note = chemically synthesized
  source 1..20: mol_type = other DNA
tatttattccagttaaaagt

SEQ ID NO: 33056 - DNA, 20 bp, synthetic construct
  misc_feature 1..20: note = chemically synthesized
  source 1..20: mol_type = other DNA
taaaagtaggcttatttcaa

SEQ ID NO: 33057 - DNA, 20 bp, synthetic construct
  misc_feature 1..20: note = chemically synthesized
  source 1..20: mol_type = other DNA
aaaagtaggcttatttcaaa

SEQ ID NO: 33058 - DNA, 20 bp, synthetic construct
  misc_feature 1..20: note = chemically synthesized
  source 1..20: mol_type = other DNA
agtaggcttatttcaaaagg

SEQ ID NO: 33059 - DNA, 20 bp, synthetic construct
  misc_feature 1..20: note = chemically synthesized
  source 1..20: mol_type = other DNA
taggcttatttcaaaaggca

SEQ ID NO: 33060 - DNA, 20 bp, synthetic construct
  misc_feature 1..20: note = chemically synthesized
  source 1..20: mol_type = other DNA
ttcaaaaggcagagaatttg

SEQ ID NO: 33061 - DNA, 20 bp, synthetic construct
  misc_feature 1..20: note = chemically synthesized
  source 1..20: mol_type = other DNA
ggcagagaatttgaagctat

SEQ ID NO: 33062 - DNA, 20 bp, synthetic construct
  misc_feature 1..20: note = chemically synthesized
  source 1..20: mol_type = other DNA
gcagagaatttgaagctatc

SEQ ID NO: 33063 - DNA, 20 bp, synthetic construct
  misc_feature 1..20: note = chemically synthesized
  source 1..20: mol_type = other DNA
cagagaatttgaagctatcg

SEQ ID NO: 33064 - DNA, 20 bp, synthetic construct
  misc_feature 1..20: note = chemically synthesized
  source 1..20: mol_type = other DNA
gaatttgaagctatcgggga

SEQ ID NO: 33065 - DNA, 20 bp, synthetic construct
  misc_feature 1..20: note = chemically synthesized
  source 1..20: mol_type = other DNA
aatttgaagctatcggggaa

SEQ ID NO: 33066 - DNA, 20 bp, synthetic construct
  misc_feature 1..20: note = chemically synthesized
  source 1..20: mol_type = other DNA
gctatcggggaaaggaactg

SEQ ID NO: 33067 - DNA, 20 bp, synthetic construct
  misc_feature 1..20: note = chemically synthesized
  source 1..20: mol_type = other DNA
atcggggaaaggaactgtgg

SEQ ID NO: 33068 - DNA, 20 bp, synthetic construct
  misc_feature 1..20: note = chemically synthesized
  source 1..20: mol_type = other DNA
gggaaaggaactgtggcaga

SEQ ID NO: 33069 - DNA, 20 bp, synthetic construct
  misc_feature 1..20: note = chemically synthesized
  source 1..20: mol_type = other DNA
cagatagtgcctgctgtgtg

SEQ ID NO: 33070 - DNA, 20 bp, synthetic construct
  misc_feature 1..20: note = chemically synthesized
  source 1..20: mol_type = other DNA
atagtgcctgctgtgtgtgg

SEQ ID NO: 33071 - DNA, 20 bp, synthetic construct
  misc_feature 1..20: note = chemically synthesized
  source 1..20: mol_type = other DNA
agtgcctgctgtgtgtggtg

SEQ ID NO: 33072 - DNA, 20 bp, synthetic construct
  misc_feature 1..20: note = chemically synthesized
  source 1..20: mol_type = other DNA
gtgcctgctgtgtgtggtgg

SEQ ID NO: 33073 - DNA, 20 bp, synthetic construct
  misc_feature 1..20: note = chemically synthesized
  source 1..20: mol_type = other DNA
gtggtggaggattctctgct

SEQ ID NO: 33074 - DNA, 20 bp, synthetic construct
  misc_feature 1..20: note = chemically synthesized
  source 1..20: mol_type = other DNA
ttctctgctcagtcctgact

SEQ ID NO: 33075 - DNA, 20 bp, synthetic construct
  misc_feature 1..20: note = chemically synthesized
  source 1..20: mol_type = other DNA
tctctgctcagtcctgactc

SEQ ID NO: 33076 - DNA, 20 bp, synthetic construct
  misc_feature 1..20: note = chemically synthesized
  source 1..20: mol_type = other DNA
tgctcagtcctgactcaggc

SEQ ID NO: 33077 - DNA, 20 bp, synthetic construct
  misc_feature 1..20: note = chemically synthesized
  source 1..20: mol_type = other DNA
gctcagtcctgactcaggct

SEQ ID NO: 33078 - DNA, 20 bp, synthetic construct
  misc_feature 1..20: note = chemically synthesized
  source 1..20: mol_type = other DNA
cagtcctgactcaggctagg

SEQ ID NO: 33079 - DNA, 20 bp, synthetic construct
  misc_feature 1..20: note = chemically synthesized
  source 1..20: mol_type = other DNA
agtcctgactcaggctagga

SEQ ID NO: 33080 - DNA, 20 bp, synthetic construct
  misc_feature 1..20: note = chemically synthesized
  source 1..20: mol_type = other DNA
tgactcaggctaggaaggaa

SEQ ID NO: 33081 - DNA, 20 bp, synthetic construct
  misc_feature 1..20: note = chemically synthesized
  source 1..20: mol_type = other DNA
gactcaggctaggaaggaac

SEQ ID NO: 33082 - DNA, 20 bp, synthetic construct
  misc_feature 1..20: note = chemically synthesized
  source 1..20: mol_type = other DNA
actcaggctaggaaggaaca

SEQ ID NO: 33083 - DNA, 20 bp, synthetic construct
  misc_feature 1..20: note = chemically synthesized
  source 1..20: mol_type = other DNA
caggctaggaaggaacaggg

SEQ ID NO: 33084 - DNA, 20 bp, synthetic construct
  misc_feature 1..20: note = chemically synthesized
  source 1..20: mol_type = other DNA
ggaaggaacagggcagtgct

SEQ ID NO: 33085 - DNA, 20 bp, synthetic construct
  misc_feature 1..20: note = chemically synthesized
  source 1..20: mol_type = other DNA
cagggcagtgctgagtctcc

SEQ ID NO: 33086 - DNA, 20 bp, synthetic construct
  misc_feature 1..20: note = chemically synthesized
  source 1..20: mol_type = other DNA
gggcagtgctgagtctcctg

SEQ ID NO: 33087 - DNA, 20 bp, synthetic construct
  misc_feature 1..20: note = chemically synthesized
  source 1..20: mol_type = other DNA
agcactgccctgttccttcc

SEQ ID NO: 33088 - DNA, 20 bp, synthetic construct
  misc_feature 1..20: note = chemically synthesized
  source 1..20: mol_type = other DNA
gccctgttccttcctagcct

SEQ ID NO: 33089 - DNA, 20 bp, synthetic construct
  misc_feature 1..20: note = chemically synthesized
  source 1..20: mol_type = other DNA
tgttccttcctagcctgagt

SEQ ID NO: 33090 - DNA, 20 bp, synthetic construct
  misc_feature 1..20: note = chemically synthesized
  source 1..20: mol_type = other DNA
gttccttcctagcctgagtc

SEQ ID NO: 33091 - DNA, 20 bp, synthetic construct
  misc_feature 1..20: note = chemically synthesized
  source 1..20: mol_type = other DNA
tcctagcctgagtcaggact

SEQ ID NO: 33092 - DNA, 20 bp, synthetic construct
  misc_feature 1..20: note = chemically synthesized
  source 1..20: mol_type = other DNA
tagcctgagtcaggactgag

SEQ ID NO: 33093 - DNA, 20 bp, synthetic construct
  misc_feature 1..20: note = chemically synthesized
  source 1..20: mol_type = other DNA
gcctgagtcaggactgagca

SEQ ID NO: 33094 - DNA, 20 bp, synthetic construct
  misc_feature 1..20: note = chemically synthesized
  source 1..20: mol_type = other DNA
agagaatcctccaccacaca

SEQ ID NO: 33095 - DNA, 20 bp, synthetic construct
  misc_feature 1..20: note = chemically synthesized
  source 1..20: mol_type = other DNA
gaatcctccaccacacacag

SEQ ID NO: 33096 - DNA, 20 bp, synthetic construct
  misc_feature 1..20: note = chemically synthesized
  source 1..20: mol_type = other DNA
aatcctccaccacacacagc

SEQ ID NO: 33097 - DNA, 20 bp, synthetic construct
  misc_feature 1..20: note = chemically synthesized
  source 1..20: mol_type = other DNA
acagcaggcactatctgcca

SEQ ID NO: 33098 - DNA, 20 bp, synthetic construct
  misc_feature 1..20: note = chemically synthesized
  source 1..20: mol_type = other DNA
gccacagttcctttccccga

SEQ ID NO: 33099 - DNA, 20 bp, synthetic construct
  misc_feature 1..20: note = chemically synthesized
  source 1..20: mol_type = other DNA
aattctctgccttttgaaat

SEQ ID NO: 33100 - DNA, 20 bp, synthetic construct
  misc_feature 1..20: note = chemically synthesized
  source 1..20: mol_type = other DNA
gaaataagcctacttttaac

SEQ ID NO: 33101 - DNA, 20 bp, synthetic construct
  misc_feature 1..20: note = chemically synthesized
  source 1..20: mol_type = other DNA
ttttaactggaataaataat

SEQ ID NO: 33102 - DNA, 20 bp, synthetic construct
  misc_feature 1..20: note = chemically synthesized
  source 1..20: mol_type = other DNA
taattggtcaatctctacct

SEQ ID NO: 33103 - DNA, 20 bp, synthetic construct
  misc_feature 1..20: note = chemically synthesized
  source 1..20: mol_type = other DNA
aattggtcaatctctacctc

SEQ ID NO: 33104 - DNA, 20 bp, synthetic construct
  misc_feature 1..20: note = chemically synthesized
  source 1..20: mol_type = other DNA
gtcaatctctacctcaggtg

SEQ ID NO: 33105 - DNA, 20 bp, synthetic construct
  misc_feature 1..20: note = chemically synthesized
  source 1..20: mol_type = other DNA
caatctctacctcaggtgaa

SEQ ID NO: 33106 - DNA, 20 bp, synthetic construct
  misc_feature 1..20: note = chemically synthesized
  source 1..20: mol_type = other DNA
aatctctacctcaggtgaag

SEQ ID NO: 33107 - DNA, 20 bp, synthetic construct
  misc_feature 1..20: note = chemically synthesized
  source 1..20: mol_type = other DNA
acctcaggtgaagaggaacc

SEQ ID NO: 33108 - DNA, 20 bp, synthetic construct
  misc_feature 1..20: note = chemically synthesized
  source 1..20: mol_type = other DNA
gtgaagaggaaccaagcctc

SEQ ID NO: 33109 - DNA, 20 bp, synthetic construct
  misc_feature 1..20: note = chemically synthesized
  source 1..20: mol_type = other DNA
accaagcctctggaaacact

SEQ ID NO: 33110 - DNA, 20 bp, synthetic construct
  misc_feature 1..20: note = chemically synthesized
  source 1..20: mol_type = other DNA
ccaagcctctggaaacactt

SEQ ID NO: 33111 - DNA, 20 bp, synthetic construct
  misc_feature 1..20: note = chemically synthesized
  source 1..20: mol_type = other DNA
ggaacaaactgtaaaaacca

SEQ ID NO: 33112 - DNA, 20 bp, synthetic construct
  misc_feature 1..20: note = chemically synthesized
  source 1..20: mol_type = other DNA
gaacaaactgtaaaaaccaa

SEQ ID NO: 33113 - DNA, 20 bp, synthetic construct
  misc_feature 1..20: note = chemically synthesized
  source 1..20: mol_type = other DNA
accaaaggcaattgtgtaac

SEQ ID NO: 33114 - DNA, 20 bp, synthetic construct
  misc_feature 1..20: note = chemically synthesized
  source 1..20: mol_type = other DNA
aattgtgtaaccggttaaat

SEQ ID NO: 33115 - DNA, 20 bp, synthetic construct
  misc_feature 1..20: note = chemically synthesized
  source 1..20: mol_type = other DNA
aaccggttaaataagcttgc

SEQ ID NO: 33116 - DNA, 20 bp, synthetic construct
  misc_feature 1..20: note = chemically synthesized
  source 1..20: mol_type = other DNA
tggactttgtccctgtgtat

SEQ ID NO: 33117 - DNA, 20 bp, synthetic construct
  misc_feature 1..20: note = chemically synthesized
  source 1..20: mol_type = other DNA
ctttgtccctgtgtatgagt

SEQ ID NO: 33118 - DNA, 20 bp, synthetic construct
  misc_feature 1..20: note = chemically synthesized
  source 1..20: mol_type = other DNA
tatgagttagacaattcttt

SEQ ID NO: 33119 - DNA, 20 bp, synthetic construct
  misc_feature 1..20: note = chemically synthesized
  source 1..20: mol_type = other DNA
agttagacaattctttcagc

SEQ ID NO: 33120 - DNA, 20 bp, synthetic construct
  misc_feature 1..20: note = chemically synthesized
  source 1..20: mol_type = other DNA
acaattctttcagctagttt

SEQ ID NO: 33121 - DNA, 20 bp, synthetic construct
  misc_feature 1..20: note = chemically synthesized
  source 1..20: mol_type = other DNA
agtttgagtgacgcactgac

SEQ ID NO: 33122 - DNA, 20 bp, synthetic construct
  misc_feature 1..20: note = chemically synthesized
  source 1..20: mol_type = other DNA
gagtgacgcactgaccagtg

SEQ ID NO: 33123 - DNA, 20 bp, synthetic construct
  misc_feature 1..20: note = chemically synthesized
  source 1..20: mol_type = other DNA
acgcactgaccagtgaagcg

SEQ ID NO: 33124 - DNA, 20 bp, synthetic construct
  misc_feature 1..20: note = chemically synthesized
  source 1..20: mol_type = other DNA
ctgaccagtgaagcgcagtg

SEQ ID NO: 33125 - DNA, 20 bp, synthetic construct
  misc_feature 1..20: note = chemically synthesized
  source 1..20: mol_type = other DNA
accagtgaagcgcagtgaag

SEQ ID NO: 33126 - DNA, 20 bp, synthetic construct
  misc_feature 1..20: note = chemically synthesized
  source 1..20: mol_type = other DNA
agtgaagcgcagtgaagcag

SEQ ID NO: 33127 - DNA, 20 bp, synthetic construct
  misc_feature 1..20: note = chemically synthesized
  source 1..20: mol_type = other DNA
gtgaagcgcagtgaagcagt

SEQ ID NO: 33128 - DNA, 20 bp, synthetic construct
  misc_feature 1..20: note = chemically synthesized
  source 1..20: mol_type = other DNA
cgcagtgaagcagtgggaac

SEQ ID NO: 33129 - DNA, 20 bp, synthetic construct
  misc_feature 1..20: note = chemically synthesized
  source 1..20: mol_type = other DNA
agtgggaaccggaatatcca

SEQ ID NO: 33130 - DNA, 20 bp, synthetic construct
  misc_feature 1..20: note = chemically synthesized
  source 1..20: mol_type = other DNA
tgggaaccggaatatccaaa

SEQ ID NO: 33131 - DNA, 20 bp, synthetic construct
  misc_feature 1..20: note = chemically synthesized
  source 1..20: mol_type = other DNA
gaaccggaatatccaaagag

SEQ ID NO: 33132 - DNA, 20 bp, synthetic construct
  misc_feature 1..20: note = chemically synthesized
  source 1..20: mol_type = other DNA
aatatccaaagagtggtttg

SEQ ID NO: 33133 - DNA, 20 bp, synthetic construct
  misc_feature 1..20: note = chemically synthesized
  source 1..20: mol_type = other DNA
atatccaaagagtggtttga

SEQ ID NO: 33134 - DNA, 20 bp, synthetic construct
  misc_feature 1..20: note = chemically synthesized
  source 1..20: mol_type = other DNA
atccaaagagtggtttgaag

SEQ ID NO: 33135 - DNA, 20 bp, synthetic construct
  misc_feature 1..20: note = chemically synthesized
  source 1..20: mol_type = other DNA
aaagagtggtttgaaggaga

SEQ ID NO: 33136 - DNA, 20 bp, synthetic construct
  misc_feature 1..20: note = chemically synthesized
  source 1..20: mol_type = other DNA
gagtggtttgaaggagaaag

SEQ ID NO: 33137 - DNA, 20 bp, synthetic construct
  misc_feature 1..20: note = chemically synthesized
  source 1..20: mol_type = other DNA
tgaaggagaaagaagcattg

SEQ ID NO: 33138 - DNA, 20 bp, synthetic construct
  misc_feature 1..20: note = chemically synthesized
  source 1..20: mol_type = other DNA
cattgtggctttatatcctc

SEQ ID NO: 33139 - DNA, 20 bp, synthetic construct
  misc_feature 1..20: note = chemically synthesized
  source 1..20: mol_type = other DNA
attgtggctttatatcctct

SEQ ID NO: 33140 - DNA, 20 bp, synthetic construct
  misc_feature 1..20: note = chemically synthesized
  source 1..20: mol_type = other DNA
ggctttatatcctctgggcc

SEQ ID NO: 33141 - DNA, 20 bp, synthetic construct
  misc_feature 1..20: note = chemically synthesized
  source 1..20: mol_type = other DNA
gctttatatcctctgggcct

SEQ ID NO: 33142 - DNA, 20 bp, synthetic construct
  misc_feature 1..20: note = chemically synthesized
  source 1..20: mol_type = other DNA
ctctgggcctgggtttcctg

SEQ ID NO: 33143 - DNA, 20 bp, synthetic construct
  misc_feature 1..20: note = chemically synthesized
  source 1..20: mol_type = other DNA
tttcctgaagtcaccacaca

SEQ ID NO: 33144 - DNA, 20 bp, synthetic construct
  misc_feature 1..20: note = chemically synthesized
  source 1..20: mol_type = other DNA
tcctgaagtcaccacacata

SEQ ID NO: 33145 - DNA, 20 bp, synthetic construct
  misc_feature 1..20: note = chemically synthesized
  source 1..20: mol_type = other DNA
cctgaagtcaccacacatag

SEQ ID NO: 33146 - DNA, 20 bp, synthetic construct
  misc_feature 1..20: note = chemically synthesized
  source 1..20: mol_type = other DNA
tgaagtcaccacacatagag

SEQ ID NO: 33147 - DNA, 20 bp, synthetic construct
  misc_feature 1..20: note = chemically synthesized
  source 1..20: mol_type = other DNA
aagtcaccacacatagagga

SEQ ID NO: 33148 - DNA, 20 bp, synthetic construct
  misc_feature 1..20: note = chemically synthesized
  source 1..20: mol_type = other DNA
gtcaccacacatagaggaga

SEQ ID NO: 33149 - DNA, 20 bp, synthetic construct
  misc_feature 1..20: note = chemically synthesized
  source 1..20: mol_type = other DNA
cacatagaggagagagaaaa

SEQ ID NO: 33150 - DNA, 20 bp, synthetic construct
  misc_feature 1..20: note = chemically synthesized
  source 1..20: mol_type = other DNA
agaggagagagaaaatggct

SEQ ID NO: 33151 - DNA, 20 bp, synthetic construct
  misc_feature 1..20: note = chemically synthesized
  source 1..20: mol_type = other DNA
gagagaaaatggctgagtta

SEQ ID NO: 33152 - DNA, 20 bp, synthetic construct
  misc_feature 1..20: note = chemically synthesized
  source 1..20: mol_type = other DNA
agagaaaatggctgagttaa

SEQ ID NO: 33153 - DNA, 20 bp, synthetic construct
  misc_feature 1..20: note = chemically synthesized
  source 1..20: mol_type = other DNA
aaaatggctgagttaaaggt

SEQ ID NO: 33154 - DNA, 20 bp, synthetic construct
  misc_feature 1..20: note = chemically synthesized
  source 1..20: mol_type = other DNA
aaggtaagaaaccatctgac

SEQ ID NO: 33155 - DNA, 20 bp, synthetic construct
  misc_feature 1..20: note = chemically synthesized
  source 1..20: mol_type = other DNA
accatctgacaagtttgcta

SEQ ID NO: 33156 - DNA, 20 bp, synthetic construct
  misc_feature 1..20: note = chemically synthesized
  source 1..20: mol_type = other DNA
caagtttgctatggcttctt

SEQ ID NO: 33157 - DNA, 20 bp, synthetic construct
  misc_feature 1..20: note = chemically synthesized
  source 1..20: mol_type = other DNA
gcttcttcagccaaaattta

SEQ ID NO: 33158 - DNA, 20 bp, synthetic construct
  misc_feature 1..20: note = chemically synthesized
  source 1..20: mol_type = other DNA
tcttcagccaaaatttatgg

SEQ ID NO: 33159 - DNA, 20 bp, synthetic construct
  misc_feature 1..20: note = chemically synthesized
  source 1..20: mol_type = other DNA
caaaatttatggaagtttct

SEQ ID NO: 33160 - DNA, 20 bp, synthetic construct
  misc_feature 1..20: note = chemically synthesized
  source 1..20: mol_type = other DNA
atggaagtttctgagaactt

SEQ ID NO: 33161 - DNA, 20 bp, synthetic construct
  misc_feature 1..20: note = chemically synthesized
  source 1..20: mol_type = other DNA
tggaagtttctgagaacttc

SEQ ID NO: 33162 - DNA, 20 bp, synthetic construct
  misc_feature 1..20: note = chemically synthesized
  source 1..20: mol_type = other DNA
ggaagtttctgagaacttca

SEQ ID NO: 33163 - DNA, 20 bp, synthetic construct
  misc_feature 1..20: note = chemically synthesized
  source 1..20: mol_type = other DNA
ttctgagaacttcagggtat

SEQ ID NO: 33164 - DNA, 20 bp, synthetic construct
  misc_feature 1..20: note = chemically synthesized
  source 1..20: mol_type = other DNA
ctgagaacttcagggtatca

SEQ ID NO: 33165 - DNA, 20 bp, synthetic construct
  misc_feature 1..20: note = chemically synthesized
  source 1..20: mol_type = other DNA
gaacttcagggtatcagagt

SEQ ID NO: 33166 - DNA, 20 bp, synthetic construct
  misc_feature 1..20: note = chemically synthesized
  source 1..20: mol_type = other DNA
tcagggtatcagagttggaa

SEQ ID NO: 33167 - DNA, 20 bp, synthetic construct
  misc_feature 1..20: note = chemically synthesized
  source 1..20: mol_type = other DNA
tatcagagttggaaaagact

SEQ ID NO: 33168 - DNA, 20 bp, synthetic construct
  misc_feature 1..20: note = chemically synthesized
  source 1..20: mol_type = other DNA
tcagagttggaaaagactta

SEQ ID NO: 33169 - DNA, 20 bp, synthetic construct
  misc_feature 1..20: note = chemically synthesized
  source 1..20: mol_type = other DNA
agagttggaaaagacttaga

SEQ ID NO: 33170 - DNA, 20 bp, synthetic construct
  misc_feature 1..20: note = chemically synthesized
  source 1..20: mol_type = other DNA
gagttggaaaagacttagag

SEQ ID NO: 33171 - DNA, 20 bp, synthetic construct
  misc_feature 1..20: note = chemically synthesized
  source 1..20: mol_type = other DNA
gaaaagacttagagaggccc

SEQ ID NO: 33172 - DNA, 20 bp, synthetic construct
  misc_feature 1..20: note = chemically synthesized
  source 1..20: mol_type = other DNA
ctggttcaaacccctgtgtt

SEQ ID NO: 33173 - DNA, 20 bp, synthetic construct
  misc_feature 1..20: note = chemically synthesized
  source 1..20: mol_type = other DNA
ggttcaaacccctgtgttca

SEQ ID NO: 33174 - DNA, 20 bp, synthetic construct
  misc_feature 1..20: note = chemically synthesized
  source 1..20: mol_type = other DNA
gttcaaacccctgtgttcag

SEQ ID NO: 33175 - DNA, 20 bp, synthetic construct
  misc_feature 1..20: note = chemically synthesized
  source 1..20: mol_type = other DNA
tgtgttcagaggcttccctg

SEQ ID NO: 33176 - DNA, 20 bp, synthetic construct
  misc_feature 1..20: note = chemically synthesized
  source 1..20: mol_type = other DNA
aggcttccctgtggtgtctg

SEQ ID NO: 33177 - DNA, 20 bp, synthetic construct
  misc_feature 1..20: note = chemically synthesized
  source 1..20: mol_type = other DNA
ggcttccctgtggtgtctgt

SEQ ID NO: 33178 - DNA, 20 bp, synthetic construct
  misc_feature 1..20: note = chemically synthesized
  source 1..20: mol_type = other DNA
ccctgtggtgtctgtgggca

SEQ ID NO: 33179 - DNA, 20 bp, synthetic construct
  misc_feature 1..20: note = chemically synthesized
  source 1..20: mol_type = other DNA
gtggtgtctgtgggcacagc

SEQ ID NO: 33180 - DNA, 20 bp, synthetic construct
  misc_feature 1..20: note = chemically synthesized
  source 1..20: mol_type = other DNA
ggtgtctgtgggcacagctg

SEQ ID NO: 33181 - DNA, 20 bp, synthetic construct
  misc_feature 1..20: note = chemically synthesized
  source 1..20: mol_type = other DNA
tgtgggcacagctggagctg

SEQ ID NO: 33182 - DNA, 20 bp, synthetic construct
  misc_feature 1..20: note = chemically synthesized
  source 1..20: mol_type = other DNA
cacagctggagctgaagaac

SEQ ID NO: 33183 - DNA, 20 bp, synthetic construct
  misc_feature 1..20: note = chemically synthesized
  source 1..20: mol_type = other DNA
acagctggagctgaagaaca

SEQ ID NO: 33184 - DNA, 20 bp, synthetic construct
  misc_feature 1..20: note = chemically synthesized
  source 1..20: mol_type = other DNA
cagctggagctgaagaacaa

SEQ ID NO: 33185 - DNA, 20 bp, synthetic construct
  misc_feature 1..20: note = chemically synthesized
  source 1..20: mol_type = other DNA
tggagctgaagaacaaggga

SEQ ID NO: 33186 - DNA, 20 bp, synthetic construct
  misc_feature 1..20: note = chemically synthesized
  source 1..20: mol_type = other DNA
ggagctgaagaacaagggaa

SEQ ID NO: 33187 - DNA, 20 bp, synthetic construct
  misc_feature 1..20: note = chemically synthesized
  source 1..20: mol_type = other DNA
agaacaagggaaaggtgata

SEQ ID NO: 33188 - DNA, 20 bp, synthetic construct
  misc_feature 1..20: note = chemically synthesized
  source 1..20: mol_type = other DNA
gaacaagggaaaggtgataa

SEQ ID NO: 33189 - DNA, 20 bp, synthetic construct
  misc_feature 1..20: note = chemically synthesized
  source 1..20: mol_type = other DNA
aagggaaaggtgataaagga

SEQ ID NO: 33190 - DNA, 20 bp, synthetic construct
  misc_feature 1..20: note = chemically synthesized
  source 1..20: mol_type = other DNA
ggtgataaaggaaagaaatg

SEQ ID NO: 33191 - DNA, 20 bp, synthetic construct
  misc_feature 1..20: note = chemically synthesized
  source 1..20: mol_type = other DNA
gaaagaaatgaagctcttat

SEQ ID NO: 33192 - DNA, 20 bp, synthetic construct
  misc_feature 1..20: note = chemically synthesized
  source 1..20: mol_type = other DNA
gttcatttcaattattgtct

SEQ ID NO: 33193 - DNA, 20 bp, synthetic construct
  misc_feature 1..20: note = chemically synthesized
  source 1..20: mol_type = other DNA
attattgtcttggaaatctg

SEQ ID NO: 33194 - DNA, 20 bp, synthetic construct
  misc_feature 1..20: note = chemically synthesized
  source 1..20: mol_type = other DNA
tggaaatctgtagacatcct

SEQ ID NO: 33195 - DNA, 20 bp, synthetic construct
  misc_feature 1..20: note = chemically synthesized
  source 1..20: mol_type = other DNA
gaaatctgtagacatcctaa

SEQ ID NO: 33196 - DNA, 20 bp, synthetic construct
  misc_feature 1..20: note = chemically synthesized
  source 1..20: mol_type = other DNA
ctaagagctcccctccacta

SEQ ID NO: 33197 - DNA, 20 bp, synthetic construct
  misc_feature 1..20: note = chemically synthesized
  source 1..20: mol_type = other DNA
ctgacaccttcccattgctg

SEQ ID NO: 33198 - DNA, 20 bp, synthetic construct
  misc_feature 1..20: note = chemically synthesized
  source 1..20: mol_type = other DNA
ttcccattgctgcagcctca

SEQ ID NO: 33199 - DNA, 20 bp, synthetic construct
  misc_feature 1..20: note = chemically synthesized
  source 1..20: mol_type = other DNA
gcagcctcatggaccacttc

SEQ ID NO: 33200 - DNA, 20 bp, synthetic construct
  misc_feature 1..20: note = chemically synthesized
  source 1..20: mol_type = other DNA
catggaccacttccggtgac

SEQ ID NO: 33201 - DNA, 20 bp, synthetic construct
  misc_feature 1..20: note = chemically synthesized
  source 1..20: mol_type = other DNA
gaccacttccggtgaccagt

SEQ ID NO: 33202 - DNA, 20 bp, synthetic construct
  misc_feature 1..20: note = chemically synthesized
  source 1..20: mol_type = other DNA
ttagatatgcttgatctatt

SEQ ID NO: 33203 - DNA, 20 bp, synthetic construct
  misc_feature 1..20: note = chemically synthesized
  source 1..20: mol_type = other DNA
cttgatctatttagttaatt

SEQ ID NO: 33204 - DNA, 20 bp, synthetic construct
  misc_feature 1..20: note = chemically synthesized
  source 1..20: mol_type = other DNA
ttgatctatttagttaatta

SEQ ID NO: 33205 - DNA, 20 bp, synthetic construct
  misc_feature 1..20: note = chemically synthesized
  source 1..20: mol_type = other DNA
agttaattaaggctctgaat

SEQ ID NO: 33206 - DNA, 20 bp, synthetic construct
  misc_feature 1..20: note = chemically synthesized
  source 1..20: mol_type = other DNA
taaggctctgaatcagccct

SEQ ID NO: 33207 - DNA, 20 bp, synthetic construct
  misc_feature 1..20: note = chemically synthesized
  source 1..20: mol_type = other DNA
gctctgaatcagcccttggc

SEQ ID NO: 33208 - DNA, 20 bp, synthetic construct
  misc_feature 1..20: note = chemically synthesized
  source 1..20: mol_type = other DNA
ctgaatcagcccttggccag

SEQ ID NO: 33209 - DNA, 20 bp, synthetic construct
  misc_feature 1..20: note = chemically synthesized
  source 1..20: mol_type = other DNA
aatcagcccttggccagaag

SEQ ID NO: 33210 - DNA, 20 bp, synthetic construct
  misc_feature 1..20: note = chemically synthesized
  source 1..20: mol_type = other DNA
gccagaagaagcacctcctc

SEQ ID NO: 33211 - DNA, 20 bp, synthetic construct
  misc_feature 1..20: note = chemically synthesized
  source 1..20: mol_type = other DNA
ccagaagaagcacctcctct

SEQ ID NO: 33212 - DNA, 20 bp, synthetic construct
  misc_feature 1..20: note = chemically synthesized
  source 1..20: mol_type = other DNA
aggaaatcattccttctttt

SEQ ID NO: 33213 - DNA, 20 bp, synthetic construct
  misc_feature 1..20: note = chemically synthesized
  source 1..20: mol_type = other DNA
tttagtaatacgcaattgaa

SEQ ID NO: 33214 - DNA, 20 bp, synthetic construct
  misc_feature 1..20: note = chemically synthesized
  source 1..20: mol_type = other DNA
acgcaattgaaaagtatgtg

SEQ ID NO: 33215 - DNA, 20 bp, synthetic construct
  misc_feature 1..20: note = chemically synthesized
  source 1..20: mol_type = other DNA
cgcaattgaaaagtatgtgt

SEQ ID NO: 33216 - DNA, 20 bp, synthetic construct
  misc_feature 1..20: note = chemically synthesized
  source 1..20: mol_type = other DNA
atgtgtgggttatgtgctgt

SEQ ID NO: 33217 - DNA, 20 bp, synthetic construct
  misc_feature 1..20: note = chemically synthesized
  source 1..20: mol_type = other DNA
tgtgtgggttatgtgctgtt

SEQ ID NO: 33218 - DNA, 20 bp, synthetic construct
  misc_feature 1..20: note = chemically synthesized
  source 1..20: mol_type = other DNA
gttatgtgctgttaggtgct

SEQ ID NO: 33219 - DNA, 20 bp, synthetic construct
  misc_feature 1..20: note = chemically synthesized
  source 1..20: mol_type = other DNA
ctgttaggtgctaagcattt

SEQ ID NO: 33220 - DNA, 20 bp, synthetic construct
  misc_feature 1..20: note = chemically synthesized
  source 1..20: mol_type = other DNA
cataatcctcaaaataaatc

SEQ ID NO: 33221 - DNA, 20 bp, synthetic construct
  misc_feature 1..20: note = chemically synthesized
  source 1..20: mol_type = other DNA
ataatcctcaaaataaatct

SEQ ID NO: 33222 - DNA, 20 bp, synthetic construct
  misc_feature 1..20: note = chemically synthesized
  source 1..20: mol_type = other DNA
taatcctcaaaataaatctg

SEQ ID NO: 33223 - DNA, 20 bp, synthetic construct
  misc_feature 1..20: note = chemically synthesized
  source 1..20: mol_type = other DNA
ctcaaaataaatctggggta

SEQ ID NO: 33224 - DNA, 20 bp, synthetic construct
  misc_feature 1..20: note = chemically synthesized
  source 1..20: mol_type = other DNA
caaaataaatctggggtata

SEQ ID NO: 33225 - DNA, 20 bp, synthetic construct
  misc_feature 1..20: note = chemically synthesized
  source 1..20: mol_type = other DNA
aaataaatctggggtataga

SEQ ID NO: 33226 - DNA, 20 bp, synthetic construct
  misc_feature 1..20: note = chemically synthesized
  source 1..20: mol_type = other DNA
ataaatctggggtatagaga

SEQ ID NO: 33227 - DNA, 20 bp, synthetic construct
  misc_feature 1..20: note = chemically synthesized
  source 1..20: mol_type = other DNA
taaatctggggtatagagag

SEQ ID NO: 33228 - DNA, 20 bp, synthetic construct
  misc_feature 1..20: note = chemically synthesized
  source 1..20: mol_type = other DNA
agagaggttcttgtttcaat

SEQ ID NO: 33229 - DNA, 20 bp, synthetic construct
  misc_feature 1..20: note = chemically synthesized
  source 1..20: mol_type = other DNA
ggttcttgtttcaattagaa

SEQ ID NO: 33230 - DNA, 20 bp, synthetic construct
  misc_feature 1..20: note = chemically synthesized
  source 1..20: mol_type = other DNA
tcaattagaaaagtaatgct

SEQ ID NO: 33231 - DNA, 20 bp, synthetic construct
  misc_feature 1..20: note = chemically synthesized
  source 1..20: mol_type = other DNA
aattagaaaagtaatgcttg

SEQ ID NO: 33232 - DNA, 20 bp, synthetic construct
  misc_feature 1..20: note = chemically synthesized
  source 1..20: mol_type = other DNA
ttagaaaagtaatgcttgga

SEQ ID NO: 33233 - DNA, 20 bp, synthetic construct
  misc_feature 1..20: note = chemically synthesized
  source 1..20: mol_type = other DNA
ggagagactatgatttgccc

SEQ ID NO: 33234 - DNA, 20 bp, synthetic construct
  misc_feature 1..20: note = chemically synthesized
  source 1..20: mol_type = other DNA
gagagactatgatttgccca

SEQ ID NO: 33235 - DNA, 20 bp, synthetic construct
  misc_feature 1..20: note = chemically synthesized
  source 1..20: mol_type = other DNA
ttgcccaaggtcactgccaa

SEQ ID NO: 33236 - DNA, 20 bp, synthetic construct
  misc_feature 1..20: note = chemically synthesized
  source 1..20: mol_type = other DNA
ctgccaatagatgacttgat

SEQ ID NO: 33237 - DNA, 20 bp, synthetic construct
  misc_feature 1..20: note = chemically synthesized
  source 1..20: mol_type = other DNA
ccaatagatgacttgattag

SEQ ID NO: 33238 - DNA, 20 bp, synthetic construct
  misc_feature 1..20: note = chemically synthesized
  source 1..20: mol_type = other DNA
atagatgacttgattagaag

SEQ ID NO: 33239 - DNA, 20 bp, synthetic construct
  misc_feature 1..20: note = chemically synthesized
  source 1..20: mol_type = other DNA
tagatgacttgattagaagc

SEQ ID NO: 33240 - DNA, 20 bp, synthetic construct
  misc_feature 1..20: note = chemically synthesized
  source 1..20: mol_type = other DNA
agatgacttgattagaagca

SEQ ID NO: 33241 - DNA, 20 bp, synthetic construct
  misc_feature 1..20: note = chemically synthesized
  source 1..20: mol_type = other DNA
gcagggtatgtttgaatgcg

SEQ ID NO: 33242 - DNA, 20 bp, synthetic construct
  misc_feature 1..20: note = chemically synthesized
  source 1..20: mol_type = other DNA
gtatgtttgaatgcgaagtc

SEQ ID NO: 33243 - DNA, 20 bp, synthetic construct
  misc_feature 1..20: note = chemically synthesized
  source 1..20: mol_type = other DNA
tatgtttgaatgcgaagtcc

SEQ ID NO: 33244 - DNA, 20 bp, synthetic construct
  misc_feature 1..20: note = chemically synthesized
  source 1..20: mol_type = other DNA
atgcgaagtccaggctcaaa

SEQ ID NO: 33245 - DNA, 20 bp, synthetic construct
  misc_feature 1..20: note = chemically synthesized
  source 1..20: mol_type = other DNA
tgcgaagtccaggctcaaaa

SEQ ID NO: 33246 - DNA, 20 bp, synthetic construct
  misc_feature 1..20: note = chemically synthesized
  source 1..20: mol_type = other DNA
gcgaagtccaggctcaaaaa

SEQ ID NO: 33247 - DNA, 20 bp, synthetic construct
  misc_feature 1..20: note = chemically synthesized
  source 1..20: mol_type = other DNA
cgaagtccaggctcaaaaag

SEQ ID NO: 33248 - DNA, 20 bp, synthetic construct
  misc_feature 1..20: note = chemically synthesized
  source 1..20: mol_type = other DNA
ccaggctcaaaaaggggcct

SEQ ID NO: 33249 - DNA, 20 bp, synthetic construct
  misc_feature 1..20: note = chemically synthesized
  source 1..20: mol_type = other DNA
ggctcaaaaaggggccttag

SEQ ID NO: 33250 - DNA, 20 bp, synthetic construct
  misc_feature 1..20: note = chemically synthesized
  source 1..20: mol_type = other DNA
ggggccttagtggctcctac

SEQ ID NO: 33251 - DNA, 20 bp, synthetic construct
  misc_feature 1..20: note = chemically synthesized
  source 1..20: mol_type = other DNA
cttagtggctcctactagac

SEQ ID NO: 33252 - DNA, 20 bp, synthetic construct
  misc_feature 1..20: note = chemically synthesized
  source 1..20: mol_type = other DNA
tcctactagactggtatctt

SEQ ID NO: 33253 - DNA, 20 bp, synthetic construct
  misc_feature 1..20: note = chemically synthesized
  source 1..20: mol_type = other DNA
cctactagactggtatctta

SEQ ID NO: 33254 - DNA, 20 bp, synthetic construct
  misc_feature 1..20: note = chemically synthesized
  source 1..20: mol_type = other DNA
ctagactggtatcttaaggc

SEQ ID NO: 33255 - DNA, 20 bp, synthetic construct
  misc_feature 1..20: note = chemically synthesized
  source 1..20: mol_type = other DNA
tagactggtatcttaaggca

SEQ ID NO: 33256 - DNA, 20 bp, synthetic construct
  misc_feature 1..20: note = chemically synthesized
  source 1..20: mol_type = other DNA
gtatcttaaggcaaggaaaa

SEQ ID NO: 33257 - DNA, 20 bp, synthetic construct
  misc_feature 1..20: note = chemically synthesized
  source 1..20: mol_type = other DNA
ctaatatctaaaaccatgcc

SEQ ID NO: 33258 - DNA, 20 bp, synthetic construct
  misc_feature 1..20: note = chemically synthesized
  source 1..20: mol_type = other DNA
ctaaaaccatgcctagtgcc

SEQ ID NO: 33259 - DNA, 20 bp, synthetic construct
  misc_feature 1..20: note = chemically synthesized
  source 1..20: mol_type = other DNA
taaaaccatgcctagtgccc

SEQ ID NO: 33260 - DNA, 20 bp, synthetic construct
  misc_feature 1..20: note = chemically synthesized
  source 1..20: mol_type = other DNA
accatgcctagtgcccaggc

SEQ ID NO: 33261 - DNA, 20 bp, synthetic construct
  misc_feature 1..20: note = chemically synthesized
  source 1..20: mol_type = other DNA
ccatgcctagtgcccaggcc

SEQ ID NO: 33262 - DNA, 20 bp, synthetic construct
  misc_feature 1..20: note = chemically synthesized
  source 1..20: mol_type = other DNA
cgcatgcatgtgtaactgaa

SEQ ID NO: 33263 - DNA, 20 bp, synthetic construct
  misc_feature 1..20: note = chemically synthesized
  source 1..20: mol_type = other DNA
tgtaactgaacagaactgcc

SEQ ID NO: 33264 - DNA, 20 bp, synthetic construct
  misc_feature 1..20: note = chemically synthesized
  source 1..20: mol_type = other DNA
aacagaactgcccagaacct

SEQ ID NO: 33265 - DNA, 20 bp, synthetic construct
  misc_feature 1..20: note = chemically synthesized
  source 1..20: mol_type = other DNA
aactgcccagaaccttggct

SEQ ID NO: 33266 - DNA, 20 bp, synthetic construct
  misc_feature 1..20: note = chemically synthesized
  source 1..20: mol_type = other DNA
actgcccagaaccttggctc

SEQ ID NO: 33267 - DNA, 20 bp, synthetic construct
  misc_feature 1..20: note = chemically synthesized
  source 1..20: mol_type = other DNA
ccagaaccttggctcaggcc

SEQ ID NO: 33268 - DNA, 20 bp, synthetic construct
  misc_feature 1..20: note = chemically synthesized
  source 1..20: mol_type = other DNA
gaaccttggctcaggccaag

SEQ ID NO: 33269 - DNA, 20 bp, synthetic construct
  misc_feature 1..20: note = chemically synthesized
  source 1..20: mol_type = other DNA
aaccttggctcaggccaagt

SEQ ID NO: 33270 - DNA, 20 bp, synthetic construct
  misc_feature 1..20: note = chemically synthesized
  source 1..20: mol_type = other DNA
ttggctcaggccaagtaggc

SEQ ID NO: 33271 - DNA, 20 bp, synthetic construct
  misc_feature 1..20: note = chemically synthesized
  source 1..20: mol_type = other DNA
taggccagaccaccccacaa

SEQ ID NO: 33272 - DNA, 20 bp, synthetic construct
  misc_feature 1..20: note = chemically synthesized
  source 1..20: mol_type = other DNA
acagacatcttccctgaatg

SEQ ID NO: 33273 - DNA, 20 bp, synthetic construct
  misc_feature 1..20: note = chemically synthesized
  source 1..20: mol_type = other DNA
cagacatcttccctgaatgc

SEQ ID NO: 33274 - DNA, 20 bp, synthetic construct
  misc_feature 1..20: note = chemically synthesized
  source 1..20: mol_type = other DNA
agacatcttccctgaatgca

SEQ ID NO: 33275 - DNA, 20 bp, synthetic construct
  misc_feature 1..20: note = chemically synthesized
  source 1..20: mol_type = other DNA
cttccctgaatgcagggttt

SEQ ID NO: 33276 - DNA, 20 bp, synthetic construct
  misc_feature 1..20: note = chemically synthesized
  source 1..20: mol_type = other DNA
ccctgaatgcagggtttgag

SEQ ID NO: 33277 - DNA, 20 bp, synthetic construct
  misc_feature 1..20: note = chemically synthesized
  source 1..20: mol_type = other DNA
aatgccctctaactgatgct

SEQ ID NO: 33278 - DNA, 20 bp, synthetic construct
  misc_feature 1..20: note = chemically synthesized
  source 1..20: mol_type = other DNA
tctaactgatgctgagtttg

SEQ ID NO: 33279 - DNA, 20 bp, synthetic construct
  misc_feature 1..20: note = chemically synthesized
  source 1..20: mol_type = other DNA
gctgagtttgaagaatccat

SEQ ID NO: 33280 - DNA, 20 bp, synthetic construct
  misc_feature 1..20: note = chemically synthesized
  source 1..20: mol_type = other DNA
gtttgaagaatccatcagtt

SEQ ID NO: 33281 - DNA, 20 bp, synthetic construct
  misc_feature 1..20: note = chemically synthesized
  source 1..20: mol_type = other DNA
tttgaagaatccatcagtta

SEQ ID NO: 33282 - DNA, 20 bp, synthetic construct
  misc_feature 1..20: note = chemically synthesized
  source 1..20: mol_type = other DNA
ttgaagaatccatcagttaa

SEQ ID NO: 33283 - DNA, 20 bp, synthetic construct
  misc_feature 1..20: note = chemically synthesized
  source 1..20: mol_type = other DNA
tgaagaatccatcagttaag

SEQ ID NO: 33284 - DNA, 20 bp, synthetic construct
  misc_feature 1..20: note = chemically synthesized
  source 1..20: mol_type = other DNA
aagaatccatcagttaaggg

SEQ ID NO: 33285 - DNA, 20 bp, synthetic construct
  misc_feature 1..20: note = chemically synthesized
  source 1..20: mol_type = other DNA
agaatccatcagttaagggg

SEQ ID NO: 33286 - DNA, 20 bp, synthetic construct
  misc_feature 1..20: note = chemically synthesized
  source 1..20: mol_type = other DNA
agttaaggggaggtgtttct

SEQ ID NO: 33287 - DNA, 20 bp, synthetic construct
  misc_feature 1..20: note = chemically synthesized
  source 1..20: mol_type = other DNA
gggaggtgtttctgagtttg

SEQ ID NO: 33288 - DNA, 20 bp, synthetic construct
  misc_feature 1..20: note = chemically synthesized
  source 1..20: mol_type = other DNA
gaatcaaacaccttcctaat

SEQ ID NO: 33289 - DNA, 20 bp, synthetic construct
  misc_feature 1..20: note = chemically synthesized
  source 1..20: mol_type = other DNA
tcaaacaccttcctaattgg

SEQ ID NO: 33290 - DNA, 20 bp, synthetic construct
  misc_feature 1..20: note = chemically synthesized
  source 1..20: mol_type = other DNA
caaacaccttcctaattggt

SEQ ID NO: 33291 - DNA, 20 bp, synthetic construct
  misc_feature 1..20: note = chemically synthesized
  source 1..20: mol_type = other DNA
atcctgaaaacactccacac

SEQ ID NO: 33292 - DNA, 20 bp, synthetic construct
  misc_feature 1..20: note = chemically synthesized
  source 1..20: mol_type = other DNA
cctgaaaacactccacaccg

SEQ ID NO: 33293 - DNA, 20 bp, synthetic construct
  misc_feature 1..20: note = chemically synthesized
  source 1..20: mol_type = other DNA
aacactccacaccggagtaa

SEQ ID NO: 33294 - DNA, 20 bp, synthetic construct
  misc_feature 1..20: note = chemically synthesized
  source 1..20: mol_type = other DNA
cacaccggagtaaaagactt

SEQ ID NO: 33295 - DNA, 20 bp, synthetic construct
  misc_feature 1..20: note = chemically synthesized
  source 1..20: mol_type = other DNA
ttatctttatgcctgactaa

SEQ ID NO: 33296 - DNA, 20 bp, synthetic construct
  misc_feature 1..20: note = chemically synthesized
  source 1..20: mol_type = other DNA
ttaactctcattctttcatt

SEQ ID NO: 33297 - DNA, 20 bp, synthetic construct
  misc_feature 1..20: note = chemically synthesized
  source 1..20: mol_type = other DNA
attcagcaaatattttgtgc

SEQ ID NO: 33298 - DNA, 20 bp, synthetic construct
  misc_feature 1..20: note = chemically synthesized
  source 1..20: mol_type = other DNA
tgtgctagtgcatgacactg

SEQ ID NO: 33299 - DNA, 20 bp, synthetic construct
  misc_feature 1..20: note = chemically synthesized
  source 1..20: mol_type = other DNA
gacactgcagattaatatcg

SEQ ID NO: 33300 - DNA, 20 bp, synthetic construct
  misc_feature 1..20: note = chemically synthesized
  source 1..20: mol_type = other DNA
attaatatcgtagatgaact

SEQ ID NO: 33301 - DNA, 20 bp, synthetic construct
  misc_feature 1..20: note = chemically synthesized
  source 1..20: mol_type = other DNA
tatcgtagatgaactgagtc

SEQ ID NO: 33302 - DNA, 20 bp, synthetic construct
  misc_feature 1..20: note = chemically synthesized
  source 1..20: mol_type = other DNA
atcgtagatgaactgagtct

SEQ ID NO: 33303 - DNA, 20 bp, synthetic construct
  misc_feature 1..20: note = chemically synthesized
  source 1..20: mol_type = other DNA
tagatgaactgagtctgggc

SEQ ID NO: 33304 - DNA, 20 bp, synthetic construct
  misc_feature 1..20: note = chemically synthesized
  source 1..20: mol_type = other DNA
agatgaactgagtctgggct

SEQ ID NO: 33305 - DNA, 20 bp, synthetic construct
  misc_feature 1..20: note = chemically synthesized
  source 1..20: mol_type = other DNA
tgaactgagtctgggctagg

SEQ ID NO: 33306 - DNA, 20 bp, synthetic construct
  misc_feature 1..20: note = chemically synthesized
  source 1..20: mol_type = other DNA
aactgagtctgggctaggta

SEQ ID NO: 33307 - DNA, 20 bp, synthetic construct
  misc_feature 1..20: note = chemically synthesized
  source 1..20: mol_type = other DNA
agtcaaaaaaaaatttccta

SEQ ID NO: 33308 - DNA, 20 bp, synthetic construct
  misc_feature 1..20: note = chemically synthesized
  source 1..20: mol_type = other DNA
gtcaaaaaaaaatttcctaa

SEQ ID NO: 33309 - DNA, 20 bp, synthetic construct
  misc_feature 1..20: note = chemically synthesized
  source 1..20: mol_type = other DNA
caaaaaaaaatttcctaaag

SEQ ID NO: 33310 - DNA, 20 bp, synthetic construct
  misc_feature 1..20: note = chemically synthesized
  source 1..20: mol_type = other DNA
aaggagcctgtacctaaact

SEQ ID NO: 33311 - DNA, 20 bp, synthetic construct
  misc_feature 1..20: note = chemically synthesized
  source 1..20: mol_type = other DNA
ctgtacctaaactgagtctt

SEQ ID NO: 33312 - DNA, 20 bp, synthetic construct
  misc_feature 1..20: note = chemically synthesized
  source 1..20: mol_type = other DNA
gtacctaaactgagtcttca

SEQ ID NO: 33313 - DNA, 20 bp, synthetic construct
  misc_feature 1..20: note = chemically synthesized
  source 1..20: mol_type = other DNA
acctaaactgagtcttcaga

SEQ ID NO: 33314 - DNA, 20 bp, synthetic construct
  misc_feature 1..20: note = chemically synthesized
  source 1..20: mol_type = other DNA
taaactgagtcttcagagag

SEQ ID NO: 33315 - DNA, 20 bp, synthetic construct
  misc_feature 1..20: note = chemically synthesized
  source 1..20: mol_type = other DNA
ctgagtcttcagagagaagt

SEQ ID NO: 33316 - DNA, 20 bp, synthetic construct
  misc_feature 1..20: note = chemically synthesized
  source 1..20: mol_type = other DNA
cttcagagagaagttggaac

SEQ ID NO: 33317 - DNA, 20 bp, synthetic construct
  misc_feature 1..20: note = chemically synthesized
  source 1..20: mol_type = other DNA
gagagaagttggaactggca

SEQ ID NO: 33318 - DNA, 20 bp, synthetic construct
  misc_feature 1..20: note = chemically synthesized
  source 1..20: mol_type = other DNA
gaagttggaactggcaaagt

SEQ ID NO: 33319 - DNA, 20 bp, synthetic construct
  misc_feature 1..20: note = chemically synthesized
  source 1..20: mol_type = other DNA
aagttggaactggcaaagtg

SEQ ID NO: 33320 - DNA, 20 bp, synthetic construct
  misc_feature 1..20: note = chemically synthesized
  source 1..20: mol_type = other DNA
ttggaactggcaaagtgagg

SEQ ID NO: 33321 - DNA, 20 bp, synthetic construct
  misc_feature 1..20: note = chemically synthesized
  source 1..20: mol_type = other DNA
tggaactggcaaagtgagga

SEQ ID NO: 33322 - DNA, 20 bp, synthetic construct
  misc_feature 1..20: note = chemically synthesized
  source 1..20: mol_type = other DNA
actggcaaagtgaggaagga

SEQ ID NO: 33323 - DNA, 20 bp, synthetic construct
  misc_feature 1..20: note = chemically synthesized
  source 1..20: mol_type = other DNA
ctggcaaagtgaggaaggac

SEQ ID NO: 33324 - DNA, 20 bp, synthetic construct
  misc_feature 1..20: note = chemically synthesized
  source 1..20: mol_type = other DNA
tggcaaagtgaggaaggacg

SEQ ID NO: 33325 - DNA, 20 bp, synthetic construct
  misc_feature 1..20: note = chemically synthesized
  source 1..20: mol_type = other DNA
aagtgaggaaggacggggtc

SEQ ID NO: 33326 - DNA, 20 bp, synthetic construct
  misc_feature 1..20: note = chemically synthesized
  source 1..20: mol_type = other DNA
gtgaggaaggacggggtctg

SEQ ID NO: 33327 - DNA, 20 bp, synthetic construct
  misc_feature 1..20: note = chemically synthesized
  source 1..20: mol_type = other DNA
tgaggaaggacggggtctgg

SEQ ID NO: 33328 - DNA, 20 bp, synthetic construct
  misc_feature 1..20: note = chemically synthesized
  source 1..20: mol_type = other DNA
gaggaaggacggggtctgga

SEQ ID NO: 33329 - DNA, 20 bp, synthetic construct
  misc_feature 1..20: note = chemically synthesized
  source 1..20: mol_type = other DNA
gaaggacggggtctggaggg

SEQ ID NO: 33330 - DNA, 20 bp, synthetic construct
  misc_feature 1..20: note = chemically synthesized
  source 1..20: mol_type = other DNA
aggacggggtctggagggaa

SEQ ID NO: 33331 - DNA, 20 bp, synthetic construct
  misc_feature 1..20: note = chemically synthesized
  source 1..20: mol_type = other DNA
cggggtctggagggaagagt

SEQ ID NO: 33332 - DNA, 20 bp, synthetic construct
  misc_feature 1..20: note = chemically synthesized
  source 1..20: mol_type = other DNA
tggagggaagagtgagtgca

SEQ ID NO: 33333 - DNA, 20 bp, synthetic construct
  misc_feature 1..20: note = chemically synthesized
  source 1..20: mol_type = other DNA
ggagggaagagtgagtgcaa

SEQ ID NO: 33334 - DNA, 20 bp, synthetic construct
  misc_feature 1..20: note = chemically synthesized
  source 1..20: mol_type = other DNA
gaagagtgagtgcaaaggca

SEQ ID NO: 33335 - DNA, 20 bp, synthetic construct
  misc_feature 1..20: note = chemically synthesized
  source 1..20: mol_type = other DNA
gtgcaaaggcacagcacata

SEQ ID NO: 33336 - DNA, 20 bp, synthetic construct
  misc_feature 1..20: note = chemically synthesized
  source 1..20: mol_type = other DNA
tacagaatgcctgcatgctc

SEQ ID NO: 33337 - DNA, 20 bp, synthetic construct
  misc_feature 1..20: note = chemically synthesized
  source 1..20: mol_type = other DNA
tctagaatccaaaactgtgt

SEQ ID NO: 33338 - DNA, 20 bp, synthetic construct
  misc_feature 1..20: note = chemically synthesized
  source 1..20: mol_type = other DNA
aaactgtgtcagccaaattt

SEQ ID NO: 33339 - DNA, 20 bp, synthetic construct
  misc_feature 1..20: note = chemically synthesized
  source 1..20: mol_type = other DNA
gtcagccaaatttgagttga

SEQ ID NO: 33340 - DNA, 20 bp, synthetic construct
  misc_feature 1..20: note = chemically synthesized
  source 1..20: mol_type = other DNA
cagccaaatttgagttgatg

SEQ ID NO: 33341 - DNA, 20 bp, synthetic construct
  misc_feature 1..20: note = chemically synthesized
  source 1..20: mol_type = other DNA
agccaaatttgagttgatgg

SEQ ID NO: 33342 - DNA, 20 bp, synthetic construct
  misc_feature 1..20: note = chemically synthesized
  source 1..20: mol_type = other DNA
gccaaatttgagttgatgga

SEQ ID NO: 33343 - DNA, 20 bp, synthetic construct
  misc_feature 1..20: note = chemically synthesized
  source 1..20: mol_type = other DNA
aatttgagttgatggaggga

SEQ ID NO: 33344 - DNA, 20 bp, synthetic construct
  misc_feature 1..20: note = chemically synthesized
  source 1..20: mol_type = other DNA
gatggagggacagccaaact

SEQ ID NO: 33345 - DNA, 20 bp, synthetic construct
  misc_feature 1..20: note = chemically synthesized
  source 1..20: mol_type = other DNA
gacagccaaactgagatacc

SEQ ID NO: 33346 - DNA, 20 bp, synthetic construct
  misc_feature 1..20: note = chemically synthesized
  source 1..20: mol_type = other DNA
acagccaaactgagataccc

SEQ ID NO: 33347 - DNA, 20 bp, synthetic construct
  misc_feature 1..20: note = chemically synthesized
  source 1..20: mol_type = other DNA
gccaaactgagatacccagg

SEQ ID NO: 33348 - DNA, 20 bp, synthetic construct
  misc_feature 1..20: note = chemically synthesized
  source 1..20: mol_type = other DNA
aaactgagatacccaggcgg

SEQ ID NO: 33349 - DNA, 20 bp, synthetic construct
  misc_feature 1..20: note = chemically synthesized
  source 1..20: mol_type = other DNA
tgagatacccaggcggtggt

SEQ ID NO: 33350 - DNA, 20 bp, synthetic construct
  misc_feature 1..20: note = chemically synthesized
  source 1..20: mol_type = other DNA
ccaggcggtggttggattta

SEQ ID NO: 33351 - DNA, 20 bp, synthetic construct
  misc_feature 1..20: note = chemically synthesized
  source 1..20: mol_type = other DNA
ggtggttggatttatggatc

SEQ ID NO: 33352 - DNA, 20 bp, synthetic construct
  misc_feature 1..20: note = chemically synthesized
  source 1..20: mol_type = other DNA
ggatttatggatctggattt

SEQ ID NO: 33353 - DNA, 20 bp, synthetic construct
  misc_feature 1..20: note = chemically synthesized
  source 1..20: mol_type = other DNA
gatttatggatctggatttc

SEQ ID NO: 33354 - DNA, 20 bp, synthetic construct
  misc_feature 1..20: note = chemically synthesized
  source 1..20: mol_type = other DNA
atttatggatctggatttca

SEQ ID NO: 33355 - DNA, 20 bp, synthetic construct
  misc_feature 1..20: note = chemically synthesized
  source 1..20: mol_type = other DNA
tttatggatctggatttcag

SEQ ID NO: 33356 - DNA, 20 bp, synthetic construct
  misc_feature 1..20: note = chemically synthesized
  source 1..20: mol_type = other DNA
tatggatctggatttcaggg

SEQ ID NO: 33357 - DNA, 20 bp, synthetic construct
  misc_feature 1..20: note = chemically synthesized
  source 1..20: mol_type = other DNA
ggatctggatttcaggggag

SEQ ID NO: 33358 - DNA, 20 bp, synthetic construct
  misc_feature 1..20: note = chemically synthesized
  source 1..20: mol_type = other DNA
gatctggatttcaggggagt

SEQ ID NO: 33359 - DNA, 20 bp, synthetic construct
  misc_feature 1..20: note = chemically synthesized
  source 1..20: mol_type = other DNA
ctggatttcaggggagtggg

SEQ ID NO: 33360 - DNA, 20 bp, synthetic construct
  misc_feature 1..20: note = chemically synthesized
  source 1..20: mol_type = other DNA
tggatttcaggggagtgggc

SEQ ID NO: 33361 - DNA, 20 bp, synthetic construct
  misc_feature 1..20: note = chemically synthesized
  source 1..20: mol_type = other DNA
ggatttcaggggagtgggca

SEQ ID NO: 33362 - DNA, 20 bp, synthetic construct
  misc_feature 1..20: note = chemically synthesized
  source 1..20: mol_type = other DNA
ttcaggggagtgggcagggc

SEQ ID NO: 33363 - DNA, 20 bp, synthetic construct
  misc_feature 1..20: note = chemically synthesized
  source 1..20: mol_type = other DNA
tcaggggagtgggcagggct

SEQ ID NO: 33364 - DNA, 20 bp, synthetic construct
  misc_feature 1..20: note = chemically synthesized
  source 1..20: mol_type = other DNA
caggggagtgggcagggcta

SEQ ID NO: 33365 - DNA, 20 bp, synthetic construct
  misc_feature 1..20: note = chemically synthesized
  source 1..20: mol_type = other DNA
aggggagtgggcagggctag

SEQ ID NO: 33366 - DNA, 20 bp, synthetic construct
  misc_feature 1..20: note = chemically synthesized
  source 1..20: mol_type = other DNA
agtgggcagggctaggggaa

SEQ ID NO: 33367 - DNA, 20 bp, synthetic construct
  misc_feature 1..20: note = chemically synthesized
  source 1..20: mol_type = other DNA
agggctaggggaatagaact

SEQ ID NO: 33368 - DNA, 20 bp, synthetic construct
  misc_feature 1..20: note = chemically synthesized
  source 1..20: mol_type = other DNA
gggctaggggaatagaactg

SEQ ID NO: 33369 - DNA, 20 bp, synthetic construct
  misc_feature 1..20: note = chemically synthesized
  source 1..20: mol_type = other DNA
ggctaggggaatagaactga

SEQ ID NO: 33370 - DNA, 20 bp, synthetic construct
  misc_feature 1..20: note = chemically synthesized
  source 1..20: mol_type = other DNA
agaactgagggtcatgatgt

SEQ ID NO: 33371 - DNA, 20 bp, synthetic construct
  misc_feature 1..20: note = chemically synthesized
  source 1..20: mol_type = other DNA
actgagggtcatgatgtcag

SEQ ID NO: 33372 - DNA, 20 bp, synthetic construct
  misc_feature 1..20: note = chemically synthesized
  source 1..20: mol_type = other DNA
gagggtcatgatgtcagtgg

SEQ ID NO: 33373 - DNA, 20 bp, synthetic construct
  misc_feature 1..20: note = chemically synthesized
  source 1..20: mol_type = other DNA
agggtcatgatgtcagtggt

SEQ ID NO: 33374 - DNA, 20 bp, synthetic construct
  misc_feature 1..20: note = chemically synthesized
  source 1..20: mol_type = other DNA
ggtcatgatgtcagtggtag

SEQ ID NO: 33375 - DNA, 20 bp, synthetic construct
  misc_feature 1..20: note = chemically synthesized
  source 1..20: mol_type = other DNA
gatgtcagtggtaggagttg

SEQ ID NO: 33376 - DNA, 20 bp, synthetic construct
  misc_feature 1..20: note = chemically synthesized
  source 1..20: mol_type = other DNA
agtggtaggagttgaagtct

SEQ ID NO: 33377 - DNA, 20 bp, synthetic construct
  misc_feature 1..20: note = chemically synthesized
  source 1..20: mol_type = other DNA
ggtaggagttgaagtcttgg

SEQ ID NO: 33378 - DNA, 20 bp, synthetic construct
  misc_feature 1..20: note = chemically synthesized
  source 1..20: mol_type = other DNA
ggagttgaagtcttggaaga

SEQ ID NO: 33379 - DNA, 20 bp, synthetic construct
  misc_feature 1..20: note = chemically synthesized
  source 1..20: mol_type = other DNA
agttgaagtcttggaagaaa

SEQ ID NO: 33380 - DNA, 20 bp, synthetic construct
  misc_feature 1..20: note = chemically synthesized
  source 1..20: mol_type = other DNA
tgaagtcttggaagaaagag

SEQ ID NO: 33381 - DNA, 20 bp, synthetic construct
  misc_feature 1..20: note = chemically synthesized
  source 1..20: mol_type = other DNA
gtcttggaagaaagagtaga

SEQ ID NO: 33382 - DNA, 20 bp, synthetic construct
  misc_feature 1..20: note = chemically synthesized
  source 1..20: mol_type = other DNA
ttttctgatgaacattctat

SEQ ID NO: 33383 - DNA, 20 bp, synthetic construct
  misc_feature 1..20: note = chemically synthesized
  source 1..20: mol_type = other DNA
tttctgatgaacattctatg

SEQ ID NO: 33384 - DNA, 20 bp, synthetic construct
  misc_feature 1..20: note = chemically synthesized
  source 1..20: mol_type = other DNA
ctgatgaacattctatgagg

SEQ ID NO: 33385 - DNA, 20 bp, synthetic construct
  misc_feature 1..20: note = chemically synthesized
  source 1..20: mol_type = other DNA
gaacattctatgaggaagtt

SEQ ID NO: 33386 - DNA, 20 bp, synthetic construct
  misc_feature 1..20: note = chemically synthesized
  source 1..20: mol_type = other DNA
cattctatgaggaagttcag

SEQ ID NO: 33387 - DNA, 20 bp, synthetic construct
  misc_feature 1..20: note = chemically synthesized
  source 1..20: mol_type = other DNA
ttctatgaggaagttcagca

SEQ ID NO: 33388 - DNA, 20 bp, synthetic construct
  misc_feature 1..20: note = chemically synthesized
  source 1..20: mol_type = other DNA
tctatgaggaagttcagcag

SEQ ID NO: 33389 - DNA, 20 bp, synthetic construct
  misc_feature 1..20: note = chemically synthesized
  source 1..20: mol_type = other DNA
tgaggaagttcagcagaggt

SEQ ID NO: 33390 - DNA, 20 bp, synthetic construct
  misc_feature 1..20: note = chemically synthesized
  source 1..20: mol_type = other DNA
cctatcctgctgtcatgttt

SEQ ID NO: 33391 - DNA, 20 bp, synthetic construct
  misc_feature 1..20: note = chemically synthesized
  source 1..20: mol_type = other DNA
tttaagcaacttattatgca

SEQ ID NO: 33392 - DNA, 20 bp, synthetic construct
  misc_feature 1..20: note = chemically synthesized
  source 1..20: mol_type = other DNA
caacttattatgcacagcac

SEQ ID NO: 33393 - DNA, 20 bp, synthetic construct
  misc_feature 1..20: note = chemically synthesized
  source 1..20: mol_type = other DNA
aacttattatgcacagcacc

SEQ ID NO: 33394 - DNA, 20 bp, synthetic construct
  misc_feature 1..20: note = chemically synthesized
  source 1..20: mol_type = other DNA
catcaatgtaaattgcatgc

SEQ ID NO: 33395 - DNA, 20 bp, synthetic construct
  misc_feature 1..20: note = chemically synthesized
  source 1..20: mol_type = other DNA
tgcatgccagtctttgctct

SEQ ID NO: 33396 - DNA, 20 bp, synthetic construct
  misc_feature 1..20: note = chemically synthesized
  source 1..20: mol_type = other DNA
agtctttgctctcagtttca

SEQ ID NO: 33397 - DNA, 20 bp, synthetic construct
  misc_feature 1..20: note = chemically synthesized
  source 1..20: mol_type = other DNA
gtctttgctctcagtttcaa

SEQ ID NO: 33398 - DNA, 20 bp, synthetic construct
  misc_feature 1..20: note = chemically synthesized
  source 1..20: mol_type = other DNA
cctgctgtctaatctttaca

SEQ ID NO: 33399 - DNA, 20 bp, synthetic construct
  misc_feature 1..20: note = chemically synthesized
  source 1..20: mol_type = other DNA
ctgtctaatctttacaaaga

SEQ ID NO: 33400 - DNA, 20 bp, synthetic construct
  misc_feature 1..20: note = chemically synthesized
  source 1..20: mol_type = other DNA
tgtctaatctttacaaagaa

SEQ ID NO: 33401 - DNA, 20 bp, synthetic construct
  misc_feature 1..20: note = chemically synthesized
  source 1..20: mol_type = other DNA
ttacaaagaaaggttaactc

SEQ ID NO: 33402 - DNA, 20 bp, synthetic construct
  misc_feature 1..20: note = chemically synthesized
  source 1..20: mol_type = other DNA
acaaagaaaggttaactcca

SEQ ID NO: 33403 - DNA, 20 bp, synthetic construct
  misc_feature 1..20: note = chemically synthesized
  source 1..20: mol_type = other DNA
caaagaaaggttaactccag

SEQ ID NO: 33404 - DNA, 20 bp, synthetic construct
  misc_feature 1..20: note = chemically synthesized
  source 1..20: mol_type = other DNA
gaaaggttaactccagaggt

SEQ ID NO: 33405 - DNA, 20 bp, synthetic construct
  misc_feature 1..20: note = chemically synthesized
  source 1..20: mol_type = other DNA
aaaggttaactccagaggtc

SEQ ID NO: 33406 - DNA, 20 bp, synthetic construct
  misc_feature 1..20: note = chemically synthesized
  source 1..20: mol_type = other DNA
agaggtcaggaatctgaaca

SEQ ID NO: 33407 - DNA, 20 bp, synthetic construct
  misc_feature 1..20: note = chemically synthesized
  source 1..20: mol_type = other DNA
ggaatctgaacacagaaaac

SEQ ID NO: 33408 - DNA, 20 bp, synthetic construct
  misc_feature 1..20: note = chemically synthesized
  source 1..20: mol_type = other DNA
ttaatgaatatgtcaacaca

SEQ ID NO: 33409 - DNA, 20 bp, synthetic construct
  misc_feature 1..20: note = chemically synthesized
  source 1..20: mol_type = other DNA
atgaaatcacatttacacaa

SEQ ID NO: 33410 - DNA, 20 bp, synthetic construct
  misc_feature 1..20: note = chemically synthesized
  source 1..20: mol_type = other DNA
catttacacaaaagtacaac

SEQ ID NO: 33411 - DNA, 20 bp, synthetic construct
  misc_feature 1..20: note = chemically synthesized
  source 1..20: mol_type = other DNA
atttacacaaaagtacaact

SEQ ID NO: 33412 - DNA, 20 bp, synthetic construct
  misc_feature 1..20: note = chemically synthesized
  source 1..20: mol_type = other DNA
tttacacaaaagtacaactg

SEQ ID NO: 33413 - DNA, 20 bp, synthetic construct
  misc_feature 1..20: note = chemically synthesized
  source 1..20: mol_type = other DNA
cacaaaagtacaactggggt

SEQ ID NO: 33414 - DNA, 20 bp, synthetic construct
  misc_feature 1..20: note = chemically synthesized
  source 1..20: mol_type = other DNA
actggggtaagaaaattcaa

SEQ ID NO: 33415 - DNA, 20 bp, synthetic construct
  misc_feature 1..20: note = chemically synthesized
  source 1..20: mol_type = other DNA
gtaagaaaattcaaaagata

SEQ ID NO: 33416 - DNA, 20 bp, synthetic construct
  misc_feature 1..20: note = chemically synthesized
  source 1..20: mol_type = other DNA
atgaaataccctatgtattt

SEQ ID NO: 33417 - DNA, 20 bp, synthetic construct
  misc_feature 1..20: note = chemically synthesized
  source 1..20: mol_type = other DNA
aataccctatgtatttgagt

SEQ ID NO: 33418 - DNA, 20 bp, synthetic construct
  misc_feature 1..20: note = chemically synthesized
  source 1..20: mol_type = other DNA
atgtatttgagtaagttgct

SEQ ID NO: 33419 - DNA, 20 bp, synthetic construct
  misc_feature 1..20: note = chemically synthesized
  source 1..20: mol_type = other DNA
tgcttagcttctcccaacct

SEQ ID NO: 33420 - DNA, 20 bp, synthetic construct
  misc_feature 1..20: note = chemically synthesized
  source 1..20: mol_type = other DNA
gtttcctcatttctaaaacg

SEQ ID NO: 33421 - DNA, 20 bp, synthetic construct
  misc_feature 1..20: note = chemically synthesized
  source 1..20: mol_type = other DNA
cgaagaacttgcttaatatt

SEQ ID NO: 33422 - DNA, 20 bp, synthetic construct
  misc_feature 1..20: note = chemically synthesized
  source 1..20: mol_type = other DNA
gaagaacttgcttaatattc

SEQ ID NO: 33423 - DNA, 20 bp, synthetic construct
  misc_feature 1..20: note = chemically synthesized
  source 1..20: mol_type = other DNA
cttgcttaatattcaggctc

SEQ ID NO: 33424 - DNA, 20 bp, synthetic construct
  misc_feature 1..20: note = chemically synthesized
  source 1..20: mol_type = other DNA
ttgcttaatattcaggctct

SEQ ID NO: 33425 - DNA, 20 bp, synthetic construct
  misc_feature 1..20: note = chemically synthesized
  source 1..20: mol_type = other DNA
ccaccaaatccttgattcac

SEQ ID NO: 33426 - DNA, 20 bp, synthetic construct
  misc_feature 1..20: note = chemically synthesized
  source 1..20: mol_type = other DNA
aatccttgattcactggctc

SEQ ID NO: 33427 - DNA, 20 bp, synthetic construct
  misc_feature 1..20: note = chemically synthesized
  source 1..20: mol_type = other DNA
atccttgattcactggctct

SEQ ID NO: 33428 - DNA, 20 bp, synthetic construct
  misc_feature 1..20: note = chemically synthesized
  source 1..20: mol_type = other DNA
gctctgggtctgtatgtaac

SEQ ID NO: 33429 - DNA, 20 bp, synthetic construct
  misc_feature 1..20: note = chemically synthesized
  source 1..20: mol_type = other DNA
gtctgtatgtaacaagcttc

SEQ ID NO: 33430 - DNA, 20 bp, synthetic construct
  misc_feature 1..20: note = chemically synthesized
  source 1..20: mol_type = other DNA
ctgtatgtaacaagcttctg

SEQ ID NO: 33431 - DNA, 20 bp, synthetic construct
  misc_feature 1..20: note = chemically synthesized
  source 1..20: mol_type = other DNA
tctggagtgattctaatgat

SEQ ID NO: 33432 - DNA, 20 bp, synthetic construct
  misc_feature 1..20: note = chemically synthesized
  source 1..20: mol_type = other DNA
gagtgattctaatgattagc

SEQ ID NO: 33433 - DNA, 20 bp, synthetic construct
  misc_feature 1..20: note = chemically synthesized
  source 1..20: mol_type = other DNA
gtgattctaatgattagcca

SEQ ID NO: 33434 - DNA, 20 bp, synthetic construct
  misc_feature 1..20: note = chemically synthesized
  source 1..20: mol_type = other DNA
ttctaatgattagccagaga

SEQ ID NO: 33435 - DNA, 20 bp, synthetic construct
  misc_feature 1..20: note = chemically synthesized
  source 1..20: mol_type = other DNA
tctaatgattagccagagac

SEQ ID NO: 33436 - DNA, 20 bp, synthetic construct
  misc_feature 1..20: note = chemically synthesized
  source 1..20: mol_type = other DNA
aaaaattaccacaaatttat

SEQ ID NO: 33437 - DNA, 20 bp, synthetic construct
  misc_feature 1..20: note = chemically synthesized
  source 1..20: mol_type = other DNA
aacacaaatgtattatcttg

SEQ ID NO: 33438 - DNA, 20 bp, synthetic construct
  misc_feature 1..20: note = chemically synthesized
  source 1..20: mol_type = other DNA
aatgtattatcttgaagttg

SEQ ID NO: 33439 - DNA, 20 bp, synthetic construct
  misc_feature 1..20: note = chemically synthesized
  source 1..20: mol_type = other DNA
tgtattatcttgaagttgtg

SEQ ID NO: 33440 - DNA, 20 bp, synthetic construct
  misc_feature 1..20: note = chemically synthesized
  source 1..20: mol_type = other DNA
gtattatcttgaagttgtgg

SEQ ID NO: 33441 - DNA, 20 bp, synthetic construct
  misc_feature 1..20: note = chemically synthesized
  source 1..20: mol_type = other DNA
tatcttgaagttgtggaggt

SEQ ID NO: 33442 - DNA, 20 bp, synthetic construct
  misc_feature 1..20: note = chemically synthesized
  source 1..20: mol_type = other DNA
cttgaagttgtggaggtcag

SEQ ID NO: 33443 - DNA, 20 bp, synthetic construct
  misc_feature 1..20: note = chemically synthesized
  source 1..20: mol_type = other DNA
ggaggtcagaagtctgaaat

SEQ ID NO: 33444 - DNA, 20 bp, synthetic construct
  misc_feature 1..20: note = chemically synthesized
  source 1..20: mol_type = other DNA
aagtctgaaatcggtttcac

SEQ ID NO: 33445 - DNA, 20 bp, synthetic construct
  misc_feature 1..20: note = chemically synthesized
  source 1..20: mol_type = other DNA
agtctgaaatcggtttcact

SEQ ID NO: 33446 - DNA, 20 bp, synthetic construct
  misc_feature 1..20: note = chemically synthesized
  source 1..20: mol_type = other DNA
aaatcggtttcactgggcta

SEQ ID NO: 33447 - DNA, 20 bp, synthetic construct
  misc_feature 1..20: note = chemically synthesized
  source 1..20: mol_type = other DNA
ggtttcactgggctaaagtc

SEQ ID NO: 33448 - DNA, 20 bp, synthetic construct
  misc_feature 1..20: note = chemically synthesized
  source 1..20: mol_type = other DNA
gtttcactgggctaaagtcg

SEQ ID NO: 33449 - DNA, 20 bp, synthetic construct
  misc_feature 1..20: note = chemically synthesized
  source 1..20: mol_type = other DNA
ctgggctaaagtcgaggtgt

SEQ ID NO: 33450 - DNA, 20 bp, synthetic construct
  misc_feature 1..20: note = chemically synthesized
  source 1..20: mol_type = other DNA
ctaaagtcgaggtgtcagtg

SEQ ID NO: 33451 - DNA, 20 bp, synthetic construct
  misc_feature 1..20: note = chemically synthesized
  source 1..20: mol_type = other DNA
gtcagtgtggctgtttcttc

SEQ ID NO: 33452 - DNA, 20 bp, synthetic construct
  misc_feature 1..20: note = chemically synthesized
  source 1..20: mol_type = other DNA
cagtgtggctgtttcttctg

SEQ ID NO: 33453 - DNA, 20 bp, synthetic construct
  misc_feature 1..20: note = chemically synthesized
  source 1..20: mol_type = other DNA
gtttcttctggagactctat

SEQ ID NO: 33454 - DNA, 20 bp, synthetic construct
  misc_feature 1..20: note = chemically synthesized
  source 1..20: mol_type = other DNA
ttcttctggagactctatga

SEQ ID NO: 33455 - DNA, 20 bp, synthetic construct
  misc_feature 1..20: note = chemically synthesized
  source 1..20: mol_type = other DNA
gtgttttcctgccttttcca

SEQ ID NO: 33456 - DNA, 20 bp, synthetic construct
  misc_feature 1..20: note = chemically synthesized
  source 1..20: mol_type = other DNA
atggattctgtttcctcttc

SEQ ID NO: 33457 - DNA, 20 bp, synthetic construct
  misc_feature 1..20: note = chemically synthesized
  source 1..20: mol_type = other DNA
ggattctgtttcctcttcta

SEQ ID NO: 33458 - DNA, 20 bp, synthetic construct
  misc_feature 1..20: note = chemically synthesized
  source 1..20: mol_type = other DNA
gattctgtttcctcttctag

SEQ ID NO: 33459 - DNA, 20 bp, synthetic construct
  misc_feature 1..20: note = chemically synthesized
  source 1..20: mol_type = other DNA
tagaggctacccacattcct

SEQ ID NO: 33460 - DNA, 20 bp, synthetic construct
  misc_feature 1..20: note = chemically synthesized
  source 1..20: mol_type = other DNA
tacccacattccttggtttg

SEQ ID NO: 33461 - DNA, 20 bp, synthetic construct
  misc_feature 1..20: note = chemically synthesized
  source 1..20: mol_type = other DNA
gtcacattttctcctcttat

SEQ ID NO: 33462 - DNA, 20 bp, synthetic construct
  misc_feature 1..20: note = chemically synthesized
  source 1..20: mol_type = other DNA
atgacacttgtgattacatt

SEQ ID NO: 33463 - DNA, 20 bp, synthetic construct
  misc_feature 1..20: note = chemically synthesized
  source 1..20: mol_type = other DNA
tgacacttgtgattacattt

SEQ ID NO: 33464 - DNA, 20 bp, synthetic construct
  misc_feature 1..20: note = chemically synthesized
  source 1..20: mol_type = other DNA
ttaggatacacccaaataat

SEQ ID NO: 33465 - DNA, 20 bp, synthetic construct
  misc_feature 1..20: note = chemically synthesized
  source 1..20: mol_type = other DNA
taggatacacccaaataatt

SEQ ID NO: 33466 - DNA, 20 bp, synthetic construct
  misc_feature 1..20: note = chemically synthesized
  source 1..20: mol_type = other DNA
ttaggatatctccccatccc

SEQ ID NO: 33467 - DNA, 20 bp, synthetic construct
  misc_feature 1..20: note = chemically synthesized
  source 1..20: mol_type = other DNA
atccttaattatatatgcaa

SEQ ID NO: 33468 - DNA, 20 bp, synthetic construct
  misc_feature 1..20: note = chemically synthesized
  source 1..20: mol_type = other DNA
tatatatgcaaaagtctgtt

SEQ ID NO: 33469 - DNA, 20 bp, synthetic construct
  misc_feature 1..20: note = chemically synthesized
  source 1..20: mol_type = other DNA
tatgcaaaagtctgtttggc

SEQ ID NO: 33470 - DNA, 20 bp, synthetic construct
  misc_feature 1..20: note = chemically synthesized
  source 1..20: mol_type = other DNA
aaaagtctgtttggctagaa

SEQ ID NO: 33471 - DNA, 20 bp, synthetic construct
  misc_feature 1..20: note = chemically synthesized
  source 1..20: mol_type = other DNA
gctagaaaagataatactca

SEQ ID NO: 33472 - DNA, 20 bp, synthetic construct
  misc_feature 1..20: note = chemically synthesized
  source 1..20: mol_type = other DNA
ctagaaaagataatactcac

SEQ ID NO: 33473 - DNA, 20 bp, synthetic construct
  misc_feature 1..20: note = chemically synthesized
  source 1..20: mol_type = other DNA
aagataatactcacaggttt

SEQ ID NO: 33474 - DNA, 20 bp, synthetic construct
  misc_feature 1..20: note = chemically synthesized
  source 1..20: mol_type = other DNA
agataatactcacaggtttc

SEQ ID NO: 33475 - DNA, 20 bp, synthetic construct
  misc_feature 1..20: note = chemically synthesized
  source 1..20: mol_type = other DNA
gataatactcacaggtttca

SEQ ID NO: 33476 - DNA, 20 bp, synthetic construct
  misc_feature 1..20: note = chemically synthesized
  source 1..20: mol_type = other DNA
ataatactcacaggtttcag

SEQ ID NO: 33477 - DNA, 20 bp, synthetic construct
  misc_feature 1..20: note = chemically synthesized
  source 1..20: mol_type = other DNA
actcacaggtttcaggggtt

SEQ ID NO: 33478 - DNA, 20 bp, synthetic construct
  misc_feature 1..20: note = chemically synthesized
  source 1..20: mol_type = other DNA
gttaagccatacatatcttt

SEQ ID NO: 33479 - DNA, 20 bp, synthetic construct
  misc_feature 1..20: note = chemically synthesized
  source 1..20: mol_type = other DNA
taagccatacatatctttca

SEQ ID NO: 33480 - DNA, 20 bp, synthetic construct
  misc_feature 1..20: note = chemically synthesized
  source 1..20: mol_type = other DNA
ccatacatatctttcagagt

SEQ ID NO: 33481 - DNA, 20 bp, synthetic construct
  misc_feature 1..20: note = chemically synthesized
  source 1..20: mol_type = other DNA
tatctttcagagtgagccat

SEQ ID NO: 33482 - DNA, 20 bp, synthetic construct
  misc_feature 1..20: note = chemically synthesized
  source 1..20: mol_type = other DNA
gtgagccattagccattatt

SEQ ID NO: 33483 - DNA, 20 bp, synthetic construct
  misc_feature 1..20: note = chemically synthesized
  source 1..20: mol_type = other DNA
agcctactgcgataatgtgc

SEQ ID NO: 33484 - DNA, 20 bp, synthetic construct
  misc_feature 1..20: note = chemically synthesized
  source 1..20: mol_type = other DNA
ctatgttctatgttcccatc

SEQ ID NO: 33485 - DNA, 20 bp, synthetic construct
  misc_feature 1..20: note = chemically synthesized
  source 1..20: mol_type = other DNA
tatgttctatgttcccatca

SEQ ID NO: 33486 - DNA, 20 bp, synthetic construct
  misc_feature 1..20: note = chemically synthesized
  source 1..20: mol_type = other DNA
atgttcccatcaaggttaat

SEQ ID NO: 33487 - DNA, 20 bp, synthetic construct
  misc_feature 1..20: note = chemically synthesized
  source 1..20: mol_type = other DNA
tcaaggttaattagaaatat

SEQ ID NO: 33488 - DNA, 20 bp, synthetic construct
  misc_feature 1..20: note = chemically synthesized
  source 1..20: mol_type = other DNA
aatattagactctttttcca

SEQ ID NO: 33489 - DNA, 20 bp, synthetic construct
  misc_feature 1..20: note = chemically synthesized
  source 1..20: mol_type = other DNA
ttccacagaaaaaaaaaatg

SEQ ID NO: 33490 - DNA, 20 bp, synthetic construct
  misc_feature 1..20: note = chemically synthesized
  source 1..20: mol_type = other DNA
cacagaaaaaaaaaatgtag

SEQ ID NO: 33491 - DNA, 20 bp, synthetic construct
  misc_feature 1..20: note = chemically synthesized
  source 1..20: mol_type = other DNA
agaaaaaaaaaatgtagcag

SEQ ID NO: 33492 - DNA, 20 bp, synthetic construct
  misc_feature 1..20: note = chemically synthesized
  source 1..20: mol_type = other DNA
ctctctctttccttcatgcc

SEQ ID NO: 33493 - DNA, 20 bp, synthetic construct
  misc_feature 1..20: note = chemically synthesized
  source 1..20: mol_type = other DNA
ctctttccttcatgcccagt

SEQ ID NO: 33494 - DNA, 20 bp, synthetic construct
  misc_feature 1..20: note = chemically synthesized
  source 1..20: mol_type = other DNA
ctttccttcatgcccagtaa

SEQ ID NO: 33495 - DNA, 20 bp, synthetic construct
  misc_feature 1..20: note = chemically synthesized
  source 1..20: mol_type = other DNA
tttccttcatgcccagtaag

SEQ ID NO: 33496 - DNA, 20 bp, synthetic construct
  misc_feature 1..20: note = chemically synthesized
  source 1..20: mol_type = other DNA
ccttcatgcccagtaagagg

SEQ ID NO: 33497 - DNA, 20 bp, synthetic construct
  misc_feature 1..20: note = chemically synthesized
  source 1..20: mol_type = other DNA
catgcccagtaagaggaagt

SEQ ID NO: 33498 - DNA, 20 bp, synthetic construct
  misc_feature 1..20: note = chemically synthesized
  source 1..20: mol_type = other DNA
atgcccagtaagaggaagtg

SEQ ID NO: 33499 - DNA, 20 bp, synthetic construct
  misc_feature 1..20: note = chemically synthesized
  source 1..20: mol_type = other DNA
gcaccatctgttcatctcat

SEQ ID NO: 33500 - DNA, 20 bp, synthetic construct
  misc_feature 1..20: note = chemically synthesized
  source 1..20: mol_type = other DNA
caccatctgttcatctcatc

SEQ ID NO: 33501 - DNA, 20 bp, synthetic construct
  misc_feature 1..20: note = chemically synthesized
  source 1..20: mol_type = other DNA
tcatctcatcaggtgttacc

SEQ ID NO: 33502 - DNA, 20 bp, synthetic construct
  misc_feature 1..20: note = chemically synthesized
  source 1..20: mol_type = other DNA
catcaggtgttacctagaat

SEQ ID NO: 33503 - DNA, 20 bp, synthetic construct
  misc_feature 1..20: note = chemically synthesized
  source 1..20: mol_type = other DNA
tcaggtgttacctagaatca

SEQ ID NO: 33504 - DNA, 20 bp, synthetic construct
  misc_feature 1..20: note = chemically synthesized
  source 1..20: mol_type = other DNA
gtgttacctagaatcagagt

SEQ ID NO: 33505 - DNA, 20 bp, synthetic construct
  misc_feature 1..20: note = chemically synthesized
  source 1..20: mol_type = other DNA
tgttacctagaatcagagtc

SEQ ID NO: 33506 - DNA, 20 bp, synthetic construct
  misc_feature 1..20: note = chemically synthesized
  source 1..20: mol_type = other DNA
ttacctagaatcagagtcag

SEQ ID NO: 33507 - DNA, 20 bp, synthetic construct
  misc_feature 1..20: note = chemically synthesized
  source 1..20: mol_type = other DNA
ctagaatcagagtcaggaga

SEQ ID NO: 33508 - DNA, 20 bp, synthetic construct
  misc_feature 1..20: note = chemically synthesized
  source 1..20: mol_type = other DNA
cctcataaaactactctgac

SEQ ID NO: 33509 - DNA, 20 bp, synthetic construct
  misc_feature 1..20: note = chemically synthesized
  source 1..20: mol_type = other DNA
ctgacaagtaaaccatatcc

SEQ ID NO: 33510 - DNA, 20 bp, synthetic construct
  misc_feature 1..20: note = chemically synthesized
  source 1..20: mol_type = other DNA
tgacaagtaaaccatatcct

SEQ ID NO: 33511 - DNA, 20 bp, synthetic construct
  misc_feature 1..20: note = chemically synthesized
  source 1..20: mol_type = other DNA
gacaagtaaaccatatcctg

SEQ ID NO: 33512 - DNA, 20 bp, synthetic construct
  misc_feature 1..20: note = chemically synthesized
  source 1..20: mol_type = other DNA
gtaaaccatatcctggggac

SEQ ID NO: 33513 - DNA, 20 bp, synthetic construct
  misc_feature 1..20: note = chemically synthesized
  source 1..20: mol_type = other DNA
taaaccatatcctggggacc

SEQ ID NO: 33514 - DNA, 20 bp, synthetic construct
  misc_feature 1..20: note = chemically synthesized
  source 1..20: mol_type = other DNA
ccatatcctggggaccaggt

SEQ ID NO: 33515 - DNA, 20 bp, synthetic construct
  misc_feature 1..20: note = chemically synthesized
  source 1..20: mol_type = other DNA
gggaccaggtgagaattaaa

SEQ ID NO: 33516 - DNA, 20 bp, synthetic construct
  misc_feature 1..20: note = chemically synthesized
  source 1..20: mol_type = other DNA
ttaaaaagctgtatactcat

SEQ ID NO: 33517 - DNA, 20 bp, synthetic construct
  misc_feature 1..20: note = chemically synthesized
  source 1..20: mol_type = other DNA
tgtatactcataagctgcca

SEQ ID NO: 33518 - DNA, 20 bp, synthetic construct
  misc_feature 1..20: note = chemically synthesized
  source 1..20: mol_type = other DNA
tatactcataagctgccaaa

SEQ ID NO: 33519 - DNA, 20 bp, synthetic construct
  misc_feature 1..20: note = chemically synthesized
  source 1..20: mol_type = other DNA
ataagctgccaaagagctga

SEQ ID NO: 33520 - DNA, 20 bp, synthetic construct
  misc_feature 1..20: note = chemically synthesized
  source 1..20: mol_type = other DNA
ccaaagagctgatggtactg

SEQ ID NO: 33521 - DNA, 20 bp, synthetic construct
  misc_feature 1..20: note = chemically synthesized
  source 1..20: mol_type = other DNA
ctgatggtactgaagtcaca

SEQ ID NO: 33522 - DNA, 20 bp, synthetic construct
  misc_feature 1..20: note = chemically synthesized
  source 1..20: mol_type = other DNA
gatggtactgaagtcacatg

SEQ ID NO: 33523 - DNA, 20 bp, synthetic construct
  misc_feature 1..20: note = chemically synthesized
  source 1..20: mol_type = other DNA
tactgaagtcacatggagct

SEQ ID NO: 33524 - DNA, 20 bp, synthetic construct
  misc_feature 1..20: note = chemically synthesized
  source 1..20: mol_type = other DNA
actgaagtcacatggagctc

SEQ ID NO: 33525 - DNA, 20 bp, synthetic construct
  misc_feature 1..20: note = chemically synthesized
  source 1..20: mol_type = other DNA
caggaatttattcttgcatt

SEQ ID NO: 33526 - DNA, 20 bp, synthetic construct
  misc_feature 1..20: note = chemically synthesized
  source 1..20: mol_type = other DNA
aatttattcttgcatttaga

SEQ ID NO: 33527 - DNA, 20 bp, synthetic construct
  misc_feature 1..20: note = chemically synthesized
  source 1..20: mol_type = other DNA
atgcatataattctctcgaa

SEQ ID NO: 33528 - DNA, 20 bp, synthetic construct
  misc_feature 1..20: note = chemically synthesized
  source 1..20: mol_type = other DNA
atgaaatcatatttttctgt

SEQ ID NO: 33529 - DNA, 20 bp, synthetic construct
  misc_feature 1..20: note = chemically synthesized
  source 1..20: mol_type = other DNA
ttctgtcggatcaaattatt

SEQ ID NO: 33530 - DNA, 20 bp, synthetic construct
  misc_feature 1..20: note = chemically synthesized
  source 1..20: mol_type = other DNA
ttattcagaaatccgaactg

SEQ ID NO: 33531 - DNA, 20 bp, synthetic construct
  misc_feature 1..20: note = chemically synthesized
  source 1..20: mol_type = other DNA
caaacacacttgcttaatgt

SEQ ID NO: 33532 - DNA, 20 bp, synthetic construct
  misc_feature 1..20: note = chemically synthesized
  source 1..20: mol_type = other DNA
tttaatcttatttttgtaca

SEQ ID NO: 33533 - DNA, 20 bp, synthetic construct
  misc_feature 1..20: note = chemically synthesized
  source 1..20: mol_type = other DNA
gtacacagtatacttttaca

SEQ ID NO: 33534 - DNA, 20 bp, synthetic construct
  misc_feature 1..20: note = chemically synthesized
  source 1..20: mol_type = other DNA
tacacagtatacttttacat

SEQ ID NO: 33535 - DNA, 20 bp, synthetic construct
  misc_feature 1..20: note = chemically synthesized
  source 1..20: mol_type = other DNA
cttttacataggcactgaac

SEQ ID NO: 33536 - DNA, 20 bp, synthetic construct
  misc_feature 1..20: note = chemically synthesized
  source 1..20: mol_type = other DNA
tacataggcactgaaccagc

SEQ ID NO: 33537 - DNA, 20 bp, synthetic construct
  misc_feature 1..20: note = chemically synthesized
  source 1..20: mol_type = other DNA
accagctggaaatgaatgct

SEQ ID NO: 33538 - DNA, 20 bp, synthetic construct
  misc_feature 1..20: note = chemically synthesized
  source 1..20: mol_type = other DNA
aatgaatgcttggattttcg

SEQ ID NO: 33539 - DNA, 20 bp, synthetic construct
  misc_feature 1..20: note = chemically synthesized
  source 1..20: mol_type = other DNA
tggattttcgcagctgataa

SEQ ID NO: 33540 - DNA, 20 bp, synthetic construct
  misc_feature 1..20: note = chemically synthesized
  source 1..20: mol_type = other DNA
attttcgcagctgataaaag

SEQ ID NO: 33541 - DNA, 20 bp, synthetic construct
  misc_feature 1..20: note = chemically synthesized
  source 1..20: mol_type = other DNA
tttcgcagctgataaaagca

SEQ ID NO: 33542 - DNA, 20 bp, synthetic construct
  misc_feature 1..20: note = chemically synthesized
  source 1..20: mol_type = other DNA
cagctgataaaagcagagtt

SEQ ID NO: 33543 - DNA, 20 bp, synthetic construct
  misc_feature 1..20: note = chemically synthesized
  source 1..20: mol_type = other DNA
agagttcagattctgtcctt

SEQ ID NO: 33544 - DNA, 20 bp, synthetic construct
  misc_feature 1..20: note = chemically synthesized
  source 1..20: mol_type = other DNA
ctgtccttgagctcaatgtc

SEQ ID NO: 33545 - DNA, 20 bp, synthetic construct
  misc_feature 1..20: note = chemically synthesized
  source 1..20: mol_type = other DNA
gtccttgagctcaatgtctg

SEQ ID NO: 33546 - DNA, 20 bp, synthetic construct
  misc_feature 1..20: note = chemically synthesized
  source 1..20: mol_type = other DNA
ttgagctcaatgtctggaga

SEQ ID NO: 33547 - DNA, 20 bp, synthetic construct
  misc_feature 1..20: note = chemically synthesized
  source 1..20: mol_type = other DNA
agctcaatgtctggagaaag

SEQ ID NO: 33548 - DNA, 20 bp, synthetic construct
  misc_feature 1..20: note = chemically synthesized
  source 1..20: mol_type = other DNA
tgaatactgcttccttaatt

SEQ ID NO: 33549 - DNA, 20 bp, synthetic construct
  misc_feature 1..20: note = chemically synthesized
  source 1..20: mol_type = other DNA
ttccttaattcagatgcctt

SEQ ID NO: 33550 - DNA, 20 bp, synthetic construct
  misc_feature 1..20: note = chemically synthesized
  source 1..20: mol_type = other DNA
attcagatgcctttggccgt

SEQ ID NO: 33551 - DNA, 20 bp, synthetic construct
  misc_feature 1..20: note = chemically synthesized
  source 1..20: mol_type = other DNA
ttcagatgcctttggccgtg

SEQ ID NO: 33552 - DNA, 20 bp, synthetic construct
  misc_feature 1..20: note = chemically synthesized
  source 1..20: mol_type = other DNA
tcagatgcctttggccgtga

SEQ ID NO: 33553 - DNA, 20 bp, synthetic construct
  misc_feature 1..20: note = chemically synthesized
  source 1..20: mol_type = other DNA
cagatgcctttggccgtgag

SEQ ID NO: 33554 - DNA, 20 bp, synthetic construct
  misc_feature 1..20: note = chemically synthesized
  source 1..20: mol_type = other DNA
gcctttggccgtgaggggca

SEQ ID NO: 33555 - DNA, 20 bp, synthetic construct
  misc_feature 1..20: note = chemically synthesized
  source 1..20: mol_type = other DNA
gtgaggggcatggcatttta

SEQ ID NO: 33556 - DNA, 20 bp, synthetic construct
  misc_feature 1..20: note = chemically synthesized
  source 1..20: mol_type = other DNA
aaactctgtactttttctct

SEQ ID NO: 33557 - DNA, 20 bp, synthetic construct
  misc_feature 1..20: note = chemically synthesized
  source 1..20: mol_type = other DNA
aactctgtactttttctctc

SEQ ID NO: 33558 - DNA, 20 bp, synthetic construct
  misc_feature 1..20: note = chemically synthesized
  source 1..20: mol_type = other DNA
actctgtactttttctctca

SEQ ID NO: 33559 - DNA, 20 bp, synthetic construct
  misc_feature 1..20: note = chemically synthesized
  source 1..20: mol_type = other DNA
ctctgtactttttctctcag

SEQ ID NO: 33560 - DNA, 20 bp, synthetic construct
  misc_feature 1..20: note = chemically synthesized
  source 1..20: mol_type = other DNA
tactttttctctcaggggat

SEQ ID NO: 33561 - DNA, 20 bp, synthetic construct
  misc_feature 1..20: note = chemically synthesized
  source 1..20: mol_type = other DNA
agaaaaaccaattgatttga

SEQ ID NO: 33562 - DNA, 20 bp, synthetic construct
  misc_feature 1..20: note = chemically synthesized
  source 1..20: mol_type = other DNA
caattgatttgatagtgact

SEQ ID NO: 33563 - DNA, 20 bp, synthetic construct
  misc_feature 1..20: note = chemically synthesized
  source 1..20: mol_type = other DNA
ttgatttgatagtgactcag

SEQ ID NO: 33564 - DNA, 20 bp, synthetic construct
  misc_feature 1..20: note = chemically synthesized
  source 1..20: mol_type = other DNA
gcagttttcaccttcctctt

SEQ ID NO: 33565 - DNA, 20 bp, synthetic construct
  misc_feature 1..20: note = chemically synthesized
  source 1..20: mol_type = other DNA
cctctttagccaatgccctg

SEQ ID NO: 33566 - DNA, 20 bp, synthetic construct
  misc_feature 1..20: note = chemically synthesized
  source 1..20: mol_type = other DNA
ttagccaatgccctgcagct

SEQ ID NO: 33567 - DNA, 20 bp, synthetic construct
  misc_feature 1..20: note = chemically synthesized
  source 1..20: mol_type = other DNA
aatgccctgcagctaagatt

SEQ ID NO: 33568 - DNA, 20 bp, synthetic construct
  misc_feature 1..20: note = chemically synthesized
  source 1..20: mol_type = other DNA
ctgcagctaagattgagaaa

SEQ ID NO: 33569 - DNA, 20 bp, synthetic construct
  misc_feature 1..20: note = chemically synthesized
  source 1..20: mol_type = other DNA
ctaagattgagaaacggatt

SEQ ID NO: 33570 - DNA, 20 bp, synthetic construct
  misc_feature 1..20: note = chemically synthesized
  source 1..20: mol_type = other DNA
gattcagaactcacacctct

SEQ ID NO: 33571 - DNA, 20 bp, synthetic construct
  misc_feature 1..20: note = chemically synthesized
  source 1..20: mol_type = other DNA
aactcacacctcttggtgct

SEQ ID NO: 33572 - DNA, 20 bp, synthetic construct
  misc_feature 1..20: note = chemically synthesized
  source 1..20: mol_type = other DNA
tcacacctcttggtgcttgg

SEQ ID NO: 33573 - DNA, 20 bp, synthetic construct
  misc_feature 1..20: note = chemically synthesized
  source 1..20: mol_type = other DNA
gtggctcccttccaaaccat

SEQ ID NO: 33574 - DNA, 20 bp, synthetic construct
  misc_feature 1..20: note = chemically synthesized
  source 1..20: mol_type = other DNA
actttctttcctatttttta

SEQ ID NO: 33575 - DNA, 20 bp, synthetic construct
  misc_feature 1..20: note = chemically synthesized
  source 1..20: mol_type = other DNA
ctttcctattttttaaagca

SEQ ID NO: 33576 - DNA, 20 bp, synthetic construct
  misc_feature 1..20: note = chemically synthesized
  source 1..20: mol_type = other DNA
tttaaagcacagtctgaatc

SEQ ID NO: 33577 - DNA, 20 bp, synthetic construct
  misc_feature 1..20: note = chemically synthesized
  source 1..20: mol_type = other DNA
acagtctgaatcaagtgctt

SEQ ID NO: 33578 - DNA, 20 bp, synthetic construct
  misc_feature 1..20: note = chemically synthesized
  source 1..20: mol_type = other DNA
ataaccctgaaccctcttct

SEQ ID NO: 33579 - DNA, 20 bp, synthetic construct
  misc_feature 1..20: note = chemically synthesized
  source 1..20: mol_type = other DNA
taaccctgaaccctcttcta

SEQ ID NO: 33580 - DNA, 20 bp, synthetic construct
  misc_feature 1..20: note = chemically synthesized
  source 1..20: mol_type = other DNA
gaaccctcttctaaggccac

SEQ ID NO: 33581 - DNA, 20 bp, synthetic construct
  misc_feature 1..20: note = chemically synthesized
  source 1..20: mol_type = other DNA
ttctaaggccaccagttaca

SEQ ID NO: 33582 - DNA, 20 bp, synthetic construct
  misc_feature 1..20: note = chemically synthesized
  source 1..20: mol_type = other DNA
aggccaccagttacaaagaa

SEQ ID NO: 33583 - DNA, 20 bp, synthetic construct
  misc_feature 1..20: note = chemically synthesized
  source 1..20: mol_type = other DNA
ggccaccagttacaaagaat

SEQ ID NO: 33584 - DNA, 20 bp, synthetic construct
  misc_feature 1..20: note = chemically synthesized
  source 1..20: mol_type = other DNA
gccaccagttacaaagaatg

SEQ ID NO: 33585 - DNA, 20 bp, synthetic construct
  misc_feature 1..20: note = chemically synthesized
  source 1..20: mol_type = other DNA
accagttacaaagaatgggg

SEQ ID NO: 33586 - DNA, 20 bp, synthetic construct
  misc_feature 1..20: note = chemically synthesized
  source 1..20: mol_type = other DNA
ccagttacaaagaatgggga

SEQ ID NO: 33587 - DNA, 20 bp, synthetic construct
  misc_feature 1..20: note = chemically synthesized
  source 1..20: mol_type = other DNA
aaagaatggggaaggttaat

SEQ ID NO: 33588 - DNA, 20 bp, synthetic construct
  misc_feature 1..20: note = chemically synthesized
  source 1..20: mol_type = other DNA
aggttaatgagtaactccac

SEQ ID NO: 33589 - DNA, 20 bp, synthetic construct
  misc_feature 1..20: note = chemically synthesized
  source 1..20: mol_type = other DNA
gtaactccaccagtgcctgc

SEQ ID NO: 33590 - DNA, 20 bp, synthetic construct
  misc_feature 1..20: note = chemically synthesized
  source 1..20: mol_type = other DNA
ctccaccagtgcctgccaga

SEQ ID NO: 33591 - DNA, 20 bp, synthetic construct
  misc_feature 1..20: note = chemically synthesized
  source 1..20: mol_type = other DNA
ccagtgcctgccagaaagct

SEQ ID NO: 33592 - DNA, 20 bp, synthetic construct
  misc_feature 1..20: note = chemically synthesized
  source 1..20: mol_type = other DNA
cagaaagctcagctgtactc

SEQ ID NO: 33593 - DNA, 20 bp, synthetic construct
  misc_feature 1..20: note = chemically synthesized
  source 1..20: mol_type = other DNA
cagccttccttcctctcttg

SEQ ID NO: 33594 - DNA, 20 bp, synthetic construct
  misc_feature 1..20: note = chemically synthesized
  source 1..20: mol_type = other DNA
gccttccttcctctcttgca

SEQ ID NO: 33595 - DNA, 20 bp, synthetic construct
  misc_feature 1..20: note = chemically synthesized
  source 1..20: mol_type = other DNA
cttccttcctctcttgcaga

SEQ ID NO: 33596 - DNA, 20 bp, synthetic construct
  misc_feature 1..20: note = chemically synthesized
  source 1..20: mol_type = other DNA
tcttgcagagagaaacaatg

SEQ ID NO: 33597 - DNA, 20 bp, synthetic construct
  misc_feature 1..20: note = chemically synthesized
  source 1..20: mol_type = other DNA
tgcagagagaaacaatgcgg

SEQ ID NO: 33598 - DNA, 20 bp, synthetic construct
  misc_feature 1..20: note = chemically synthesized
  source 1..20: mol_type = other DNA
aacaatgcggcagttgaaca

SEQ ID NO: 33599 - DNA, 20 bp, synthetic construct
  misc_feature 1..20: note = chemically synthesized
  source 1..20: mol_type = other DNA
tgcggcagttgaacaaagcg

SEQ ID NO: 33600 - DNA, 20 bp, synthetic construct
  misc_feature 1..20: note = chemically synthesized
  source 1..20: mol_type = other DNA
gcggcagttgaacaaagcga

SEQ ID NO: 33601 - DNA, 20 bp, synthetic construct
  misc_feature 1..20: note = chemically synthesized
  source 1..20: mol_type = other DNA
agcgaaggcactgtaatgcc

SEQ ID NO: 33602 - DNA, 20 bp, synthetic construct
  misc_feature 1..20: note = chemically synthesized
  source 1..20: mol_type = other DNA
gaaggcactgtaatgcccag

SEQ ID NO: 33603 - DNA, 20 bp, synthetic construct
  misc_feature 1..20: note = chemically synthesized
  source 1..20: mol_type = other DNA
actgtaatgcccagtggctt

SEQ ID NO: 33604 - DNA, 20 bp, synthetic construct
  misc_feature 1..20: note = chemically synthesized
  source 1..20: mol_type = other DNA
atgcccagtggcttcagtca

SEQ ID NO: 33605 - DNA, 20 bp, synthetic construct
  misc_feature 1..20: note = chemically synthesized
  source 1..20: mol_type = other DNA
tgcccagtggcttcagtcac

SEQ ID NO: 33606 - DNA, 20 bp, synthetic construct
  misc_feature 1..20: note = chemically synthesized
  source 1..20: mol_type = other DNA
cagtggcttcagtcacaggc

SEQ ID NO: 33607 - DNA, 20 bp, synthetic construct
  misc_feature 1..20: note = chemically synthesized
  source 1..20: mol_type = other DNA
tggtctaaaattccatttca

SEQ ID NO: 33608 - DNA, 20 bp, synthetic construct
  misc_feature 1..20: note = chemically synthesized
  source 1..20: mol_type = other DNA
aattccatttcacagaattg

SEQ ID NO: 33609 - DNA, 20 bp, synthetic construct
  misc_feature 1..20: note = chemically synthesized
  source 1..20: mol_type = other DNA
tcacagaattgaagataatt

SEQ ID NO: 33610 - DNA, 20 bp, synthetic construct
  misc_feature 1..20: note = chemically synthesized
  source 1..20: mol_type = other DNA
cacagaattgaagataattt

SEQ ID NO: 33611 - DNA, 20 bp, synthetic construct
  misc_feature 1..20: note = chemically synthesized
  source 1..20: mol_type = other DNA
acagaattgaagataatttg

SEQ ID NO: 33612 - DNA, 20 bp, synthetic construct
  misc_feature 1..20: note = chemically synthesized
  source 1..20: mol_type = other DNA
ttggggttattaccaattct

SEQ ID NO: 33613 - DNA, 20 bp, synthetic construct
  misc_feature 1..20: note = chemically synthesized
  source 1..20: mol_type = other DNA
gggttattaccaattctcag

SEQ ID NO: 33614 - DNA, 20 bp, synthetic construct
  misc_feature 1..20: note = chemically synthesized
  source 1..20: mol_type = other DNA
ctcaaattcaatcccgttga

SEQ ID NO: 33615 - DNA, 20 bp, synthetic construct
  misc_feature 1..20: note = chemically synthesized
  source 1..20: mol_type = other DNA
aattcaatcccgttgatggt

SEQ ID NO: 33616 - DNA, 20 bp, synthetic construct
  misc_feature 1..20: note = chemically synthesized
  source 1..20: mol_type = other DNA
aatcccgttgatggtgagca

SEQ ID NO: 33617 - DNA, 20 bp, synthetic construct
  misc_feature 1..20: note = chemically synthesized
  source 1..20: mol_type = other DNA
atcccgttgatggtgagcat

SEQ ID NO: 33618 - DNA, 20 bp, synthetic construct
  misc_feature 1..20: note = chemically synthesized
  source 1..20: mol_type = other DNA
tcccgttgatggtgagcatg

SEQ ID NO: 33619 - DNA, 20 bp, synthetic construct
  misc_feature 1..20: note = chemically synthesized
  source 1..20: mol_type = other DNA
gtgagcatggggttcatttt

SEQ ID NO: 33620 - DNA, 20 bp, synthetic construct
  misc_feature 1..20: note = chemically synthesized
  source 1..20: mol_type = other DNA
gagcatggggttcattttga

SEQ ID NO: 33621 - DNA, 20 bp, synthetic construct
  misc_feature 1..20: note = chemically synthesized
  source 1..20: mol_type = other DNA
catggggttcattttgagag

SEQ ID NO: 33622 - DNA, 20 bp, synthetic construct
  misc_feature 1..20: note = chemically synthesized
  source 1..20: mol_type = other DNA
tcattttgagagtagaaaat

SEQ ID NO: 33623 - DNA, 20 bp, synthetic construct
  misc_feature 1..20: note = chemically synthesized
  source 1..20: mol_type = other DNA
tgagagtagaaaattggatg

SEQ ID NO: 33624 - DNA, 20 bp, synthetic construct
  misc_feature 1..20: note = chemically synthesized
  source 1..20: mol_type = other DNA
gagtagaaaattggatgcag

SEQ ID NO: 33625 - DNA, 20 bp, synthetic construct
  misc_feature 1..20: note = chemically synthesized
  source 1..20: mol_type = other DNA
gtagaaaattggatgcagtg

SEQ ID NO: 33626 - DNA, 20 bp, synthetic construct
  misc_feature 1..20: note = chemically synthesized
  source 1..20: mol_type = other DNA
aattggatgcagtggagaat

SEQ ID NO: 33627 - DNA, 20 bp, synthetic construct
  misc_feature 1..20: note = chemically synthesized
  source 1..20: mol_type = other DNA
gcagtggagaatcagaatgt

SEQ ID NO: 33628 - DNA, 20 bp, synthetic construct
  misc_feature 1..20: note = chemically synthesized
  source 1..20: mol_type = other DNA
tggagaatcagaatgttgga

SEQ ID NO: 33629 - DNA, 20 bp, synthetic construct
  misc_feature 1..20: note = chemically synthesized
  source 1..20: mol_type = other DNA
tggtctctgccatttcccca

SEQ ID NO: 33630 - DNA, 20 bp, synthetic construct
  misc_feature 1..20: note = chemically synthesized
  source 1..20: mol_type = other DNA
tgctgctgcttttaacaaat

SEQ ID NO: 33631 - DNA, 20 bp, synthetic construct
  misc_feature 1..20: note = chemically synthesized
  source 1..20: mol_type = other DNA
taacaaatcagtatacaact

SEQ ID NO: 33632 - DNA, 20 bp, synthetic construct
  misc_feature 1..20: note = chemically synthesized
  source 1..20: mol_type = other DNA
tttcaaatatacaaaatatt

SEQ ID NO: 33633 - DNA, 20 bp, synthetic construct
  misc_feature 1..20: note = chemically synthesized
  source 1..20: mol_type = other DNA
tatacaaaatattgagtctg

SEQ ID NO: 33634 - DNA, 20 bp, synthetic construct
  misc_feature 1..20: note = chemically synthesized
  source 1..20: mol_type = other DNA
atacaaaatattgagtctga

SEQ ID NO: 33635 - DNA, 20 bp, synthetic construct
  misc_feature 1..20: note = chemically synthesized
  source 1..20: mol_type = other DNA
atattgagtctgaaggcaaa

SEQ ID NO: 33636 - DNA, 20 bp, synthetic construct
  misc_feature 1..20: note = chemically synthesized
  source 1..20: mol_type = other DNA
ttttcacttccattgcttcc

SEQ ID NO: 33637 - DNA, 20 bp, synthetic construct
  misc_feature 1..20: note = chemically synthesized
  source 1..20: mol_type = other DNA
tttcacttccattgcttcct

SEQ ID NO: 33638 - DNA, 20 bp, synthetic construct
  misc_feature 1..20: note = chemically synthesized
  source 1..20: mol_type = other DNA
tctgatatttcttccaaata

SEQ ID NO: 33639 - DNA, 20 bp, synthetic construct
  misc_feature 1..20: note = chemically synthesized
  source 1..20: mol_type = other DNA
ttccaaatacagactgttgt

SEQ ID NO: 33640 - DNA, 20 bp, synthetic construct
  misc_feature 1..20: note = chemically synthesized
  source 1..20: mol_type = other DNA
ctgatcatcactcacacatc

SEQ ID NO: 33641 - DNA, 20 bp, synthetic construct
  misc_feature 1..20: note = chemically synthesized
  source 1..20: mol_type = other DNA
tgatcatcactcacacatcc

SEQ ID NO: 33642 - DNA, 20 bp, synthetic construct
  misc_feature 1..20: note = chemically synthesized
  source 1..20: mol_type = other DNA
tgttacatctccacgccact

SEQ ID NO: 33643 - DNA, 20 bp, synthetic construct
  misc_feature 1..20: note = chemically synthesized
  source 1..20: mol_type = other DNA
atctccacgccactgagtat

SEQ ID NO: 33644 - DNA, 20 bp, synthetic construct
  misc_feature 1..20: note = chemically synthesized
  source 1..20: mol_type = other DNA
tctccacgccactgagtatc

SEQ ID NO: 33645 - DNA, 20 bp, synthetic construct
  misc_feature 1..20: note = chemically synthesized
  source 1..20: mol_type = other DNA
ctccacgccactgagtatca

SEQ ID NO: 33646 - DNA, 20 bp, synthetic construct
  misc_feature 1..20: note = chemically synthesized
  source 1..20: mol_type = other DNA
aacctgccccaatattcacg

SEQ ID NO: 33647 - DNA, 20 bp, synthetic construct
  misc_feature 1..20: note = chemically synthesized
  source 1..20: mol_type = other DNA
acctgccccaatattcacgt

SEQ ID NO: 33648 - DNA, 20 bp, synthetic construct
  misc_feature 1..20: note = chemically synthesized
  source 1..20: mol_type = other DNA
ggttcttttctattttccct

SEQ ID NO: 33649 - DNA, 20 bp, synthetic construct
  misc_feature 1..20: note = chemically synthesized
  source 1..20: mol_type = other DNA
tttctattttccctaagcgt

SEQ ID NO: 33650 - DNA, 20 bp, synthetic construct
  misc_feature 1..20: note = chemically synthesized
  source 1..20: mol_type = other DNA
ccctaagcgtcggccaactt

SEQ ID NO: 33651 - DNA, 20 bp, synthetic construct
  misc_feature 1..20: note = chemically synthesized
  source 1..20: mol_type = other DNA
gtcggccaactttagaaata

SEQ ID NO: 33652 - DNA, 20 bp, synthetic construct
  misc_feature 1..20: note = chemically synthesized
  source 1..20: mol_type = other DNA
tcggccaactttagaaataa

SEQ ID NO: 33653 - DNA, 20 bp, synthetic construct
  misc_feature 1..20: note = chemically synthesized
  source 1..20: mol_type = other DNA
cggccaactttagaaataaa

SEQ ID NO: 33654 - DNA, 20 bp, synthetic construct
  misc_feature 1..20: note = chemically synthesized
  source 1..20: mol_type = other DNA
caactttagaaataaaggga

SEQ ID NO: 33655 - DNA, 20 bp, synthetic construct
  misc_feature 1..20: note = chemically synthesized
  source 1..20: mol_type = other DNA
actttagaaataaagggaca

SEQ ID NO: 33656 - DNA, 20 bp, synthetic construct
  misc_feature 1..20: note = chemically synthesized
  source 1..20: mol_type = other DNA
aataaagggacagagtacaa

SEQ ID NO: 33657 - DNA, 20 bp, synthetic construct
  misc_feature 1..20: note = chemically synthesized
  source 1..20: mol_type = other DNA
taaagggacagagtacaaaa

SEQ ID NO: 33658 - DNA, 20 bp, synthetic construct
  misc_feature 1..20: note = chemically synthesized
  source 1..20: mol_type = other DNA
aagggacagagtacaaaaga

SEQ ID NO: 33659 - DNA, 20 bp, synthetic construct
  misc_feature 1..20: note = chemically synthesized
  source 1..20: mol_type = other DNA
tacaaaagagagaaatttta

SEQ ID NO: 33660 - DNA, 20 bp, synthetic construct
  misc_feature 1..20: note = chemically synthesized
  source 1..20: mol_type = other DNA
aaagagagaaattttaaagc

SEQ ID NO: 33661 - DNA, 20 bp, synthetic construct
  misc_feature 1..20: note = chemically synthesized
  source 1..20: mol_type = other DNA
aagagagaaattttaaagcc

SEQ ID NO: 33662 - DNA, 20 bp, synthetic construct
  misc_feature 1..20: note = chemically synthesized
  source 1..20: mol_type = other DNA
aaattttaaagccgggcatc

SEQ ID NO: 33663 - DNA, 20 bp, synthetic construct
  misc_feature 1..20: note = chemically synthesized
  source 1..20: mol_type = other DNA
aattttaaagccgggcatcc

SEQ ID NO: 33664 - DNA, 20 bp, synthetic construct
  misc_feature 1..20: note = chemically synthesized
  source 1..20: mol_type = other DNA
attttaaagccgggcatccg

SEQ ID NO: 33665 - DNA, 20 bp, synthetic construct
  misc_feature 1..20: note = chemically synthesized
  source 1..20: mol_type = other DNA
ttttaaagccgggcatccgg

SEQ ID NO: 33666 - DNA, 20 bp, synthetic construct
  misc_feature 1..20: note = chemically synthesized
  source 1..20: mol_type = other DNA
ttaaagccgggcatccgggg

SEQ ID NO: 33667 - DNA, 20 bp, synthetic construct
  misc_feature 1..20: note = chemically synthesized
  source 1..20: mol_type = other DNA
taaagccgggcatccggggg

SEQ ID NO: 33668 - DNA, 20 bp, synthetic construct
  misc_feature 1..20: note = chemically synthesized
  source 1..20: mol_type = other DNA
ccgggggaggcatcacattt

SEQ ID NO: 33669 - DNA, 20 bp, synthetic construct
  misc_feature 1..20: note = chemically synthesized
  source 1..20: mol_type = other DNA
ggggaggcatcacatttcgg

SEQ ID NO: 33670 - DNA, 20 bp, synthetic construct
  misc_feature 1..20: note = chemically synthesized
  source 1..20: mol_type = other DNA
gggaggcatcacatttcggt

SEQ ID NO: 33671 - DNA, 20 bp, synthetic construct
  misc_feature 1..20: note = chemically synthesized
  source 1..20: mol_type = other DNA
taggttccgtgatgccccac

SEQ ID NO: 33672 - DNA, 20 bp, synthetic construct
  misc_feature 1..20: note = chemically synthesized
  source 1..20: mol_type = other DNA
gccccacaagccacaaaaac

SEQ ID NO: 33673 - DNA, 20 bp, synthetic construct
  misc_feature 1..20: note = chemically synthesized
  source 1..20: mol_type = other DNA
cacaagccacaaaaaccagc

SEQ ID NO: 33674 - DNA, 20 bp, synthetic construct
  misc_feature 1..20: note = chemically synthesized
  source 1..20: mol_type = other DNA
aaaaaccagcaagtttgtat

SEQ ID NO: 33675 - DNA, 20 bp, synthetic construct
  misc_feature 1..20: note = chemically synthesized
  source 1..20: mol_type = other DNA
aaaaccagcaagtttgtatt

SEQ ID NO: 33676 - DNA, 20 bp, synthetic construct
  misc_feature 1..20: note = chemically synthesized
  source 1..20: mol_type = other DNA
aaaccagcaagtttgtatta

SEQ ID NO: 33677 - DNA, 20 bp, synthetic construct
  misc_feature 1..20: note = chemically synthesized
  source 1..20: mol_type = other DNA
ttgtattagggattttcaaa

SEQ ID NO: 33678 - DNA, 20 bp, synthetic construct
  misc_feature 1..20: note = chemically synthesized
  source 1..20: mol_type = other DNA
tgtattagggattttcaaat

SEQ ID NO: 33679 - DNA, 20 bp, synthetic construct
  misc_feature 1..20: note = chemically synthesized
  source 1..20: mol_type = other DNA
gtattagggattttcaaatg

SEQ ID NO: 33680 - DNA, 20 bp, synthetic construct
  misc_feature 1..20: note = chemically synthesized
  source 1..20: mol_type = other DNA
attagggattttcaaatggg

SEQ ID NO: 33681 - DNA, 20 bp, synthetic construct
  misc_feature 1..20: note = chemically synthesized
  source 1..20: mol_type = other DNA
ttagggattttcaaatgggg

SEQ ID NO: 33682 - DNA, 20 bp, synthetic construct
  misc_feature 1..20: note = chemically synthesized
  source 1..20: mol_type = other DNA
gggattttcaaatggggagg

SEQ ID NO: 33683 - DNA, 20 bp, synthetic construct
  misc_feature 1..20: note = chemically synthesized
  source 1..20: mol_type = other DNA
atggggaggcagtgtgcaaa

SEQ ID NO: 33684 - DNA, 20 bp, synthetic construct
  misc_feature 1..20: note = chemically synthesized
  source 1..20: mol_type = other DNA
tggggaggcagtgtgcaaat

SEQ ID NO: 33685 - DNA, 20 bp, synthetic construct
  misc_feature 1..20: note = chemically synthesized
  source 1..20: mol_type = other DNA
aggcagtgtgcaaataggtg

SEQ ID NO: 33686 - DNA, 20 bp, synthetic construct
  misc_feature 1..20: note = chemically synthesized
  source 1..20: mol_type = other DNA
ggcagtgtgcaaataggtgt

SEQ ID NO: 33687 - DNA, 20 bp, synthetic construct
  misc_feature 1..20: note = chemically synthesized
  source 1..20: mol_type = other DNA
gtgcaaataggtgtgggtca

SEQ ID NO: 33688 - DNA, 20 bp, synthetic construct
  misc_feature 1..20: note = chemically synthesized
  source 1..20: mol_type = other DNA
aggtgtgggtcacagacatc

SEQ ID NO: 33689 - DNA, 20 bp, synthetic construct
  misc_feature 1..20: note = chemically synthesized
  source 1..20: mol_type = other DNA
acagacatcaagtactttac

SEQ ID NO: 33690 - DNA, 20 bp, synthetic construct
  misc_feature 1..20: note = chemically synthesized
  source 1..20: mol_type = other DNA
cagacatcaagtactttaca

SEQ ID NO: 33691 - DNA, 20 bp, synthetic construct
  misc_feature 1..20: note = chemically synthesized
  source 1..20: mol_type = other DNA
tcaagtactttacaaggtaa

SEQ ID NO: 33692 - DNA, 20 bp, synthetic construct
  misc_feature 1..20: note = chemically synthesized
  source 1..20: mol_type = other DNA
acaaggtaatagaatatcac

SEQ ID NO: 33693 - DNA, 20 bp, synthetic construct
  misc_feature 1..20: note = chemically synthesized
  source 1..20: mol_type = other DNA
caaggtaatagaatatcaca

SEQ ID NO: 33694 - DNA, 20 bp, synthetic construct
  misc_feature 1..20: note = chemically synthesized
  source 1..20: mol_type = other DNA
gtaatagaatatcacaaggc

SEQ ID NO: 33695 - DNA, 20 bp, synthetic construct
  misc_feature 1..20: note = chemically synthesized
  source 1..20: mol_type = other DNA
atagaatatcacaaggcaag

SEQ ID NO: 33696 - DNA, 20 bp, synthetic construct
  misc_feature 1..20: note = chemically synthesized
  source 1..20: mol_type = other DNA
agaatatcacaaggcaagtg

SEQ ID NO: 33697 - DNA, 20 bp, synthetic construct
  misc_feature 1..20: note = chemically synthesized
  source 1..20: mol_type = other DNA
gaatatcacaaggcaagtgg

SEQ ID NO: 33698 - DNA, 20 bp, synthetic construct
  misc_feature 1..20: note = chemically synthesized
  source 1..20: mol_type = other DNA
tatcacaaggcaagtggagg

SEQ ID NO: 33699 - DNA, 20 bp, synthetic construct
  misc_feature 1..20: note = chemically synthesized
  source 1..20: mol_type = other DNA
atcacaaggcaagtggaggc

SEQ ID NO: 33700 - DNA, 20 bp, synthetic construct
  misc_feature 1..20: note = chemically synthesized
  source 1..20: mol_type = other DNA
tcacaaggcaagtggaggca

SEQ ID NO: 33701 - DNA, 20 bp, synthetic construct
  misc_feature 1..20: note = chemically synthesized
  source 1..20: mol_type = other DNA
aaggcaagtggaggcagggt

SEQ ID NO: 33702 - DNA, 20 bp, synthetic construct
  misc_feature 1..20: note = chemically synthesized
  source 1..20: mol_type = other DNA
gtggaggcagggtgagatca

SEQ ID NO: 33703 - DNA, 20 bp, synthetic construct
  misc_feature 1..20: note = chemically synthesized
  source 1..20: mol_type = other DNA
tggaggcagggtgagatcac

SEQ ID NO: 33704 - DNA, 20 bp, synthetic construct
  misc_feature 1..20: note = chemically synthesized
  source 1..20: mol_type = other DNA
agggtgagatcacaggacca

SEQ ID NO: 33705 - DNA, 20 bp, synthetic construct
  misc_feature 1..20: note = chemically synthesized
  source 1..20: mol_type = other DNA
gggtgagatcacaggaccac

SEQ ID NO: 33706 - DNA, 20 bp, synthetic construct
  misc_feature 1..20: note = chemically synthesized
  source 1..20: mol_type = other DNA
gatcacaggaccacaggacc

SEQ ID NO: 33707 - DNA, 20 bp, synthetic construct
  misc_feature 1..20: note = chemically synthesized
  source 1..20: mol_type = other DNA
atcacaggaccacaggaccg

SEQ ID NO: 33708 - DNA, 20 bp, synthetic construct
  misc_feature 1..20: note = chemically synthesized
  source 1..20: mol_type = other DNA
cgaaattaaaattgctaatg

SEQ ID NO: 33709 - DNA, 20 bp, synthetic construct
  misc_feature 1..20: note = chemically synthesized
  source 1..20: mol_type = other DNA
taaaattgctaatgaagttt

SEQ ID NO: 33710 - DNA, 20 bp, synthetic construct
  misc_feature 1..20: note = chemically synthesized
  source 1..20: mol_type = other DNA
aaaattgctaatgaagtttc

SEQ ID NO: 33711 - DNA, 20 bp, synthetic construct
  misc_feature 1..20: note = chemically synthesized
  source 1..20: mol_type = other DNA
tgtcattgataacatcttat

SEQ ID NO: 33712 - DNA, 20 bp, synthetic construct
  misc_feature 1..20: note = chemically synthesized
  source 1..20: mol_type = other DNA
gtcattgataacatcttatc

SEQ ID NO: 33713 - DNA, 20 bp, synthetic construct
  misc_feature 1..20: note = chemically synthesized
  source 1..20: mol_type = other DNA
cattgataacatcttatcag

SEQ ID NO: 33714 - DNA, 20 bp, synthetic construct
  misc_feature 1..20: note = chemically synthesized
  source 1..20: mol_type = other DNA
gataacatcttatcaggaga

SEQ ID NO: 33715 - DNA, 20 bp, synthetic construct
  misc_feature 1..20: note = chemically synthesized
  source 1..20: mol_type = other DNA
ataacatcttatcaggagac

SEQ ID NO: 33716 - DNA, 20 bp, synthetic construct
  misc_feature 1..20: note = chemically synthesized
  source 1..20: mol_type = other DNA
taacatcttatcaggagaca

SEQ ID NO: 33717 - DNA, 20 bp, synthetic construct
  misc_feature 1..20: note = chemically synthesized
  source 1..20: mol_type = other DNA
ttatcaggagacagggtttt

SEQ ID NO: 33718 - DNA, 20 bp, synthetic construct
  misc_feature 1..20: note = chemically synthesized
  source 1..20: mol_type = other DNA
tatcaggagacagggttttt

SEQ ID NO: 33719 - DNA, 20 bp, synthetic construct
  misc_feature 1..20: note = chemically synthesized
  source 1..20: mol_type = other DNA
acagggtttttaggatcaac

SEQ ID NO: 33720 - DNA, 20 bp, synthetic construct
  misc_feature 1..20: note = chemically synthesized
  source 1..20: mol_type = other DNA
ctggtctgaccaaaatttat

SEQ ID NO: 33721 - DNA, 20 bp, synthetic construct
  misc_feature 1..20: note = chemically synthesized
  source 1..20: mol_type = other DNA
tggtctgaccaaaatttatt

SEQ ID NO: 33722 - DNA, 20 bp, synthetic construct
  misc_feature 1..20: note = chemically synthesized
  source 1..20: mol_type = other DNA
tctgaccaaaatttattagg

SEQ ID NO: 33723 - DNA, 20 bp, synthetic construct
  misc_feature 1..20: note = chemically synthesized
  source 1..20: mol_type = other DNA
ctgaccaaaatttattaggc

SEQ ID NO: 33724 - DNA, 20 bp, synthetic construct
  misc_feature 1..20: note = chemically synthesized
  source 1..20: mol_type = other DNA
gggaatttcctcttcctaat

SEQ ID NO: 33725 - DNA, 20 bp, synthetic construct
  misc_feature 1..20: note = chemically synthesized
  source 1..20: mol_type = other DNA
tttcctcttcctaataagcc

SEQ ID NO: 33726 - DNA, 20 bp, synthetic construct
  misc_feature 1..20: note = chemically synthesized
  source 1..20: mol_type = other DNA
ttcctcttcctaataagcct

SEQ ID NO: 33727 - DNA, 20 bp, synthetic construct
  misc_feature 1..20: note = chemically synthesized
  source 1..20: mol_type = other DNA
cctcttcctaataagcctgg

SEQ ID NO: 33728 - DNA, 20 bp, synthetic construct
  misc_feature 1..20: note = chemically synthesized
  source 1..20: mol_type = other DNA
taataagcctgggagcgctg

SEQ ID NO: 33729 - DNA, 20 bp, synthetic construct
  misc_feature 1..20: note = chemically synthesized
  source 1..20: mol_type = other DNA
aataagcctgggagcgctgt

SEQ ID NO: 33730 - DNA, 20 bp, synthetic construct
  misc_feature 1..20: note = chemically synthesized
  source 1..20: mol_type = other DNA
taagcctgggagcgctgtgg

SEQ ID NO: 33731 - DNA, 20 bp, synthetic construct
  misc_feature 1..20: note = chemically synthesized
  source 1..20: mol_type = other DNA
ctgggagcgctgtgggagac

SEQ ID NO: 33732 - DNA, 20 bp, synthetic construct
  misc_feature 1..20: note = chemically synthesized
  source 1..20: mol_type = other DNA
tgggagcgctgtgggagact

SEQ ID NO: 33733 - DNA, 20 bp, synthetic construct
  misc_feature 1..20: note = chemically synthesized
  source 1..20: mol_type = other DNA
gggagcgctgtgggagactg

SEQ ID NO: 33734 - DNA, 20 bp, synthetic construct
  misc_feature 1..20: note = chemically synthesized
  source 1..20: mol_type = other DNA
tggggtctatttcacccctg

SEQ ID NO: 33735 - DNA, 20 bp, synthetic construct
  misc_feature 1..20: note = chemically synthesized
  source 1..20: mol_type = other DNA
acccctgcagtctcgaccat

SEQ ID NO: 33736 - DNA, 20 bp, synthetic construct
  misc_feature 1..20: note = chemically synthesized
  source 1..20: mol_type = other DNA
ccctgcagtctcgaccataa

SEQ ID NO: 33737 - DNA, 20 bp, synthetic construct
  misc_feature 1..20: note = chemically synthesized
  source 1..20: mol_type = other DNA
gcagtctcgaccataagaga

SEQ ID NO: 33738 - DNA, 20 bp, synthetic construct
  misc_feature 1..20: note = chemically synthesized
  source 1..20: mol_type = other DNA
cagtctcgaccataagagac

SEQ ID NO: 33739 - DNA, 20 bp, synthetic construct
  misc_feature 1..20: note = chemically synthesized
  source 1..20: mol_type = other DNA
ccataagagacaggcgcacc

SEQ ID NO: 33740 - DNA, 20 bp, synthetic construct
  misc_feature 1..20: note = chemically synthesized
  source 1..20: mol_type = other DNA
ataagagacaggcgcacctg

SEQ ID NO: 33741 - DNA, 20 bp, synthetic construct
  misc_feature 1..20: note = chemically synthesized
  source 1..20: mol_type = other DNA
taagagacaggcgcacctgg

SEQ ID NO: 33742 - DNA, 20 bp, synthetic construct
  misc_feature 1..20: note = chemically synthesized
  source 1..20: mol_type = other DNA
aagagacaggcgcacctgga

SEQ ID NO: 33743 - DNA, 20 bp, synthetic construct
  misc_feature 1..20: note = chemically synthesized
  source 1..20: mol_type = other DNA
agagacaggcgcacctggag

SEQ ID NO: 33744 - DNA, 20 bp, synthetic construct
  misc_feature 1..20: note = chemically synthesized
  source 1..20: mol_type = other DNA
gagacaggcgcacctggagg

SEQ ID NO: 33745 - DNA, 20 bp, synthetic construct
  misc_feature 1..20: note = chemically synthesized
  source 1..20: mol_type = other DNA
agacaggcgcacctggaggg

SEQ ID NO: 33746 - DNA, 20 bp, synthetic construct
  misc_feature 1..20: note = chemically synthesized
  source 1..20: mol_type = other DNA
cctggaggggggctgtttat

SEQ ID NO: 33747 - DNA, 20 bp, synthetic construct
  misc_feature 1..20: note = chemically synthesized
  source 1..20: mol_type = other DNA
gtttataagcctatacctcc

SEQ ID NO: 33748 - DNA, 20 bp, synthetic construct
  misc_feature 1..20: note = chemically synthesized
  source 1..20: mol_type = other DNA
ctggctcgtattctctttct

SEQ ID NO: 33749 - DNA, 20 bp, synthetic construct
  misc_feature 1..20: note = chemically synthesized
  source 1..20: mol_type = other DNA
tggctcgtattctctttctc

SEQ ID NO: 33750 - DNA, 20 bp, synthetic construct
  misc_feature 1..20: note = chemically synthesized
  source 1..20: mol_type = other DNA
ggctcgtattctctttctca

SEQ ID NO: 33751 - DNA, 20 bp, synthetic construct
  misc_feature 1..20: note = chemically synthesized
  source 1..20: mol_type = other DNA
tctcagggatgttccatgct

SEQ ID NO: 33752 - DNA, 20 bp, synthetic construct
  misc_feature 1..20: note = chemically synthesized
  source 1..20: mol_type = other DNA
ggatgttccatgctgagaaa

SEQ ID NO: 33753 - DNA, 20 bp, synthetic construct
  misc_feature 1..20: note = chemically synthesized
  source 1..20: mol_type = other DNA
ccatgctgagaaaaagaatt

SEQ ID NO: 33754 - DNA, 20 bp, synthetic construct
  misc_feature 1..20: note = chemically synthesized
  source 1..20: mol_type = other DNA
tttctcccatttgcttttga

SEQ ID NO: 33755 - DNA, 20 bp, synthetic construct
  misc_feature 1..20: note = chemically synthesized
  source 1..20: mol_type = other DNA
ctcccatttgcttttgaaag

SEQ ID NO: 33756 - DNA, 20 bp, synthetic construct
  misc_feature 1..20: note = chemically synthesized
  source 1..20: mol_type = other DNA
cccatttgcttttgaaagaa

SEQ ID NO: 33757 - DNA, 20 bp, synthetic construct
  misc_feature 1..20: note = chemically synthesized
  source 1..20: mol_type = other DNA
cttttgaaagaagagaaata

SEQ ID NO: 33758 - DNA, 20 bp, synthetic construct
  misc_feature 1..20: note = chemically synthesized
  source 1..20: mol_type = other DNA
aaatatggctctgttctgcc

SEQ ID NO: 33759 - DNA, 20 bp, synthetic construct
  misc_feature 1..20: note = chemically synthesized
  source 1..20: mol_type = other DNA
ctctgttctgcctggctcac

SEQ ID NO: 33760 - DNA, 20 bp, synthetic construct
  misc_feature 1..20: note = chemically synthesized
  source 1..20: mol_type = other DNA
tgttctgcctggctcaccag

SEQ ID NO: 33761 - DNA, 20 bp, synthetic construct
  misc_feature 1..20: note = chemically synthesized
  source 1..20: mol_type = other DNA
ctgcctggctcaccagcagt

SEQ ID NO: 33762 - DNA, 20 bp, synthetic construct
  misc_feature 1..20: note = chemically synthesized
  source 1..20: mol_type = other DNA
gcctggctcaccagcagtca

SEQ ID NO: 33763 - DNA, 20 bp, synthetic construct
  misc_feature 1..20: note = chemically synthesized
  source 1..20: mol_type = other DNA
ctcaccagcagtcagagttt

SEQ ID NO: 33764 - DNA, 20 bp, synthetic construct
  misc_feature 1..20: note = chemically synthesized
  source 1..20: mol_type = other DNA
tcaccagcagtcagagttta

SEQ ID NO: 33765 - DNA, 20 bp, synthetic construct
  misc_feature 1..20: note = chemically synthesized
  source 1..20: mol_type = other DNA
tgttatcctgttcttttttc

SEQ ID NO: 33766 - DNA, 20 bp, synthetic construct
  misc_feature 1..20: note = chemically synthesized
  source 1..20: mol_type = other DNA
gttatcctgttcttttttca

SEQ ID NO: 33767 - DNA, 20 bp, synthetic construct
  misc_feature 1..20: note = chemically synthesized
  source 1..20: mol_type = other DNA
cacatgctgtacaatttgtg

SEQ ID NO: 33768 - DNA, 20 bp, synthetic construct
  misc_feature 1..20: note = chemically synthesized
  source 1..20: mol_type = other DNA
tgcagttaatgcaattatta

SEQ ID NO: 33769 - DNA, 20 bp, synthetic construct
  misc_feature 1..20: note = chemically synthesized
  source 1..20: mol_type = other DNA
gcagttaatgcaattattac

SEQ ID NO: 33770 - DNA, 20 bp, synthetic construct
  misc_feature 1..20: note = chemically synthesized
  source 1..20: mol_type = other DNA
cagttaatgcaattattaca

SEQ ID NO: 33771 - DNA, 20 bp, synthetic construct
  misc_feature 1..20: note = chemically synthesized
  source 1..20: mol_type = other DNA
tgcaattattacagggtcct

SEQ ID NO: 33772 - DNA, 20 bp, synthetic construct
  misc_feature 1..20: note = chemically synthesized
  source 1..20: mol_type = other DNA
gcaattattacagggtcctg

SEQ ID NO: 33773 - DNA, 20 bp, synthetic construct
  misc_feature 1..20: note = chemically synthesized
  source 1..20: mol_type = other DNA
gaggcaatatacatcctcct

SEQ ID NO: 33774 - DNA, 20 bp, synthetic construct
  misc_feature 1..20: note = chemically synthesized
  source 1..20: mol_type = other DNA
tatacatcctcctcagctga

SEQ ID NO: 33775 - DNA, 20 bp, synthetic construct
  misc_feature 1..20: note = chemically synthesized
  source 1..20: mol_type = other DNA
atacatcctcctcagctgac

SEQ ID NO: 33776 - DNA, 20 bp, synthetic construct
  misc_feature 1..20: note = chemically synthesized
  source 1..20: mol_type = other DNA
cctcctcagctgacaggatt

SEQ ID NO: 33777 - DNA, 20 bp, synthetic construct
  misc_feature 1..20: note = chemically synthesized
  source 1..20: mol_type = other DNA
tcctcagctgacaggattaa

SEQ ID NO: 33778 - DNA, 20 bp, synthetic construct
  misc_feature 1..20: note = chemically synthesized
  source 1..20: mol_type = other DNA
ctgacaggattaagagatta

SEQ ID NO: 33779 - DNA, 20 bp, synthetic construct
  misc_feature 1..20: note = chemically synthesized
  source 1..20: mol_type = other DNA
aggattaagagattaaagta

SEQ ID NO: 33780 - DNA, 20 bp, synthetic construct
  misc_feature 1..20: note = chemically synthesized
  source 1..20: mol_type = other DNA
ttaagagattaaagtaaaga

SEQ ID NO: 33781 - DNA, 20 bp, synthetic construct
  misc_feature 1..20: note = chemically synthesized
  source 1..20: mol_type = other DNA
taagagattaaagtaaagac

SEQ ID NO: 33782 - DNA, 20 bp, synthetic construct
  misc_feature 1..20: note = chemically synthesized
  source 1..20: mol_type = other DNA
taaagacaggcataaatcac

SEQ ID NO: 33783 - DNA, 20 bp, synthetic construct
  misc_feature 1..20: note = chemically synthesized
  source 1..20: mol_type = other DNA
aaagacaggcataaatcaca

SEQ ID NO: 33784 - DNA, 20 bp, synthetic construct
  misc_feature 1..20: note = chemically synthesized
  source 1..20: mol_type = other DNA
taaatcacaaggatattgac

SEQ ID NO: 33785 - DNA, 20 bp, synthetic construct
  misc_feature 1..20: note = chemically synthesized
  source 1..20: mol_type = other DNA
aaatcacaaggatattgact

SEQ ID NO: 33786 - DNA, 20 bp, synthetic construct
  misc_feature 1..20: note = chemically synthesized
  source 1..20: mol_type = other DNA
aatcacaaggatattgactg

SEQ ID NO: 33787 - DNA, 20 bp, synthetic construct
  misc_feature 1..20: note = chemically synthesized
  source 1..20: mol_type = other DNA
cacaaggatattgactgggg

SEQ ID NO: 33788 - DNA, 20 bp, synthetic construct
  misc_feature 1..20: note = chemically synthesized
  source 1..20: mol_type = other DNA
atattgactggggaagtgat

SEQ ID NO: 33789 - DNA, 20 bp, synthetic construct
  misc_feature 1..20: note = chemically synthesized
  source 1..20: mol_type = other DNA
aaatctttacaatttatgtt

SEQ ID NO: 33790 - DNA, 20 bp, synthetic construct
  misc_feature 1..20: note = chemically synthesized
  source 1..20: mol_type = other DNA
atctttacaatttatgttta

SEQ ID NO: 33791 - DNA, 20 bp, synthetic construct
  misc_feature 1..20: note = chemically synthesized
  source 1..20: mol_type = other DNA
caatttatgtttagagattg

SEQ ID NO: 33792 - DNA, 20 bp, synthetic construct
  misc_feature 1..20: note = chemically synthesized
  source 1..20: mol_type = other DNA
tatgtttagagattgcagta

SEQ ID NO: 33793 - DNA, 20 bp, synthetic construct
  misc_feature 1..20: note = chemically synthesized
  source 1..20: mol_type = other DNA
tttagagattgcagtaaaga

SEQ ID NO: 33794 - DNA, 20 bp, synthetic construct
  misc_feature 1..20: note = chemically synthesized
  source 1..20: mol_type = other DNA
ttagagattgcagtaaagac

SEQ ID NO: 33795 - DNA, 20 bp, synthetic construct
  misc_feature 1..20: note = chemically synthesized
  source 1..20: mol_type = other DNA
attgcagtaaagacaggcat

SEQ ID NO: 33796 - DNA, 20 bp, synthetic construct
  misc_feature 1..20: note = chemically synthesized
  source 1..20: mol_type = other DNA
acaggcataagaaattacaa

SEQ ID NO: 33797 - DNA, 20 bp, synthetic construct
  misc_feature 1..20: note = chemically synthesized
  source 1..20: mol_type = other DNA
aaattacaaaagtattaatt

SEQ ID NO: 33798 - DNA, 20 bp, synthetic construct
  misc_feature 1..20: note = chemically synthesized
  source 1..20: mol_type = other DNA
aattacaaaagtattaattt

SEQ ID NO: 33799 - DNA, 20 bp, synthetic construct
  misc_feature 1..20: note = chemically synthesized
  source 1..20: mol_type = other DNA
attacaaaagtattaatttg

SEQ ID NO: 33800 - DNA, 20 bp, synthetic construct
  misc_feature 1..20: note = chemically synthesized
  source 1..20: mol_type = other DNA
caatccacgaacttctgcca

SEQ ID NO: 33801 - DNA, 20 bp, synthetic construct
  misc_feature 1..20: note = chemically synthesized
  source 1..20: mol_type = other DNA
acgaacttctgccatggctt

SEQ ID NO: 33802 - DNA, 20 bp, synthetic construct
  misc_feature 1..20: note = chemically synthesized
  source 1..20: mol_type = other DNA
cttcagctgatccctccgtt

SEQ ID NO: 33803 - DNA, 20 bp, synthetic construct
  misc_feature 1..20: note = chemically synthesized
  source 1..20: mol_type = other DNA
tcagctgatccctccgtttg

SEQ ID NO: 33804 - DNA, 20 bp, synthetic construct
  misc_feature 1..20: note = chemically synthesized
  source 1..20: mol_type = other DNA
gatccctccgtttggagtcc

SEQ ID NO: 33805 - DNA, 20 bp, synthetic construct
  misc_feature 1..20: note = chemically synthesized
  source 1..20: mol_type = other DNA
ccagacttcccgcaacaact

SEQ ID NO: 33806 - DNA, 20 bp, synthetic construct
  misc_feature 1..20: note = chemically synthesized
  source 1..20: mol_type = other DNA
cccgcaacaactgagaactc

SEQ ID NO: 33807 - DNA, 20 bp, synthetic construct
  misc_feature 1..20: note = chemically synthesized
  source 1..20: mol_type = other DNA
cgcaacaactgagaactctg

SEQ ID NO: 33808 - DNA, 20 bp, synthetic construct
  misc_feature 1..20: note = chemically synthesized
  source 1..20: mol_type = other DNA
gcaacaactgagaactctgg

SEQ ID NO: 33809 - DNA, 20 bp, synthetic construct
  misc_feature 1..20: note = chemically synthesized
  source 1..20: mol_type = other DNA
caacaactgagaactctgga

SEQ ID NO: 33810 - DNA, 20 bp, synthetic construct
  misc_feature 1..20: note = chemically synthesized
  source 1..20: mol_type = other DNA
ccacccttcttatatctctt

SEQ ID NO: 33811 - DNA, 20 bp, synthetic construct
  misc_feature 1..20: note = chemically synthesized
  source 1..20: mol_type = other DNA
cacccttcttatatctctta

SEQ ID NO: 33812 - DNA, 20 bp, synthetic construct
  misc_feature 1..20: note = chemically synthesized
  source 1..20: mol_type = other DNA
cccttcttatatctcttaag

SEQ ID NO: 33813 - DNA, 20 bp, synthetic construct
  misc_feature 1..20: note = chemically synthesized
  source 1..20: mol_type = other DNA
atctcttaaggagctgtgtt

SEQ ID NO: 33814 - DNA, 20 bp, synthetic construct
  misc_feature 1..20: note = chemically synthesized
  source 1..20: mol_type = other DNA
cttaaggagctgtgttcaga

SEQ ID NO: 33815 - DNA, 20 bp, synthetic construct
  misc_feature 1..20: note = chemically synthesized
  source 1..20: mol_type = other DNA
atggttacatttcgcttgct

SEQ ID NO: 33816 - DNA, 20 bp, synthetic construct
  misc_feature 1..20: note = chemically synthesized
  source 1..20: mol_type = other DNA
ttacatttcgcttgctgagc

SEQ ID NO: 33817 - DNA, 20 bp, synthetic construct
  misc_feature 1..20: note = chemically synthesized
  source 1..20: mol_type = other DNA
agactgcattttcattatcc

SEQ ID NO: 33818 - DNA, 20 bp, synthetic construct
  misc_feature 1..20: note = chemically synthesized
  source 1..20: mol_type = other DNA
gactgcattttcattatcct

SEQ ID NO: 33819 - DNA, 20 bp, synthetic construct
  misc_feature 1..20: note = chemically synthesized
  source 1..20: mol_type = other DNA
tatcctgggctaaaatcaat

SEQ ID NO: 33820 - DNA, 20 bp, synthetic construct
  misc_feature 1..20: note = chemically synthesized
  source 1..20: mol_type = other DNA
gctaaaatcaattggtattt

SEQ ID NO: 33821 - DNA, 20 bp, synthetic construct
  misc_feature 1..20: note = chemically synthesized
  source 1..20: mol_type = other DNA
aaatcaattggtatttaagt

SEQ ID NO: 33822 - DNA, 20 bp, synthetic construct
  misc_feature 1..20: note = chemically synthesized
  source 1..20: mol_type = other DNA
atcaattggtatttaagtta

SEQ ID NO: 33823 - DNA, 20 bp, synthetic construct
  misc_feature 1..20: note = chemically synthesized
  source 1..20: mol_type = other DNA
ggtatttaagttagagcaaa

SEQ ID NO: 33824 - DNA, 20 bp, synthetic construct
  misc_feature 1..20: note = chemically synthesized
  source 1..20: mol_type = other DNA
gtatttaagttagagcaaaa

SEQ ID NO: 33825 - DNA, 20 bp, synthetic construct
  misc_feature 1..20: note = chemically synthesized
  source 1..20: mol_type = other DNA
tatttaagttagagcaaaaa

SEQ ID NO: 33826 - DNA, 20 bp, synthetic construct
  misc_feature 1..20: note = chemically synthesized
  source 1..20: mol_type = other DNA
aagggttctaaccctattta

SEQ ID NO: 33827 - DNA, 20 bp, synthetic construct
  misc_feature 1..20: note = chemically synthesized
  source 1..20: mol_type = other DNA
ggttctaaccctatttacag

SEQ ID NO: 33828 - DNA, 20 bp, synthetic construct
  misc_feature 1..20: note = chemically synthesized
  source 1..20: mol_type = other DNA
cagcacacatacacttacat

SEQ ID NO: 33829 - DNA, 20 bp, synthetic construct
  misc_feature 1..20: note = chemically synthesized
  source 1..20: mol_type = other DNA
acatacacttacattagaat

SEQ ID NO: 33830 - DNA, 20 bp, synthetic construct
  misc_feature 1..20: note = chemically synthesized
  source 1..20: mol_type = other DNA
cttacattagaattggcttt

SEQ ID NO: 33831 - DNA, 20 bp, synthetic construct
  misc_feature 1..20: note = chemically synthesized
  source 1..20: mol_type = other DNA
ttacattagaattggcttta

SEQ ID NO: 33832 - DNA, 20 bp, synthetic construct
  misc_feature 1..20: note = chemically synthesized
  source 1..20: mol_type = other DNA
tacattagaattggctttaa

SEQ ID NO: 33833 - DNA, 20 bp, synthetic construct
  misc_feature 1..20: note = chemically synthesized
  source 1..20: mol_type = other DNA
ttccactgattaccttctat

SEQ ID NO: 33834 - DNA, 20 bp, synthetic construct
  misc_feature 1..20: note = chemically synthesized
  source 1..20: mol_type = other DNA
ctgattaccttctatgagcc

SEQ ID NO: 33835 - DNA, 20 bp, synthetic construct
  misc_feature 1..20: note = chemically synthesized
  source 1..20: mol_type = other DNA
tctatgagccaagactgcca

SEQ ID NO: 33836 - DNA, 20 bp, synthetic construct
  misc_feature 1..20: note = chemically synthesized
  source 1..20: mol_type = other DNA
agccaagactgccatagtct

SEQ ID NO: 33837 - DNA, 20 bp, synthetic construct
  misc_feature 1..20: note = chemically synthesized
  source 1..20: mol_type = other DNA
ccatagtctcagccttcatg

SEQ ID NO: 33838 - DNA, 20 bp, synthetic construct
  misc_feature 1..20: note = chemically synthesized
  source 1..20: mol_type = other DNA
ctcagccttcatgcagctta

SEQ ID NO: 33839 - DNA, 20 bp, synthetic construct
  misc_feature 1..20: note = chemically synthesized
  source 1..20: mol_type = other DNA
tcagccttcatgcagcttat

SEQ ID NO: 33840 - DNA, 20 bp, synthetic construct
  misc_feature 1..20: note = chemically synthesized
  source 1..20: mol_type = other DNA
ccttcatgcagcttataggc

SEQ ID NO: 33841 - DNA, 20 bp, synthetic construct
  misc_feature 1..20: note = chemically synthesized
  source 1..20: mol_type = other DNA
cagcttataggctagcaaaa

SEQ ID NO: 33842 - DNA, 20 bp, synthetic construct
  misc_feature 1..20: note = chemically synthesized
  source 1..20: mol_type = other DNA
ttataggctagcaaaaaagc

SEQ ID NO: 33843 - DNA, 20 bp, synthetic construct
  misc_feature 1..20: note = chemically synthesized
  source 1..20: mol_type = other DNA
aggctagcaaaaaagccaga

SEQ ID NO: 33844 - DNA, 20 bp, synthetic construct
  misc_feature 1..20: note = chemically synthesized
  source 1..20: mol_type = other DNA
aaaaaagccagacagtgcac

SEQ ID NO: 33845 - DNA, 20 bp, synthetic construct
  misc_feature 1..20: note = chemically synthesized
  source 1..20: mol_type = other DNA
gacagtgcacaagaactcac

SEQ ID NO: 33846 - DNA, 20 bp, synthetic construct
  misc_feature 1..20: note = chemically synthesized
  source 1..20: mol_type = other DNA
caagaactcacaagtgtgtt

SEQ ID NO: 33847 - DNA, 20 bp, synthetic construct
  misc_feature 1..20: note = chemically synthesized
  source 1..20: mol_type = other DNA
acaagtgtgttgagtgttgc

SEQ ID NO: 33848 - DNA, 20 bp, synthetic construct
  misc_feature 1..20: note = chemically synthesized
  source 1..20: mol_type = other DNA
aagtgtgttgagtgttgcaa

SEQ ID NO: 33849 - DNA, 20 bp, synthetic construct
  misc_feature 1..20: note = chemically synthesized
  source 1..20: mol_type = other DNA
gtgttgagtgttgcaagagt

SEQ ID NO: 33850 - DNA, 20 bp, synthetic construct
  misc_feature 1..20: note = chemically synthesized
  source 1..20: mol_type = other DNA
agtgttgcaagagtaagttt

SEQ ID NO: 33851 - DNA, 20 bp, synthetic construct
  misc_feature 1..20: note = chemically synthesized
  source 1..20: mol_type = other DNA
gtgttgcaagagtaagtttc

SEQ ID NO: 33852 - DNA, 20 bp, synthetic construct
  misc_feature 1..20: note = chemically synthesized
  source 1..20: mol_type = other DNA
tgttgcaagagtaagtttca

SEQ ID NO: 33853 - DNA, 20 bp, synthetic construct
  misc_feature 1..20: note = chemically synthesized
  source 1..20: mol_type = other DNA
gttgcaagagtaagtttcag

SEQ ID NO: 33854 - DNA, 20 bp, synthetic construct
  misc_feature 1..20: note = chemically synthesized
  source 1..20: mol_type = other DNA
ggggctctccatgacttacc

SEQ ID NO: 33855 - DNA, 20 bp, synthetic construct
  misc_feature 1..20: note = chemically synthesized
  source 1..20: mol_type = other DNA
tctccatgacttacctggtt

SEQ ID NO: 33856 - DNA, 20 bp, synthetic construct
  misc_feature 1..20: note = chemically synthesized
  source 1..20: mol_type = other DNA
ctttaactttttttttcctc

SEQ ID NO: 33857 - DNA, 20 bp, synthetic construct
  misc_feature 1..20: note = chemically synthesized
  source 1..20: mol_type = other DNA
tttaactttttttttcctct

SEQ ID NO: 33858 - DNA, 20 bp, synthetic construct
  misc_feature 1..20: note = chemically synthesized
  source 1..20: mol_type = other DNA
ttttttttcctctgggtgta

SEQ ID NO: 33859 - DNA, 20 bp, synthetic construct
  misc_feature 1..20: note = chemically synthesized
  source 1..20: mol_type = other DNA
tttcctctgggtgtaaagtg

SEQ ID NO: 33860 - DNA, 20 bp, synthetic construct
  misc_feature 1..20: note = chemically synthesized
  source 1..20: mol_type = other DNA
tcctctgggtgtaaagtgaa

SEQ ID NO: 33861 - DNA, 20 bp, synthetic construct
  misc_feature 1..20: note = chemically synthesized
  source 1..20: mol_type = other DNA
ctgggtgtaaagtgaagaga

SEQ ID NO: 33862 - DNA, 20 bp, synthetic construct
  misc_feature 1..20: note = chemically synthesized
  source 1..20: mol_type = other DNA
taaagtgaagagatggcaat

SEQ ID NO: 33863 - DNA, 20 bp, synthetic construct
  misc_feature 1..20: note = chemically synthesized
  source 1..20: mol_type = other DNA
aagtgaagagatggcaatca

SEQ ID NO: 33864 - DNA, 20 bp, synthetic construct
  misc_feature 1..20: note = chemically synthesized
  source 1..20: mol_type = other DNA
tgaagagatggcaatcagag

SEQ ID NO: 33865 - DNA, 20 bp, synthetic construct
  misc_feature 1..20: note = chemically synthesized
  source 1..20: mol_type = other DNA
gaagagatggcaatcagagt

SEQ ID NO: 33866 - DNA, 20 bp, synthetic construct
  misc_feature 1..20: note = chemically synthesized
  source 1..20: mol_type = other DNA
ttccattgtgtcattgtgaa

SEQ ID NO: 33867 - DNA, 20 bp, synthetic construct
  misc_feature 1..20: note = chemically synthesized
  source 1..20: mol_type = other DNA
gtgtcattgtgaaaagatgc

SEQ ID NO: 33868 - DNA, 20 bp, synthetic construct
  misc_feature 1..20: note = chemically synthesized
  source 1..20: mol_type = other DNA
tgtcattgtgaaaagatgct

SEQ ID NO: 33869 - DNA, 20 bp, synthetic construct
  misc_feature 1..20: note = chemically synthesized
  source 1..20: mol_type = other DNA
attgtgaaaagatgctgggc

SEQ ID NO: 33870 - DNA, 20 bp, synthetic construct
  misc_feature 1..20: note = chemically synthesized
  source 1..20: mol_type = other DNA
ctgggctggcgtgtctcctg

SEQ ID NO: 33871 - DNA, 20 bp, synthetic construct
  misc_feature 1..20: note = chemically synthesized
  source 1..20: mol_type = other DNA
tgggctggcgtgtctcctga

SEQ ID NO: 33872 - DNA, 20 bp, synthetic construct
  misc_feature 1..20: note = chemically synthesized
  source 1..20: mol_type = other DNA
ttcatgcattcgcacaaata

SEQ ID NO: 33873 - DNA, 20 bp, synthetic construct
  misc_feature 1..20: note = chemically synthesized
  source 1..20: mol_type = other DNA
acaaatatagatgtgttcca

SEQ ID NO: 33874 - DNA, 20 bp, synthetic construct
  misc_feature 1..20: note = chemically synthesized
  source 1..20: mol_type = other DNA
tatagatgtgttccatagat

SEQ ID NO: 33875 - DNA, 20 bp, synthetic construct
  misc_feature 1..20: note = chemically synthesized
  source 1..20: mol_type = other DNA
atagatgtgttccatagatg

SEQ ID NO: 33876 - DNA, 20 bp, synthetic construct
  misc_feature 1..20: note = chemically synthesized
  source 1..20: mol_type = other DNA
gatgtgttccatagatgagg

SEQ ID NO: 33877 - DNA, 20 bp, synthetic construct
  misc_feature 1..20: note = chemically synthesized
  source 1..20: mol_type = other DNA
tgttccatagatgaggcaga

SEQ ID NO: 33878 - DNA, 20 bp, synthetic construct
  misc_feature 1..20: note = chemically synthesized
  source 1..20: mol_type = other DNA
tccatagatgaggcagatag

SEQ ID NO: 33879 - DNA, 20 bp, synthetic construct
  misc_feature 1..20: note = chemically synthesized
  source 1..20: mol_type = other DNA
catagatgaggcagatagca

SEQ ID NO: 33880 - DNA, 20 bp, synthetic construct
  misc_feature 1..20: note = chemically synthesized
  source 1..20: mol_type = other DNA
atagatgaggcagatagcag

SEQ ID NO: 33881 - DNA, 20 bp, synthetic construct
  misc_feature 1..20: note = chemically synthesized
  source 1..20: mol_type = other DNA
atagcagaggcttctgccta

SEQ ID NO: 33882 - DNA, 20 bp, synthetic construct
  misc_feature 1..20: note = chemically synthesized
  source 1..20: mol_type = other DNA
cagaggcttctgcctacagc

SEQ ID NO: 33883 - DNA, 20 bp, synthetic construct
  misc_feature 1..20: note = chemically synthesized
  source 1..20: mol_type = other DNA
agaggcttctgcctacagca

SEQ ID NO: 33884 - DNA, 20 bp, synthetic construct
  misc_feature 1..20: note = chemically synthesized
  source 1..20: mol_type = other DNA
gcttctgcctacagcaaggc

SEQ ID NO: 33885 - DNA, 20 bp, synthetic construct
  misc_feature 1..20: note = chemically synthesized
  source 1..20: mol_type = other DNA
tgcctacagcaaggctagtt

SEQ ID NO: 33886 - DNA, 20 bp, synthetic construct
  misc_feature 1..20: note = chemically synthesized
  source 1..20: mol_type = other DNA
cctacagcaaggctagtttg

SEQ ID NO: 33887 - DNA, 20 bp, synthetic construct
  misc_feature 1..20: note = chemically synthesized
  source 1..20: mol_type = other DNA
tacagcaaggctagtttgga

SEQ ID NO: 33888 - DNA, 20 bp, synthetic construct
  misc_feature 1..20: note = chemically synthesized
  source 1..20: mol_type = other DNA
acagcaaggctagtttggag

SEQ ID NO: 33889 - DNA, 20 bp, synthetic construct
  misc_feature 1..20: note = chemically synthesized
  source 1..20: mol_type = other DNA
cagcaaggctagtttggaga

SEQ ID NO: 33890 - DNA, 20 bp, synthetic construct
  misc_feature 1..20: note = chemically synthesized
  source 1..20: mol_type = other DNA
tttggagagggttttgctgt

SEQ ID NO: 33891 - DNA, 20 bp, synthetic construct
  misc_feature 1..20: note = chemically synthesized
  source 1..20: mol_type = other DNA
ttggagagggttttgctgtc

SEQ ID NO: 33892 - DNA, 20 bp, synthetic construct
  misc_feature 1..20: note = chemically synthesized
  source 1..20: mol_type = other DNA
tggagagggttttgctgtca

SEQ ID NO: 33893 - DNA, 20 bp, synthetic construct
  misc_feature 1..20: note = chemically synthesized
  source 1..20: mol_type = other DNA
gagggttttgctgtcagggt

SEQ ID NO: 33894 - DNA, 20 bp, synthetic construct
  misc_feature 1..20: note = chemically synthesized
  source 1..20: mol_type = other DNA
tggacccacacacctcttca

SEQ ID NO: 33895 - DNA, 20 bp, synthetic construct
  misc_feature 1..20: note = chemically synthesized
  source 1..20: mol_type = other DNA
atgctttttcttttttttcc

SEQ ID NO: 33896 - DNA, 20 bp, synthetic construct
  misc_feature 1..20: note = chemically synthesized
  source 1..20: mol_type = other DNA
gctttttcttttttttccca

SEQ ID NO: 33897 - DNA, 20 bp, synthetic construct
  misc_feature 1..20: note = chemically synthesized
  source 1..20: mol_type = other DNA
ttttttttcccagagtttga

SEQ ID NO: 33898 - DNA, 20 bp, synthetic construct
  misc_feature 1..20: note = chemically synthesized
  source 1..20: mol_type = other DNA
tttttttcccagagtttgaa

SEQ ID NO: 33899 - DNA, 20 bp, synthetic construct
  misc_feature 1..20: note = chemically synthesized
  source 1..20: mol_type = other DNA
ttttttcccagagtttgaaa

SEQ ID NO: 33900 - DNA, 20 bp, synthetic construct
  misc_feature 1..20: note = chemically synthesized
  source 1..20: mol_type = other DNA
cccagagtttgaaagggaaa

SEQ ID NO: 33901 - DNA, 20 bp, synthetic construct
  misc_feature 1..20: note = chemically synthesized
  source 1..20: mol_type = other DNA
cagagtttgaaagggaaatg

SEQ ID NO: 33902 - DNA, 20 bp, synthetic construct
  misc_feature 1..20: note = chemically synthesized
  source 1..20: mol_type = other DNA
tgaaagggaaatggagtctc

SEQ ID NO: 33903 - DNA, 20 bp, synthetic construct
  misc_feature 1..20: note = chemically synthesized
  source 1..20: mol_type = other DNA
gggaaatggagtctcaagtt

SEQ ID NO: 33904 - DNA, 20 bp, synthetic construct
  misc_feature 1..20: note = chemically synthesized
  source 1..20: mol_type = other DNA
ggaaatggagtctcaagttc

SEQ ID NO: 33905 - DNA, 20 bp, synthetic construct
  misc_feature 1..20: note = chemically synthesized
  source 1..20: mol_type = other DNA
gaaatggagtctcaagttca

SEQ ID NO: 33906 - DNA, 20 bp, synthetic construct
  misc_feature 1..20: note = chemically synthesized
  source 1..20: mol_type = other DNA
aatggagtctcaagttcagg

SEQ ID NO: 33907 - DNA, 20 bp, synthetic construct
  misc_feature 1..20: note = chemically synthesized
  source 1..20: mol_type = other DNA
atggagtctcaagttcaggg

SEQ ID NO: 33908 - DNA, 20 bp, synthetic construct
  misc_feature 1..20: note = chemically synthesized
  source 1..20: mol_type = other DNA
tctcaagttcagggaggtta

SEQ ID NO: 33909 - DNA, 20 bp, synthetic construct
  misc_feature 1..20: note = chemically synthesized
  source 1..20: mol_type = other DNA
agttcagggaggttacagtg

SEQ ID NO: 33910 - DNA, 20 bp, synthetic construct
  misc_feature 1..20: note = chemically synthesized
  source 1..20: mol_type = other DNA
tacagtgtagacccacaaat

SEQ ID NO: 33911 - DNA, 20 bp, synthetic construct
  misc_feature 1..20: note = chemically synthesized
  source 1..20: mol_type = other DNA
tgtagacccacaaatcagct

SEQ ID NO: 33912 - DNA, 20 bp, synthetic construct
  misc_feature 1..20: note = chemically synthesized
  source 1..20: mol_type = other DNA
acccacaaatcagctaagta

SEQ ID NO: 33913 - DNA, 20 bp, synthetic construct
  misc_feature 1..20: note = chemically synthesized
  source 1..20: mol_type = other DNA
caaatcagctaagtacagct

SEQ ID NO: 33914 - DNA, 20 bp, synthetic construct
  misc_feature 1..20: note = chemically synthesized
  source 1..20: mol_type = other DNA
aaatcagctaagtacagcta

SEQ ID NO: 33915 - DNA, 20 bp, synthetic construct
  misc_feature 1..20: note = chemically synthesized
  source 1..20: mol_type = other DNA
aatcagctaagtacagctaa

SEQ ID NO: 33916 - DNA, 20 bp, synthetic construct
  misc_feature 1..20: note = chemically synthesized
  source 1..20: mol_type = other DNA
cagctaagtacagctaaggg

SEQ ID NO: 33917 - DNA, 20 bp, synthetic construct
  misc_feature 1..20: note = chemically synthesized
  source 1..20: mol_type = other DNA
gctaagtacagctaagggtg

SEQ ID NO: 33918 - DNA, 20 bp, synthetic construct
  misc_feature 1..20: note = chemically synthesized
  source 1..20: mol_type = other DNA
aagtacagctaagggtggag

SEQ ID NO: 33919 - DNA, 20 bp, synthetic construct
  misc_feature 1..20: note = chemically synthesized
  source 1..20: mol_type = other DNA
ggagaagtctatgcaatatc

SEQ ID NO: 33920 - DNA, 20 bp, synthetic construct
  misc_feature 1..20: note = chemically synthesized
  source 1..20: mol_type = other DNA
ccagcactcttctgattaat

SEQ ID NO: 33921 - DNA, 20 bp, synthetic construct
  misc_feature 1..20: note = chemically synthesized
  source 1..20: mol_type = other DNA
gcactcttctgattaattag

SEQ ID NO: 33922 - DNA, 20 bp, synthetic construct
  misc_feature 1..20: note = chemically synthesized
  source 1..20: mol_type = other DNA
ttagaagtctttaaaattca

SEQ ID NO: 33923 - DNA, 20 bp, synthetic construct
  misc_feature 1..20: note = chemically synthesized
  source 1..20: mol_type = other DNA
ccctaaatgattcatatgtc

SEQ ID NO: 33924 - DNA, 20 bp, synthetic construct
  misc_feature 1..20: note = chemically synthesized
  source 1..20: mol_type = other DNA
atgattcatatgtcaagaca

SEQ ID NO: 33925 - DNA, 20 bp, synthetic construct
  misc_feature 1..20: note = chemically synthesized
  source 1..20: mol_type = other DNA
tcatatgtcaagacacagta

SEQ ID NO: 33926 - DNA, 20 bp, synthetic construct
  misc_feature 1..20: note = chemically synthesized
  source 1..20: mol_type = other DNA
cacagtaaagatattatatg

SEQ ID NO: 33927 - DNA, 20 bp, synthetic construct
  misc_feature 1..20: note = chemically synthesized
  source 1..20: mol_type = other DNA
tggaacatcatacacaaaca

SEQ ID NO: 33928 - DNA, 20 bp, synthetic construct
  misc_feature 1..20: note = chemically synthesized
  source 1..20: mol_type = other DNA
ggaacatcatacacaaacat

SEQ ID NO: 33929 - DNA, 20 bp, synthetic construct
  misc_feature 1..20: note = chemically synthesized
  source 1..20: mol_type = other DNA
tacacaaacataggtccata

SEQ ID NO: 33930 - DNA, 20 bp, synthetic construct
  misc_feature 1..20: note = chemically synthesized
  source 1..20: mol_type = other DNA
ccatatagaaattcttacct

SEQ ID NO: 33931 - DNA, 20 bp, synthetic construct
  misc_feature 1..20: note = chemically synthesized
  source 1..20: mol_type = other DNA
tgctctttaaatcctgctaa

SEQ ID NO: 33932 - DNA, 20 bp, synthetic construct
  misc_feature 1..20: note = chemically synthesized
  source 1..20: mol_type = other DNA
tctttaaatcctgctaatgg

SEQ ID NO: 33933 - DNA, 20 bp, synthetic construct
  misc_feature 1..20: note = chemically synthesized
  source 1..20: mol_type = other DNA
atttgtgtctttgtcaccta

SEQ ID NO: 33934 - DNA, 20 bp, synthetic construct
  misc_feature 1..20: note = chemically synthesized
  source 1..20: mol_type = other DNA
tgtcacctacagtacatttc

SEQ ID NO: 33935 - DNA, 20 bp, synthetic construct
  misc_feature 1..20: note = chemically synthesized
  source 1..20: mol_type = other DNA
ctacagtacatttctggatt

SEQ ID NO: 33936 - DNA, 20 bp, synthetic construct
  misc_feature 1..20: note = chemically synthesized
  source 1..20: mol_type = other DNA
tacagtacatttctggattt

SEQ ID NO: 33937 - DNA, 20 bp, synthetic construct
  misc_feature 1..20: note = chemically synthesized
  source 1..20: mol_type = other DNA
acatttctggatttgggaat

SEQ ID NO: 33938 - DNA, 20 bp, synthetic construct
  misc_feature 1..20: note = chemically synthesized
  source 1..20: mol_type = other DNA
atttgggaatgagtgttctt

SEQ ID NO: 33939 - DNA, 20 bp, synthetic construct
  misc_feature 1..20: note = chemically synthesized
  source 1..20: mol_type = other DNA
ttgggaatgagtgttcttca

SEQ ID NO: 33940 - DNA, 20 bp, synthetic construct
  misc_feature 1..20: note = chemically synthesized
  source 1..20: mol_type = other DNA
tgggaatgagtgttcttcag

SEQ ID NO: 33941 - DNA, 20 bp, synthetic construct
  misc_feature 1..20: note = chemically synthesized
  source 1..20: mol_type = other DNA
ttcagaggatcctcgctgcc

SEQ ID NO: 33942 - DNA, 20 bp, synthetic construct
  misc_feature 1..20: note = chemically synthesized
  source 1..20: mol_type = other DNA
tcagaggatcctcgctgccc

SEQ ID NO: 33943 - DNA, 20 bp, synthetic construct
  misc_feature 1..20: note = chemically synthesized
  source 1..20: mol_type = other DNA
tcgctgcccaggttccctgc

SEQ ID NO: 33944 - DNA, 20 bp, synthetic construct
  misc_feature 1..20: note = chemically synthesized
  source 1..20: mol_type = other DNA
ctgcccaggttccctgccag

SEQ ID NO: 33945 - DNA, 20 bp, synthetic construct
  misc_feature 1..20: note = chemically synthesized
  source 1..20: mol_type = other DNA
tgcccaggttccctgccaga

SEQ ID NO: 33946 - DNA, 20 bp, synthetic construct
  misc_feature 1..20: note = chemically synthesized
  source 1..20: mol_type = other DNA
caggttccctgccagaagga

SEQ ID NO: 33947 - DNA, 20 bp, synthetic construct
  misc_feature 1..20: note = chemically synthesized
  source 1..20: mol_type = other DNA
tggcagggaacctgggcagc

SEQ ID NO: 33948 - DNA, 20 bp, synthetic construct
  misc_feature 1..20: note = chemically synthesized
  source 1..20: mol_type = other DNA
gacacaaatgccaccattag

SEQ ID NO: 33949 - DNA, 20 bp, synthetic construct
  misc_feature 1..20: note = chemically synthesized
  source 1..20: mol_type = other DNA
aattggcagtttactaaggt

SEQ ID NO: 33950 - DNA, 20 bp, synthetic construct
  misc_feature 1..20: note = chemically synthesized
  source 1..20: mol_type = other DNA
tctttactgtgtcttgacat

SEQ ID NO: 33951 - DNA, 20 bp, synthetic construct
  misc_feature 1..20: note = chemically synthesized
  source 1..20: mol_type = other DNA
gggaagacaatatggtttct

SEQ ID NO: 33952 - DNA, 20 bp, synthetic construct
  misc_feature 1..20: note = chemically synthesized
  source 1..20: mol_type = other DNA
aaagacttctaattaatcag

SEQ ID NO: 33953 - DNA, 20 bp, synthetic construct
  misc_feature 1..20: note = chemically synthesized
  source 1..20: mol_type = other DNA
tctaattaatcagaagagtg

SEQ ID NO: 33954 - DNA, 20 bp, synthetic construct
  misc_feature 1..20: note = chemically synthesized
  source 1..20: mol_type = other DNA
tagctgtacttagctgattt

SEQ ID NO: 33955 - DNA, 20 bp, synthetic construct
  misc_feature 1..20: note = chemically synthesized
  source 1..20: mol_type = other DNA
aagcatctatgaagaggtgt

SEQ ID NO: 33956 - DNA, 20 bp, synthetic construct
  misc_feature 1..20: note = chemically synthesized
  source 1..20: mol_type = other DNA
tggaacacatctatatttgt

SEQ ID NO: 33957 - DNA, 20 bp, synthetic construct
  misc_feature 1..20: note = chemically synthesized
  source 1..20: mol_type = other DNA
tgaaaataaagtttaaagat

SEQ ID NO: 33958 - DNA, 20 bp, synthetic construct
  misc_feature 1..20: note = chemically synthesized
  source 1..20: mol_type = other DNA
ccagaggaaaaaaaaagtta

SEQ ID NO: 33959 - DNA, 20 bp, synthetic construct
  misc_feature 1..20: note = chemically synthesized
  source 1..20: mol_type = other DNA
ttgcaacactcaacacactt

SEQ ID NO: 33960 - DNA, 20 bp, synthetic construct
  misc_feature 1..20: note = chemically synthesized
  source 1..20: mol_type = other DNA
agtggaaatttgtcgattga

SEQ ID NO: 33961 - DNA, 20 bp, synthetic construct
  misc_feature 1..20: note = chemically synthesized
  source 1..20: mol_type = other DNA
tgtatgtgtgctgctgtaaa

SEQ ID NO: 33962 - DNA, 20 bp, synthetic construct
  misc_feature 1..20: note = chemically synthesized
  source 1..20: mol_type = other DNA
aataccaattgattttagcc

SEQ ID NO: 33963 - DNA, 20 bp, synthetic construct
  misc_feature 1..20: note = chemically synthesized
  source 1..20: mol_type = other DNA
agctccttaagagatataag

SEQ ID NO: 33964 - DNA, 20 bp, synthetic construct
  misc_feature 1..20: note = chemically synthesized
  source 1..20: mol_type = other DNA
gagatataagaagggtggaa

SEQ ID NO: 33965 - DNA, 20 bp, synthetic construct
  misc_feature 1..20: note = chemically synthesized
  source 1..20: mol_type = other DNA
aagaagggtggaagtgggtg

SEQ ID NO: 33966 - DNA, 20 bp, synthetic construct
  misc_feature 1..20: note = chemically synthesized
  source 1..20: mol_type = other DNA
tgggtgaagggtaggccctc

SEQ ID NO: 33967 - DNA, 20 bp, synthetic construct
  misc_feature 1..20: note = chemically synthesized
  source 1..20: mol_type = other DNA
aagtctgggactccaaacgg

SEQ ID NO: 33968 - DNA, 20 bp, synthetic construct
  misc_feature 1..20: note = chemically synthesized
  source 1..20: mol_type = other DNA
tgaagccatggcagaagttc

SEQ ID NO: 33969 - DNA, 20 bp, synthetic construct
  misc_feature 1..20: note = chemically synthesized
  source 1..20: mol_type = other DNA
tcttaatcctgtcagctgag

SEQ ID NO: 33970 - DNA, 20 bp, synthetic construct
  misc_feature 1..20: note = chemically synthesized
  source 1..20: mol_type = other DNA
tggacaccttgaaaaaagaa

SEQ ID NO: 33971 - DNA, 20 bp, synthetic construct
  misc_feature 1..20: note = chemically synthesized
  source 1..20: mol_type = other DNA
aggataacagcaattgttca

SEQ ID NO: 33972 - DNA, 20 bp, synthetic construct
  misc_feature 1..20: note = chemically synthesized
  source 1..20: mol_type = other DNA
agcaaatgggagaaatatcg

SEQ ID NO: 33973 - DNA, 20 bp, synthetic construct
  misc_feature 1..20: note = chemically synthesized
  source 1..20: mol_type = other DNA
catggaacatccctgagaaa

SEQ ID NO: 33974 - DNA, 20 bp, synthetic construct
  misc_feature 1..20: note = chemically synthesized
  source 1..20: mol_type = other DNA
tctcttatggtcgagactgc

SEQ ID NO: 33975 - DNA, 20 bp, synthetic construct
  misc_feature 1..20: note = chemically synthesized
  source 1..20: mol_type = other DNA
accgaaatgtgatgcctccc

SEQ ID NO: 33976 - DNA, 20 bp, synthetic construct
  misc_feature 1..20: note = chemically synthesized
  source 1..20: mol_type = other DNA
gaaaatagaaaagaacctac

SEQ ID NO: 33977 - DNA, 20 bp, synthetic construct
  misc_feature 1..20: note = chemically synthesized
  source 1..20: mol_type = other DNA
ggcgtggagatgtaacaagc

SEQ ID NO: 33978 - DNA, 20 bp, synthetic construct
  misc_feature 1..20: note = chemically synthesized
  source 1..20: mol_type = other DNA
gatgtaacaagcctggatgt

SEQ ID NO: 33979 - DNA, 20 bp, synthetic construct
  misc_feature 1..20: note = chemically synthesized
  source 1..20: mol_type = other DNA
atttggaagaaatatcagat

SEQ ID NO: 33980 - DNA, 20 bp, synthetic construct
  misc_feature 1..20: note = chemically synthesized
  source 1..20: mol_type = other DNA
taaaagcagcagcatgcagt

SEQ ID NO: 33981 - DNA, 20 bp, synthetic construct
  misc_feature 1..20: note = chemically synthesized
  source 1..20: mol_type = other DNA
aaccccatgctcaccatcaa

SEQ ID NO: 33982 - DNA, 20 bp, synthetic construct
  misc_feature 1..20: note = chemically synthesized
  source 1..20: mol_type = other DNA
catgctcaccatcaacggga

SEQ ID NO: 33983 - DNA, 20 bp, synthetic construct
  misc_feature 1..20: note = chemically synthesized
  source 1..20: mol_type = other DNA
gggattgaatttgagctgct

SEQ ID NO: 33984 - DNA, 20 bp, synthetic construct
  misc_feature 1..20: note = chemically synthesized
  source 1..20: mol_type = other DNA
ttatcttcaattctgtgaaa

SEQ ID NO: 33985 - DNA, 20 bp, synthetic construct
  misc_feature 1..20: note = chemically synthesized
  source 1..20: mol_type = other DNA
tgcaagagaggaaggaaggc

SEQ ID NO: 33986 - DNA, 20 bp, synthetic construct
  misc_feature 1..20: note = chemically synthesized
  source 1..20: mol_type = other DNA
agctttctggcaggcactgg

SEQ ID NO: 33987 - DNA, 20 bp, synthetic construct
  misc_feature 1..20: note = chemically synthesized
  source 1..20: mol_type = other DNA
tgtaactggtggccttagaa

SEQ ID NO: 33988 - DNA, 20 bp, synthetic construct
  misc_feature 1..20: note = chemically synthesized
  source 1..20: mol_type = other DNA
ggtggccttagaagagggtt

SEQ ID NO: 33989 - DNA, 20 bp, synthetic construct
  misc_feature 1..20: note = chemically synthesized
  source 1..20: mol_type = other DNA
cagggttatgtgtttggaac

SEQ ID NO: 33990 - DNA, 20 bp, synthetic construct
  misc_feature 1..20: note = chemically synthesized
  source 1..20: mol_type = other DNA
gccaccaagcaccaagaggt

SEQ ID NO: 33991 - DNA, 20 bp, synthetic construct
  misc_feature 1..20: note = chemically synthesized
  source 1..20: mol_type = other DNA
agcaccaagaggtgtgagtt

SEQ ID NO: 33992 - DNA, 20 bp, synthetic construct
  misc_feature 1..20: note = chemically synthesized
  source 1..20: mol_type = other DNA
aaagaggaaggtgaaaactg

SEQ ID NO: 33993 - DNA, 20 bp, synthetic construct
  misc_feature 1..20: note = chemically synthesized
  source 1..20: mol_type = other DNA
atcccctgagagaaaaagta

SEQ ID NO: 33994 - DNA, 20 bp, synthetic construct
  misc_feature 1..20: note = chemically synthesized
  source 1..20: mol_type = other DNA
cccctcacggccaaaggcat

SEQ ID NO: 33995 - DNA, 20 bp, synthetic construct
  misc_feature 1..20: note = chemically synthesized
  source 1..20: mol_type = other DNA
ccagacattgagctcaagga

SEQ ID NO: 33996 - DNA, 20 bp, synthetic construct
  misc_feature 1..20: note = chemically synthesized
  source 1..20: mol_type = other DNA
gtttgtatgttttctacagt

SEQ ID NO: 33997 - DNA, 20 bp, synthetic construct
  misc_feature 1..20: note = chemically synthesized
  source 1..20: mol_type = other DNA
gttttctacagttcggattt

SEQ ID NO: 33998 - DNA, 20 bp, synthetic construct
  misc_feature 1..20: note = chemically synthesized
  source 1..20: mol_type = other DNA
atgatttcatttcttttcga

SEQ ID NO: 33999 - DNA, 20 bp, synthetic construct
  misc_feature 1..20: note = chemically synthesized
  source 1..20: mol_type = other DNA
tatgcatactttctaaatgc

SEQ ID NO: 34000 - DNA, 20 bp, synthetic construct
  misc_feature 1..20: note = chemically synthesized
  source 1..20: mol_type = other DNA
catcagctctttggcagctt

SEQ ID NO: 34001 - DNA, 20 bp, synthetic construct
  misc_feature 1..20: note = chemically synthesized
  source 1..20: mol_type = other DNA
tttaattctcacctggtccc

SEQ ID NO: 34002 - DNA, 20 bp, synthetic construct
  misc_feature 1..20: note = chemically synthesized
  source 1..20: mol_type = other DNA
ccaggatatggtttacttgt

SEQ ID NO: 34003 - DNA, 20 bp, synthetic construct
  misc_feature 1..20: note = chemically synthesized
  source 1..20: mol_type = other DNA
tgaaggaaagagagagaagt

SEQ ID NO: 34004 - DNA, 20 bp, synthetic construct
  misc_feature 1..20: note = chemically synthesized
  source 1..20: mol_type = other DNA
attttttttttctgtggaaa

SEQ ID NO: 34005 - DNA, 20 bp, synthetic construct
  misc_feature 1..20: note = chemically synthesized
  source 1..20: mol_type = other DNA
ttgcacattatcgcagtagg

SEQ ID NO: 34006 - DNA, 20 bp, synthetic construct
  misc_feature 1..20: note = chemically synthesized
  source 1..20: mol_type = other DNA
tggcttaacccctgaaacct

SEQ ID NO: 34007 - DNA, 20 bp, synthetic construct
  misc_feature 1..20: note = chemically synthesized
  source 1..20: mol_type = other DNA
agacttttgcatatataatt

SEQ ID NO: 34008 - DNA, 20 bp, synthetic construct
  misc_feature 1..20: note = chemically synthesized
  source 1..20: mol_type = other DNA
gcatatataattaaggatct

SEQ ID NO: 34009 - DNA, 20 bp, synthetic construct
  misc_feature 1..20: note = chemically synthesized
  source 1..20: mol_type = other DNA
tggggagatatcctaattat

SEQ ID NO: 34010 - DNA, 20 bp, synthetic construct
  misc_feature 1..20: note = chemically synthesized
  source 1..20: mol_type = other DNA
gaggaagaggctacaaacca

SEQ ID NO: 34011 - DNA, 20 bp, synthetic construct
  misc_feature 1..20: note = chemically synthesized
  source 1..20: mol_type = other DNA
gaggctacaaaccaaggaat

SEQ ID NO: 34012 - DNA, 20 bp, synthetic construct
  misc_feature 1..20: note = chemically synthesized
  source 1..20: mol_type = other DNA
gtagcctctagaagaggaaa

SEQ ID NO: 34013 - DNA, 20 bp, synthetic construct
  misc_feature 1..20: note = chemically synthesized
  source 1..20: mol_type = other DNA
caggaaaacacaatctctca

SEQ ID NO: 34014 - DNA, 20 bp, synthetic construct
  misc_feature 1..20: note = chemically synthesized
  source 1..20: mol_type = other DNA
gcaagaggaaatcagttacg

SEQ ID NO: 34015 - DNA, 20 bp, synthetic construct
  misc_feature 1..20: note = chemically synthesized
  source 1..20: mol_type = other DNA
tcctgtctctggctaatcat

SEQ ID NO: 34016 - DNA, 20 bp, synthetic construct
  misc_feature 1..20: note = chemically synthesized
  source 1..20: mol_type = other DNA
tacatacagacccagagcca

SEQ ID NO: 34017 - DNA, 20 bp, synthetic construct
  misc_feature 1..20: note = chemically synthesized
  source 1..20: mol_type = other DNA
agacccagagccagtgaatc

SEQ ID NO: 34018 - DNA, 20 bp, synthetic construct
  misc_feature 1..20: note = chemically synthesized
  source 1..20: mol_type = other DNA
ttggtggtggggcccagagc

SEQ ID NO: 34019 - DNA, 20 bp, synthetic construct
  misc_feature 1..20: note = chemically synthesized
  source 1..20: mol_type = other DNA
aagcaacttactcaaataca

SEQ ID NO: 34020 - DNA, 20 bp, synthetic construct
  misc_feature 1..20: note = chemically synthesized
  source 1..20: mol_type = other DNA
taattttattactttatctt

SEQ ID NO: 34021 - DNA, 20 bp, synthetic construct
  misc_feature 1..20: note = chemically synthesized
  source 1..20: mol_type = other DNA
attatataatgtttattgat

SEQ ID NO: 34022 - DNA, 20 bp, synthetic construct
  misc_feature 1..20: note = chemically synthesized
  source 1..20: mol_type = other DNA
tataatgtttattgattaga

SEQ ID NO: 34023 - DNA, 20 bp, synthetic construct
  misc_feature 1..20: note = chemically synthesized
  source 1..20: mol_type = other DNA
gtgttcagattcctgacctc

SEQ ID NO: 34024 - DNA, 20 bp, synthetic construct
  misc_feature 1..20: note = chemically synthesized
  source 1..20: mol_type = other DNA
agattagacagcaggcaggg

SEQ ID NO: 34025 - DNA, 20 bp, synthetic construct
  misc_feature 1..20: note = chemically synthesized
  source 1..20: mol_type = other DNA
aagttgcttaaacatgacag

SEQ ID NO: 34026 - DNA, 20 bp, synthetic construct
  misc_feature 1..20: note = chemically synthesized
  source 1..20: mol_type = other DNA
gcttaaacatgacagcagga

SEQ ID NO: 34027 - DNA, 20 bp, synthetic construct
  misc_feature 1..20: note = chemically synthesized
  source 1..20: mol_type = other DNA
acctctgctgaacttcctca

SEQ ID NO: 34028 - DNA, 20 bp, synthetic construct
  misc_feature 1..20: note = chemically synthesized
  source 1..20: mol_type = other DNA
tccataaatccaaccaccgc

SEQ ID NO: 34029 - DNA, 20 bp, synthetic construct
  misc_feature 1..20: note = chemically synthesized
  source 1..20: mol_type = other DNA
caaatttggctgacacagtt

SEQ ID NO: 34030 - DNA, 20 bp, synthetic construct
  misc_feature 1..20: note = chemically synthesized
  source 1..20: mol_type = other DNA
gcactagcacaaaatatttg

SEQ ID NO: 34031 - DNA, 20 bp, synthetic construct
  misc_feature 1..20: note = chemically synthesized
  source 1..20: mol_type = other DNA
acaaaatatttgctgaatga

SEQ ID NO: 34032 - DNA, 20 bp, synthetic construct
  misc_feature 1..20: note = chemically synthesized
  source 1..20: mol_type = other DNA
tatttgctgaatgaaagaat

SEQ ID NO: 34033 - DNA, 20 bp, synthetic construct
  misc_feature 1..20: note = chemically synthesized
  source 1..20: mol_type = other DNA
caaagtcttttactccggtg

SEQ ID NO: 34034 - DNA, 20 bp, synthetic construct
  misc_feature 1..20: note = chemically synthesized
  source 1..20: mol_type = other DNA
actccggtgtggagtgtttt

SEQ ID NO: 34035 - DNA, 20 bp, synthetic construct
  misc_feature 1..20: note = chemically synthesized
  source 1..20: mol_type = other DNA
gaaacacctccccttaactg

SEQ ID NO: 34036 - DNA, 20 bp, synthetic construct
  misc_feature 1..20: note = chemically synthesized
  source 1..20: mol_type = other DNA
ttcagggaagatgtctgttg

SEQ ID NO: 34037 - DNA, 20 bp, synthetic construct
  misc_feature 1..20: note = chemically synthesized
  source 1..20: mol_type = other DNA
ctataccccagatttatttt

SEQ ID NO: 34038 - DNA, 20 bp, synthetic construct
  misc_feature 1..20: note = chemically synthesized
  source 1..20: mol_type = other DNA
ccagatttattttgaggatt

SEQ ID NO: 34039 - DNA, 20 bp, synthetic construct
  misc_feature 1..20: note = chemically synthesized
  source 1..20: mol_type = other DNA
attgcgtattactaaaaaga

SEQ ID NO: 34040 - DNA, 20 bp, synthetic construct
  misc_feature 1..20: note = chemically synthesized
  source 1..20: mol_type = other DNA
caatgggaaggtgtcagagc

SEQ ID NO: 34041 - DNA, 20 bp, synthetic construct
  misc_feature 1..20: note = chemically synthesized
  source 1..20: mol_type = other DNA
ccgtagtggaggggagctct

SEQ ID NO: 34042 - DNA, 20 bp, synthetic construct
  misc_feature 1..20: note = chemically synthesized
  source 1..20: mol_type = other DNA
aattgaaatgaacaaaggca

SEQ ID NO: 34043 - DNA, 20 bp, synthetic construct
  misc_feature 1..20: note = chemically synthesized
  source 1..20: mol_type = other DNA
acagggaagcctctgaacac

SEQ ID NO: 34044 - DNA, 20 bp, synthetic construct
  misc_feature 1..20: note = chemically synthesized
  source 1..20: mol_type = other DNA
cttcaggaaacccaggccca

SEQ ID NO: 34045 - DNA, 20 bp, synthetic construct
  misc_feature 1..20: note = chemically synthesized
  source 1..20: mol_type = other DNA
tttctccttcaaaccactct

SEQ ID NO: 34046 - DNA, 20 bp, synthetic construct
  misc_feature 1..20: note = chemically synthesized
  source 1..20: mol_type = other DNA
gcgtcactcaaactagctga

SEQ ID NO: 34047 - DNA, 20 bp, synthetic construct
  misc_feature 1..20: note = chemically synthesized
  source 1..20: mol_type = other DNA
taggcttatttcaaaaggca

SEQ ID NO: 34048 - DNA, 20 bp, synthetic construct
  misc_feature 1..20: note = chemically synthesized
  source 1..20: mol_type = other DNA
agtgcctgctgtgtgtggtg

SEQ ID NO: 34049 - DNA, 20 bp, synthetic construct
  misc_feature 1..20: note = chemically synthesized
  source 1..20: mol_type = other DNA
taggaaggaacagggcagtg

SEQ ID NO: 34050 - DNA, 20 bp, synthetic construct
  misc_feature 1..20: note = chemically synthesized
  source 1..20: mol_type = other DNA
ctgccctgttccttcctagc

SEQ ID NO: 34051 - DNA, 20 bp, synthetic construct
  misc_feature 1..20: note = chemically synthesized
  source 1..20: mol_type = other DNA
gcctgagtcaggactgagca

SEQ ID NO: 34052 - DNA, 20 bp, synthetic construct
  misc_feature 1..20: note = chemically synthesized
  source 1..20: mol_type = other DNA
gaaataagcctacttttaac

SEQ ID NO: 34053 - DNA, 20 bp, synthetic construct
  misc_feature 1..20: note = chemically synthesized
  source 1..20: mol_type = other DNA
gctggactttgtccctgtgt

SEQ ID NO: 34054 - DNA, 20 bp, synthetic construct
  misc_feature 1..20: note = chemically synthesized
  source 1..20: mol_type = other DNA
agacaattctttcagctagt

SEQ ID NO: 34055 - DNA, 20 bp, synthetic construct
  misc_feature 1..20: note = chemically synthesized
  source 1..20: mol_type = other DNA
cgcagtgaagcagtgggaac

SEQ ID NO: 34056 - DNA, 20 bp, synthetic construct
  misc_feature 1..20: note = chemically synthesized
  source 1..20: mol_type = other DNA
agtgggaaccggaatatcca

SEQ ID NO: 34057 - DNA, 20 bp, synthetic construct
  misc_feature 1..20: note = chemically synthesized
  source 1..20: mol_type = other DNA
tggctttatatcctctgggc

SEQ ID NO: 34058 - DNA, 20 bp, synthetic construct
  misc_feature 1..20: note = chemically synthesized
  source 1..20: mol_type = other DNA
atagaggagagagaaaatgg

SEQ ID NO: 34059 - DNA, 20 bp, synthetic construct
  misc_feature 1..20: note = chemically synthesized
  source 1..20: mol_type = other DNA
atggaagtttctgagaactt

SEQ ID NO: 34060 - DNA, 20 bp, synthetic construct
  misc_feature 1..20: note = chemically synthesized
  source 1..20: mol_type = other DNA
ttctgagaacttcagggtat

SEQ ID NO: 34061 - DNA, 20 bp, synthetic construct
  misc_feature 1..20: note = chemically synthesized
  source 1..20: mol_type = other DNA
ctatttagttaattaaggct

SEQ ID NO: 34062 - DNA, 20 bp, synthetic construct
  misc_feature 1..20: note = chemically synthesized
  source 1..20: mol_type = other DNA
tacgcaattgaaaagtatgt

SEQ ID NO: 34063 - DNA, 20 bp, synthetic construct
  misc_feature 1..20: note = chemically synthesized
  source 1..20: mol_type = other DNA
aggtgctaagcattttagct

SEQ ID NO: 34064 - DNA, 20 bp, synthetic construct
  misc_feature 1..20: note = chemically synthesized
  source 1..20: mol_type = other DNA
cataatcctcaaaataaatc

SEQ ID NO: 34065 - DNA, 20 bp, synthetic construct
  misc_feature 1..20: note = chemically synthesized
  source 1..20: mol_type = other DNA
atagatgacttgattagaag

SEQ ID NO: 34066 - DNA, 20 bp, synthetic construct
  misc_feature 1..20: note = chemically synthesized
  source 1..20: mol_type = other DNA
tgattagaagcagggtatgt

SEQ ID NO: 34067 - DNA, 20 bp, synthetic construct
  misc_feature 1..20: note = chemically synthesized
  source 1..20: mol_type = other DNA
gtatcttaaggcaaggaaaa

SEQ ID NO: 34068 - DNA, 20 bp, synthetic construct
  misc_feature 1..20: note = chemically synthesized
  source 1..20: mol_type = other DNA
gcctagtgcccaggccaggc

SEQ ID NO: 34069 - DNA, 20 bp, synthetic construct
  misc_feature 1..20: note = chemically synthesized
  source 1..20: mol_type = other DNA
ccccacaacagacatcttcc

SEQ ID NO: 34070 - DNA, 20 bp, synthetic construct
  misc_feature 1..20: note = chemically synthesized
  source 1..20: mol_type = other DNA
acagacatcttccctgaatg

SEQ ID NO: 34071 - DNA, 20 bp, synthetic construct
  misc_feature 1..20: note = chemically synthesized
  source 1..20: mol_type = other DNA
ctaatgccctctaactgatg

SEQ ID NO: 34072 - DNA, 20 bp, synthetic construct
  misc_feature 1..20: note = chemically synthesized
  source 1..20: mol_type = other DNA
tctaactgatgctgagtttg

SEQ ID NO: 34073 - DNA, 20 bp, synthetic construct
  misc_feature 1..20: note = chemically synthesized
  source 1..20: mol_type = other DNA
tcagttaaggggaggtgttt

SEQ ID NO: 34074 - DNA, 20 bp, synthetic construct
  misc_feature 1..20: note = chemically synthesized
  source 1..20: mol_type = other DNA
gggaggtgtttctgagtttg

SEQ ID NO: 34075 - DNA, 20 bp, synthetic construct
  misc_feature 1..20: note = chemically synthesized
  source 1..20: mol_type = other DNA
caaacaccttcctaattggt

SEQ ID NO: 34076 - DNA, 20 bp, synthetic construct
  misc_feature 1..20: note = chemically synthesized
  source 1..20: mol_type = other DNA
atcctgaaaacactccacac

SEQ ID NO: 34077 - DNA, 20 bp, synthetic construct
  misc_feature 1..20: note = chemically synthesized
  source 1..20: mol_type = other DNA
agattaatatcgtagatgaa

SEQ ID NO: 34078 - DNA, 20 bp, synthetic construct
  misc_feature 1..20: note = chemically synthesized
  source 1..20: mol_type = other DNA
tgaactgagtctgggctagg

SEQ ID NO: 34079 - DNA, 20 bp, synthetic construct
  misc_feature 1..20: note = chemically synthesized
  source 1..20: mol_type = other DNA
taaaggagcctgtacctaaa

SEQ ID NO: 34080 - DNA, 20 bp, synthetic construct
  misc_feature 1..20: note = chemically synthesized
  source 1..20: mol_type = other DNA
actggcaaagtgaggaagga

SEQ ID NO: 34081 - DNA, 20 bp, synthetic construct
  misc_feature 1..20: note = chemically synthesized
  source 1..20: mol_type = other DNA
gaaggacggggtctggaggg

SEQ ID NO: 34082 - DNA, 20 bp, synthetic construct
  misc_feature 1..20: note = chemically synthesized
  source 1..20: mol_type = other DNA
gacggggtctggagggaaga

SEQ ID NO: 34083 - DNA, 20 bp, synthetic construct
  misc_feature 1..20: note = chemically synthesized
  source 1..20: mol_type = other DNA
gtgcaaaggcacagcacata

SEQ ID NO: 34084 - DNA, 20 bp, synthetic construct
  misc_feature 1..20: note = chemically synthesized
  source 1..20: mol_type = other DNA
tacagaatgcctgcatgctc

SEQ ID NO: 34085 - DNA, 20 bp, synthetic construct
  misc_feature 1..20: note = chemically synthesized
  source 1..20: mol_type = other DNA
caaaactgtgtcagccaaat

SEQ ID NO: 34086 - DNA, 20 bp, synthetic construct
  misc_feature 1..20: note = chemically synthesized
  source 1..20: mol_type = other DNA
ctgagatacccaggcggtgg

SEQ ID NO: 34087 - DNA, 20 bp, synthetic construct
  misc_feature 1..20: note = chemically synthesized
  source 1..20: mol_type = other DNA
cccaggcggtggttggattt

SEQ ID NO: 34088 - DNA, 20 bp, synthetic construct
  misc_feature 1..20: note = chemically synthesized
  source 1..20: mol_type = other DNA
cggtggttggatttatggat

SEQ ID NO: 34089 - DNA, 20 bp, synthetic construct
  misc_feature 1..20: note = chemically synthesized
  source 1..20: mol_type = other DNA
tttatggatctggatttcag

SEQ ID NO: 34090 - DNA, 20 bp, synthetic construct
  misc_feature 1..20: note = chemically synthesized
  source 1..20: mol_type = other DNA
aggggagtgggcagggctag

SEQ ID NO: 34091 - DNA, 20 bp, synthetic construct
  misc_feature 1..20: note = chemically synthesized
  source 1..20: mol_type = other DNA
agggctaggggaatagaact

SEQ ID NO: 34092 - DNA, 20 bp, synthetic construct
  misc_feature 1..20: note = chemically synthesized
  source 1..20: mol_type = other DNA
agggtcatgatgtcagtggt

SEQ ID NO: 34093 - DNA, 20 bp, synthetic construct
  misc_feature 1..20: note = chemically synthesized
  source 1..20: mol_type = other DNA
ggagttgaagtcttggaaga

SEQ ID NO: 34094 - DNA, 20 bp, synthetic construct
  misc_feature 1..20: note = chemically synthesized
  source 1..20: mol_type = other DNA
aaaggttaactccagaggtc

SEQ ID NO: 34095 - DNA, 20 bp, synthetic construct
  misc_feature 1..20: note = chemically synthesized
  source 1..20: mol_type = other DNA
tcttttatttcttcatttta

SEQ ID NO: 34096 - DNA, 20 bp, synthetic construct
  misc_feature 1..20: note = chemically synthesized
  source 1..20: mol_type = other DNA
catttacacaaaagtacaac

SEQ ID NO: 34097 - DNA, 20 bp, synthetic construct
  misc_feature 1..20: note = chemically synthesized
  source 1..20: mol_type = other DNA
aaatgaaataccctatgtat

SEQ ID NO: 34098 - DNA, 20 bp, synthetic construct
  misc_feature 1..20: note = chemically synthesized
  source 1..20: mol_type = other DNA
aaatccttgattcactggct

SEQ ID NO: 34099 - DNA, 20 bp, synthetic construct
  misc_feature 1..20: note = chemically synthesized
  source 1..20: mol_type = other DNA
gtctgtatgtaacaagcttc

SEQ ID NO: 34100 - DNA, 20 bp, synthetic construct
  misc_feature 1..20: note = chemically synthesized
  source 1..20: mol_type = other DNA
tgtgttttcctgccttttcc

SEQ ID NO: 34101 - DNA, 20 bp, synthetic construct
  misc_feature 1..20: note = chemically synthesized
  source 1..20: mol_type = other DNA
atgacacttgtgattacatt

SEQ ID NO: 34102 - DNA, 20 bp, synthetic construct
  misc_feature 1..20: note = chemically synthesized
  source 1..20: mol_type = other DNA
ttaggatacacccaaataat

SEQ ID NO: 34103 - DNA, 20 bp, synthetic construct
  misc_feature 1..20: note = chemically synthesized
  source 1..20: mol_type = other DNA
agataatactcacaggtttc

SEQ ID NO: 34104 - DNA, 20 bp, synthetic construct
  misc_feature 1..20: note = chemically synthesized
  source 1..20: mol_type = other DNA
gttaagccatacatatcttt

SEQ ID NO: 34105 - DNA, 20 bp, synthetic construct
  misc_feature 1..20: note = chemically synthesized
  source 1..20: mol_type = other DNA
tcatctcatcaggtgttacc

SEQ ID NO: 34106 - DNA, 20 bp, synthetic construct
  misc_feature 1..20: note = chemically synthesized
  source 1..20: mol_type = other DNA
catcaggtgttacctagaat

SEQ ID NO: 34107 - DNA, 20 bp, synthetic construct
  misc_feature 1..20: note = chemically synthesized
  source 1..20: mol_type = other DNA
ccatatcctggggaccaggt

SEQ ID NO: 34108 - DNA, 20 bp, synthetic construct
  misc_feature 1..20: note = chemically synthesized
  source 1..20: mol_type = other DNA
actgaagtcacatggagctc

SEQ ID NO: 34109 - DNA, 20 bp, synthetic construct
  misc_feature 1..20: note = chemically synthesized
  source 1..20: mol_type = other DNA
aatgaaatcatatttttctg

SEQ ID NO: 34110 - DNA, 20 bp, synthetic construct
  misc_feature 1..20: note = chemically synthesized
  source 1..20: mol_type = other DNA
aggcactgaaccagctggaa

SEQ ID NO: 34111 - DNA, 20 bp, synthetic construct
  misc_feature 1..20: note = chemically synthesized
  source 1..20: mol_type = other DNA
aaccagctggaaatgaatgc

SEQ ID NO: 34112 - DNA, 20 bp, synthetic construct
  misc_feature 1..20: note = chemically synthesized
  source 1..20: mol_type = other DNA
attttcgcagctgataaaag

SEQ ID NO: 34113 - DNA, 20 bp, synthetic construct
  misc_feature 1..20: note = chemically synthesized
  source 1..20: mol_type = other DNA
aatgtctggagaaagcagct

SEQ ID NO: 34114 - DNA, 20 bp, synthetic construct
  misc_feature 1..20: note = chemically synthesized
  source 1..20: mol_type = other DNA
actctgtactttttctctca

SEQ ID NO: 34115 - DNA, 20 bp, synthetic construct
  misc_feature 1..20: note = chemically synthesized
  source 1..20: mol_type = other DNA
cctgcagctaagattgagaa

SEQ ID NO: 34116 - DNA, 20 bp, synthetic construct
  misc_feature 1..20: note = chemically synthesized
  source 1..20: mol_type = other DNA
cctattttttaaagcacagt

SEQ ID NO: 34117 - DNA, 20 bp, synthetic construct
  misc_feature 1..20: note = chemically synthesized
  source 1..20: mol_type = other DNA
ttctaaggccaccagttaca

SEQ ID NO: 34118 - DNA, 20 bp, synthetic construct
  misc_feature 1..20: note = chemically synthesized
  source 1..20: mol_type = other DNA
acaaagaatggggaaggtta

SEQ ID NO: 34119 - DNA, 20 bp, synthetic construct
  misc_feature 1..20: note = chemically synthesized
  source 1..20: mol_type = other DNA
tggtctaaaattccatttca

SEQ ID NO: 34120 - DNA, 20 bp, synthetic construct
  misc_feature 1..20: note = chemically synthesized
  source 1..20: mol_type = other DNA
tcacagaattgaagataatt

SEQ ID NO: 34121 - DNA, 20 bp, synthetic construct
  misc_feature 1..20: note = chemically synthesized
  source 1..20: mol_type = other DNA
aatcccgttgatggtgagca

SEQ ID NO: 34122 - DNA, 20 bp, synthetic construct
  misc_feature 1..20: note = chemically synthesized
  source 1..20: mol_type = other DNA
gtgagcatggggttcatttt

SEQ ID NO: 34123 - DNA, 20 bp, synthetic construct
  misc_feature 1..20: note = chemically synthesized
  source 1..20: mol_type = other DNA
ttcattttgagagtagaaaa

SEQ ID NO: 34124 - DNA, 20 bp, synthetic construct
  misc_feature 1..20: note = chemically synthesized
  source 1..20: mol_type = other DNA
gtagaaaattggatgcagtg

SEQ ID NO: 34125 - DNA, 20 bp, synthetic construct
  misc_feature 1..20: note = chemically synthesized
  source 1..20: mol_type = other DNA
aattggatgcagtggagaat

SEQ ID NO: 34126 - DNA, 20 bp, synthetic construct
  misc_feature 1..20: note = chemically synthesized
  source 1..20: mol_type = other DNA
tgcagtggagaatcagaatg

SEQ ID NO: 34127 - DNA, 20 bp, synthetic construct
  misc_feature 1..20: note = chemically synthesized
  source 1..20: mol_type = other DNA
attttcaaatatacaaaata

SEQ ID NO: 34128 - DNA, 20 bp, synthetic construct
  misc_feature 1..20: note = chemically synthesized
  source 1..20: mol_type = other DNA
atattgagtctgaaggcaaa

SEQ ID NO: 34129 - DNA, 20 bp, synthetic construct
  misc_feature 1..20: note = chemically synthesized
  source 1..20: mol_type = other DNA
cttgttacatctccacgcca

SEQ ID NO: 34130 - DNA, 20 bp, synthetic construct
  misc_feature 1..20: note = chemically synthesized
  source 1..20: mol_type = other DNA
caactttagaaataaaggga

SEQ ID NO: 34131 - DNA, 20 bp, synthetic construct
  misc_feature 1..20: note = chemically synthesized
  source 1..20: mol_type = other DNA
aaaaccagcaagtttgtatt

SEQ ID NO: 34132 - DNA, 20 bp, synthetic construct
  misc_feature 1..20: note = chemically synthesized
  source 1..20: mol_type = other DNA
gaggcagtgtgcaaataggt

SEQ ID NO: 34133 - DNA, 20 bp, synthetic construct
  misc_feature 1..20: note = chemically synthesized
  source 1..20: mol_type = other DNA
tcaagtactttacaaggtaa

SEQ ID NO: 34134 - DNA, 20 bp, synthetic construct
  misc_feature 1..20: note = chemically synthesized
  source 1..20: mol_type = other DNA
tatcacaaggcaagtggagg

SEQ ID NO: 34135 - DNA, 20 bp, synthetic construct
  misc_feature 1..20: note = chemically synthesized
  source 1..20: mol_type = other DNA
gataacatcttatcaggaga

SEQ ID NO: 34136 - DNA, 20 bp, synthetic construct
  misc_feature 1..20: note = chemically synthesized
  source 1..20: mol_type = other DNA
ttatcaggagacagggtttt

SEQ ID NO: 34137 - DNA, 20 bp, synthetic construct
  misc_feature 1..20: note = chemically synthesized
  source 1..20: mol_type = other DNA
ctgaccaaaatttattaggc

SEQ ID NO: 34138 - DNA, 20 bp, synthetic construct
  misc_feature 1..20: note = chemically synthesized
  source 1..20: mol_type = other DNA
ctgggagcgctgtgggagac

SEQ ID NO: 34139 - DNA, 20 bp, synthetic construct
  misc_feature 1..20: note = chemically synthesized
  source 1..20: mol_type = other DNA
tggctcgtattctctttctc

SEQ ID NO: 34140 - DNA, 20 bp, synthetic construct
  misc_feature 1..20: note = chemically synthesized
  source 1..20: mol_type = other DNA
ggatgttccatgctgagaaa

SEQ ID NO: 34141 - DNA, 20 bp, synthetic construct
  misc_feature 1..20: note = chemically synthesized
  source 1..20: mol_type = other DNA
ctgcctggctcaccagcagt

SEQ ID NO: 34142 - DNA, 20 bp, synthetic construct
  misc_feature 1..20: note = chemically synthesized
  source 1..20: mol_type = other DNA
tgcagttaatgcaattatta

SEQ ID NO: 34143 - DNA, 20 bp, synthetic construct
  misc_feature 1..20: note = chemically synthesized
  source 1..20: mol_type = other DNA
tatacatcctcctcagctga

SEQ ID NO: 34144 - DNA, 20 bp, synthetic construct
  misc_feature 1..20: note = chemically synthesized
  source 1..20: mol_type = other DNA
taaagacaggcataaatcac

SEQ ID NO: 34145 - DNA, 20 bp, synthetic construct
  misc_feature 1..20: note = chemically synthesized
  source 1..20: mol_type = other DNA
cttcagctgatccctccgtt

SEQ ID NO: 34146 - DNA, 20 bp, synthetic construct
  misc_feature 1..20: note = chemically synthesized
  source 1..20: mol_type = other DNA
ggtatttaagttagagcaaa

SEQ ID NO: 34147 - DNA, 20 bp, synthetic construct
  misc_feature 1..20: note = chemically synthesized
  source 1..20: mol_type = other DNA
cagcacacatacacttacat

SEQ ID NO: 34148 - DNA, 20 bp, synthetic construct
  misc_feature 1..20: note = chemically synthesized
  source 1..20: mol_type = other DNA
cacaagaactcacaagtgtg

SEQ ID NO: 34149 - DNA, 20 bp, synthetic construct
  misc_feature 1..20: note = chemically synthesized
  source 1..20: mol_type = other DNA
acaagtgtgttgagtgttgc

SEQ ID NO: 34150 - DNA, 20 bp, synthetic construct
  misc_feature 1..20: note = chemically synthesized
  source 1..20: mol_type = other DNA
cctttaactttttttttcct

SEQ ID NO: 34151 - DNA, 20 bp, synthetic construct
  misc_feature 1..20: note = chemically synthesized
  source 1..20: mol_type = other DNA
taaagtgaagagatggcaat

SEQ ID NO: 34152 - DNA, 20 bp, synthetic construct
  misc_feature 1..20: note = chemically synthesized
  source 1..20: mol_type = other DNA
tacagcaaggctagtttgga

SEQ ID NO: 34153 - DNA, 20 bp, synthetic construct
  misc_feature 1..20: note = chemically synthesized
  source 1..20: mol_type = other DNA
tttggagagggttttgctgt

SEQ ID NO: 34154 - DNA, 20 bp, synthetic construct
  misc_feature 1..20: note = chemically synthesized
  source 1..20: mol_type = other DNA
atgctttttcttttttttcc

SEQ ID NO: 34155 - DNA, 20 bp, synthetic construct
  misc_feature 1..20: note = chemically synthesized
  source 1..20: mol_type = other DNA
cccagagtttgaaagggaaa

SEQ ID NO: 34156 - DNA, 20 bp, synthetic construct
  misc_feature 1..20: note = chemically synthesized
  source 1..20: mol_type = other DNA
caaatcagctaagtacagct

SEQ ID NO: 34157 - DNA, 20 bp, synthetic construct
  misc_feature 1..20: note = chemically synthesized
  source 1..20: mol_type = other DNA
ttgtcacctacagtacattt

SEQ ID NO: 34158 - DNA, 20 bp, synthetic construct
  misc_feature 1..20: note = chemically synthesized
  source 1..20: mol_type = other DNA
tacagtacatttctggattt

SEQ ID NO: 34159 - DNA, 20 bp, synthetic construct
  misc_feature 1..20: note = chemically synthesized
  source 1..20: mol_type = other DNA
gtacatttctggatttggga

SEQ ID NO: 34160 - DNA, 20 bp, synthetic construct
  misc_feature 1..20: note = chemically synthesized
  source 1..20: mol_type = other DNA
ttgggaatgagtgttcttca

SEQ ID NO: 34161 - DNA, 20 bp, synthetic construct
  misc_feature 1..20: note = chemically synthesized
  source 1..20: mol_type = other DNA
aagaacactcattcccaaat

SEQ ID NO: 34162 - DNA, 20 bp, synthetic construct
  misc_feature 1..20: note = chemically synthesized
  source 1..20: mol_type = other DNA
agcaggatttaaagagcatt

SEQ ID NO: 34163 - DNA, 20 bp, synthetic construct
  misc_feature 1..20: note = chemically synthesized
  source 1..20: mol_type = other DNA
aaattggcagtttactaagg

SEQ ID NO: 34164 - DNA, 20 bp, synthetic construct
  misc_feature 1..20: note = chemically synthesized
  source 1..20: mol_type = other DNA
ctttcaaactctgggaaaaa

SEQ ID NO: 34165 - DNA, 20 bp, synthetic construct
  misc_feature 1..20: note = chemically synthesized
  source 1..20: mol_type = other DNA
tcttctttcaaaagcaaatg

SEQ ID NO: 34166 - DNA, 20 bp, synthetic construct
  misc_feature 1..20: note = chemically synthesized
  source 1..20: mol_type = other DNA
ttctcagcatggaacatccc

SEQ ID NO: 34167 - DNA, 20 bp, synthetic construct
  misc_feature 1..20: note = chemically synthesized
  source 1..20: mol_type = other DNA
gcatggaacatccctgagaa

SEQ ID NO: 34168 - DNA, 20 bp, synthetic construct
  misc_feature 1..20: note = chemically synthesized
  source 1..20: mol_type = other DNA
ttggccgacgcttagggaaa

SEQ ID NO: 34169 - DNA, 20 bp, synthetic construct
  misc_feature 1..20: note = chemically synthesized
  source 1..20: mol_type = other DNA
ccaacaacagtctgtatttg

SEQ ID NO: 34170 - DNA, 20 bp, synthetic construct
  misc_feature 1..20: note = chemically synthesized
  source 1..20: mol_type = other DNA
cgggattgaatttgagctgc

SEQ ID NO: 34171 - DNA, 20 bp, synthetic construct
  misc_feature 1..20: note = chemically synthesized
  source 1..20: mol_type = other DNA
actgtgctttaaaaaatagg

SEQ ID NO: 34172 - DNA, 20 bp, synthetic construct
  misc_feature 1..20: note = chemically synthesized
  source 1..20: mol_type = other DNA
tttaaaaaataggaaagaaa

SEQ ID NO: 34173 - DNA, 20 bp, synthetic construct
  misc_feature 1..20: note = chemically synthesized
  source 1..20: mol_type = other DNA
ttggtttttctaatcccctg

SEQ ID NO: 34174 - DNA, 20 bp, synthetic construct
  misc_feature 1..20: note = chemically synthesized
  source 1..20: mol_type = other DNA
tccagacattgagctcaagg

SEQ ID NO: 34175 - DNA, 20 bp, synthetic construct
  misc_feature 1..20: note = chemically synthesized
  source 1..20: mol_type = other DNA
tttctgaataatttgatccg

SEQ ID NO: 34176 - DNA, 20 bp, synthetic construct
  misc_feature 1..20: note = chemically synthesized
  source 1..20: mol_type = other DNA
tatgatttcatttcttttcg

SEQ ID NO: 34177 - DNA, 20 bp, synthetic construct
  misc_feature 1..20: note = chemically synthesized
  source 1..20: mol_type = other DNA
atatgcatactttctaaatg

SEQ ID NO: 34178 - DNA, 20 bp, synthetic construct
  misc_feature 1..20: note = chemically synthesized
  source 1..20: mol_type = other DNA
gggagatttgacttataaga

SEQ ID NO: 34179 - DNA, 20 bp, synthetic construct
  misc_feature 1..20: note = chemically synthesized
  source 1..20: mol_type = other DNA
ggtagcctctagaagaggaa

SEQ ID NO: 34180 - DNA, 20 bp, synthetic construct
  misc_feature 1..20: note = chemically synthesized
  source 1..20: mol_type = other DNA
aatctctcatagagtctcca

SEQ ID NO: 34181 - DNA, 20 bp, synthetic construct
  misc_feature 1..20: note = chemically synthesized
  source 1..20: mol_type = other DNA
agcaagaggaaatcagttac

SEQ ID NO: 34182 - DNA, 20 bp, synthetic construct
  misc_feature 1..20: note = chemically synthesized
  source 1..20: mol_type = other DNA
gtcctgtctctggctaatca

SEQ ID NO: 34183 - DNA, 20 bp, synthetic construct
  misc_feature 1..20: note = chemically synthesized
  source 1..20: mol_type = other DNA
tattaagcaagttcttcgtt

SEQ ID NO: 34184 - DNA, 20 bp, synthetic construct
  misc_feature 1..20: note = chemically synthesized
  source 1..20: mol_type = other DNA
gttgacatattcattaaaat

SEQ ID NO: 34185 - DNA, 20 bp, synthetic construct
  misc_feature 1..20: note = chemically synthesized
  source 1..20: mol_type = other DNA
taaaatgaagaaataaaaga

SEQ ID NO: 34186 - DNA, 20 bp, synthetic construct
  misc_feature 1..20: note = chemically synthesized
  source 1..20: mol_type = other DNA
aattatataatgtttattga

SEQ ID NO: 34187 - DNA, 20 bp, synthetic construct
  misc_feature 1..20: note = chemically synthesized
  source 1..20: mol_type = other DNA
aagattagacagcaggcagg

SEQ ID NO: 34188 - DNA, 20 bp, synthetic construct
  misc_feature 1..20: note = chemically synthesized
  source 1..20: mol_type = other DNA
aacctctgctgaacttcctc

SEQ ID NO: 34189 - DNA, 20 bp, synthetic construct
  misc_feature 1..20: note = chemically synthesized
  source 1..20: mol_type = other DNA
acttcctcatagaatgttca

SEQ ID NO: 34190 - DNA, 20 bp, synthetic construct
  misc_feature 1..20: note = chemically synthesized
  source 1..20: mol_type = other DNA
cacaaaatatttgctgaatg

SEQ ID NO: 34191 - DNA, 20 bp, synthetic construct
  misc_feature 1..20: note = chemically synthesized
  source 1..20: mol_type = other DNA
aggtgtttgattcttcaaac

SEQ ID NO: 34192 - DNA, 20 bp, synthetic construct
  misc_feature 1..20: note = chemically synthesized
  source 1..20: mol_type = other DNA
gggttgggaaaaagacatag

SEQ ID NO: 34193 - DNA, 20 bp, synthetic construct
  misc_feature 1..20: note = chemically synthesized
  source 1..20: mol_type = other DNA
actctgataccctgaagttc

SEQ ID NO: 34194 - DNA, 20 bp, synthetic construct
  misc_feature 1..20: note = chemically synthesized
  source 1..20: mol_type = other DNA
tgcgtcactcaaactagctg

SEQ ID NO: 34195 - DNA, 20 bp, synthetic construct
  misc_feature 1..20: note = chemically synthesized
  source 1..20: mol_type = other DNA
gtaggcttatttcaaaaggc

SEQ ID NO: 34196 - DNA, 20 bp, synthetic construct
  misc_feature 1..20: note = chemically synthesized
  source 1..20: mol_type = other DNA
agcctgagtcaggactgagc

SEQ ID NO: 34197 - DNA, 20 bp, synthetic construct
  misc_feature 1..20: note = chemically synthesized
  source 1..20: mol_type = other DNA
tatccaaagagtggtttgaa

SEQ ID NO: 34198 - DNA, 20 bp, synthetic construct
  misc_feature 1..20: note = chemically synthesized
  source 1..20: mol_type = other DNA
agtcaccacacatagaggag

SEQ ID NO: 34199 - DNA, 20 bp, synthetic construct
  misc_feature 1..20: note = chemically synthesized
  source 1..20: mol_type = other DNA
gaaaatggctgagttaaagg

SEQ ID NO: 34200 - DNA, 20 bp, synthetic construct
  misc_feature 1..20: note = chemically synthesized
  source 1..20: mol_type = other DNA
caagggaaaggtgataaagg

SEQ ID NO: 34201 - DNA, 20 bp, synthetic construct
  misc_feature 1..20: note = chemically synthesized
  source 1..20: mol_type = other DNA
gagagaggttcttgtttcaa

SEQ ID NO: 34202 - DNA, 20 bp, synthetic construct
  misc_feature 1..20: note = chemically synthesized
  source 1..20: mol_type = other DNA
ggtatcttaaggcaaggaaa

SEQ ID NO: 34203 - DNA, 20 bp, synthetic construct
  misc_feature 1..20: note = chemically synthesized
  source 1..20: mol_type = other DNA
ctctaactgatgctgagttt

SEQ ID NO: 34204 - DNA, 20 bp, synthetic construct
  misc_feature 1..20: note = chemically synthesized
  source 1..20: mol_type = other DNA
ggggaggtgtttctgagttt

SEQ ID NO: 34205 - DNA, 20 bp, synthetic construct
  misc_feature 1..20: note = chemically synthesized
  source 1..20: mol_type = other DNA
agtgcaaaggcacagcacat

SEQ ID NO: 34206 - DNA, 20 bp, synthetic construct
  misc_feature 1..20: note = chemically synthesized
  source 1..20: mol_type = other DNA
atacagaatgcctgcatgct

SEQ ID NO: 34207 - DNA, 20 bp, synthetic construct
  misc_feature 1..20: note = chemically synthesized
  source 1..20: mol_type = other DNA
tggtaggagttgaagtcttg

SEQ ID NO: 34208 - DNA, 20 bp, synthetic construct
  misc_feature 1..20: note = chemically synthesized
  source 1..20: mol_type = other DNA
agtcttggaagaaagagtag

SEQ ID NO: 34209 - DNA, 20 bp, synthetic construct
  misc_feature 1..20: note = chemically synthesized
  source 1..20: mol_type = other DNA
gcctgctgtctaatctttac

SEQ ID NO: 34210 - DNA, 20 bp, synthetic construct
  misc_feature 1..20: note = chemically synthesized
  source 1..20: mol_type = other DNA
cagaggtcaggaatctgaac

SEQ ID NO: 34211 - DNA, 20 bp, synthetic construct
  misc_feature 1..20: note = chemically synthesized
  source 1..20: mol_type = other DNA
acacaaaagtacaactgggg

SEQ ID NO: 34212 - DNA, 20 bp, synthetic construct
  misc_feature 1..20: note = chemically synthesized
  source 1..20: mol_type = other DNA
atatgcaaaagtctgtttgg

SEQ ID NO: 34213 - DNA, 20 bp, synthetic construct
  misc_feature 1..20: note = chemically synthesized
  source 1..20: mol_type = other DNA
tatgttcccatcaaggttaa

SEQ ID NO: 34214 - DNA, 20 bp, synthetic construct
  misc_feature 1..20: note = chemically synthesized
  source 1..20: mol_type = other DNA
aaatattagactctttttcc

SEQ ID NO: 34215 - DNA, 20 bp, synthetic construct
  misc_feature 1..20: note = chemically synthesized
  source 1..20: mol_type = other DNA
ttcatctcatcaggtgttac

SEQ ID NO: 34216 - DNA, 20 bp, synthetic construct
  misc_feature 1..20: note = chemically synthesized
  source 1..20: mol_type = other DNA
gttacctagaatcagagtca

SEQ ID NO: 34217 - DNA, 20 bp, synthetic construct
  misc_feature 1..20: note = chemically synthesized
  source 1..20: mol_type = other DNA
accatatcctggggaccagg

SEQ ID NO: 34218 - DNA, 20 bp, synthetic construct
  misc_feature 1..20: note = chemically synthesized
  source 1..20: mol_type = other DNA
tcaggaatttattcttgcat

SEQ ID NO: 34219 - DNA, 20 bp, synthetic construct
  misc_feature 1..20: note = chemically synthesized
  source 1..20: mol_type = other DNA
tatgcatataattctctcga

SEQ ID NO: 34220 - DNA, 20 bp, synthetic construct
  misc_feature 1..20: note = chemically synthesized
  source 1..20: mol_type = other DNA
tttctgtcggatcaaattat

SEQ ID NO: 34221 - DNA, 20 bp, synthetic construct
  misc_feature 1..20: note = chemically synthesized
  source 1..20: mol_type = other DNA
attattcagaaatccgaact

SEQ ID NO: 34222 - DNA, 20 bp, synthetic construct
  misc_feature 1..20: note = chemically synthesized
  source 1..20: mol_type = other DNA
tgtccttgagctcaatgtct

SEQ ID NO: 34223 - DNA, 20 bp, synthetic construct
  misc_feature 1..20: note = chemically synthesized
  source 1..20: mol_type = other DNA
gtactttttctctcagggga

SEQ ID NO: 34224 - DNA, 20 bp, synthetic construct
  misc_feature 1..20: note = chemically synthesized
  source 1..20: mol_type = other DNA
caatgccctgcagctaagat

SEQ ID NO: 34225 - DNA, 20 bp, synthetic construct
  misc_feature 1..20: note = chemically synthesized
  source 1..20: mol_type = other DNA
cttctaaggccaccagttac

SEQ ID NO: 34226 - DNA, 20 bp, synthetic construct
  misc_feature 1..20: note = chemically synthesized
  source 1..20: mol_type = other DNA
agtaactccaccagtgcctg

SEQ ID NO: 34227 - DNA, 20 bp, synthetic construct
  misc_feature 1..20: note = chemically synthesized
  source 1..20: mol_type = other DNA
ccttccttcctctcttgcag

SEQ ID NO: 34228 - DNA, 20 bp, synthetic construct
  misc_feature 1..20: note = chemically synthesized
  source 1..20: mol_type = other DNA
ctggtctaaaattccatttc

SEQ ID NO: 34229 - DNA, 20 bp, synthetic construct
  misc_feature 1..20: note = chemically synthesized
  source 1..20: mol_type = other DNA
gcatggggttcattttgaga

SEQ ID NO: 34230 - DNA, 20 bp, synthetic construct
  misc_feature 1..20: note = chemically synthesized
  source 1..20: mol_type = other DNA
agtagaaaattggatgcagt

SEQ ID NO: 34231 - DNA, 20 bp, synthetic construct
  misc_feature 1..20: note = chemically synthesized
  source 1..20: mol_type = other DNA
aaattggatgcagtggagaa

SEQ ID NO: 34232 - DNA, 20 bp, synthetic construct
  misc_feature 1..20: note = chemically synthesized
  source 1..20: mol_type = other DNA
aatattgagtctgaaggcaa

SEQ ID NO: 34233 - DNA, 20 bp, synthetic construct
  misc_feature 1..20: note = chemically synthesized
  source 1..20: mol_type = other DNA
tccctaagcgtcggccaact

SEQ ID NO: 34234 - DNA, 20 bp, synthetic construct
  misc_feature 1..20: note = chemically synthesized
  source 1..20: mol_type = other DNA
aaagggacagagtacaaaag

SEQ ID NO: 34235 - DNA, 20 bp, synthetic construct
  misc_feature 1..20: note = chemically synthesized
  source 1..20: mol_type = other DNA
atcaagtactttacaaggta

SEQ ID NO: 34236 - DNA, 20 bp, synthetic construct
  misc_feature 1..20: note = chemically synthesized
  source 1..20: mol_type = other DNA
ttctcagggatgttccatgc

SEQ ID NO: 34237 - DNA, 20 bp, synthetic construct
  misc_feature 1..20: note = chemically synthesized
  source 1..20: mol_type = other DNA
gggatgttccatgctgagaa

SEQ ID NO: 34238 - DNA, 20 bp, synthetic construct
  misc_feature 1..20: note = chemically synthesized
  source 1..20: mol_type = other DNA
tcccatttgcttttgaaaga

SEQ ID NO: 34239 - DNA, 20 bp, synthetic construct
  misc_feature 1..20: note = chemically synthesized
  source 1..20: mol_type = other DNA
gattgcagtaaagacaggca

SEQ ID NO: 34240 - DNA, 20 bp, synthetic construct
  misc_feature 1..20: note = chemically synthesized
  source 1..20: mol_type = other DNA
gcagcacacatacacttaca

SEQ ID NO: 34241 - DNA, 20 bp, synthetic construct
  misc_feature 1..20: note = chemically synthesized
  source 1..20: mol_type = other DNA
ctctccatgacttacctggt

SEQ ID NO: 34242 - DNA, 20 bp, synthetic construct
  misc_feature 1..20: note = chemically synthesized
  source 1..20: mol_type = other DNA
attagaagtctttaaaattc

SEQ ID NO: 34243 - DNA, 20 bp, synthetic construct
  misc_feature 1..20: note = chemically synthesized
  source 1..20: mol_type = other DNA
atacacaaacataggtccat

SEQ ID NO: 34244 - DNA, 20 bp, synthetic construct
  misc_feature 1..20: note = chemically synthesized
  source 1..20: mol_type = other DNA
tgtgggtccaaccctgacag

SEQ ID NO: 34245 - DNA, 20 bp, synthetic construct
  misc_feature 1..20: note = chemically synthesized
  source 1..20: mol_type = other DNA
tggtcagaccagttgatcct

SEQ ID NO: 34246 - DNA, 20 bp, synthetic construct
  misc_feature 1..20: note = chemically synthesized
  source 1..20: mol_type = other DNA
cattggctaaagaggaaggt

SEQ ID NO: 34247 - DNA, 20 bp, synthetic construct
  misc_feature 1..20: note = chemically synthesized
  source 1..20: mol_type = other DNA
agaatccatggaaaaggcag

SEQ ID NO: 34248 - DNA, 20 bp, synthetic construct
  misc_feature 1..20: note = chemically synthesized
  source 1..20: mol_type = other DNA
tcctcatagaatgttcatca

SEQ ID NO: 34249 - DNA, 20 bp, synthetic construct
  misc_feature 1..20: note = chemically synthesized
  source 1..20: mol_type = other DNA
tttagtcaggcataaagata

SEQ ID NO: 34250 - DNA, 20 bp, synthetic construct
  misc_feature 1..20: note = chemically synthesized
  source 1..20: mol_type = other DNA
aacacttaggaacaaactgt

SEQ ID NO: 34251 - DNA, 20 bp, synthetic construct
  misc_feature 1..20: note = chemically synthesized
  source 1..20: mol_type = other DNA
gactggtatcttaaggcaag

SEQ ID NO: 34252 - DNA, 20 bp, synthetic construct
  misc_feature 1..20: note = chemically synthesized
  source 1..20: mol_type = other DNA
cagaatatgtccctaatatc

SEQ ID NO: 34253 - DNA, 20 bp, synthetic construct
  misc_feature 1..20: note = chemically synthesized
  source 1..20: mol_type = other DNA
tcctaattggtaggaatcct

SEQ ID NO: 34254 - DNA, 20 bp, synthetic construct
  misc_feature 1..20: note = chemically synthesized
  source 1..20: mol_type = other DNA
tgcctgcatgctctagaatc

SEQ ID NO: 34255 - DNA, 20 bp, synthetic construct
  misc_feature 1..20: note = chemically synthesized
  source 1..20: mol_type = other DNA
aggtcaggaatctgaacaca

SEQ ID NO: 34256 - DNA, 20 bp, synthetic construct
  misc_feature 1..20: note = chemically synthesized
  source 1..20: mol_type = other DNA
aataaacattatataatttt

SEQ ID NO: 34257 - DNA, 20 bp, synthetic construct
  misc_feature 1..20: note = chemically synthesized
  source 1..20: mol_type = other DNA
aaccttggtttcctcatttc

SEQ ID NO: 34258 - DNA, 20 bp, synthetic construct
  misc_feature 1..20: note = chemically synthesized
  source 1..20: mol_type = other DNA
ttaccacaaatttattggct

SEQ ID NO: 34259 - DNA, 20 bp, synthetic construct
  misc_feature 1..20: note = chemically synthesized
  source 1..20: mol_type = other DNA
agtcaggagaaagcacctca

SEQ ID NO: 34260 - DNA, 20 bp, synthetic construct
  misc_feature 1..20: note = chemically synthesized
  source 1..20: mol_type = other DNA
attcagaaatccgaactgta

SEQ ID NO: 34261 - DNA, 20 bp, synthetic construct
  misc_feature 1..20: note = chemically synthesized
  source 1..20: mol_type = other DNA
tttttctctcaggggattag

SEQ ID NO: 34262 - DNA, 20 bp, synthetic construct
  misc_feature 1..20: note = chemically synthesized
  source 1..20: mol_type = other DNA
cgtgatgccccacaagccac

SEQ ID NO: 34263 - DNA, 20 bp, synthetic construct
  misc_feature 1..20: note = chemically synthesized
  source 1..20: mol_type = other DNA
agacacaaatgccaccatta

SEQ ID NO: 34264 - DNA, 20 bp, synthetic construct
  misc_feature 1..20: note = chemically synthesized
  source 1..20: mol_type = other DNA
aaagagcatttcagaaaatt

SEQ ID NO: 34265 - DNA, 20 bp, synthetic construct
  misc_feature 1..20: note = chemically synthesized
  source 1..20: mol_type = other DNA
gtaagaatttctatatggac

SEQ ID NO: 34266 - DNA, 20 bp, synthetic construct
  misc_feature 1..20: note = chemically synthesized
  source 1..20: mol_type = other DNA
gaatcatttagggaagacaa

SEQ ID NO: 34267 - DNA, 20 bp, synthetic construct
  misc_feature 1..20: note = chemically synthesized
  source 1..20: mol_type = other DNA
ctccacccttagctgtactt

SEQ ID NO: 34268 - DNA, 20 bp, synthetic construct
  misc_feature 1..20: note = chemically synthesized
  source 1..20: mol_type = other DNA
tttgtgcgaatgcatgaaaa

SEQ ID NO: 34269 - DNA, 20 bp, synthetic construct
  misc_feature 1..20: note = chemically synthesized
  source 1..20: mol_type = other DNA
caatgacacaatggaaccta

SEQ ID NO: 34270 - DNA, 20 bp, synthetic construct
  misc_feature 1..20: note = chemically synthesized
  source 1..20: mol_type = other DNA
ccagaggaaaaaaaaagtta

SEQ ID NO: 34271 - DNA, 20 bp, synthetic construct
  misc_feature 1..20: note = chemically synthesized
  source 1..20: mol_type = other DNA
ttgtgagttcttgtgcactg

SEQ ID NO: 34272 - DNA, 20 bp, synthetic construct
  misc_feature 1..20: note = chemically synthesized
  source 1..20: mol_type = other DNA
gaaggtaatcagtggaaatt

SEQ ID NO: 34273 - DNA, 20 bp, synthetic construct
  misc_feature 1..20: note = chemically synthesized
  source 1..20: mol_type = other DNA
gtaatcagtggaaatttgtc

SEQ ID NO: 34274 - DNA, 20 bp, synthetic construct
  misc_feature 1..20: note = chemically synthesized
  source 1..20: mol_type = other DNA
tttgctctaacttaaatacc

SEQ ID NO: 34275 - DNA, 20 bp, synthetic construct
  misc_feature 1..20: note = chemically synthesized
  source 1..20: mol_type = other DNA
ctgaagccatggcagaagtt

SEQ ID NO: 34276 - DNA, 20 bp, synthetic construct
  misc_feature 1..20: note = chemically synthesized
  source 1..20: mol_type = other DNA
tggcagaagttcgtggattg

SEQ ID NO: 34277 - DNA, 20 bp, synthetic construct
  misc_feature 1..20: note = chemically synthesized
  source 1..20: mol_type = other DNA
caatctctaaacataaattg

SEQ ID NO: 34278 - DNA, 20 bp, synthetic construct
  misc_feature 1..20: note = chemically synthesized
  source 1..20: mol_type = other DNA
cacttccccagtcaatatcc

SEQ ID NO: 34279 - DNA, 20 bp, synthetic construct
  misc_feature 1..20: note = chemically synthesized
  source 1..20: mol_type = other DNA
ctgcacaaattgtacagcat

SEQ ID NO: 34280 - DNA, 20 bp, synthetic construct
  misc_feature 1..20: note = chemically synthesized
  source 1..20: mol_type = other DNA
gagaatacgagccaggaggt

SEQ ID NO: 34281 - DNA, 20 bp, synthetic construct
  misc_feature 1..20: note = chemically synthesized
  source 1..20: mol_type = other DNA
cccagtctcccacagcgctc

SEQ ID NO: 34282 - DNA, 20 bp, synthetic construct
  misc_feature 1..20: note = chemically synthesized
  source 1..20: mol_type = other DNA
aaaatccctaatacaaactt

SEQ ID NO: 34283 - DNA, 20 bp, synthetic construct
  misc_feature 1..20: note = chemically synthesized
  source 1..20: mol_type = other DNA
aatacaaacttgctggtttt

SEQ ID NO: 34284 - DNA, 20 bp, synthetic construct
  misc_feature 1..20: note = chemically synthesized
  source 1..20: mol_type = other DNA
tgtgatgcctcccccggatg

SEQ ID NO: 34285 - DNA, 20 bp, synthetic construct
  misc_feature 1..20: note = chemically synthesized
  source 1..20: mol_type = other DNA
cctttatttctaaagttggc

SEQ ID NO: 34286 - DNA, 20 bp, synthetic construct
  misc_feature 1..20: note = chemically synthesized
  source 1..20: mol_type = other DNA
acaaaaaatactaagttgta

SEQ ID NO: 34287 - DNA, 20 bp, synthetic construct
  misc_feature 1..20: note = chemically synthesized
  source 1..20: mol_type = other DNA
atggcagagaccatccaaca

SEQ ID NO: 34288 - DNA, 20 bp, synthetic construct
  misc_feature 1..20: note = chemically synthesized
  source 1..20: mol_type = other DNA
gaaccccatgctcaccatca

SEQ ID NO: 34289 - DNA, 20 bp, synthetic construct
  misc_feature 1..20: note = chemically synthesized
  source 1..20: mol_type = other DNA
gccactgggcattacagtgc

SEQ ID NO: 34290 - DNA, 20 bp, synthetic construct
  misc_feature 1..20: note = chemically synthesized
  source 1..20: mol_type = other DNA
ttcgctttgttcaactgccg

SEQ ID NO: 34291 - DNA, 20 bp, synthetic construct
  misc_feature 1..20: note = chemically synthesized
  source 1..20: mol_type = other DNA
gaaggaaggctggagtacag

SEQ ID NO: 34292 - DNA, 20 bp, synthetic construct
  misc_feature 1..20: note = chemically synthesized
  source 1..20: mol_type = other DNA
ttagaagagggttcagggtt

SEQ ID NO: 34293 - DNA, 20 bp, synthetic construct
  misc_feature 1..20: note = chemically synthesized
  source 1..20: mol_type = other DNA
agtataaatggttctgaagc

SEQ ID NO: 34294 - DNA, 20 bp, synthetic construct
  misc_feature 1..20: note = chemically synthesized
  source 1..20: mol_type = other DNA
tctgaagcacttgattcaga

SEQ ID NO: 34295 - DNA, 20 bp, synthetic construct
  misc_feature 1..20: note = chemically synthesized
  source 1..20: mol_type = other DNA
agaaagtagaaagaacagct

SEQ ID NO: 34296 - DNA, 20 bp, synthetic construct
  misc_feature 1..20: note = chemically synthesized
  source 1..20: mol_type = other DNA
ccaagaggtgtgagttctga

SEQ ID NO: 34297 - DNA, 20 bp, synthetic construct
  misc_feature 1..20: note = chemically synthesized
  source 1..20: mol_type = other DNA
gctgagtcactatcaaatca

SEQ ID NO: 34298 - DNA, 20 bp, synthetic construct
  misc_feature 1..20: note = chemically synthesized
  source 1..20: mol_type = other DNA
atcccctgagagaaaaagta

SEQ ID NO: 34299 - DNA, 20 bp, synthetic construct
  misc_feature 1..20: note = chemically synthesized
  source 1..20: mol_type = other DNA
agaaaaagtacagagtttat

SEQ ID NO: 34300 - DNA, 20 bp, synthetic construct
  misc_feature 1..20: note = chemically synthesized
  source 1..20: mol_type = other DNA
attaaggaagcagtattcac

SEQ ID NO: 34301 - DNA, 20 bp, synthetic construct
  misc_feature 1..20: note = chemically synthesized
  source 1..20: mol_type = other DNA
gctcaaggacagaatctgaa

SEQ ID NO: 34302 - DNA, 20 bp, synthetic construct
  misc_feature 1..20: note = chemically synthesized
  source 1..20: mol_type = other DNA
aaagtatactgtgtacaaaa

SEQ ID NO: 34303 - DNA, 20 bp, synthetic construct
  misc_feature 1..20: note = chemically synthesized
  source 1..20: mol_type = other DNA
aaaaagctaacattaagcaa

SEQ ID NO: 34304 - DNA, 20 bp, synthetic construct
  misc_feature 1..20: note = chemically synthesized
  source 1..20: mol_type = other DNA
aacattaagcaagtgtgttt

SEQ ID NO: 34305 - DNA, 20 bp, synthetic construct
  misc_feature 1..20: note = chemically synthesized
  source 1..20: mol_type = other DNA
tgtttgtatgttttctacag

SEQ ID NO: 34306 - DNA, 20 bp, synthetic construct
  misc_feature 1..20: note = chemically synthesized
  source 1..20: mol_type = other DNA
taatttgatccgacagaaaa

SEQ ID NO: 34307 - DNA, 20 bp, synthetic construct
  misc_feature 1..20: note = chemically synthesized
  source 1..20: mol_type = other DNA
ttcagtaccatcagctcttt

SEQ ID NO: 34308 - DNA, 20 bp, synthetic construct
  misc_feature 1..20: note = chemically synthesized
  source 1..20: mol_type = other DNA
tctttggcagcttatgagta

SEQ ID NO: 34309 - DNA, 20 bp, synthetic construct
  misc_feature 1..20: note = chemically synthesized
  source 1..20: mol_type = other DNA
ttctcacctggtccccagga

SEQ ID NO: 34310 - DNA, 20 bp, synthetic construct
  misc_feature 1..20: note = chemically synthesized
  source 1..20: mol_type = other DNA
ggatatggtttacttgtcag

SEQ ID NO: 34311 - DNA, 20 bp, synthetic construct
  misc_feature 1..20: note = chemically synthesized
  source 1..20: mol_type = other DNA
cttgtcagagtagttttatg

SEQ ID NO: 34312 - DNA, 20 bp, synthetic construct
  misc_feature 1..20: note = chemically synthesized
  source 1..20: mol_type = other DNA
tatgaggtgctttctcctga

SEQ ID NO: 34313 - DNA, 20 bp, synthetic construct
  misc_feature 1..20: note = chemically synthesized
  source 1..20: mol_type = other DNA
accttgatgggaacatagaa

SEQ ID NO: 34314 - DNA, 20 bp, synthetic construct
  misc_feature 1..20: note = chemically synthesized
  source 1..20: mol_type = other DNA
ggctcactctgaaagatatg

SEQ ID NO: 34315 - DNA, 20 bp, synthetic construct
  misc_feature 1..20: note = chemically synthesized
  source 1..20: mol_type = other DNA
cattataagagggaggcaaa

SEQ ID NO: 34316 - DNA, 20 bp, synthetic construct
  misc_feature 1..20: note = chemically synthesized
  source 1..20: mol_type = other DNA
ttataagaggagaaaatgtg

SEQ ID NO: 34317 - DNA, 20 bp, synthetic construct
  misc_feature 1..20: note = chemically synthesized
  source 1..20: mol_type = other DNA
cctcgactttagcccagtga

SEQ ID NO: 34318 - DNA, 20 bp, synthetic construct
  misc_feature 1..20: note = chemically synthesized
  source 1..20: mol_type = other DNA
acttcaagataatacatttg

SEQ ID NO: 34319 - DNA, 20 bp, synthetic construct
  misc_feature 1..20: note = chemically synthesized
  source 1..20: mol_type = other DNA
ctaatcattagaatcactcc

SEQ ID NO: 34320 - DNA, 20 bp, synthetic construct
  misc_feature 1..20: note = chemically synthesized
  source 1..20: mol_type = other DNA
cagacccagagccagtgaat

SEQ ID NO: 34321 - DNA, 20 bp, synthetic construct
  misc_feature 1..20: note = chemically synthesized
  source 1..20: mol_type = other DNA
gcctgaatattaagcaagtt

SEQ ID NO: 34322 - DNA, 20 bp, synthetic construct
  misc_feature 1..20: note = chemically synthesized
  source 1..20: mol_type = other DNA
ccagttgtacttttgtgtaa

SEQ ID NO: 34323 - DNA, 20 bp, synthetic construct
  misc_feature 1..20: note = chemically synthesized
  source 1..20: mol_type = other DNA
tgtgtaaatgtgatttcatt

SEQ ID NO: 34324 - DNA, 20 bp, synthetic construct
  misc_feature 1..20: note = chemically synthesized
  source 1..20: mol_type = other DNA
tgaagaaataaaagatgaga

SEQ ID NO: 34325 - DNA, 20 bp, synthetic construct
  misc_feature 1..20: note = chemically synthesized
  source 1..20: mol_type = other DNA
aaacagttttaaaaattata

SEQ ID NO: 34326 - DNA, 20 bp, synthetic construct
  misc_feature 1..20: note = chemically synthesized
  source 1..20: mol_type = other DNA
tttaaaaattatataatgtt

SEQ ID NO: 34327 - DNA, 20 bp, synthetic construct
  misc_feature 1..20: note = chemically synthesized
  source 1..20: mol_type = other DNA
ttagaatgaatatgatgcaa

SEQ ID NO: 34328 - DNA, 20 bp, synthetic construct
  misc_feature 1..20: note = chemically synthesized
  source 1..20: mol_type = other DNA
atgcaatctggttttctgtg

SEQ ID NO: 34329 - DNA, 20 bp, synthetic construct
  misc_feature 1..20: note = chemically synthesized
  source 1..20: mol_type = other DNA
ctggagttaacctttctttg

SEQ ID NO: 34330 - DNA, 20 bp, synthetic construct
  misc_feature 1..20: note = chemically synthesized
  source 1..20: mol_type = other DNA
tcctggtgctgtgcataata

SEQ ID NO: 34331 - DNA, 20 bp, synthetic construct
  misc_feature 1..20: note = chemically synthesized
  source 1..20: mol_type = other DNA
tgcttaaacatgacagcagg

SEQ ID NO: 34332 - DNA, 20 bp, synthetic construct
  misc_feature 1..20: note = chemically synthesized
  source 1..20: mol_type = other DNA
aatttatttataaatggtaa

SEQ ID NO: 34333 - DNA, 20 bp, synthetic construct
  misc_feature 1..20: note = chemically synthesized
  source 1..20: mol_type = other DNA
atagaatgttcatcagaaaa

SEQ ID NO: 34334 - DNA, 20 bp, synthetic construct
  misc_feature 1..20: note = chemically synthesized
  source 1..20: mol_type = other DNA
tccaaccaccgcctgggtat

SEQ ID NO: 34335 - DNA, 20 bp, synthetic construct
  misc_feature 1..20: note = chemically synthesized
  source 1..20: mol_type = other DNA
atcaactcaaatttggctga

SEQ ID NO: 34336 - DNA, 20 bp, synthetic construct
  misc_feature 1..20: note = chemically synthesized
  source 1..20: mol_type = other DNA
tcaaatttggctgacacagt

SEQ ID NO: 34337 - DNA, 20 bp, synthetic construct
  misc_feature 1..20: note = chemically synthesized
  source 1..20: mol_type = other DNA
ttccaacttctctctgaaga

SEQ ID NO: 34338 - DNA, 20 bp, synthetic construct
  misc_feature 1..20: note = chemically synthesized
  source 1..20: mol_type = other DNA
aagtcttttactccggtgtg

SEQ ID NO: 34339 - DNA, 20 bp, synthetic construct
  misc_feature 1..20: note = chemically synthesized
  source 1..20: mol_type = other DNA
tactccggtgtggagtgttt

SEQ ID NO: 34340 - DNA, 20 bp, synthetic construct
  misc_feature 1..20: note = chemically synthesized
  source 1..20: mol_type = other DNA
aggattcctaccaattagga

SEQ ID NO: 34341 - DNA, 20 bp, synthetic construct
  misc_feature 1..20: note = chemically synthesized
  source 1..20: mol_type = other DNA
ttcctaccaattaggaaggt

SEQ ID NO: 34342 - DNA, 20 bp, synthetic construct
  misc_feature 1..20: note = chemically synthesized
  source 1..20: mol_type = other DNA
agaaacacctccccttaact

SEQ ID NO: 34343 - DNA, 20 bp, synthetic construct
  misc_feature 1..20: note = chemically synthesized
  source 1..20: mol_type = other DNA
ttacacatgcatgcgttgag

SEQ ID NO: 34344 - DNA, 20 bp, synthetic construct
  misc_feature 1..20: note = chemically synthesized
  source 1..20: mol_type = other DNA
agcctggcctgggcactagg

SEQ ID NO: 34345 - DNA, 20 bp, synthetic construct
  misc_feature 1..20: note = chemically synthesized
  source 1..20: mol_type = other DNA
ttttagatattagggacata

SEQ ID NO: 34346 - DNA, 20 bp, synthetic construct
  misc_feature 1..20: note = chemically synthesized
  source 1..20: mol_type = other DNA
ggacttcgcattcaaacata

SEQ ID NO: 34347 - DNA, 20 bp, synthetic construct
  misc_feature 1..20: note = chemically synthesized
  source 1..20: mol_type = other DNA
acaagaacctctctctatac

SEQ ID NO: 34348 - DNA, 20 bp, synthetic construct
  misc_feature 1..20: note = chemically synthesized
  source 1..20: mol_type = other DNA
tctataccccagatttattt

SEQ ID NO: 34349 - DNA, 20 bp, synthetic construct
  misc_feature 1..20: note = chemically synthesized
  source 1..20: mol_type = other DNA
tatgagttaattcatagcta

SEQ ID NO: 34350 - DNA, 20 bp, synthetic construct
  misc_feature 1..20: note = chemically synthesized
  source 1..20: mol_type = other DNA
tgcgtattactaaaaagaag

SEQ ID NO: 34351 - DNA, 20 bp, synthetic construct
  misc_feature 1..20: note = chemically synthesized
  source 1..20: mol_type = other DNA
aaggaatgatttcctagagg

SEQ ID NO: 34352 - DNA, 20 bp, synthetic construct
  misc_feature 1..20: note = chemically synthesized
  source 1..20: mol_type = other DNA
aggtgcttcttctggccaag

SEQ ID NO: 34353 - DNA, 20 bp, synthetic construct
  misc_feature 1..20: note = chemically synthesized
  source 1..20: mol_type = other DNA
aggggagctcttaggatgtc

SEQ ID NO: 34354 - DNA, 20 bp, synthetic construct
  misc_feature 1..20: note = chemically synthesized
  source 1..20: mol_type = other DNA
aaaggcaagggatgaccaat

SEQ ID NO: 34355 - DNA, 20 bp, synthetic construct
  misc_feature 1..20: note = chemically synthesized
  source 1..20: mol_type = other DNA
acagggaagcctctgaacac

SEQ ID NO: 34356 - DNA, 20 bp, synthetic construct
  misc_feature 1..20: note = chemically synthesized
  source 1..20: mol_type = other DNA
aagccatagcaaacttgtca

SEQ ID NO: 34357 - DNA, 20 bp, synthetic construct
  misc_feature 1..20: note = chemically synthesized
  source 1..20: mol_type = other DNA
gcccagaggatataaagcca

SEQ ID NO: 34358 - DNA, 20 bp, synthetic construct
  misc_feature 1..20: note = chemically synthesized
  source 1..20: mol_type = other DNA
tctttggatattccggttcc

SEQ ID NO: 34359 - DNA, 20 bp, synthetic construct
  misc_feature 1..20: note = chemically synthesized
  source 1..20: mol_type = other DNA
ttccggttcccactgcttca

SEQ ID NO: 34360 - DNA, 20 bp, synthetic construct
  misc_feature 1..20: note = chemically synthesized
  source 1..20: mol_type = other DNA
atacacagggacaaagtcca

SEQ ID NO: 34361 - DNA, 20 bp, synthetic construct
  misc_feature 1..20: note = chemically synthesized
  source 1..20: mol_type = other DNA
taaccggttacacaattgcc

SEQ ID NO: 34362 - DNA, 20 bp, synthetic construct
  misc_feature 1..20: note = chemically synthesized
  source 1..20: mol_type = other DNA
acacaattgcctttggtttt

SEQ ID NO: 34363 - DNA, 20 bp, synthetic construct
  misc_feature 1..20: note = chemically synthesized
  source 1..20: mol_type = other DNA
ggtttttacagtttgttcct

SEQ ID NO: 34364 - DNA, 20 bp, synthetic construct
  misc_feature 1..20: note = chemically synthesized
  source 1..20: mol_type = other DNA
gtttgttcctaagtgtttcc

SEQ ID NO: 34365 - DNA, 20 bp, synthetic construct
  misc_feature 1..20: note = chemically synthesized
  source 1..20: mol_type = other DNA
tggttcctcttcacctgagg

SEQ ID NO: 34366 - DNA, 20 bp, synthetic construct
  misc_feature 1..20: note = chemically synthesized
  source 1..20: mol_type = other DNA
attatttattccagttaaaa

SEQ ID NO: 34367 - DNA, 20 bp, synthetic construct
  misc_feature 1..20: note = chemically synthesized
  source 1..20: mol_type = other DNA
tagtgcctgctgtgtgtggt

SEQ ID NO: 34368 - DNA, 20 bp, synthetic construct
  misc_feature 1..20: note = chemically synthesized
  source 1..20: mol_type = other DNA
ctgccacagttcctttcccc

SEQ ID NO: 34369 - DNA, 20 bp, synthetic construct
  misc_feature 1..20: note = chemically synthesized
  source 1..20: mol_type = other DNA
gcaattgtgtaaccggttaa

SEQ ID NO: 34370 - DNA, 20 bp, synthetic construct
  misc_feature 1..20: note = chemically synthesized
  source 1..20: mol_type = other DNA
tgagttagacaattctttca

SEQ ID NO: 34371 - DNA, 20 bp, synthetic construct
  misc_feature 1..20: note = chemically synthesized
  source 1..20: mol_type = other DNA
gggaaccggaatatccaaag

SEQ ID NO: 34372 - DNA, 20 bp, synthetic construct
  misc_feature 1..20: note = chemically synthesized
  source 1..20: mol_type = other DNA
tttgaaggagaaagaagcat

SEQ ID NO: 34373 - DNA, 20 bp, synthetic construct
  misc_feature 1..20: note = chemically synthesized
  source 1..20: mol_type = other DNA
tggctttatatcctctgggc

SEQ ID NO: 34374 - DNA, 20 bp, synthetic construct
  misc_feature 1..20: note = chemically synthesized
  source 1..20: mol_type = other DNA
taaaggtaagaaaccatctg

SEQ ID NO: 34375 - DNA, 20 bp, synthetic construct
  misc_feature 1..20: note = chemically synthesized
  source 1..20: mol_type = other DNA
aaaccatctgacaagtttgc

SEQ ID NO: 34376 - DNA, 20 bp, synthetic construct
  misc_feature 1..20: note = chemically synthesized
  source 1..20: mol_type = other DNA
cttcttcagccaaaatttat

SEQ ID NO: 34377 - DNA, 20 bp, synthetic construct
  misc_feature 1..20: note = chemically synthesized
  source 1..20: mol_type = other DNA
tggttcaaacccctgtgttc

SEQ ID NO: 34378 - DNA, 20 bp, synthetic construct
  misc_feature 1..20: note = chemically synthesized
  source 1..20: mol_type = other DNA
ctcccctccactacggacat

SEQ ID NO: 34379 - DNA, 20 bp, synthetic construct
  misc_feature 1..20: note = chemically synthesized
  source 1..20: mol_type = other DNA
cacttccggtgaccagttag

SEQ ID NO: 34380 - DNA, 20 bp, synthetic construct
  misc_feature 1..20: note = chemically synthesized
  source 1..20: mol_type = other DNA
tctggggtatagagagaggt

SEQ ID NO: 34381 - DNA, 20 bp, synthetic construct
  misc_feature 1..20: note = chemically synthesized
  source 1..20: mol_type = other DNA
tcttgtttcaattagaaaag

SEQ ID NO: 34382 - DNA, 20 bp, synthetic construct
  misc_feature 1..20: note = chemically synthesized
  source 1..20: mol_type = other DNA
aaaagtaatgcttggagaga

SEQ ID NO: 34383 - DNA, 20 bp, synthetic construct
  misc_feature 1..20: note = chemically synthesized
  source 1..20: mol_type = other DNA
aaggtcactgccaatagatg

SEQ ID NO: 34384 - DNA, 20 bp, synthetic construct
  misc_feature 1..20: note = chemically synthesized
  source 1..20: mol_type = other DNA
atgacttgattagaagcagg

SEQ ID NO: 34385 - DNA, 20 bp, synthetic construct
  misc_feature 1..20: note = chemically synthesized
  source 1..20: mol_type = other DNA
aaccatgcctagtgcccagg

SEQ ID NO: 34386 - DNA, 20 bp, synthetic construct
  misc_feature 1..20: note = chemically synthesized
  source 1..20: mol_type = other DNA
acagacatcttccctgaatg

SEQ ID NO: 34387 - DNA, 20 bp, synthetic construct
  misc_feature 1..20: note = chemically synthesized
  source 1..20: mol_type = other DNA
ctaatgccctctaactgatg

SEQ ID NO: 34388 - DNA, 20 bp, synthetic construct
  misc_feature 1..20: note = chemically synthesized
  source 1..20: mol_type = other DNA
agaatccatcagttaagggg

SEQ ID NO: 34389 - DNA, 20 bp, synthetic construct
  misc_feature 1..20: note = chemically synthesized
  source 1..20: mol_type = other DNA
tcagttaaggggaggtgttt

SEQ ID NO: 34390 - DNA, 20 bp, synthetic construct
  misc_feature 1..20: note = chemically synthesized
  source 1..20: mol_type = other DNA
tccacaccggagtaaaagac

SEQ ID NO: 34391 - DNA, 20 bp, synthetic construct
  misc_feature 1..20: note = chemically synthesized
  source 1..20: mol_type = other DNA
tttgtgctagtgcatgacac

SEQ ID NO: 34392 - DNA, 20 bp, synthetic construct
  misc_feature 1..20: note = chemically synthesized
  source 1..20: mol_type = other DNA
actgagatacccaggcggtg

SEQ ID NO: 34393 - DNA, 20 bp, synthetic construct
  misc_feature 1..20: note = chemically synthesized
  source 1..20: mol_type = other DNA
gcggtggttggatttatgga

SEQ ID NO: 34394 - DNA, 20 bp, synthetic construct
  misc_feature 1..20: note = chemically synthesized
  source 1..20: mol_type = other DNA
gaagaaagagtagatagaaa

SEQ ID NO: 34395 - DNA, 20 bp, synthetic construct
  misc_feature 1..20: note = chemically synthesized
  source 1..20: mol_type = other DNA
tgtaaaatcctatcctgctg

SEQ ID NO: 34396 - DNA, 20 bp, synthetic construct
  misc_feature 1..20: note = chemically synthesized
  source 1..20: mol_type = other DNA
attgcatgccagtctttgct

SEQ ID NO: 34397 - DNA, 20 bp, synthetic construct
  misc_feature 1..20: note = chemically synthesized
  source 1..20: mol_type = other DNA
caggaatctgaacacagaaa

SEQ ID NO: 34398 - DNA, 20 bp, synthetic construct
  misc_feature 1..20: note = chemically synthesized
  source 1..20: mol_type = other DNA
aaacattatataatttttaa

SEQ ID NO: 34399 - DNA, 20 bp, synthetic construct
  misc_feature 1..20: note = chemically synthesized
  source 1..20: mol_type = other DNA
ataccctatgtatttgagta

SEQ ID NO: 34400 - DNA, 20 bp, synthetic construct
  misc_feature 1..20: note = chemically synthesized
  source 1..20: mol_type = other DNA
ctatgtatttgagtaagttg

SEQ ID NO: 34401 - DNA, 20 bp, synthetic construct
  misc_feature 1..20: note = chemically synthesized
  source 1..20: mol_type = other DNA
gttgcttagcttctcccaac

SEQ ID NO: 34402 - DNA, 20 bp, synthetic construct
  misc_feature 1..20: note = chemically synthesized
  source 1..20: mol_type = other DNA
cctcatttctaaaacgaaga

SEQ ID NO: 34403 - DNA, 20 bp, synthetic construct
  misc_feature 1..20: note = chemically synthesized
  source 1..20: mol_type = other DNA
tctgggccccaccaccaaat

SEQ ID NO: 34404 - DNA, 20 bp, synthetic construct
  misc_feature 1..20: note = chemically synthesized
  source 1..20: mol_type = other DNA
tggctctgggtctgtatgta

SEQ ID NO: 34405 - DNA, 20 bp, synthetic construct
  misc_feature 1..20: note = chemically synthesized
  source 1..20: mol_type = other DNA
ctgtatgtaacaagcttctg

SEQ ID NO: 34406 - DNA, 20 bp, synthetic construct
  misc_feature 1..20: note = chemically synthesized
  source 1..20: mol_type = other DNA
acaagcttctggagtgattc

SEQ ID NO: 34407 - DNA, 20 bp, synthetic construct
  misc_feature 1..20: note = chemically synthesized
  source 1..20: mol_type = other DNA
caggacctactattctacgt

SEQ ID NO: 34408 - DNA, 20 bp, synthetic construct
  misc_feature 1..20: note = chemically synthesized
  source 1..20: mol_type = other DNA
taaaaaattaccacaaattt

SEQ ID NO: 34409 - DNA, 20 bp, synthetic construct
  misc_feature 1..20: note = chemically synthesized
  source 1..20: mol_type = other DNA
gtggaggtcagaagtctgaa

SEQ ID NO: 34410 - DNA, 20 bp, synthetic construct
  misc_feature 1..20: note = chemically synthesized
  source 1..20: mol_type = other DNA
taaagtcgaggtgtcagtgt

SEQ ID NO: 34411 - DNA, 20 bp, synthetic construct
  misc_feature 1..20: note = chemically synthesized
  source 1..20: mol_type = other DNA
gtttcttctggagactctat

SEQ ID NO: 34412 - DNA, 20 bp, synthetic construct
  misc_feature 1..20: note = chemically synthesized
  source 1..20: mol_type = other DNA
tctggagactctatgagaga

SEQ ID NO: 34413 - DNA, 20 bp, synthetic construct
  misc_feature 1..20: note = chemically synthesized
  source 1..20: mol_type = other DNA
ttgtgttttcctgccttttc

SEQ ID NO: 34414 - DNA, 20 bp, synthetic construct
  misc_feature 1..20: note = chemically synthesized
  source 1..20: mol_type = other DNA
tttcctgccttttccatgga

SEQ ID NO: 34415 - DNA, 20 bp, synthetic construct
  misc_feature 1..20: note = chemically synthesized
  source 1..20: mol_type = other DNA
tctagaggctacccacattc

SEQ ID NO: 34416 - DNA, 20 bp, synthetic construct
  misc_feature 1..20: note = chemically synthesized
  source 1..20: mol_type = other DNA
cgatcttcaaaaaaatgtat

SEQ ID NO: 34417 - DNA, 20 bp, synthetic construct
  misc_feature 1..20: note = chemically synthesized
  source 1..20: mol_type = other DNA
cctccctcttataatgacac

SEQ ID NO: 34418 - DNA, 20 bp, synthetic construct
  misc_feature 1..20: note = chemically synthesized
  source 1..20: mol_type = other DNA
ccttaattatatatgcaaaa

SEQ ID NO: 34419 - DNA, 20 bp, synthetic construct
  misc_feature 1..20: note = chemically synthesized
  source 1..20: mol_type = other DNA
ggctagaaaagataatactc

SEQ ID NO: 34420 - DNA, 20 bp, synthetic construct
  misc_feature 1..20: note = chemically synthesized
  source 1..20: mol_type = other DNA
acagaaaaaaaaaatgtagc

SEQ ID NO: 34421 - DNA, 20 bp, synthetic construct
  misc_feature 1..20: note = chemically synthesized
  source 1..20: mol_type = other DNA
tgtagaaaacatacaaacac

SEQ ID NO: 34422 - DNA, 20 bp, synthetic construct
  misc_feature 1..20: note = chemically synthesized
  source 1..20: mol_type = other DNA
tacaaacacacttgcttaat

SEQ ID NO: 34423 - DNA, 20 bp, synthetic construct
  misc_feature 1..20: note = chemically synthesized
  source 1..20: mol_type = other DNA
gcactgaaccagctggaaat

SEQ ID NO: 34424 - DNA, 20 bp, synthetic construct
  misc_feature 1..20: note = chemically synthesized
  source 1..20: mol_type = other DNA
gaaccagctggaaatgaatg

SEQ ID NO: 34425 - DNA, 20 bp, synthetic construct
  misc_feature 1..20: note = chemically synthesized
  source 1..20: mol_type = other DNA
cgcagctgataaaagcagag

SEQ ID NO: 34426 - DNA, 20 bp, synthetic construct
  misc_feature 1..20: note = chemically synthesized
  source 1..20: mol_type = other DNA
ctggagaaagcagctgtgaa

SEQ ID NO: 34427 - DNA, 20 bp, synthetic construct
  misc_feature 1..20: note = chemically synthesized
  source 1..20: mol_type = other DNA
aactctgtactttttctctc

SEQ ID NO: 34428 - DNA, 20 bp, synthetic construct
  misc_feature 1..20: note = chemically synthesized
  source 1..20: mol_type = other DNA
ctcaggggattagaaaaacc

SEQ ID NO: 34429 - DNA, 20 bp, synthetic construct
  misc_feature 1..20: note = chemically synthesized
  source 1..20: mol_type = other DNA
aattgatttgatagtgactc

SEQ ID NO: 34430 - DNA, 20 bp, synthetic construct
  misc_feature 1..20: note = chemically synthesized
  source 1..20: mol_type = other DNA
ctttagccaatgccctgcag

SEQ ID NO: 34431 - DNA, 20 bp, synthetic construct
  misc_feature 1..20: note = chemically synthesized
  source 1..20: mol_type = other DNA
ccctgcagctaagattgaga

SEQ ID NO: 34432 - DNA, 20 bp, synthetic construct
  misc_feature 1..20: note = chemically synthesized
  source 1..20: mol_type = other DNA
gattcagaactcacacctct

SEQ ID NO: 34433 - DNA, 20 bp, synthetic construct
  misc_feature 1..20: note = chemically synthesized
  source 1..20: mol_type = other DNA
tttaaagcacagtctgaatc

SEQ ID NO: 34434 - DNA, 20 bp, synthetic construct
  misc_feature 1..20: note = chemically synthesized
  source 1..20: mol_type = other DNA
gcgaaggcactgtaatgccc

SEQ ID NO: 34435 - DNA, 20 bp, synthetic construct
  misc_feature 1..20: note = chemically synthesized
  source 1..20: mol_type = other DNA
atatcatcctaactgcatgc

SEQ ID NO: 34436 - DNA, 20 bp, synthetic construct
  misc_feature 1..20: note = chemically synthesized
  source 1..20: mol_type = other DNA
aaagaataatttttcacttc

SEQ ID NO: 34437 - DNA, 20 bp, synthetic construct
  misc_feature 1..20: note = chemically synthesized
  source 1..20: mol_type = other DNA
cctgatcatcactcacacat

SEQ ID NO: 34438 - DNA, 20 bp, synthetic construct
  misc_feature 1..20: note = chemically synthesized
  source 1..20: mol_type = other DNA
cccacaagccacaaaaacca

SEQ ID NO: 34439 - DNA, 20 bp, synthetic construct
  misc_feature 1..20: note = chemically synthesized
  source 1..20: mol_type = other DNA
aaaaaccagcaagtttgtat

SEQ ID NO: 34440 - DNA, 20 bp, synthetic construct
  misc_feature 1..20: note = chemically synthesized
  source 1..20: mol_type = other DNA
ggcgaaattaaaattgctaa

SEQ ID NO: 34441 - DNA, 20 bp, synthetic construct
  misc_feature 1..20: note = chemically synthesized
  source 1..20: mol_type = other DNA
gataacatcttatcaggaga

SEQ ID NO: 34442 - DNA, 20 bp, synthetic construct
  misc_feature 1..20: note = chemically synthesized
  source 1..20: mol_type = other DNA
gacaggcgcacctggagggg

SEQ ID NO: 34443 - DNA, 20 bp, synthetic construct
  misc_feature 1..20: note = chemically synthesized
  source 1..20: mol_type = other DNA
aattcagcgatatttctccc

SEQ ID NO: 34444 - DNA, 20 bp, synthetic construct
  misc_feature 1..20: note = chemically synthesized
  source 1..20: mol_type = other DNA
ctgcctggctcaccagcagt

SEQ ID NO: 34445 - DNA, 20 bp, synthetic construct
  misc_feature 1..20: note = chemically synthesized
  source 1..20: mol_type = other DNA
atatacatcctcctcagctg

SEQ ID NO: 34446 - DNA, 20 bp, synthetic construct
  misc_feature 1..20: note = chemically synthesized
  source 1..20: mol_type = other DNA
cctcctcagctgacaggatt

SEQ ID NO: 34447 - DNA, 20 bp, synthetic construct
  misc_feature 1..20: note = chemically synthesized
  source 1..20: mol_type = other DNA
gtccatgaaatctttacaat

SEQ ID NO: 34448 - DNA, 20 bp, synthetic construct
  misc_feature 1..20: note = chemically synthesized
  source 1..20: mol_type = other DNA
aaatctttacaatttatgtt

SEQ ID NO: 34449 - DNA, 20 bp, synthetic construct
  misc_feature 1..20: note = chemically synthesized
  source 1..20: mol_type = other DNA
cacaatccacgaacttctgc

SEQ ID NO: 34450 - DNA, 20 bp, synthetic construct
  misc_feature 1..20: note = chemically synthesized
  source 1..20: mol_type = other DNA
gccatggcttcagctgatcc

SEQ ID NO: 34451 - DNA, 20 bp, synthetic construct
  misc_feature 1..20: note = chemically synthesized
  source 1..20: mol_type = other DNA
gctgtgttcagatggttaca

SEQ ID NO: 34452 - DNA, 20 bp, synthetic construct
  misc_feature 1..20: note = chemically synthesized
  source 1..20: mol_type = other DNA
acacatacacttacattaga

SEQ ID NO: 34453 - DNA, 20 bp, synthetic construct
  misc_feature 1..20: note = chemically synthesized
  source 1..20: mol_type = other DNA
tcaatcaatcgacaaatttc

SEQ ID NO: 34454 - DNA, 20 bp, synthetic construct
  misc_feature 1..20: note = chemically synthesized
  source 1..20: mol_type = other DNA
tgccatagtctcagccttca

SEQ ID NO: 34455 - DNA, 20 bp, synthetic construct
  misc_feature 1..20: note = chemically synthesized
  source 1..20: mol_type = other DNA
gtgtgttgagtgttgcaaga

SEQ ID NO: 34456 - DNA, 20 bp, synthetic construct
  misc_feature 1..20: note = chemically synthesized
  source 1..20: mol_type = other DNA
ccatagatgaggcagatagc

SEQ ID NO: 34457 - DNA, 20 bp, synthetic construct
  misc_feature 1..20: note = chemically synthesized
  source 1..20: mol_type = other DNA
aggcttctgcctacagcaag

SEQ ID NO: 34458 - DNA, 20 bp, synthetic construct
  misc_feature 1..20: note = chemically synthesized
  source 1..20: mol_type = other DNA
tacagcaaggctagtttgga

SEQ ID NO: 34459 - DNA, 20 bp, synthetic construct
  misc_feature 1..20: note = chemically synthesized
  source 1..20: mol_type = other DNA
ggacccacacacctcttcat

SEQ ID NO: 34460 - DNA, 20 bp, synthetic construct
  misc_feature 1..20: note = chemically synthesized
  source 1..20: mol_type = other DNA
atgctttttcttttttttcc

SEQ ID NO: 34461 - DNA, 20 bp, synthetic construct
  misc_feature 1..20: note = chemically synthesized
  source 1..20: mol_type = other DNA
ctatgcaatatccagcactc

SEQ ID NO: 34462 - DNA, 20 bp, synthetic construct
  misc_feature 1..20: note = chemically synthesized
  source 1..20: mol_type = other DNA
gaaaccatattgtcttccct

SEQ ID NO: 34463 - DNA, 20 bp, synthetic construct
  misc_feature 1..20: note = chemically synthesized
  source 1..20: mol_type = other DNA
tttgtcacctacagtacatt

SEQ ID NO: 34464 - DNA, 22 bp, synthetic construct
  misc_feature 1..22: note = chemically synthesized
  source 1..22: mol_type = other DNA
tccttctggcagggaacctggg

SEQ ID NO: 34465 - DNA, 22 bp, synthetic construct
  misc_feature 1..22: note = chemically synthesized
  source 1..22: mol_type = other DNA
ctggcagggaacctgggcagcg

SEQ ID NO: 34466 - DNA, 22 bp, synthetic construct
  misc_feature 1..22: note = chemically synthesized
  source 1..22: mol_type = other DNA
tggcagggaacctgggcagcga

SEQ ID NO: 34467 - DNA, 22 bp, synthetic construct
  misc_feature 1..22: note = chemically synthesized
  source 1..22: mol_type = other DNA
gcagggaacctgggcagcgagg

SEQ ID NO: 34468 - DNA, 22 bp, synthetic construct
  misc_feature 1..22: note = chemically synthesized
  source 1..22: mol_type = other DNA
ggcagcgaggatcctctgaaga

SEQ ID NO: 34469 - DNA, 22 bp, synthetic construct
  misc_feature 1..22: note = chemically synthesized
  source 1..22: mol_type = other DNA
tgaagaacactcattcccaaat

SEQ ID NO: 34470 - DNA, 22 bp, synthetic construct
  misc_feature 1..22: note = chemically synthesized
  source 1..22: mol_type = other DNA
aagaacactcattcccaaatcc

SEQ ID NO: 34471 - DNA, 22 bp, synthetic construct
  misc_feature 1..22: note = chemically synthesized
  source 1..22: mol_type = other DNA
attcccaaatccagaaatgtac

SEQ ID NO: 34472 - DNA, 22 bp, synthetic construct
  misc_feature 1..22: note = chemically synthesized
  source 1..22: mol_type = other DNA
ccaaatccagaaatgtactgta

SEQ ID NO: 34473 - DNA, 22 bp, synthetic construct
  misc_feature 1..22: note = chemically synthesized
  source 1..22: mol_type = other DNA
taggtgacaaagacacaaatgc

SEQ ID NO: 34474 - DNA, 22 bp, synthetic construct
  misc_feature 1..22: note = chemically synthesized
  source 1..22: mol_type = other DNA
gcaggatttaaagagcatttca

SEQ ID NO: 34475 - DNA, 22 bp, synthetic construct
  misc_feature 1..22: note = chemically synthesized
  source 1..22: mol_type = other DNA
aaagagcatttcagaaaattgg

SEQ ID NO: 34476 - DNA, 22 bp, synthetic construct
  misc_feature 1..22: note = chemically synthesized
  source 1..22: mol_type = other DNA
aagagcatttcagaaaattggc

SEQ ID NO: 34477 - DNA, 22 bp, synthetic construct
  misc_feature 1..22: note = chemically synthesized
  source 1..22: mol_type = other DNA
cagaaaattggcagtttactaa

SEQ ID NO: 34478 - DNA, 22 bp, synthetic construct
  misc_feature 1..22: note = chemically synthesized
  source 1..22: mol_type = other DNA
agaaaattggcagtttactaag

SEQ ID NO: 34479 - DNA, 22 bp, synthetic construct
  misc_feature 1..22: note = chemically synthesized
  source 1..22: mol_type = other DNA
gcagtttactaaggtaagaatt

SEQ ID NO: 34480 - DNA, 22 bp, synthetic construct
  misc_feature 1..22: note = chemically synthesized
  source 1..22: mol_type = other DNA
actaaggtaagaatttctatat

SEQ ID NO: 34481 - DNA, 22 bp, synthetic construct
  misc_feature 1..22: note = chemically synthesized
  source 1..22: mol_type = other DNA
ctaaggtaagaatttctatatg

SEQ ID NO: 34482 - DNA, 22 bp, synthetic construct
  misc_feature 1..22: note = chemically synthesized
  source 1..22: mol_type = other DNA
aggtaagaatttctatatggac

SEQ ID NO: 34483 - DNA, 22 bp, synthetic construct
  misc_feature 1..22: note = chemically synthesized
  source 1..22: mol_type = other DNA
ctatatggacctatgtttgtgt

SEQ ID NO: 34484 - DNA, 22 bp, synthetic construct
  misc_feature 1..22: note = chemically synthesized
  source 1..22: mol_type = other DNA
tatatggacctatgtttgtgta

SEQ ID NO: 34485 - DNA, 22 bp, synthetic construct
  misc_feature 1..22: note = chemically synthesized
  source 1..22: mol_type = other DNA
tatggacctatgtttgtgtatg

SEQ ID NO: 34486 - DNA, 22 bp, synthetic construct
  misc_feature 1..22: note = chemically synthesized
  source 1..22: mol_type = other DNA
tgtttgtgtatgatgttccaca

SEQ ID NO: 34487 - DNA, 22 bp, synthetic construct
  misc_feature 1..22: note = chemically synthesized
  source 1..22: mol_type = other DNA
gtgtatgatgttccacatataa

SEQ ID NO: 34488 - DNA, 22 bp, synthetic construct
  misc_feature 1..22: note = chemically synthesized
  source 1..22: mol_type = other DNA
tgtatgatgttccacatataat

SEQ ID NO: 34489 - DNA, 22 bp, synthetic construct
  misc_feature 1..22: note = chemically synthesized
  source 1..22: mol_type = other DNA
cacatataatatctttactgtg

SEQ ID NO: 34490 - DNA, 22 bp, synthetic construct
  misc_feature 1..22: note = chemically synthesized
  source 1..22: mol_type = other DNA
tactgtgtcttgacatatgaat

SEQ ID NO: 34491 - DNA, 22 bp, synthetic construct
  misc_feature 1..22: note = chemically synthesized
  source 1..22: mol_type = other DNA
actgtgtcttgacatatgaatc

SEQ ID NO: 34492 - DNA, 22 bp, synthetic construct
  misc_feature 1..22: note = chemically synthesized
  source 1..22: mol_type = other DNA
ctgtgtcttgacatatgaatca

SEQ ID NO: 34493 - DNA, 22 bp, synthetic construct
  misc_feature 1..22: note = chemically synthesized
  source 1..22: mol_type = other DNA
tgtcttgacatatgaatcattt

SEQ ID NO: 34494 - DNA, 22 bp, synthetic construct
  misc_feature 1..22: note = chemically synthesized
  source 1..22: mol_type = other DNA
gacatatgaatcatttagggaa

SEQ ID NO: 34495 - DNA, 22 bp, synthetic construct
  misc_feature 1..22: note = chemically synthesized
  source 1..22: mol_type = other DNA
acatatgaatcatttagggaag

SEQ ID NO: 34496 - DNA, 22 bp, synthetic construct
  misc_feature 1..22: note = chemically synthesized
  source 1..22: mol_type = other DNA
agggaagacaatatggtttctg

SEQ ID NO: 34497 - DNA, 22 bp, synthetic construct
  misc_feature 1..22: note = chemically synthesized
  source 1..22: mol_type = other DNA
gggaagacaatatggtttctgt

SEQ ID NO: 34498 - DNA, 22 bp, synthetic construct
  misc_feature 1..22: note = chemically synthesized
  source 1..22: mol_type = other DNA
ctgtgaattttaaagacttcta

SEQ ID NO: 34499 - DNA, 22 bp, synthetic construct
  misc_feature 1..22: note = chemically synthesized
  source 1..22: mol_type = other DNA
tgtgaattttaaagacttctaa

SEQ ID NO: 34500 - DNA, 22 bp, synthetic construct
  misc_feature 1..22: note = chemically synthesized
  source 1..22: mol_type = other DNA
tgaattttaaagacttctaatt

SEQ ID NO: 34501 - DNA, 22 bp, synthetic construct
  misc_feature 1..22: note = chemically synthesized
  source 1..22: mol_type = other DNA
taaagacttctaattaatcaga

SEQ ID NO: 34502 - DNA, 22 bp, synthetic construct
  misc_feature 1..22: note = chemically synthesized
  source 1..22: mol_type = other DNA
aaagacttctaattaatcagaa

SEQ ID NO: 34503 - DNA, 22 bp, synthetic construct
  misc_feature 1..22: note = chemically synthesized
  source 1..22: mol_type = other DNA
aagacttctaattaatcagaag

SEQ ID NO: 34504 - DNA, 22 bp, synthetic construct
  misc_feature 1..22: note = chemically synthesized
  source 1..22: mol_type = other DNA
ctaattaatcagaagagtgctg

SEQ ID NO: 34505 - DNA, 22 bp, synthetic construct
  misc_feature 1..22: note = chemically synthesized
  source 1..22: mol_type = other DNA
taattaatcagaagagtgctgg

SEQ ID NO: 34506 - DNA, 22 bp, synthetic construct
  misc_feature 1..22: note = chemically synthesized
  source 1..22: mol_type = other DNA
attaatcagaagagtgctggat

SEQ ID NO: 34507 - DNA, 22 bp, synthetic construct
  misc_feature 1..22: note = chemically synthesized
  source 1..22: mol_type = other DNA
atcagaagagtgctggatattg

SEQ ID NO: 34508 - DNA, 22 bp, synthetic construct
  misc_feature 1..22: note = chemically synthesized
  source 1..22: mol_type = other DNA
gatattgcatagacttctccac

SEQ ID NO: 34509 - DNA, 22 bp, synthetic construct
  misc_feature 1..22: note = chemically synthesized
  source 1..22: mol_type = other DNA
catagacttctccacccttagc

SEQ ID NO: 34510 - DNA, 22 bp, synthetic construct
  misc_feature 1..22: note = chemically synthesized
  source 1..22: mol_type = other DNA
ctccacccttagctgtacttag

SEQ ID NO: 34511 - DNA, 22 bp, synthetic construct
  misc_feature 1..22: note = chemically synthesized
  source 1..22: mol_type = other DNA
tccacccttagctgtacttagc

SEQ ID NO: 34512 - DNA, 22 bp, synthetic construct
  misc_feature 1..22: note = chemically synthesized
  source 1..22: mol_type = other DNA
cacccttagctgtacttagctg

SEQ ID NO: 34513 - DNA, 22 bp, synthetic construct
  misc_feature 1..22: note = chemically synthesized
  source 1..22: mol_type = other DNA
agctgtacttagctgatttgtg

SEQ ID NO: 34514 - DNA, 22 bp, synthetic construct
  misc_feature 1..22: note = chemically synthesized
  source 1..22: mol_type = other DNA
gctgtacttagctgatttgtgg

SEQ ID NO: 34515 - DNA, 22 bp, synthetic construct
  misc_feature 1..22: note = chemically synthesized
  source 1..22: mol_type = other DNA
tacttagctgatttgtgggtct

SEQ ID NO: 34516 - DNA, 22 bp, synthetic construct
  misc_feature 1..22: note = chemically synthesized
  source 1..22: mol_type = other DNA
agctgatttgtgggtctacact

SEQ ID NO: 34517 - DNA, 22 bp, synthetic construct
  misc_feature 1..22: note = chemically synthesized
  source 1..22: mol_type = other DNA
gctgatttgtgggtctacactg

SEQ ID NO: 34518 - DNA, 22 bp, synthetic construct
  misc_feature 1..22: note = chemically synthesized
  source 1..22: mol_type = other DNA
atttgtgggtctacactgtaac

SEQ ID NO: 34519 - DNA, 22 bp, synthetic construct
  misc_feature 1..22: note = chemically synthesized
  source 1..22: mol_type = other DNA
gtgggtctacactgtaacctcc

SEQ ID NO: 34520 - DNA, 22 bp, synthetic construct
  misc_feature 1..22: note = chemically synthesized
  source 1..22: mol_type = other DNA
tgggtctacactgtaacctccc

SEQ ID NO: 34521 - DNA, 22 bp, synthetic construct
  misc_feature 1..22: note = chemically synthesized
  source 1..22: mol_type = other DNA
cactgtaacctccctgaacttg

SEQ ID NO: 34522 - DNA, 22 bp, synthetic construct
  misc_feature 1..22: note = chemically synthesized
  source 1..22: mol_type = other DNA
taacctccctgaacttgagact

SEQ ID NO: 34523 - DNA, 22 bp, synthetic construct
  misc_feature 1..22: note = chemically synthesized
  source 1..22: mol_type = other DNA
cctgaacttgagactccatttc

SEQ ID NO: 34524 - DNA, 22 bp, synthetic construct
  misc_feature 1..22: note = chemically synthesized
  source 1..22: mol_type = other DNA
aacttgagactccatttccctt

SEQ ID NO: 34525 - DNA, 22 bp, synthetic construct
  misc_feature 1..22: note = chemically synthesized
  source 1..22: mol_type = other DNA
gagactccatttccctttcaaa

SEQ ID NO: 34526 - DNA, 22 bp, synthetic construct
  misc_feature 1..22: note = chemically synthesized
  source 1..22: mol_type = other DNA
agactccatttccctttcaaac

SEQ ID NO: 34527 - DNA, 22 bp, synthetic construct
  misc_feature 1..22: note = chemically synthesized
  source 1..22: mol_type = other DNA
catttccctttcaaactctggg

SEQ ID NO: 34528 - DNA, 22 bp, synthetic construct
  misc_feature 1..22: note = chemically synthesized
  source 1..22: mol_type = other DNA
ccctttcaaactctgggaaaaa

SEQ ID NO: 34529 - DNA, 22 bp, synthetic construct
  misc_feature 1..22: note = chemically synthesized
  source 1..22: mol_type = other DNA
cctttcaaactctgggaaaaaa

SEQ ID NO: 34530 - DNA, 22 bp, synthetic construct
  misc_feature 1..22: note = chemically synthesized
  source 1..22: mol_type = other DNA
tcaaactctgggaaaaaaaaga

SEQ ID NO: 34531 - DNA, 22 bp, synthetic construct
  misc_feature 1..22: note = chemically synthesized
  source 1..22: mol_type = other DNA
caaactctgggaaaaaaaagaa

SEQ ID NO: 34532 - DNA, 22 bp, synthetic construct
  misc_feature 1..22: note = chemically synthesized
  source 1..22: mol_type = other DNA
aaactctgggaaaaaaaagaaa

SEQ ID NO: 34533 - DNA, 22 bp, synthetic construct
  misc_feature 1..22: note = chemically synthesized
  source 1..22: mol_type = other DNA
tgggaaaaaaaagaaaaagcat

SEQ ID NO: 34534 - DNA, 22 bp, synthetic construct
  misc_feature 1..22: note = chemically synthesized
  source 1..22: mol_type = other DNA
ggaaaaaaaagaaaaagcatct

SEQ ID NO: 34535 - DNA, 22 bp, synthetic construct
  misc_feature 1..22: note = chemically synthesized
  source 1..22: mol_type = other DNA
tgaagaggtgtgtgggtccaac

SEQ ID NO: 34536 - DNA, 22 bp, synthetic construct
  misc_feature 1..22: note = chemically synthesized
  source 1..22: mol_type = other DNA
acagcaaaaccctctccaaact

SEQ ID NO: 34537 - DNA, 22 bp, synthetic construct
  misc_feature 1..22: note = chemically synthesized
  source 1..22: mol_type = other DNA
tccaaactagccttgctgtagg

SEQ ID NO: 34538 - DNA, 22 bp, synthetic construct
  misc_feature 1..22: note = chemically synthesized
  source 1..22: mol_type = other DNA
caaactagccttgctgtaggca

SEQ ID NO: 34539 - DNA, 22 bp, synthetic construct
  misc_feature 1..22: note = chemically synthesized
  source 1..22: mol_type = other DNA
gccttgctgtaggcagaagcct

SEQ ID NO: 34540 - DNA, 22 bp, synthetic construct
  misc_feature 1..22: note = chemically synthesized
  source 1..22: mol_type = other DNA
gctgtaggcagaagcctctgct

SEQ ID NO: 34541 - DNA, 22 bp, synthetic construct
  misc_feature 1..22: note = chemically synthesized
  source 1..22: mol_type = other DNA
ctgtaggcagaagcctctgcta

SEQ ID NO: 34542 - DNA, 22 bp, synthetic construct
  misc_feature 1..22: note = chemically synthesized
  source 1..22: mol_type = other DNA
taggcagaagcctctgctatct

SEQ ID NO: 34543 - DNA, 22 bp, synthetic construct
  misc_feature 1..22: note = chemically synthesized
  source 1..22: mol_type = other DNA
tgctatctgcctcatctatgga

SEQ ID NO: 34544 - DNA, 22 bp, synthetic construct
  misc_feature 1..22: note = chemically synthesized
  source 1..22: mol_type = other DNA
ctatctgcctcatctatggaac

SEQ ID NO: 34545 - DNA, 22 bp, synthetic construct
  misc_feature 1..22: note = chemically synthesized
  source 1..22: mol_type = other DNA
tctgcctcatctatggaacaca

SEQ ID NO: 34546 - DNA, 22 bp, synthetic construct
  misc_feature 1..22: note = chemically synthesized
  source 1..22: mol_type = other DNA
cctcatctatggaacacatcta

SEQ ID NO: 34547 - DNA, 22 bp, synthetic construct
  misc_feature 1..22: note = chemically synthesized
  source 1..22: mol_type = other DNA
atctatggaacacatctatatt

SEQ ID NO: 34548 - DNA, 22 bp, synthetic construct
  misc_feature 1..22: note = chemically synthesized
  source 1..22: mol_type = other DNA
tggaacacatctatatttgtgc

SEQ ID NO: 34549 - DNA, 22 bp, synthetic construct
  misc_feature 1..22: note = chemically synthesized
  source 1..22: mol_type = other DNA
tatttgtgcgaatgcatgaaaa

SEQ ID NO: 34550 - DNA, 22 bp, synthetic construct
  misc_feature 1..22: note = chemically synthesized
  source 1..22: mol_type = other DNA
gtgcgaatgcatgaaaataaag

SEQ ID NO: 34551 - DNA, 22 bp, synthetic construct
  misc_feature 1..22: note = chemically synthesized
  source 1..22: mol_type = other DNA
tgcgaatgcatgaaaataaagt

SEQ ID NO: 34552 - DNA, 22 bp, synthetic construct
  misc_feature 1..22: note = chemically synthesized
  source 1..22: mol_type = other DNA
aaagatatgggtggccttcagg

SEQ ID NO: 34553 - DNA, 22 bp, synthetic construct
  misc_feature 1..22: note = chemically synthesized
  source 1..22: mol_type = other DNA
aagatatgggtggccttcagga

SEQ ID NO: 34554 - DNA, 22 bp, synthetic construct
  misc_feature 1..22: note = chemically synthesized
  source 1..22: mol_type = other DNA
caggagacacgccagcccagca

SEQ ID NO: 34555 - DNA, 22 bp, synthetic construct
  misc_feature 1..22: note = chemically synthesized
  source 1..22: mol_type = other DNA
aggagacacgccagcccagcat

SEQ ID NO: 34556 - DNA, 22 bp, synthetic construct
  misc_feature 1..22: note = chemically synthesized
  source 1..22: mol_type = other DNA
ttcacaatgacacaatggaacc

SEQ ID NO: 34557 - DNA, 22 bp, synthetic construct
  misc_feature 1..22: note = chemically synthesized
  source 1..22: mol_type = other DNA
tcacaatgacacaatggaacct

SEQ ID NO: 34558 - DNA, 22 bp, synthetic construct
  misc_feature 1..22: note = chemically synthesized
  source 1..22: mol_type = other DNA
cacaatgacacaatggaaccta

SEQ ID NO: 34559 - DNA, 22 bp, synthetic construct
  misc_feature 1..22: note = chemically synthesized
  source 1..22: mol_type = other DNA
acaatgacacaatggaacctac

SEQ ID NO: 34560 - DNA, 22 bp, synthetic construct
  misc_feature 1..22: note = chemically synthesized
  source 1..22: mol_type = other DNA
ctctgattgccatctcttcact

SEQ ID NO: 34561 - DNA, 22 bp, synthetic construct
  misc_feature 1..22: note = chemically synthesized
  source 1..22: mol_type = other DNA
tgattgccatctcttcacttta

SEQ ID NO: 34562 - DNA, 22 bp, synthetic construct
  misc_feature 1..22: note = chemically synthesized
  source 1..22: mol_type = other DNA
attgccatctcttcactttaca

SEQ ID NO: 34563 - DNA, 22 bp, synthetic construct
  misc_feature 1..22: note = chemically synthesized
  source 1..22: mol_type = other DNA
ccatctcttcactttacaccca

SEQ ID NO: 34564 - DNA, 22 bp, synthetic construct
  misc_feature 1..22: note = chemically synthesized
  source 1..22: mol_type = other DNA
ttcactttacacccagaggaaa

SEQ ID NO: 34565 - DNA, 22 bp, synthetic construct
  misc_feature 1..22: note = chemically synthesized
  source 1..22: mol_type = other DNA
cactttacacccagaggaaaaa

SEQ ID NO: 34566 - DNA, 22 bp, synthetic construct
  misc_feature 1..22: note = chemically synthesized
  source 1..22: mol_type = other DNA
actttacacccagaggaaaaaa

SEQ ID NO: 34567 - DNA, 22 bp, synthetic construct
  misc_feature 1..22: note = chemically synthesized
  source 1..22: mol_type = other DNA
tacacccagaggaaaaaaaaag

SEQ ID NO: 34568 - DNA, 22 bp, synthetic construct
  misc_feature 1..22: note = chemically synthesized
  source 1..22: mol_type = other DNA
acacccagaggaaaaaaaaagt

SEQ ID NO: 34569 - DNA, 22 bp, synthetic construct
  misc_feature 1..22: note = chemically synthesized
  source 1..22: mol_type = other DNA
cacccagaggaaaaaaaaagtt

SEQ ID NO: 34570 - DNA, 22 bp, synthetic construct
  misc_feature 1..22: note = chemically synthesized
  source 1..22: mol_type = other DNA
aagggtttctcaaccaggtaag

SEQ ID NO: 34571 - DNA, 22 bp, synthetic construct
  misc_feature 1..22: note = chemically synthesized
  source 1..22: mol_type = other DNA
ctcaaccaggtaagtcatggag

SEQ ID NO: 34572 - DNA, 22 bp, synthetic construct
  misc_feature 1..22: note = chemically synthesized
  source 1..22: mol_type = other DNA
tcaaccaggtaagtcatggaga

SEQ ID NO: 34573 - DNA, 22 bp, synthetic construct
  misc_feature 1..22: note = chemically synthesized
  source 1..22: mol_type = other DNA
aaccaggtaagtcatggagagc

SEQ ID NO: 34574 - DNA, 22 bp, synthetic construct
  misc_feature 1..22: note = chemically synthesized
  source 1..22: mol_type = other DNA
aaacttactcttgcaacactca

SEQ ID NO: 34575 - DNA, 22 bp, synthetic construct
  misc_feature 1..22: note = chemically synthesized
  source 1..22: mol_type = other DNA
actcttgcaacactcaacacac

SEQ ID NO: 34576 - DNA, 22 bp, synthetic construct
  misc_feature 1..22: note = chemically synthesized
  source 1..22: mol_type = other DNA
ctcttgcaacactcaacacact

SEQ ID NO: 34577 - DNA, 22 bp, synthetic construct
  misc_feature 1..22: note = chemically synthesized
  source 1..22: mol_type = other DNA
ttgcaacactcaacacacttgt

SEQ ID NO: 34578 - DNA, 22 bp, synthetic construct
  misc_feature 1..22: note = chemically synthesized
  source 1..22: mol_type = other DNA
gcaacactcaacacacttgtga

SEQ ID NO: 34579 - DNA, 22 bp, synthetic construct
  misc_feature 1..22: note = chemically synthesized
  source 1..22: mol_type = other DNA
caacactcaacacacttgtgag

SEQ ID NO: 34580 - DNA, 22 bp, synthetic construct
  misc_feature 1..22: note = chemically synthesized
  source 1..22: mol_type = other DNA
aacacacttgtgagttcttgtg

SEQ ID NO: 34581 - DNA, 22 bp, synthetic construct
  misc_feature 1..22: note = chemically synthesized
  source 1..22: mol_type = other DNA
gtgagttcttgtgcactgtctg

SEQ ID NO: 34582 - DNA, 22 bp, synthetic construct
  misc_feature 1..22: note = chemically synthesized
  source 1..22: mol_type = other DNA
tgagttcttgtgcactgtctgg

SEQ ID NO: 34583 - DNA, 22 bp, synthetic construct
  misc_feature 1..22: note = chemically synthesized
  source 1..22: mol_type = other DNA
ttgtgcactgtctggctttttt

SEQ ID NO: 34584 - DNA, 22 bp, synthetic construct
  misc_feature 1..22: note = chemically synthesized
  source 1..22: mol_type = other DNA
gtgcactgtctggcttttttgc

SEQ ID NO: 34585 - DNA, 22 bp, synthetic construct
  misc_feature 1..22: note = chemically synthesized
  source 1..22: mol_type = other DNA
tgcactgtctggcttttttgct

SEQ ID NO: 34586 - DNA, 22 bp, synthetic construct
  misc_feature 1..22: note = chemically synthesized
  source 1..22: mol_type = other DNA
tctggcttttttgctagcctat

SEQ ID NO: 34587 - DNA, 22 bp, synthetic construct
  misc_feature 1..22: note = chemically synthesized
  source 1..22: mol_type = other DNA
gcttttttgctagcctataagc

SEQ ID NO: 34588 - DNA, 22 bp, synthetic construct
  misc_feature 1..22: note = chemically synthesized
  source 1..22: mol_type = other DNA
ttttgctagcctataagctgca

SEQ ID NO: 34589 - DNA, 22 bp, synthetic construct
  misc_feature 1..22: note = chemically synthesized
  source 1..22: mol_type = other DNA
tttgctagcctataagctgcat

SEQ ID NO: 34590 - DNA, 22 bp, synthetic construct
  misc_feature 1..22: note = chemically synthesized
  source 1..22: mol_type = other DNA
ttgctagcctataagctgcatg

SEQ ID NO: 34591 - DNA, 22 bp, synthetic construct
  misc_feature 1..22: note = chemically synthesized
  source 1..22: mol_type = other DNA
tgctagcctataagctgcatga

SEQ ID NO: 34592 - DNA, 22 bp, synthetic construct
  misc_feature 1..22: note = chemically synthesized
  source 1..22: mol_type = other DNA
gctagcctataagctgcatgaa

SEQ ID NO: 34593 - DNA, 22 bp, synthetic construct
  misc_feature 1..22: note = chemically synthesized
  source 1..22: mol_type = other DNA
ctagcctataagctgcatgaag

SEQ ID NO: 34594 - DNA, 22 bp, synthetic construct
  misc_feature 1..22: note = chemically synthesized
  source 1..22: mol_type = other DNA
gcctataagctgcatgaaggct

SEQ ID NO: 34595 - DNA, 22 bp, synthetic construct
  misc_feature 1..22: note = chemically synthesized
  source 1..22: mol_type = other DNA
taagctgcatgaaggctgagac

SEQ ID NO: 34596 - DNA, 22 bp, synthetic construct
  misc_feature 1..22: note = chemically synthesized
  source 1..22: mol_type = other DNA
catgaaggctgagactatggca

SEQ ID NO: 34597 - DNA, 22 bp, synthetic construct
  misc_feature 1..22: note = chemically synthesized
  source 1..22: mol_type = other DNA
agactatggcagtcttggctca

SEQ ID NO: 34598 - DNA, 22 bp, synthetic construct
  misc_feature 1..22: note = chemically synthesized
  source 1..22: mol_type = other DNA
tggcagtcttggctcatagaag

SEQ ID NO: 34599 - DNA, 22 bp, synthetic construct
  misc_feature 1..22: note = chemically synthesized
  source 1..22: mol_type = other DNA
ggctcatagaaggtaatcagtg

SEQ ID NO: 34600 - DNA, 22 bp, synthetic construct
  misc_feature 1..22: note = chemically synthesized
  source 1..22: mol_type = other DNA
gctcatagaaggtaatcagtgg

SEQ ID NO: 34601 - DNA, 22 bp, synthetic construct
  misc_feature 1..22: note = chemically synthesized
  source 1..22: mol_type = other DNA
atagaaggtaatcagtggaaat

SEQ ID NO: 34602 - DNA, 22 bp, synthetic construct
  misc_feature 1..22: note = chemically synthesized
  source 1..22: mol_type = other DNA
gtcgattgattgaatttttccc

SEQ ID NO: 34603 - DNA, 22 bp, synthetic construct
  misc_feature 1..22: note = chemically synthesized
  source 1..22: mol_type = other DNA
tcgattgattgaatttttccct

SEQ ID NO: 34604 - DNA, 22 bp, synthetic construct
  misc_feature 1..22: note = chemically synthesized
  source 1..22: mol_type = other DNA
attgaatttttcccttaaagcc

SEQ ID NO: 34605 - DNA, 22 bp, synthetic construct
  misc_feature 1..22: note = chemically synthesized
  source 1..22: mol_type = other DNA
aatttttcccttaaagccaatt

SEQ ID NO: 34606 - DNA, 22 bp, synthetic construct
  misc_feature 1..22: note = chemically synthesized
  source 1..22: mol_type = other DNA
ttcccttaaagccaattctaat

SEQ ID NO: 34607 - DNA, 22 bp, synthetic construct
  misc_feature 1..22: note = chemically synthesized
  source 1..22: mol_type = other DNA
tcccttaaagccaattctaatg

SEQ ID NO: 34608 - DNA, 22 bp, synthetic construct
  misc_feature 1..22: note = chemically synthesized
  source 1..22: mol_type = other DNA
cccttaaagccaattctaatgt

SEQ ID NO: 34609 - DNA, 22 bp, synthetic construct
  misc_feature 1..22: note = chemically synthesized
  source 1..22: mol_type = other DNA
ccttaaagccaattctaatgta

SEQ ID NO: 34610 - DNA, 22 bp, synthetic construct
  misc_feature 1..22: note = chemically synthesized
  source 1..22: mol_type = other DNA
aaagccaattctaatgtaagtg

SEQ ID NO: 34611 - DNA, 22 bp, synthetic construct
  misc_feature 1..22: note = chemically synthesized
  source 1..22: mol_type = other DNA
aagccaattctaatgtaagtgt

SEQ ID NO: 34612 - DNA, 22 bp, synthetic construct
  misc_feature 1..22: note = chemically synthesized
  source 1..22: mol_type = other DNA
taatgtaagtgtatgtgtgctg

SEQ ID NO: 34613 - DNA, 22 bp, synthetic construct
  misc_feature 1..22: note = chemically synthesized
  source 1..22: mol_type = other DNA
atgtaagtgtatgtgtgctgct

SEQ ID NO: 34614 - DNA, 22 bp, synthetic construct
  misc_feature 1..22: note = chemically synthesized
  source 1..22: mol_type = other DNA
ctgtaaatagggttagaaccct

SEQ ID NO: 34615 - DNA, 22 bp, synthetic construct
  misc_feature 1..22: note = chemically synthesized
  source 1..22: mol_type = other DNA
taaatagggttagaaccctttt

SEQ ID NO: 34616 - DNA, 22 bp, synthetic construct
  misc_feature 1..22: note = chemically synthesized
  source 1..22: mol_type = other DNA
gaaccctttttgctctaactta

SEQ ID NO: 34617 - DNA, 22 bp, synthetic construct
  misc_feature 1..22: note = chemically synthesized
  source 1..22: mol_type = other DNA
tttgctctaacttaaataccaa

SEQ ID NO: 34618 - DNA, 22 bp, synthetic construct
  misc_feature 1..22: note = chemically synthesized
  source 1..22: mol_type = other DNA
ttgctctaacttaaataccaat

SEQ ID NO: 34619 - DNA, 22 bp, synthetic construct
  misc_feature 1..22: note = chemically synthesized
  source 1..22: mol_type = other DNA
tgctctaacttaaataccaatt

SEQ ID NO: 34620 - DNA, 22 bp, synthetic construct
  misc_feature 1..22: note = chemically synthesized
  source 1..22: mol_type = other DNA
gctctaacttaaataccaattg

SEQ ID NO: 34621 - DNA, 22 bp, synthetic construct
  misc_feature 1..22: note = chemically synthesized
  source 1..22: mol_type = other DNA
ctctaacttaaataccaattga

SEQ ID NO: 34622 - DNA, 22 bp, synthetic construct
  misc_feature 1..22: note = chemically synthesized
  source 1..22: mol_type = other DNA
taacttaaataccaattgattt

SEQ ID NO: 34623 - DNA, 22 bp, synthetic construct
  misc_feature 1..22: note = chemically synthesized
  source 1..22: mol_type = other DNA
acttaaataccaattgatttta

SEQ ID NO: 34624 - DNA, 22 bp, synthetic construct
  misc_feature 1..22: note = chemically synthesized
  source 1..22: mol_type = other DNA
aaataccaattgattttagccc

SEQ ID NO: 34625 - DNA, 22 bp, synthetic construct
  misc_feature 1..22: note = chemically synthesized
  source 1..22: mol_type = other DNA
aataccaattgattttagccca

SEQ ID NO: 34626 - DNA, 22 bp, synthetic construct
  misc_feature 1..22: note = chemically synthesized
  source 1..22: mol_type = other DNA
attttagcccaggataatgaaa

SEQ ID NO: 34627 - DNA, 22 bp, synthetic construct
  misc_feature 1..22: note = chemically synthesized
  source 1..22: mol_type = other DNA
tagcccaggataatgaaaatgc

SEQ ID NO: 34628 - DNA, 22 bp, synthetic construct
  misc_feature 1..22: note = chemically synthesized
  source 1..22: mol_type = other DNA
agcccaggataatgaaaatgca

SEQ ID NO: 34629 - DNA, 22 bp, synthetic construct
  misc_feature 1..22: note = chemically synthesized
  source 1..22: mol_type = other DNA
gcccaggataatgaaaatgcag

SEQ ID NO: 34630 - DNA, 22 bp, synthetic construct
  misc_feature 1..22: note = chemically synthesized
  source 1..22: mol_type = other DNA
gctcagcaagcgaaatgtaacc

SEQ ID NO: 34631 - DNA, 22 bp, synthetic construct
  misc_feature 1..22: note = chemically synthesized
  source 1..22: mol_type = other DNA
ctcagcaagcgaaatgtaacca

SEQ ID NO: 34632 - DNA, 22 bp, synthetic construct
  misc_feature 1..22: note = chemically synthesized
  source 1..22: mol_type = other DNA
agcaagcgaaatgtaaccatct

SEQ ID NO: 34633 - DNA, 22 bp, synthetic construct
  misc_feature 1..22: note = chemically synthesized
  source 1..22: mol_type = other DNA
aacacagctccttaagagatat

SEQ ID NO: 34634 - DNA, 22 bp, synthetic construct
  misc_feature 1..22: note = chemically synthesized
  source 1..22: mol_type = other DNA
cttaagagatataagaagggtg

SEQ ID NO: 34635 - DNA, 22 bp, synthetic construct
  misc_feature 1..22: note = chemically synthesized
  source 1..22: mol_type = other DNA
aagagatataagaagggtggaa

SEQ ID NO: 34636 - DNA, 22 bp, synthetic construct
  misc_feature 1..22: note = chemically synthesized
  source 1..22: mol_type = other DNA
agagatataagaagggtggaag

SEQ ID NO: 34637 - DNA, 22 bp, synthetic construct
  misc_feature 1..22: note = chemically synthesized
  source 1..22: mol_type = other DNA
cagagttctcagttgttgcggg

SEQ ID NO: 34638 - DNA, 22 bp, synthetic construct
  misc_feature 1..22: note = chemically synthesized
  source 1..22: mol_type = other DNA
tcagttgttgcgggaagtctgg

SEQ ID NO: 34639 - DNA, 22 bp, synthetic construct
  misc_feature 1..22: note = chemically synthesized
  source 1..22: mol_type = other DNA
agttgttgcgggaagtctggga

SEQ ID NO: 34640 - DNA, 22 bp, synthetic construct
  misc_feature 1..22: note = chemically synthesized
  source 1..22: mol_type = other DNA
ttgcgggaagtctgggactcca

SEQ ID NO: 34641 - DNA, 22 bp, synthetic construct
  misc_feature 1..22: note = chemically synthesized
  source 1..22: mol_type = other DNA
cgggaagtctgggactccaaac

SEQ ID NO: 34642 - DNA, 22 bp, synthetic construct
  misc_feature 1..22: note = chemically synthesized
  source 1..22: mol_type = other DNA
ggactccaaacggagggatcag

SEQ ID NO: 34643 - DNA, 22 bp, synthetic construct
  misc_feature 1..22: note = chemically synthesized
  source 1..22: mol_type = other DNA
caaacggagggatcagctgaag

SEQ ID NO: 34644 - DNA, 22 bp, synthetic construct
  misc_feature 1..22: note = chemically synthesized
  source 1..22: mol_type = other DNA
aagccatggcagaagttcgtgg

SEQ ID NO: 34645 - DNA, 22 bp, synthetic construct
  misc_feature 1..22: note = chemically synthesized
  source 1..22: mol_type = other DNA
gtggattgtgaagatttcatgg

SEQ ID NO: 34646 - DNA, 22 bp, synthetic construct
  misc_feature 1..22: note = chemically synthesized
  source 1..22: mol_type = other DNA
tgaagatttcatggacatttat

SEQ ID NO: 34647 - DNA, 22 bp, synthetic construct
  misc_feature 1..22: note = chemically synthesized
  source 1..22: mol_type = other DNA
catggacatttattagttcccc

SEQ ID NO: 34648 - DNA, 22 bp, synthetic construct
  misc_feature 1..22: note = chemically synthesized
  source 1..22: mol_type = other DNA
atggacatttattagttcccca

SEQ ID NO: 34649 - DNA, 22 bp, synthetic construct
  misc_feature 1..22: note = chemically synthesized
  source 1..22: mol_type = other DNA
attagttccccaaattaatact

SEQ ID NO: 34650 - DNA, 22 bp, synthetic construct
  misc_feature 1..22: note = chemically synthesized
  source 1..22: mol_type = other DNA
ttagttccccaaattaatactt

SEQ ID NO: 34651 - DNA, 22 bp, synthetic construct
  misc_feature 1..22: note = chemically synthesized
  source 1..22: mol_type = other DNA
gttccccaaattaatacttttg

SEQ ID NO: 34652 - DNA, 22 bp, synthetic construct
  misc_feature 1..22: note = chemically synthesized
  source 1..22: mol_type = other DNA
cccaaattaatacttttgtaat

SEQ ID NO: 34653 - DNA, 22 bp, synthetic construct
  misc_feature 1..22: note = chemically synthesized
  source 1..22: mol_type = other DNA
atacttttgtaatttcttatgc

SEQ ID NO: 34654 - DNA, 22 bp, synthetic construct
  misc_feature 1..22: note = chemically synthesized
  source 1..22: mol_type = other DNA
ttgtaatttcttatgcctgtct

SEQ ID NO: 34655 - DNA, 22 bp, synthetic construct
  misc_feature 1..22: note = chemically synthesized
  source 1..22: mol_type = other DNA
tgtaatttcttatgcctgtctt

SEQ ID NO: 34656 - DNA, 22 bp, synthetic construct
  misc_feature 1..22: note = chemically synthesized
  source 1..22: mol_type = other DNA
gtaatttcttatgcctgtcttt

SEQ ID NO: 34657 - DNA, 22 bp, synthetic construct
  misc_feature 1..22: note = chemically synthesized
  source 1..22: mol_type = other DNA
taatttcttatgcctgtcttta

SEQ ID NO: 34658 - DNA, 22 bp, synthetic construct
  misc_feature 1..22: note = chemically synthesized
  source 1..22: mol_type = other DNA
cttatgcctgtctttactgcaa

SEQ ID NO: 34659 - DNA, 22 bp, synthetic construct
  misc_feature 1..22: note = chemically synthesized
  source 1..22: mol_type = other DNA
ttatgcctgtctttactgcaat

SEQ ID NO: 34660 - DNA, 22 bp, synthetic construct
  misc_feature 1..22: note = chemically synthesized
  source 1..22: mol_type = other DNA
atgcctgtctttactgcaatct

SEQ ID NO: 34661 - DNA, 22 bp, synthetic construct
  misc_feature 1..22: note = chemically synthesized
  source 1..22: mol_type = other DNA
tgcctgtctttactgcaatctc

SEQ ID NO: 34662 - DNA, 22 bp, synthetic construct
  misc_feature 1..22: note = chemically synthesized
  source 1..22: mol_type = other DNA
tctttactgcaatctctaaaca

SEQ ID NO: 34663 - DNA, 22 bp, synthetic construct
  misc_feature 1..22: note = chemically synthesized
  source 1..22: mol_type = other DNA
tactgcaatctctaaacataaa

SEQ ID NO: 34664 - DNA, 22 bp, synthetic construct
  misc_feature 1..22: note = chemically synthesized
  source 1..22: mol_type = other DNA
actgcaatctctaaacataaat

SEQ ID NO: 34665 - DNA, 22 bp, synthetic construct
  misc_feature 1..22: note = chemically synthesized
  source 1..22: mol_type = other DNA
ctgcaatctctaaacataaatt

SEQ ID NO: 34666 - DNA, 22 bp, synthetic construct
  misc_feature 1..22: note = chemically synthesized
  source 1..22: mol_type = other DNA
caatctctaaacataaattgta

SEQ ID NO: 34667 - DNA, 22 bp, synthetic construct
  misc_feature 1..22: note = chemically synthesized
  source 1..22: mol_type = other DNA
taaacataaattgtaaagattt

SEQ ID NO: 34668 - DNA, 22 bp, synthetic construct
  misc_feature 1..22: note = chemically synthesized
  source 1..22: mol_type = other DNA
aacataaattgtaaagatttca

SEQ ID NO: 34669 - DNA, 22 bp, synthetic construct
  misc_feature 1..22: note = chemically synthesized
  source 1..22: mol_type = other DNA
taaagatttcatggacacttat

SEQ ID NO: 34670 - DNA, 22 bp, synthetic construct
  misc_feature 1..22: note = chemically synthesized
  source 1..22: mol_type = other DNA
catggacacttatcacttcccc

SEQ ID NO: 34671 - DNA, 22 bp, synthetic construct
  misc_feature 1..22: note = chemically synthesized
  source 1..22: mol_type = other DNA
atggacacttatcacttcccca

SEQ ID NO: 34672 - DNA, 22 bp, synthetic construct
  misc_feature 1..22: note = chemically synthesized
  source 1..22: mol_type = other DNA
atcacttccccagtcaatatcc

SEQ ID NO: 34673 - DNA, 22 bp, synthetic construct
  misc_feature 1..22: note = chemically synthesized
  source 1..22: mol_type = other DNA
tcacttccccagtcaatatcct

SEQ ID NO: 34674 - DNA, 22 bp, synthetic construct
  misc_feature 1..22: note = chemically synthesized
  source 1..22: mol_type = other DNA
ccccagtcaatatccttgtgat

SEQ ID NO: 34675 - DNA, 22 bp, synthetic construct
  misc_feature 1..22: note = chemically synthesized
  source 1..22: mol_type = other DNA
cccagtcaatatccttgtgatt

SEQ ID NO: 34676 - DNA, 22 bp, synthetic construct
  misc_feature 1..22: note = chemically synthesized
  source 1..22: mol_type = other DNA
gtgatttatgcctgtctttact

SEQ ID NO: 34677 - DNA, 22 bp, synthetic construct
  misc_feature 1..22: note = chemically synthesized
  source 1..22: mol_type = other DNA
tgatttatgcctgtctttactt

SEQ ID NO: 34678 - DNA, 22 bp, synthetic construct
  misc_feature 1..22: note = chemically synthesized
  source 1..22: mol_type = other DNA
atgcctgtctttactttaatct

SEQ ID NO: 34679 - DNA, 22 bp, synthetic construct
  misc_feature 1..22: note = chemically synthesized
  source 1..22: mol_type = other DNA
tgcctgtctttactttaatctc

SEQ ID NO: 34680 - DNA, 22 bp, synthetic construct
  misc_feature 1..22: note = chemically synthesized
  source 1..22: mol_type = other DNA
tctttactttaatctcttaatc

SEQ ID NO: 34681 - DNA, 22 bp, synthetic construct
  misc_feature 1..22: note = chemically synthesized
  source 1..22: mol_type = other DNA
tactttaatctcttaatcctgt

SEQ ID NO: 34682 - DNA, 22 bp, synthetic construct
  misc_feature 1..22: note = chemically synthesized
  source 1..22: mol_type = other DNA
actttaatctcttaatcctgtc

SEQ ID NO: 34683 - DNA, 22 bp, synthetic construct
  misc_feature 1..22: note = chemically synthesized
  source 1..22: mol_type = other DNA
ctttaatctcttaatcctgtca

SEQ ID NO: 34684 - DNA, 22 bp, synthetic construct
  misc_feature 1..22: note = chemically synthesized
  source 1..22: mol_type = other DNA
taatctcttaatcctgtcagct

SEQ ID NO: 34685 - DNA, 22 bp, synthetic construct
  misc_feature 1..22: note = chemically synthesized
  source 1..22: mol_type = other DNA
aatctcttaatcctgtcagctg

SEQ ID NO: 34686 - DNA, 22 bp, synthetic construct
  misc_feature 1..22: note = chemically synthesized
  source 1..22: mol_type = other DNA
atctcttaatcctgtcagctga

SEQ ID NO: 34687 - DNA, 22 bp, synthetic construct
  misc_feature 1..22: note = chemically synthesized
  source 1..22: mol_type = other DNA
ttaatcctgtcagctgaggagg

SEQ ID NO: 34688 - DNA, 22 bp, synthetic construct
  misc_feature 1..22: note = chemically synthesized
  source 1..22: mol_type = other DNA
aatcctgtcagctgaggaggat

SEQ ID NO: 34689 - DNA, 22 bp, synthetic construct
  misc_feature 1..22: note = chemically synthesized
  source 1..22: mol_type = other DNA
atcctgtcagctgaggaggatg

SEQ ID NO: 34690 - DNA, 22 bp, synthetic construct
  misc_feature 1..22: note = chemically synthesized
  source 1..22: mol_type = other DNA
tcagctgaggaggatgtatatt

SEQ ID NO: 34691 - DNA, 22 bp, synthetic construct
  misc_feature 1..22: note = chemically synthesized
  source 1..22: mol_type = other DNA
aggaggatgtatattgcctcag

SEQ ID NO: 34692 - DNA, 22 bp, synthetic construct
  misc_feature 1..22: note = chemically synthesized
  source 1..22: mol_type = other DNA
cctcaggaccctgtaataattg

SEQ ID NO: 34693 - DNA, 22 bp, synthetic construct
  misc_feature 1..22: note = chemically synthesized
  source 1..22: mol_type = other DNA
aggaccctgtaataattgcatt

SEQ ID NO: 34694 - DNA, 22 bp, synthetic construct
  misc_feature 1..22: note = chemically synthesized
  source 1..22: mol_type = other DNA
taataattgcattaactgcaca

SEQ ID NO: 34695 - DNA, 22 bp, synthetic construct
  misc_feature 1..22: note = chemically synthesized
  source 1..22: mol_type = other DNA
cattaactgcacaaattgtaca

SEQ ID NO: 34696 - DNA, 22 bp, synthetic construct
  misc_feature 1..22: note = chemically synthesized
  source 1..22: mol_type = other DNA
actgcacaaattgtacagcatg

SEQ ID NO: 34697 - DNA, 22 bp, synthetic construct
  misc_feature 1..22: note = chemically synthesized
  source 1..22: mol_type = other DNA
cacaaattgtacagcatgtgtg

SEQ ID NO: 34698 - DNA, 22 bp, synthetic construct
  misc_feature 1..22: note = chemically synthesized
  source 1..22: mol_type = other DNA
tacagcatgtgtgtttgagcaa

SEQ ID NO: 34699 - DNA, 22 bp, synthetic construct
  misc_feature 1..22: note = chemically synthesized
  source 1..22: mol_type = other DNA
gagcaacatgaaatgtggacac

SEQ ID NO: 34700 - DNA, 22 bp, synthetic construct
  misc_feature 1..22: note = chemically synthesized
  source 1..22: mol_type = other DNA
agcaacatgaaatgtggacacc

SEQ ID NO: 34701 - DNA, 22 bp, synthetic construct
  misc_feature 1..22: note = chemically synthesized
  source 1..22: mol_type = other DNA
gaaaaaagaacaggataacagc

SEQ ID NO: 34702 - DNA, 22 bp, synthetic construct
  misc_feature 1..22: note = chemically synthesized
  source 1..22: mol_type = other DNA
aaaaaagaacaggataacagca

SEQ ID NO: 34703 - DNA, 22 bp, synthetic construct
  misc_feature 1..22: note = chemically synthesized
  source 1..22: mol_type = other DNA
ttcagggaataagagagataac

SEQ ID NO: 34704 - DNA, 22 bp, synthetic construct
  misc_feature 1..22: note = chemically synthesized
  source 1..22: mol_type = other DNA
agggaataagagagataacctt

SEQ ID NO: 34705 - DNA, 22 bp, synthetic construct
  misc_feature 1..22: note = chemically synthesized
  source 1..22: mol_type = other DNA
aaactctgactgctggtgagcc

SEQ ID NO: 34706 - DNA, 22 bp, synthetic construct
  misc_feature 1..22: note = chemically synthesized
  source 1..22: mol_type = other DNA
aactctgactgctggtgagcca

SEQ ID NO: 34707 - DNA, 22 bp, synthetic construct
  misc_feature 1..22: note = chemically synthesized
  source 1..22: mol_type = other DNA
tgactgctggtgagccaggcag

SEQ ID NO: 34708 - DNA, 22 bp, synthetic construct
  misc_feature 1..22: note = chemically synthesized
  source 1..22: mol_type = other DNA
actgctggtgagccaggcagaa

SEQ ID NO: 34709 - DNA, 22 bp, synthetic construct
  misc_feature 1..22: note = chemically synthesized
  source 1..22: mol_type = other DNA
ctggtgagccaggcagaacaga

SEQ ID NO: 34710 - DNA, 22 bp, synthetic construct
  misc_feature 1..22: note = chemically synthesized
  source 1..22: mol_type = other DNA
gtgagccaggcagaacagagcc

SEQ ID NO: 34711 - DNA, 22 bp, synthetic construct
  misc_feature 1..22: note = chemically synthesized
  source 1..22: mol_type = other DNA
ctcttctttcaaaagcaaatgg

SEQ ID NO: 34712 - DNA, 22 bp, synthetic construct
  misc_feature 1..22: note = chemically synthesized
  source 1..22: mol_type = other DNA
tcttctttcaaaagcaaatggg

SEQ ID NO: 34713 - DNA, 22 bp, synthetic construct
  misc_feature 1..22: note = chemically synthesized
  source 1..22: mol_type = other DNA
ttctttcaaaagcaaatgggag

SEQ ID NO: 34714 - DNA, 22 bp, synthetic construct
  misc_feature 1..22: note = chemically synthesized
  source 1..22: mol_type = other DNA
ctttcaaaagcaaatgggagaa

SEQ ID NO: 34715 - DNA, 22 bp, synthetic construct
  misc_feature 1..22: note = chemically synthesized
  source 1..22: mol_type = other DNA
tttcaaaagcaaatgggagaaa

SEQ ID NO: 34716 - DNA, 22 bp, synthetic construct
  misc_feature 1..22: note = chemically synthesized
  source 1..22: mol_type = other DNA
tcaaaagcaaatgggagaaata

SEQ ID NO: 34717 - DNA, 22 bp, synthetic construct
  misc_feature 1..22: note = chemically synthesized
  source 1..22: mol_type = other DNA
caaaagcaaatgggagaaatat

SEQ ID NO: 34718 - DNA, 22 bp, synthetic construct
  misc_feature 1..22: note = chemically synthesized
  source 1..22: mol_type = other DNA
aaaagcaaatgggagaaatatc

SEQ ID NO: 34719 - DNA, 22 bp, synthetic construct
  misc_feature 1..22: note = chemically synthesized
  source 1..22: mol_type = other DNA
aattctttttctcagcatggaa

SEQ ID NO: 34720 - DNA, 22 bp, synthetic construct
  misc_feature 1..22: note = chemically synthesized
  source 1..22: mol_type = other DNA
tttttctcagcatggaacatcc

SEQ ID NO: 34721 - DNA, 22 bp, synthetic construct
  misc_feature 1..22: note = chemically synthesized
  source 1..22: mol_type = other DNA
tttctcagcatggaacatccct

SEQ ID NO: 34722 - DNA, 22 bp, synthetic construct
  misc_feature 1..22: note = chemically synthesized
  source 1..22: mol_type = other DNA
ttctcagcatggaacatccctg

SEQ ID NO: 34723 - DNA, 22 bp, synthetic construct
  misc_feature 1..22: note = chemically synthesized
  source 1..22: mol_type = other DNA
tctcagcatggaacatccctga

SEQ ID NO: 34724 - DNA, 22 bp, synthetic construct
  misc_feature 1..22: note = chemically synthesized
  source 1..22: mol_type = other DNA
ctcagcatggaacatccctgag

SEQ ID NO: 34725 - DNA, 22 bp, synthetic construct
  misc_feature 1..22: note = chemically synthesized
  source 1..22: mol_type = other DNA
tcagcatggaacatccctgaga

SEQ ID NO: 34726 - DNA, 22 bp, synthetic construct
  misc_feature 1..22: note = chemically synthesized
  source 1..22: mol_type = other DNA
agcatggaacatccctgagaaa

SEQ ID NO: 34727 - DNA, 22 bp, synthetic construct
  misc_feature 1..22: note = chemically synthesized
  source 1..22: mol_type = other DNA
agaaagagaatacgagccagga

SEQ ID NO: 34728 - DNA, 22 bp, synthetic construct
  misc_feature 1..22: note = chemically synthesized
  source 1..22: mol_type = other DNA
ataaacagcccccctccaggtg

SEQ ID NO: 34729 - DNA, 22 bp, synthetic construct
  misc_feature 1..22: note = chemically synthesized
  source 1..22: mol_type = other DNA
taaacagcccccctccaggtgc

SEQ ID NO: 34730 - DNA, 22 bp, synthetic construct
  misc_feature 1..22: note = chemically synthesized
  source 1..22: mol_type = other DNA
caggtgcgcctgtctcttatgg

SEQ ID NO: 34731 - DNA, 22 bp, synthetic construct
  misc_feature 1..22: note = chemically synthesized
  source 1..22: mol_type = other DNA
tctcttatggtcgagactgcag

SEQ ID NO: 34732 - DNA, 22 bp, synthetic construct
  misc_feature 1..22: note = chemically synthesized
  source 1..22: mol_type = other DNA
ttatggtcgagactgcaggggt

SEQ ID NO: 34733 - DNA, 22 bp, synthetic construct
  misc_feature 1..22: note = chemically synthesized
  source 1..22: mol_type = other DNA
atggtcgagactgcaggggtga

SEQ ID NO: 34734 - DNA, 22 bp, synthetic construct
  misc_feature 1..22: note = chemically synthesized
  source 1..22: mol_type = other DNA
tggtcgagactgcaggggtgaa

SEQ ID NO: 34735 - DNA, 22 bp, synthetic construct
  misc_feature 1..22: note = chemically synthesized
  source 1..22: mol_type = other DNA
caggggtgaaatagaccccagt

SEQ ID NO: 34736 - DNA, 22 bp, synthetic construct
  misc_feature 1..22: note = chemically synthesized
  source 1..22: mol_type = other DNA
ccacagcgctcccaggcttatt

SEQ ID NO: 34737 - DNA, 22 bp, synthetic construct
  misc_feature 1..22: note = chemically synthesized
  source 1..22: mol_type = other DNA
ccaggcttattaggaagaggaa

SEQ ID NO: 34738 - DNA, 22 bp, synthetic construct
  misc_feature 1..22: note = chemically synthesized
  source 1..22: mol_type = other DNA
attaggaagaggaaattcccgc

SEQ ID NO: 34739 - DNA, 22 bp, synthetic construct
  misc_feature 1..22: note = chemically synthesized
  source 1..22: mol_type = other DNA
ttaggaagaggaaattcccgcc

SEQ ID NO: 34740 - DNA, 22 bp, synthetic construct
  misc_feature 1..22: note = chemically synthesized
  source 1..22: mol_type = other DNA
ggaagaggaaattcccgcctaa

SEQ ID NO: 34741 - DNA, 22 bp, synthetic construct
  misc_feature 1..22: note = chemically synthesized
  source 1..22: mol_type = other DNA
ccgcctaataaattttggtcag

SEQ ID NO: 34742 - DNA, 22 bp, synthetic construct
  misc_feature 1..22: note = chemically synthesized
  source 1..22: mol_type = other DNA
ataaattttggtcagaccagtt

SEQ ID NO: 34743 - DNA, 22 bp, synthetic construct
  misc_feature 1..22: note = chemically synthesized
  source 1..22: mol_type = other DNA
tggtcagaccagttgatcctaa

SEQ ID NO: 34744 - DNA, 22 bp, synthetic construct
  misc_feature 1..22: note = chemically synthesized
  source 1..22: mol_type = other DNA
ggtcagaccagttgatcctaaa

SEQ ID NO: 34745 - DNA, 22 bp, synthetic construct
  misc_feature 1..22: note = chemically synthesized
  source 1..22: mol_type = other DNA
gtcagaccagttgatcctaaaa

SEQ ID NO: 34746 - DNA, 22 bp, synthetic construct
  misc_feature 1..22: note = chemically synthesized
  source 1..22: mol_type = other DNA
atcctaaaaaccctgtctcctg

SEQ ID NO: 34747 - DNA, 22 bp, synthetic construct
  misc_feature 1..22: note = chemically synthesized
  source 1..22: mol_type = other DNA
aaaaccctgtctcctgataaga

SEQ ID NO: 34748 - DNA, 22 bp, synthetic construct
  misc_feature 1..22: note = chemically synthesized
  source 1..22: mol_type = other DNA
tctcctgataagatgttatcaa

SEQ ID NO: 34749 - DNA, 22 bp, synthetic construct
  misc_feature 1..22: note = chemically synthesized
  source 1..22: mol_type = other DNA
ctgataagatgttatcaatgac

SEQ ID NO: 34750 - DNA, 22 bp, synthetic construct
  misc_feature 1..22: note = chemically synthesized
  source 1..22: mol_type = other DNA
ataagatgttatcaatgacaat

SEQ ID NO: 34751 - DNA, 22 bp, synthetic construct
  misc_feature 1..22: note = chemically synthesized
  source 1..22: mol_type = other DNA
tcaatgacaatggtgcccgaaa

SEQ ID NO: 34752 - DNA, 22 bp, synthetic construct
  misc_feature 1..22: note = chemically synthesized
  source 1..22: mol_type = other DNA
cattagcaattttaatttcgcc

SEQ ID NO: 34753 - DNA, 22 bp, synthetic construct
  misc_feature 1..22: note = chemically synthesized
  source 1..22: mol_type = other DNA
attagcaattttaatttcgcct

SEQ ID NO: 34754 - DNA, 22 bp, synthetic construct
  misc_feature 1..22: note = chemically synthesized
  source 1..22: mol_type = other DNA
gcaattttaatttcgcctcggt

SEQ ID NO: 34755 - DNA, 22 bp, synthetic construct
  misc_feature 1..22: note = chemically synthesized
  source 1..22: mol_type = other DNA
taatttcgcctcggtcctgtgg

SEQ ID NO: 34756 - DNA, 22 bp, synthetic construct
  misc_feature 1..22: note = chemically synthesized
  source 1..22: mol_type = other DNA
aatttcgcctcggtcctgtggt

SEQ ID NO: 34757 - DNA, 22 bp, synthetic construct
  misc_feature 1..22: note = chemically synthesized
  source 1..22: mol_type = other DNA
atttcgcctcggtcctgtggtc

SEQ ID NO: 34758 - DNA, 22 bp, synthetic construct
  misc_feature 1..22: note = chemically synthesized
  source 1..22: mol_type = other DNA
cgcctcggtcctgtggtcctgt

SEQ ID NO: 34759 - DNA, 22 bp, synthetic construct
  misc_feature 1..22: note = chemically synthesized
  source 1..22: mol_type = other DNA
gcctcggtcctgtggtcctgtg

SEQ ID NO: 34760 - DNA, 22 bp, synthetic construct
  misc_feature 1..22: note = chemically synthesized
  source 1..22: mol_type = other DNA
ggtcctgtggtcctgtgatctc

SEQ ID NO: 34761 - DNA, 22 bp, synthetic construct
  misc_feature 1..22: note = chemically synthesized
  source 1..22: mol_type = other DNA
tggtcctgtgatctcaccctgc

SEQ ID NO: 34762 - DNA, 22 bp, synthetic construct
  misc_feature 1..22: note = chemically synthesized
  source 1..22: mol_type = other DNA
tgatctcaccctgcctccactt

SEQ ID NO: 34763 - DNA, 22 bp, synthetic construct
  misc_feature 1..22: note = chemically synthesized
  source 1..22: mol_type = other DNA
accctgcctccacttgccttgt

SEQ ID NO: 34764 - DNA, 22 bp, synthetic construct
  misc_feature 1..22: note = chemically synthesized
  source 1..22: mol_type = other DNA
cctccacttgccttgtgatatt

SEQ ID NO: 34765 - DNA, 22 bp, synthetic construct
  misc_feature 1..22: note = chemically synthesized
  source 1..22: mol_type = other DNA
cacttgccttgtgatattctat

SEQ ID NO: 34766 - DNA, 22 bp, synthetic construct
  misc_feature 1..22: note = chemically synthesized
  source 1..22: mol_type = other DNA
gccttgtgatattctattacct

SEQ ID NO: 34767 - DNA, 22 bp, synthetic construct
  misc_feature 1..22: note = chemically synthesized
  source 1..22: mol_type = other DNA
ccttgtgatattctattacctt

SEQ ID NO: 34768 - DNA, 22 bp, synthetic construct
  misc_feature 1..22: note = chemically synthesized
  source 1..22: mol_type = other DNA
gtgatattctattaccttgtaa

SEQ ID NO: 34769 - DNA, 22 bp, synthetic construct
  misc_feature 1..22: note = chemically synthesized
  source 1..22: mol_type = other DNA
tgatattctattaccttgtaaa

SEQ ID NO: 34770 - DNA, 22 bp, synthetic construct
  misc_feature 1..22: note = chemically synthesized
  source 1..22: mol_type = other DNA
tattaccttgtaaagtacttga

SEQ ID NO: 34771 - DNA, 22 bp, synthetic construct
  misc_feature 1..22: note = chemically synthesized
  source 1..22: mol_type = other DNA
ttaccttgtaaagtacttgatg

SEQ ID NO: 34772 - DNA, 22 bp, synthetic construct
  misc_feature 1..22: note = chemically synthesized
  source 1..22: mol_type = other DNA
ccttgtaaagtacttgatgtct

SEQ ID NO: 34773 - DNA, 22 bp, synthetic construct
  misc_feature 1..22: note = chemically synthesized
  source 1..22: mol_type = other DNA
gtaaagtacttgatgtctgtga

SEQ ID NO: 34774 - DNA, 22 bp, synthetic construct
  misc_feature 1..22: note = chemically synthesized
  source 1..22: mol_type = other DNA
taaagtacttgatgtctgtgac

SEQ ID NO: 34775 - DNA, 22 bp, synthetic construct
  misc_feature 1..22: note = chemically synthesized
  source 1..22: mol_type = other DNA
gatgtctgtgacccacacctat

SEQ ID NO: 34776 - DNA, 22 bp, synthetic construct
  misc_feature 1..22: note = chemically synthesized
  source 1..22: mol_type = other DNA
atgtctgtgacccacacctatt

SEQ ID NO: 34777 - DNA, 22 bp, synthetic construct
  misc_feature 1..22: note = chemically synthesized
  source 1..22: mol_type = other DNA
tgacccacacctatttgcacac

SEQ ID NO: 34778 - DNA, 22 bp, synthetic construct
  misc_feature 1..22: note = chemically synthesized
  source 1..22: mol_type = other DNA
tttgcacactgcctccccattt

SEQ ID NO: 34779 - DNA, 22 bp, synthetic construct
  misc_feature 1..22: note = chemically synthesized
  source 1..22: mol_type = other DNA
gcacactgcctccccatttgaa

SEQ ID NO: 34780 - DNA, 22 bp, synthetic construct
  misc_feature 1..22: note = chemically synthesized
  source 1..22: mol_type = other DNA
cacactgcctccccatttgaaa

SEQ ID NO: 34781 - DNA, 22 bp, synthetic construct
  misc_feature 1..22: note = chemically synthesized
  source 1..22: mol_type = other DNA
cctccccatttgaaaatcccta

SEQ ID NO: 34782 - DNA, 22 bp, synthetic construct
  misc_feature 1..22: note = chemically synthesized
  source 1..22: mol_type = other DNA
cccatttgaaaatccctaatac

SEQ ID NO: 34783 - DNA, 22 bp, synthetic construct
  misc_feature 1..22: note = chemically synthesized
  source 1..22: mol_type = other DNA
gaaaatccctaatacaaacttg

SEQ ID NO: 34784 - DNA, 22 bp, synthetic construct
  misc_feature 1..22: note = chemically synthesized
  source 1..22: mol_type = other DNA
aaaatccctaatacaaacttgc

SEQ ID NO: 34785 - DNA, 22 bp, synthetic construct
  misc_feature 1..22: note = chemically synthesized
  source 1..22: mol_type = other DNA
atacaaacttgctggtttttgt

SEQ ID NO: 34786 - DNA, 22 bp, synthetic construct
  misc_feature 1..22: note = chemically synthesized
  source 1..22: mol_type = other DNA
gctggtttttgtggcttgtggg

SEQ ID NO: 34787 - DNA, 22 bp, synthetic construct
  misc_feature 1..22: note = chemically synthesized
  source 1..22: mol_type = other DNA
ctggtttttgtggcttgtgggg

SEQ ID NO: 34788 - DNA, 22 bp, synthetic construct
  misc_feature 1..22: note = chemically synthesized
  source 1..22: mol_type = other DNA
gtttttgtggcttgtggggcat

SEQ ID NO: 34789 - DNA, 22 bp, synthetic construct
  misc_feature 1..22: note = chemically synthesized
  source 1..22: mol_type = other DNA
ttgtggcttgtggggcatcacg

SEQ ID NO: 34790 - DNA, 22 bp, synthetic construct
  misc_feature 1..22: note = chemically synthesized
  source 1..22: mol_type = other DNA
tgtggcttgtggggcatcacgg

SEQ ID NO: 34791 - DNA, 22 bp, synthetic construct
  misc_feature 1..22: note = chemically synthesized
  source 1..22: mol_type = other DNA
gtggcttgtggggcatcacgga

SEQ ID NO: 34792 - DNA, 22 bp, synthetic construct
  misc_feature 1..22: note = chemically synthesized
  source 1..22: mol_type = other DNA
tggcttgtggggcatcacggaa

SEQ ID NO: 34793 - DNA, 22 bp, synthetic construct
  misc_feature 1..22: note = chemically synthesized
  source 1..22: mol_type = other DNA
gtggggcatcacggaacctacc

SEQ ID NO: 34794 - DNA, 22 bp, synthetic construct
  misc_feature 1..22: note = chemically synthesized
  source 1..22: mol_type = other DNA
tggggcatcacggaacctaccg

SEQ ID NO: 34795 - DNA, 22 bp, synthetic construct
  misc_feature 1..22: note = chemically synthesized
  source 1..22: mol_type = other DNA
ccgaaatgtgatgcctcccccg

SEQ ID NO: 34796 - DNA, 22 bp, synthetic construct
  misc_feature 1..22: note = chemically synthesized
  source 1..22: mol_type = other DNA
ccccggatgcccggctttaaaa

SEQ ID NO: 34797 - DNA, 22 bp, synthetic construct
  misc_feature 1..22: note = chemically synthesized
  source 1..22: mol_type = other DNA
taaaatttctctcttttgtact

SEQ ID NO: 34798 - DNA, 22 bp, synthetic construct
  misc_feature 1..22: note = chemically synthesized
  source 1..22: mol_type = other DNA
aaaatttctctcttttgtactc

SEQ ID NO: 34799 - DNA, 22 bp, synthetic construct
  misc_feature 1..22: note = chemically synthesized
  source 1..22: mol_type = other DNA
aaatttctctcttttgtactct

SEQ ID NO: 34800 - DNA, 22 bp, synthetic construct
  misc_feature 1..22: note = chemically synthesized
  source 1..22: mol_type = other DNA
ctctcttttgtactctgtccct

SEQ ID NO: 34801 - DNA, 22 bp, synthetic construct
  misc_feature 1..22: note = chemically synthesized
  source 1..22: mol_type = other DNA
tctcttttgtactctgtccctt

SEQ ID NO: 34802 - DNA, 22 bp, synthetic construct
  misc_feature 1..22: note = chemically synthesized
  source 1..22: mol_type = other DNA
tcttttgtactctgtcccttta

SEQ ID NO: 34803 - DNA, 22 bp, synthetic construct
  misc_feature 1..22: note = chemically synthesized
  source 1..22: mol_type = other DNA
ttttgtactctgtccctttatt

SEQ ID NO: 34804 - DNA, 22 bp, synthetic construct
  misc_feature 1..22: note = chemically synthesized
  source 1..22: mol_type = other DNA
ttgtactctgtccctttatttc

SEQ ID NO: 34805 - DNA, 22 bp, synthetic construct
  misc_feature 1..22: note = chemically synthesized
  source 1..22: mol_type = other DNA
tgtactctgtccctttatttct

SEQ ID NO: 34806 - DNA, 22 bp, synthetic construct
  misc_feature 1..22: note = chemically synthesized
  source 1..22: mol_type = other DNA
gtactctgtccctttatttcta

SEQ ID NO: 34807 - DNA, 22 bp, synthetic construct
  misc_feature 1..22: note = chemically synthesized
  source 1..22: mol_type = other DNA
tactctgtccctttatttctaa

SEQ ID NO: 34808 - DNA, 22 bp, synthetic construct
  misc_feature 1..22: note = chemically synthesized
  source 1..22: mol_type = other DNA
tgtccctttatttctaaagttg

SEQ ID NO: 34809 - DNA, 22 bp, synthetic construct
  misc_feature 1..22: note = chemically synthesized
  source 1..22: mol_type = other DNA
tccctttatttctaaagttggc

SEQ ID NO: 34810 - DNA, 22 bp, synthetic construct
  misc_feature 1..22: note = chemically synthesized
  source 1..22: mol_type = other DNA
tatttctaaagttggccgacgc

SEQ ID NO: 34811 - DNA, 22 bp, synthetic construct
  misc_feature 1..22: note = chemically synthesized
  source 1..22: mol_type = other DNA
atttctaaagttggccgacgct

SEQ ID NO: 34812 - DNA, 22 bp, synthetic construct
  misc_feature 1..22: note = chemically synthesized
  source 1..22: mol_type = other DNA
tttctaaagttggccgacgctt

SEQ ID NO: 34813 - DNA, 22 bp, synthetic construct
  misc_feature 1..22: note = chemically synthesized
  source 1..22: mol_type = other DNA
ctaaagttggccgacgcttagg

SEQ ID NO: 34814 - DNA, 22 bp, synthetic construct
  misc_feature 1..22: note = chemically synthesized
  source 1..22: mol_type = other DNA
taaagttggccgacgcttaggg

SEQ ID NO: 34815 - DNA, 22 bp, synthetic construct
  misc_feature 1..22: note = chemically synthesized
  source 1..22: mol_type = other DNA
aagttggccgacgcttagggaa

SEQ ID NO: 34816 - DNA, 22 bp, synthetic construct
  misc_feature 1..22: note = chemically synthesized
  source 1..22: mol_type = other DNA
gccgacgcttagggaaaataga

SEQ ID NO: 34817 - DNA, 22 bp, synthetic construct
  misc_feature 1..22: note = chemically synthesized
  source 1..22: mol_type = other DNA
agggaaaatagaaaagaaccta

SEQ ID NO: 34818 - DNA, 22 bp, synthetic construct
  misc_feature 1..22: note = chemically synthesized
  source 1..22: mol_type = other DNA
gggaaaatagaaaagaacctac

SEQ ID NO: 34819 - DNA, 22 bp, synthetic construct
  misc_feature 1..22: note = chemically synthesized
  source 1..22: mol_type = other DNA
cgtgaatattggggcaggttcc

SEQ ID NO: 34820 - DNA, 22 bp, synthetic construct
  misc_feature 1..22: note = chemically synthesized
  source 1..22: mol_type = other DNA
gggcaggttccctgatactcag

SEQ ID NO: 34821 - DNA, 22 bp, synthetic construct
  misc_feature 1..22: note = chemically synthesized
  source 1..22: mol_type = other DNA
cctgatactcagtggcgtggag

SEQ ID NO: 34822 - DNA, 22 bp, synthetic construct
  misc_feature 1..22: note = chemically synthesized
  source 1..22: mol_type = other DNA
atactcagtggcgtggagatgt

SEQ ID NO: 34823 - DNA, 22 bp, synthetic construct
  misc_feature 1..22: note = chemically synthesized
  source 1..22: mol_type = other DNA
agtggcgtggagatgtaacaag

SEQ ID NO: 34824 - DNA, 22 bp, synthetic construct
  misc_feature 1..22: note = chemically synthesized
  source 1..22: mol_type = other DNA
gatgtgtgagtgatgatcaggc

SEQ ID NO: 34825 - DNA, 22 bp, synthetic construct
  misc_feature 1..22: note = chemically synthesized
  source 1..22: mol_type = other DNA
tatttggaagaaatatcagatg

SEQ ID NO: 34826 - DNA, 22 bp, synthetic construct
  misc_feature 1..22: note = chemically synthesized
  source 1..22: mol_type = other DNA
ggaagaaatatcagatgtgaat

SEQ ID NO: 34827 - DNA, 22 bp, synthetic construct
  misc_feature 1..22: note = chemically synthesized
  source 1..22: mol_type = other DNA
gaagaaatatcagatgtgaatg

SEQ ID NO: 34828 - DNA, 22 bp, synthetic construct
  misc_feature 1..22: note = chemically synthesized
  source 1..22: mol_type = other DNA
tgacctaggaagcaatggaagt

SEQ ID NO: 34829 - DNA, 22 bp, synthetic construct
  misc_feature 1..22: note = chemically synthesized
  source 1..22: mol_type = other DNA
ggaagcaatggaagtgaaaaat

SEQ ID NO: 34830 - DNA, 22 bp, synthetic construct
  misc_feature 1..22: note = chemically synthesized
  source 1..22: mol_type = other DNA
ttctttttgccttcagactcaa

SEQ ID NO: 34831 - DNA, 22 bp, synthetic construct
  misc_feature 1..22: note = chemically synthesized
  source 1..22: mol_type = other DNA
tttttgccttcagactcaatat

SEQ ID NO: 34832 - DNA, 22 bp, synthetic construct
  misc_feature 1..22: note = chemically synthesized
  source 1..22: mol_type = other DNA
tttgccttcagactcaatattt

SEQ ID NO: 34833 - DNA, 22 bp, synthetic construct
  misc_feature 1..22: note = chemically synthesized
  source 1..22: mol_type = other DNA
ttgccttcagactcaatatttt

SEQ ID NO: 34834 - DNA, 22 bp, synthetic construct
  misc_feature 1..22: note = chemically synthesized
  source 1..22: mol_type = other DNA
tgccttcagactcaatattttg

SEQ ID NO: 34835 - DNA, 22 bp, synthetic construct
  misc_feature 1..22: note = chemically synthesized
  source 1..22: mol_type = other DNA
gccttcagactcaatattttgt

SEQ ID NO: 34836 - DNA, 22 bp, synthetic construct
  misc_feature 1..22: note = chemically synthesized
  source 1..22: mol_type = other DNA
ccttcagactcaatattttgta

SEQ ID NO: 34837 - DNA, 22 bp, synthetic construct
  misc_feature 1..22: note = chemically synthesized
  source 1..22: mol_type = other DNA
cagactcaatattttgtatatt

SEQ ID NO: 34838 - DNA, 22 bp, synthetic construct
  misc_feature 1..22: note = chemically synthesized
  source 1..22: mol_type = other DNA
agactcaatattttgtatattt

SEQ ID NO: 34839 - DNA, 22 bp, synthetic construct
  misc_feature 1..22: note = chemically synthesized
  source 1..22: mol_type = other DNA
aatattttgtatatttgaaaat

SEQ ID NO: 34840 - DNA, 22 bp, synthetic construct
  misc_feature 1..22: note = chemically synthesized
  source 1..22: mol_type = other DNA
tgtatatttgaaaatttgtcaa

SEQ ID NO: 34841 - DNA, 22 bp, synthetic construct
  misc_feature 1..22: note = chemically synthesized
  source 1..22: mol_type = other DNA
gtatatttgaaaatttgtcaac

SEQ ID NO: 34842 - DNA, 22 bp, synthetic construct
  misc_feature 1..22: note = chemically synthesized
  source 1..22: mol_type = other DNA
tatatttgaaaatttgtcaaca

SEQ ID NO: 34843 - DNA, 22 bp, synthetic construct
  misc_feature 1..22: note = chemically synthesized
  source 1..22: mol_type = other DNA
gaaaatttgtcaacacaaaaaa

SEQ ID NO: 34844 - DNA, 22 bp, synthetic construct
  misc_feature 1..22: note = chemically synthesized
  source 1..22: mol_type = other DNA
aaaatttgtcaacacaaaaaat

SEQ ID NO: 34845 - DNA, 22 bp, synthetic construct
  misc_feature 1..22: note = chemically synthesized
  source 1..22: mol_type = other DNA
gtcaacacaaaaaatactaagt

SEQ ID NO: 34846 - DNA, 22 bp, synthetic construct
  misc_feature 1..22: note = chemically synthesized
  source 1..22: mol_type = other DNA
tcaacacaaaaaatactaagtt

SEQ ID NO: 34847 - DNA, 22 bp, synthetic construct
  misc_feature 1..22: note = chemically synthesized
  source 1..22: mol_type = other DNA
agttgtatactgatttgttaaa

SEQ ID NO: 34848 - DNA, 22 bp, synthetic construct
  misc_feature 1..22: note = chemically synthesized
  source 1..22: mol_type = other DNA
tatactgatttgttaaaagcag

SEQ ID NO: 34849 - DNA, 22 bp, synthetic construct
  misc_feature 1..22: note = chemically synthesized
  source 1..22: mol_type = other DNA
atttgttaaaagcagcagcatg

SEQ ID NO: 34850 - DNA, 22 bp, synthetic construct
  misc_feature 1..22: note = chemically synthesized
  source 1..22: mol_type = other DNA
gttaaaagcagcagcatgcagt

SEQ ID NO: 34851 - DNA, 22 bp, synthetic construct
  misc_feature 1..22: note = chemically synthesized
  source 1..22: mol_type = other DNA
ttaaaagcagcagcatgcagtt

SEQ ID NO: 34852 - DNA, 22 bp, synthetic construct
  misc_feature 1..22: note = chemically synthesized
  source 1..22: mol_type = other DNA
aaagcagcagcatgcagttagg

SEQ ID NO: 34853 - DNA, 22 bp, synthetic construct
  misc_feature 1..22: note = chemically synthesized
  source 1..22: mol_type = other DNA
ggatgatatctttggggaaatg

SEQ ID NO: 34854 - DNA, 22 bp, synthetic construct
  misc_feature 1..22: note = chemically synthesized
  source 1..22: mol_type = other DNA
tggggaaatggcagagaccatc

SEQ ID NO: 34855 - DNA, 22 bp, synthetic construct
  misc_feature 1..22: note = chemically synthesized
  source 1..22: mol_type = other DNA
ggggaaatggcagagaccatcc

SEQ ID NO: 34856 - DNA, 22 bp, synthetic construct
  misc_feature 1..22: note = chemically synthesized
  source 1..22: mol_type = other DNA
gggaaatggcagagaccatcca

SEQ ID NO: 34857 - DNA, 22 bp, synthetic construct
  misc_feature 1..22: note = chemically synthesized
  source 1..22: mol_type = other DNA
tgattctccactgcatccaatt

SEQ ID NO: 34858 - DNA, 22 bp, synthetic construct
  misc_feature 1..22: note = chemically synthesized
  source 1..22: mol_type = other DNA
attctccactgcatccaatttt

SEQ ID NO: 34859 - DNA, 22 bp, synthetic construct
  misc_feature 1..22: note = chemically synthesized
  source 1..22: mol_type = other DNA
tccactgcatccaattttctac

SEQ ID NO: 34860 - DNA, 22 bp, synthetic construct
  misc_feature 1..22: note = chemically synthesized
  source 1..22: mol_type = other DNA
cactgcatccaattttctactc

SEQ ID NO: 34861 - DNA, 22 bp, synthetic construct
  misc_feature 1..22: note = chemically synthesized
  source 1..22: mol_type = other DNA
catccaattttctactctcaaa

SEQ ID NO: 34862 - DNA, 22 bp, synthetic construct
  misc_feature 1..22: note = chemically synthesized
  source 1..22: mol_type = other DNA
tctactctcaaaatgaacccca

SEQ ID NO: 34863 - DNA, 22 bp, synthetic construct
  misc_feature 1..22: note = chemically synthesized
  source 1..22: mol_type = other DNA
ctactctcaaaatgaaccccat

SEQ ID NO: 34864 - DNA, 22 bp, synthetic construct
  misc_feature 1..22: note = chemically synthesized
  source 1..22: mol_type = other DNA
tactctcaaaatgaaccccatg

SEQ ID NO: 34865 - DNA, 22 bp, synthetic construct
  misc_feature 1..22: note = chemically synthesized
  source 1..22: mol_type = other DNA
ctctcaaaatgaaccccatgct

SEQ ID NO: 34866 - DNA, 22 bp, synthetic construct
  misc_feature 1..22: note = chemically synthesized
  source 1..22: mol_type = other DNA
tcaaaatgaaccccatgctcac

SEQ ID NO: 34867 - DNA, 22 bp, synthetic construct
  misc_feature 1..22: note = chemically synthesized
  source 1..22: mol_type = other DNA
aaaatgaaccccatgctcacca

SEQ ID NO: 34868 - DNA, 22 bp, synthetic construct
  misc_feature 1..22: note = chemically synthesized
  source 1..22: mol_type = other DNA
accatcaacgggattgaatttg

SEQ ID NO: 34869 - DNA, 22 bp, synthetic construct
  misc_feature 1..22: note = chemically synthesized
  source 1..22: mol_type = other DNA
aatttgagctgctgagaattgg

SEQ ID NO: 34870 - DNA, 22 bp, synthetic construct
  misc_feature 1..22: note = chemically synthesized
  source 1..22: mol_type = other DNA
gagctgctgagaattggtaata

SEQ ID NO: 34871 - DNA, 22 bp, synthetic construct
  misc_feature 1..22: note = chemically synthesized
  source 1..22: mol_type = other DNA
agctgctgagaattggtaataa

SEQ ID NO: 34872 - DNA, 22 bp, synthetic construct
  misc_feature 1..22: note = chemically synthesized
  source 1..22: mol_type = other DNA
ctgagaattggtaataacccca

SEQ ID NO: 34873 - DNA, 22 bp, synthetic construct
  misc_feature 1..22: note = chemically synthesized
  source 1..22: mol_type = other DNA
agaattggtaataaccccaaat

SEQ ID NO: 34874 - DNA, 22 bp, synthetic construct
  misc_feature 1..22: note = chemically synthesized
  source 1..22: mol_type = other DNA
gtaataaccccaaattatcttc

SEQ ID NO: 34875 - DNA, 22 bp, synthetic construct
  misc_feature 1..22: note = chemically synthesized
  source 1..22: mol_type = other DNA
tcttcaattctgtgaaatggaa

SEQ ID NO: 34876 - DNA, 22 bp, synthetic construct
  misc_feature 1..22: note = chemically synthesized
  source 1..22: mol_type = other DNA
caattctgtgaaatggaatttt

SEQ ID NO: 34877 - DNA, 22 bp, synthetic construct
  misc_feature 1..22: note = chemically synthesized
  source 1..22: mol_type = other DNA
aattctgtgaaatggaatttta

SEQ ID NO: 34878 - DNA, 22 bp, synthetic construct
  misc_feature 1..22: note = chemically synthesized
  source 1..22: mol_type = other DNA
tgtgaaatggaattttagacca

SEQ ID NO: 34879 - DNA, 22 bp, synthetic construct
  misc_feature 1..22: note = chemically synthesized
  source 1..22: mol_type = other DNA
tgaaatggaattttagaccagc

SEQ ID NO: 34880 - DNA, 22 bp, synthetic construct
  misc_feature 1..22: note = chemically synthesized
  source 1..22: mol_type = other DNA
tagaccagcctgtgactgaagc

SEQ ID NO: 34881 - DNA, 22 bp, synthetic construct
  misc_feature 1..22: note = chemically synthesized
  source 1..22: mol_type = other DNA
agaccagcctgtgactgaagcc

SEQ ID NO: 34882 - DNA, 22 bp, synthetic construct
  misc_feature 1..22: note = chemically synthesized
  source 1..22: mol_type = other DNA
gaccagcctgtgactgaagcca

SEQ ID NO: 34883 - DNA, 22 bp, synthetic construct
  misc_feature 1..22: note = chemically synthesized
  source 1..22: mol_type = other DNA
tgactgaagccactgggcatta

SEQ ID NO: 34884 - DNA, 22 bp, synthetic construct
  misc_feature 1..22: note = chemically synthesized
  source 1..22: mol_type = other DNA
aagccactgggcattacagtgc

SEQ ID NO: 34885 - DNA, 22 bp, synthetic construct
  misc_feature 1..22: note = chemically synthesized
  source 1..22: mol_type = other DNA
ggcattacagtgccttcgcttt

SEQ ID NO: 34886 - DNA, 22 bp, synthetic construct
  misc_feature 1..22: note = chemically synthesized
  source 1..22: mol_type = other DNA
cagtgccttcgctttgttcaac

SEQ ID NO: 34887 - DNA, 22 bp, synthetic construct
  misc_feature 1..22: note = chemically synthesized
  source 1..22: mol_type = other DNA
cgctttgttcaactgccgcatt

SEQ ID NO: 34888 - DNA, 22 bp, synthetic construct
  misc_feature 1..22: note = chemically synthesized
  source 1..22: mol_type = other DNA
gctttgttcaactgccgcattg

SEQ ID NO: 34889 - DNA, 22 bp, synthetic construct
  misc_feature 1..22: note = chemically synthesized
  source 1..22: mol_type = other DNA
tgttcaactgccgcattgtttc

SEQ ID NO: 34890 - DNA, 22 bp, synthetic construct
  misc_feature 1..22: note = chemically synthesized
  source 1..22: mol_type = other DNA
gttcaactgccgcattgtttct

SEQ ID NO: 34891 - DNA, 22 bp, synthetic construct
  misc_feature 1..22: note = chemically synthesized
  source 1..22: mol_type = other DNA
ttcaactgccgcattgtttctc

SEQ ID NO: 34892 - DNA, 22 bp, synthetic construct
  misc_feature 1..22: note = chemically synthesized
  source 1..22: mol_type = other DNA
aactgccgcattgtttctctct

SEQ ID NO: 34893 - DNA, 22 bp, synthetic construct
  misc_feature 1..22: note = chemically synthesized
  source 1..22: mol_type = other DNA
ccgcattgtttctctctgcaag

SEQ ID NO: 34894 - DNA, 22 bp, synthetic construct
  misc_feature 1..22: note = chemically synthesized
  source 1..22: mol_type = other DNA
tttctctctgcaagagaggaag

SEQ ID NO: 34895 - DNA, 22 bp, synthetic construct
  misc_feature 1..22: note = chemically synthesized
  source 1..22: mol_type = other DNA
ctctctgcaagagaggaaggaa

SEQ ID NO: 34896 - DNA, 22 bp, synthetic construct
  misc_feature 1..22: note = chemically synthesized
  source 1..22: mol_type = other DNA
tctctgcaagagaggaaggaag

SEQ ID NO: 34897 - DNA, 22 bp, synthetic construct
  misc_feature 1..22: note = chemically synthesized
  source 1..22: mol_type = other DNA
tctgcaagagaggaaggaaggc

SEQ ID NO: 34898 - DNA, 22 bp, synthetic construct
  misc_feature 1..22: note = chemically synthesized
  source 1..22: mol_type = other DNA
tgcaagagaggaaggaaggctg

SEQ ID NO: 34899 - DNA, 22 bp, synthetic construct
  misc_feature 1..22: note = chemically synthesized
  source 1..22: mol_type = other DNA
caagagaggaaggaaggctgga

SEQ ID NO: 34900 - DNA, 22 bp, synthetic construct
  misc_feature 1..22: note = chemically synthesized
  source 1..22: mol_type = other DNA
gagtacagctgagctttctggc

SEQ ID NO: 34901 - DNA, 22 bp, synthetic construct
  misc_feature 1..22: note = chemically synthesized
  source 1..22: mol_type = other DNA
agctttctggcaggcactggtg

SEQ ID NO: 34902 - DNA, 22 bp, synthetic construct
  misc_feature 1..22: note = chemically synthesized
  source 1..22: mol_type = other DNA
tctggcaggcactggtggagtt

SEQ ID NO: 34903 - DNA, 22 bp, synthetic construct
  misc_feature 1..22: note = chemically synthesized
  source 1..22: mol_type = other DNA
ctggcaggcactggtggagtta

SEQ ID NO: 34904 - DNA, 22 bp, synthetic construct
  misc_feature 1..22: note = chemically synthesized
  source 1..22: mol_type = other DNA
tggcaggcactggtggagttac

SEQ ID NO: 34905 - DNA, 22 bp, synthetic construct
  misc_feature 1..22: note = chemically synthesized
  source 1..22: mol_type = other DNA
gcaggcactggtggagttactc

SEQ ID NO: 34906 - DNA, 22 bp, synthetic construct
  misc_feature 1..22: note = chemically synthesized
  source 1..22: mol_type = other DNA
gtggagttactcattaaccttc

SEQ ID NO: 34907 - DNA, 22 bp, synthetic construct
  misc_feature 1..22: note = chemically synthesized
  source 1..22: mol_type = other DNA
ctcattaaccttccccattctt

SEQ ID NO: 34908 - DNA, 22 bp, synthetic construct
  misc_feature 1..22: note = chemically synthesized
  source 1..22: mol_type = other DNA
attaaccttccccattctttgt

SEQ ID NO: 34909 - DNA, 22 bp, synthetic construct
  misc_feature 1..22: note = chemically synthesized
  source 1..22: mol_type = other DNA
accttccccattctttgtaact

SEQ ID NO: 34910 - DNA, 22 bp, synthetic construct
  misc_feature 1..22: note = chemically synthesized
  source 1..22: mol_type = other DNA
ccccattctttgtaactggtgg

SEQ ID NO: 34911 - DNA, 22 bp, synthetic construct
  misc_feature 1..22: note = chemically synthesized
  source 1..22: mol_type = other DNA
cccattctttgtaactggtggc

SEQ ID NO: 34912 - DNA, 22 bp, synthetic construct
  misc_feature 1..22: note = chemically synthesized
  source 1..22: mol_type = other DNA
tttgtaactggtggccttagaa

SEQ ID NO: 34913 - DNA, 22 bp, synthetic construct
  misc_feature 1..22: note = chemically synthesized
  source 1..22: mol_type = other DNA
tgtaactggtggccttagaaga

SEQ ID NO: 34914 - DNA, 22 bp, synthetic construct
  misc_feature 1..22: note = chemically synthesized
  source 1..22: mol_type = other DNA
gtaactggtggccttagaagag

SEQ ID NO: 34915 - DNA, 22 bp, synthetic construct
  misc_feature 1..22: note = chemically synthesized
  source 1..22: mol_type = other DNA
taactggtggccttagaagagg

SEQ ID NO: 34916 - DNA, 22 bp, synthetic construct
  misc_feature 1..22: note = chemically synthesized
  source 1..22: mol_type = other DNA
gtggccttagaagagggttcag

SEQ ID NO: 34917 - DNA, 22 bp, synthetic construct
  misc_feature 1..22: note = chemically synthesized
  source 1..22: mol_type = other DNA
agaagagggttcagggttatgt

SEQ ID NO: 34918 - DNA, 22 bp, synthetic construct
  misc_feature 1..22: note = chemically synthesized
  source 1..22: mol_type = other DNA
gaagagggttcagggttatgtg

SEQ ID NO: 34919 - DNA, 22 bp, synthetic construct
  misc_feature 1..22: note = chemically synthesized
  source 1..22: mol_type = other DNA
agggttatgtgtttggaacacg

SEQ ID NO: 34920 - DNA, 22 bp, synthetic construct
  misc_feature 1..22: note = chemically synthesized
  source 1..22: mol_type = other DNA
tgtgtttggaacacgagttagt

SEQ ID NO: 34921 - DNA, 22 bp, synthetic construct
  misc_feature 1..22: note = chemically synthesized
  source 1..22: mol_type = other DNA
ggaacacgagttagtataaatg

SEQ ID NO: 34922 - DNA, 22 bp, synthetic construct
  misc_feature 1..22: note = chemically synthesized
  source 1..22: mol_type = other DNA
gaacacgagttagtataaatgg

SEQ ID NO: 34923 - DNA, 22 bp, synthetic construct
  misc_feature 1..22: note = chemically synthesized
  source 1..22: mol_type = other DNA
gtataaatggttctgaagcact

SEQ ID NO: 34924 - DNA, 22 bp, synthetic construct
  misc_feature 1..22: note = chemically synthesized
  source 1..22: mol_type = other DNA
tgaagcacttgattcagactgt

SEQ ID NO: 34925 - DNA, 22 bp, synthetic construct
  misc_feature 1..22: note = chemically synthesized
  source 1..22: mol_type = other DNA
aagcacttgattcagactgtgc

SEQ ID NO: 34926 - DNA, 22 bp, synthetic construct
  misc_feature 1..22: note = chemically synthesized
  source 1..22: mol_type = other DNA
gattcagactgtgctttaaaaa

SEQ ID NO: 34927 - DNA, 22 bp, synthetic construct
  misc_feature 1..22: note = chemically synthesized
  source 1..22: mol_type = other DNA
attcagactgtgctttaaaaaa

SEQ ID NO: 34928 - DNA, 22 bp, synthetic construct
  misc_feature 1..22: note = chemically synthesized
  source 1..22: mol_type = other DNA
agactgtgctttaaaaaatagg

SEQ ID NO: 34929 - DNA, 22 bp, synthetic construct
  misc_feature 1..22: note = chemically synthesized
  source 1..22: mol_type = other DNA
tgctttaaaaaataggaaagaa

SEQ ID NO: 34930 - DNA, 22 bp, synthetic construct
  misc_feature 1..22: note = chemically synthesized
  source 1..22: mol_type = other DNA
taaaaaataggaaagaaagtag

SEQ ID NO: 34931 - DNA, 22 bp, synthetic construct
  misc_feature 1..22: note = chemically synthesized
  source 1..22: mol_type = other DNA
aaaaaataggaaagaaagtaga

SEQ ID NO: 34932 - DNA, 22 bp, synthetic construct
  misc_feature 1..22: note = chemically synthesized
  source 1..22: mol_type = other DNA
aaaaataggaaagaaagtagaa

SEQ ID NO: 34933 - DNA, 22 bp, synthetic construct
  misc_feature 1..22: note = chemically synthesized
  source 1..22: mol_type = other DNA
atggtttggaagggagccacca

SEQ ID NO: 34934 - DNA, 22 bp, synthetic construct
  misc_feature 1..22: note = chemically synthesized
  source 1..22: mol_type = other DNA
ggaagggagccaccaagcacca

SEQ ID NO: 34935 - DNA, 22 bp, synthetic construct
  misc_feature 1..22: note = chemically synthesized
  source 1..22: mol_type = other DNA
gaagggagccaccaagcaccaa

SEQ ID NO: 34936 - DNA, 22 bp, synthetic construct
  misc_feature 1..22: note = chemically synthesized
  source 1..22: mol_type = other DNA
tgaatccgtttctcaatcttag

SEQ ID NO: 34937 - DNA, 22 bp, synthetic construct
  misc_feature 1..22: note = chemically synthesized
  source 1..22: mol_type = other DNA
aatccgtttctcaatcttagct

SEQ ID NO: 34938 - DNA, 22 bp, synthetic construct
  misc_feature 1..22: note = chemically synthesized
  source 1..22: mol_type = other DNA
ctcaatcttagctgcagggcat

SEQ ID NO: 34939 - DNA, 22 bp, synthetic construct
  misc_feature 1..22: note = chemically synthesized
  source 1..22: mol_type = other DNA
tcaatcttagctgcagggcatt

SEQ ID NO: 34940 - DNA, 22 bp, synthetic construct
  misc_feature 1..22: note = chemically synthesized
  source 1..22: mol_type = other DNA
aatcttagctgcagggcattgg

SEQ ID NO: 34941 - DNA, 22 bp, synthetic construct
  misc_feature 1..22: note = chemically synthesized
  source 1..22: mol_type = other DNA
agctgcagggcattggctaaag

SEQ ID NO: 34942 - DNA, 22 bp, synthetic construct
  misc_feature 1..22: note = chemically synthesized
  source 1..22: mol_type = other DNA
gctgcagggcattggctaaaga

SEQ ID NO: 34943 - DNA, 22 bp, synthetic construct
  misc_feature 1..22: note = chemically synthesized
  source 1..22: mol_type = other DNA
cagggcattggctaaagaggaa

SEQ ID NO: 34944 - DNA, 22 bp, synthetic construct
  misc_feature 1..22: note = chemically synthesized
  source 1..22: mol_type = other DNA
gctaaagaggaaggtgaaaact

SEQ ID NO: 34945 - DNA, 22 bp, synthetic construct
  misc_feature 1..22: note = chemically synthesized
  source 1..22: mol_type = other DNA
aagaggaaggtgaaaactgctg

SEQ ID NO: 34946 - DNA, 22 bp, synthetic construct
  misc_feature 1..22: note = chemically synthesized
  source 1..22: mol_type = other DNA
ctgagtcactatcaaatcaatt

SEQ ID NO: 34947 - DNA, 22 bp, synthetic construct
  misc_feature 1..22: note = chemically synthesized
  source 1..22: mol_type = other DNA
agtcactatcaaatcaattggt

SEQ ID NO: 34948 - DNA, 22 bp, synthetic construct
  misc_feature 1..22: note = chemically synthesized
  source 1..22: mol_type = other DNA
tcaaatcaattggtttttctaa

SEQ ID NO: 34949 - DNA, 22 bp, synthetic construct
  misc_feature 1..22: note = chemically synthesized
  source 1..22: mol_type = other DNA
gtttttctaatcccctgagaga

SEQ ID NO: 34950 - DNA, 22 bp, synthetic construct
  misc_feature 1..22: note = chemically synthesized
  source 1..22: mol_type = other DNA
ttctaatcccctgagagaaaaa

SEQ ID NO: 34951 - DNA, 22 bp, synthetic construct
  misc_feature 1..22: note = chemically synthesized
  source 1..22: mol_type = other DNA
tctaatcccctgagagaaaaag

SEQ ID NO: 34952 - DNA, 22 bp, synthetic construct
  misc_feature 1..22: note = chemically synthesized
  source 1..22: mol_type = other DNA
ctaatcccctgagagaaaaagt

SEQ ID NO: 34953 - DNA, 22 bp, synthetic construct
  misc_feature 1..22: note = chemically synthesized
  source 1..22: mol_type = other DNA
taatcccctgagagaaaaagta

SEQ ID NO: 34954 - DNA, 22 bp, synthetic construct
  misc_feature 1..22: note = chemically synthesized
  source 1..22: mol_type = other DNA
atcccctgagagaaaaagtaca

SEQ ID NO: 34955 - DNA, 22 bp, synthetic construct
  misc_feature 1..22: note = chemically synthesized
  source 1..22: mol_type = other DNA
agagaaaaagtacagagtttat

SEQ ID NO: 34956 - DNA, 22 bp, synthetic construct
  misc_feature 1..22: note = chemically synthesized
  source 1..22: mol_type = other DNA
attgcagctttaaaatgccatg

SEQ ID NO: 34957 - DNA, 22 bp, synthetic construct
  misc_feature 1..22: note = chemically synthesized
  source 1..22: mol_type = other DNA
ttgcagctttaaaatgccatgc

SEQ ID NO: 34958 - DNA, 22 bp, synthetic construct
  misc_feature 1..22: note = chemically synthesized
  source 1..22: mol_type = other DNA
cagctttaaaatgccatgcccc

SEQ ID NO: 34959 - DNA, 22 bp, synthetic construct
  misc_feature 1..22: note = chemically synthesized
  source 1..22: mol_type = other DNA
taaaatgccatgcccctcacgg

SEQ ID NO: 34960 - DNA, 22 bp, synthetic construct
  misc_feature 1..22: note = chemically synthesized
  source 1..22: mol_type = other DNA
aaaatgccatgcccctcacggc

SEQ ID NO: 34961 - DNA, 22 bp, synthetic construct
  misc_feature 1..22: note = chemically synthesized
  source 1..22: mol_type = other DNA
aaatgccatgcccctcacggcc

SEQ ID NO: 34962 - DNA, 22 bp, synthetic construct
  misc_feature 1..22: note = chemically synthesized
  source 1..22: mol_type = other DNA
acggccaaaggcatctgaatta

SEQ ID NO: 34963 - DNA, 22 bp, synthetic construct
  misc_feature 1..22: note = chemically synthesized
  source 1..22: mol_type = other DNA
aattaaggaagcagtattcaca

SEQ ID NO: 34964 - DNA, 22 bp, synthetic construct
  misc_feature 1..22: note = chemically synthesized
  source 1..22: mol_type = other DNA
aggaagcagtattcacagctgc

SEQ ID NO: 34965 - DNA, 22 bp, synthetic construct
  misc_feature 1..22: note = chemically synthesized
  source 1..22: mol_type = other DNA
acagctgctttctccagacatt

SEQ ID NO: 34966 - DNA, 22 bp, synthetic construct
  misc_feature 1..22: note = chemically synthesized
  source 1..22: mol_type = other DNA
ctttctccagacattgagctca

SEQ ID NO: 34967 - DNA, 22 bp, synthetic construct
  misc_feature 1..22: note = chemically synthesized
  source 1..22: mol_type = other DNA
tctccagacattgagctcaagg

SEQ ID NO: 34968 - DNA, 22 bp, synthetic construct
  misc_feature 1..22: note = chemically synthesized
  source 1..22: mol_type = other DNA
ctccagacattgagctcaagga

SEQ ID NO: 34969 - DNA, 22 bp, synthetic construct
  misc_feature 1..22: note = chemically synthesized
  source 1..22: mol_type = other DNA
tccagacattgagctcaaggac

SEQ ID NO: 34970 - DNA, 22 bp, synthetic construct
  misc_feature 1..22: note = chemically synthesized
  source 1..22: mol_type = other DNA
cagacattgagctcaaggacag

SEQ ID NO: 34971 - DNA, 22 bp, synthetic construct
  misc_feature 1..22: note = chemically synthesized
  source 1..22: mol_type = other DNA
agctcaaggacagaatctgaac

SEQ ID NO: 34972 - DNA, 22 bp, synthetic construct
  misc_feature 1..22: note = chemically synthesized
  source 1..22: mol_type = other DNA
aaggacagaatctgaactctgc

SEQ ID NO: 34973 - DNA, 22 bp, synthetic construct
  misc_feature 1..22: note = chemically synthesized
  source 1..22: mol_type = other DNA
aactctgcttttatcagctgcg

SEQ ID NO: 34974 - DNA, 22 bp, synthetic construct
  misc_feature 1..22: note = chemically synthesized
  source 1..22: mol_type = other DNA
tgcttttatcagctgcgaaaat

SEQ ID NO: 34975 - DNA, 22 bp, synthetic construct
  misc_feature 1..22: note = chemically synthesized
  source 1..22: mol_type = other DNA
cttttatcagctgcgaaaatcc

SEQ ID NO: 34976 - DNA, 22 bp, synthetic construct
  misc_feature 1..22: note = chemically synthesized
  source 1..22: mol_type = other DNA
ttatcagctgcgaaaatccaag

SEQ ID NO: 34977 - DNA, 22 bp, synthetic construct
  misc_feature 1..22: note = chemically synthesized
  source 1..22: mol_type = other DNA
tatcagctgcgaaaatccaagc

SEQ ID NO: 34978 - DNA, 22 bp, synthetic construct
  misc_feature 1..22: note = chemically synthesized
  source 1..22: mol_type = other DNA
atcagctgcgaaaatccaagca

SEQ ID NO: 34979 - DNA, 22 bp, synthetic construct
  misc_feature 1..22: note = chemically synthesized
  source 1..22: mol_type = other DNA
tcagctgcgaaaatccaagcat

SEQ ID NO: 34980 - DNA, 22 bp, synthetic construct
  misc_feature 1..22: note = chemically synthesized
  source 1..22: mol_type = other DNA
cgaaaatccaagcattcatttc

SEQ ID NO: 34981 - DNA, 22 bp, synthetic construct
  misc_feature 1..22: note = chemically synthesized
  source 1..22: mol_type = other DNA
atttccagctggttcagtgcct

SEQ ID NO: 34982 - DNA, 22 bp, synthetic construct
  misc_feature 1..22: note = chemically synthesized
  source 1..22: mol_type = other DNA
ccagctggttcagtgcctatgt

SEQ ID NO: 34983 - DNA, 22 bp, synthetic construct
  misc_feature 1..22: note = chemically synthesized
  source 1..22: mol_type = other DNA
cagctggttcagtgcctatgta

SEQ ID NO: 34984 - DNA, 22 bp, synthetic construct
  misc_feature 1..22: note = chemically synthesized
  source 1..22: mol_type = other DNA
gttcagtgcctatgtaaaagta

SEQ ID NO: 34985 - DNA, 22 bp, synthetic construct
  misc_feature 1..22: note = chemically synthesized
  source 1..22: mol_type = other DNA
agtgcctatgtaaaagtatact

SEQ ID NO: 34986 - DNA, 22 bp, synthetic construct
  misc_feature 1..22: note = chemically synthesized
  source 1..22: mol_type = other DNA
tgtaaaagtatactgtgtacaa

SEQ ID NO: 34987 - DNA, 22 bp, synthetic construct
  misc_feature 1..22: note = chemically synthesized
  source 1..22: mol_type = other DNA
tgtacaaaaataagattaaaaa

SEQ ID NO: 34988 - DNA, 22 bp, synthetic construct
  misc_feature 1..22: note = chemically synthesized
  source 1..22: mol_type = other DNA
aaaagctaacattaagcaagtg

SEQ ID NO: 34989 - DNA, 22 bp, synthetic construct
  misc_feature 1..22: note = chemically synthesized
  source 1..22: mol_type = other DNA
acattaagcaagtgtgtttgta

SEQ ID NO: 34990 - DNA, 22 bp, synthetic construct
  misc_feature 1..22: note = chemically synthesized
  source 1..22: mol_type = other DNA
agcaagtgtgtttgtatgtttt

SEQ ID NO: 34991 - DNA, 22 bp, synthetic construct
  misc_feature 1..22: note = chemically synthesized
  source 1..22: mol_type = other DNA
gtatgttttctacagttcggat

SEQ ID NO: 34992 - DNA, 22 bp, synthetic construct
  misc_feature 1..22: note = chemically synthesized
  source 1..22: mol_type = other DNA
tatgttttctacagttcggatt

SEQ ID NO: 34993 - DNA, 22 bp, synthetic construct
  misc_feature 1..22: note = chemically synthesized
  source 1..22: mol_type = other DNA
tctacagttcggatttctgaat

SEQ ID NO: 34994 - DNA, 22 bp, synthetic construct
  misc_feature 1..22: note = chemically synthesized
  source 1..22: mol_type = other DNA
ctacagttcggatttctgaata

SEQ ID NO: 34995 - DNA, 22 bp, synthetic construct
  misc_feature 1..22: note = chemically synthesized
  source 1..22: mol_type = other DNA
tacagttcggatttctgaataa

SEQ ID NO: 34996 - DNA, 22 bp, synthetic construct
  misc_feature 1..22: note = chemically synthesized
  source 1..22: mol_type = other DNA
cagttcggatttctgaataatt

SEQ ID NO: 34997 - DNA, 22 bp, synthetic construct
  misc_feature 1..22: note = chemically synthesized
  source 1..22: mol_type = other DNA
ggatttctgaataatttgatcc

SEQ ID NO: 34998 - DNA, 22 bp, synthetic construct
  misc_feature 1..22: note = chemically synthesized
  source 1..22: mol_type = other DNA
ctgaataatttgatccgacaga

SEQ ID NO: 34999 - DNA, 22 bp, synthetic construct
  misc_feature 1..22: note = chemically synthesized
  source 1..22: mol_type = other DNA
tgaataatttgatccgacagaa

SEQ ID NO: 35000 - DNA, 22 bp, synthetic construct
  misc_feature 1..22: note = chemically synthesized
  source 1..22: mol_type = other DNA
aataatttgatccgacagaaaa

SEQ ID NO: 35001 - DNA, 22 bp, synthetic construct
  misc_feature 1..22: note = chemically synthesized
  source 1..22: mol_type = other DNA
gatccgacagaaaaatatgatt

SEQ ID NO: 35002 - DNA, 22 bp, synthetic construct
  misc_feature 1..22: note = chemically synthesized
  source 1..22: mol_type = other DNA
atccgacagaaaaatatgattt

SEQ ID NO: 35003 - DNA, 22 bp, synthetic construct
  misc_feature 1..22: note = chemically synthesized
  source 1..22: mol_type = other DNA
catttcttttcgagagaattat

SEQ ID NO: 35004 - DNA, 22 bp, synthetic construct
  misc_feature 1..22: note = chemically synthesized
  source 1..22: mol_type = other DNA
atttcttttcgagagaattata

SEQ ID NO: 35005 - DNA, 22 bp, synthetic construct
  misc_feature 1..22: note = chemically synthesized
  source 1..22: mol_type = other DNA
cttttcgagagaattatatgca

SEQ ID NO: 35006 - DNA, 22 bp, synthetic construct
  misc_feature 1..22: note = chemically synthesized
  source 1..22: mol_type = other DNA
ttttcgagagaattatatgcat

SEQ ID NO: 35007 - DNA, 22 bp, synthetic construct
  misc_feature 1..22: note = chemically synthesized
  source 1..22: mol_type = other DNA
ttcgagagaattatatgcatac

SEQ ID NO: 35008 - DNA, 22 bp, synthetic construct
  misc_feature 1..22: note = chemically synthesized
  source 1..22: mol_type = other DNA
tcgagagaattatatgcatact

SEQ ID NO: 35009 - DNA, 22 bp, synthetic construct
  misc_feature 1..22: note = chemically synthesized
  source 1..22: mol_type = other DNA
cgagagaattatatgcatactt

SEQ ID NO: 35010 - DNA, 22 bp, synthetic construct
  misc_feature 1..22: note = chemically synthesized
  source 1..22: mol_type = other DNA
gagagaattatatgcatacttt

SEQ ID NO: 35011 - DNA, 22 bp, synthetic construct
  misc_feature 1..22: note = chemically synthesized
  source 1..22: mol_type = other DNA
tatgcatactttctaaatgcaa

SEQ ID NO: 35012 - DNA, 22 bp, synthetic construct
  misc_feature 1..22: note = chemically synthesized
  source 1..22: mol_type = other DNA
tctaaatgcaagaataaattcc

SEQ ID NO: 35013 - DNA, 22 bp, synthetic construct
  misc_feature 1..22: note = chemically synthesized
  source 1..22: mol_type = other DNA
ctaaatgcaagaataaattcct

SEQ ID NO: 35014 - DNA, 22 bp, synthetic construct
  misc_feature 1..22: note = chemically synthesized
  source 1..22: mol_type = other DNA
taaatgcaagaataaattcctg

SEQ ID NO: 35015 - DNA, 22 bp, synthetic construct
  misc_feature 1..22: note = chemically synthesized
  source 1..22: mol_type = other DNA
aatgcaagaataaattcctgag

SEQ ID NO: 35016 - DNA, 22 bp, synthetic construct
  misc_feature 1..22: note = chemically synthesized
  source 1..22: mol_type = other DNA
ctgagctccatgtgacttcagt

SEQ ID NO: 35017 - DNA, 22 bp, synthetic construct
  misc_feature 1..22: note = chemically synthesized
  source 1..22: mol_type = other DNA
agctccatgtgacttcagtacc

SEQ ID NO: 35018 - DNA, 22 bp, synthetic construct
  misc_feature 1..22: note = chemically synthesized
  source 1..22: mol_type = other DNA
catgtgacttcagtaccatcag

SEQ ID NO: 35019 - DNA, 22 bp, synthetic construct
  misc_feature 1..22: note = chemically synthesized
  source 1..22: mol_type = other DNA
cagtaccatcagctctttggca

SEQ ID NO: 35020 - DNA, 22 bp, synthetic construct
  misc_feature 1..22: note = chemically synthesized
  source 1..22: mol_type = other DNA
agtaccatcagctctttggcag

SEQ ID NO: 35021 - DNA, 22 bp, synthetic construct
  misc_feature 1..22: note = chemically synthesized
  source 1..22: mol_type = other DNA
tttggcagcttatgagtataca

SEQ ID NO: 35022 - DNA, 22 bp, synthetic construct
  misc_feature 1..22: note = chemically synthesized
  source 1..22: mol_type = other DNA
tggcagcttatgagtatacagc

SEQ ID NO: 35023 - DNA, 22 bp, synthetic construct
  misc_feature 1..22: note = chemically synthesized
  source 1..22: mol_type = other DNA
ggcagcttatgagtatacagct

SEQ ID NO: 35024 - DNA, 22 bp, synthetic construct
  misc_feature 1..22: note = chemically synthesized
  source 1..22: mol_type = other DNA
gcagcttatgagtatacagctt

SEQ ID NO: 35025 - DNA, 22 bp, synthetic construct
  misc_feature 1..22: note = chemically synthesized
  source 1..22: mol_type = other DNA
atgagtatacagctttttaatt

SEQ ID NO: 35026 - DNA, 22 bp, synthetic construct
  misc_feature 1..22: note = chemically synthesized
  source 1..22: mol_type = other DNA
tgagtatacagctttttaattc

SEQ ID NO: 35027 - DNA, 22 bp, synthetic construct
  misc_feature 1..22: note = chemically synthesized
  source 1..22: mol_type = other DNA
tttaattctcacctggtcccca

SEQ ID NO: 35028 - DNA, 22 bp, synthetic construct
  misc_feature 1..22: note = chemically synthesized
  source 1..22: mol_type = other DNA
ttaattctcacctggtccccag

SEQ ID NO: 35029 - DNA, 22 bp, synthetic construct
  misc_feature 1..22: note = chemically synthesized
  source 1..22: mol_type = other DNA
taattctcacctggtccccagg

SEQ ID NO: 35030 - DNA, 22 bp, synthetic construct
  misc_feature 1..22: note = chemically synthesized
  source 1..22: mol_type = other DNA
aattctcacctggtccccagga

SEQ ID NO: 35031 - DNA, 22 bp, synthetic construct
  misc_feature 1..22: note = chemically synthesized
  source 1..22: mol_type = other DNA
attctcacctggtccccaggat

SEQ ID NO: 35032 - DNA, 22 bp, synthetic construct
  misc_feature 1..22: note = chemically synthesized
  source 1..22: mol_type = other DNA
tcacctggtccccaggatatgg

SEQ ID NO: 35033 - DNA, 22 bp, synthetic construct
  misc_feature 1..22: note = chemically synthesized
  source 1..22: mol_type = other DNA
acctggtccccaggatatggtt

SEQ ID NO: 35034 - DNA, 22 bp, synthetic construct
  misc_feature 1..22: note = chemically synthesized
  source 1..22: mol_type = other DNA
gtccccaggatatggtttactt

SEQ ID NO: 35035 - DNA, 22 bp, synthetic construct
  misc_feature 1..22: note = chemically synthesized
  source 1..22: mol_type = other DNA
acttgtcagagtagttttatga

SEQ ID NO: 35036 - DNA, 22 bp, synthetic construct
  misc_feature 1..22: note = chemically synthesized
  source 1..22: mol_type = other DNA
cttgtcagagtagttttatgag

SEQ ID NO: 35037 - DNA, 22 bp, synthetic construct
  misc_feature 1..22: note = chemically synthesized
  source 1..22: mol_type = other DNA
gtcagagtagttttatgaggtg

SEQ ID NO: 35038 - DNA, 22 bp, synthetic construct
  misc_feature 1..22: note = chemically synthesized
  source 1..22: mol_type = other DNA
tcagagtagttttatgaggtgc

SEQ ID NO: 35039 - DNA, 22 bp, synthetic construct
  misc_feature 1..22: note = chemically synthesized
  source 1..22: mol_type = other DNA
tatgaggtgctttctcctgact

SEQ ID NO: 35040 - DNA, 22 bp, synthetic construct
  misc_feature 1..22: note = chemically synthesized
  source 1..22: mol_type = other DNA
atgaggtgctttctcctgactc

SEQ ID NO: 35041 - DNA, 22 bp, synthetic construct
  misc_feature 1..22: note = chemically synthesized
  source 1..22: mol_type = other DNA
tgaggtgctttctcctgactct

SEQ ID NO: 35042 - DNA, 22 bp, synthetic construct
  misc_feature 1..22: note = chemically synthesized
  source 1..22: mol_type = other DNA
tctcctgactctgattctaggt

SEQ ID NO: 35043 - DNA, 22 bp, synthetic construct
  misc_feature 1..22: note = chemically synthesized
  source 1..22: mol_type = other DNA
ctcctgactctgattctaggta

SEQ ID NO: 35044 - DNA, 22 bp, synthetic construct
  misc_feature 1..22: note = chemically synthesized
  source 1..22: mol_type = other DNA
tcctgactctgattctaggtaa

SEQ ID NO: 35045 - DNA, 22 bp, synthetic construct
  misc_feature 1..22: note = chemically synthesized
  source 1..22: mol_type = other DNA
ctgactctgattctaggtaaca

SEQ ID NO: 35046 - DNA, 22 bp, synthetic construct
  misc_feature 1..22: note = chemically synthesized
  source 1..22: mol_type = other DNA
actctgattctaggtaacacct

SEQ ID NO: 35047 - DNA, 22 bp, synthetic construct
  misc_feature 1..22: note = chemically synthesized
  source 1..22: mol_type = other DNA
tgattctaggtaacacctgatg

SEQ ID NO: 35048 - DNA, 22 bp, synthetic construct
  misc_feature 1..22: note = chemically synthesized
  source 1..22: mol_type = other DNA
attctaggtaacacctgatgag

SEQ ID NO: 35049 - DNA, 22 bp, synthetic construct
  misc_feature 1..22: note = chemically synthesized
  source 1..22: mol_type = other DNA
taggtaacacctgatgagatga

SEQ ID NO: 35050 - DNA, 22 bp, synthetic construct
  misc_feature 1..22: note = chemically synthesized
  source 1..22: mol_type = other DNA
ggtaacacctgatgagatgaac

SEQ ID NO: 35051 - DNA, 22 bp, synthetic construct
  misc_feature 1..22: note = chemically synthesized
  source 1..22: mol_type = other DNA
atgagatgaacagatggtgcac

SEQ ID NO: 35052 - DNA, 22 bp, synthetic construct
  misc_feature 1..22: note = chemically synthesized
  source 1..22: mol_type = other DNA
acttcctcttactgggcatgaa

SEQ ID NO: 35053 - DNA, 22 bp, synthetic construct
  misc_feature 1..22: note = chemically synthesized
  source 1..22: mol_type = other DNA
cctcttactgggcatgaaggaa

SEQ ID NO: 35054 - DNA, 22 bp, synthetic construct
  misc_feature 1..22: note = chemically synthesized
  source 1..22: mol_type = other DNA
ctcttactgggcatgaaggaaa

SEQ ID NO: 35055 - DNA, 22 bp, synthetic construct
  misc_feature 1..22: note = chemically synthesized
  source 1..22: mol_type = other DNA
ttactgggcatgaaggaaagag

SEQ ID NO: 35056 - DNA, 22 bp, synthetic construct
  misc_feature 1..22: note = chemically synthesized
  source 1..22: mol_type = other DNA
actgggcatgaaggaaagagag

SEQ ID NO: 35057 - DNA, 22 bp, synthetic construct
  misc_feature 1..22: note = chemically synthesized
  source 1..22: mol_type = other DNA
ctgggcatgaaggaaagagaga

SEQ ID NO: 35058 - DNA, 22 bp, synthetic construct
  misc_feature 1..22: note = chemically synthesized
  source 1..22: mol_type = other DNA
ggcatgaaggaaagagagagaa

SEQ ID NO: 35059 - DNA, 22 bp, synthetic construct
  misc_feature 1..22: note = chemically synthesized
  source 1..22: mol_type = other DNA
ctgctacattttttttttctgt

SEQ ID NO: 35060 - DNA, 22 bp, synthetic construct
  misc_feature 1..22: note = chemically synthesized
  source 1..22: mol_type = other DNA
ctacattttttttttctgtgga

SEQ ID NO: 35061 - DNA, 22 bp, synthetic construct
  misc_feature 1..22: note = chemically synthesized
  source 1..22: mol_type = other DNA
cattttttttttctgtggaaaa

SEQ ID NO: 35062 - DNA, 22 bp, synthetic construct
  misc_feature 1..22: note = chemically synthesized
  source 1..22: mol_type = other DNA
tttttttctgtggaaaaagagt

SEQ ID NO: 35063 - DNA, 22 bp, synthetic construct
  misc_feature 1..22: note = chemically synthesized
  source 1..22: mol_type = other DNA
ttttttctgtggaaaaagagtc

SEQ ID NO: 35064 - DNA, 22 bp, synthetic construct
  misc_feature 1..22: note = chemically synthesized
  source 1..22: mol_type = other DNA
tttttctgtggaaaaagagtct

SEQ ID NO: 35065 - DNA, 22 bp, synthetic construct
  misc_feature 1..22: note = chemically synthesized
  source 1..22: mol_type = other DNA
ttttctgtggaaaaagagtcta

SEQ ID NO: 35066 - DNA, 22 bp, synthetic construct
  misc_feature 1..22: note = chemically synthesized
  source 1..22: mol_type = other DNA
tttctgtggaaaaagagtctaa

SEQ ID NO: 35067 - DNA, 22 bp, synthetic construct
  misc_feature 1..22: note = chemically synthesized
  source 1..22: mol_type = other DNA
ttctgtggaaaaagagtctaat

SEQ ID NO: 35068 - DNA, 22 bp, synthetic construct
  misc_feature 1..22: note = chemically synthesized
  source 1..22: mol_type = other DNA
tctgtggaaaaagagtctaata

SEQ ID NO: 35069 - DNA, 22 bp, synthetic construct
  misc_feature 1..22: note = chemically synthesized
  source 1..22: mol_type = other DNA
ctgtggaaaaagagtctaatat

SEQ ID NO: 35070 - DNA, 22 bp, synthetic construct
  misc_feature 1..22: note = chemically synthesized
  source 1..22: mol_type = other DNA
tgtggaaaaagagtctaatatt

SEQ ID NO: 35071 - DNA, 22 bp, synthetic construct
  misc_feature 1..22: note = chemically synthesized
  source 1..22: mol_type = other DNA
tggaaaaagagtctaatatttc

SEQ ID NO: 35072 - DNA, 22 bp, synthetic construct
  misc_feature 1..22: note = chemically synthesized
  source 1..22: mol_type = other DNA
atatttctaattaaccttgatg

SEQ ID NO: 35073 - DNA, 22 bp, synthetic construct
  misc_feature 1..22: note = chemically synthesized
  source 1..22: mol_type = other DNA
ctaattaaccttgatgggaaca

SEQ ID NO: 35074 - DNA, 22 bp, synthetic construct
  misc_feature 1..22: note = chemically synthesized
  source 1..22: mol_type = other DNA
taattaaccttgatgggaacat

SEQ ID NO: 35075 - DNA, 22 bp, synthetic construct
  misc_feature 1..22: note = chemically synthesized
  source 1..22: mol_type = other DNA
attaaccttgatgggaacatag

SEQ ID NO: 35076 - DNA, 22 bp, synthetic construct
  misc_feature 1..22: note = chemically synthesized
  source 1..22: mol_type = other DNA
accttgatgggaacatagaaca

SEQ ID NO: 35077 - DNA, 22 bp, synthetic construct
  misc_feature 1..22: note = chemically synthesized
  source 1..22: mol_type = other DNA
gatgggaacatagaacatagat

SEQ ID NO: 35078 - DNA, 22 bp, synthetic construct
  misc_feature 1..22: note = chemically synthesized
  source 1..22: mol_type = other DNA
atgggaacatagaacatagatt

SEQ ID NO: 35079 - DNA, 22 bp, synthetic construct
  misc_feature 1..22: note = chemically synthesized
  source 1..22: mol_type = other DNA
taaagggaacttgcacattatc

SEQ ID NO: 35080 - DNA, 22 bp, synthetic construct
  misc_feature 1..22: note = chemically synthesized
  source 1..22: mol_type = other DNA
gcacattatcgcagtaggctga

SEQ ID NO: 35081 - DNA, 22 bp, synthetic construct
  misc_feature 1..22: note = chemically synthesized
  source 1..22: mol_type = other DNA
cacattatcgcagtaggctgaa

SEQ ID NO: 35082 - DNA, 22 bp, synthetic construct
  misc_feature 1..22: note = chemically synthesized
  source 1..22: mol_type = other DNA
tcgcagtaggctgaataatggc

SEQ ID NO: 35083 - DNA, 22 bp, synthetic construct
  misc_feature 1..22: note = chemically synthesized
  source 1..22: mol_type = other DNA
aataatggctaatggctcactc

SEQ ID NO: 35084 - DNA, 22 bp, synthetic construct
  misc_feature 1..22: note = chemically synthesized
  source 1..22: mol_type = other DNA
atggctcactctgaaagatatg

SEQ ID NO: 35085 - DNA, 22 bp, synthetic construct
  misc_feature 1..22: note = chemically synthesized
  source 1..22: mol_type = other DNA
actctgaaagatatgtatggct

SEQ ID NO: 35086 - DNA, 22 bp, synthetic construct
  misc_feature 1..22: note = chemically synthesized
  source 1..22: mol_type = other DNA
tgaaagatatgtatggcttaac

SEQ ID NO: 35087 - DNA, 22 bp, synthetic construct
  misc_feature 1..22: note = chemically synthesized
  source 1..22: mol_type = other DNA
aaagatatgtatggcttaaccc

SEQ ID NO: 35088 - DNA, 22 bp, synthetic construct
  misc_feature 1..22: note = chemically synthesized
  source 1..22: mol_type = other DNA
aacccctgaaacctgtgagtat

SEQ ID NO: 35089 - DNA, 22 bp, synthetic construct
  misc_feature 1..22: note = chemically synthesized
  source 1..22: mol_type = other DNA
acccctgaaacctgtgagtatt

SEQ ID NO: 35090 - DNA, 22 bp, synthetic construct
  misc_feature 1..22: note = chemically synthesized
  source 1..22: mol_type = other DNA
aaacctgtgagtattatctttt

SEQ ID NO: 35091 - DNA, 22 bp, synthetic construct
  misc_feature 1..22: note = chemically synthesized
  source 1..22: mol_type = other DNA
tgagtattatcttttctagcca

SEQ ID NO: 35092 - DNA, 22 bp, synthetic construct
  misc_feature 1..22: note = chemically synthesized
  source 1..22: mol_type = other DNA
tcttttctagccaaacagactt

SEQ ID NO: 35093 - DNA, 22 bp, synthetic construct
  misc_feature 1..22: note = chemically synthesized
  source 1..22: mol_type = other DNA
ttctagccaaacagacttttgc

SEQ ID NO: 35094 - DNA, 22 bp, synthetic construct
  misc_feature 1..22: note = chemically synthesized
  source 1..22: mol_type = other DNA
tctagccaaacagacttttgca

SEQ ID NO: 35095 - DNA, 22 bp, synthetic construct
  misc_feature 1..22: note = chemically synthesized
  source 1..22: mol_type = other DNA
ctagccaaacagacttttgcat

SEQ ID NO: 35096 - DNA, 22 bp, synthetic construct
  misc_feature 1..22: note = chemically synthesized
  source 1..22: mol_type = other DNA
tagccaaacagacttttgcata

SEQ ID NO: 35097 - DNA, 22 bp, synthetic construct
  misc_feature 1..22: note = chemically synthesized
  source 1..22: mol_type = other DNA
gccaaacagacttttgcatata

SEQ ID NO: 35098 - DNA, 22 bp, synthetic construct
  misc_feature 1..22: note = chemically synthesized
  source 1..22: mol_type = other DNA
ttgcatatataattaaggatct

SEQ ID NO: 35099 - DNA, 22 bp, synthetic construct
  misc_feature 1..22: note = chemically synthesized
  source 1..22: mol_type = other DNA
tgcatatataattaaggatctt

SEQ ID NO: 35100 - DNA, 22 bp, synthetic construct
  misc_feature 1..22: note = chemically synthesized
  source 1..22: mol_type = other DNA
gcatatataattaaggatcttg

SEQ ID NO: 35101 - DNA, 22 bp, synthetic construct
  misc_feature 1..22: note = chemically synthesized
  source 1..22: mol_type = other DNA
catatataattaaggatcttgg

SEQ ID NO: 35102 - DNA, 22 bp, synthetic construct
  misc_feature 1..22: note = chemically synthesized
  source 1..22: mol_type = other DNA
aggatcttgggatggggagata

SEQ ID NO: 35103 - DNA, 22 bp, synthetic construct
  misc_feature 1..22: note = chemically synthesized
  source 1..22: mol_type = other DNA
gggatggggagatatcctaatt

SEQ ID NO: 35104 - DNA, 22 bp, synthetic construct
  misc_feature 1..22: note = chemically synthesized
  source 1..22: mol_type = other DNA
ggatggggagatatcctaatta

SEQ ID NO: 35105 - DNA, 22 bp, synthetic construct
  misc_feature 1..22: note = chemically synthesized
  source 1..22: mol_type = other DNA
attatttgggtgtatcctaaat

SEQ ID NO: 35106 - DNA, 22 bp, synthetic construct
  misc_feature 1..22: note = chemically synthesized
  source 1..22: mol_type = other DNA
tttgggtgtatcctaaatgtaa

SEQ ID NO: 35107 - DNA, 22 bp, synthetic construct
  misc_feature 1..22: note = chemically synthesized
  source 1..22: mol_type = other DNA
gggtgtatcctaaatgtaatca

SEQ ID NO: 35108 - DNA, 22 bp, synthetic construct
  misc_feature 1..22: note = chemically synthesized
  source 1..22: mol_type = other DNA
ggtgtatcctaaatgtaatcac

SEQ ID NO: 35109 - DNA, 22 bp, synthetic construct
  misc_feature 1..22: note = chemically synthesized
  source 1..22: mol_type = other DNA
aatgtaatcacaagtgtcatta

SEQ ID NO: 35110 - DNA, 22 bp, synthetic construct
  misc_feature 1..22: note = chemically synthesized
  source 1..22: mol_type = other DNA
taagagggaggcaaagggagat

SEQ ID NO: 35111 - DNA, 22 bp, synthetic construct
  misc_feature 1..22: note = chemically synthesized
  source 1..22: mol_type = other DNA
gacttataagaggagaaaatgt

SEQ ID NO: 35112 - DNA, 22 bp, synthetic construct
  misc_feature 1..22: note = chemically synthesized
  source 1..22: mol_type = other DNA
acttataagaggagaaaatgtg

SEQ ID NO: 35113 - DNA, 22 bp, synthetic construct
  misc_feature 1..22: note = chemically synthesized
  source 1..22: mol_type = other DNA
ataagaggagaaaatgtgacgt

SEQ ID NO: 35114 - DNA, 22 bp, synthetic construct
  misc_feature 1..22: note = chemically synthesized
  source 1..22: mol_type = other DNA
taagaggagaaaatgtgacgtg

SEQ ID NO: 35115 - DNA, 22 bp, synthetic construct
  misc_feature 1..22: note = chemically synthesized
  source 1..22: mol_type = other DNA
caaaagcagagatacatttttt

SEQ ID NO: 35116 - DNA, 22 bp, synthetic construct
  misc_feature 1..22: note = chemically synthesized
  source 1..22: mol_type = other DNA
ttttgaagatcgaggaagaggc

SEQ ID NO: 35117 - DNA, 22 bp, synthetic construct
  misc_feature 1..22: note = chemically synthesized
  source 1..22: mol_type = other DNA
tttgaagatcgaggaagaggct

SEQ ID NO: 35118 - DNA, 22 bp, synthetic construct
  misc_feature 1..22: note = chemically synthesized
  source 1..22: mol_type = other DNA
ttgaagatcgaggaagaggcta

SEQ ID NO: 35119 - DNA, 22 bp, synthetic construct
  misc_feature 1..22: note = chemically synthesized
  source 1..22: mol_type = other DNA
tgaagatcgaggaagaggctac

SEQ ID NO: 35120 - DNA, 22 bp, synthetic construct
  misc_feature 1..22: note = chemically synthesized
  source 1..22: mol_type = other DNA
gaagatcgaggaagaggctaca

SEQ ID NO: 35121 - DNA, 22 bp, synthetic construct
  misc_feature 1..22: note = chemically synthesized
  source 1..22: mol_type = other DNA
aagatcgaggaagaggctacaa

SEQ ID NO: 35122 - DNA, 22 bp, synthetic construct
  misc_feature 1..22: note = chemically synthesized
  source 1..22: mol_type = other DNA
caaaccaaggaatgtgggtagc

SEQ ID NO: 35123 - DNA, 22 bp, synthetic construct
  misc_feature 1..22: note = chemically synthesized
  source 1..22: mol_type = other DNA
tagaagaggaaacagaatccat

SEQ ID NO: 35124 - DNA, 22 bp, synthetic construct
  misc_feature 1..22: note = chemically synthesized
  source 1..22: mol_type = other DNA
gaagaggaaacagaatccatgg

SEQ ID NO: 35125 - DNA, 22 bp, synthetic construct
  misc_feature 1..22: note = chemically synthesized
  source 1..22: mol_type = other DNA
tcatagagtctccagaagaaac

SEQ ID NO: 35126 - DNA, 22 bp, synthetic construct
  misc_feature 1..22: note = chemically synthesized
  source 1..22: mol_type = other DNA
atagagtctccagaagaaacag

SEQ ID NO: 35127 - DNA, 22 bp, synthetic construct
  misc_feature 1..22: note = chemically synthesized
  source 1..22: mol_type = other DNA
cagaagaaacagccacactgac

SEQ ID NO: 35128 - DNA, 22 bp, synthetic construct
  misc_feature 1..22: note = chemically synthesized
  source 1..22: mol_type = other DNA
acacctcgactttagcccagtg

SEQ ID NO: 35129 - DNA, 22 bp, synthetic construct
  misc_feature 1..22: note = chemically synthesized
  source 1..22: mol_type = other DNA
gactttagcccagtgaaaccga

SEQ ID NO: 35130 - DNA, 22 bp, synthetic construct
  misc_feature 1..22: note = chemically synthesized
  source 1..22: mol_type = other DNA
tagcccagtgaaaccgatttca

SEQ ID NO: 35131 - DNA, 22 bp, synthetic construct
  misc_feature 1..22: note = chemically synthesized
  source 1..22: mol_type = other DNA
agcccagtgaaaccgatttcag

SEQ ID NO: 35132 - DNA, 22 bp, synthetic construct
  misc_feature 1..22: note = chemically synthesized
  source 1..22: mol_type = other DNA
gcccagtgaaaccgatttcaga

SEQ ID NO: 35133 - DNA, 22 bp, synthetic construct
  misc_feature 1..22: note = chemically synthesized
  source 1..22: mol_type = other DNA
cagacttctgacctccacaact

SEQ ID NO: 35134 - DNA, 22 bp, synthetic construct
  misc_feature 1..22: note = chemically synthesized
  source 1..22: mol_type = other DNA
agacttctgacctccacaactt

SEQ ID NO: 35135 - DNA, 22 bp, synthetic construct
  misc_feature 1..22: note = chemically synthesized
  source 1..22: mol_type = other DNA
ctgacctccacaacttcaagat

SEQ ID NO: 35136 - DNA, 22 bp, synthetic construct
  misc_feature 1..22: note = chemically synthesized
  source 1..22: mol_type = other DNA
tgacctccacaacttcaagata

SEQ ID NO: 35137 - DNA, 22 bp, synthetic construct
  misc_feature 1..22: note = chemically synthesized
  source 1..22: mol_type = other DNA
acctccacaacttcaagataat

SEQ ID NO: 35138 - DNA, 22 bp, synthetic construct
  misc_feature 1..22: note = chemically synthesized
  source 1..22: mol_type = other DNA
cacaacttcaagataatacatt

SEQ ID NO: 35139 - DNA, 22 bp, synthetic construct
  misc_feature 1..22: note = chemically synthesized
  source 1..22: mol_type = other DNA
caagataatacatttgtgttgt

SEQ ID NO: 35140 - DNA, 22 bp, synthetic construct
  misc_feature 1..22: note = chemically synthesized
  source 1..22: mol_type = other DNA
aagataatacatttgtgttgtt

SEQ ID NO: 35141 - DNA, 22 bp, synthetic construct
  misc_feature 1..22: note = chemically synthesized
  source 1..22: mol_type = other DNA
gtgttgttttaagccaataaat

SEQ ID NO: 35142 - DNA, 22 bp, synthetic construct
  misc_feature 1..22: note = chemically synthesized
  source 1..22: mol_type = other DNA
tgttgttttaagccaataaatt

SEQ ID NO: 35143 - DNA, 22 bp, synthetic construct
  misc_feature 1..22: note = chemically synthesized
  source 1..22: mol_type = other DNA
ttttaagccaataaatttgtgg

SEQ ID NO: 35144 - DNA, 22 bp, synthetic construct
  misc_feature 1..22: note = chemically synthesized
  source 1..22: mol_type = other DNA
taagccaataaatttgtggtaa

SEQ ID NO: 35145 - DNA, 22 bp, synthetic construct
  misc_feature 1..22: note = chemically synthesized
  source 1..22: mol_type = other DNA
aagccaataaatttgtggtaat

SEQ ID NO: 35146 - DNA, 22 bp, synthetic construct
  misc_feature 1..22: note = chemically synthesized
  source 1..22: mol_type = other DNA
agccaataaatttgtggtaatt

SEQ ID NO: 35147 - DNA, 22 bp, synthetic construct
  misc_feature 1..22: note = chemically synthesized
  source 1..22: mol_type = other DNA
gtggtaattttttacagcagca

SEQ ID NO: 35148 - DNA, 22 bp, synthetic construct
  misc_feature 1..22: note = chemically synthesized
  source 1..22: mol_type = other DNA
tggtaattttttacagcagcaa

SEQ ID NO: 35149 - DNA, 22 bp, synthetic construct
  misc_feature 1..22: note = chemically synthesized
  source 1..22: mol_type = other DNA
tttacagcagcaagaggaaatc

SEQ ID NO: 35150 - DNA, 22 bp, synthetic construct
  misc_feature 1..22: note = chemically synthesized
  source 1..22: mol_type = other DNA
ttacagcagcaagaggaaatca

SEQ ID NO: 35151 - DNA, 22 bp, synthetic construct
  misc_feature 1..22: note = chemically synthesized
  source 1..22: mol_type = other DNA
tacagcagcaagaggaaatcag

SEQ ID NO: 35152 - DNA, 22 bp, synthetic construct
  misc_feature 1..22: note = chemically synthesized
  source 1..22: mol_type = other DNA
acagcagcaagaggaaatcagt

SEQ ID NO: 35153 - DNA, 22 bp, synthetic construct
  misc_feature 1..22: note = chemically synthesized
  source 1..22: mol_type = other DNA
cagcagcaagaggaaatcagtt

SEQ ID NO: 35154 - DNA, 22 bp, synthetic construct
  misc_feature 1..22: note = chemically synthesized
  source 1..22: mol_type = other DNA
cgtagaatagtaggtcctgtct

SEQ ID NO: 35155 - DNA, 22 bp, synthetic construct
  misc_feature 1..22: note = chemically synthesized
  source 1..22: mol_type = other DNA
tctctggctaatcattagaatc

SEQ ID NO: 35156 - DNA, 22 bp, synthetic construct
  misc_feature 1..22: note = chemically synthesized
  source 1..22: mol_type = other DNA
tggctaatcattagaatcactc

SEQ ID NO: 35157 - DNA, 22 bp, synthetic construct
  misc_feature 1..22: note = chemically synthesized
  source 1..22: mol_type = other DNA
gctaatcattagaatcactcca

SEQ ID NO: 35158 - DNA, 22 bp, synthetic construct
  misc_feature 1..22: note = chemically synthesized
  source 1..22: mol_type = other DNA
atcattagaatcactccagaag

SEQ ID NO: 35159 - DNA, 22 bp, synthetic construct
  misc_feature 1..22: note = chemically synthesized
  source 1..22: mol_type = other DNA
gaatcactccagaagcttgtta

SEQ ID NO: 35160 - DNA, 22 bp, synthetic construct
  misc_feature 1..22: note = chemically synthesized
  source 1..22: mol_type = other DNA
cagaagcttgttacatacagac

SEQ ID NO: 35161 - DNA, 22 bp, synthetic construct
  misc_feature 1..22: note = chemically synthesized
  source 1..22: mol_type = other DNA
gttacatacagacccagagcca

SEQ ID NO: 35162 - DNA, 22 bp, synthetic construct
  misc_feature 1..22: note = chemically synthesized
  source 1..22: mol_type = other DNA
ttacatacagacccagagccag

SEQ ID NO: 35163 - DNA, 22 bp, synthetic construct
  misc_feature 1..22: note = chemically synthesized
  source 1..22: mol_type = other DNA
catacagacccagagccagtga

SEQ ID NO: 35164 - DNA, 22 bp, synthetic construct
  misc_feature 1..22: note = chemically synthesized
  source 1..22: mol_type = other DNA
ggtggtggggcccagagcctga

SEQ ID NO: 35165 - DNA, 22 bp, synthetic construct
  misc_feature 1..22: note = chemically synthesized
  source 1..22: mol_type = other DNA
gtggtggggcccagagcctgaa

SEQ ID NO: 35166 - DNA, 22 bp, synthetic construct
  misc_feature 1..22: note = chemically synthesized
  source 1..22: mol_type = other DNA
aatattaagcaagttcttcgtt

SEQ ID NO: 35167 - DNA, 22 bp, synthetic construct
  misc_feature 1..22: note = chemically synthesized
  source 1..22: mol_type = other DNA
agcaagttcttcgttttagaaa

SEQ ID NO: 35168 - DNA, 22 bp, synthetic construct
  misc_feature 1..22: note = chemically synthesized
  source 1..22: mol_type = other DNA
ttcgttttagaaatgaggaaac

SEQ ID NO: 35169 - DNA, 22 bp, synthetic construct
  misc_feature 1..22: note = chemically synthesized
  source 1..22: mol_type = other DNA
cgttttagaaatgaggaaacca

SEQ ID NO: 35170 - DNA, 22 bp, synthetic construct
  misc_feature 1..22: note = chemically synthesized
  source 1..22: mol_type = other DNA
gttttagaaatgaggaaaccaa

SEQ ID NO: 35171 - DNA, 22 bp, synthetic construct
  misc_feature 1..22: note = chemically synthesized
  source 1..22: mol_type = other DNA
tagaaatgaggaaaccaaggtt

SEQ ID NO: 35172 - DNA, 22 bp, synthetic construct
  misc_feature 1..22: note = chemically synthesized
  source 1..22: mol_type = other DNA
agaaatgaggaaaccaaggttg

SEQ ID NO: 35173 - DNA, 22 bp, synthetic construct
  misc_feature 1..22: note = chemically synthesized
  source 1..22: mol_type = other DNA
gaaatgaggaaaccaaggttgg

SEQ ID NO: 35174 - DNA, 22 bp, synthetic construct
  misc_feature 1..22: note = chemically synthesized
  source 1..22: mol_type = other DNA
ggagaagctaagcaacttactc

SEQ ID NO: 35175 - DNA, 22 bp, synthetic construct
  misc_feature 1..22: note = chemically synthesized
  source 1..22: mol_type = other DNA
agcaacttactcaaatacatag

SEQ ID NO: 35176 - DNA, 22 bp, synthetic construct
  misc_feature 1..22: note = chemically synthesized
  source 1..22: mol_type = other DNA
actcaaatacatagggtatttc

SEQ ID NO: 35177 - DNA, 22 bp, synthetic construct
  misc_feature 1..22: note = chemically synthesized
  source 1..22: mol_type = other DNA
ctcaaatacatagggtatttca

SEQ ID NO: 35178 - DNA, 22 bp, synthetic construct
  misc_feature 1..22: note = chemically synthesized
  source 1..22: mol_type = other DNA
aaatacatagggtatttcattt

SEQ ID NO: 35179 - DNA, 22 bp, synthetic construct
  misc_feature 1..22: note = chemically synthesized
  source 1..22: mol_type = other DNA
cattttaaatttaattttatta

SEQ ID NO: 35180 - DNA, 22 bp, synthetic construct
  misc_feature 1..22: note = chemically synthesized
  source 1..22: mol_type = other DNA
attttaaatttaattttattac

SEQ ID NO: 35181 - DNA, 22 bp, synthetic construct
  misc_feature 1..22: note = chemically synthesized
  source 1..22: mol_type = other DNA
taaatttaattttattacttta

SEQ ID NO: 35182 - DNA, 22 bp, synthetic construct
  misc_feature 1..22: note = chemically synthesized
  source 1..22: mol_type = other DNA
aaatttaattttattactttat

SEQ ID NO: 35183 - DNA, 22 bp, synthetic construct
  misc_feature 1..22: note = chemically synthesized
  source 1..22: mol_type = other DNA
aatttaattttattactttatc

SEQ ID NO: 35184 - DNA, 22 bp, synthetic construct
  misc_feature 1..22: note = chemically synthesized
  source 1..22: mol_type = other DNA
aattttattactttatcttttg

SEQ ID NO: 35185 - DNA, 22 bp, synthetic construct
  misc_feature 1..22: note = chemically synthesized
  source 1..22: mol_type = other DNA
attttattactttatcttttga

SEQ ID NO: 35186 - DNA, 22 bp, synthetic construct
  misc_feature 1..22: note = chemically synthesized
  source 1..22: mol_type = other DNA
tattactttatcttttgaattt

SEQ ID NO: 35187 - DNA, 22 bp, synthetic construct
  misc_feature 1..22: note = chemically synthesized
  source 1..22: mol_type = other DNA
attactttatcttttgaatttt

SEQ ID NO: 35188 - DNA, 22 bp, synthetic construct
  misc_feature 1..22: note = chemically synthesized
  source 1..22: mol_type = other DNA
ttactttatcttttgaattttc

SEQ ID NO: 35189 - DNA, 22 bp, synthetic construct
  misc_feature 1..22: note = chemically synthesized
  source 1..22: mol_type = other DNA
ctttatcttttgaattttctta

SEQ ID NO: 35190 - DNA, 22 bp, synthetic construct
  misc_feature 1..22: note = chemically synthesized
  source 1..22: mol_type = other DNA
tatcttttgaattttcttaccc

SEQ ID NO: 35191 - DNA, 22 bp, synthetic construct
  misc_feature 1..22: note = chemically synthesized
  source 1..22: mol_type = other DNA
atcttttgaattttcttacccc

SEQ ID NO: 35192 - DNA, 22 bp, synthetic construct
  misc_feature 1..22: note = chemically synthesized
  source 1..22: mol_type = other DNA
tcttttgaattttcttacccca

SEQ ID NO: 35193 - DNA, 22 bp, synthetic construct
  misc_feature 1..22: note = chemically synthesized
  source 1..22: mol_type = other DNA
ttgaattttcttaccccagttg

SEQ ID NO: 35194 - DNA, 22 bp, synthetic construct
  misc_feature 1..22: note = chemically synthesized
  source 1..22: mol_type = other DNA
tgaattttcttaccccagttgt

SEQ ID NO: 35195 - DNA, 22 bp, synthetic construct
  misc_feature 1..22: note = chemically synthesized
  source 1..22: mol_type = other DNA
gaattttcttaccccagttgta

SEQ ID NO: 35196 - DNA, 22 bp, synthetic construct
  misc_feature 1..22: note = chemically synthesized
  source 1..22: mol_type = other DNA
aattttcttaccccagttgtac

SEQ ID NO: 35197 - DNA, 22 bp, synthetic construct
  misc_feature 1..22: note = chemically synthesized
  source 1..22: mol_type = other DNA
tcttaccccagttgtacttttg

SEQ ID NO: 35198 - DNA, 22 bp, synthetic construct
  misc_feature 1..22: note = chemically synthesized
  source 1..22: mol_type = other DNA
cttaccccagttgtacttttgt

SEQ ID NO: 35199 - DNA, 22 bp, synthetic construct
  misc_feature 1..22: note = chemically synthesized
  source 1..22: mol_type = other DNA
ttaccccagttgtacttttgtg

SEQ ID NO: 35200 - DNA, 22 bp, synthetic construct
  misc_feature 1..22: note = chemically synthesized
  source 1..22: mol_type = other DNA
accccagttgtacttttgtgta

SEQ ID NO: 35201 - DNA, 22 bp, synthetic construct
  misc_feature 1..22: note = chemically synthesized
  source 1..22: mol_type = other DNA
ccccagttgtacttttgtgtaa

SEQ ID NO: 35202 - DNA, 22 bp, synthetic construct
  misc_feature 1..22: note = chemically synthesized
  source 1..22: mol_type = other DNA
tacttttgtgtaaatgtgattt

SEQ ID NO: 35203 - DNA, 22 bp, synthetic construct
  misc_feature 1..22: note = chemically synthesized
  source 1..22: mol_type = other DNA
ttgtgtaaatgtgatttcattt

SEQ ID NO: 35204 - DNA, 22 bp, synthetic construct
  misc_feature 1..22: note = chemically synthesized
  source 1..22: mol_type = other DNA
tgtgtaaatgtgatttcattta

SEQ ID NO: 35205 - DNA, 22 bp, synthetic construct
  misc_feature 1..22: note = chemically synthesized
  source 1..22: mol_type = other DNA
gtgtaaatgtgatttcatttac

SEQ ID NO: 35206 - DNA, 22 bp, synthetic construct
  misc_feature 1..22: note = chemically synthesized
  source 1..22: mol_type = other DNA
tgtaaatgtgatttcatttacg

SEQ ID NO: 35207 - DNA, 22 bp, synthetic construct
  misc_feature 1..22: note = chemically synthesized
  source 1..22: mol_type = other DNA
catttacggctttgtgttgaca

SEQ ID NO: 35208 - DNA, 22 bp, synthetic construct
  misc_feature 1..22: note = chemically synthesized
  source 1..22: mol_type = other DNA
atttacggctttgtgttgacat

SEQ ID NO: 35209 - DNA, 22 bp, synthetic construct
  misc_feature 1..22: note = chemically synthesized
  source 1..22: mol_type = other DNA
acggctttgtgttgacatattc

SEQ ID NO: 35210 - DNA, 22 bp, synthetic construct
  misc_feature 1..22: note = chemically synthesized
  source 1..22: mol_type = other DNA
cggctttgtgttgacatattca

SEQ ID NO: 35211 - DNA, 22 bp, synthetic construct
  misc_feature 1..22: note = chemically synthesized
  source 1..22: mol_type = other DNA
tgtgttgacatattcattaaaa

SEQ ID NO: 35212 - DNA, 22 bp, synthetic construct
  misc_feature 1..22: note = chemically synthesized
  source 1..22: mol_type = other DNA
gtgttgacatattcattaaaat

SEQ ID NO: 35213 - DNA, 22 bp, synthetic construct
  misc_feature 1..22: note = chemically synthesized
  source 1..22: mol_type = other DNA
tgttgacatattcattaaaatg

SEQ ID NO: 35214 - DNA, 22 bp, synthetic construct
  misc_feature 1..22: note = chemically synthesized
  source 1..22: mol_type = other DNA
acatattcattaaaatgaagaa

SEQ ID NO: 35215 - DNA, 22 bp, synthetic construct
  misc_feature 1..22: note = chemically synthesized
  source 1..22: mol_type = other DNA
attaaaatgaagaaataaaaga

SEQ ID NO: 35216 - DNA, 22 bp, synthetic construct
  misc_feature 1..22: note = chemically synthesized
  source 1..22: mol_type = other DNA
aaatgaagaaataaaagatgag

SEQ ID NO: 35217 - DNA, 22 bp, synthetic construct
  misc_feature 1..22: note = chemically synthesized
  source 1..22: mol_type = other DNA
taaaaattatataatgtttatt

SEQ ID NO: 35218 - DNA, 22 bp, synthetic construct
  misc_feature 1..22: note = chemically synthesized
  source 1..22: mol_type = other DNA
aaaaattatataatgtttattg

SEQ ID NO: 35219 - DNA, 22 bp, synthetic construct
  misc_feature 1..22: note = chemically synthesized
  source 1..22: mol_type = other DNA
aaaattatataatgtttattga

SEQ ID NO: 35220 - DNA, 22 bp, synthetic construct
  misc_feature 1..22: note = chemically synthesized
  source 1..22: mol_type = other DNA
tataatgtttattgattagaat

SEQ ID NO: 35221 - DNA, 22 bp, synthetic construct
  misc_feature 1..22: note = chemically synthesized
  source 1..22: mol_type = other DNA
attgattagaatgaatatgatg

SEQ ID NO: 35222 - DNA, 22 bp, synthetic construct
  misc_feature 1..22: note = chemically synthesized
  source 1..22: mol_type = other DNA
ttgattagaatgaatatgatgc

SEQ ID NO: 35223 - DNA, 22 bp, synthetic construct
  misc_feature 1..22: note = chemically synthesized
  source 1..22: mol_type = other DNA
attagaatgaatatgatgcaat

SEQ ID NO: 35224 - DNA, 22 bp, synthetic construct
  misc_feature 1..22: note = chemically synthesized
  source 1..22: mol_type = other DNA
gaatgaatatgatgcaatctgg

SEQ ID NO: 35225 - DNA, 22 bp, synthetic construct
  misc_feature 1..22: note = chemically synthesized
  source 1..22: mol_type = other DNA
gttttctgtgttcagattcctg

SEQ ID NO: 35226 - DNA, 22 bp, synthetic construct
  misc_feature 1..22: note = chemically synthesized
  source 1..22: mol_type = other DNA
tctgtgttcagattcctgacct

SEQ ID NO: 35227 - DNA, 22 bp, synthetic construct
  misc_feature 1..22: note = chemically synthesized
  source 1..22: mol_type = other DNA
ctgtgttcagattcctgacctc

SEQ ID NO: 35228 - DNA, 22 bp, synthetic construct
  misc_feature 1..22: note = chemically synthesized
  source 1..22: mol_type = other DNA
tgtgttcagattcctgacctct

SEQ ID NO: 35229 - DNA, 22 bp, synthetic construct
  misc_feature 1..22: note = chemically synthesized
  source 1..22: mol_type = other DNA
tgttcagattcctgacctctgg

SEQ ID NO: 35230 - DNA, 22 bp, synthetic construct
  misc_feature 1..22: note = chemically synthesized
  source 1..22: mol_type = other DNA
agattcctgacctctggagtta

SEQ ID NO: 35231 - DNA, 22 bp, synthetic construct
  misc_feature 1..22: note = chemically synthesized
  source 1..22: mol_type = other DNA
ctgacctctggagttaaccttt

SEQ ID NO: 35232 - DNA, 22 bp, synthetic construct
  misc_feature 1..22: note = chemically synthesized
  source 1..22: mol_type = other DNA
acctctggagttaacctttctt

SEQ ID NO: 35233 - DNA, 22 bp, synthetic construct
  misc_feature 1..22: note = chemically synthesized
  source 1..22: mol_type = other DNA
tggagttaacctttctttgtaa

SEQ ID NO: 35234 - DNA, 22 bp, synthetic construct
  misc_feature 1..22: note = chemically synthesized
  source 1..22: mol_type = other DNA
gagttaacctttctttgtaaag

SEQ ID NO: 35235 - DNA, 22 bp, synthetic construct
  misc_feature 1..22: note = chemically synthesized
  source 1..22: mol_type = other DNA
acctttctttgtaaagattaga

SEQ ID NO: 35236 - DNA, 22 bp, synthetic construct
  misc_feature 1..22: note = chemically synthesized
  source 1..22: mol_type = other DNA
tctttgtaaagattagacagca

SEQ ID NO: 35237 - DNA, 22 bp, synthetic construct
  misc_feature 1..22: note = chemically synthesized
  source 1..22: mol_type = other DNA
ctttgtaaagattagacagcag

SEQ ID NO: 35238 - DNA, 22 bp, synthetic construct
  misc_feature 1..22: note = chemically synthesized
  source 1..22: mol_type = other DNA
tttgtaaagattagacagcagg

SEQ ID NO: 35239 - DNA, 22 bp, synthetic construct
  misc_feature 1..22: note = chemically synthesized
  source 1..22: mol_type = other DNA
tgtaaagattagacagcaggca

SEQ ID NO: 35240 - DNA, 22 bp, synthetic construct
  misc_feature 1..22: note = chemically synthesized
  source 1..22: mol_type = other DNA
gtaaagattagacagcaggcag

SEQ ID NO: 35241 - DNA, 22 bp, synthetic construct
  misc_feature 1..22: note = chemically synthesized
  source 1..22: mol_type = other DNA
taaagattagacagcaggcagg

SEQ ID NO: 35242 - DNA, 22 bp, synthetic construct
  misc_feature 1..22: note = chemically synthesized
  source 1..22: mol_type = other DNA
gacagcaggcagggaagaatgc

SEQ ID NO: 35243 - DNA, 22 bp, synthetic construct
  misc_feature 1..22: note = chemically synthesized
  source 1..22: mol_type = other DNA
tgaaactgagagcaaagactgg

SEQ ID NO: 35244 - DNA, 22 bp, synthetic construct
  misc_feature 1..22: note = chemically synthesized
  source 1..22: mol_type = other DNA
gaaactgagagcaaagactggc

SEQ ID NO: 35245 - DNA, 22 bp, synthetic construct
  misc_feature 1..22: note = chemically synthesized
  source 1..22: mol_type = other DNA
aaactgagagcaaagactggca

SEQ ID NO: 35246 - DNA, 22 bp, synthetic construct
  misc_feature 1..22: note = chemically synthesized
  source 1..22: mol_type = other DNA
agagcaaagactggcatgcaat

SEQ ID NO: 35247 - DNA, 22 bp, synthetic construct
  misc_feature 1..22: note = chemically synthesized
  source 1..22: mol_type = other DNA
gcatgcaatttacattgatgtc

SEQ ID NO: 35248 - DNA, 22 bp, synthetic construct
  misc_feature 1..22: note = chemically synthesized
  source 1..22: mol_type = other DNA
acattgatgtcctggtgctgtg

SEQ ID NO: 35249 - DNA, 22 bp, synthetic construct
  misc_feature 1..22: note = chemically synthesized
  source 1..22: mol_type = other DNA
cattgatgtcctggtgctgtgc

SEQ ID NO: 35250 - DNA, 22 bp, synthetic construct
  misc_feature 1..22: note = chemically synthesized
  source 1..22: mol_type = other DNA
atgtcctggtgctgtgcataat

SEQ ID NO: 35251 - DNA, 22 bp, synthetic construct
  misc_feature 1..22: note = chemically synthesized
  source 1..22: mol_type = other DNA
gtgctgtgcataataagttgct

SEQ ID NO: 35252 - DNA, 22 bp, synthetic construct
  misc_feature 1..22: note = chemically synthesized
  source 1..22: mol_type = other DNA
tgcataataagttgcttaaaca

SEQ ID NO: 35253 - DNA, 22 bp, synthetic construct
  misc_feature 1..22: note = chemically synthesized
  source 1..22: mol_type = other DNA
cttaaacatgacagcaggatag

SEQ ID NO: 35254 - DNA, 22 bp, synthetic construct
  misc_feature 1..22: note = chemically synthesized
  source 1..22: mol_type = other DNA
aaacatgacagcaggataggat

SEQ ID NO: 35255 - DNA, 22 bp, synthetic construct
  misc_feature 1..22: note = chemically synthesized
  source 1..22: mol_type = other DNA
aacatgacagcaggataggatt

SEQ ID NO: 35256 - DNA, 22 bp, synthetic construct
  misc_feature 1..22: note = chemically synthesized
  source 1..22: mol_type = other DNA
tacataaaatttatttataaat

SEQ ID NO: 35257 - DNA, 22 bp, synthetic construct
  misc_feature 1..22: note = chemically synthesized
  source 1..22: mol_type = other DNA
acataaaatttatttataaatg

SEQ ID NO: 35258 - DNA, 22 bp, synthetic construct
  misc_feature 1..22: note = chemically synthesized
  source 1..22: mol_type = other DNA
cataaaatttatttataaatgg

SEQ ID NO: 35259 - DNA, 22 bp, synthetic construct
  misc_feature 1..22: note = chemically synthesized
  source 1..22: mol_type = other DNA
atttataaatggtaaagatgtt

SEQ ID NO: 35260 - DNA, 22 bp, synthetic construct
  misc_feature 1..22: note = chemically synthesized
  source 1..22: mol_type = other DNA
tttataaatggtaaagatgttt

SEQ ID NO: 35261 - DNA, 22 bp, synthetic construct
  misc_feature 1..22: note = chemically synthesized
  source 1..22: mol_type = other DNA
ataaatggtaaagatgtttcca

SEQ ID NO: 35262 - DNA, 22 bp, synthetic construct
  misc_feature 1..22: note = chemically synthesized
  source 1..22: mol_type = other DNA
taaatggtaaagatgtttccaa

SEQ ID NO: 35263 - DNA, 22 bp, synthetic construct
  misc_feature 1..22: note = chemically synthesized
  source 1..22: mol_type = other DNA
ccaacctctgctgaacttcctc

SEQ ID NO: 35264 - DNA, 22 bp, synthetic construct
  misc_feature 1..22: note = chemically synthesized
  source 1..22: mol_type = other DNA
caacctctgctgaacttcctca

SEQ ID NO: 35265 - DNA, 22 bp, synthetic construct
  misc_feature 1..22: note = chemically synthesized
  source 1..22: mol_type = other DNA
tgctgaacttcctcatagaatg

SEQ ID NO: 35266 - DNA, 22 bp, synthetic construct
  misc_feature 1..22: note = chemically synthesized
  source 1..22: mol_type = other DNA
ctgaacttcctcatagaatgtt

SEQ ID NO: 35267 - DNA, 22 bp, synthetic construct
  misc_feature 1..22: note = chemically synthesized
  source 1..22: mol_type = other DNA
aacttcctcatagaatgttcat

SEQ ID NO: 35268 - DNA, 22 bp, synthetic construct
  misc_feature 1..22: note = chemically synthesized
  source 1..22: mol_type = other DNA
cctcatagaatgttcatcagaa

SEQ ID NO: 35269 - DNA, 22 bp, synthetic construct
  misc_feature 1..22: note = chemically synthesized
  source 1..22: mol_type = other DNA
ctcatagaatgttcatcagaaa

SEQ ID NO: 35270 - DNA, 22 bp, synthetic construct
  misc_feature 1..22: note = chemically synthesized
  source 1..22: mol_type = other DNA
atagaatgttcatcagaaaaca

SEQ ID NO: 35271 - DNA, 22 bp, synthetic construct
  misc_feature 1..22: note = chemically synthesized
  source 1..22: mol_type = other DNA
atcagaaaacaaagtttctatc

SEQ ID NO: 35272 - DNA, 22 bp, synthetic construct
  misc_feature 1..22: note = chemically synthesized
  source 1..22: mol_type = other DNA
ctatctactctttcttccaaga

SEQ ID NO: 35273 - DNA, 22 bp, synthetic construct
  misc_feature 1..22: note = chemically synthesized
  source 1..22: mol_type = other DNA
tatctactctttcttccaagac

SEQ ID NO: 35274 - DNA, 22 bp, synthetic construct
  misc_feature 1..22: note = chemically synthesized
  source 1..22: mol_type = other DNA
tctactctttcttccaagactt

SEQ ID NO: 35275 - DNA, 22 bp, synthetic construct
  misc_feature 1..22: note = chemically synthesized
  source 1..22: mol_type = other DNA
ctctttcttccaagacttcaac

SEQ ID NO: 35276 - DNA, 22 bp, synthetic construct
  misc_feature 1..22: note = chemically synthesized
  source 1..22: mol_type = other DNA
tttcttccaagacttcaactcc

SEQ ID NO: 35277 - DNA, 22 bp, synthetic construct
  misc_feature 1..22: note = chemically synthesized
  source 1..22: mol_type = other DNA
tcttccaagacttcaactccta

SEQ ID NO: 35278 - DNA, 22 bp, synthetic construct
  misc_feature 1..22: note = chemically synthesized
  source 1..22: mol_type = other DNA
cttccaagacttcaactcctac

SEQ ID NO: 35279 - DNA, 22 bp, synthetic construct
  misc_feature 1..22: note = chemically synthesized
  source 1..22: mol_type = other DNA
ttccaagacttcaactcctacc

SEQ ID NO: 35280 - DNA, 22 bp, synthetic construct
  misc_feature 1..22: note = chemically synthesized
  source 1..22: mol_type = other DNA
ccaagacttcaactcctaccac

SEQ ID NO: 35281 - DNA, 22 bp, synthetic construct
  misc_feature 1..22: note = chemically synthesized
  source 1..22: mol_type = other DNA
caagacttcaactcctaccact

SEQ ID NO: 35282 - DNA, 22 bp, synthetic construct
  misc_feature 1..22: note = chemically synthesized
  source 1..22: mol_type = other DNA
caactcctaccactgacatcat

SEQ ID NO: 35283 - DNA, 22 bp, synthetic construct
  misc_feature 1..22: note = chemically synthesized
  source 1..22: mol_type = other DNA
aactcctaccactgacatcatg

SEQ ID NO: 35284 - DNA, 22 bp, synthetic construct
  misc_feature 1..22: note = chemically synthesized
  source 1..22: mol_type = other DNA
ctaccactgacatcatgaccct

SEQ ID NO: 35285 - DNA, 22 bp, synthetic construct
  misc_feature 1..22: note = chemically synthesized
  source 1..22: mol_type = other DNA
ccactgacatcatgaccctcag

SEQ ID NO: 35286 - DNA, 22 bp, synthetic construct
  misc_feature 1..22: note = chemically synthesized
  source 1..22: mol_type = other DNA
acatcatgaccctcagttctat

SEQ ID NO: 35287 - DNA, 22 bp, synthetic construct
  misc_feature 1..22: note = chemically synthesized
  source 1..22: mol_type = other DNA
agttctattcccctagccctgc

SEQ ID NO: 35288 - DNA, 22 bp, synthetic construct
  misc_feature 1..22: note = chemically synthesized
  source 1..22: mol_type = other DNA
tattcccctagccctgcccact

SEQ ID NO: 35289 - DNA, 22 bp, synthetic construct
  misc_feature 1..22: note = chemically synthesized
  source 1..22: mol_type = other DNA
ttcccctagccctgcccactcc

SEQ ID NO: 35290 - DNA, 22 bp, synthetic construct
  misc_feature 1..22: note = chemically synthesized
  source 1..22: mol_type = other DNA
ccctagccctgcccactcccct

SEQ ID NO: 35291 - DNA, 22 bp, synthetic construct
  misc_feature 1..22: note = chemically synthesized
  source 1..22: mol_type = other DNA
gccctgcccactcccctgaaat

SEQ ID NO: 35292 - DNA, 22 bp, synthetic construct
  misc_feature 1..22: note = chemically synthesized
  source 1..22: mol_type = other DNA
cccactcccctgaaatccagat

SEQ ID NO: 35293 - DNA, 22 bp, synthetic construct
  misc_feature 1..22: note = chemically synthesized
  source 1..22: mol_type = other DNA
ccctgaaatccagatccataaa

SEQ ID NO: 35294 - DNA, 22 bp, synthetic construct
  misc_feature 1..22: note = chemically synthesized
  source 1..22: mol_type = other DNA
aaatccagatccataaatccaa

SEQ ID NO: 35295 - DNA, 22 bp, synthetic construct
  misc_feature 1..22: note = chemically synthesized
  source 1..22: mol_type = other DNA
ggtatctcagtttggctgtccc

SEQ ID NO: 35296 - DNA, 22 bp, synthetic construct
  misc_feature 1..22: note = chemically synthesized
  source 1..22: mol_type = other DNA
agtttggctgtccctccatcaa

SEQ ID NO: 35297 - DNA, 22 bp, synthetic construct
  misc_feature 1..22: note = chemically synthesized
  source 1..22: mol_type = other DNA
ggctgtccctccatcaactcaa

SEQ ID NO: 35298 - DNA, 22 bp, synthetic construct
  misc_feature 1..22: note = chemically synthesized
  source 1..22: mol_type = other DNA
gctgtccctccatcaactcaaa

SEQ ID NO: 35299 - DNA, 22 bp, synthetic construct
  misc_feature 1..22: note = chemically synthesized
  source 1..22: mol_type = other DNA
tccctccatcaactcaaatttg

SEQ ID NO: 35300 - DNA, 22 bp, synthetic construct
  misc_feature 1..22: note = chemically synthesized
  source 1..22: mol_type = other DNA
catcaactcaaatttggctgac

SEQ ID NO: 35301 - DNA, 22 bp, synthetic construct
  misc_feature 1..22: note = chemically synthesized
  source 1..22: mol_type = other DNA
aaatttggctgacacagttttg

SEQ ID NO: 35302 - DNA, 22 bp, synthetic construct
  misc_feature 1..22: note = chemically synthesized
  source 1..22: mol_type = other DNA
ggctgacacagttttggattct

SEQ ID NO: 35303 - DNA, 22 bp, synthetic construct
  misc_feature 1..22: note = chemically synthesized
  source 1..22: mol_type = other DNA
gctgacacagttttggattcta

SEQ ID NO: 35304 - DNA, 22 bp, synthetic construct
  misc_feature 1..22: note = chemically synthesized
  source 1..22: mol_type = other DNA
acacagttttggattctagagc

SEQ ID NO: 35305 - DNA, 22 bp, synthetic construct
  misc_feature 1..22: note = chemically synthesized
  source 1..22: mol_type = other DNA
tggattctagagcatgcaggca

SEQ ID NO: 35306 - DNA, 22 bp, synthetic construct
  misc_feature 1..22: note = chemically synthesized
  source 1..22: mol_type = other DNA
ggattctagagcatgcaggcat

SEQ ID NO: 35307 - DNA, 22 bp, synthetic construct
  misc_feature 1..22: note = chemically synthesized
  source 1..22: mol_type = other DNA
gattctagagcatgcaggcatt

SEQ ID NO: 35308 - DNA, 22 bp, synthetic construct
  misc_feature 1..22: note = chemically synthesized
  source 1..22: mol_type = other DNA
tagagcatgcaggcattctgta

SEQ ID NO: 35309 - DNA, 22 bp, synthetic construct
  misc_feature 1..22: note = chemically synthesized
  source 1..22: mol_type = other DNA
gagcatgcaggcattctgtatg

SEQ ID NO: 35310 - DNA, 22 bp, synthetic construct
  misc_feature 1..22: note = chemically synthesized
  source 1..22: mol_type = other DNA
tgtatgtgctgtgcctttgcac

SEQ ID NO: 35311 - DNA, 22 bp, synthetic construct
  misc_feature 1..22: note = chemically synthesized
  source 1..22: mol_type = other DNA
tatgtgctgtgcctttgcactc

SEQ ID NO: 35312 - DNA, 22 bp, synthetic construct
  misc_feature 1..22: note = chemically synthesized
  source 1..22: mol_type = other DNA
tgcctttgcactcactcttccc

SEQ ID NO: 35313 - DNA, 22 bp, synthetic construct
  misc_feature 1..22: note = chemically synthesized
  source 1..22: mol_type = other DNA
tgcactcactcttccctccaga

SEQ ID NO: 35314 - DNA, 22 bp, synthetic construct
  misc_feature 1..22: note = chemically synthesized
  source 1..22: mol_type = other DNA
gcactcactcttccctccagac

SEQ ID NO: 35315 - DNA, 22 bp, synthetic construct
  misc_feature 1..22: note = chemically synthesized
  source 1..22: mol_type = other DNA
cactcactcttccctccagacc

SEQ ID NO: 35316 - DNA, 22 bp, synthetic construct
  misc_feature 1..22: note = chemically synthesized
  source 1..22: mol_type = other DNA
actcttccctccagaccccgtc

SEQ ID NO: 35317 - DNA, 22 bp, synthetic construct
  misc_feature 1..22: note = chemically synthesized
  source 1..22: mol_type = other DNA
ttccctccagaccccgtccttc

SEQ ID NO: 35318 - DNA, 22 bp, synthetic construct
  misc_feature 1..22: note = chemically synthesized
  source 1..22: mol_type = other DNA
ccctccagaccccgtccttcct

SEQ ID NO: 35319 - DNA, 22 bp, synthetic construct
  misc_feature 1..22: note = chemically synthesized
  source 1..22: mol_type = other DNA
cctccagaccccgtccttcctc

SEQ ID NO: 35320 - DNA, 22 bp, synthetic construct
  misc_feature 1..22: note = chemically synthesized
  source 1..22: mol_type = other DNA
cagaccccgtccttcctcactt

SEQ ID NO: 35321 - DNA, 22 bp, synthetic construct
  misc_feature 1..22: note = chemically synthesized
  source 1..22: mol_type = other DNA
cctcactttgccagttccaact

SEQ ID NO: 35322 - DNA, 22 bp, synthetic construct
  misc_feature 1..22: note = chemically synthesized
  source 1..22: mol_type = other DNA
ctcactttgccagttccaactt

SEQ ID NO: 35323 - DNA, 22 bp, synthetic construct
  misc_feature 1..22: note = chemically synthesized
  source 1..22: mol_type = other DNA
actttgccagttccaacttctc

SEQ ID NO: 35324 - DNA, 22 bp, synthetic construct
  misc_feature 1..22: note = chemically synthesized
  source 1..22: mol_type = other DNA
tgccagttccaacttctctctg

SEQ ID NO: 35325 - DNA, 22 bp, synthetic construct
  misc_feature 1..22: note = chemically synthesized
  source 1..22: mol_type = other DNA
gccagttccaacttctctctga

SEQ ID NO: 35326 - DNA, 22 bp, synthetic construct
  misc_feature 1..22: note = chemically synthesized
  source 1..22: mol_type = other DNA
ccagttccaacttctctctgaa

SEQ ID NO: 35327 - DNA, 22 bp, synthetic construct
  misc_feature 1..22: note = chemically synthesized
  source 1..22: mol_type = other DNA
caacttctctctgaagactcag

SEQ ID NO: 35328 - DNA, 22 bp, synthetic construct
  misc_feature 1..22: note = chemically synthesized
  source 1..22: mol_type = other DNA
ctctctgaagactcagtttagg

SEQ ID NO: 35329 - DNA, 22 bp, synthetic construct
  misc_feature 1..22: note = chemically synthesized
  source 1..22: mol_type = other DNA
tctctgaagactcagtttaggt

SEQ ID NO: 35330 - DNA, 22 bp, synthetic construct
  misc_feature 1..22: note = chemically synthesized
  source 1..22: mol_type = other DNA
tctgaagactcagtttaggtac

SEQ ID NO: 35331 - DNA, 22 bp, synthetic construct
  misc_feature 1..22: note = chemically synthesized
  source 1..22: mol_type = other DNA
tgaagactcagtttaggtacag

SEQ ID NO: 35332 - DNA, 22 bp, synthetic construct
  misc_feature 1..22: note = chemically synthesized
  source 1..22: mol_type = other DNA
aagactcagtttaggtacaggc

SEQ ID NO: 35333 - DNA, 22 bp, synthetic construct
  misc_feature 1..22: note = chemically synthesized
  source 1..22: mol_type = other DNA
agtttaggtacaggctccttta

SEQ ID NO: 35334 - DNA, 22 bp, synthetic construct
  misc_feature 1..22: note = chemically synthesized
  source 1..22: mol_type = other DNA
aggtacaggctcctttaggaaa

SEQ ID NO: 35335 - DNA, 22 bp, synthetic construct
  misc_feature 1..22: note = chemically synthesized
  source 1..22: mol_type = other DNA
ggtacaggctcctttaggaaat

SEQ ID NO: 35336 - DNA, 22 bp, synthetic construct
  misc_feature 1..22: note = chemically synthesized
  source 1..22: mol_type = other DNA
ctttaggaaatttttttttgac

SEQ ID NO: 35337 - DNA, 22 bp, synthetic construct
  misc_feature 1..22: note = chemically synthesized
  source 1..22: mol_type = other DNA
taggaaatttttttttgactct

SEQ ID NO: 35338 - DNA, 22 bp, synthetic construct
  misc_feature 1..22: note = chemically synthesized
  source 1..22: mol_type = other DNA
aggaaatttttttttgactcta

SEQ ID NO: 35339 - DNA, 22 bp, synthetic construct
  misc_feature 1..22: note = chemically synthesized
  source 1..22: mol_type = other DNA
ggaaatttttttttgactctac

SEQ ID NO: 35340 - DNA, 22 bp, synthetic construct
  misc_feature 1..22: note = chemically synthesized
  source 1..22: mol_type = other DNA
ttttttgactctacctagccca

SEQ ID NO: 35341 - DNA, 22 bp, synthetic construct
  misc_feature 1..22: note = chemically synthesized
  source 1..22: mol_type = other DNA
tttttgactctacctagcccag

SEQ ID NO: 35342 - DNA, 22 bp, synthetic construct
  misc_feature 1..22: note = chemically synthesized
  source 1..22: mol_type = other DNA
ttttgactctacctagcccaga

SEQ ID NO: 35343 - DNA, 22 bp, synthetic construct
  misc_feature 1..22: note = chemically synthesized
  source 1..22: mol_type = other DNA
tttgactctacctagcccagac

SEQ ID NO: 35344 - DNA, 22 bp, synthetic construct
  misc_feature 1..22: note = chemically synthesized
  source 1..22: mol_type = other DNA
ttgactctacctagcccagact

SEQ ID NO: 35345 - DNA, 22 bp, synthetic construct
  misc_feature 1..22: note = chemically synthesized
  source 1..22: mol_type = other DNA
tgactctacctagcccagactc

SEQ ID NO: 35346 - DNA, 22 bp, synthetic construct
  misc_feature 1..22: note = chemically synthesized
  source 1..22: mol_type = other DNA
gactctacctagcccagactca

SEQ ID NO: 35347 - DNA, 22 bp, synthetic construct
  misc_feature 1..22: note = chemically synthesized
  source 1..22: mol_type = other DNA
actctacctagcccagactcag

SEQ ID NO: 35348 - DNA, 22 bp, synthetic construct
  misc_feature 1..22: note = chemically synthesized
  source 1..22: mol_type = other DNA
tacctagcccagactcagttca

SEQ ID NO: 35349 - DNA, 22 bp, synthetic construct
  misc_feature 1..22: note = chemically synthesized
  source 1..22: mol_type = other DNA
cctagcccagactcagttcatc

SEQ ID NO: 35350 - DNA, 22 bp, synthetic construct
  misc_feature 1..22: note = chemically synthesized
  source 1..22: mol_type = other DNA
gcccagactcagttcatctacg

SEQ ID NO: 35351 - DNA, 22 bp, synthetic construct
  misc_feature 1..22: note = chemically synthesized
  source 1..22: mol_type = other DNA
agttcatctacgatattaatct

SEQ ID NO: 35352 - DNA, 22 bp, synthetic construct
  misc_feature 1..22: note = chemically synthesized
  source 1..22: mol_type = other DNA
atctacgatattaatctgcagt

SEQ ID NO: 35353 - DNA, 22 bp, synthetic construct
  misc_feature 1..22: note = chemically synthesized
  source 1..22: mol_type = other DNA
cgatattaatctgcagtgtcat

SEQ ID NO: 35354 - DNA, 22 bp, synthetic construct
  misc_feature 1..22: note = chemically synthesized
  source 1..22: mol_type = other DNA
atctgcagtgtcatgcactagc

SEQ ID NO: 35355 - DNA, 22 bp, synthetic construct
  misc_feature 1..22: note = chemically synthesized
  source 1..22: mol_type = other DNA
cagtgtcatgcactagcacaaa

SEQ ID NO: 35356 - DNA, 22 bp, synthetic construct
  misc_feature 1..22: note = chemically synthesized
  source 1..22: mol_type = other DNA
gcacaaaatatttgctgaatga

SEQ ID NO: 35357 - DNA, 22 bp, synthetic construct
  misc_feature 1..22: note = chemically synthesized
  source 1..22: mol_type = other DNA
gctgaatgaaagaatgagagtt

SEQ ID NO: 35358 - DNA, 22 bp, synthetic construct
  misc_feature 1..22: note = chemically synthesized
  source 1..22: mol_type = other DNA
ctgaatgaaagaatgagagtta

SEQ ID NO: 35359 - DNA, 22 bp, synthetic construct
  misc_feature 1..22: note = chemically synthesized
  source 1..22: mol_type = other DNA
aatgaaagaatgagagttaact

SEQ ID NO: 35360 - DNA, 22 bp, synthetic construct
  misc_feature 1..22: note = chemically synthesized
  source 1..22: mol_type = other DNA
acttttagtcaggcataaagat

SEQ ID NO: 35361 - DNA, 22 bp, synthetic construct
  misc_feature 1..22: note = chemically synthesized
  source 1..22: mol_type = other DNA
ttagtcaggcataaagataaaa

SEQ ID NO: 35362 - DNA, 22 bp, synthetic construct
  misc_feature 1..22: note = chemically synthesized
  source 1..22: mol_type = other DNA
tagtcaggcataaagataaaaa

SEQ ID NO: 35363 - DNA, 22 bp, synthetic construct
  misc_feature 1..22: note = chemically synthesized
  source 1..22: mol_type = other DNA
agtcaggcataaagataaaaaa

SEQ ID NO: 35364 - DNA, 22 bp, synthetic construct
  misc_feature 1..22: note = chemically synthesized
  source 1..22: mol_type = other DNA
gtcaggcataaagataaaaaac

SEQ ID NO: 35365 - DNA, 22 bp, synthetic construct
  misc_feature 1..22: note = chemically synthesized
  source 1..22: mol_type = other DNA
ttactccggtgtggagtgtttt

SEQ ID NO: 35366 - DNA, 22 bp, synthetic construct
  misc_feature 1..22: note = chemically synthesized
  source 1..22: mol_type = other DNA
tactccggtgtggagtgttttc

SEQ ID NO: 35367 - DNA, 22 bp, synthetic construct
  misc_feature 1..22: note = chemically synthesized
  source 1..22: mol_type = other DNA
actccggtgtggagtgttttca

SEQ ID NO: 35368 - DNA, 22 bp, synthetic construct
  misc_feature 1..22: note = chemically synthesized
  source 1..22: mol_type = other DNA
ctccggtgtggagtgttttcag

SEQ ID NO: 35369 - DNA, 22 bp, synthetic construct
  misc_feature 1..22: note = chemically synthesized
  source 1..22: mol_type = other DNA
cggtgtggagtgttttcaggat

SEQ ID NO: 35370 - DNA, 22 bp, synthetic construct
  misc_feature 1..22: note = chemically synthesized
  source 1..22: mol_type = other DNA
tcaggattcctaccaattagga

SEQ ID NO: 35371 - DNA, 22 bp, synthetic construct
  misc_feature 1..22: note = chemically synthesized
  source 1..22: mol_type = other DNA
caggattcctaccaattaggaa

SEQ ID NO: 35372 - DNA, 22 bp, synthetic construct
  misc_feature 1..22: note = chemically synthesized
  source 1..22: mol_type = other DNA
aggattcctaccaattaggaag

SEQ ID NO: 35373 - DNA, 22 bp, synthetic construct
  misc_feature 1..22: note = chemically synthesized
  source 1..22: mol_type = other DNA
ctaccaattaggaaggtgtttg

SEQ ID NO: 35374 - DNA, 22 bp, synthetic construct
  misc_feature 1..22: note = chemically synthesized
  source 1..22: mol_type = other DNA
ccaattaggaaggtgtttgatt

SEQ ID NO: 35375 - DNA, 22 bp, synthetic construct
  misc_feature 1..22: note = chemically synthesized
  source 1..22: mol_type = other DNA
ggaaggtgtttgattcttcaaa

SEQ ID NO: 35376 - DNA, 22 bp, synthetic construct
  misc_feature 1..22: note = chemically synthesized
  source 1..22: mol_type = other DNA
gattcttcaaactcagaaacac

SEQ ID NO: 35377 - DNA, 22 bp, synthetic construct
  misc_feature 1..22: note = chemically synthesized
  source 1..22: mol_type = other DNA
attcttcaaactcagaaacacc

SEQ ID NO: 35378 - DNA, 22 bp, synthetic construct
  misc_feature 1..22: note = chemically synthesized
  source 1..22: mol_type = other DNA
ttcaaactcagaaacacctccc

SEQ ID NO: 35379 - DNA, 22 bp, synthetic construct
  misc_feature 1..22: note = chemically synthesized
  source 1..22: mol_type = other DNA
caaactcagaaacacctcccct

SEQ ID NO: 35380 - DNA, 22 bp, synthetic construct
  misc_feature 1..22: note = chemically synthesized
  source 1..22: mol_type = other DNA
aaactcagaaacacctcccctt

SEQ ID NO: 35381 - DNA, 22 bp, synthetic construct
  misc_feature 1..22: note = chemically synthesized
  source 1..22: mol_type = other DNA
agaaacacctccccttaactga

SEQ ID NO: 35382 - DNA, 22 bp, synthetic construct
  misc_feature 1..22: note = chemically synthesized
  source 1..22: mol_type = other DNA
cccttaactgatggattcttca

SEQ ID NO: 35383 - DNA, 22 bp, synthetic construct
  misc_feature 1..22: note = chemically synthesized
  source 1..22: mol_type = other DNA
aactgatggattcttcaaactc

SEQ ID NO: 35384 - DNA, 22 bp, synthetic construct
  misc_feature 1..22: note = chemically synthesized
  source 1..22: mol_type = other DNA
actgatggattcttcaaactca

SEQ ID NO: 35385 - DNA, 22 bp, synthetic construct
  misc_feature 1..22: note = chemically synthesized
  source 1..22: mol_type = other DNA
atggattcttcaaactcagcat

SEQ ID NO: 35386 - DNA, 22 bp, synthetic construct
  misc_feature 1..22: note = chemically synthesized
  source 1..22: mol_type = other DNA
ttcaaactcagcatcagttaga

SEQ ID NO: 35387 - DNA, 22 bp, synthetic construct
  misc_feature 1..22: note = chemically synthesized
  source 1..22: mol_type = other DNA
caaactcagcatcagttagagg

SEQ ID NO: 35388 - DNA, 22 bp, synthetic construct
  misc_feature 1..22: note = chemically synthesized
  source 1..22: mol_type = other DNA
aaactcagcatcagttagaggg

SEQ ID NO: 35389 - DNA, 22 bp, synthetic construct
  misc_feature 1..22: note = chemically synthesized
  source 1..22: mol_type = other DNA
agcatcagttagagggcattag

SEQ ID NO: 35390 - DNA, 22 bp, synthetic construct
  misc_feature 1..22: note = chemically synthesized
  source 1..22: mol_type = other DNA
gagggcattagggcacttctca

SEQ ID NO: 35391 - DNA, 22 bp, synthetic construct
  misc_feature 1..22: note = chemically synthesized
  source 1..22: mol_type = other DNA
gggcacttctcaaaccctgcat

SEQ ID NO: 35392 - DNA, 22 bp, synthetic construct
  misc_feature 1..22: note = chemically synthesized
  source 1..22: mol_type = other DNA
ctcaaaccctgcattcagggaa

SEQ ID NO: 35393 - DNA, 22 bp, synthetic construct
  misc_feature 1..22: note = chemically synthesized
  source 1..22: mol_type = other DNA
tcaaaccctgcattcagggaag

SEQ ID NO: 35394 - DNA, 22 bp, synthetic construct
  misc_feature 1..22: note = chemically synthesized
  source 1..22: mol_type = other DNA
aaaccctgcattcagggaagat

SEQ ID NO: 35395 - DNA, 22 bp, synthetic construct
  misc_feature 1..22: note = chemically synthesized
  source 1..22: mol_type = other DNA
cattcagggaagatgtctgttg

SEQ ID NO: 35396 - DNA, 22 bp, synthetic construct
  misc_feature 1..22: note = chemically synthesized
  source 1..22: mol_type = other DNA
agggaagatgtctgttgtgggg

SEQ ID NO: 35397 - DNA, 22 bp, synthetic construct
  misc_feature 1..22: note = chemically synthesized
  source 1..22: mol_type = other DNA
ttgtggggtggtctggcctact

SEQ ID NO: 35398 - DNA, 22 bp, synthetic construct
  misc_feature 1..22: note = chemically synthesized
  source 1..22: mol_type = other DNA
tggggtggtctggcctacttgg

SEQ ID NO: 35399 - DNA, 22 bp, synthetic construct
  misc_feature 1..22: note = chemically synthesized
  source 1..22: mol_type = other DNA
gcctacttggcctgagccaagg

SEQ ID NO: 35400 - DNA, 22 bp, synthetic construct
  misc_feature 1..22: note = chemically synthesized
  source 1..22: mol_type = other DNA
cttggcctgagccaaggttctg

SEQ ID NO: 35401 - DNA, 22 bp, synthetic construct
  misc_feature 1..22: note = chemically synthesized
  source 1..22: mol_type = other DNA
ggcctgagccaaggttctgggc

SEQ ID NO: 35402 - DNA, 22 bp, synthetic construct
  misc_feature 1..22: note = chemically synthesized
  source 1..22: mol_type = other DNA
gcctgagccaaggttctgggca

SEQ ID NO: 35403 - DNA, 22 bp, synthetic construct
  misc_feature 1..22: note = chemically synthesized
  source 1..22: mol_type = other DNA
agccaaggttctgggcagttct

SEQ ID NO: 35404 - DNA, 22 bp, synthetic construct
  misc_feature 1..22: note = chemically synthesized
  source 1..22: mol_type = other DNA
tgggcagttctgttcagttaca

SEQ ID NO: 35405 - DNA, 22 bp, synthetic construct
  misc_feature 1..22: note = chemically synthesized
  source 1..22: mol_type = other DNA
ggcagttctgttcagttacaca

SEQ ID NO: 35406 - DNA, 22 bp, synthetic construct
  misc_feature 1..22: note = chemically synthesized
  source 1..22: mol_type = other DNA
tgttcagttacacatgcatgcg

SEQ ID NO: 35407 - DNA, 22 bp, synthetic construct
  misc_feature 1..22: note = chemically synthesized
  source 1..22: mol_type = other DNA
ttcagttacacatgcatgcgtt

SEQ ID NO: 35408 - DNA, 22 bp, synthetic construct
  misc_feature 1..22: note = chemically synthesized
  source 1..22: mol_type = other DNA
agttacacatgcatgcgttgag

SEQ ID NO: 35409 - DNA, 22 bp, synthetic construct
  misc_feature 1..22: note = chemically synthesized
  source 1..22: mol_type = other DNA
cacatgcatgcgttgagcattg

SEQ ID NO: 35410 - DNA, 22 bp, synthetic construct
  misc_feature 1..22: note = chemically synthesized
  source 1..22: mol_type = other DNA
agcattgattcaagcctggcct

SEQ ID NO: 35411 - DNA, 22 bp, synthetic construct
  misc_feature 1..22: note = chemically synthesized
  source 1..22: mol_type = other DNA
attcaagcctggcctgggcact

SEQ ID NO: 35412 - DNA, 22 bp, synthetic construct
  misc_feature 1..22: note = chemically synthesized
  source 1..22: mol_type = other DNA
aagcctggcctgggcactaggc

SEQ ID NO: 35413 - DNA, 22 bp, synthetic construct
  misc_feature 1..22: note = chemically synthesized
  source 1..22: mol_type = other DNA
gcctgggcactaggcatggttt

SEQ ID NO: 35414 - DNA, 22 bp, synthetic construct
  misc_feature 1..22: note = chemically synthesized
  source 1..22: mol_type = other DNA
ggcactaggcatggttttagat

SEQ ID NO: 35415 - DNA, 22 bp, synthetic construct
  misc_feature 1..22: note = chemically synthesized
  source 1..22: mol_type = other DNA
ggcatggttttagatattaggg

SEQ ID NO: 35416 - DNA, 22 bp, synthetic construct
  misc_feature 1..22: note = chemically synthesized
  source 1..22: mol_type = other DNA
tagatattagggacatattctg

SEQ ID NO: 35417 - DNA, 22 bp, synthetic construct
  misc_feature 1..22: note = chemically synthesized
  source 1..22: mol_type = other DNA
agatattagggacatattctgt

SEQ ID NO: 35418 - DNA, 22 bp, synthetic construct
  misc_feature 1..22: note = chemically synthesized
  source 1..22: mol_type = other DNA
gatattagggacatattctgtt

SEQ ID NO: 35419 - DNA, 22 bp, synthetic construct
  misc_feature 1..22: note = chemically synthesized
  source 1..22: mol_type = other DNA
gggacatattctgttttccttg

SEQ ID NO: 35420 - DNA, 22 bp, synthetic construct
  misc_feature 1..22: note = chemically synthesized
  source 1..22: mol_type = other DNA
tgttttccttgccttaagatac

SEQ ID NO: 35421 - DNA, 22 bp, synthetic construct
  misc_feature 1..22: note = chemically synthesized
  source 1..22: mol_type = other DNA
ttttccttgccttaagatacca

SEQ ID NO: 35422 - DNA, 22 bp, synthetic construct
  misc_feature 1..22: note = chemically synthesized
  source 1..22: mol_type = other DNA
tccttgccttaagataccagtc

SEQ ID NO: 35423 - DNA, 22 bp, synthetic construct
  misc_feature 1..22: note = chemically synthesized
  source 1..22: mol_type = other DNA
ccttgccttaagataccagtct

SEQ ID NO: 35424 - DNA, 22 bp, synthetic construct
  misc_feature 1..22: note = chemically synthesized
  source 1..22: mol_type = other DNA
cttgccttaagataccagtcta

SEQ ID NO: 35425 - DNA, 22 bp, synthetic construct
  misc_feature 1..22: note = chemically synthesized
  source 1..22: mol_type = other DNA
gccttaagataccagtctagta

SEQ ID NO: 35426 - DNA, 22 bp, synthetic construct
  misc_feature 1..22: note = chemically synthesized
  source 1..22: mol_type = other DNA
ccttaagataccagtctagtag

SEQ ID NO: 35427 - DNA, 22 bp, synthetic construct
  misc_feature 1..22: note = chemically synthesized
  source 1..22: mol_type = other DNA
aagataccagtctagtaggagc

SEQ ID NO: 35428 - DNA, 22 bp, synthetic construct
  misc_feature 1..22: note = chemically synthesized
  source 1..22: mol_type = other DNA
agataccagtctagtaggagcc

SEQ ID NO: 35429 - DNA, 22 bp, synthetic construct
  misc_feature 1..22: note = chemically synthesized
  source 1..22: mol_type = other DNA
gtaggagccactaaggcccctt

SEQ ID NO: 35430 - DNA, 22 bp, synthetic construct
  misc_feature 1..22: note = chemically synthesized
  source 1..22: mol_type = other DNA
aggcccctttttgagcctggac

SEQ ID NO: 35431 - DNA, 22 bp, synthetic construct
  misc_feature 1..22: note = chemically synthesized
  source 1..22: mol_type = other DNA
tttgagcctggacttcgcattc

SEQ ID NO: 35432 - DNA, 22 bp, synthetic construct
  misc_feature 1..22: note = chemically synthesized
  source 1..22: mol_type = other DNA
ttgagcctggacttcgcattca

SEQ ID NO: 35433 - DNA, 22 bp, synthetic construct
  misc_feature 1..22: note = chemically synthesized
  source 1..22: mol_type = other DNA
tgagcctggacttcgcattcaa

SEQ ID NO: 35434 - DNA, 22 bp, synthetic construct
  misc_feature 1..22: note = chemically synthesized
  source 1..22: mol_type = other DNA
gagcctggacttcgcattcaaa

SEQ ID NO: 35435 - DNA, 22 bp, synthetic construct
  misc_feature 1..22: note = chemically synthesized
  source 1..22: mol_type = other DNA
agcctggacttcgcattcaaac

SEQ ID NO: 35436 - DNA, 22 bp, synthetic construct
  misc_feature 1..22: note = chemically synthesized
  source 1..22: mol_type = other DNA
gacttcgcattcaaacataccc

SEQ ID NO: 35437 - DNA, 22 bp, synthetic construct
  misc_feature 1..22: note = chemically synthesized
  source 1..22: mol_type = other DNA
cgcattcaaacataccctgctt

SEQ ID NO: 35438 - DNA, 22 bp, synthetic construct
  misc_feature 1..22: note = chemically synthesized
  source 1..22: mol_type = other DNA
gcattcaaacataccctgcttc

SEQ ID NO: 35439 - DNA, 22 bp, synthetic construct
  misc_feature 1..22: note = chemically synthesized
  source 1..22: mol_type = other DNA
aaacataccctgcttctaatca

SEQ ID NO: 35440 - DNA, 22 bp, synthetic construct
  misc_feature 1..22: note = chemically synthesized
  source 1..22: mol_type = other DNA
cttctaatcaagtcatctattg

SEQ ID NO: 35441 - DNA, 22 bp, synthetic construct
  misc_feature 1..22: note = chemically synthesized
  source 1..22: mol_type = other DNA
ctaatcaagtcatctattggca

SEQ ID NO: 35442 - DNA, 22 bp, synthetic construct
  misc_feature 1..22: note = chemically synthesized
  source 1..22: mol_type = other DNA
taatcaagtcatctattggcag

SEQ ID NO: 35443 - DNA, 22 bp, synthetic construct
  misc_feature 1..22: note = chemically synthesized
  source 1..22: mol_type = other DNA
atcaagtcatctattggcagtg

SEQ ID NO: 35444 - DNA, 22 bp, synthetic construct
  misc_feature 1..22: note = chemically synthesized
  source 1..22: mol_type = other DNA
ttggcagtgaccttgggcaaat

SEQ ID NO: 35445 - DNA, 22 bp, synthetic construct
  misc_feature 1..22: note = chemically synthesized
  source 1..22: mol_type = other DNA
gcagtgaccttgggcaaatcat

SEQ ID NO: 35446 - DNA, 22 bp, synthetic construct
  misc_feature 1..22: note = chemically synthesized
  source 1..22: mol_type = other DNA
gggcaaatcatagtctctccaa

SEQ ID NO: 35447 - DNA, 22 bp, synthetic construct
  misc_feature 1..22: note = chemically synthesized
  source 1..22: mol_type = other DNA
ggcaaatcatagtctctccaag

SEQ ID NO: 35448 - DNA, 22 bp, synthetic construct
  misc_feature 1..22: note = chemically synthesized
  source 1..22: mol_type = other DNA
tccaagcattacttttctaatt

SEQ ID NO: 35449 - DNA, 22 bp, synthetic construct
  misc_feature 1..22: note = chemically synthesized
  source 1..22: mol_type = other DNA
caagcattacttttctaattga

SEQ ID NO: 35450 - DNA, 22 bp, synthetic construct
  misc_feature 1..22: note = chemically synthesized
  source 1..22: mol_type = other DNA
cttttctaattgaaacaagaac

SEQ ID NO: 35451 - DNA, 22 bp, synthetic construct
  misc_feature 1..22: note = chemically synthesized
  source 1..22: mol_type = other DNA
ttctaattgaaacaagaacctc

SEQ ID NO: 35452 - DNA, 22 bp, synthetic construct
  misc_feature 1..22: note = chemically synthesized
  source 1..22: mol_type = other DNA
tctaattgaaacaagaacctct

SEQ ID NO: 35453 - DNA, 22 bp, synthetic construct
  misc_feature 1..22: note = chemically synthesized
  source 1..22: mol_type = other DNA
ctaattgaaacaagaacctctc

SEQ ID NO: 35454 - DNA, 22 bp, synthetic construct
  misc_feature 1..22: note = chemically synthesized
  source 1..22: mol_type = other DNA
taattgaaacaagaacctctct

SEQ ID NO: 35455 - DNA, 22 bp, synthetic construct
  misc_feature 1..22: note = chemically synthesized
  source 1..22: mol_type = other DNA
attgaaacaagaacctctctct

SEQ ID NO: 35456 - DNA, 22 bp, synthetic construct
  misc_feature 1..22: note = chemically synthesized
  source 1..22: mol_type = other DNA
aaacaagaacctctctctatac

SEQ ID NO: 35457 - DNA, 22 bp, synthetic construct
  misc_feature 1..22: note = chemically synthesized
  source 1..22: mol_type = other DNA
tctctataccccagatttattt

SEQ ID NO: 35458 - DNA, 22 bp, synthetic construct
  misc_feature 1..22: note = chemically synthesized
  source 1..22: mol_type = other DNA
tctataccccagatttattttg

SEQ ID NO: 35459 - DNA, 22 bp, synthetic construct
  misc_feature 1..22: note = chemically synthesized
  source 1..22: mol_type = other DNA
tataccccagatttattttgag

SEQ ID NO: 35460 - DNA, 22 bp, synthetic construct
  misc_feature 1..22: note = chemically synthesized
  source 1..22: mol_type = other DNA
taccccagatttattttgagga

SEQ ID NO: 35461 - DNA, 22 bp, synthetic construct
  misc_feature 1..22: note = chemically synthesized
  source 1..22: mol_type = other DNA
attttgaggattatgagttaat

SEQ ID NO: 35462 - DNA, 22 bp, synthetic construct
  misc_feature 1..22: note = chemically synthesized
  source 1..22: mol_type = other DNA
ttttgaggattatgagttaatt

SEQ ID NO: 35463 - DNA, 22 bp, synthetic construct
  misc_feature 1..22: note = chemically synthesized
  source 1..22: mol_type = other DNA
tgaggattatgagttaattcat

SEQ ID NO: 35464 - DNA, 22 bp, synthetic construct
  misc_feature 1..22: note = chemically synthesized
  source 1..22: mol_type = other DNA
gaggattatgagttaattcata

SEQ ID NO: 35465 - DNA, 22 bp, synthetic construct
  misc_feature 1..22: note = chemically synthesized
  source 1..22: mol_type = other DNA
aggattatgagttaattcatag

SEQ ID NO: 35466 - DNA, 22 bp, synthetic construct
  misc_feature 1..22: note = chemically synthesized
  source 1..22: mol_type = other DNA
tgagttaattcatagctaaaat

SEQ ID NO: 35467 - DNA, 22 bp, synthetic construct
  misc_feature 1..22: note = chemically synthesized
  source 1..22: mol_type = other DNA
attcatagctaaaatgcttagc

SEQ ID NO: 35468 - DNA, 22 bp, synthetic construct
  misc_feature 1..22: note = chemically synthesized
  source 1..22: mol_type = other DNA
atagctaaaatgcttagcacct

SEQ ID NO: 35469 - DNA, 22 bp, synthetic construct
  misc_feature 1..22: note = chemically synthesized
  source 1..22: mol_type = other DNA
aaatgcttagcacctaacagca

SEQ ID NO: 35470 - DNA, 22 bp, synthetic construct
  misc_feature 1..22: note = chemically synthesized
  source 1..22: mol_type = other DNA
agcacctaacagcacataaccc

SEQ ID NO: 35471 - DNA, 22 bp, synthetic construct
  misc_feature 1..22: note = chemically synthesized
  source 1..22: mol_type = other DNA
gcacctaacagcacataaccca

SEQ ID NO: 35472 - DNA, 22 bp, synthetic construct
  misc_feature 1..22: note = chemically synthesized
  source 1..22: mol_type = other DNA
acagcacataacccacacatac

SEQ ID NO: 35473 - DNA, 22 bp, synthetic construct
  misc_feature 1..22: note = chemically synthesized
  source 1..22: mol_type = other DNA
ttcaattgcgtattactaaaaa

SEQ ID NO: 35474 - DNA, 22 bp, synthetic construct
  misc_feature 1..22: note = chemically synthesized
  source 1..22: mol_type = other DNA
tcaattgcgtattactaaaaag

SEQ ID NO: 35475 - DNA, 22 bp, synthetic construct
  misc_feature 1..22: note = chemically synthesized
  source 1..22: mol_type = other DNA
caattgcgtattactaaaaaga

SEQ ID NO: 35476 - DNA, 22 bp, synthetic construct
  misc_feature 1..22: note = chemically synthesized
  source 1..22: mol_type = other DNA
aattgcgtattactaaaaagaa

SEQ ID NO: 35477 - DNA, 22 bp, synthetic construct
  misc_feature 1..22: note = chemically synthesized
  source 1..22: mol_type = other DNA
cgtattactaaaaagaaggaat

SEQ ID NO: 35478 - DNA, 22 bp, synthetic construct
  misc_feature 1..22: note = chemically synthesized
  source 1..22: mol_type = other DNA
ctaaaaagaaggaatgatttcc

SEQ ID NO: 35479 - DNA, 22 bp, synthetic construct
  misc_feature 1..22: note = chemically synthesized
  source 1..22: mol_type = other DNA
aaaagaaggaatgatttcctag

SEQ ID NO: 35480 - DNA, 22 bp, synthetic construct
  misc_feature 1..22: note = chemically synthesized
  source 1..22: mol_type = other DNA
cctagaggaggtgcttcttctg

SEQ ID NO: 35481 - DNA, 22 bp, synthetic construct
  misc_feature 1..22: note = chemically synthesized
  source 1..22: mol_type = other DNA
ctagaggaggtgcttcttctgg

SEQ ID NO: 35482 - DNA, 22 bp, synthetic construct
  misc_feature 1..22: note = chemically synthesized
  source 1..22: mol_type = other DNA
gaggaggtgcttcttctggcca

SEQ ID NO: 35483 - DNA, 22 bp, synthetic construct
  misc_feature 1..22: note = chemically synthesized
  source 1..22: mol_type = other DNA
cttctggccaagggctgattca

SEQ ID NO: 35484 - DNA, 22 bp, synthetic construct
  misc_feature 1..22: note = chemically synthesized
  source 1..22: mol_type = other DNA
ttctggccaagggctgattcag

SEQ ID NO: 35485 - DNA, 22 bp, synthetic construct
  misc_feature 1..22: note = chemically synthesized
  source 1..22: mol_type = other DNA
ctggccaagggctgattcagag

SEQ ID NO: 35486 - DNA, 22 bp, synthetic construct
  misc_feature 1..22: note = chemically synthesized
  source 1..22: mol_type = other DNA
tggccaagggctgattcagagc

SEQ ID NO: 35487 - DNA, 22 bp, synthetic construct
  misc_feature 1..22: note = chemically synthesized
  source 1..22: mol_type = other DNA
gccaagggctgattcagagcct

SEQ ID NO: 35488 - DNA, 22 bp, synthetic construct
  misc_feature 1..22: note = chemically synthesized
  source 1..22: mol_type = other DNA
attcagagccttaattaactaa

SEQ ID NO: 35489 - DNA, 22 bp, synthetic construct
  misc_feature 1..22: note = chemically synthesized
  source 1..22: mol_type = other DNA
agagccttaattaactaaatag

SEQ ID NO: 35490 - DNA, 22 bp, synthetic construct
  misc_feature 1..22: note = chemically synthesized
  source 1..22: mol_type = other DNA
aattaactaaatagatcaagca

SEQ ID NO: 35491 - DNA, 22 bp, synthetic construct
  misc_feature 1..22: note = chemically synthesized
  source 1..22: mol_type = other DNA
attaactaaatagatcaagcat

SEQ ID NO: 35492 - DNA, 22 bp, synthetic construct
  misc_feature 1..22: note = chemically synthesized
  source 1..22: mol_type = other DNA
actaaatagatcaagcatatct

SEQ ID NO: 35493 - DNA, 22 bp, synthetic construct
  misc_feature 1..22: note = chemically synthesized
  source 1..22: mol_type = other DNA
aatagatcaagcatatctaact

SEQ ID NO: 35494 - DNA, 22 bp, synthetic construct
  misc_feature 1..22: note = chemically synthesized
  source 1..22: mol_type = other DNA
actggtcaccggaagtggtcca

SEQ ID NO: 35495 - DNA, 22 bp, synthetic construct
  misc_feature 1..22: note = chemically synthesized
  source 1..22: mol_type = other DNA
gtcaccggaagtggtccatgag

SEQ ID NO: 35496 - DNA, 22 bp, synthetic construct
  misc_feature 1..22: note = chemically synthesized
  source 1..22: mol_type = other DNA
cagcaatgggaaggtgtcagag

SEQ ID NO: 35497 - DNA, 22 bp, synthetic construct
  misc_feature 1..22: note = chemically synthesized
  source 1..22: mol_type = other DNA
ggaaaaagacatagagagaaac

SEQ ID NO: 35498 - DNA, 22 bp, synthetic construct
  misc_feature 1..22: note = chemically synthesized
  source 1..22: mol_type = other DNA
ttaggatgtctacagatttcca

SEQ ID NO: 35499 - DNA, 22 bp, synthetic construct
  misc_feature 1..22: note = chemically synthesized
  source 1..22: mol_type = other DNA
aggatgtctacagatttccaag

SEQ ID NO: 35500 - DNA, 22 bp, synthetic construct
  misc_feature 1..22: note = chemically synthesized
  source 1..22: mol_type = other DNA
ggatgtctacagatttccaaga

SEQ ID NO: 35501 - DNA, 22 bp, synthetic construct
  misc_feature 1..22: note = chemically synthesized
  source 1..22: mol_type = other DNA
cagatttccaagacaataattg

SEQ ID NO: 35502 - DNA, 22 bp, synthetic construct
  misc_feature 1..22: note = chemically synthesized
  source 1..22: mol_type = other DNA
ccaagacaataattgaaatgaa

SEQ ID NO: 35503 - DNA, 22 bp, synthetic construct
  misc_feature 1..22: note = chemically synthesized
  source 1..22: mol_type = other DNA
caagacaataattgaaatgaac

SEQ ID NO: 35504 - DNA, 22 bp, synthetic construct
  misc_feature 1..22: note = chemically synthesized
  source 1..22: mol_type = other DNA
aaatgaacaaaggcaagggatg

SEQ ID NO: 35505 - DNA, 22 bp, synthetic construct
  misc_feature 1..22: note = chemically synthesized
  source 1..22: mol_type = other DNA
catttctttcctttatcacctt

SEQ ID NO: 35506 - DNA, 22 bp, synthetic construct
  misc_feature 1..22: note = chemically synthesized
  source 1..22: mol_type = other DNA
atttctttcctttatcaccttt

SEQ ID NO: 35507 - DNA, 22 bp, synthetic construct
  misc_feature 1..22: note = chemically synthesized
  source 1..22: mol_type = other DNA
ctttcctttatcacctttccct

SEQ ID NO: 35508 - DNA, 22 bp, synthetic construct
  misc_feature 1..22: note = chemically synthesized
  source 1..22: mol_type = other DNA
tttcctttatcacctttccctt

SEQ ID NO: 35509 - DNA, 22 bp, synthetic construct
  misc_feature 1..22: note = chemically synthesized
  source 1..22: mol_type = other DNA
tcctttatcacctttcccttgt

SEQ ID NO: 35510 - DNA, 22 bp, synthetic construct
  misc_feature 1..22: note = chemically synthesized
  source 1..22: mol_type = other DNA
cctttatcacctttcccttgtt

SEQ ID NO: 35511 - DNA, 22 bp, synthetic construct
  misc_feature 1..22: note = chemically synthesized
  source 1..22: mol_type = other DNA
ctttatcacctttcccttgttc

SEQ ID NO: 35512 - DNA, 22 bp, synthetic construct
  misc_feature 1..22: note = chemically synthesized
  source 1..22: mol_type = other DNA
tatcacctttcccttgttcttc

SEQ ID NO: 35513 - DNA, 22 bp, synthetic construct
  misc_feature 1..22: note = chemically synthesized
  source 1..22: mol_type = other DNA
atcacctttcccttgttcttca

SEQ ID NO: 35514 - DNA, 22 bp, synthetic construct
  misc_feature 1..22: note = chemically synthesized
  source 1..22: mol_type = other DNA
tcacctttcccttgttcttcag

SEQ ID NO: 35515 - DNA, 22 bp, synthetic construct
  misc_feature 1..22: note = chemically synthesized
  source 1..22: mol_type = other DNA
tcccttgttcttcagctccagc

SEQ ID NO: 35516 - DNA, 22 bp, synthetic construct
  misc_feature 1..22: note = chemically synthesized
  source 1..22: mol_type = other DNA
cccttgttcttcagctccagct

SEQ ID NO: 35517 - DNA, 22 bp, synthetic construct
  misc_feature 1..22: note = chemically synthesized
  source 1..22: mol_type = other DNA
ccttgttcttcagctccagctg

SEQ ID NO: 35518 - DNA, 22 bp, synthetic construct
  misc_feature 1..22: note = chemically synthesized
  source 1..22: mol_type = other DNA
gttcttcagctccagctgtgcc

SEQ ID NO: 35519 - DNA, 22 bp, synthetic construct
  misc_feature 1..22: note = chemically synthesized
  source 1..22: mol_type = other DNA
ttcttcagctccagctgtgccc

SEQ ID NO: 35520 - DNA, 22 bp, synthetic construct
  misc_feature 1..22: note = chemically synthesized
  source 1..22: mol_type = other DNA
ttcagctccagctgtgcccaca

SEQ ID NO: 35521 - DNA, 22 bp, synthetic construct
  misc_feature 1..22: note = chemically synthesized
  source 1..22: mol_type = other DNA
cagctccagctgtgcccacaga

SEQ ID NO: 35522 - DNA, 22 bp, synthetic construct
  misc_feature 1..22: note = chemically synthesized
  source 1..22: mol_type = other DNA
agctccagctgtgcccacagac

SEQ ID NO: 35523 - DNA, 22 bp, synthetic construct
  misc_feature 1..22: note = chemically synthesized
  source 1..22: mol_type = other DNA
cagctgtgcccacagacaccac

SEQ ID NO: 35524 - DNA, 22 bp, synthetic construct
  misc_feature 1..22: note = chemically synthesized
  source 1..22: mol_type = other DNA
tgcccacagacaccacagggaa

SEQ ID NO: 35525 - DNA, 22 bp, synthetic construct
  misc_feature 1..22: note = chemically synthesized
  source 1..22: mol_type = other DNA
tgaacacaggggtttgaaccag

SEQ ID NO: 35526 - DNA, 22 bp, synthetic construct
  misc_feature 1..22: note = chemically synthesized
  source 1..22: mol_type = other DNA
aacacaggggtttgaaccaggg

SEQ ID NO: 35527 - DNA, 22 bp, synthetic construct
  misc_feature 1..22: note = chemically synthesized
  source 1..22: mol_type = other DNA
gaaccagggcctctctaagtct

SEQ ID NO: 35528 - DNA, 22 bp, synthetic construct
  misc_feature 1..22: note = chemically synthesized
  source 1..22: mol_type = other DNA
aaccagggcctctctaagtctt

SEQ ID NO: 35529 - DNA, 22 bp, synthetic construct
  misc_feature 1..22: note = chemically synthesized
  source 1..22: mol_type = other DNA
tctaagtcttttccaactctga

SEQ ID NO: 35530 - DNA, 22 bp, synthetic construct
  misc_feature 1..22: note = chemically synthesized
  source 1..22: mol_type = other DNA
taagtcttttccaactctgata

SEQ ID NO: 35531 - DNA, 22 bp, synthetic construct
  misc_feature 1..22: note = chemically synthesized
  source 1..22: mol_type = other DNA
agtcttttccaactctgatacc

SEQ ID NO: 35532 - DNA, 22 bp, synthetic construct
  misc_feature 1..22: note = chemically synthesized
  source 1..22: mol_type = other DNA
ttccaactctgataccctgaag

SEQ ID NO: 35533 - DNA, 22 bp, synthetic construct
  misc_feature 1..22: note = chemically synthesized
  source 1..22: mol_type = other DNA
tccaactctgataccctgaagt

SEQ ID NO: 35534 - DNA, 22 bp, synthetic construct
  misc_feature 1..22: note = chemically synthesized
  source 1..22: mol_type = other DNA
ccaactctgataccctgaagtt

SEQ ID NO: 35535 - DNA, 22 bp, synthetic construct
  misc_feature 1..22: note = chemically synthesized
  source 1..22: mol_type = other DNA
caactctgataccctgaagttc

SEQ ID NO: 35536 - DNA, 22 bp, synthetic construct
  misc_feature 1..22: note = chemically synthesized
  source 1..22: mol_type = other DNA
tgataccctgaagttctcagaa

SEQ ID NO: 35537 - DNA, 22 bp, synthetic construct
  misc_feature 1..22: note = chemically synthesized
  source 1..22: mol_type = other DNA
ataccctgaagttctcagaaac

SEQ ID NO: 35538 - DNA, 22 bp, synthetic construct
  misc_feature 1..22: note = chemically synthesized
  source 1..22: mol_type = other DNA
aagttctcagaaacttccataa

SEQ ID NO: 35539 - DNA, 22 bp, synthetic construct
  misc_feature 1..22: note = chemically synthesized
  source 1..22: mol_type = other DNA
tcagaaacttccataaattttg

SEQ ID NO: 35540 - DNA, 22 bp, synthetic construct
  misc_feature 1..22: note = chemically synthesized
  source 1..22: mol_type = other DNA
agaaacttccataaattttggc

SEQ ID NO: 35541 - DNA, 22 bp, synthetic construct
  misc_feature 1..22: note = chemically synthesized
  source 1..22: mol_type = other DNA
ccataaattttggctgaagaag

SEQ ID NO: 35542 - DNA, 22 bp, synthetic construct
  misc_feature 1..22: note = chemically synthesized
  source 1..22: mol_type = other DNA
cataaattttggctgaagaagc

SEQ ID NO: 35543 - DNA, 22 bp, synthetic construct
  misc_feature 1..22: note = chemically synthesized
  source 1..22: mol_type = other DNA
tggctgaagaagccatagcaaa

SEQ ID NO: 35544 - DNA, 22 bp, synthetic construct
  misc_feature 1..22: note = chemically synthesized
  source 1..22: mol_type = other DNA
ggctgaagaagccatagcaaac

SEQ ID NO: 35545 - DNA, 22 bp, synthetic construct
  misc_feature 1..22: note = chemically synthesized
  source 1..22: mol_type = other DNA
gctgaagaagccatagcaaact

SEQ ID NO: 35546 - DNA, 22 bp, synthetic construct
  misc_feature 1..22: note = chemically synthesized
  source 1..22: mol_type = other DNA
aagaagccatagcaaacttgtc

SEQ ID NO: 35547 - DNA, 22 bp, synthetic construct
  misc_feature 1..22: note = chemically synthesized
  source 1..22: mol_type = other DNA
gtcagatggtttcttaccttta

SEQ ID NO: 35548 - DNA, 22 bp, synthetic construct
  misc_feature 1..22: note = chemically synthesized
  source 1..22: mol_type = other DNA
tcagatggtttcttacctttaa

SEQ ID NO: 35549 - DNA, 22 bp, synthetic construct
  misc_feature 1..22: note = chemically synthesized
  source 1..22: mol_type = other DNA
cttacctttaactcagccattt

SEQ ID NO: 35550 - DNA, 22 bp, synthetic construct
  misc_feature 1..22: note = chemically synthesized
  source 1..22: mol_type = other DNA
ttacctttaactcagccatttt

SEQ ID NO: 35551 - DNA, 22 bp, synthetic construct
  misc_feature 1..22: note = chemically synthesized
  source 1..22: mol_type = other DNA
acctttaactcagccattttct

SEQ ID NO: 35552 - DNA, 22 bp, synthetic construct
  misc_feature 1..22: note = chemically synthesized
  source 1..22: mol_type = other DNA
cctttaactcagccattttctc

SEQ ID NO: 35553 - DNA, 22 bp, synthetic construct
  misc_feature 1..22: note = chemically synthesized
  source 1..22: mol_type = other DNA
taactcagccattttctctctc

SEQ ID NO: 35554 - DNA, 22 bp, synthetic construct
  misc_feature 1..22: note = chemically synthesized
  source 1..22: mol_type = other DNA
aactcagccattttctctctcc

SEQ ID NO: 35555 - DNA, 22 bp, synthetic construct
  misc_feature 1..22: note = chemically synthesized
  source 1..22: mol_type = other DNA
actcagccattttctctctcct

SEQ ID NO: 35556 - DNA, 22 bp, synthetic construct
  misc_feature 1..22: note = chemically synthesized
  source 1..22: mol_type = other DNA
agccattttctctctcctctat

SEQ ID NO: 35557 - DNA, 22 bp, synthetic construct
  misc_feature 1..22: note = chemically synthesized
  source 1..22: mol_type = other DNA
tctctctcctctatgtgtggtg

SEQ ID NO: 35558 - DNA, 22 bp, synthetic construct
  misc_feature 1..22: note = chemically synthesized
  source 1..22: mol_type = other DNA
ctctctcctctatgtgtggtga

SEQ ID NO: 35559 - DNA, 22 bp, synthetic construct
  misc_feature 1..22: note = chemically synthesized
  source 1..22: mol_type = other DNA
tctctcctctatgtgtggtgac

SEQ ID NO: 35560 - DNA, 22 bp, synthetic construct
  misc_feature 1..22: note = chemically synthesized
  source 1..22: mol_type = other DNA
tctcctctatgtgtggtgactt

SEQ ID NO: 35561 - DNA, 22 bp, synthetic construct
  misc_feature 1..22: note = chemically synthesized
  source 1..22: mol_type = other DNA
tcctctatgtgtggtgacttca

SEQ ID NO: 35562 - DNA, 22 bp, synthetic construct
  misc_feature 1..22: note = chemically synthesized
  source 1..22: mol_type = other DNA
ctctatgtgtggtgacttcagg

SEQ ID NO: 35563 - DNA, 22 bp, synthetic construct
  misc_feature 1..22: note = chemically synthesized
  source 1..22: mol_type = other DNA
tatgtgtggtgacttcaggaaa

SEQ ID NO: 35564 - DNA, 22 bp, synthetic construct
  misc_feature 1..22: note = chemically synthesized
  source 1..22: mol_type = other DNA
tgtgtggtgacttcaggaaacc

SEQ ID NO: 35565 - DNA, 22 bp, synthetic construct
  misc_feature 1..22: note = chemically synthesized
  source 1..22: mol_type = other DNA
caggaaacccaggcccagagga

SEQ ID NO: 35566 - DNA, 22 bp, synthetic construct
  misc_feature 1..22: note = chemically synthesized
  source 1..22: mol_type = other DNA
aggaaacccaggcccagaggat

SEQ ID NO: 35567 - DNA, 22 bp, synthetic construct
  misc_feature 1..22: note = chemically synthesized
  source 1..22: mol_type = other DNA
ctttctccttcaaaccactctt

SEQ ID NO: 35568 - DNA, 22 bp, synthetic construct
  misc_feature 1..22: note = chemically synthesized
  source 1..22: mol_type = other DNA
tttctccttcaaaccactcttt

SEQ ID NO: 35569 - DNA, 22 bp, synthetic construct
  misc_feature 1..22: note = chemically synthesized
  source 1..22: mol_type = other DNA
tctccttcaaaccactctttgg

SEQ ID NO: 35570 - DNA, 22 bp, synthetic construct
  misc_feature 1..22: note = chemically synthesized
  source 1..22: mol_type = other DNA
ctccttcaaaccactctttgga

SEQ ID NO: 35571 - DNA, 22 bp, synthetic construct
  misc_feature 1..22: note = chemically synthesized
  source 1..22: mol_type = other DNA
tccttcaaaccactctttggat

SEQ ID NO: 35572 - DNA, 22 bp, synthetic construct
  misc_feature 1..22: note = chemically synthesized
  source 1..22: mol_type = other DNA
cttcaaaccactctttggatat

SEQ ID NO: 35573 - DNA, 22 bp, synthetic construct
  misc_feature 1..22: note = chemically synthesized
  source 1..22: mol_type = other DNA
caaaccactctttggatattcc

SEQ ID NO: 35574 - DNA, 22 bp, synthetic construct
  misc_feature 1..22: note = chemically synthesized
  source 1..22: mol_type = other DNA
aaaccactctttggatattccg

SEQ ID NO: 35575 - DNA, 22 bp, synthetic construct
  misc_feature 1..22: note = chemically synthesized
  source 1..22: mol_type = other DNA
tttggatattccggttcccact

SEQ ID NO: 35576 - DNA, 22 bp, synthetic construct
  misc_feature 1..22: note = chemically synthesized
  source 1..22: mol_type = other DNA
tggatattccggttcccactgc

SEQ ID NO: 35577 - DNA, 22 bp, synthetic construct
  misc_feature 1..22: note = chemically synthesized
  source 1..22: mol_type = other DNA
ggatattccggttcccactgct

SEQ ID NO: 35578 - DNA, 22 bp, synthetic construct
  misc_feature 1..22: note = chemically synthesized
  source 1..22: mol_type = other DNA
gatattccggttcccactgctt

SEQ ID NO: 35579 - DNA, 22 bp, synthetic construct
  misc_feature 1..22: note = chemically synthesized
  source 1..22: mol_type = other DNA
cggttcccactgcttcactgcg

SEQ ID NO: 35580 - DNA, 22 bp, synthetic construct
  misc_feature 1..22: note = chemically synthesized
  source 1..22: mol_type = other DNA
ccactgcttcactgcgcttcac

SEQ ID NO: 35581 - DNA, 22 bp, synthetic construct
  misc_feature 1..22: note = chemically synthesized
  source 1..22: mol_type = other DNA
cttcactgcgcttcactggtca

SEQ ID NO: 35582 - DNA, 22 bp, synthetic construct
  misc_feature 1..22: note = chemically synthesized
  source 1..22: mol_type = other DNA
cactgcgcttcactggtcagtg

SEQ ID NO: 35583 - DNA, 22 bp, synthetic construct
  misc_feature 1..22: note = chemically synthesized
  source 1..22: mol_type = other DNA
actgcgcttcactggtcagtgc

SEQ ID NO: 35584 - DNA, 22 bp, synthetic construct
  misc_feature 1..22: note = chemically synthesized
  source 1..22: mol_type = other DNA
cgcttcactggtcagtgcgtca

SEQ ID NO: 35585 - DNA, 22 bp, synthetic construct
  misc_feature 1..22: note = chemically synthesized
  source 1..22: mol_type = other DNA
cactggtcagtgcgtcactcaa

SEQ ID NO: 35586 - DNA, 22 bp, synthetic construct
  misc_feature 1..22: note = chemically synthesized
  source 1..22: mol_type = other DNA
actggtcagtgcgtcactcaaa

SEQ ID NO: 35587 - DNA, 22 bp, synthetic construct
  misc_feature 1..22: note = chemically synthesized
  source 1..22: mol_type = other DNA
gtcagtgcgtcactcaaactag

SEQ ID NO: 35588 - DNA, 22 bp, synthetic construct
  misc_feature 1..22: note = chemically synthesized
  source 1..22: mol_type = other DNA
aaactagctgaaagaattgtct

SEQ ID NO: 35589 - DNA, 22 bp, synthetic construct
  misc_feature 1..22: note = chemically synthesized
  source 1..22: mol_type = other DNA
gctgaaagaattgtctaactca

SEQ ID NO: 35590 - DNA, 22 bp, synthetic construct
  misc_feature 1..22: note = chemically synthesized
  source 1..22: mol_type = other DNA
aaagaattgtctaactcataca

SEQ ID NO: 35591 - DNA, 22 bp, synthetic construct
  misc_feature 1..22: note = chemically synthesized
  source 1..22: mol_type = other DNA
tctaactcatacacagggacaa

SEQ ID NO: 35592 - DNA, 22 bp, synthetic construct
  misc_feature 1..22: note = chemically synthesized
  source 1..22: mol_type = other DNA
actcatacacagggacaaagtc

SEQ ID NO: 35593 - DNA, 22 bp, synthetic construct
  misc_feature 1..22: note = chemically synthesized
  source 1..22: mol_type = other DNA
atacacagggacaaagtccagc

SEQ ID NO: 35594 - DNA, 22 bp, synthetic construct
  misc_feature 1..22: note = chemically synthesized
  source 1..22: mol_type = other DNA
atttaaccggttacacaattgc

SEQ ID NO: 35595 - DNA, 22 bp, synthetic construct
  misc_feature 1..22: note = chemically synthesized
  source 1..22: mol_type = other DNA
tttaaccggttacacaattgcc

SEQ ID NO: 35596 - DNA, 22 bp, synthetic construct
  misc_feature 1..22: note = chemically synthesized
  source 1..22: mol_type = other DNA
aaccggttacacaattgccttt

SEQ ID NO: 35597 - DNA, 22 bp, synthetic construct
  misc_feature 1..22: note = chemically synthesized
  source 1..22: mol_type = other DNA
accggttacacaattgcctttg

SEQ ID NO: 35598 - DNA, 22 bp, synthetic construct
  misc_feature 1..22: note = chemically synthesized
  source 1..22: mol_type = other DNA
cacaattgcctttggtttttac

SEQ ID NO: 35599 - DNA, 22 bp, synthetic construct
  misc_feature 1..22: note = chemically synthesized
  source 1..22: mol_type = other DNA
cctttggtttttacagtttgtt

SEQ ID NO: 35600 - DNA, 22 bp, synthetic construct
  misc_feature 1..22: note = chemically synthesized
  source 1..22: mol_type = other DNA
tggtttttacagtttgttccta

SEQ ID NO: 35601 - DNA, 22 bp, synthetic construct
  misc_feature 1..22: note = chemically synthesized
  source 1..22: mol_type = other DNA
ggtttttacagtttgttcctaa

SEQ ID NO: 35602 - DNA, 22 bp, synthetic construct
  misc_feature 1..22: note = chemically synthesized
  source 1..22: mol_type = other DNA
gtttttacagtttgttcctaag

SEQ ID NO: 35603 - DNA, 22 bp, synthetic construct
  misc_feature 1..22: note = chemically synthesized
  source 1..22: mol_type = other DNA
ttacagtttgttcctaagtgtt

SEQ ID NO: 35604 - DNA, 22 bp, synthetic construct
  misc_feature 1..22: note = chemically synthesized
  source 1..22: mol_type = other DNA
tacagtttgttcctaagtgttt

SEQ ID NO: 35605 - DNA, 22 bp, synthetic construct
  misc_feature 1..22: note = chemically synthesized
  source 1..22: mol_type = other DNA
acagtttgttcctaagtgtttc

SEQ ID NO: 35606 - DNA, 22 bp, synthetic construct
  misc_feature 1..22: note = chemically synthesized
  source 1..22: mol_type = other DNA
cagtttgttcctaagtgtttcc

SEQ ID NO: 35607 - DNA, 22 bp, synthetic construct
  misc_feature 1..22: note = chemically synthesized
  source 1..22: mol_type = other DNA
gttcctaagtgtttccagaggc

SEQ ID NO: 35608 - DNA, 22 bp, synthetic construct
  misc_feature 1..22: note = chemically synthesized
  source 1..22: mol_type = other DNA
ttcctaagtgtttccagaggct

SEQ ID NO: 35609 - DNA, 22 bp, synthetic construct
  misc_feature 1..22: note = chemically synthesized
  source 1..22: mol_type = other DNA
ctaagtgtttccagaggcttgg

SEQ ID NO: 35610 - DNA, 22 bp, synthetic construct
  misc_feature 1..22: note = chemically synthesized
  source 1..22: mol_type = other DNA
agtgtttccagaggcttggttc

SEQ ID NO: 35611 - DNA, 22 bp, synthetic construct
  misc_feature 1..22: note = chemically synthesized
  source 1..22: mol_type = other DNA
ccagaggcttggttcctcttca

SEQ ID NO: 35612 - DNA, 22 bp, synthetic construct
  misc_feature 1..22: note = chemically synthesized
  source 1..22: mol_type = other DNA
cagaggcttggttcctcttcac

SEQ ID NO: 35613 - DNA, 22 bp, synthetic construct
  misc_feature 1..22: note = chemically synthesized
  source 1..22: mol_type = other DNA
ggttcctcttcacctgaggtag

SEQ ID NO: 35614 - DNA, 22 bp, synthetic construct
  misc_feature 1..22: note = chemically synthesized
  source 1..22: mol_type = other DNA
gttcctcttcacctgaggtaga

SEQ ID NO: 35615 - DNA, 22 bp, synthetic construct
  misc_feature 1..22: note = chemically synthesized
  source 1..22: mol_type = other DNA
ctcttcacctgaggtagagatt

SEQ ID NO: 35616 - DNA, 22 bp, synthetic construct
  misc_feature 1..22: note = chemically synthesized
  source 1..22: mol_type = other DNA
ttcacctgaggtagagattgac

SEQ ID NO: 35617 - DNA, 22 bp, synthetic construct
  misc_feature 1..22: note = chemically synthesized
  source 1..22: mol_type = other DNA
cacctgaggtagagattgacca

SEQ ID NO: 35618 - DNA, 22 bp, synthetic construct
  misc_feature 1..22: note = chemically synthesized
  source 1..22: mol_type = other DNA
acctgaggtagagattgaccaa

SEQ ID NO: 35619 - DNA, 22 bp, synthetic construct
  misc_feature 1..22: note = chemically synthesized
  source 1..22: mol_type = other DNA
aggtagagattgaccaattatt

SEQ ID NO: 35620 - DNA, 22 bp, synthetic construct
  misc_feature 1..22: note = chemically synthesized
  source 1..22: mol_type = other DNA
accaattatttattccagttaa

SEQ ID NO: 35621 - DNA, 22 bp, synthetic construct
  misc_feature 1..22: note = chemically synthesized
  source 1..22: mol_type = other DNA
tttattccagttaaaagtaggc

SEQ ID NO: 35622 - DNA, 22 bp, synthetic construct
  misc_feature 1..22: note = chemically synthesized
  source 1..22: mol_type = other DNA
attccagttaaaagtaggctta

SEQ ID NO: 35623 - DNA, 22 bp, synthetic construct
  misc_feature 1..22: note = chemically synthesized
  source 1..22: mol_type = other DNA
ttccagttaaaagtaggcttat

SEQ ID NO: 35624 - DNA, 22 bp, synthetic construct
  misc_feature 1..22: note = chemically synthesized
  source 1..22: mol_type = other DNA
cagttaaaagtaggcttatttc

SEQ ID NO: 35625 - DNA, 22 bp, synthetic construct
  misc_feature 1..22: note = chemically synthesized
  source 1..22: mol_type = other DNA
aaagtaggcttatttcaaaagg

SEQ ID NO: 35626 - DNA, 22 bp, synthetic construct
  misc_feature 1..22: note = chemically synthesized
  source 1..22: mol_type = other DNA
atttcaaaaggcagagaatttg

SEQ ID NO: 35627 - DNA, 22 bp, synthetic construct
  misc_feature 1..22: note = chemically synthesized
  source 1..22: mol_type = other DNA
tttcaaaaggcagagaatttga

SEQ ID NO: 35628 - DNA, 22 bp, synthetic construct
  misc_feature 1..22: note = chemically synthesized
  source 1..22: mol_type = other DNA
caaaaggcagagaatttgaagc

SEQ ID NO: 35629 - DNA, 22 bp, synthetic construct
  misc_feature 1..22: note = chemically synthesized
  source 1..22: mol_type = other DNA
aaaaggcagagaatttgaagct

SEQ ID NO: 35630 - DNA, 22 bp, synthetic construct
  misc_feature 1..22: note = chemically synthesized
  source 1..22: mol_type = other DNA
gaagctatcggggaaaggaact

SEQ ID NO: 35631 - DNA, 22 bp, synthetic construct
  misc_feature 1..22: note = chemically synthesized
  source 1..22: mol_type = other DNA
aagctatcggggaaaggaactg

SEQ ID NO: 35632 - DNA, 22 bp, synthetic construct
  misc_feature 1..22: note = chemically synthesized
  source 1..22: mol_type = other DNA
tcggggaaaggaactgtggcag

SEQ ID NO: 35633 - DNA, 22 bp, synthetic construct
  misc_feature 1..22: note = chemically synthesized
  source 1..22: mol_type = other DNA
tggcagatagtgcctgctgtgt

SEQ ID NO: 35634 - DNA, 22 bp, synthetic construct
  misc_feature 1..22: note = chemically synthesized
  source 1..22: mol_type = other DNA
ctgtgtgtggtggaggattctc

SEQ ID NO: 35635 - DNA, 22 bp, synthetic construct
  misc_feature 1..22: note = chemically synthesized
  source 1..22: mol_type = other DNA
tgtgtggtggaggattctctgc

SEQ ID NO: 35636 - DNA, 22 bp, synthetic construct
  misc_feature 1..22: note = chemically synthesized
  source 1..22: mol_type = other DNA
tctgctcagtcctgactcaggc

SEQ ID NO: 35637 - DNA, 22 bp, synthetic construct
  misc_feature 1..22: note = chemically synthesized
  source 1..22: mol_type = other DNA
tgctcagtcctgactcaggcta

SEQ ID NO: 35638 - DNA, 22 bp, synthetic construct
  misc_feature 1..22: note = chemically synthesized
  source 1..22: mol_type = other DNA
ctcagtcctgactcaggctagg

SEQ ID NO: 35639 - DNA, 22 bp, synthetic construct
  misc_feature 1..22: note = chemically synthesized
  source 1..22: mol_type = other DNA
agtcctgactcaggctaggaag

SEQ ID NO: 35640 - DNA, 22 bp, synthetic construct
  misc_feature 1..22: note = chemically synthesized
  source 1..22: mol_type = other DNA
actcaggctaggaaggaacagg

SEQ ID NO: 35641 - DNA, 22 bp, synthetic construct
  misc_feature 1..22: note = chemically synthesized
  source 1..22: mol_type = other DNA
aggctaggaaggaacagggcag

SEQ ID NO: 35642 - DNA, 22 bp, synthetic construct
  misc_feature 1..22: note = chemically synthesized
  source 1..22: mol_type = other DNA
ggaaggaacagggcagtgctga

SEQ ID NO: 35643 - DNA, 22 bp, synthetic construct
  misc_feature 1..22: note = chemically synthesized
  source 1..22: mol_type = other DNA
caggagactcagcactgccctg

SEQ ID NO: 35644 - DNA, 22 bp, synthetic construct
  misc_feature 1..22: note = chemically synthesized
  source 1..22: mol_type = other DNA
agcactgccctgttccttccta

SEQ ID NO: 35645 - DNA, 22 bp, synthetic construct
  misc_feature 1..22: note = chemically synthesized
  source 1..22: mol_type = other DNA
ccctgttccttcctagcctgag

SEQ ID NO: 35646 - DNA, 22 bp, synthetic construct
  misc_feature 1..22: note = chemically synthesized
  source 1..22: mol_type = other DNA
ttccttcctagcctgagtcagg

SEQ ID NO: 35647 - DNA, 22 bp, synthetic construct
  misc_feature 1..22: note = chemically synthesized
  source 1..22: mol_type = other DNA
cttcctagcctgagtcaggact

SEQ ID NO: 35648 - DNA, 22 bp, synthetic construct
  misc_feature 1..22: note = chemically synthesized
  source 1..22: mol_type = other DNA
cctagcctgagtcaggactgag

SEQ ID NO: 35649 - DNA, 22 bp, synthetic construct
  misc_feature 1..22: note = chemically synthesized
  source 1..22: mol_type = other DNA
ctagcctgagtcaggactgagc

SEQ ID NO: 35650 - DNA, 22 bp, synthetic construct
  misc_feature 1..22: note = chemically synthesized
  source 1..22: mol_type = other DNA
gcctgagtcaggactgagcaga

SEQ ID NO: 35651 - DNA, 22 bp, synthetic construct
  misc_feature 1..22: note = chemically synthesized
  source 1..22: mol_type = other DNA
agtcaggactgagcagagaatc

SEQ ID NO: 35652 - DNA, 22 bp, synthetic construct
  misc_feature 1..22: note = chemically synthesized
  source 1..22: mol_type = other DNA
agcagagaatcctccaccacac

SEQ ID NO: 35653 - DNA, 22 bp, synthetic construct
  misc_feature 1..22: note = chemically synthesized
  source 1..22: mol_type = other DNA
caccacacacagcaggcactat

SEQ ID NO: 35654 - DNA, 22 bp, synthetic construct
  misc_feature 1..22: note = chemically synthesized
  source 1..22: mol_type = other DNA
tctgccacagttcctttccccg

SEQ ID NO: 35655 - DNA, 22 bp, synthetic construct
  misc_feature 1..22: note = chemically synthesized
  source 1..22: mol_type = other DNA
ccacagttcctttccccgatag

SEQ ID NO: 35656 - DNA, 22 bp, synthetic construct
  misc_feature 1..22: note = chemically synthesized
  source 1..22: mol_type = other DNA
ctttccccgatagcttcaaatt

SEQ ID NO: 35657 - DNA, 22 bp, synthetic construct
  misc_feature 1..22: note = chemically synthesized
  source 1..22: mol_type = other DNA
tccccgatagcttcaaattctc

SEQ ID NO: 35658 - DNA, 22 bp, synthetic construct
  misc_feature 1..22: note = chemically synthesized
  source 1..22: mol_type = other DNA
ccccgatagcttcaaattctct

SEQ ID NO: 35659 - DNA, 22 bp, synthetic construct
  misc_feature 1..22: note = chemically synthesized
  source 1..22: mol_type = other DNA
cccgatagcttcaaattctctg

SEQ ID NO: 35660 - DNA, 22 bp, synthetic construct
  misc_feature 1..22: note = chemically synthesized
  source 1..22: mol_type = other DNA
caaattctctgccttttgaaat

SEQ ID NO: 35661 - DNA, 22 bp, synthetic construct
  misc_feature 1..22: note = chemically synthesized
  source 1..22: mol_type = other DNA
aaattctctgccttttgaaata

SEQ ID NO: 35662 - DNA, 22 bp, synthetic construct
  misc_feature 1..22: note = chemically synthesized
  source 1..22: mol_type = other DNA
tctgccttttgaaataagccta

SEQ ID NO: 35663 - DNA, 22 bp, synthetic construct
  misc_feature 1..22: note = chemically synthesized
  source 1..22: mol_type = other DNA
tgccttttgaaataagcctact

SEQ ID NO: 35664 - DNA, 22 bp, synthetic construct
  misc_feature 1..22: note = chemically synthesized
  source 1..22: mol_type = other DNA
ccttttgaaataagcctacttt

SEQ ID NO: 35665 - DNA, 22 bp, synthetic construct
  misc_feature 1..22: note = chemically synthesized
  source 1..22: mol_type = other DNA
ttgaaataagcctacttttaac

SEQ ID NO: 35666 - DNA, 22 bp, synthetic construct
  misc_feature 1..22: note = chemically synthesized
  source 1..22: mol_type = other DNA
tgaaataagcctacttttaact

SEQ ID NO: 35667 - DNA, 22 bp, synthetic construct
  misc_feature 1..22: note = chemically synthesized
  source 1..22: mol_type = other DNA
gaaataagcctacttttaactg

SEQ ID NO: 35668 - DNA, 22 bp, synthetic construct
  misc_feature 1..22: note = chemically synthesized
  source 1..22: mol_type = other DNA
aaataagcctacttttaactgg

SEQ ID NO: 35669 - DNA, 22 bp, synthetic construct
  misc_feature 1..22: note = chemically synthesized
  source 1..22: mol_type = other DNA
cttttaactggaataaataatt

SEQ ID NO: 35670 - DNA, 22 bp, synthetic construct
  misc_feature 1..22: note = chemically synthesized
  source 1..22: mol_type = other DNA
ttaactggaataaataattggt

SEQ ID NO: 35671 - DNA, 22 bp, synthetic construct
  misc_feature 1..22: note = chemically synthesized
  source 1..22: mol_type = other DNA
taactggaataaataattggtc

SEQ ID NO: 35672 - DNA, 22 bp, synthetic construct
  misc_feature 1..22: note = chemically synthesized
  source 1..22: mol_type = other DNA
aactggaataaataattggtca

SEQ ID NO: 35673 - DNA, 22 bp, synthetic construct
  misc_feature 1..22: note = chemically synthesized
  source 1..22: mol_type = other DNA
actggaataaataattggtcaa

SEQ ID NO: 35674 - DNA, 22 bp, synthetic construct
  misc_feature 1..22: note = chemically synthesized
  source 1..22: mol_type = other DNA
gaataaataattggtcaatctc

SEQ ID NO: 35675 - DNA, 22 bp, synthetic construct
  misc_feature 1..22: note = chemically synthesized
  source 1..22: mol_type = other DNA
gtcaatctctacctcaggtgaa

SEQ ID NO: 35676 - DNA, 22 bp, synthetic construct
  misc_feature 1..22: note = chemically synthesized
  source 1..22: mol_type = other DNA
tacctcaggtgaagaggaacca

SEQ ID NO: 35677 - DNA, 22 bp, synthetic construct
  misc_feature 1..22: note = chemically synthesized
  source 1..22: mol_type = other DNA
cctcaggtgaagaggaaccaag

SEQ ID NO: 35678 - DNA, 22 bp, synthetic construct
  misc_feature 1..22: note = chemically synthesized
  source 1..22: mol_type = other DNA
aggtgaagaggaaccaagcctc

SEQ ID NO: 35679 - DNA, 22 bp, synthetic construct
  misc_feature 1..22: note = chemically synthesized
  source 1..22: mol_type = other DNA
tggaaacacttaggaacaaact

SEQ ID NO: 35680 - DNA, 22 bp, synthetic construct
  misc_feature 1..22: note = chemically synthesized
  source 1..22: mol_type = other DNA
gaaacacttaggaacaaactgt

SEQ ID NO: 35681 - DNA, 22 bp, synthetic construct
  misc_feature 1..22: note = chemically synthesized
  source 1..22: mol_type = other DNA
aggaacaaactgtaaaaaccaa

SEQ ID NO: 35682 - DNA, 22 bp, synthetic construct
  misc_feature 1..22: note = chemically synthesized
  source 1..22: mol_type = other DNA
ggaacaaactgtaaaaaccaaa

SEQ ID NO: 35683 - DNA, 22 bp, synthetic construct
  misc_feature 1..22: note = chemically synthesized
  source 1..22: mol_type = other DNA
taaaaaccaaaggcaattgtgt

SEQ ID NO: 35684 - DNA, 22 bp, synthetic construct
  misc_feature 1..22: note = chemically synthesized
  source 1..22: mol_type = other DNA
tgtaaccggttaaataagcttg

SEQ ID NO: 35685 - DNA, 22 bp, synthetic construct
  misc_feature 1..22: note = chemically synthesized
  source 1..22: mol_type = other DNA
aataagcttgctggactttgtc

SEQ ID NO: 35686 - DNA, 22 bp, synthetic construct
  misc_feature 1..22: note = chemically synthesized
  source 1..22: mol_type = other DNA
gctggactttgtccctgtgtat

SEQ ID NO: 35687 - DNA, 22 bp, synthetic construct
  misc_feature 1..22: note = chemically synthesized
  source 1..22: mol_type = other DNA
ctggactttgtccctgtgtatg

SEQ ID NO: 35688 - DNA, 22 bp, synthetic construct
  misc_feature 1..22: note = chemically synthesized
  source 1..22: mol_type = other DNA
gactttgtccctgtgtatgagt

SEQ ID NO: 35689 - DNA, 22 bp, synthetic construct
  misc_feature 1..22: note = chemically synthesized
  source 1..22: mol_type = other DNA
tgtccctgtgtatgagttagac

SEQ ID NO: 35690 - DNA, 22 bp, synthetic construct
  misc_feature 1..22: note = chemically synthesized
  source 1..22: mol_type = other DNA
gtccctgtgtatgagttagaca

SEQ ID NO: 35691 - DNA, 22 bp, synthetic construct
  misc_feature 1..22: note = chemically synthesized
  source 1..22: mol_type = other DNA
tccctgtgtatgagttagacaa

SEQ ID NO: 35692 - DNA, 22 bp, synthetic construct
  misc_feature 1..22: note = chemically synthesized
  source 1..22: mol_type = other DNA
tgtatgagttagacaattcttt

SEQ ID NO: 35693 - DNA, 22 bp, synthetic construct
  misc_feature 1..22: note = chemically synthesized
  source 1..22: mol_type = other DNA
gacaattctttcagctagtttg

SEQ ID NO: 35694 - DNA, 22 bp, synthetic construct
  misc_feature 1..22: note = chemically synthesized
  source 1..22: mol_type = other DNA
tttcagctagtttgagtgacgc

SEQ ID NO: 35695 - DNA, 22 bp, synthetic construct
  misc_feature 1..22: note = chemically synthesized
  source 1..22: mol_type = other DNA
tcagctagtttgagtgacgcac

SEQ ID NO: 35696 - DNA, 22 bp, synthetic construct
  misc_feature 1..22: note = chemically synthesized
  source 1..22: mol_type = other DNA
cagctagtttgagtgacgcact

SEQ ID NO: 35697 - DNA, 22 bp, synthetic construct
  misc_feature 1..22: note = chemically synthesized
  source 1..22: mol_type = other DNA
agctagtttgagtgacgcactg

SEQ ID NO: 35698 - DNA, 22 bp, synthetic construct
  misc_feature 1..22: note = chemically synthesized
  source 1..22: mol_type = other DNA
gtttgagtgacgcactgaccag

SEQ ID NO: 35699 - DNA, 22 bp, synthetic construct
  misc_feature 1..22: note = chemically synthesized
  source 1..22: mol_type = other DNA
gagtgacgcactgaccagtgaa

SEQ ID NO: 35700 - DNA, 22 bp, synthetic construct
  misc_feature 1..22: note = chemically synthesized
  source 1..22: mol_type = other DNA
agtgacgcactgaccagtgaag

SEQ ID NO: 35701 - DNA, 22 bp, synthetic construct
  misc_feature 1..22: note = chemically synthesized
  source 1..22: mol_type = other DNA
accagtgaagcgcagtgaagca

SEQ ID NO: 35702 - DNA, 22 bp, synthetic construct
  misc_feature 1..22: note = chemically synthesized
  source 1..22: mol_type = other DNA
gaaggagaaagaagcattgtgg

SEQ ID NO: 35703 - DNA, 22 bp, synthetic construct
  misc_feature 1..22: note = chemically synthesized
  source 1..22: mol_type = other DNA
aaggagaaagaagcattgtggc

SEQ ID NO: 35704 - DNA, 22 bp, synthetic construct
  misc_feature 1..22: note = chemically synthesized
  source 1..22: mol_type = other DNA
tggctttatatcctctgggcct

SEQ ID NO: 35705 - DNA, 22 bp, synthetic construct
  misc_feature 1..22: note = chemically synthesized
  source 1..22: mol_type = other DNA
tatatcctctgggcctgggttt

SEQ ID NO: 35706 - DNA, 22 bp, synthetic construct
  misc_feature 1..22: note = chemically synthesized
  source 1..22: mol_type = other DNA
atatcctctgggcctgggtttc

SEQ ID NO: 35707 - DNA, 22 bp, synthetic construct
  misc_feature 1..22: note = chemically synthesized
  source 1..22: mol_type = other DNA
tatcctctgggcctgggtttcc

SEQ ID NO: 35708 - DNA, 22 bp, synthetic construct
  misc_feature 1..22: note = chemically synthesized
  source 1..22: mol_type = other DNA
tgggcctgggtttcctgaagtc

SEQ ID NO: 35709 - DNA, 22 bp, synthetic construct
  misc_feature 1..22: note = chemically synthesized
  source 1..22: mol_type = other DNA
ggcctgggtttcctgaagtcac

SEQ ID NO: 35710 - DNA, 22 bp, synthetic construct
  misc_feature 1..22: note = chemically synthesized
  source 1..22: mol_type = other DNA
ggtttcctgaagtcaccacaca

SEQ ID NO: 35711 - DNA, 22 bp, synthetic construct
  misc_feature 1..22: note = chemically synthesized
  source 1..22: mol_type = other DNA
cctgaagtcaccacacatagag

SEQ ID NO: 35712 - DNA, 22 bp, synthetic construct
  misc_feature 1..22: note = chemically synthesized
  source 1..22: mol_type = other DNA
ctgaagtcaccacacatagagg

SEQ ID NO: 35713 - DNA, 22 bp, synthetic construct
  misc_feature 1..22: note = chemically synthesized
  source 1..22: mol_type = other DNA
aagtcaccacacatagaggaga

SEQ ID NO: 35714 - DNA, 22 bp, synthetic construct
  misc_feature 1..22: note = chemically synthesized
  source 1..22: mol_type = other DNA
agttaaaggtaagaaaccatct

SEQ ID NO: 35715 - DNA, 22 bp, synthetic construct
  misc_feature 1..22: note = chemically synthesized
  source 1..22: mol_type = other DNA
aaggtaagaaaccatctgacaa

SEQ ID NO: 35716 - DNA, 22 bp, synthetic construct
  misc_feature 1..22: note = chemically synthesized
  source 1..22: mol_type = other DNA
acaagtttgctatggcttcttc

SEQ ID NO: 35717 - DNA, 22 bp, synthetic construct
  misc_feature 1..22: note = chemically synthesized
  source 1..22: mol_type = other DNA
gctatggcttcttcagccaaaa

SEQ ID NO: 35718 - DNA, 22 bp, synthetic construct
  misc_feature 1..22: note = chemically synthesized
  source 1..22: mol_type = other DNA
ctatggcttcttcagccaaaat

SEQ ID NO: 35719 - DNA, 22 bp, synthetic construct
  misc_feature 1..22: note = chemically synthesized
  source 1..22: mol_type = other DNA
tggcttcttcagccaaaattta

SEQ ID NO: 35720 - DNA, 22 bp, synthetic construct
  misc_feature 1..22: note = chemically synthesized
  source 1..22: mol_type = other DNA
cttcagccaaaatttatggaag

SEQ ID NO: 35721 - DNA, 22 bp, synthetic construct
  misc_feature 1..22: note = chemically synthesized
  source 1..22: mol_type = other DNA
ttcagccaaaatttatggaagt

SEQ ID NO: 35722 - DNA, 22 bp, synthetic construct
  misc_feature 1..22: note = chemically synthesized
  source 1..22: mol_type = other DNA
cagccaaaatttatggaagttt

SEQ ID NO: 35723 - DNA, 22 bp, synthetic construct
  misc_feature 1..22: note = chemically synthesized
  source 1..22: mol_type = other DNA
agccaaaatttatggaagtttc

SEQ ID NO: 35724 - DNA, 22 bp, synthetic construct
  misc_feature 1..22: note = chemically synthesized
  source 1..22: mol_type = other DNA
atggaagtttctgagaacttca

SEQ ID NO: 35725 - DNA, 22 bp, synthetic construct
  misc_feature 1..22: note = chemically synthesized
  source 1..22: mol_type = other DNA
tggaagtttctgagaacttcag

SEQ ID NO: 35726 - DNA, 22 bp, synthetic construct
  misc_feature 1..22: note = chemically synthesized
  source 1..22: mol_type = other DNA
ctgagaacttcagggtatcaga

SEQ ID NO: 35727 - DNA, 22 bp, synthetic construct
  misc_feature 1..22: note = chemically synthesized
  source 1..22: mol_type = other DNA
tgagaacttcagggtatcagag

SEQ ID NO: 35728 - DNA, 22 bp, synthetic construct
  misc_feature 1..22: note = chemically synthesized
  source 1..22: mol_type = other DNA
agaacttcagggtatcagagtt

SEQ ID NO: 35729 - DNA, 22 bp, synthetic construct
  misc_feature 1..22: note = chemically synthesized
  source 1..22: mol_type = other DNA
cagggtatcagagttggaaaag

SEQ ID NO: 35730 - DNA, 22 bp, synthetic construct
  misc_feature 1..22: note = chemically synthesized
  source 1..22: mol_type = other DNA
agggtatcagagttggaaaaga

SEQ ID NO: 35731 - DNA, 22 bp, synthetic construct
  misc_feature 1..22: note = chemically synthesized
  source 1..22: mol_type = other DNA
gaaaagacttagagaggccctg

SEQ ID NO: 35732 - DNA, 22 bp, synthetic construct
  misc_feature 1..22: note = chemically synthesized
  source 1..22: mol_type = other DNA
agagaggccctggttcaaaccc

SEQ ID NO: 35733 - DNA, 22 bp, synthetic construct
  misc_feature 1..22: note = chemically synthesized
  source 1..22: mol_type = other DNA
gagaggccctggttcaaacccc

SEQ ID NO: 35734 - DNA, 22 bp, synthetic construct
  misc_feature 1..22: note = chemically synthesized
  source 1..22: mol_type = other DNA
gttcaaacccctgtgttcagag

SEQ ID NO: 35735 - DNA, 22 bp, synthetic construct
  misc_feature 1..22: note = chemically synthesized
  source 1..22: mol_type = other DNA
aaacccctgtgttcagaggctt

SEQ ID NO: 35736 - DNA, 22 bp, synthetic construct
  misc_feature 1..22: note = chemically synthesized
  source 1..22: mol_type = other DNA
tgttcagaggcttccctgtggt

SEQ ID NO: 35737 - DNA, 22 bp, synthetic construct
  misc_feature 1..22: note = chemically synthesized
  source 1..22: mol_type = other DNA
agaggcttccctgtggtgtctg

SEQ ID NO: 35738 - DNA, 22 bp, synthetic construct
  misc_feature 1..22: note = chemically synthesized
  source 1..22: mol_type = other DNA
ccctgtggtgtctgtgggcaca

SEQ ID NO: 35739 - DNA, 22 bp, synthetic construct
  misc_feature 1..22: note = chemically synthesized
  source 1..22: mol_type = other DNA
cctgtggtgtctgtgggcacag

SEQ ID NO: 35740 - DNA, 22 bp, synthetic construct
  misc_feature 1..22: note = chemically synthesized
  source 1..22: mol_type = other DNA
tggtgtctgtgggcacagctgg

SEQ ID NO: 35741 - DNA, 22 bp, synthetic construct
  misc_feature 1..22: note = chemically synthesized
  source 1..22: mol_type = other DNA
tgggcacagctggagctgaaga

SEQ ID NO: 35742 - DNA, 22 bp, synthetic construct
  misc_feature 1..22: note = chemically synthesized
  source 1..22: mol_type = other DNA
gagctgaagaacaagggaaagg

SEQ ID NO: 35743 - DNA, 22 bp, synthetic construct
  misc_feature 1..22: note = chemically synthesized
  source 1..22: mol_type = other DNA
aagaacaagggaaaggtgataa

SEQ ID NO: 35744 - DNA, 22 bp, synthetic construct
  misc_feature 1..22: note = chemically synthesized
  source 1..22: mol_type = other DNA
ttattggtcatcccttgccttt

SEQ ID NO: 35745 - DNA, 22 bp, synthetic construct
  misc_feature 1..22: note = chemically synthesized
  source 1..22: mol_type = other DNA
attggtcatcccttgcctttgt

SEQ ID NO: 35746 - DNA, 22 bp, synthetic construct
  misc_feature 1..22: note = chemically synthesized
  source 1..22: mol_type = other DNA
ttggtcatcccttgcctttgtt

SEQ ID NO: 35747 - DNA, 22 bp, synthetic construct
  misc_feature 1..22: note = chemically synthesized
  source 1..22: mol_type = other DNA
gtcatcccttgcctttgttcat

SEQ ID NO: 35748 - DNA, 22 bp, synthetic construct
  misc_feature 1..22: note = chemically synthesized
  source 1..22: mol_type = other DNA
gcctttgttcatttcaattatt

SEQ ID NO: 35749 - DNA, 22 bp, synthetic construct
  misc_feature 1..22: note = chemically synthesized
  source 1..22: mol_type = other DNA
cctttgttcatttcaattattg

SEQ ID NO: 35750 - DNA, 22 bp, synthetic construct
  misc_feature 1..22: note = chemically synthesized
  source 1..22: mol_type = other DNA
tgttcatttcaattattgtctt

SEQ ID NO: 35751 - DNA, 22 bp, synthetic construct
  misc_feature 1..22: note = chemically synthesized
  source 1..22: mol_type = other DNA
gttcatttcaattattgtcttg

SEQ ID NO: 35752 - DNA, 22 bp, synthetic construct
  misc_feature 1..22: note = chemically synthesized
  source 1..22: mol_type = other DNA
ttcatttcaattattgtcttgg

SEQ ID NO: 35753 - DNA, 22 bp, synthetic construct
  misc_feature 1..22: note = chemically synthesized
  source 1..22: mol_type = other DNA
atttcaattattgtcttggaaa

SEQ ID NO: 35754 - DNA, 22 bp, synthetic construct
  misc_feature 1..22: note = chemically synthesized
  source 1..22: mol_type = other DNA
caattattgtcttggaaatctg

SEQ ID NO: 35755 - DNA, 22 bp, synthetic construct
  misc_feature 1..22: note = chemically synthesized
  source 1..22: mol_type = other DNA
aattattgtcttggaaatctgt

SEQ ID NO: 35756 - DNA, 22 bp, synthetic construct
  misc_feature 1..22: note = chemically synthesized
  source 1..22: mol_type = other DNA
ttgtcttggaaatctgtagaca

SEQ ID NO: 35757 - DNA, 22 bp, synthetic construct
  misc_feature 1..22: note = chemically synthesized
  source 1..22: mol_type = other DNA
tcttggaaatctgtagacatcc

SEQ ID NO: 35758 - DNA, 22 bp, synthetic construct
  misc_feature 1..22: note = chemically synthesized
  source 1..22: mol_type = other DNA
ggaaatctgtagacatcctaag

SEQ ID NO: 35759 - DNA, 22 bp, synthetic construct
  misc_feature 1..22: note = chemically synthesized
  source 1..22: mol_type = other DNA
gaaatctgtagacatcctaaga

SEQ ID NO: 35760 - DNA, 22 bp, synthetic construct
  misc_feature 1..22: note = chemically synthesized
  source 1..22: mol_type = other DNA
tagacatcctaagagctcccct

SEQ ID NO: 35761 - DNA, 22 bp, synthetic construct
  misc_feature 1..22: note = chemically synthesized
  source 1..22: mol_type = other DNA
agagctcccctccactacggac

SEQ ID NO: 35762 - DNA, 22 bp, synthetic construct
  misc_feature 1..22: note = chemically synthesized
  source 1..22: mol_type = other DNA
ccctccactacggacatgcacg

SEQ ID NO: 35763 - DNA, 22 bp, synthetic construct
  misc_feature 1..22: note = chemically synthesized
  source 1..22: mol_type = other DNA
cactacggacatgcacgtttct

SEQ ID NO: 35764 - DNA, 22 bp, synthetic construct
  misc_feature 1..22: note = chemically synthesized
  source 1..22: mol_type = other DNA
cggacatgcacgtttctctcta

SEQ ID NO: 35765 - DNA, 22 bp, synthetic construct
  misc_feature 1..22: note = chemically synthesized
  source 1..22: mol_type = other DNA
ctctctatgtctttttcccaac

SEQ ID NO: 35766 - DNA, 22 bp, synthetic construct
  misc_feature 1..22: note = chemically synthesized
  source 1..22: mol_type = other DNA
tctctatgtctttttcccaacc

SEQ ID NO: 35767 - DNA, 22 bp, synthetic construct
  misc_feature 1..22: note = chemically synthesized
  source 1..22: mol_type = other DNA
tctatgtctttttcccaacccc

SEQ ID NO: 35768 - DNA, 22 bp, synthetic construct
  misc_feature 1..22: note = chemically synthesized
  source 1..22: mol_type = other DNA
tatgtctttttcccaacccctg

SEQ ID NO: 35769 - DNA, 22 bp, synthetic construct
  misc_feature 1..22: note = chemically synthesized
  source 1..22: mol_type = other DNA
tgtctttttcccaacccctgct

SEQ ID NO: 35770 - DNA, 22 bp, synthetic construct
  misc_feature 1..22: note = chemically synthesized
  source 1..22: mol_type = other DNA
tttcccaacccctgctctgaca

SEQ ID NO: 35771 - DNA, 22 bp, synthetic construct
  misc_feature 1..22: note = chemically synthesized
  source 1..22: mol_type = other DNA
ttcccaacccctgctctgacac

SEQ ID NO: 35772 - DNA, 22 bp, synthetic construct
  misc_feature 1..22: note = chemically synthesized
  source 1..22: mol_type = other DNA
tcccaacccctgctctgacacc

SEQ ID NO: 35773 - DNA, 22 bp, synthetic construct
  misc_feature 1..22: note = chemically synthesized
  source 1..22: mol_type = other DNA
cccaacccctgctctgacacct

SEQ ID NO: 35774 - DNA, 22 bp, synthetic construct
  misc_feature 1..22: note = chemically synthesized
  source 1..22: mol_type = other DNA
ccaacccctgctctgacacctt

SEQ ID NO: 35775 - DNA, 22 bp, synthetic construct
  misc_feature 1..22: note = chemically synthesized
  source 1..22: mol_type = other DNA
ctctgacaccttcccattgctg

SEQ ID NO: 35776 - DNA, 22 bp, synthetic construct
  misc_feature 1..22: note = chemically synthesized
  source 1..22: mol_type = other DNA
tgacaccttcccattgctgcag

SEQ ID NO: 35777 - DNA, 22 bp, synthetic construct
  misc_feature 1..22: note = chemically synthesized
  source 1..22: mol_type = other DNA
acaccttcccattgctgcagcc

SEQ ID NO: 35778 - DNA, 22 bp, synthetic construct
  misc_feature 1..22: note = chemically synthesized
  source 1..22: mol_type = other DNA
cccattgctgcagcctcatgga

SEQ ID NO: 35779 - DNA, 22 bp, synthetic construct
  misc_feature 1..22: note = chemically synthesized
  source 1..22: mol_type = other DNA
ccattgctgcagcctcatggac

SEQ ID NO: 35780 - DNA, 22 bp, synthetic construct
  misc_feature 1..22: note = chemically synthesized
  source 1..22: mol_type = other DNA
ctgcagcctcatggaccacttc

SEQ ID NO: 35781 - DNA, 22 bp, synthetic construct
  misc_feature 1..22: note = chemically synthesized
  source 1..22: mol_type = other DNA
cagcctcatggaccacttccgg

SEQ ID NO: 35782 - DNA, 22 bp, synthetic construct
  misc_feature 1..22: note = chemically synthesized
  source 1..22: mol_type = other DNA
atggaccacttccggtgaccag

SEQ ID NO: 35783 - DNA, 22 bp, synthetic construct
  misc_feature 1..22: note = chemically synthesized
  source 1..22: mol_type = other DNA
ccggtgaccagttagatatgct

SEQ ID NO: 35784 - DNA, 22 bp, synthetic construct
  misc_feature 1..22: note = chemically synthesized
  source 1..22: mol_type = other DNA
cggtgaccagttagatatgctt

SEQ ID NO: 35785 - DNA, 22 bp, synthetic construct
  misc_feature 1..22: note = chemically synthesized
  source 1..22: mol_type = other DNA
gatatgcttgatctatttagtt

SEQ ID NO: 35786 - DNA, 22 bp, synthetic construct
  misc_feature 1..22: note = chemically synthesized
  source 1..22: mol_type = other DNA
gatctatttagttaattaaggc

SEQ ID NO: 35787 - DNA, 22 bp, synthetic construct
  misc_feature 1..22: note = chemically synthesized
  source 1..22: mol_type = other DNA
atctatttagttaattaaggct

SEQ ID NO: 35788 - DNA, 22 bp, synthetic construct
  misc_feature 1..22: note = chemically synthesized
  source 1..22: mol_type = other DNA
tttagttaattaaggctctgaa

SEQ ID NO: 35789 - DNA, 22 bp, synthetic construct
  misc_feature 1..22: note = chemically synthesized
  source 1..22: mol_type = other DNA
agttaattaaggctctgaatca

SEQ ID NO: 35790 - DNA, 22 bp, synthetic construct
  misc_feature 1..22: note = chemically synthesized
  source 1..22: mol_type = other DNA
gttaattaaggctctgaatcag

SEQ ID NO: 35791 - DNA, 22 bp, synthetic construct
  misc_feature 1..22: note = chemically synthesized
  source 1..22: mol_type = other DNA
attaaggctctgaatcagccct

SEQ ID NO: 35792 - DNA, 22 bp, synthetic construct
  misc_feature 1..22: note = chemically synthesized
  source 1..22: mol_type = other DNA
aggctctgaatcagcccttggc

SEQ ID NO: 35793 - DNA, 22 bp, synthetic construct
  misc_feature 1..22: note = chemically synthesized
  source 1..22: mol_type = other DNA
tgaatcagcccttggccagaag

SEQ ID NO: 35794 - DNA, 22 bp, synthetic construct
  misc_feature 1..22: note = chemically synthesized
  source 1..22: mol_type = other DNA
aatcagcccttggccagaagaa

SEQ ID NO: 35795 - DNA, 22 bp, synthetic construct
  misc_feature 1..22: note = chemically synthesized
  source 1..22: mol_type = other DNA
ggccagaagaagcacctcctct

SEQ ID NO: 35796 - DNA, 22 bp, synthetic construct
  misc_feature 1..22: note = chemically synthesized
  source 1..22: mol_type = other DNA
gccagaagaagcacctcctcta

SEQ ID NO: 35797 - DNA, 22 bp, synthetic construct
  misc_feature 1..22: note = chemically synthesized
  source 1..22: mol_type = other DNA
ctctaggaaatcattccttctt

SEQ ID NO: 35798 - DNA, 22 bp, synthetic construct
  misc_feature 1..22: note = chemically synthesized
  source 1..22: mol_type = other DNA
taggaaatcattccttcttttt

SEQ ID NO: 35799 - DNA, 22 bp, synthetic construct
  misc_feature 1..22: note = chemically synthesized
  source 1..22: mol_type = other DNA
ggaaatcattccttctttttag

SEQ ID NO: 35800 - DNA, 22 bp, synthetic construct
  misc_feature 1..22: note = chemically synthesized
  source 1..22: mol_type = other DNA
cttctttttagtaatacgcaat

SEQ ID NO: 35801 - DNA, 22 bp, synthetic construct
  misc_feature 1..22: note = chemically synthesized
  source 1..22: mol_type = other DNA
ctttttagtaatacgcaattga

SEQ ID NO: 35802 - DNA, 22 bp, synthetic construct
  misc_feature 1..22: note = chemically synthesized
  source 1..22: mol_type = other DNA
tttttagtaatacgcaattgaa

SEQ ID NO: 35803 - DNA, 22 bp, synthetic construct
  misc_feature 1..22: note = chemically synthesized
  source 1..22: mol_type = other DNA
tttagtaatacgcaattgaaaa

SEQ ID NO: 35804 - DNA, 22 bp, synthetic construct
  misc_feature 1..22: note = chemically synthesized
  source 1..22: mol_type = other DNA
ttagtaatacgcaattgaaaag

SEQ ID NO: 35805 - DNA, 22 bp, synthetic construct
  misc_feature 1..22: note = chemically synthesized
  source 1..22: mol_type = other DNA
tagtaatacgcaattgaaaagt

SEQ ID NO: 35806 - DNA, 22 bp, synthetic construct
  misc_feature 1..22: note = chemically synthesized
  source 1..22: mol_type = other DNA
agtaatacgcaattgaaaagta

SEQ ID NO: 35807 - DNA, 22 bp, synthetic construct
  misc_feature 1..22: note = chemically synthesized
  source 1..22: mol_type = other DNA
gtaatacgcaattgaaaagtat

SEQ ID NO: 35808 - DNA, 22 bp, synthetic construct
  misc_feature 1..22: note = chemically synthesized
  source 1..22: mol_type = other DNA
aaaagtatgtgtgggttatgtg

SEQ ID NO: 35809 - DNA, 22 bp, synthetic construct
  misc_feature 1..22: note = chemically synthesized
  source 1..22: mol_type = other DNA
tgtgctgttaggtgctaagcat

SEQ ID NO: 35810 - DNA, 22 bp, synthetic construct
  misc_feature 1..22: note = chemically synthesized
  source 1..22: mol_type = other DNA
ttaggtgctaagcattttagct

SEQ ID NO: 35811 - DNA, 22 bp, synthetic construct
  misc_feature 1..22: note = chemically synthesized
  source 1..22: mol_type = other DNA
ggtgctaagcattttagctatg

SEQ ID NO: 35812 - DNA, 22 bp, synthetic construct
  misc_feature 1..22: note = chemically synthesized
  source 1..22: mol_type = other DNA
agcattttagctatgaattaac

SEQ ID NO: 35813 - DNA, 22 bp, synthetic construct
  misc_feature 1..22: note = chemically synthesized
  source 1..22: mol_type = other DNA
tagctatgaattaactcataat

SEQ ID NO: 35814 - DNA, 22 bp, synthetic construct
  misc_feature 1..22: note = chemically synthesized
  source 1..22: mol_type = other DNA
agctatgaattaactcataatc

SEQ ID NO: 35815 - DNA, 22 bp, synthetic construct
  misc_feature 1..22: note = chemically synthesized
  source 1..22: mol_type = other DNA
gctatgaattaactcataatcc

SEQ ID NO: 35816 - DNA, 22 bp, synthetic construct
  misc_feature 1..22: note = chemically synthesized
  source 1..22: mol_type = other DNA
tgaattaactcataatcctcaa

SEQ ID NO: 35817 - DNA, 22 bp, synthetic construct
  misc_feature 1..22: note = chemically synthesized
  source 1..22: mol_type = other DNA
actcataatcctcaaaataaat

SEQ ID NO: 35818 - DNA, 22 bp, synthetic construct
  misc_feature 1..22: note = chemically synthesized
  source 1..22: mol_type = other DNA
ataatcctcaaaataaatctgg

SEQ ID NO: 35819 - DNA, 22 bp, synthetic construct
  misc_feature 1..22: note = chemically synthesized
  source 1..22: mol_type = other DNA
aaaataaatctggggtatagag

SEQ ID NO: 35820 - DNA, 22 bp, synthetic construct
  misc_feature 1..22: note = chemically synthesized
  source 1..22: mol_type = other DNA
gggtatagagagaggttcttgt

SEQ ID NO: 35821 - DNA, 22 bp, synthetic construct
  misc_feature 1..22: note = chemically synthesized
  source 1..22: mol_type = other DNA
ttgtttcaattagaaaagtaat

SEQ ID NO: 35822 - DNA, 22 bp, synthetic construct
  misc_feature 1..22: note = chemically synthesized
  source 1..22: mol_type = other DNA
gtttcaattagaaaagtaatgc

SEQ ID NO: 35823 - DNA, 22 bp, synthetic construct
  misc_feature 1..22: note = chemically synthesized
  source 1..22: mol_type = other DNA
tttcaattagaaaagtaatgct

SEQ ID NO: 35824 - DNA, 22 bp, synthetic construct
  misc_feature 1..22: note = chemically synthesized
  source 1..22: mol_type = other DNA
caattagaaaagtaatgcttgg

SEQ ID NO: 35825 - DNA, 22 bp, synthetic construct
  misc_feature 1..22: note = chemically synthesized
  source 1..22: mol_type = other DNA
aattagaaaagtaatgcttgga

SEQ ID NO: 35826 - DNA, 22 bp, synthetic construct
  misc_feature 1..22: note = chemically synthesized
  source 1..22: mol_type = other DNA
gaaaagtaatgcttggagagac

SEQ ID NO: 35827 - DNA, 22 bp, synthetic construct
  misc_feature 1..22: note = chemically synthesized
  source 1..22: mol_type = other DNA
ggagagactatgatttgcccaa

SEQ ID NO: 35828 - DNA, 22 bp, synthetic construct
  misc_feature 1..22: note = chemically synthesized
  source 1..22: mol_type = other DNA
gagagactatgatttgcccaag

SEQ ID NO: 35829 - DNA, 22 bp, synthetic construct
  misc_feature 1..22: note = chemically synthesized
  source 1..22: mol_type = other DNA
tgatttgcccaaggtcactgcc

SEQ ID NO: 35830 - DNA, 22 bp, synthetic construct
  misc_feature 1..22: note = chemically synthesized
  source 1..22: mol_type = other DNA
gcccaaggtcactgccaataga

SEQ ID NO: 35831 - DNA, 22 bp, synthetic construct
  misc_feature 1..22: note = chemically synthesized
  source 1..22: mol_type = other DNA
cccaaggtcactgccaatagat

SEQ ID NO: 35832 - DNA, 22 bp, synthetic construct
  misc_feature 1..22: note = chemically synthesized
  source 1..22: mol_type = other DNA
ccaatagatgacttgattagaa

SEQ ID NO: 35833 - DNA, 22 bp, synthetic construct
  misc_feature 1..22: note = chemically synthesized
  source 1..22: mol_type = other DNA
gattagaagcagggtatgtttg

SEQ ID NO: 35834 - DNA, 22 bp, synthetic construct
  misc_feature 1..22: note = chemically synthesized
  source 1..22: mol_type = other DNA
attagaagcagggtatgtttga

SEQ ID NO: 35835 - DNA, 22 bp, synthetic construct
  misc_feature 1..22: note = chemically synthesized
  source 1..22: mol_type = other DNA
gaagcagggtatgtttgaatgc

SEQ ID NO: 35836 - DNA, 22 bp, synthetic construct
  misc_feature 1..22: note = chemically synthesized
  source 1..22: mol_type = other DNA
gaatgcgaagtccaggctcaaa

SEQ ID NO: 35837 - DNA, 22 bp, synthetic construct
  misc_feature 1..22: note = chemically synthesized
  source 1..22: mol_type = other DNA
aatgcgaagtccaggctcaaaa

SEQ ID NO: 35838 - DNA, 22 bp, synthetic construct
  misc_feature 1..22: note = chemically synthesized
  source 1..22: mol_type = other DNA
aaaaaggggccttagtggctcc

SEQ ID NO: 35839 - DNA, 22 bp, synthetic construct
  misc_feature 1..22: note = chemically synthesized
  source 1..22: mol_type = other DNA
agtggctcctactagactggta

SEQ ID NO: 35840 - DNA, 22 bp, synthetic construct
  misc_feature 1..22: note = chemically synthesized
  source 1..22: mol_type = other DNA
gtggctcctactagactggtat

SEQ ID NO: 35841 - DNA, 22 bp, synthetic construct
  misc_feature 1..22: note = chemically synthesized
  source 1..22: mol_type = other DNA
ctactagactggtatcttaagg

SEQ ID NO: 35842 - DNA, 22 bp, synthetic construct
  misc_feature 1..22: note = chemically synthesized
  source 1..22: mol_type = other DNA
ctagactggtatcttaaggcaa

SEQ ID NO: 35843 - DNA, 22 bp, synthetic construct
  misc_feature 1..22: note = chemically synthesized
  source 1..22: mol_type = other DNA
gactggtatcttaaggcaagga

SEQ ID NO: 35844 - DNA, 22 bp, synthetic construct
  misc_feature 1..22: note = chemically synthesized
  source 1..22: mol_type = other DNA
gtatcttaaggcaaggaaaaca

SEQ ID NO: 35845 - DNA, 22 bp, synthetic construct
  misc_feature 1..22: note = chemically synthesized
  source 1..22: mol_type = other DNA
aaggcaaggaaaacagaatatg

SEQ ID NO: 35846 - DNA, 22 bp, synthetic construct
  misc_feature 1..22: note = chemically synthesized
  source 1..22: mol_type = other DNA
aggcaaggaaaacagaatatgt

SEQ ID NO: 35847 - DNA, 22 bp, synthetic construct
  misc_feature 1..22: note = chemically synthesized
  source 1..22: mol_type = other DNA
atatctaaaaccatgcctagtg

SEQ ID NO: 35848 - DNA, 22 bp, synthetic construct
  misc_feature 1..22: note = chemically synthesized
  source 1..22: mol_type = other DNA
aaaccatgcctagtgcccaggc

SEQ ID NO: 35849 - DNA, 22 bp, synthetic construct
  misc_feature 1..22: note = chemically synthesized
  source 1..22: mol_type = other DNA
gtgcccaggccaggcttgaatc

SEQ ID NO: 35850 - DNA, 22 bp, synthetic construct
  misc_feature 1..22: note = chemically synthesized
  source 1..22: mol_type = other DNA
gaatcaatgctcaacgcatgca

SEQ ID NO: 35851 - DNA, 22 bp, synthetic construct
  misc_feature 1..22: note = chemically synthesized
  source 1..22: mol_type = other DNA
aatcaatgctcaacgcatgcat

SEQ ID NO: 35852 - DNA, 22 bp, synthetic construct
  misc_feature 1..22: note = chemically synthesized
  source 1..22: mol_type = other DNA
aacgcatgcatgtgtaactgaa

SEQ ID NO: 35853 - DNA, 22 bp, synthetic construct
  misc_feature 1..22: note = chemically synthesized
  source 1..22: mol_type = other DNA
aacagaactgcccagaaccttg

SEQ ID NO: 35854 - DNA, 22 bp, synthetic construct
  misc_feature 1..22: note = chemically synthesized
  source 1..22: mol_type = other DNA
cccagaaccttggctcaggcca

SEQ ID NO: 35855 - DNA, 22 bp, synthetic construct
  misc_feature 1..22: note = chemically synthesized
  source 1..22: mol_type = other DNA
ggctcaggccaagtaggccaga

SEQ ID NO: 35856 - DNA, 22 bp, synthetic construct
  misc_feature 1..22: note = chemically synthesized
  source 1..22: mol_type = other DNA
gctcaggccaagtaggccagac

SEQ ID NO: 35857 - DNA, 22 bp, synthetic construct
  misc_feature 1..22: note = chemically synthesized
  source 1..22: mol_type = other DNA
aggccaagtaggccagaccacc

SEQ ID NO: 35858 - DNA, 22 bp, synthetic construct
  misc_feature 1..22: note = chemically synthesized
  source 1..22: mol_type = other DNA
ccctgaatgcagggtttgagaa

SEQ ID NO: 35859 - DNA, 22 bp, synthetic construct
  misc_feature 1..22: note = chemically synthesized
  source 1..22: mol_type = other DNA
cctgaatgcagggtttgagaag

SEQ ID NO: 35860 - DNA, 22 bp, synthetic construct
  misc_feature 1..22: note = chemically synthesized
  source 1..22: mol_type = other DNA
aatgcagggtttgagaagtgcc

SEQ ID NO: 35861 - DNA, 22 bp, synthetic construct
  misc_feature 1..22: note = chemically synthesized
  source 1..22: mol_type = other DNA
gagaagtgccctaatgccctct

SEQ ID NO: 35862 - DNA, 22 bp, synthetic construct
  misc_feature 1..22: note = chemically synthesized
  source 1..22: mol_type = other DNA
agaagtgccctaatgccctcta

SEQ ID NO: 35863 - DNA, 22 bp, synthetic construct
  misc_feature 1..22: note = chemically synthesized
  source 1..22: mol_type = other DNA
atgccctctaactgatgctgag

SEQ ID NO: 35864 - DNA, 22 bp, synthetic construct
  misc_feature 1..22: note = chemically synthesized
  source 1..22: mol_type = other DNA
taactgatgctgagtttgaaga

SEQ ID NO: 35865 - DNA, 22 bp, synthetic construct
  misc_feature 1..22: note = chemically synthesized
  source 1..22: mol_type = other DNA
actgatgctgagtttgaagaat

SEQ ID NO: 35866 - DNA, 22 bp, synthetic construct
  misc_feature 1..22: note = chemically synthesized
  source 1..22: mol_type = other DNA
atgctgagtttgaagaatccat

SEQ ID NO: 35867 - DNA, 22 bp, synthetic construct
  misc_feature 1..22: note = chemically synthesized
  source 1..22: mol_type = other DNA
agtttgaagaatccatcagtta

SEQ ID NO: 35868 - DNA, 22 bp, synthetic construct
  misc_feature 1..22: note = chemically synthesized
  source 1..22: mol_type = other DNA
gaagaatccatcagttaagggg

SEQ ID NO: 35869 - DNA, 22 bp, synthetic construct
  misc_feature 1..22: note = chemically synthesized
  source 1..22: mol_type = other DNA
aagaatccatcagttaagggga

SEQ ID NO: 35870 - DNA, 22 bp, synthetic construct
  misc_feature 1..22: note = chemically synthesized
  source 1..22: mol_type = other DNA
aggggaggtgtttctgagtttg

SEQ ID NO: 35871 - DNA, 22 bp, synthetic construct
  misc_feature 1..22: note = chemically synthesized
  source 1..22: mol_type = other DNA
ctgagtttgaagaatcaaacac

SEQ ID NO: 35872 - DNA, 22 bp, synthetic construct
  misc_feature 1..22: note = chemically synthesized
  source 1..22: mol_type = other DNA
tgagtttgaagaatcaaacacc

SEQ ID NO: 35873 - DNA, 22 bp, synthetic construct
  misc_feature 1..22: note = chemically synthesized
  source 1..22: mol_type = other DNA
agtttgaagaatcaaacacctt

SEQ ID NO: 35874 - DNA, 22 bp, synthetic construct
  misc_feature 1..22: note = chemically synthesized
  source 1..22: mol_type = other DNA
gaagaatcaaacaccttcctaa

SEQ ID NO: 35875 - DNA, 22 bp, synthetic construct
  misc_feature 1..22: note = chemically synthesized
  source 1..22: mol_type = other DNA
aagaatcaaacaccttcctaat

SEQ ID NO: 35876 - DNA, 22 bp, synthetic construct
  misc_feature 1..22: note = chemically synthesized
  source 1..22: mol_type = other DNA
cctaattggtaggaatcctgaa

SEQ ID NO: 35877 - DNA, 22 bp, synthetic construct
  misc_feature 1..22: note = chemically synthesized
  source 1..22: mol_type = other DNA
ctaattggtaggaatcctgaaa

SEQ ID NO: 35878 - DNA, 22 bp, synthetic construct
  misc_feature 1..22: note = chemically synthesized
  source 1..22: mol_type = other DNA
attggtaggaatcctgaaaaca

SEQ ID NO: 35879 - DNA, 22 bp, synthetic construct
  misc_feature 1..22: note = chemically synthesized
  source 1..22: mol_type = other DNA
gtaggaatcctgaaaacactcc

SEQ ID NO: 35880 - DNA, 22 bp, synthetic construct
  misc_feature 1..22: note = chemically synthesized
  source 1..22: mol_type = other DNA
aaaacactccacaccggagtaa

SEQ ID NO: 35881 - DNA, 22 bp, synthetic construct
  misc_feature 1..22: note = chemically synthesized
  source 1..22: mol_type = other DNA
cacaccggagtaaaagactttg

SEQ ID NO: 35882 - DNA, 22 bp, synthetic construct
  misc_feature 1..22: note = chemically synthesized
  source 1..22: mol_type = other DNA
tggttttttatctttatgcctg

SEQ ID NO: 35883 - DNA, 22 bp, synthetic construct
  misc_feature 1..22: note = chemically synthesized
  source 1..22: mol_type = other DNA
ggttttttatctttatgcctga

SEQ ID NO: 35884 - DNA, 22 bp, synthetic construct
  misc_feature 1..22: note = chemically synthesized
  source 1..22: mol_type = other DNA
gttttttatctttatgcctgac

SEQ ID NO: 35885 - DNA, 22 bp, synthetic construct
  misc_feature 1..22: note = chemically synthesized
  source 1..22: mol_type = other DNA
tttatctttatgcctgactaaa

SEQ ID NO: 35886 - DNA, 22 bp, synthetic construct
  misc_feature 1..22: note = chemically synthesized
  source 1..22: mol_type = other DNA
ttatctttatgcctgactaaaa

SEQ ID NO: 35887 - DNA, 22 bp, synthetic construct
  misc_feature 1..22: note = chemically synthesized
  source 1..22: mol_type = other DNA
tatctttatgcctgactaaaag

SEQ ID NO: 35888 - DNA, 22 bp, synthetic construct
  misc_feature 1..22: note = chemically synthesized
  source 1..22: mol_type = other DNA
atctttatgcctgactaaaagt

SEQ ID NO: 35889 - DNA, 22 bp, synthetic construct
  misc_feature 1..22: note = chemically synthesized
  source 1..22: mol_type = other DNA
tctttatgcctgactaaaagtt

SEQ ID NO: 35890 - DNA, 22 bp, synthetic construct
  misc_feature 1..22: note = chemically synthesized
  source 1..22: mol_type = other DNA
tatgcctgactaaaagttaact

SEQ ID NO: 35891 - DNA, 22 bp, synthetic construct
  misc_feature 1..22: note = chemically synthesized
  source 1..22: mol_type = other DNA
atgcctgactaaaagttaactc

SEQ ID NO: 35892 - DNA, 22 bp, synthetic construct
  misc_feature 1..22: note = chemically synthesized
  source 1..22: mol_type = other DNA
tgcctgactaaaagttaactct

SEQ ID NO: 35893 - DNA, 22 bp, synthetic construct
  misc_feature 1..22: note = chemically synthesized
  source 1..22: mol_type = other DNA
actaaaagttaactctcattct

SEQ ID NO: 35894 - DNA, 22 bp, synthetic construct
  misc_feature 1..22: note = chemically synthesized
  source 1..22: mol_type = other DNA
aaagttaactctcattctttca

SEQ ID NO: 35895 - DNA, 22 bp, synthetic construct
  misc_feature 1..22: note = chemically synthesized
  source 1..22: mol_type = other DNA
actctcattctttcattcagca

SEQ ID NO: 35896 - DNA, 22 bp, synthetic construct
  misc_feature 1..22: note = chemically synthesized
  source 1..22: mol_type = other DNA
tcattctttcattcagcaaata

SEQ ID NO: 35897 - DNA, 22 bp, synthetic construct
  misc_feature 1..22: note = chemically synthesized
  source 1..22: mol_type = other DNA
attctttcattcagcaaatatt

SEQ ID NO: 35898 - DNA, 22 bp, synthetic construct
  misc_feature 1..22: note = chemically synthesized
  source 1..22: mol_type = other DNA
tttcattcagcaaatattttgt

SEQ ID NO: 35899 - DNA, 22 bp, synthetic construct
  misc_feature 1..22: note = chemically synthesized
  source 1..22: mol_type = other DNA
tcattcagcaaatattttgtgc

SEQ ID NO: 35900 - DNA, 22 bp, synthetic construct
  misc_feature 1..22: note = chemically synthesized
  source 1..22: mol_type = other DNA
cattcagcaaatattttgtgct

SEQ ID NO: 35901 - DNA, 22 bp, synthetic construct
  misc_feature 1..22: note = chemically synthesized
  source 1..22: mol_type = other DNA
attcagcaaatattttgtgcta

SEQ ID NO: 35902 - DNA, 22 bp, synthetic construct
  misc_feature 1..22: note = chemically synthesized
  source 1..22: mol_type = other DNA
agcaaatattttgtgctagtgc

SEQ ID NO: 35903 - DNA, 22 bp, synthetic construct
  misc_feature 1..22: note = chemically synthesized
  source 1..22: mol_type = other DNA
tgtgctagtgcatgacactgca

SEQ ID NO: 35904 - DNA, 22 bp, synthetic construct
  misc_feature 1..22: note = chemically synthesized
  source 1..22: mol_type = other DNA
gtgctagtgcatgacactgcag

SEQ ID NO: 35905 - DNA, 22 bp, synthetic construct
  misc_feature 1..22: note = chemically synthesized
  source 1..22: mol_type = other DNA
tgctagtgcatgacactgcaga

SEQ ID NO: 35906 - DNA, 22 bp, synthetic construct
  misc_feature 1..22: note = chemically synthesized
  source 1..22: mol_type = other DNA
gtgcatgacactgcagattaat

SEQ ID NO: 35907 - DNA, 22 bp, synthetic construct
  misc_feature 1..22: note = chemically synthesized
  source 1..22: mol_type = other DNA
cagattaatatcgtagatgaac

SEQ ID NO: 35908 - DNA, 22 bp, synthetic construct
  misc_feature 1..22: note = chemically synthesized
  source 1..22: mol_type = other DNA
atatcgtagatgaactgagtct

SEQ ID NO: 35909 - DNA, 22 bp, synthetic construct
  misc_feature 1..22: note = chemically synthesized
  source 1..22: mol_type = other DNA
agtctgggctaggtagagtcaa

SEQ ID NO: 35910 - DNA, 22 bp, synthetic construct
  misc_feature 1..22: note = chemically synthesized
  source 1..22: mol_type = other DNA
ggctaggtagagtcaaaaaaaa

SEQ ID NO: 35911 - DNA, 22 bp, synthetic construct
  misc_feature 1..22: note = chemically synthesized
  source 1..22: mol_type = other DNA
ggtagagtcaaaaaaaaatttc

SEQ ID NO: 35912 - DNA, 22 bp, synthetic construct
  misc_feature 1..22: note = chemically synthesized
  source 1..22: mol_type = other DNA
cctaaaggagcctgtacctaaa

SEQ ID NO: 35913 - DNA, 22 bp, synthetic construct
  misc_feature 1..22: note = chemically synthesized
  source 1..22: mol_type = other DNA
ctaaaggagcctgtacctaaac

SEQ ID NO: 35914 - DNA, 22 bp, synthetic construct
  misc_feature 1..22: note = chemically synthesized
  source 1..22: mol_type = other DNA
aaggagcctgtacctaaactga

SEQ ID NO: 35915 - DNA, 22 bp, synthetic construct
  misc_feature 1..22: note = chemically synthesized
  source 1..22: mol_type = other DNA
tacctaaactgagtcttcagag

SEQ ID NO: 35916 - DNA, 22 bp, synthetic construct
  misc_feature 1..22: note = chemically synthesized
  source 1..22: mol_type = other DNA
aactgagtcttcagagagaagt

SEQ ID NO: 35917 - DNA, 22 bp, synthetic construct
  misc_feature 1..22: note = chemically synthesized
  source 1..22: mol_type = other DNA
agtcttcagagagaagttggaa

SEQ ID NO: 35918 - DNA, 22 bp, synthetic construct
  misc_feature 1..22: note = chemically synthesized
  source 1..22: mol_type = other DNA
cagagagaagttggaactggca

SEQ ID NO: 35919 - DNA, 22 bp, synthetic construct
  misc_feature 1..22: note = chemically synthesized
  source 1..22: mol_type = other DNA
agagagaagttggaactggcaa

SEQ ID NO: 35920 - DNA, 22 bp, synthetic construct
  misc_feature 1..22: note = chemically synthesized
  source 1..22: mol_type = other DNA
gaactggcaaagtgaggaagga

SEQ ID NO: 35921 - DNA, 22 bp, synthetic construct
  misc_feature 1..22: note = chemically synthesized
  source 1..22: mol_type = other DNA
gcaaagtgaggaaggacggggt

SEQ ID NO: 35922 - DNA, 22 bp, synthetic construct
  misc_feature 1..22: note = chemically synthesized
  source 1..22: mol_type = other DNA
gagggaagagtgagtgcaaagg

SEQ ID NO: 35923 - DNA, 22 bp, synthetic construct
  misc_feature 1..22: note = chemically synthesized
  source 1..22: mol_type = other DNA
catgctctagaatccaaaactg

SEQ ID NO: 35924 - DNA, 22 bp, synthetic construct
  misc_feature 1..22: note = chemically synthesized
  source 1..22: mol_type = other DNA
tagaatccaaaactgtgtcagc

SEQ ID NO: 35925 - DNA, 22 bp, synthetic construct
  misc_feature 1..22: note = chemically synthesized
  source 1..22: mol_type = other DNA
gaatccaaaactgtgtcagcca

SEQ ID NO: 35926 - DNA, 22 bp, synthetic construct
  misc_feature 1..22: note = chemically synthesized
  source 1..22: mol_type = other DNA
tgtcagccaaatttgagttgat

SEQ ID NO: 35927 - DNA, 22 bp, synthetic construct
  misc_feature 1..22: note = chemically synthesized
  source 1..22: mol_type = other DNA
gagttgatggagggacagccaa

SEQ ID NO: 35928 - DNA, 22 bp, synthetic construct
  misc_feature 1..22: note = chemically synthesized
  source 1..22: mol_type = other DNA
agttgatggagggacagccaaa

SEQ ID NO: 35929 - DNA, 22 bp, synthetic construct
  misc_feature 1..22: note = chemically synthesized
  source 1..22: mol_type = other DNA
atggagggacagccaaactgag

SEQ ID NO: 35930 - DNA, 22 bp, synthetic construct
  misc_feature 1..22: note = chemically synthesized
  source 1..22: mol_type = other DNA
agatacccaggcggtggttgga

SEQ ID NO: 35931 - DNA, 22 bp, synthetic construct
  misc_feature 1..22: note = chemically synthesized
  source 1..22: mol_type = other DNA
gatttatggatctggatttcag

SEQ ID NO: 35932 - DNA, 22 bp, synthetic construct
  misc_feature 1..22: note = chemically synthesized
  source 1..22: mol_type = other DNA
atggatctggatttcaggggag

SEQ ID NO: 35933 - DNA, 22 bp, synthetic construct
  misc_feature 1..22: note = chemically synthesized
  source 1..22: mol_type = other DNA
tggatctggatttcaggggagt

SEQ ID NO: 35934 - DNA, 22 bp, synthetic construct
  misc_feature 1..22: note = chemically synthesized
  source 1..22: mol_type = other DNA
gatttcaggggagtgggcaggg

SEQ ID NO: 35935 - DNA, 22 bp, synthetic construct
  misc_feature 1..22: note = chemically synthesized
  source 1..22: mol_type = other DNA
caggggagtgggcagggctagg

SEQ ID NO: 35936 - DNA, 22 bp, synthetic construct
  misc_feature 1..22: note = chemically synthesized
  source 1..22: mol_type = other DNA
aggggagtgggcagggctaggg

SEQ ID NO: 35937 - DNA, 22 bp, synthetic construct
  misc_feature 1..22: note = chemically synthesized
  source 1..22: mol_type = other DNA
ggggaatagaactgagggtcat

SEQ ID NO: 35938 - DNA, 22 bp, synthetic construct
  misc_feature 1..22: note = chemically synthesized
  source 1..22: mol_type = other DNA
agggtcatgatgtcagtggtag

SEQ ID NO: 35939 - DNA, 22 bp, synthetic construct
  misc_feature 1..22: note = chemically synthesized
  source 1..22: mol_type = other DNA
aagtcttggaagaaagagtaga

SEQ ID NO: 35940 - DNA, 22 bp, synthetic construct
  misc_feature 1..22: note = chemically synthesized
  source 1..22: mol_type = other DNA
ggaagaaagagtagatagaaac

SEQ ID NO: 35941 - DNA, 22 bp, synthetic construct
  misc_feature 1..22: note = chemically synthesized
  source 1..22: mol_type = other DNA
gaagaaagagtagatagaaact

SEQ ID NO: 35942 - DNA, 22 bp, synthetic construct
  misc_feature 1..22: note = chemically synthesized
  source 1..22: mol_type = other DNA
tgttttctgatgaacattctat

SEQ ID NO: 35943 - DNA, 22 bp, synthetic construct
  misc_feature 1..22: note = chemically synthesized
  source 1..22: mol_type = other DNA
gttttctgatgaacattctatg

SEQ ID NO: 35944 - DNA, 22 bp, synthetic construct
  misc_feature 1..22: note = chemically synthesized
  source 1..22: mol_type = other DNA
ttttctgatgaacattctatga

SEQ ID NO: 35945 - DNA, 22 bp, synthetic construct
  misc_feature 1..22: note = chemically synthesized
  source 1..22: mol_type = other DNA
tctgatgaacattctatgagga

SEQ ID NO: 35946 - DNA, 22 bp, synthetic construct
  misc_feature 1..22: note = chemically synthesized
  source 1..22: mol_type = other DNA
ctgatgaacattctatgaggaa

SEQ ID NO: 35947 - DNA, 22 bp, synthetic construct
  misc_feature 1..22: note = chemically synthesized
  source 1..22: mol_type = other DNA
tgatgaacattctatgaggaag

SEQ ID NO: 35948 - DNA, 22 bp, synthetic construct
  misc_feature 1..22: note = chemically synthesized
  source 1..22: mol_type = other DNA
atgaacattctatgaggaagtt

SEQ ID NO: 35949 - DNA, 22 bp, synthetic construct
  misc_feature 1..22: note = chemically synthesized
  source 1..22: mol_type = other DNA
tatgaggaagttcagcagaggt

SEQ ID NO: 35950 - DNA, 22 bp, synthetic construct
  misc_feature 1..22: note = chemically synthesized
  source 1..22: mol_type = other DNA
tgaggaagttcagcagaggttg

SEQ ID NO: 35951 - DNA, 22 bp, synthetic construct
  misc_feature 1..22: note = chemically synthesized
  source 1..22: mol_type = other DNA
agcagaggttggaaacatcttt

SEQ ID NO: 35952 - DNA, 22 bp, synthetic construct
  misc_feature 1..22: note = chemically synthesized
  source 1..22: mol_type = other DNA
gaaacatctttaccatttataa

SEQ ID NO: 35953 - DNA, 22 bp, synthetic construct
  misc_feature 1..22: note = chemically synthesized
  source 1..22: mol_type = other DNA
taccatttataaataaatttta

SEQ ID NO: 35954 - DNA, 22 bp, synthetic construct
  misc_feature 1..22: note = chemically synthesized
  source 1..22: mol_type = other DNA
accatttataaataaattttat

SEQ ID NO: 35955 - DNA, 22 bp, synthetic construct
  misc_feature 1..22: note = chemically synthesized
  source 1..22: mol_type = other DNA
ccatttataaataaattttatg

SEQ ID NO: 35956 - DNA, 22 bp, synthetic construct
  misc_feature 1..22: note = chemically synthesized
  source 1..22: mol_type = other DNA
ataaataaattttatgtaaaat

SEQ ID NO: 35957 - DNA, 22 bp, synthetic construct
  misc_feature 1..22: note = chemically synthesized
  source 1..22: mol_type = other DNA
taaataaattttatgtaaaatc

SEQ ID NO: 35958 - DNA, 22 bp, synthetic construct
  misc_feature 1..22: note = chemically synthesized
  source 1..22: mol_type = other DNA
tatgtaaaatcctatcctgctg

SEQ ID NO: 35959 - DNA, 22 bp, synthetic construct
  misc_feature 1..22: note = chemically synthesized
  source 1..22: mol_type = other DNA
atgtaaaatcctatcctgctgt

SEQ ID NO: 35960 - DNA, 22 bp, synthetic construct
  misc_feature 1..22: note = chemically synthesized
  source 1..22: mol_type = other DNA
tgtaaaatcctatcctgctgtc

SEQ ID NO: 35961 - DNA, 22 bp, synthetic construct
  misc_feature 1..22: note = chemically synthesized
  source 1..22: mol_type = other DNA
tcctgctgtcatgtttaagcaa

SEQ ID NO: 35962 - DNA, 22 bp, synthetic construct
  misc_feature 1..22: note = chemically synthesized
  source 1..22: mol_type = other DNA
ctgtcatgtttaagcaacttat

SEQ ID NO: 35963 - DNA, 22 bp, synthetic construct
  misc_feature 1..22: note = chemically synthesized
  source 1..22: mol_type = other DNA
tcatgtttaagcaacttattat

SEQ ID NO: 35964 - DNA, 22 bp, synthetic construct
  misc_feature 1..22: note = chemically synthesized
  source 1..22: mol_type = other DNA
aagcaacttattatgcacagca

SEQ ID NO: 35965 - DNA, 22 bp, synthetic construct
  misc_feature 1..22: note = chemically synthesized
  source 1..22: mol_type = other DNA
agcaacttattatgcacagcac

SEQ ID NO: 35966 - DNA, 22 bp, synthetic construct
  misc_feature 1..22: note = chemically synthesized
  source 1..22: mol_type = other DNA
attatgcacagcaccaggacat

SEQ ID NO: 35967 - DNA, 22 bp, synthetic construct
  misc_feature 1..22: note = chemically synthesized
  source 1..22: mol_type = other DNA
ttatgcacagcaccaggacatc

SEQ ID NO: 35968 - DNA, 22 bp, synthetic construct
  misc_feature 1..22: note = chemically synthesized
  source 1..22: mol_type = other DNA
tgcacagcaccaggacatcaat

SEQ ID NO: 35969 - DNA, 22 bp, synthetic construct
  misc_feature 1..22: note = chemically synthesized
  source 1..22: mol_type = other DNA
catgccagtctttgctctcagt

SEQ ID NO: 35970 - DNA, 22 bp, synthetic construct
  misc_feature 1..22: note = chemically synthesized
  source 1..22: mol_type = other DNA
tgctctcagtttcaaaggcatt

SEQ ID NO: 35971 - DNA, 22 bp, synthetic construct
  misc_feature 1..22: note = chemically synthesized
  source 1..22: mol_type = other DNA
gctctcagtttcaaaggcattc

SEQ ID NO: 35972 - DNA, 22 bp, synthetic construct
  misc_feature 1..22: note = chemically synthesized
  source 1..22: mol_type = other DNA
ctctcagtttcaaaggcattct

SEQ ID NO: 35973 - DNA, 22 bp, synthetic construct
  misc_feature 1..22: note = chemically synthesized
  source 1..22: mol_type = other DNA
tcagtttcaaaggcattcttcc

SEQ ID NO: 35974 - DNA, 22 bp, synthetic construct
  misc_feature 1..22: note = chemically synthesized
  source 1..22: mol_type = other DNA
agtttcaaaggcattcttccct

SEQ ID NO: 35975 - DNA, 22 bp, synthetic construct
  misc_feature 1..22: note = chemically synthesized
  source 1..22: mol_type = other DNA
caaaggcattcttccctgcctg

SEQ ID NO: 35976 - DNA, 22 bp, synthetic construct
  misc_feature 1..22: note = chemically synthesized
  source 1..22: mol_type = other DNA
aaaggcattcttccctgcctgc

SEQ ID NO: 35977 - DNA, 22 bp, synthetic construct
  misc_feature 1..22: note = chemically synthesized
  source 1..22: mol_type = other DNA
ttccctgcctgctgtctaatct

SEQ ID NO: 35978 - DNA, 22 bp, synthetic construct
  misc_feature 1..22: note = chemically synthesized
  source 1..22: mol_type = other DNA
ccctgcctgctgtctaatcttt

SEQ ID NO: 35979 - DNA, 22 bp, synthetic construct
  misc_feature 1..22: note = chemically synthesized
  source 1..22: mol_type = other DNA
cctgcctgctgtctaatcttta

SEQ ID NO: 35980 - DNA, 22 bp, synthetic construct
  misc_feature 1..22: note = chemically synthesized
  source 1..22: mol_type = other DNA
cctgctgtctaatctttacaaa

SEQ ID NO: 35981 - DNA, 22 bp, synthetic construct
  misc_feature 1..22: note = chemically synthesized
  source 1..22: mol_type = other DNA
ctgtctaatctttacaaagaaa

SEQ ID NO: 35982 - DNA, 22 bp, synthetic construct
  misc_feature 1..22: note = chemically synthesized
  source 1..22: mol_type = other DNA
tctaatctttacaaagaaaggt

SEQ ID NO: 35983 - DNA, 22 bp, synthetic construct
  misc_feature 1..22: note = chemically synthesized
  source 1..22: mol_type = other DNA
atctttacaaagaaaggttaac

SEQ ID NO: 35984 - DNA, 22 bp, synthetic construct
  misc_feature 1..22: note = chemically synthesized
  source 1..22: mol_type = other DNA
tacaaagaaaggttaactccag

SEQ ID NO: 35985 - DNA, 22 bp, synthetic construct
  misc_feature 1..22: note = chemically synthesized
  source 1..22: mol_type = other DNA
acaaagaaaggttaactccaga

SEQ ID NO: 35986 - DNA, 22 bp, synthetic construct
  misc_feature 1..22: note = chemically synthesized
  source 1..22: mol_type = other DNA
caaagaaaggttaactccagag

SEQ ID NO: 35987 - DNA, 22 bp, synthetic construct
  misc_feature 1..22: note = chemically synthesized
  source 1..22: mol_type = other DNA
actccagaggtcaggaatctga

SEQ ID NO: 35988 - DNA, 22 bp, synthetic construct
  misc_feature 1..22: note = chemically synthesized
  source 1..22: mol_type = other DNA
cagaggtcaggaatctgaacac

SEQ ID NO: 35989 - DNA, 22 bp, synthetic construct
  misc_feature 1..22: note = chemically synthesized
  source 1..22: mol_type = other DNA
aacacagaaaaccagattgcat

SEQ ID NO: 35990 - DNA, 22 bp, synthetic construct
  misc_feature 1..22: note = chemically synthesized
  source 1..22: mol_type = other DNA
catcatattcattctaatcaat

SEQ ID NO: 35991 - DNA, 22 bp, synthetic construct
  misc_feature 1..22: note = chemically synthesized
  source 1..22: mol_type = other DNA
attctaatcaataaacattata

SEQ ID NO: 35992 - DNA, 22 bp, synthetic construct
  misc_feature 1..22: note = chemically synthesized
  source 1..22: mol_type = other DNA
taatcaataaacattatataat

SEQ ID NO: 35993 - DNA, 22 bp, synthetic construct
  misc_feature 1..22: note = chemically synthesized
  source 1..22: mol_type = other DNA
atcaataaacattatataattt

SEQ ID NO: 35994 - DNA, 22 bp, synthetic construct
  misc_feature 1..22: note = chemically synthesized
  source 1..22: mol_type = other DNA
tataatttttaaaactgtttct

SEQ ID NO: 35995 - DNA, 22 bp, synthetic construct
  misc_feature 1..22: note = chemically synthesized
  source 1..22: mol_type = other DNA
ttaaaactgtttctcatctttt

SEQ ID NO: 35996 - DNA, 22 bp, synthetic construct
  misc_feature 1..22: note = chemically synthesized
  source 1..22: mol_type = other DNA
taaaactgtttctcatctttta

SEQ ID NO: 35997 - DNA, 22 bp, synthetic construct
  misc_feature 1..22: note = chemically synthesized
  source 1..22: mol_type = other DNA
aaaactgtttctcatcttttat

SEQ ID NO: 35998 - DNA, 22 bp, synthetic construct
  misc_feature 1..22: note = chemically synthesized
  source 1..22: mol_type = other DNA
aaactgtttctcatcttttatt

SEQ ID NO: 35999 - DNA, 22 bp, synthetic construct
  misc_feature 1..22: note = chemically synthesized
  source 1..22: mol_type = other DNA
tttctcatcttttatttcttca

SEQ ID NO: 36000 - DNA, 22 bp, synthetic construct
  misc_feature 1..22: note = chemically synthesized
  source 1..22: mol_type = other DNA
ctcatcttttatttcttcattt

SEQ ID NO: 36001 - DNA, 22 bp, synthetic construct
  misc_feature 1..22: note = chemically synthesized
  source 1..22: mol_type = other DNA
tcatcttttatttcttcatttt

SEQ ID NO: 36002 - DNA, 22 bp, synthetic construct
  misc_feature 1..22: note = chemically synthesized
  source 1..22: mol_type = other DNA
atcttttatttcttcattttaa

SEQ ID NO: 36003 - DNA, 22 bp, synthetic construct
  misc_feature 1..22: note = chemically synthesized
  source 1..22: mol_type = other DNA
ttatttcttcattttaatgaat

SEQ ID NO: 36004 - DNA, 22 bp, synthetic construct
  misc_feature 1..22: note = chemically synthesized
  source 1..22: mol_type = other DNA
tatttcttcattttaatgaata

SEQ ID NO: 36005 - DNA, 22 bp, synthetic construct
  misc_feature 1..22: note = chemically synthesized
  source 1..22: mol_type = other DNA
atttcttcattttaatgaatat

SEQ ID NO: 36006 - DNA, 22 bp, synthetic construct
  misc_feature 1..22: note = chemically synthesized
  source 1..22: mol_type = other DNA
tttcttcattttaatgaatatg

SEQ ID NO: 36007 - DNA, 22 bp, synthetic construct
  misc_feature 1..22: note = chemically synthesized
  source 1..22: mol_type = other DNA
cttcattttaatgaatatgtca

SEQ ID NO: 36008 - DNA, 22 bp, synthetic construct
  misc_feature 1..22: note = chemically synthesized
  source 1..22: mol_type = other DNA
ttcattttaatgaatatgtcaa

SEQ ID NO: 36009 - DNA, 22 bp, synthetic construct
  misc_feature 1..22: note = chemically synthesized
  source 1..22: mol_type = other DNA
cattttaatgaatatgtcaaca

SEQ ID NO: 36010 - DNA, 22 bp, synthetic construct
  misc_feature 1..22: note = chemically synthesized
  source 1..22: mol_type = other DNA
attttaatgaatatgtcaacac

SEQ ID NO: 36011 - DNA, 22 bp, synthetic construct
  misc_feature 1..22: note = chemically synthesized
  source 1..22: mol_type = other DNA
taatgaatatgtcaacacaaag

SEQ ID NO: 36012 - DNA, 22 bp, synthetic construct
  misc_feature 1..22: note = chemically synthesized
  source 1..22: mol_type = other DNA
aatgaatatgtcaacacaaagc

SEQ ID NO: 36013 - DNA, 22 bp, synthetic construct
  misc_feature 1..22: note = chemically synthesized
  source 1..22: mol_type = other DNA
atgaatatgtcaacacaaagcc

SEQ ID NO: 36014 - DNA, 22 bp, synthetic construct
  misc_feature 1..22: note = chemically synthesized
  source 1..22: mol_type = other DNA
acacaaaagtacaactggggta

SEQ ID NO: 36015 - DNA, 22 bp, synthetic construct
  misc_feature 1..22: note = chemically synthesized
  source 1..22: mol_type = other DNA
cacaaaagtacaactggggtaa

SEQ ID NO: 36016 - DNA, 22 bp, synthetic construct
  misc_feature 1..22: note = chemically synthesized
  source 1..22: mol_type = other DNA
gggtaagaaaattcaaaagata

SEQ ID NO: 36017 - DNA, 22 bp, synthetic construct
  misc_feature 1..22: note = chemically synthesized
  source 1..22: mol_type = other DNA
aaaagataaagtaataaaatta

SEQ ID NO: 36018 - DNA, 22 bp, synthetic construct
  misc_feature 1..22: note = chemically synthesized
  source 1..22: mol_type = other DNA
aatttaaaatgaaataccctat

SEQ ID NO: 36019 - DNA, 22 bp, synthetic construct
  misc_feature 1..22: note = chemically synthesized
  source 1..22: mol_type = other DNA
aaaatgaaataccctatgtatt

SEQ ID NO: 36020 - DNA, 22 bp, synthetic construct
  misc_feature 1..22: note = chemically synthesized
  source 1..22: mol_type = other DNA
aaatgaaataccctatgtattt

SEQ ID NO: 36021 - DNA, 22 bp, synthetic construct
  misc_feature 1..22: note = chemically synthesized
  source 1..22: mol_type = other DNA
tgtatttgagtaagttgcttag

SEQ ID NO: 36022 - DNA, 22 bp, synthetic construct
  misc_feature 1..22: note = chemically synthesized
  source 1..22: mol_type = other DNA
gagtaagttgcttagcttctcc

SEQ ID NO: 36023 - DNA, 22 bp, synthetic construct
  misc_feature 1..22: note = chemically synthesized
  source 1..22: mol_type = other DNA
agtaagttgcttagcttctccc

SEQ ID NO: 36024 - DNA, 22 bp, synthetic construct
  misc_feature 1..22: note = chemically synthesized
  source 1..22: mol_type = other DNA
cttagcttctcccaaccttggt

SEQ ID NO: 36025 - DNA, 22 bp, synthetic construct
  misc_feature 1..22: note = chemically synthesized
  source 1..22: mol_type = other DNA
agcttctcccaaccttggtttc

SEQ ID NO: 36026 - DNA, 22 bp, synthetic construct
  misc_feature 1..22: note = chemically synthesized
  source 1..22: mol_type = other DNA
gcttctcccaaccttggtttcc

SEQ ID NO: 36027 - DNA, 22 bp, synthetic construct
  misc_feature 1..22: note = chemically synthesized
  source 1..22: mol_type = other DNA
ctcccaaccttggtttcctcat

SEQ ID NO: 36028 - DNA, 22 bp, synthetic construct
  misc_feature 1..22: note = chemically synthesized
  source 1..22: mol_type = other DNA
tcccaaccttggtttcctcatt

SEQ ID NO: 36029 - DNA, 22 bp, synthetic construct
  misc_feature 1..22: note = chemically synthesized
  source 1..22: mol_type = other DNA
ccaaccttggtttcctcatttc

SEQ ID NO: 36030 - DNA, 22 bp, synthetic construct
  misc_feature 1..22: note = chemically synthesized
  source 1..22: mol_type = other DNA
ggtttcctcatttctaaaacga

SEQ ID NO: 36031 - DNA, 22 bp, synthetic construct
  misc_feature 1..22: note = chemically synthesized
  source 1..22: mol_type = other DNA
gtttcctcatttctaaaacgaa

SEQ ID NO: 36032 - DNA, 22 bp, synthetic construct
  misc_feature 1..22: note = chemically synthesized
  source 1..22: mol_type = other DNA
cctcatttctaaaacgaagaac

SEQ ID NO: 36033 - DNA, 22 bp, synthetic construct
  misc_feature 1..22: note = chemically synthesized
  source 1..22: mol_type = other DNA
ctcatttctaaaacgaagaact

SEQ ID NO: 36034 - DNA, 22 bp, synthetic construct
  misc_feature 1..22: note = chemically synthesized
  source 1..22: mol_type = other DNA
atttctaaaacgaagaacttgc

SEQ ID NO: 36035 - DNA, 22 bp, synthetic construct
  misc_feature 1..22: note = chemically synthesized
  source 1..22: mol_type = other DNA
ctaaaacgaagaacttgcttaa

SEQ ID NO: 36036 - DNA, 22 bp, synthetic construct
  misc_feature 1..22: note = chemically synthesized
  source 1..22: mol_type = other DNA
taaaacgaagaacttgcttaat

SEQ ID NO: 36037 - DNA, 22 bp, synthetic construct
  misc_feature 1..22: note = chemically synthesized
  source 1..22: mol_type = other DNA
aaacgaagaacttgcttaatat

SEQ ID NO: 36038 - DNA, 22 bp, synthetic construct
  misc_feature 1..22: note = chemically synthesized
  source 1..22: mol_type = other DNA
gcttaatattcaggctctgggc

SEQ ID NO: 36039 - DNA, 22 bp, synthetic construct
  misc_feature 1..22: note = chemically synthesized
  source 1..22: mol_type = other DNA
cttaatattcaggctctgggcc

SEQ ID NO: 36040 - DNA, 22 bp, synthetic construct
  misc_feature 1..22: note = chemically synthesized
  source 1..22: mol_type = other DNA
aatattcaggctctgggcccca

SEQ ID NO: 36041 - DNA, 22 bp, synthetic construct
  misc_feature 1..22: note = chemically synthesized
  source 1..22: mol_type = other DNA
atattcaggctctgggccccac

SEQ ID NO: 36042 - DNA, 22 bp, synthetic construct
  misc_feature 1..22: note = chemically synthesized
  source 1..22: mol_type = other DNA
aggctctgggccccaccaccaa

SEQ ID NO: 36043 - DNA, 22 bp, synthetic construct
  misc_feature 1..22: note = chemically synthesized
  source 1..22: mol_type = other DNA
tgggccccaccaccaaatcctt

SEQ ID NO: 36044 - DNA, 22 bp, synthetic construct
  misc_feature 1..22: note = chemically synthesized
  source 1..22: mol_type = other DNA
ggccccaccaccaaatccttga

SEQ ID NO: 36045 - DNA, 22 bp, synthetic construct
  misc_feature 1..22: note = chemically synthesized
  source 1..22: mol_type = other DNA
gattcactggctctgggtctgt

SEQ ID NO: 36046 - DNA, 22 bp, synthetic construct
  misc_feature 1..22: note = chemically synthesized
  source 1..22: mol_type = other DNA
attcactggctctgggtctgta

SEQ ID NO: 36047 - DNA, 22 bp, synthetic construct
  misc_feature 1..22: note = chemically synthesized
  source 1..22: mol_type = other DNA
actggctctgggtctgtatgta

SEQ ID NO: 36048 - DNA, 22 bp, synthetic construct
  misc_feature 1..22: note = chemically synthesized
  source 1..22: mol_type = other DNA
gctctgggtctgtatgtaacaa

SEQ ID NO: 36049 - DNA, 22 bp, synthetic construct
  misc_feature 1..22: note = chemically synthesized
  source 1..22: mol_type = other DNA
tgggtctgtatgtaacaagctt

SEQ ID NO: 36050 - DNA, 22 bp, synthetic construct
  misc_feature 1..22: note = chemically synthesized
  source 1..22: mol_type = other DNA
ggtctgtatgtaacaagcttct

SEQ ID NO: 36051 - DNA, 22 bp, synthetic construct
  misc_feature 1..22: note = chemically synthesized
  source 1..22: mol_type = other DNA
tatgtaacaagcttctggagtg

SEQ ID NO: 36052 - DNA, 22 bp, synthetic construct
  misc_feature 1..22: note = chemically synthesized
  source 1..22: mol_type = other DNA
ctggagtgattctaatgattag

SEQ ID NO: 36053 - DNA, 22 bp, synthetic construct
  misc_feature 1..22: note = chemically synthesized
  source 1..22: mol_type = other DNA
tggagtgattctaatgattagc

SEQ ID NO: 36054 - DNA, 22 bp, synthetic construct
  misc_feature 1..22: note = chemically synthesized
  source 1..22: mol_type = other DNA
gagtgattctaatgattagcca

SEQ ID NO: 36055 - DNA, 22 bp, synthetic construct
  misc_feature 1..22: note = chemically synthesized
  source 1..22: mol_type = other DNA
taatgattagccagagacagga

SEQ ID NO: 36056 - DNA, 22 bp, synthetic construct
  misc_feature 1..22: note = chemically synthesized
  source 1..22: mol_type = other DNA
atgattagccagagacaggacc

SEQ ID NO: 36057 - DNA, 22 bp, synthetic construct
  misc_feature 1..22: note = chemically synthesized
  source 1..22: mol_type = other DNA
gccagagacaggacctactatt

SEQ ID NO: 36058 - DNA, 22 bp, synthetic construct
  misc_feature 1..22: note = chemically synthesized
  source 1..22: mol_type = other DNA
ctattctacgtaactgatttcc

SEQ ID NO: 36059 - DNA, 22 bp, synthetic construct
  misc_feature 1..22: note = chemically synthesized
  source 1..22: mol_type = other DNA
ttctacgtaactgatttcctct

SEQ ID NO: 36060 - DNA, 22 bp, synthetic construct
  misc_feature 1..22: note = chemically synthesized
  source 1..22: mol_type = other DNA
tacgtaactgatttcctcttgc

SEQ ID NO: 36061 - DNA, 22 bp, synthetic construct
  misc_feature 1..22: note = chemically synthesized
  source 1..22: mol_type = other DNA
cgtaactgatttcctcttgctg

SEQ ID NO: 36062 - DNA, 22 bp, synthetic construct
  misc_feature 1..22: note = chemically synthesized
  source 1..22: mol_type = other DNA
atttcctcttgctgctgtaaaa

SEQ ID NO: 36063 - DNA, 22 bp, synthetic construct
  misc_feature 1..22: note = chemically synthesized
  source 1..22: mol_type = other DNA
cctcttgctgctgtaaaaaatt

SEQ ID NO: 36064 - DNA, 22 bp, synthetic construct
  misc_feature 1..22: note = chemically synthesized
  source 1..22: mol_type = other DNA
ctcttgctgctgtaaaaaatta

SEQ ID NO: 36065 - DNA, 22 bp, synthetic construct
  misc_feature 1..22: note = chemically synthesized
  source 1..22: mol_type = other DNA
ttgctgctgtaaaaaattacca

SEQ ID NO: 36066 - DNA, 22 bp, synthetic construct
  misc_feature 1..22: note = chemically synthesized
  source 1..22: mol_type = other DNA
gctgctgtaaaaaattaccaca

SEQ ID NO: 36067 - DNA, 22 bp, synthetic construct
  misc_feature 1..22: note = chemically synthesized
  source 1..22: mol_type = other DNA
ctgctgtaaaaaattaccacaa

SEQ ID NO: 36068 - DNA, 22 bp, synthetic construct
  misc_feature 1..22: note = chemically synthesized
  source 1..22: mol_type = other DNA
ctgtaaaaaattaccacaaatt

SEQ ID NO: 36069 - DNA, 22 bp, synthetic construct
  misc_feature 1..22: note = chemically synthesized
  source 1..22: mol_type = other DNA
taaaaaattaccacaaatttat

SEQ ID NO: 36070 - DNA, 22 bp, synthetic construct
  misc_feature 1..22: note = chemically synthesized
  source 1..22: mol_type = other DNA
ccacaaatttattggcttaaaa

SEQ ID NO: 36071 - DNA, 22 bp, synthetic construct
  misc_feature 1..22: note = chemically synthesized
  source 1..22: mol_type = other DNA
attggcttaaaacaacacaaat

SEQ ID NO: 36072 - DNA, 22 bp, synthetic construct
  misc_feature 1..22: note = chemically synthesized
  source 1..22: mol_type = other DNA
ttggcttaaaacaacacaaatg

SEQ ID NO: 36073 - DNA, 22 bp, synthetic construct
  misc_feature 1..22: note = chemically synthesized
  source 1..22: mol_type = other DNA
gcttaaaacaacacaaatgtat

SEQ ID NO: 36074 - DNA, 22 bp, synthetic construct
  misc_feature 1..22: note = chemically synthesized
  source 1..22: mol_type = other DNA
aaaacaacacaaatgtattatc

SEQ ID NO: 36075 - DNA, 22 bp, synthetic construct
  misc_feature 1..22: note = chemically synthesized
  source 1..22: mol_type = other DNA
aaacaacacaaatgtattatct

SEQ ID NO: 36076 - DNA, 22 bp, synthetic construct
  misc_feature 1..22: note = chemically synthesized
  source 1..22: mol_type = other DNA
tcttgaagttgtggaggtcaga

SEQ ID NO: 36077 - DNA, 22 bp, synthetic construct
  misc_feature 1..22: note = chemically synthesized
  source 1..22: mol_type = other DNA
gaagttgtggaggtcagaagtc

SEQ ID NO: 36078 - DNA, 22 bp, synthetic construct
  misc_feature 1..22: note = chemically synthesized
  source 1..22: mol_type = other DNA
aagttgtggaggtcagaagtct

SEQ ID NO: 36079 - DNA, 22 bp, synthetic construct
  misc_feature 1..22: note = chemically synthesized
  source 1..22: mol_type = other DNA
tggaggtcagaagtctgaaatc

SEQ ID NO: 36080 - DNA, 22 bp, synthetic construct
  misc_feature 1..22: note = chemically synthesized
  source 1..22: mol_type = other DNA
aaatcggtttcactgggctaaa

SEQ ID NO: 36081 - DNA, 22 bp, synthetic construct
  misc_feature 1..22: note = chemically synthesized
  source 1..22: mol_type = other DNA
cactgggctaaagtcgaggtgt

SEQ ID NO: 36082 - DNA, 22 bp, synthetic construct
  misc_feature 1..22: note = chemically synthesized
  source 1..22: mol_type = other DNA
actgggctaaagtcgaggtgtc

SEQ ID NO: 36083 - DNA, 22 bp, synthetic construct
  misc_feature 1..22: note = chemically synthesized
  source 1..22: mol_type = other DNA
ggctaaagtcgaggtgtcagtg

SEQ ID NO: 36084 - DNA, 22 bp, synthetic construct
  misc_feature 1..22: note = chemically synthesized
  source 1..22: mol_type = other DNA
aagtcgaggtgtcagtgtggct

SEQ ID NO: 36085 - DNA, 22 bp, synthetic construct
  misc_feature 1..22: note = chemically synthesized
  source 1..22: mol_type = other DNA
tttcttctggagactctatgag

SEQ ID NO: 36086 - DNA, 22 bp, synthetic construct
  misc_feature 1..22: note = chemically synthesized
  source 1..22: mol_type = other DNA
cttctggagactctatgagaga

SEQ ID NO: 36087 - DNA, 22 bp, synthetic construct
  misc_feature 1..22: note = chemically synthesized
  source 1..22: mol_type = other DNA
ttctggagactctatgagagat

SEQ ID NO: 36088 - DNA, 22 bp, synthetic construct
  misc_feature 1..22: note = chemically synthesized
  source 1..22: mol_type = other DNA
ctggagactctatgagagattg

SEQ ID NO: 36089 - DNA, 22 bp, synthetic construct
  misc_feature 1..22: note = chemically synthesized
  source 1..22: mol_type = other DNA
tggagactctatgagagattgt

SEQ ID NO: 36090 - DNA, 22 bp, synthetic construct
  misc_feature 1..22: note = chemically synthesized
  source 1..22: mol_type = other DNA
gagactctatgagagattgtgt

SEQ ID NO: 36091 - DNA, 22 bp, synthetic construct
  misc_feature 1..22: note = chemically synthesized
  source 1..22: mol_type = other DNA
tatgagagattgtgttttcctg

SEQ ID NO: 36092 - DNA, 22 bp, synthetic construct
  misc_feature 1..22: note = chemically synthesized
  source 1..22: mol_type = other DNA
tgagagattgtgttttcctgcc

SEQ ID NO: 36093 - DNA, 22 bp, synthetic construct
  misc_feature 1..22: note = chemically synthesized
  source 1..22: mol_type = other DNA
tgttttcctgccttttccatgg

SEQ ID NO: 36094 - DNA, 22 bp, synthetic construct
  misc_feature 1..22: note = chemically synthesized
  source 1..22: mol_type = other DNA
tcctgccttttccatggattct

SEQ ID NO: 36095 - DNA, 22 bp, synthetic construct
  misc_feature 1..22: note = chemically synthesized
  source 1..22: mol_type = other DNA
cctgccttttccatggattctg

SEQ ID NO: 36096 - DNA, 22 bp, synthetic construct
  misc_feature 1..22: note = chemically synthesized
  source 1..22: mol_type = other DNA
ctgccttttccatggattctgt

SEQ ID NO: 36097 - DNA, 22 bp, synthetic construct
  misc_feature 1..22: note = chemically synthesized
  source 1..22: mol_type = other DNA
ccttttccatggattctgtttc

SEQ ID NO: 36098 - DNA, 22 bp, synthetic construct
  misc_feature 1..22: note = chemically synthesized
  source 1..22: mol_type = other DNA
ttccatggattctgtttcctct

SEQ ID NO: 36099 - DNA, 22 bp, synthetic construct
  misc_feature 1..22: note = chemically synthesized
  source 1..22: mol_type = other DNA
tccatggattctgtttcctctt

SEQ ID NO: 36100 - DNA, 22 bp, synthetic construct
  misc_feature 1..22: note = chemically synthesized
  source 1..22: mol_type = other DNA
ccatggattctgtttcctcttc

SEQ ID NO: 36101 - DNA, 22 bp, synthetic construct
  misc_feature 1..22: note = chemically synthesized
  source 1..22: mol_type = other DNA
catggattctgtttcctcttct

SEQ ID NO: 36102 - DNA, 22 bp, synthetic construct
  misc_feature 1..22: note = chemically synthesized
  source 1..22: mol_type = other DNA
tgtttcctcttctagaggctac

SEQ ID NO: 36103 - DNA, 22 bp, synthetic construct
  misc_feature 1..22: note = chemically synthesized
  source 1..22: mol_type = other DNA
tttcctcttctagaggctaccc

SEQ ID NO: 36104 - DNA, 22 bp, synthetic construct
  misc_feature 1..22: note = chemically synthesized
  source 1..22: mol_type = other DNA
cctcttctagaggctacccaca

SEQ ID NO: 36105 - DNA, 22 bp, synthetic construct
  misc_feature 1..22: note = chemically synthesized
  source 1..22: mol_type = other DNA
ctcttctagaggctacccacat

SEQ ID NO: 36106 - DNA, 22 bp, synthetic construct
  misc_feature 1..22: note = chemically synthesized
  source 1..22: mol_type = other DNA
ttctagaggctacccacattcc

SEQ ID NO: 36107 - DNA, 22 bp, synthetic construct
  misc_feature 1..22: note = chemically synthesized
  source 1..22: mol_type = other DNA
ctagaggctacccacattcctt

SEQ ID NO: 36108 - DNA, 22 bp, synthetic construct
  misc_feature 1..22: note = chemically synthesized
  source 1..22: mol_type = other DNA
tagaggctacccacattccttg

SEQ ID NO: 36109 - DNA, 22 bp, synthetic construct
  misc_feature 1..22: note = chemically synthesized
  source 1..22: mol_type = other DNA
gaggctacccacattccttggt

SEQ ID NO: 36110 - DNA, 22 bp, synthetic construct
  misc_feature 1..22: note = chemically synthesized
  source 1..22: mol_type = other DNA
cccacattccttggtttgtagc

SEQ ID NO: 36111 - DNA, 22 bp, synthetic construct
  misc_feature 1..22: note = chemically synthesized
  source 1..22: mol_type = other DNA
cttggtttgtagcctcttcctc

SEQ ID NO: 36112 - DNA, 22 bp, synthetic construct
  misc_feature 1..22: note = chemically synthesized
  source 1..22: mol_type = other DNA
ggtttgtagcctcttcctcgat

SEQ ID NO: 36113 - DNA, 22 bp, synthetic construct
  misc_feature 1..22: note = chemically synthesized
  source 1..22: mol_type = other DNA
gtttgtagcctcttcctcgatc

SEQ ID NO: 36114 - DNA, 22 bp, synthetic construct
  misc_feature 1..22: note = chemically synthesized
  source 1..22: mol_type = other DNA
gtagcctcttcctcgatcttca

SEQ ID NO: 36115 - DNA, 22 bp, synthetic construct
  misc_feature 1..22: note = chemically synthesized
  source 1..22: mol_type = other DNA
tagcctcttcctcgatcttcaa

SEQ ID NO: 36116 - DNA, 22 bp, synthetic construct
  misc_feature 1..22: note = chemically synthesized
  source 1..22: mol_type = other DNA
ttcctcgatcttcaaaaaaatg

SEQ ID NO: 36117 - DNA, 22 bp, synthetic construct
  misc_feature 1..22: note = chemically synthesized
  source 1..22: mol_type = other DNA
cctcgatcttcaaaaaaatgta

SEQ ID NO: 36118 - DNA, 22 bp, synthetic construct
  misc_feature 1..22: note = chemically synthesized
  source 1..22: mol_type = other DNA
ctcgatcttcaaaaaaatgtat

SEQ ID NO: 36119 - DNA, 22 bp, synthetic construct
  misc_feature 1..22: note = chemically synthesized
  source 1..22: mol_type = other DNA
gatcttcaaaaaaatgtatctc

SEQ ID NO: 36120 - DNA, 22 bp, synthetic construct
  misc_feature 1..22: note = chemically synthesized
  source 1..22: mol_type = other DNA
caaaaaaatgtatctctgcttt

SEQ ID NO: 36121 - DNA, 22 bp, synthetic construct
  misc_feature 1..22: note = chemically synthesized
  source 1..22: mol_type = other DNA
aaaaaaatgtatctctgctttt

SEQ ID NO: 36122 - DNA, 22 bp, synthetic construct
  misc_feature 1..22: note = chemically synthesized
  source 1..22: mol_type = other DNA
tgcttttgtaatcacgtcacat

SEQ ID NO: 36123 - DNA, 22 bp, synthetic construct
  misc_feature 1..22: note = chemically synthesized
  source 1..22: mol_type = other DNA
cttttgtaatcacgtcacattt

SEQ ID NO: 36124 - DNA, 22 bp, synthetic construct
  misc_feature 1..22: note = chemically synthesized
  source 1..22: mol_type = other DNA
ttgtaatcacgtcacattttct

SEQ ID NO: 36125 - DNA, 22 bp, synthetic construct
  misc_feature 1..22: note = chemically synthesized
  source 1..22: mol_type = other DNA
tgtaatcacgtcacattttctc

SEQ ID NO: 36126 - DNA, 22 bp, synthetic construct
  misc_feature 1..22: note = chemically synthesized
  source 1..22: mol_type = other DNA
gtaatcacgtcacattttctcc

SEQ ID NO: 36127 - DNA, 22 bp, synthetic construct
  misc_feature 1..22: note = chemically synthesized
  source 1..22: mol_type = other DNA
taatcacgtcacattttctcct

SEQ ID NO: 36128 - DNA, 22 bp, synthetic construct
  misc_feature 1..22: note = chemically synthesized
  source 1..22: mol_type = other DNA
tctcctcttataagtcaaatct

SEQ ID NO: 36129 - DNA, 22 bp, synthetic construct
  misc_feature 1..22: note = chemically synthesized
  source 1..22: mol_type = other DNA
ctcctcttataagtcaaatctc

SEQ ID NO: 36130 - DNA, 22 bp, synthetic construct
  misc_feature 1..22: note = chemically synthesized
  source 1..22: mol_type = other DNA
tcctcttataagtcaaatctcc

SEQ ID NO: 36131 - DNA, 22 bp, synthetic construct
  misc_feature 1..22: note = chemically synthesized
  source 1..22: mol_type = other DNA
ctcttataagtcaaatctccct

SEQ ID NO: 36132 - DNA, 22 bp, synthetic construct
  misc_feature 1..22: note = chemically synthesized
  source 1..22: mol_type = other DNA
ttataagtcaaatctccctttg

SEQ ID NO: 36133 - DNA, 22 bp, synthetic construct
  misc_feature 1..22: note = chemically synthesized
  source 1..22: mol_type = other DNA
ataagtcaaatctccctttgcc

SEQ ID NO: 36134 - DNA, 22 bp, synthetic construct
  misc_feature 1..22: note = chemically synthesized
  source 1..22: mol_type = other DNA
taagtcaaatctccctttgcct

SEQ ID NO: 36135 - DNA, 22 bp, synthetic construct
  misc_feature 1..22: note = chemically synthesized
  source 1..22: mol_type = other DNA
cctttgcctccctcttataatg

SEQ ID NO: 36136 - DNA, 22 bp, synthetic construct
  misc_feature 1..22: note = chemically synthesized
  source 1..22: mol_type = other DNA
tgcctccctcttataatgacac

SEQ ID NO: 36137 - DNA, 22 bp, synthetic construct
  misc_feature 1..22: note = chemically synthesized
  source 1..22: mol_type = other DNA
gcctccctcttataatgacact

SEQ ID NO: 36138 - DNA, 22 bp, synthetic construct
  misc_feature 1..22: note = chemically synthesized
  source 1..22: mol_type = other DNA
cctccctcttataatgacactt

SEQ ID NO: 36139 - DNA, 22 bp, synthetic construct
  misc_feature 1..22: note = chemically synthesized
  source 1..22: mol_type = other DNA
cctcttataatgacacttgtga

SEQ ID NO: 36140 - DNA, 22 bp, synthetic construct
  misc_feature 1..22: note = chemically synthesized
  source 1..22: mol_type = other DNA
ttataatgacacttgtgattac

SEQ ID NO: 36141 - DNA, 22 bp, synthetic construct
  misc_feature 1..22: note = chemically synthesized
  source 1..22: mol_type = other DNA
ataatgacacttgtgattacat

SEQ ID NO: 36142 - DNA, 22 bp, synthetic construct
  misc_feature 1..22: note = chemically synthesized
  source 1..22: mol_type = other DNA
taatgacacttgtgattacatt

SEQ ID NO: 36143 - DNA, 22 bp, synthetic construct
  misc_feature 1..22: note = chemically synthesized
  source 1..22: mol_type = other DNA
gtgattacatttaggatacacc

SEQ ID NO: 36144 - DNA, 22 bp, synthetic construct
  misc_feature 1..22: note = chemically synthesized
  source 1..22: mol_type = other DNA
tgattacatttaggatacaccc

SEQ ID NO: 36145 - DNA, 22 bp, synthetic construct
  misc_feature 1..22: note = chemically synthesized
  source 1..22: mol_type = other DNA
catttaggatacacccaaataa

SEQ ID NO: 36146 - DNA, 22 bp, synthetic construct
  misc_feature 1..22: note = chemically synthesized
  source 1..22: mol_type = other DNA
aggatacacccaaataattagg

SEQ ID NO: 36147 - DNA, 22 bp, synthetic construct
  misc_feature 1..22: note = chemically synthesized
  source 1..22: mol_type = other DNA
ggatacacccaaataattagga

SEQ ID NO: 36148 - DNA, 22 bp, synthetic construct
  misc_feature 1..22: note = chemically synthesized
  source 1..22: mol_type = other DNA
ggatatctccccatcccaagat

SEQ ID NO: 36149 - DNA, 22 bp, synthetic construct
  misc_feature 1..22: note = chemically synthesized
  source 1..22: mol_type = other DNA
cccatcccaagatccttaatta

SEQ ID NO: 36150 - DNA, 22 bp, synthetic construct
  misc_feature 1..22: note = chemically synthesized
  source 1..22: mol_type = other DNA
aattatatatgcaaaagtctgt

SEQ ID NO: 36151 - DNA, 22 bp, synthetic construct
  misc_feature 1..22: note = chemically synthesized
  source 1..22: mol_type = other DNA
attatatatgcaaaagtctgtt

SEQ ID NO: 36152 - DNA, 22 bp, synthetic construct
  misc_feature 1..22: note = chemically synthesized
  source 1..22: mol_type = other DNA
tatatgcaaaagtctgtttggc

SEQ ID NO: 36153 - DNA, 22 bp, synthetic construct
  misc_feature 1..22: note = chemically synthesized
  source 1..22: mol_type = other DNA
tttggctagaaaagataatact

SEQ ID NO: 36154 - DNA, 22 bp, synthetic construct
  misc_feature 1..22: note = chemically synthesized
  source 1..22: mol_type = other DNA
ggctagaaaagataatactcac

SEQ ID NO: 36155 - DNA, 22 bp, synthetic construct
  misc_feature 1..22: note = chemically synthesized
  source 1..22: mol_type = other DNA
gctagaaaagataatactcaca

SEQ ID NO: 36156 - DNA, 22 bp, synthetic construct
  misc_feature 1..22: note = chemically synthesized
  source 1..22: mol_type = other DNA
gaaaagataatactcacaggtt

SEQ ID NO: 36157 - DNA, 22 bp, synthetic construct
  misc_feature 1..22: note = chemically synthesized
  source 1..22: mol_type = other DNA
acaggtttcaggggttaagcca

SEQ ID NO: 36158 - DNA, 22 bp, synthetic construct
  misc_feature 1..22: note = chemically synthesized
  source 1..22: mol_type = other DNA
caggggttaagccatacatatc

SEQ ID NO: 36159 - DNA, 22 bp, synthetic construct
  misc_feature 1..22: note = chemically synthesized
  source 1..22: mol_type = other DNA
aggggttaagccatacatatct

SEQ ID NO: 36160 - DNA, 22 bp, synthetic construct
  misc_feature 1..22: note = chemically synthesized
  source 1..22: mol_type = other DNA
agccatacatatctttcagagt

SEQ ID NO: 36161 - DNA, 22 bp, synthetic construct
  misc_feature 1..22: note = chemically synthesized
  source 1..22: mol_type = other DNA
tcagagtgagccattagccatt

SEQ ID NO: 36162 - DNA, 22 bp, synthetic construct
  misc_feature 1..22: note = chemically synthesized
  source 1..22: mol_type = other DNA
cagagtgagccattagccatta

SEQ ID NO: 36163 - DNA, 22 bp, synthetic construct
  misc_feature 1..22: note = chemically synthesized
  source 1..22: mol_type = other DNA
agagtgagccattagccattat

SEQ ID NO: 36164 - DNA, 22 bp, synthetic construct
  misc_feature 1..22: note = chemically synthesized
  source 1..22: mol_type = other DNA
gccattattcagcctactgcga

SEQ ID NO: 36165 - DNA, 22 bp, synthetic construct
  misc_feature 1..22: note = chemically synthesized
  source 1..22: mol_type = other DNA
ttcagcctactgcgataatgtg

SEQ ID NO: 36166 - DNA, 22 bp, synthetic construct
  misc_feature 1..22: note = chemically synthesized
  source 1..22: mol_type = other DNA
agcctactgcgataatgtgcaa

SEQ ID NO: 36167 - DNA, 22 bp, synthetic construct
  misc_feature 1..22: note = chemically synthesized
  source 1..22: mol_type = other DNA
ctgcgataatgtgcaagttccc

SEQ ID NO: 36168 - DNA, 22 bp, synthetic construct
  misc_feature 1..22: note = chemically synthesized
  source 1..22: mol_type = other DNA
cgataatgtgcaagttcccttt

SEQ ID NO: 36169 - DNA, 22 bp, synthetic construct
  misc_feature 1..22: note = chemically synthesized
  source 1..22: mol_type = other DNA
cctttacaatctatgttctatg

SEQ ID NO: 36170 - DNA, 22 bp, synthetic construct
  misc_feature 1..22: note = chemically synthesized
  source 1..22: mol_type = other DNA
tacaatctatgttctatgttcc

SEQ ID NO: 36171 - DNA, 22 bp, synthetic construct
  misc_feature 1..22: note = chemically synthesized
  source 1..22: mol_type = other DNA
acaatctatgttctatgttccc

SEQ ID NO: 36172 - DNA, 22 bp, synthetic construct
  misc_feature 1..22: note = chemically synthesized
  source 1..22: mol_type = other DNA
caatctatgttctatgttccca

SEQ ID NO: 36173 - DNA, 22 bp, synthetic construct
  misc_feature 1..22: note = chemically synthesized
  source 1..22: mol_type = other DNA
tgttctatgttcccatcaaggt

SEQ ID NO: 36174 - DNA, 22 bp, synthetic construct
  misc_feature 1..22: note = chemically synthesized
  source 1..22: mol_type = other DNA
tatgttcccatcaaggttaatt

SEQ ID NO: 36175 - DNA, 22 bp, synthetic construct
  misc_feature 1..22: note = chemically synthesized
  source 1..22: mol_type = other DNA
tgttcccatcaaggttaattag

SEQ ID NO: 36176 - DNA, 22 bp, synthetic construct
  misc_feature 1..22: note = chemically synthesized
  source 1..22: mol_type = other DNA
ccatcaaggttaattagaaata

SEQ ID NO: 36177 - DNA, 22 bp, synthetic construct
  misc_feature 1..22: note = chemically synthesized
  source 1..22: mol_type = other DNA
attagaaatattagactctttt

SEQ ID NO: 36178 - DNA, 22 bp, synthetic construct
  misc_feature 1..22: note = chemically synthesized
  source 1..22: mol_type = other DNA
gaaatattagactctttttcca

SEQ ID NO: 36179 - DNA, 22 bp, synthetic construct
  misc_feature 1..22: note = chemically synthesized
  source 1..22: mol_type = other DNA
gactctttttccacagaaaaaa

SEQ ID NO: 36180 - DNA, 22 bp, synthetic construct
  misc_feature 1..22: note = chemically synthesized
  source 1..22: mol_type = other DNA
tttttccacagaaaaaaaaaat

SEQ ID NO: 36181 - DNA, 22 bp, synthetic construct
  misc_feature 1..22: note = chemically synthesized
  source 1..22: mol_type = other DNA
tttccacagaaaaaaaaaatgt

SEQ ID NO: 36182 - DNA, 22 bp, synthetic construct
  misc_feature 1..22: note = chemically synthesized
  source 1..22: mol_type = other DNA
ttccacagaaaaaaaaaatgta

SEQ ID NO: 36183 - DNA, 22 bp, synthetic construct
  misc_feature 1..22: note = chemically synthesized
  source 1..22: mol_type = other DNA
tccacagaaaaaaaaaatgtag

SEQ ID NO: 36184 - DNA, 22 bp, synthetic construct
  misc_feature 1..22: note = chemically synthesized
  source 1..22: mol_type = other DNA
ccacagaaaaaaaaaatgtagc

SEQ ID NO: 36185 - DNA, 22 bp, synthetic construct
  misc_feature 1..22: note = chemically synthesized
  source 1..22: mol_type = other DNA
cacagaaaaaaaaaatgtagca

SEQ ID NO: 36186 - DNA, 22 bp, synthetic construct
  misc_feature 1..22: note = chemically synthesized
  source 1..22: mol_type = other DNA
catctctaccctgacttctctc

SEQ ID NO: 36187 - DNA, 22 bp, synthetic construct
  misc_feature 1..22: note = chemically synthesized
  source 1..22: mol_type = other DNA
atctctaccctgacttctctct

SEQ ID NO: 36188 - DNA, 22 bp, synthetic construct
  misc_feature 1..22: note = chemically synthesized
  source 1..22: mol_type = other DNA
taccctgacttctctctctttc

SEQ ID NO: 36189 - DNA, 22 bp, synthetic construct
  misc_feature 1..22: note = chemically synthesized
  source 1..22: mol_type = other DNA
ccctgacttctctctctttcct

SEQ ID NO: 36190 - DNA, 22 bp, synthetic construct
  misc_feature 1..22: note = chemically synthesized
  source 1..22: mol_type = other DNA
acttctctctctttccttcatg

SEQ ID NO: 36191 - DNA, 22 bp, synthetic construct
  misc_feature 1..22: note = chemically synthesized
  source 1..22: mol_type = other DNA
ctctctctttccttcatgccca

SEQ ID NO: 36192 - DNA, 22 bp, synthetic construct
  misc_feature 1..22: note = chemically synthesized
  source 1..22: mol_type = other DNA
tctctctttccttcatgcccag

SEQ ID NO: 36193 - DNA, 22 bp, synthetic construct
  misc_feature 1..22: note = chemically synthesized
  source 1..22: mol_type = other DNA
tctctttccttcatgcccagta

SEQ ID NO: 36194 - DNA, 22 bp, synthetic construct
  misc_feature 1..22: note = chemically synthesized
  source 1..22: mol_type = other DNA
tctttccttcatgcccagtaag

SEQ ID NO: 36195 - DNA, 22 bp, synthetic construct
  misc_feature 1..22: note = chemically synthesized
  source 1..22: mol_type = other DNA
tttccttcatgcccagtaagag

SEQ ID NO: 36196 - DNA, 22 bp, synthetic construct
  misc_feature 1..22: note = chemically synthesized
  source 1..22: mol_type = other DNA
tccttcatgcccagtaagagga

SEQ ID NO: 36197 - DNA, 22 bp, synthetic construct
  misc_feature 1..22: note = chemically synthesized
  source 1..22: mol_type = other DNA
ccttcatgcccagtaagaggaa

SEQ ID NO: 36198 - DNA, 22 bp, synthetic construct
  misc_feature 1..22: note = chemically synthesized
  source 1..22: mol_type = other DNA
cttcatgcccagtaagaggaag

SEQ ID NO: 36199 - DNA, 22 bp, synthetic construct
  misc_feature 1..22: note = chemically synthesized
  source 1..22: mol_type = other DNA
catgcccagtaagaggaagtga

SEQ ID NO: 36200 - DNA, 22 bp, synthetic construct
  misc_feature 1..22: note = chemically synthesized
  source 1..22: mol_type = other DNA
atgcccagtaagaggaagtgag

SEQ ID NO: 36201 - DNA, 22 bp, synthetic construct
  misc_feature 1..22: note = chemically synthesized
  source 1..22: mol_type = other DNA
ttcatctcatcaggtgttacct

SEQ ID NO: 36202 - DNA, 22 bp, synthetic construct
  misc_feature 1..22: note = chemically synthesized
  source 1..22: mol_type = other DNA
atctcatcaggtgttacctaga

SEQ ID NO: 36203 - DNA, 22 bp, synthetic construct
  misc_feature 1..22: note = chemically synthesized
  source 1..22: mol_type = other DNA
atcaggtgttacctagaatcag

SEQ ID NO: 36204 - DNA, 22 bp, synthetic construct
  misc_feature 1..22: note = chemically synthesized
  source 1..22: mol_type = other DNA
cctagaatcagagtcaggagaa

SEQ ID NO: 36205 - DNA, 22 bp, synthetic construct
  misc_feature 1..22: note = chemically synthesized
  source 1..22: mol_type = other DNA
gaatcagagtcaggagaaagca

SEQ ID NO: 36206 - DNA, 22 bp, synthetic construct
  misc_feature 1..22: note = chemically synthesized
  source 1..22: mol_type = other DNA
ataaaactactctgacaagtaa

SEQ ID NO: 36207 - DNA, 22 bp, synthetic construct
  misc_feature 1..22: note = chemically synthesized
  source 1..22: mol_type = other DNA
ctctgacaagtaaaccatatcc

SEQ ID NO: 36208 - DNA, 22 bp, synthetic construct
  misc_feature 1..22: note = chemically synthesized
  source 1..22: mol_type = other DNA
tgacaagtaaaccatatcctgg

SEQ ID NO: 36209 - DNA, 22 bp, synthetic construct
  misc_feature 1..22: note = chemically synthesized
  source 1..22: mol_type = other DNA
acaagtaaaccatatcctgggg

SEQ ID NO: 36210 - DNA, 22 bp, synthetic construct
  misc_feature 1..22: note = chemically synthesized
  source 1..22: mol_type = other DNA
gggaccaggtgagaattaaaaa

SEQ ID NO: 36211 - DNA, 22 bp, synthetic construct
  misc_feature 1..22: note = chemically synthesized
  source 1..22: mol_type = other DNA
aaaagctgtatactcataagct

SEQ ID NO: 36212 - DNA, 22 bp, synthetic construct
  misc_feature 1..22: note = chemically synthesized
  source 1..22: mol_type = other DNA
tatactcataagctgccaaaga

SEQ ID NO: 36213 - DNA, 22 bp, synthetic construct
  misc_feature 1..22: note = chemically synthesized
  source 1..22: mol_type = other DNA
ataagctgccaaagagctgatg

SEQ ID NO: 36214 - DNA, 22 bp, synthetic construct
  misc_feature 1..22: note = chemically synthesized
  source 1..22: mol_type = other DNA
ccaaagagctgatggtactgaa

SEQ ID NO: 36215 - DNA, 22 bp, synthetic construct
  misc_feature 1..22: note = chemically synthesized
  source 1..22: mol_type = other DNA
atggtactgaagtcacatggag

SEQ ID NO: 36216 - DNA, 22 bp, synthetic construct
  misc_feature 1..22: note = chemically synthesized
  source 1..22: mol_type = other DNA
aagtcacatggagctcaggaat

SEQ ID NO: 36217 - DNA, 22 bp, synthetic construct
  misc_feature 1..22: note = chemically synthesized
  source 1..22: mol_type = other DNA
aggaatttattcttgcatttag

SEQ ID NO: 36218 - DNA, 22 bp, synthetic construct
  misc_feature 1..22: note = chemically synthesized
  source 1..22: mol_type = other DNA
attcttgcatttagaaagtatg

SEQ ID NO: 36219 - DNA, 22 bp, synthetic construct
  misc_feature 1..22: note = chemically synthesized
  source 1..22: mol_type = other DNA
ttcttgcatttagaaagtatgc

SEQ ID NO: 36220 - DNA, 22 bp, synthetic construct
  misc_feature 1..22: note = chemically synthesized
  source 1..22: mol_type = other DNA
ttgcatttagaaagtatgcata

SEQ ID NO: 36221 - DNA, 22 bp, synthetic construct
  misc_feature 1..22: note = chemically synthesized
  source 1..22: mol_type = other DNA
gcatttagaaagtatgcatata

SEQ ID NO: 36222 - DNA, 22 bp, synthetic construct
  misc_feature 1..22: note = chemically synthesized
  source 1..22: mol_type = other DNA
catttagaaagtatgcatataa

SEQ ID NO: 36223 - DNA, 22 bp, synthetic construct
  misc_feature 1..22: note = chemically synthesized
  source 1..22: mol_type = other DNA
agaaagtatgcatataattctc

SEQ ID NO: 36224 - DNA, 22 bp, synthetic construct
  misc_feature 1..22: note = chemically synthesized
  source 1..22: mol_type = other DNA
gaaagtatgcatataattctct

SEQ ID NO: 36225 - DNA, 22 bp, synthetic construct
  misc_feature 1..22: note = chemically synthesized
  source 1..22: mol_type = other DNA
tctcgaaaagaaatgaaatcat

SEQ ID NO: 36226 - DNA, 22 bp, synthetic construct
  misc_feature 1..22: note = chemically synthesized
  source 1..22: mol_type = other DNA
tcgaaaagaaatgaaatcatat

SEQ ID NO: 36227 - DNA, 22 bp, synthetic construct
  misc_feature 1..22: note = chemically synthesized
  source 1..22: mol_type = other DNA
gaaaagaaatgaaatcatattt

SEQ ID NO: 36228 - DNA, 22 bp, synthetic construct
  misc_feature 1..22: note = chemically synthesized
  source 1..22: mol_type = other DNA
ttctgtcggatcaaattattca

SEQ ID NO: 36229 - DNA, 22 bp, synthetic construct
  misc_feature 1..22: note = chemically synthesized
  source 1..22: mol_type = other DNA
tctgtcggatcaaattattcag

SEQ ID NO: 36230 - DNA, 22 bp, synthetic construct
  misc_feature 1..22: note = chemically synthesized
  source 1..22: mol_type = other DNA
ctgtcggatcaaattattcaga

SEQ ID NO: 36231 - DNA, 22 bp, synthetic construct
  misc_feature 1..22: note = chemically synthesized
  source 1..22: mol_type = other DNA
tgtcggatcaaattattcagaa

SEQ ID NO: 36232 - DNA, 22 bp, synthetic construct
  misc_feature 1..22: note = chemically synthesized
  source 1..22: mol_type = other DNA
tcggatcaaattattcagaaat

SEQ ID NO: 36233 - DNA, 22 bp, synthetic construct
  misc_feature 1..22: note = chemically synthesized
  source 1..22: mol_type = other DNA
ttcagaaatccgaactgtagaa

SEQ ID NO: 36234 - DNA, 22 bp, synthetic construct
  misc_feature 1..22: note = chemically synthesized
  source 1..22: mol_type = other DNA
agaaatccgaactgtagaaaac

SEQ ID NO: 36235 - DNA, 22 bp, synthetic construct
  misc_feature 1..22: note = chemically synthesized
  source 1..22: mol_type = other DNA
tagaaaacatacaaacacactt

SEQ ID NO: 36236 - DNA, 22 bp, synthetic construct
  misc_feature 1..22: note = chemically synthesized
  source 1..22: mol_type = other DNA
gcttaatgttagctttttaatc

SEQ ID NO: 36237 - DNA, 22 bp, synthetic construct
  misc_feature 1..22: note = chemically synthesized
  source 1..22: mol_type = other DNA
cttaatgttagctttttaatct

SEQ ID NO: 36238 - DNA, 22 bp, synthetic construct
  misc_feature 1..22: note = chemically synthesized
  source 1..22: mol_type = other DNA
aatgttagctttttaatcttat

SEQ ID NO: 36239 - DNA, 22 bp, synthetic construct
  misc_feature 1..22: note = chemically synthesized
  source 1..22: mol_type = other DNA
atgttagctttttaatcttatt

SEQ ID NO: 36240 - DNA, 22 bp, synthetic construct
  misc_feature 1..22: note = chemically synthesized
  source 1..22: mol_type = other DNA
gctttttaatcttatttttgta

SEQ ID NO: 36241 - DNA, 22 bp, synthetic construct
  misc_feature 1..22: note = chemically synthesized
  source 1..22: mol_type = other DNA
tttaatcttatttttgtacaca

SEQ ID NO: 36242 - DNA, 22 bp, synthetic construct
  misc_feature 1..22: note = chemically synthesized
  source 1..22: mol_type = other DNA
ttaatcttatttttgtacacag

SEQ ID NO: 36243 - DNA, 22 bp, synthetic construct
  misc_feature 1..22: note = chemically synthesized
  source 1..22: mol_type = other DNA
taatcttatttttgtacacagt

SEQ ID NO: 36244 - DNA, 22 bp, synthetic construct
  misc_feature 1..22: note = chemically synthesized
  source 1..22: mol_type = other DNA
aatcttatttttgtacacagta

SEQ ID NO: 36245 - DNA, 22 bp, synthetic construct
  misc_feature 1..22: note = chemically synthesized
  source 1..22: mol_type = other DNA
atcttatttttgtacacagtat

SEQ ID NO: 36246 - DNA, 22 bp, synthetic construct
  misc_feature 1..22: note = chemically synthesized
  source 1..22: mol_type = other DNA
atttttgtacacagtatacttt

SEQ ID NO: 36247 - DNA, 22 bp, synthetic construct
  misc_feature 1..22: note = chemically synthesized
  source 1..22: mol_type = other DNA
tttttgtacacagtatactttt

SEQ ID NO: 36248 - DNA, 22 bp, synthetic construct
  misc_feature 1..22: note = chemically synthesized
  source 1..22: mol_type = other DNA
ttgtacacagtatacttttaca

SEQ ID NO: 36249 - DNA, 22 bp, synthetic construct
  misc_feature 1..22: note = chemically synthesized
  source 1..22: mol_type = other DNA
tgtacacagtatacttttacat

SEQ ID NO: 36250 - DNA, 22 bp, synthetic construct
  misc_feature 1..22: note = chemically synthesized
  source 1..22: mol_type = other DNA
gtacacagtatacttttacata

SEQ ID NO: 36251 - DNA, 22 bp, synthetic construct
  misc_feature 1..22: note = chemically synthesized
  source 1..22: mol_type = other DNA
tacacagtatacttttacatag

SEQ ID NO: 36252 - DNA, 22 bp, synthetic construct
  misc_feature 1..22: note = chemically synthesized
  source 1..22: mol_type = other DNA
ttacataggcactgaaccagct

SEQ ID NO: 36253 - DNA, 22 bp, synthetic construct
  misc_feature 1..22: note = chemically synthesized
  source 1..22: mol_type = other DNA
tacataggcactgaaccagctg

SEQ ID NO: 36254 - DNA, 22 bp, synthetic construct
  misc_feature 1..22: note = chemically synthesized
  source 1..22: mol_type = other DNA
acataggcactgaaccagctgg

SEQ ID NO: 36255 - DNA, 22 bp, synthetic construct
  misc_feature 1..22: note = chemically synthesized
  source 1..22: mol_type = other DNA
cataggcactgaaccagctgga

SEQ ID NO: 36256 - DNA, 22 bp, synthetic construct
  misc_feature 1..22: note = chemically synthesized
  source 1..22: mol_type = other DNA
aaccagctggaaatgaatgctt

SEQ ID NO: 36257 - DNA, 22 bp, synthetic construct
  misc_feature 1..22: note = chemically synthesized
  source 1..22: mol_type = other DNA
gaaatgaatgcttggattttcg

SEQ ID NO: 36258 - DNA, 22 bp, synthetic construct
  misc_feature 1..22: note = chemically synthesized
  source 1..22: mol_type = other DNA
ggattttcgcagctgataaaag

SEQ ID NO: 36259 - DNA, 22 bp, synthetic construct
  misc_feature 1..22: note = chemically synthesized
  source 1..22: mol_type = other DNA
gattttcgcagctgataaaagc

SEQ ID NO: 36260 - DNA, 22 bp, synthetic construct
  misc_feature 1..22: note = chemically synthesized
  source 1..22: mol_type = other DNA
tcgcagctgataaaagcagagt

SEQ ID NO: 36261 - DNA, 22 bp, synthetic construct
  misc_feature 1..22: note = chemically synthesized
  source 1..22: mol_type = other DNA
cgcagctgataaaagcagagtt

SEQ ID NO: 36262 - DNA, 22 bp, synthetic construct
  misc_feature 1..22: note = chemically synthesized
  source 1..22: mol_type = other DNA
gcagctgataaaagcagagttc

SEQ ID NO: 36263 - DNA, 22 bp, synthetic construct
  misc_feature 1..22: note = chemically synthesized
  source 1..22: mol_type = other DNA
ataaaagcagagttcagattct

SEQ ID NO: 36264 - DNA, 22 bp, synthetic construct
  misc_feature 1..22: note = chemically synthesized
  source 1..22: mol_type = other DNA
agattctgtccttgagctcaat

SEQ ID NO: 36265 - DNA, 22 bp, synthetic construct
  misc_feature 1..22: note = chemically synthesized
  source 1..22: mol_type = other DNA
tgtccttgagctcaatgtctgg

SEQ ID NO: 36266 - DNA, 22 bp, synthetic construct
  misc_feature 1..22: note = chemically synthesized
  source 1..22: mol_type = other DNA
tccttgagctcaatgtctggag

SEQ ID NO: 36267 - DNA, 22 bp, synthetic construct
  misc_feature 1..22: note = chemically synthesized
  source 1..22: mol_type = other DNA
gagctcaatgtctggagaaagc

SEQ ID NO: 36268 - DNA, 22 bp, synthetic construct
  misc_feature 1..22: note = chemically synthesized
  source 1..22: mol_type = other DNA
agctcaatgtctggagaaagca

SEQ ID NO: 36269 - DNA, 22 bp, synthetic construct
  misc_feature 1..22: note = chemically synthesized
  source 1..22: mol_type = other DNA
aatgtctggagaaagcagctgt

SEQ ID NO: 36270 - DNA, 22 bp, synthetic construct
  misc_feature 1..22: note = chemically synthesized
  source 1..22: mol_type = other DNA
gagaaagcagctgtgaatactg

SEQ ID NO: 36271 - DNA, 22 bp, synthetic construct
  misc_feature 1..22: note = chemically synthesized
  source 1..22: mol_type = other DNA
tgaatactgcttccttaattca

SEQ ID NO: 36272 - DNA, 22 bp, synthetic construct
  misc_feature 1..22: note = chemically synthesized
  source 1..22: mol_type = other DNA
cttccttaattcagatgccttt

SEQ ID NO: 36273 - DNA, 22 bp, synthetic construct
  misc_feature 1..22: note = chemically synthesized
  source 1..22: mol_type = other DNA
ccttaattcagatgcctttggc

SEQ ID NO: 36274 - DNA, 22 bp, synthetic construct
  misc_feature 1..22: note = chemically synthesized
  source 1..22: mol_type = other DNA
cttaattcagatgcctttggcc

SEQ ID NO: 36275 - DNA, 22 bp, synthetic construct
  misc_feature 1..22: note = chemically synthesized
  source 1..22: mol_type = other DNA
aattcagatgcctttggccgtg

SEQ ID NO: 36276 - DNA, 22 bp, synthetic construct
  misc_feature 1..22: note = chemically synthesized
  source 1..22: mol_type = other DNA
attcagatgcctttggccgtga

SEQ ID NO: 36277 - DNA, 22 bp, synthetic construct
  misc_feature 1..22: note = chemically synthesized
  source 1..22: mol_type = other DNA
agatgcctttggccgtgagggg

SEQ ID NO: 36278 - DNA, 22 bp, synthetic construct
  misc_feature 1..22: note = chemically synthesized
  source 1..22: mol_type = other DNA
tggccgtgaggggcatggcatt

SEQ ID NO: 36279 - DNA, 22 bp, synthetic construct
  misc_feature 1..22: note = chemically synthesized
  source 1..22: mol_type = other DNA
ggccgtgaggggcatggcattt

SEQ ID NO: 36280 - DNA, 22 bp, synthetic construct
  misc_feature 1..22: note = chemically synthesized
  source 1..22: mol_type = other DNA
gccgtgaggggcatggcatttt

SEQ ID NO: 36281 - DNA, 22 bp, synthetic construct
  misc_feature 1..22: note = chemically synthesized
  source 1..22: mol_type = other DNA
taaagctgcaataaactctgta

SEQ ID NO: 36282 - DNA, 22 bp, synthetic construct
  misc_feature 1..22: note = chemically synthesized
  source 1..22: mol_type = other DNA
aaagctgcaataaactctgtac

SEQ ID NO: 36283 - DNA, 22 bp, synthetic construct
  misc_feature 1..22: note = chemically synthesized
  source 1..22: mol_type = other DNA
aagctgcaataaactctgtact

SEQ ID NO: 36284 - DNA, 22 bp, synthetic construct
  misc_feature 1..22: note = chemically synthesized
  source 1..22: mol_type = other DNA
caataaactctgtactttttct

SEQ ID NO: 36285 - DNA, 22 bp, synthetic construct
  misc_feature 1..22: note = chemically synthesized
  source 1..22: mol_type = other DNA
tgtactttttctctcaggggat

SEQ ID NO: 36286 - DNA, 22 bp, synthetic construct
  misc_feature 1..22: note = chemically synthesized
  source 1..22: mol_type = other DNA
tactttttctctcaggggatta

SEQ ID NO: 36287 - DNA, 22 bp, synthetic construct
  misc_feature 1..22: note = chemically synthesized
  source 1..22: mol_type = other DNA
tttctctcaggggattagaaaa

SEQ ID NO: 36288 - DNA, 22 bp, synthetic construct
  misc_feature 1..22: note = chemically synthesized
  source 1..22: mol_type = other DNA
ttctctcaggggattagaaaaa

SEQ ID NO: 36289 - DNA, 22 bp, synthetic construct
  misc_feature 1..22: note = chemically synthesized
  source 1..22: mol_type = other DNA
tctctcaggggattagaaaaac

SEQ ID NO: 36290 - DNA, 22 bp, synthetic construct
  misc_feature 1..22: note = chemically synthesized
  source 1..22: mol_type = other DNA
ctctcaggggattagaaaaacc

SEQ ID NO: 36291 - DNA, 22 bp, synthetic construct
  misc_feature 1..22: note = chemically synthesized
  source 1..22: mol_type = other DNA
tctcaggggattagaaaaacca

SEQ ID NO: 36292 - DNA, 22 bp, synthetic construct
  misc_feature 1..22: note = chemically synthesized
  source 1..22: mol_type = other DNA
tcaggggattagaaaaaccaat

SEQ ID NO: 36293 - DNA, 22 bp, synthetic construct
  misc_feature 1..22: note = chemically synthesized
  source 1..22: mol_type = other DNA
aggggattagaaaaaccaattg

SEQ ID NO: 36294 - DNA, 22 bp, synthetic construct
  misc_feature 1..22: note = chemically synthesized
  source 1..22: mol_type = other DNA
gaaaaaccaattgatttgatag

SEQ ID NO: 36295 - DNA, 22 bp, synthetic construct
  misc_feature 1..22: note = chemically synthesized
  source 1..22: mol_type = other DNA
atttgatagtgactcagcagtt

SEQ ID NO: 36296 - DNA, 22 bp, synthetic construct
  misc_feature 1..22: note = chemically synthesized
  source 1..22: mol_type = other DNA
gatagtgactcagcagttttca

SEQ ID NO: 36297 - DNA, 22 bp, synthetic construct
  misc_feature 1..22: note = chemically synthesized
  source 1..22: mol_type = other DNA
atagtgactcagcagttttcac

SEQ ID NO: 36298 - DNA, 22 bp, synthetic construct
  misc_feature 1..22: note = chemically synthesized
  source 1..22: mol_type = other DNA
agcagttttcaccttcctcttt

SEQ ID NO: 36299 - DNA, 22 bp, synthetic construct
  misc_feature 1..22: note = chemically synthesized
  source 1..22: mol_type = other DNA
tcaccttcctctttagccaatg

SEQ ID NO: 36300 - DNA, 22 bp, synthetic construct
  misc_feature 1..22: note = chemically synthesized
  source 1..22: mol_type = other DNA
caccttcctctttagccaatgc

SEQ ID NO: 36301 - DNA, 22 bp, synthetic construct
  misc_feature 1..22: note = chemically synthesized
  source 1..22: mol_type = other DNA
accttcctctttagccaatgcc

SEQ ID NO: 36302 - DNA, 22 bp, synthetic construct
  misc_feature 1..22: note = chemically synthesized
  source 1..22: mol_type = other DNA
cctctttagccaatgccctgca

SEQ ID NO: 36303 - DNA, 22 bp, synthetic construct
  misc_feature 1..22: note = chemically synthesized
  source 1..22: mol_type = other DNA
ctctttagccaatgccctgcag

SEQ ID NO: 36304 - DNA, 22 bp, synthetic construct
  misc_feature 1..22: note = chemically synthesized
  source 1..22: mol_type = other DNA
tttagccaatgccctgcagcta

SEQ ID NO: 36305 - DNA, 22 bp, synthetic construct
  misc_feature 1..22: note = chemically synthesized
  source 1..22: mol_type = other DNA
tagccaatgccctgcagctaag

SEQ ID NO: 36306 - DNA, 22 bp, synthetic construct
  misc_feature 1..22: note = chemically synthesized
  source 1..22: mol_type = other DNA
agccaatgccctgcagctaaga

SEQ ID NO: 36307 - DNA, 22 bp, synthetic construct
  misc_feature 1..22: note = chemically synthesized
  source 1..22: mol_type = other DNA
gccaatgccctgcagctaagat

SEQ ID NO: 36308 - DNA, 22 bp, synthetic construct
  misc_feature 1..22: note = chemically synthesized
  source 1..22: mol_type = other DNA
cagctaagattgagaaacggat

SEQ ID NO: 36309 - DNA, 22 bp, synthetic construct
  misc_feature 1..22: note = chemically synthesized
  source 1..22: mol_type = other DNA
agattgagaaacggattcagaa

SEQ ID NO: 36310 - DNA, 22 bp, synthetic construct
  misc_feature 1..22: note = chemically synthesized
  source 1..22: mol_type = other DNA
agaaacggattcagaactcaca

SEQ ID NO: 36311 - DNA, 22 bp, synthetic construct
  misc_feature 1..22: note = chemically synthesized
  source 1..22: mol_type = other DNA
agaactcacacctcttggtgct

SEQ ID NO: 36312 - DNA, 22 bp, synthetic construct
  misc_feature 1..22: note = chemically synthesized
  source 1..22: mol_type = other DNA
acacctcttggtgcttggtggc

SEQ ID NO: 36313 - DNA, 22 bp, synthetic construct
  misc_feature 1..22: note = chemically synthesized
  source 1..22: mol_type = other DNA
ttggtgcttggtggctcccttc

SEQ ID NO: 36314 - DNA, 22 bp, synthetic construct
  misc_feature 1..22: note = chemically synthesized
  source 1..22: mol_type = other DNA
ggtgcttggtggctcccttcca

SEQ ID NO: 36315 - DNA, 22 bp, synthetic construct
  misc_feature 1..22: note = chemically synthesized
  source 1..22: mol_type = other DNA
gtgcttggtggctcccttccaa

SEQ ID NO: 36316 - DNA, 22 bp, synthetic construct
  misc_feature 1..22: note = chemically synthesized
  source 1..22: mol_type = other DNA
ggtggctcccttccaaaccatc

SEQ ID NO: 36317 - DNA, 22 bp, synthetic construct
  misc_feature 1..22: note = chemically synthesized
  source 1..22: mol_type = other DNA
gtggctcccttccaaaccatca

SEQ ID NO: 36318 - DNA, 22 bp, synthetic construct
  misc_feature 1..22: note = chemically synthesized
  source 1..22: mol_type = other DNA
ccttccaaaccatcagctgttc

SEQ ID NO: 36319 - DNA, 22 bp, synthetic construct
  misc_feature 1..22: note = chemically synthesized
  source 1..22: mol_type = other DNA
ccaaaccatcagctgttctttc

SEQ ID NO: 36320 - DNA, 22 bp, synthetic construct
  misc_feature 1..22: note = chemically synthesized
  source 1..22: mol_type = other DNA
caaaccatcagctgttctttct

SEQ ID NO: 36321 - DNA, 22 bp, synthetic construct
  misc_feature 1..22: note = chemically synthesized
  source 1..22: mol_type = other DNA
ttctttctactttctttcctat

SEQ ID NO: 36322 - DNA, 22 bp, synthetic construct
  misc_feature 1..22: note = chemically synthesized
  source 1..22: mol_type = other DNA
tttctactttctttcctatttt

SEQ ID NO: 36323 - DNA, 22 bp, synthetic construct
  misc_feature 1..22: note = chemically synthesized
  source 1..22: mol_type = other DNA
tctactttctttcctatttttt

SEQ ID NO: 36324 - DNA, 22 bp, synthetic construct
  misc_feature 1..22: note = chemically synthesized
  source 1..22: mol_type = other DNA
ctactttctttcctatttttta

SEQ ID NO: 36325 - DNA, 22 bp, synthetic construct
  misc_feature 1..22: note = chemically synthesized
  source 1..22: mol_type = other DNA
tactttctttcctattttttaa

SEQ ID NO: 36326 - DNA, 22 bp, synthetic construct
  misc_feature 1..22: note = chemically synthesized
  source 1..22: mol_type = other DNA
ctttctttcctattttttaaag

SEQ ID NO: 36327 - DNA, 22 bp, synthetic construct
  misc_feature 1..22: note = chemically synthesized
  source 1..22: mol_type = other DNA
tctttcctattttttaaagcac

SEQ ID NO: 36328 - DNA, 22 bp, synthetic construct
  misc_feature 1..22: note = chemically synthesized
  source 1..22: mol_type = other DNA
ctttcctattttttaaagcaca

SEQ ID NO: 36329 - DNA, 22 bp, synthetic construct
  misc_feature 1..22: note = chemically synthesized
  source 1..22: mol_type = other DNA
tttcctattttttaaagcacag

SEQ ID NO: 36330 - DNA, 22 bp, synthetic construct
  misc_feature 1..22: note = chemically synthesized
  source 1..22: mol_type = other DNA
tcctattttttaaagcacagtc

SEQ ID NO: 36331 - DNA, 22 bp, synthetic construct
  misc_feature 1..22: note = chemically synthesized
  source 1..22: mol_type = other DNA
cctattttttaaagcacagtct

SEQ ID NO: 36332 - DNA, 22 bp, synthetic construct
  misc_feature 1..22: note = chemically synthesized
  source 1..22: mol_type = other DNA
ctattttttaaagcacagtctg

SEQ ID NO: 36333 - DNA, 22 bp, synthetic construct
  misc_feature 1..22: note = chemically synthesized
  source 1..22: mol_type = other DNA
ttttttaaagcacagtctgaat

SEQ ID NO: 36334 - DNA, 22 bp, synthetic construct
  misc_feature 1..22: note = chemically synthesized
  source 1..22: mol_type = other DNA
tttaaagcacagtctgaatcaa

SEQ ID NO: 36335 - DNA, 22 bp, synthetic construct
  misc_feature 1..22: note = chemically synthesized
  source 1..22: mol_type = other DNA
ttaaagcacagtctgaatcaag

SEQ ID NO: 36336 - DNA, 22 bp, synthetic construct
  misc_feature 1..22: note = chemically synthesized
  source 1..22: mol_type = other DNA
taaagcacagtctgaatcaagt

SEQ ID NO: 36337 - DNA, 22 bp, synthetic construct
  misc_feature 1..22: note = chemically synthesized
  source 1..22: mol_type = other DNA
aaagcacagtctgaatcaagtg

SEQ ID NO: 36338 - DNA, 22 bp, synthetic construct
  misc_feature 1..22: note = chemically synthesized
  source 1..22: mol_type = other DNA
aagcacagtctgaatcaagtgc

SEQ ID NO: 36339 - DNA, 22 bp, synthetic construct
  misc_feature 1..22: note = chemically synthesized
  source 1..22: mol_type = other DNA
aatcaagtgcttcagaaccatt

SEQ ID NO: 36340 - DNA, 22 bp, synthetic construct
  misc_feature 1..22: note = chemically synthesized
  source 1..22: mol_type = other DNA
cagaaccatttatactaactcg

SEQ ID NO: 36341 - DNA, 22 bp, synthetic construct
  misc_feature 1..22: note = chemically synthesized
  source 1..22: mol_type = other DNA
agaaccatttatactaactcgt

SEQ ID NO: 36342 - DNA, 22 bp, synthetic construct
  misc_feature 1..22: note = chemically synthesized
  source 1..22: mol_type = other DNA
atactaactcgtgttccaaaca

SEQ ID NO: 36343 - DNA, 22 bp, synthetic construct
  misc_feature 1..22: note = chemically synthesized
  source 1..22: mol_type = other DNA
tactaactcgtgttccaaacac

SEQ ID NO: 36344 - DNA, 22 bp, synthetic construct
  misc_feature 1..22: note = chemically synthesized
  source 1..22: mol_type = other DNA
actcgtgttccaaacacataac

SEQ ID NO: 36345 - DNA, 22 bp, synthetic construct
  misc_feature 1..22: note = chemically synthesized
  source 1..22: mol_type = other DNA
gtgttccaaacacataaccctg

SEQ ID NO: 36346 - DNA, 22 bp, synthetic construct
  misc_feature 1..22: note = chemically synthesized
  source 1..22: mol_type = other DNA
caaacacataaccctgaaccct

SEQ ID NO: 36347 - DNA, 22 bp, synthetic construct
  misc_feature 1..22: note = chemically synthesized
  source 1..22: mol_type = other DNA
aaccctcttctaaggccaccag

SEQ ID NO: 36348 - DNA, 22 bp, synthetic construct
  misc_feature 1..22: note = chemically synthesized
  source 1..22: mol_type = other DNA
ttctaaggccaccagttacaaa

SEQ ID NO: 36349 - DNA, 22 bp, synthetic construct
  misc_feature 1..22: note = chemically synthesized
  source 1..22: mol_type = other DNA
ctaaggccaccagttacaaaga

SEQ ID NO: 36350 - DNA, 22 bp, synthetic construct
  misc_feature 1..22: note = chemically synthesized
  source 1..22: mol_type = other DNA
taaggccaccagttacaaagaa

SEQ ID NO: 36351 - DNA, 22 bp, synthetic construct
  misc_feature 1..22: note = chemically synthesized
  source 1..22: mol_type = other DNA
aggccaccagttacaaagaatg

SEQ ID NO: 36352 - DNA, 22 bp, synthetic construct
  misc_feature 1..22: note = chemically synthesized
  source 1..22: mol_type = other DNA
caaagaatggggaaggttaatg

SEQ ID NO: 36353 - DNA, 22 bp, synthetic construct
  misc_feature 1..22: note = chemically synthesized
  source 1..22: mol_type = other DNA
atgagtaactccaccagtgcct

SEQ ID NO: 36354 - DNA, 22 bp, synthetic construct
  misc_feature 1..22: note = chemically synthesized
  source 1..22: mol_type = other DNA
caccagtgcctgccagaaagct

SEQ ID NO: 36355 - DNA, 22 bp, synthetic construct
  misc_feature 1..22: note = chemically synthesized
  source 1..22: mol_type = other DNA
ccagaaagctcagctgtactcc

SEQ ID NO: 36356 - DNA, 22 bp, synthetic construct
  misc_feature 1..22: note = chemically synthesized
  source 1..22: mol_type = other DNA
agctgtactccagccttccttc

SEQ ID NO: 36357 - DNA, 22 bp, synthetic construct
  misc_feature 1..22: note = chemically synthesized
  source 1..22: mol_type = other DNA
tactccagccttccttcctctc

SEQ ID NO: 36358 - DNA, 22 bp, synthetic construct
  misc_feature 1..22: note = chemically synthesized
  source 1..22: mol_type = other DNA
cagccttccttcctctcttgca

SEQ ID NO: 36359 - DNA, 22 bp, synthetic construct
  misc_feature 1..22: note = chemically synthesized
  source 1..22: mol_type = other DNA
ccttcctctcttgcagagagaa

SEQ ID NO: 36360 - DNA, 22 bp, synthetic construct
  misc_feature 1..22: note = chemically synthesized
  source 1..22: mol_type = other DNA
cttcctctcttgcagagagaaa

SEQ ID NO: 36361 - DNA, 22 bp, synthetic construct
  misc_feature 1..22: note = chemically synthesized
  source 1..22: mol_type = other DNA
cctctcttgcagagagaaacaa

SEQ ID NO: 36362 - DNA, 22 bp, synthetic construct
  misc_feature 1..22: note = chemically synthesized
  source 1..22: mol_type = other DNA
ctctcttgcagagagaaacaat

SEQ ID NO: 36363 - DNA, 22 bp, synthetic construct
  misc_feature 1..22: note = chemically synthesized
  source 1..22: mol_type = other DNA
tcttgcagagagaaacaatgcg

SEQ ID NO: 36364 - DNA, 22 bp, synthetic construct
  misc_feature 1..22: note = chemically synthesized
  source 1..22: mol_type = other DNA
ttgcagagagaaacaatgcggc

SEQ ID NO: 36365 - DNA, 22 bp, synthetic construct
  misc_feature 1..22: note = chemically synthesized
  source 1..22: mol_type = other DNA
gcagagagaaacaatgcggcag

SEQ ID NO: 36366 - DNA, 22 bp, synthetic construct
  misc_feature 1..22: note = chemically synthesized
  source 1..22: mol_type = other DNA
cagagagaaacaatgcggcagt

SEQ ID NO: 36367 - DNA, 22 bp, synthetic construct
  misc_feature 1..22: note = chemically synthesized
  source 1..22: mol_type = other DNA
aacaaagcgaaggcactgtaat

SEQ ID NO: 36368 - DNA, 22 bp, synthetic construct
  misc_feature 1..22: note = chemically synthesized
  source 1..22: mol_type = other DNA
taatgcccagtggcttcagtca

SEQ ID NO: 36369 - DNA, 22 bp, synthetic construct
  misc_feature 1..22: note = chemically synthesized
  source 1..22: mol_type = other DNA
cagtcacaggctggtctaaaat

SEQ ID NO: 36370 - DNA, 22 bp, synthetic construct
  misc_feature 1..22: note = chemically synthesized
  source 1..22: mol_type = other DNA
agtcacaggctggtctaaaatt

SEQ ID NO: 36371 - DNA, 22 bp, synthetic construct
  misc_feature 1..22: note = chemically synthesized
  source 1..22: mol_type = other DNA
gtctaaaattccatttcacaga

SEQ ID NO: 36372 - DNA, 22 bp, synthetic construct
  misc_feature 1..22: note = chemically synthesized
  source 1..22: mol_type = other DNA
aaattccatttcacagaattga

SEQ ID NO: 36373 - DNA, 22 bp, synthetic construct
  misc_feature 1..22: note = chemically synthesized
  source 1..22: mol_type = other DNA
catttcacagaattgaagataa

SEQ ID NO: 36374 - DNA, 22 bp, synthetic construct
  misc_feature 1..22: note = chemically synthesized
  source 1..22: mol_type = other DNA
cacagaattgaagataatttgg

SEQ ID NO: 36375 - DNA, 22 bp, synthetic construct
  misc_feature 1..22: note = chemically synthesized
  source 1..22: mol_type = other DNA
acagaattgaagataatttggg

SEQ ID NO: 36376 - DNA, 22 bp, synthetic construct
  misc_feature 1..22: note = chemically synthesized
  source 1..22: mol_type = other DNA
aagataatttggggttattacc

SEQ ID NO: 36377 - DNA, 22 bp, synthetic construct
  misc_feature 1..22: note = chemically synthesized
  source 1..22: mol_type = other DNA
ggggttattaccaattctcagc

SEQ ID NO: 36378 - DNA, 22 bp, synthetic construct
  misc_feature 1..22: note = chemically synthesized
  source 1..22: mol_type = other DNA
gggttattaccaattctcagca

SEQ ID NO: 36379 - DNA, 22 bp, synthetic construct
  misc_feature 1..22: note = chemically synthesized
  source 1..22: mol_type = other DNA
ttaccaattctcagcagctcaa

SEQ ID NO: 36380 - DNA, 22 bp, synthetic construct
  misc_feature 1..22: note = chemically synthesized
  source 1..22: mol_type = other DNA
ccaattctcagcagctcaaatt

SEQ ID NO: 36381 - DNA, 22 bp, synthetic construct
  misc_feature 1..22: note = chemically synthesized
  source 1..22: mol_type = other DNA
tcagcagctcaaattcaatccc

SEQ ID NO: 36382 - DNA, 22 bp, synthetic construct
  misc_feature 1..22: note = chemically synthesized
  source 1..22: mol_type = other DNA
agcagctcaaattcaatcccgt

SEQ ID NO: 36383 - DNA, 22 bp, synthetic construct
  misc_feature 1..22: note = chemically synthesized
  source 1..22: mol_type = other DNA
aaattcaatcccgttgatggtg

SEQ ID NO: 36384 - DNA, 22 bp, synthetic construct
  misc_feature 1..22: note = chemically synthesized
  source 1..22: mol_type = other DNA
aatcccgttgatggtgagcatg

SEQ ID NO: 36385 - DNA, 22 bp, synthetic construct
  misc_feature 1..22: note = chemically synthesized
  source 1..22: mol_type = other DNA
atggtgagcatggggttcattt

SEQ ID NO: 36386 - DNA, 22 bp, synthetic construct
  misc_feature 1..22: note = chemically synthesized
  source 1..22: mol_type = other DNA
attttgagagtagaaaattgga

SEQ ID NO: 36387 - DNA, 22 bp, synthetic construct
  misc_feature 1..22: note = chemically synthesized
  source 1..22: mol_type = other DNA
tgagagtagaaaattggatgca

SEQ ID NO: 36388 - DNA, 22 bp, synthetic construct
  misc_feature 1..22: note = chemically synthesized
  source 1..22: mol_type = other DNA
gagagtagaaaattggatgcag

SEQ ID NO: 36389 - DNA, 22 bp, synthetic construct
  misc_feature 1..22: note = chemically synthesized
  source 1..22: mol_type = other DNA
agagtagaaaattggatgcagt

SEQ ID NO: 36390 - DNA, 22 bp, synthetic construct
  misc_feature 1..22: note = chemically synthesized
  source 1..22: mol_type = other DNA
gatgcagtggagaatcagaatg

SEQ ID NO: 36391 - DNA, 22 bp, synthetic construct
  misc_feature 1..22: note = chemically synthesized
  source 1..22: mol_type = other DNA
gatggtctctgccatttcccca

SEQ ID NO: 36392 - DNA, 22 bp, synthetic construct
  misc_feature 1..22: note = chemically synthesized
  source 1..22: mol_type = other DNA
tgccatttccccaaagatatca

SEQ ID NO: 36393 - DNA, 22 bp, synthetic construct
  misc_feature 1..22: note = chemically synthesized
  source 1..22: mol_type = other DNA
ccatttccccaaagatatcatc

SEQ ID NO: 36394 - DNA, 22 bp, synthetic construct
  misc_feature 1..22: note = chemically synthesized
  source 1..22: mol_type = other DNA
ccccaaagatatcatcctaact

SEQ ID NO: 36395 - DNA, 22 bp, synthetic construct
  misc_feature 1..22: note = chemically synthesized
  source 1..22: mol_type = other DNA
cccaaagatatcatcctaactg

SEQ ID NO: 36396 - DNA, 22 bp, synthetic construct
  misc_feature 1..22: note = chemically synthesized
  source 1..22: mol_type = other DNA
actgcatgctgctgcttttaac

SEQ ID NO: 36397 - DNA, 22 bp, synthetic construct
  misc_feature 1..22: note = chemically synthesized
  source 1..22: mol_type = other DNA
catgctgctgcttttaacaaat

SEQ ID NO: 36398 - DNA, 22 bp, synthetic construct
  misc_feature 1..22: note = chemically synthesized
  source 1..22: mol_type = other DNA
ctgcttttaacaaatcagtata

SEQ ID NO: 36399 - DNA, 22 bp, synthetic construct
  misc_feature 1..22: note = chemically synthesized
  source 1..22: mol_type = other DNA
cttttaacaaatcagtatacaa

SEQ ID NO: 36400 - DNA, 22 bp, synthetic construct
  misc_feature 1..22: note = chemically synthesized
  source 1..22: mol_type = other DNA
ttaacaaatcagtatacaactt

SEQ ID NO: 36401 - DNA, 22 bp, synthetic construct
  misc_feature 1..22: note = chemically synthesized
  source 1..22: mol_type = other DNA
taacaaatcagtatacaactta

SEQ ID NO: 36402 - DNA, 22 bp, synthetic construct
  misc_feature 1..22: note = chemically synthesized
  source 1..22: mol_type = other DNA
aacaaatcagtatacaacttag

SEQ ID NO: 36403 - DNA, 22 bp, synthetic construct
  misc_feature 1..22: note = chemically synthesized
  source 1..22: mol_type = other DNA
acaaatcagtatacaacttagt

SEQ ID NO: 36404 - DNA, 22 bp, synthetic construct
  misc_feature 1..22: note = chemically synthesized
  source 1..22: mol_type = other DNA
agtattttttgtgttgacaaat

SEQ ID NO: 36405 - DNA, 22 bp, synthetic construct
  misc_feature 1..22: note = chemically synthesized
  source 1..22: mol_type = other DNA
gtattttttgtgttgacaaatt

SEQ ID NO: 36406 - DNA, 22 bp, synthetic construct
  misc_feature 1..22: note = chemically synthesized
  source 1..22: mol_type = other DNA
tttgtgttgacaaattttcaaa

SEQ ID NO: 36407 - DNA, 22 bp, synthetic construct
  misc_feature 1..22: note = chemically synthesized
  source 1..22: mol_type = other DNA
ttgtgttgacaaattttcaaat

SEQ ID NO: 36408 - DNA, 22 bp, synthetic construct
  misc_feature 1..22: note = chemically synthesized
  source 1..22: mol_type = other DNA
tgtgttgacaaattttcaaata

SEQ ID NO: 36409 - DNA, 22 bp, synthetic construct
  misc_feature 1..22: note = chemically synthesized
  source 1..22: mol_type = other DNA
gtgttgacaaattttcaaatat

SEQ ID NO: 36410 - DNA, 22 bp, synthetic construct
  misc_feature 1..22: note = chemically synthesized
  source 1..22: mol_type = other DNA
tgttgacaaattttcaaatata

SEQ ID NO: 36411 - DNA, 22 bp, synthetic construct
  misc_feature 1..22: note = chemically synthesized
  source 1..22: mol_type = other DNA
acaaattttcaaatatacaaaa

SEQ ID NO: 36412 - DNA, 22 bp, synthetic construct
  misc_feature 1..22: note = chemically synthesized
  source 1..22: mol_type = other DNA
tcaaatatacaaaatattgagt

SEQ ID NO: 36413 - DNA, 22 bp, synthetic construct
  misc_feature 1..22: note = chemically synthesized
  source 1..22: mol_type = other DNA
caaatatacaaaatattgagtc

SEQ ID NO: 36414 - DNA, 22 bp, synthetic construct
  misc_feature 1..22: note = chemically synthesized
  source 1..22: mol_type = other DNA
aaatatacaaaatattgagtct

SEQ ID NO: 36415 - DNA, 22 bp, synthetic construct
  misc_feature 1..22: note = chemically synthesized
  source 1..22: mol_type = other DNA
agtctgaaggcaaaaagaataa

SEQ ID NO: 36416 - DNA, 22 bp, synthetic construct
  misc_feature 1..22: note = chemically synthesized
  source 1..22: mol_type = other DNA
aaggcaaaaagaataatttttc

SEQ ID NO: 36417 - DNA, 22 bp, synthetic construct
  misc_feature 1..22: note = chemically synthesized
  source 1..22: mol_type = other DNA
ttcacttccattgcttcctagg

SEQ ID NO: 36418 - DNA, 22 bp, synthetic construct
  misc_feature 1..22: note = chemically synthesized
  source 1..22: mol_type = other DNA
tcacttccattgcttcctaggt

SEQ ID NO: 36419 - DNA, 22 bp, synthetic construct
  misc_feature 1..22: note = chemically synthesized
  source 1..22: mol_type = other DNA
cacttccattgcttcctaggtc

SEQ ID NO: 36420 - DNA, 22 bp, synthetic construct
  misc_feature 1..22: note = chemically synthesized
  source 1..22: mol_type = other DNA
acttccattgcttcctaggtca

SEQ ID NO: 36421 - DNA, 22 bp, synthetic construct
  misc_feature 1..22: note = chemically synthesized
  source 1..22: mol_type = other DNA
ccattgcttcctaggtcataac

SEQ ID NO: 36422 - DNA, 22 bp, synthetic construct
  misc_feature 1..22: note = chemically synthesized
  source 1..22: mol_type = other DNA
cattgcttcctaggtcataaca

SEQ ID NO: 36423 - DNA, 22 bp, synthetic construct
  misc_feature 1..22: note = chemically synthesized
  source 1..22: mol_type = other DNA
cttcctaggtcataacattcac

SEQ ID NO: 36424 - DNA, 22 bp, synthetic construct
  misc_feature 1..22: note = chemically synthesized
  source 1..22: mol_type = other DNA
cctaggtcataacattcacatc

SEQ ID NO: 36425 - DNA, 22 bp, synthetic construct
  misc_feature 1..22: note = chemically synthesized
  source 1..22: mol_type = other DNA
ctaggtcataacattcacatct

SEQ ID NO: 36426 - DNA, 22 bp, synthetic construct
  misc_feature 1..22: note = chemically synthesized
  source 1..22: mol_type = other DNA
ggtcataacattcacatctgat

SEQ ID NO: 36427 - DNA, 22 bp, synthetic construct
  misc_feature 1..22: note = chemically synthesized
  source 1..22: mol_type = other DNA
acatctgatatttcttccaaat

SEQ ID NO: 36428 - DNA, 22 bp, synthetic construct
  misc_feature 1..22: note = chemically synthesized
  source 1..22: mol_type = other DNA
atatttcttccaaatacagact

SEQ ID NO: 36429 - DNA, 22 bp, synthetic construct
  misc_feature 1..22: note = chemically synthesized
  source 1..22: mol_type = other DNA
cttccaaatacagactgttgtt

SEQ ID NO: 36430 - DNA, 22 bp, synthetic construct
  misc_feature 1..22: note = chemically synthesized
  source 1..22: mol_type = other DNA
ttccaaatacagactgttgttg

SEQ ID NO: 36431 - DNA, 22 bp, synthetic construct
  misc_feature 1..22: note = chemically synthesized
  source 1..22: mol_type = other DNA
ccaaatacagactgttgttggc

SEQ ID NO: 36432 - DNA, 22 bp, synthetic construct
  misc_feature 1..22: note = chemically synthesized
  source 1..22: mol_type = other DNA
caaatacagactgttgttggcc

SEQ ID NO: 36433 - DNA, 22 bp, synthetic construct
  misc_feature 1..22: note = chemically synthesized
  source 1..22: mol_type = other DNA
ttgttggcctgatcatcactca

SEQ ID NO: 36434 - DNA, 22 bp, synthetic construct
  misc_feature 1..22: note = chemically synthesized
  source 1..22: mol_type = other DNA
ttggcctgatcatcactcacac

SEQ ID NO: 36435 - DNA, 22 bp, synthetic construct
  misc_feature 1..22: note = chemically synthesized
  source 1..22: mol_type = other DNA
gcctgatcatcactcacacatc

SEQ ID NO: 36436 - DNA, 22 bp, synthetic construct
  misc_feature 1..22: note = chemically synthesized
  source 1..22: mol_type = other DNA
atcatcactcacacatccaggc

SEQ ID NO: 36437 - DNA, 22 bp, synthetic construct
  misc_feature 1..22: note = chemically synthesized
  source 1..22: mol_type = other DNA
acacatccaggcttgttacatc

SEQ ID NO: 36438 - DNA, 22 bp, synthetic construct
  misc_feature 1..22: note = chemically synthesized
  source 1..22: mol_type = other DNA
gttacatctccacgccactgag

SEQ ID NO: 36439 - DNA, 22 bp, synthetic construct
  misc_feature 1..22: note = chemically synthesized
  source 1..22: mol_type = other DNA
ttacatctccacgccactgagt

SEQ ID NO: 36440 - DNA, 22 bp, synthetic construct
  misc_feature 1..22: note = chemically synthesized
  source 1..22: mol_type = other DNA
catctccacgccactgagtatc

SEQ ID NO: 36441 - DNA, 22 bp, synthetic construct
  misc_feature 1..22: note = chemically synthesized
  source 1..22: mol_type = other DNA
cacgccactgagtatcagggaa

SEQ ID NO: 36442 - DNA, 22 bp, synthetic construct
  misc_feature 1..22: note = chemically synthesized
  source 1..22: mol_type = other DNA
agtatcagggaacctgccccaa

SEQ ID NO: 36443 - DNA, 22 bp, synthetic construct
  misc_feature 1..22: note = chemically synthesized
  source 1..22: mol_type = other DNA
ccccaatattcacgtaggttct

SEQ ID NO: 36444 - DNA, 22 bp, synthetic construct
  misc_feature 1..22: note = chemically synthesized
  source 1..22: mol_type = other DNA
acgtaggttcttttctattttc

SEQ ID NO: 36445 - DNA, 22 bp, synthetic construct
  misc_feature 1..22: note = chemically synthesized
  source 1..22: mol_type = other DNA
ttttctattttccctaagcgtc

SEQ ID NO: 36446 - DNA, 22 bp, synthetic construct
  misc_feature 1..22: note = chemically synthesized
  source 1..22: mol_type = other DNA
ttctattttccctaagcgtcgg

SEQ ID NO: 36447 - DNA, 22 bp, synthetic construct
  misc_feature 1..22: note = chemically synthesized
  source 1..22: mol_type = other DNA
tctattttccctaagcgtcggc

SEQ ID NO: 36448 - DNA, 22 bp, synthetic construct
  misc_feature 1..22: note = chemically synthesized
  source 1..22: mol_type = other DNA
ctattttccctaagcgtcggcc

SEQ ID NO: 36449 - DNA, 22 bp, synthetic construct
  misc_feature 1..22: note = chemically synthesized
  source 1..22: mol_type = other DNA
tattttccctaagcgtcggcca

SEQ ID NO: 36450 - DNA, 22 bp, synthetic construct
  misc_feature 1..22: note = chemically synthesized
  source 1..22: mol_type = other DNA
ttttccctaagcgtcggccaac

SEQ ID NO: 36451 - DNA, 22 bp, synthetic construct
  misc_feature 1..22: note = chemically synthesized
  source 1..22: mol_type = other DNA
tccctaagcgtcggccaacttt

SEQ ID NO: 36452 - DNA, 22 bp, synthetic construct
  misc_feature 1..22: note = chemically synthesized
  source 1..22: mol_type = other DNA
ccctaagcgtcggccaacttta

SEQ ID NO: 36453 - DNA, 22 bp, synthetic construct
  misc_feature 1..22: note = chemically synthesized
  source 1..22: mol_type = other DNA
cctaagcgtcggccaactttag

SEQ ID NO: 36454 - DNA, 22 bp, synthetic construct
  misc_feature 1..22: note = chemically synthesized
  source 1..22: mol_type = other DNA
agcgtcggccaactttagaaat

SEQ ID NO: 36455 - DNA, 22 bp, synthetic construct
  misc_feature 1..22: note = chemically synthesized
  source 1..22: mol_type = other DNA
tagaaataaagggacagagtac

SEQ ID NO: 36456 - DNA, 22 bp, synthetic construct
  misc_feature 1..22: note = chemically synthesized
  source 1..22: mol_type = other DNA
agaaataaagggacagagtaca

SEQ ID NO: 36457 - DNA, 22 bp, synthetic construct
  misc_feature 1..22: note = chemically synthesized
  source 1..22: mol_type = other DNA
gaaataaagggacagagtacaa

SEQ ID NO: 36458 - DNA, 22 bp, synthetic construct
  misc_feature 1..22: note = chemically synthesized
  source 1..22: mol_type = other DNA
taaagccgggcatccgggggag

SEQ ID NO: 36459 - DNA, 22 bp, synthetic construct
  misc_feature 1..22: note = chemically synthesized
  source 1..22: mol_type = other DNA
aaagccgggcatccgggggagg

SEQ ID NO: 36460 - DNA, 22 bp, synthetic construct
  misc_feature 1..22: note = chemically synthesized
  source 1..22: mol_type = other DNA
aagccgggcatccgggggaggc

SEQ ID NO: 36461 - DNA, 22 bp, synthetic construct
  misc_feature 1..22: note = chemically synthesized
  source 1..22: mol_type = other DNA
cggtaggttccgtgatgcccca

SEQ ID NO: 36462 - DNA, 22 bp, synthetic construct
  misc_feature 1..22: note = chemically synthesized
  source 1..22: mol_type = other DNA
ggtaggttccgtgatgccccac

SEQ ID NO: 36463 - DNA, 22 bp, synthetic construct
  misc_feature 1..22: note = chemically synthesized
  source 1..22: mol_type = other DNA
cgtgatgccccacaagccacaa

SEQ ID NO: 36464 - DNA, 22 bp, synthetic construct
  misc_feature 1..22: note = chemically synthesized
  source 1..22: mol_type = other DNA
gtattagggattttcaaatggg

SEQ ID NO: 36465 - DNA, 22 bp, synthetic construct
  misc_feature 1..22: note = chemically synthesized
  source 1..22: mol_type = other DNA
tattagggattttcaaatgggg

SEQ ID NO: 36466 - DNA, 22 bp, synthetic construct
  misc_feature 1..22: note = chemically synthesized
  source 1..22: mol_type = other DNA
gggattttcaaatggggaggca

SEQ ID NO: 36467 - DNA, 22 bp, synthetic construct
  misc_feature 1..22: note = chemically synthesized
  source 1..22: mol_type = other DNA
tcaaatggggaggcagtgtgca

SEQ ID NO: 36468 - DNA, 22 bp, synthetic construct
  misc_feature 1..22: note = chemically synthesized
  source 1..22: mol_type = other DNA
caaatggggaggcagtgtgcaa

SEQ ID NO: 36469 - DNA, 22 bp, synthetic construct
  misc_feature 1..22: note = chemically synthesized
  source 1..22: mol_type = other DNA
aaatggggaggcagtgtgcaaa

SEQ ID NO: 36470 - DNA, 22 bp, synthetic construct
  misc_feature 1..22: note = chemically synthesized
  source 1..22: mol_type = other DNA
tacaaggtaatagaatatcaca

SEQ ID NO: 36471 - DNA, 22 bp, synthetic construct
  misc_feature 1..22: note = chemically synthesized
  source 1..22: mol_type = other DNA
acaaggtaatagaatatcacaa

SEQ ID NO: 36472 - DNA, 22 bp, synthetic construct
  misc_feature 1..22: note = chemically synthesized
  source 1..22: mol_type = other DNA
caaggtaatagaatatcacaag

SEQ ID NO: 36473 - DNA, 22 bp, synthetic construct
  misc_feature 1..22: note = chemically synthesized
  source 1..22: mol_type = other DNA
aaattgctaatgaagtttcggg

SEQ ID NO: 36474 - DNA, 22 bp, synthetic construct
  misc_feature 1..22: note = chemically synthesized
  source 1..22: mol_type = other DNA
ctaatgaagtttcgggcaccat

SEQ ID NO: 36475 - DNA, 22 bp, synthetic construct
  misc_feature 1..22: note = chemically synthesized
  source 1..22: mol_type = other DNA
atgaagtttcgggcaccattgt

SEQ ID NO: 36476 - DNA, 22 bp, synthetic construct
  misc_feature 1..22: note = chemically synthesized
  source 1..22: mol_type = other DNA
cgggcaccattgtcattgataa

SEQ ID NO: 36477 - DNA, 22 bp, synthetic construct
  misc_feature 1..22: note = chemically synthesized
  source 1..22: mol_type = other DNA
gggcaccattgtcattgataac

SEQ ID NO: 36478 - DNA, 22 bp, synthetic construct
  misc_feature 1..22: note = chemically synthesized
  source 1..22: mol_type = other DNA
tcattgataacatcttatcagg

SEQ ID NO: 36479 - DNA, 22 bp, synthetic construct
  misc_feature 1..22: note = chemically synthesized
  source 1..22: mol_type = other DNA
ataacatcttatcaggagacag

SEQ ID NO: 36480 - DNA, 22 bp, synthetic construct
  misc_feature 1..22: note = chemically synthesized
  source 1..22: mol_type = other DNA
atcaggagacagggtttttagg

SEQ ID NO: 36481 - DNA, 22 bp, synthetic construct
  misc_feature 1..22: note = chemically synthesized
  source 1..22: mol_type = other DNA
tcaggagacagggtttttagga

SEQ ID NO: 36482 - DNA, 22 bp, synthetic construct
  misc_feature 1..22: note = chemically synthesized
  source 1..22: mol_type = other DNA
ttaggatcaactggtctgacca

SEQ ID NO: 36483 - DNA, 22 bp, synthetic construct
  misc_feature 1..22: note = chemically synthesized
  source 1..22: mol_type = other DNA
taggatcaactggtctgaccaa

SEQ ID NO: 36484 - DNA, 22 bp, synthetic construct
  misc_feature 1..22: note = chemically synthesized
  source 1..22: mol_type = other DNA
aggatcaactggtctgaccaaa

SEQ ID NO: 36485 - DNA, 22 bp, synthetic construct
  misc_feature 1..22: note = chemically synthesized
  source 1..22: mol_type = other DNA
ggatcaactggtctgaccaaaa

SEQ ID NO: 36486 - DNA, 22 bp, synthetic construct
  misc_feature 1..22: note = chemically synthesized
  source 1..22: mol_type = other DNA
gtctgaccaaaatttattaggc

SEQ ID NO: 36487 - DNA, 22 bp, synthetic construct
  misc_feature 1..22: note = chemically synthesized
  source 1..22: mol_type = other DNA
accaaaatttattaggcgggaa

SEQ ID NO: 36488 - DNA, 22 bp, synthetic construct
  misc_feature 1..22: note = chemically synthesized
  source 1..22: mol_type = other DNA
attaggcgggaatttcctcttc

SEQ ID NO: 36489 - DNA, 22 bp, synthetic construct
  misc_feature 1..22: note = chemically synthesized
  source 1..22: mol_type = other DNA
ttaggcgggaatttcctcttcc

SEQ ID NO: 36490 - DNA, 22 bp, synthetic construct
  misc_feature 1..22: note = chemically synthesized
  source 1..22: mol_type = other DNA
ggcgggaatttcctcttcctaa

SEQ ID NO: 36491 - DNA, 22 bp, synthetic construct
  misc_feature 1..22: note = chemically synthesized
  source 1..22: mol_type = other DNA
cctcttcctaataagcctggga

SEQ ID NO: 36492 - DNA, 22 bp, synthetic construct
  misc_feature 1..22: note = chemically synthesized
  source 1..22: mol_type = other DNA
ctcttcctaataagcctgggag

SEQ ID NO: 36493 - DNA, 22 bp, synthetic construct
  misc_feature 1..22: note = chemically synthesized
  source 1..22: mol_type = other DNA
ttcctaataagcctgggagcgc

SEQ ID NO: 36494 - DNA, 22 bp, synthetic construct
  misc_feature 1..22: note = chemically synthesized
  source 1..22: mol_type = other DNA
cctaataagcctgggagcgctg

SEQ ID NO: 36495 - DNA, 22 bp, synthetic construct
  misc_feature 1..22: note = chemically synthesized
  source 1..22: mol_type = other DNA
ctaataagcctgggagcgctgt

SEQ ID NO: 36496 - DNA, 22 bp, synthetic construct
  misc_feature 1..22: note = chemically synthesized
  source 1..22: mol_type = other DNA
ataagcctgggagcgctgtggg

SEQ ID NO: 36497 - DNA, 22 bp, synthetic construct
  misc_feature 1..22: note = chemically synthesized
  source 1..22: mol_type = other DNA
ggagcgctgtgggagactgggg

SEQ ID NO: 36498 - DNA, 22 bp, synthetic construct
  misc_feature 1..22: note = chemically synthesized
  source 1..22: mol_type = other DNA
tgggagactggggtctatttca

SEQ ID NO: 36499 - DNA, 22 bp, synthetic construct
  misc_feature 1..22: note = chemically synthesized
  source 1..22: mol_type = other DNA
gggtctatttcacccctgcagt

SEQ ID NO: 36500 - DNA, 22 bp, synthetic construct
  misc_feature 1..22: note = chemically synthesized
  source 1..22: mol_type = other DNA
tttcacccctgcagtctcgacc

SEQ ID NO: 36501 - DNA, 22 bp, synthetic construct
  misc_feature 1..22: note = chemically synthesized
  source 1..22: mol_type = other DNA
cacccctgcagtctcgaccata

SEQ ID NO: 36502 - DNA, 22 bp, synthetic construct
  misc_feature 1..22: note = chemically synthesized
  source 1..22: mol_type = other DNA
acccctgcagtctcgaccataa

SEQ ID NO: 36503 - DNA, 22 bp, synthetic construct
  misc_feature 1..22: note = chemically synthesized
  source 1..22: mol_type = other DNA
cagtctcgaccataagagacag

SEQ ID NO: 36504 - DNA, 22 bp, synthetic construct
  misc_feature 1..22: note = chemically synthesized
  source 1..22: mol_type = other DNA
gaccataagagacaggcgcacc

SEQ ID NO: 36505 - DNA, 22 bp, synthetic construct
  misc_feature 1..22: note = chemically synthesized
  source 1..22: mol_type = other DNA
gaggggggctgtttataagcct

SEQ ID NO: 36506 - DNA, 22 bp, synthetic construct
  misc_feature 1..22: note = chemically synthesized
  source 1..22: mol_type = other DNA
tttataagcctatacctcctgg

SEQ ID NO: 36507 - DNA, 22 bp, synthetic construct
  misc_feature 1..22: note = chemically synthesized
  source 1..22: mol_type = other DNA
ataagcctatacctcctggctc

SEQ ID NO: 36508 - DNA, 22 bp, synthetic construct
  misc_feature 1..22: note = chemically synthesized
  source 1..22: mol_type = other DNA
taagcctatacctcctggctcg

SEQ ID NO: 36509 - DNA, 22 bp, synthetic construct
  misc_feature 1..22: note = chemically synthesized
  source 1..22: mol_type = other DNA
tacctcctggctcgtattctct

SEQ ID NO: 36510 - DNA, 22 bp, synthetic construct
  misc_feature 1..22: note = chemically synthesized
  source 1..22: mol_type = other DNA
ctggctcgtattctctttctca

SEQ ID NO: 36511 - DNA, 22 bp, synthetic construct
  misc_feature 1..22: note = chemically synthesized
  source 1..22: mol_type = other DNA
gctcgtattctctttctcaggg

SEQ ID NO: 36512 - DNA, 22 bp, synthetic construct
  misc_feature 1..22: note = chemically synthesized
  source 1..22: mol_type = other DNA
gtattctctttctcagggatgt

SEQ ID NO: 36513 - DNA, 22 bp, synthetic construct
  misc_feature 1..22: note = chemically synthesized
  source 1..22: mol_type = other DNA
tctttctcagggatgttccatg

SEQ ID NO: 36514 - DNA, 22 bp, synthetic construct
  misc_feature 1..22: note = chemically synthesized
  source 1..22: mol_type = other DNA
tttctcagggatgttccatgct

SEQ ID NO: 36515 - DNA, 22 bp, synthetic construct
  misc_feature 1..22: note = chemically synthesized
  source 1..22: mol_type = other DNA
tctcagggatgttccatgctga

SEQ ID NO: 36516 - DNA, 22 bp, synthetic construct
  misc_feature 1..22: note = chemically synthesized
  source 1..22: mol_type = other DNA
ctcagggatgttccatgctgag

SEQ ID NO: 36517 - DNA, 22 bp, synthetic construct
  misc_feature 1..22: note = chemically synthesized
  source 1..22: mol_type = other DNA
tcagggatgttccatgctgaga

SEQ ID NO: 36518 - DNA, 22 bp, synthetic construct
  misc_feature 1..22: note = chemically synthesized
  source 1..22: mol_type = other DNA
agggatgttccatgctgagaaa

SEQ ID NO: 36519 - DNA, 22 bp, synthetic construct
  misc_feature 1..22: note = chemically synthesized
  source 1..22: mol_type = other DNA
catgctgagaaaaagaattcag

SEQ ID NO: 36520 - DNA, 22 bp, synthetic construct
  misc_feature 1..22: note = chemically synthesized
  source 1..22: mol_type = other DNA
agaaaaagaattcagcgatatt

SEQ ID NO: 36521 - DNA, 22 bp, synthetic construct
  misc_feature 1..22: note = chemically synthesized
  source 1..22: mol_type = other DNA
agcgatatttctcccatttgct

SEQ ID NO: 36522 - DNA, 22 bp, synthetic construct
  misc_feature 1..22: note = chemically synthesized
  source 1..22: mol_type = other DNA
ctcccatttgcttttgaaagaa

SEQ ID NO: 36523 - DNA, 22 bp, synthetic construct
  misc_feature 1..22: note = chemically synthesized
  source 1..22: mol_type = other DNA
tcccatttgcttttgaaagaag

SEQ ID NO: 36524 - DNA, 22 bp, synthetic construct
  misc_feature 1..22: note = chemically synthesized
  source 1..22: mol_type = other DNA
ccatttgcttttgaaagaagag

SEQ ID NO: 36525 - DNA, 22 bp, synthetic construct
  misc_feature 1..22: note = chemically synthesized
  source 1..22: mol_type = other DNA
gcttttgaaagaagagaaatat

SEQ ID NO: 36526 - DNA, 22 bp, synthetic construct
  misc_feature 1..22: note = chemically synthesized
  source 1..22: mol_type = other DNA
cttttgaaagaagagaaatatg

SEQ ID NO: 36527 - DNA, 22 bp, synthetic construct
  misc_feature 1..22: note = chemically synthesized
  source 1..22: mol_type = other DNA
ttgaaagaagagaaatatggct

SEQ ID NO: 36528 - DNA, 22 bp, synthetic construct
  misc_feature 1..22: note = chemically synthesized
  source 1..22: mol_type = other DNA
tgaaagaagagaaatatggctc

SEQ ID NO: 36529 - DNA, 22 bp, synthetic construct
  misc_feature 1..22: note = chemically synthesized
  source 1..22: mol_type = other DNA
gaaagaagagaaatatggctct

SEQ ID NO: 36530 - DNA, 22 bp, synthetic construct
  misc_feature 1..22: note = chemically synthesized
  source 1..22: mol_type = other DNA
aaagaagagaaatatggctctg

SEQ ID NO: 36531 - DNA, 22 bp, synthetic construct
  misc_feature 1..22: note = chemically synthesized
  source 1..22: mol_type = other DNA
tgttctgcctggctcaccagca

SEQ ID NO: 36532 - DNA, 22 bp, synthetic construct
  misc_feature 1..22: note = chemically synthesized
  source 1..22: mol_type = other DNA
ttctgcctggctcaccagcagt

SEQ ID NO: 36533 - DNA, 22 bp, synthetic construct
  misc_feature 1..22: note = chemically synthesized
  source 1..22: mol_type = other DNA
tgcctggctcaccagcagtcag

SEQ ID NO: 36534 - DNA, 22 bp, synthetic construct
  misc_feature 1..22: note = chemically synthesized
  source 1..22: mol_type = other DNA
cctggctcaccagcagtcagag

SEQ ID NO: 36535 - DNA, 22 bp, synthetic construct
  misc_feature 1..22: note = chemically synthesized
  source 1..22: mol_type = other DNA
gctcaccagcagtcagagttta

SEQ ID NO: 36536 - DNA, 22 bp, synthetic construct
  misc_feature 1..22: note = chemically synthesized
  source 1..22: mol_type = other DNA
accagcagtcagagtttaaggt

SEQ ID NO: 36537 - DNA, 22 bp, synthetic construct
  misc_feature 1..22: note = chemically synthesized
  source 1..22: mol_type = other DNA
aaggttatctctcttattccct

SEQ ID NO: 36538 - DNA, 22 bp, synthetic construct
  misc_feature 1..22: note = chemically synthesized
  source 1..22: mol_type = other DNA
aggttatctctcttattccctg

SEQ ID NO: 36539 - DNA, 22 bp, synthetic construct
  misc_feature 1..22: note = chemically synthesized
  source 1..22: mol_type = other DNA
tctctcttattccctgaacaat

SEQ ID NO: 36540 - DNA, 22 bp, synthetic construct
  misc_feature 1..22: note = chemically synthesized
  source 1..22: mol_type = other DNA
tcttattccctgaacaattgct

SEQ ID NO: 36541 - DNA, 22 bp, synthetic construct
  misc_feature 1..22: note = chemically synthesized
  source 1..22: mol_type = other DNA
ttattccctgaacaattgctgt

SEQ ID NO: 36542 - DNA, 22 bp, synthetic construct
  misc_feature 1..22: note = chemically synthesized
  source 1..22: mol_type = other DNA
attccctgaacaattgctgtta

SEQ ID NO: 36543 - DNA, 22 bp, synthetic construct
  misc_feature 1..22: note = chemically synthesized
  source 1..22: mol_type = other DNA
ttccctgaacaattgctgttat

SEQ ID NO: 36544 - DNA, 22 bp, synthetic construct
  misc_feature 1..22: note = chemically synthesized
  source 1..22: mol_type = other DNA
cctgaacaattgctgttatcct

SEQ ID NO: 36545 - DNA, 22 bp, synthetic construct
  misc_feature 1..22: note = chemically synthesized
  source 1..22: mol_type = other DNA
aacaattgctgttatcctgttc

SEQ ID NO: 36546 - DNA, 22 bp, synthetic construct
  misc_feature 1..22: note = chemically synthesized
  source 1..22: mol_type = other DNA
ctgttatcctgttcttttttca

SEQ ID NO: 36547 - DNA, 22 bp, synthetic construct
  misc_feature 1..22: note = chemically synthesized
  source 1..22: mol_type = other DNA
ttatcctgttcttttttcaagg

SEQ ID NO: 36548 - DNA, 22 bp, synthetic construct
  misc_feature 1..22: note = chemically synthesized
  source 1..22: mol_type = other DNA
tcctgttcttttttcaaggtgt

SEQ ID NO: 36549 - DNA, 22 bp, synthetic construct
  misc_feature 1..22: note = chemically synthesized
  source 1..22: mol_type = other DNA
ttcttttttcaaggtgtccaca

SEQ ID NO: 36550 - DNA, 22 bp, synthetic construct
  misc_feature 1..22: note = chemically synthesized
  source 1..22: mol_type = other DNA
ttttttcaaggtgtccacattt

SEQ ID NO: 36551 - DNA, 22 bp, synthetic construct
  misc_feature 1..22: note = chemically synthesized
  source 1..22: mol_type = other DNA
ttttcaaggtgtccacatttca

SEQ ID NO: 36552 - DNA, 22 bp, synthetic construct
  misc_feature 1..22: note = chemically synthesized
  source 1..22: mol_type = other DNA
tttcaaggtgtccacatttcat

SEQ ID NO: 36553 - DNA, 22 bp, synthetic construct
  misc_feature 1..22: note = chemically synthesized
  source 1..22: mol_type = other DNA
ttcaaggtgtccacatttcatg

SEQ ID NO: 36554 - DNA, 22 bp, synthetic construct
  misc_feature 1..22: note = chemically synthesized
  source 1..22: mol_type = other DNA
tcaaggtgtccacatttcatgt

SEQ ID NO: 36555 - DNA, 22 bp, synthetic construct
  misc_feature 1..22: note = chemically synthesized
  source 1..22: mol_type = other DNA
caaggtgtccacatttcatgtt

SEQ ID NO: 36556 - DNA, 22 bp, synthetic construct
  misc_feature 1..22: note = chemically synthesized
  source 1..22: mol_type = other DNA
aaggtgtccacatttcatgttg

SEQ ID NO: 36557 - DNA, 22 bp, synthetic construct
  misc_feature 1..22: note = chemically synthesized
  source 1..22: mol_type = other DNA
catgttgctcaaacacacatgc

SEQ ID NO: 36558 - DNA, 22 bp, synthetic construct
  misc_feature 1..22: note = chemically synthesized
  source 1..22: mol_type = other DNA
atgttgctcaaacacacatgct

SEQ ID NO: 36559 - DNA, 22 bp, synthetic construct
  misc_feature 1..22: note = chemically synthesized
  source 1..22: mol_type = other DNA
ctcaaacacacatgctgtacaa

SEQ ID NO: 36560 - DNA, 22 bp, synthetic construct
  misc_feature 1..22: note = chemically synthesized
  source 1..22: mol_type = other DNA
aaacacacatgctgtacaattt

SEQ ID NO: 36561 - DNA, 22 bp, synthetic construct
  misc_feature 1..22: note = chemically synthesized
  source 1..22: mol_type = other DNA
tacaatttgtgcagttaatgca

SEQ ID NO: 36562 - DNA, 22 bp, synthetic construct
  misc_feature 1..22: note = chemically synthesized
  source 1..22: mol_type = other DNA
gtgcagttaatgcaattattac

SEQ ID NO: 36563 - DNA, 22 bp, synthetic construct
  misc_feature 1..22: note = chemically synthesized
  source 1..22: mol_type = other DNA
tgcagttaatgcaattattaca

SEQ ID NO: 36564 - DNA, 22 bp, synthetic construct
  misc_feature 1..22: note = chemically synthesized
  source 1..22: mol_type = other DNA
atgcaattattacagggtcctg

SEQ ID NO: 36565 - DNA, 22 bp, synthetic construct
  misc_feature 1..22: note = chemically synthesized
  source 1..22: mol_type = other DNA
ttacagggtcctgaggcaatat

SEQ ID NO: 36566 - DNA, 22 bp, synthetic construct
  misc_feature 1..22: note = chemically synthesized
  source 1..22: mol_type = other DNA
cagggtcctgaggcaatataca

SEQ ID NO: 36567 - DNA, 22 bp, synthetic construct
  misc_feature 1..22: note = chemically synthesized
  source 1..22: mol_type = other DNA
aggcaatatacatcctcctcag

SEQ ID NO: 36568 - DNA, 22 bp, synthetic construct
  misc_feature 1..22: note = chemically synthesized
  source 1..22: mol_type = other DNA
ctcagctgacaggattaagaga

SEQ ID NO: 36569 - DNA, 22 bp, synthetic construct
  misc_feature 1..22: note = chemically synthesized
  source 1..22: mol_type = other DNA
agctgacaggattaagagatta

SEQ ID NO: 36570 - DNA, 22 bp, synthetic construct
  misc_feature 1..22: note = chemically synthesized
  source 1..22: mol_type = other DNA
acaggattaagagattaaagta

SEQ ID NO: 36571 - DNA, 22 bp, synthetic construct
  misc_feature 1..22: note = chemically synthesized
  source 1..22: mol_type = other DNA
agagattaaagtaaagacaggc

SEQ ID NO: 36572 - DNA, 22 bp, synthetic construct
  misc_feature 1..22: note = chemically synthesized
  source 1..22: mol_type = other DNA
aagtaaagacaggcataaatca

SEQ ID NO: 36573 - DNA, 22 bp, synthetic construct
  misc_feature 1..22: note = chemically synthesized
  source 1..22: mol_type = other DNA
actggggaagtgataagtgtcc

SEQ ID NO: 36574 - DNA, 22 bp, synthetic construct
  misc_feature 1..22: note = chemically synthesized
  source 1..22: mol_type = other DNA
gggaagtgataagtgtccatga

SEQ ID NO: 36575 - DNA, 22 bp, synthetic construct
  misc_feature 1..22: note = chemically synthesized
  source 1..22: mol_type = other DNA
tacaatttatgtttagagattg

SEQ ID NO: 36576 - DNA, 22 bp, synthetic construct
  misc_feature 1..22: note = chemically synthesized
  source 1..22: mol_type = other DNA
acaatttatgtttagagattgc

SEQ ID NO: 36577 - DNA, 22 bp, synthetic construct
  misc_feature 1..22: note = chemically synthesized
  source 1..22: mol_type = other DNA
caatttatgtttagagattgca

SEQ ID NO: 36578 - DNA, 22 bp, synthetic construct
  misc_feature 1..22: note = chemically synthesized
  source 1..22: mol_type = other DNA
atgtttagagattgcagtaaag

SEQ ID NO: 36579 - DNA, 22 bp, synthetic construct
  misc_feature 1..22: note = chemically synthesized
  source 1..22: mol_type = other DNA
tgtttagagattgcagtaaaga

SEQ ID NO: 36580 - DNA, 22 bp, synthetic construct
  misc_feature 1..22: note = chemically synthesized
  source 1..22: mol_type = other DNA
agagattgcagtaaagacaggc

SEQ ID NO: 36581 - DNA, 22 bp, synthetic construct
  misc_feature 1..22: note = chemically synthesized
  source 1..22: mol_type = other DNA
gagattgcagtaaagacaggca

SEQ ID NO: 36582 - DNA, 22 bp, synthetic construct
  misc_feature 1..22: note = chemically synthesized
  source 1..22: mol_type = other DNA
cagtaaagacaggcataagaaa

SEQ ID NO: 36583 - DNA, 22 bp, synthetic construct
  misc_feature 1..22: note = chemically synthesized
  source 1..22: mol_type = other DNA
caaaagtattaatttggggaac

SEQ ID NO: 36584 - DNA, 22 bp, synthetic construct
  misc_feature 1..22: note = chemically synthesized
  source 1..22: mol_type = other DNA
atttggggaactaataaatgtc

SEQ ID NO: 36585 - DNA, 22 bp, synthetic construct
  misc_feature 1..22: note = chemically synthesized
  source 1..22: mol_type = other DNA
ggggaactaataaatgtccatg

SEQ ID NO: 36586 - DNA, 22 bp, synthetic construct
  misc_feature 1..22: note = chemically synthesized
  source 1..22: mol_type = other DNA
gggaactaataaatgtccatga

SEQ ID NO: 36587 - DNA, 22 bp, synthetic construct
  misc_feature 1..22: note = chemically synthesized
  source 1..22: mol_type = other DNA
ataaatgtccatgaaatcttca

SEQ ID NO: 36588 - DNA, 22 bp, synthetic construct
  misc_feature 1..22: note = chemically synthesized
  source 1..22: mol_type = other DNA
cacaatccacgaacttctgcca

SEQ ID NO: 36589 - DNA, 22 bp, synthetic construct
  misc_feature 1..22: note = chemically synthesized
  source 1..22: mol_type = other DNA
acaatccacgaacttctgccat

SEQ ID NO: 36590 - DNA, 22 bp, synthetic construct
  misc_feature 1..22: note = chemically synthesized
  source 1..22: mol_type = other DNA
ctgccatggcttcagctgatcc

SEQ ID NO: 36591 - DNA, 22 bp, synthetic construct
  misc_feature 1..22: note = chemically synthesized
  source 1..22: mol_type = other DNA
tgccatggcttcagctgatccc

SEQ ID NO: 36592 - DNA, 22 bp, synthetic construct
  misc_feature 1..22: note = chemically synthesized
  source 1..22: mol_type = other DNA
ccatggcttcagctgatccctc

SEQ ID NO: 36593 - DNA, 22 bp, synthetic construct
  misc_feature 1..22: note = chemically synthesized
  source 1..22: mol_type = other DNA
cagctgatccctccgtttggag

SEQ ID NO: 36594 - DNA, 22 bp, synthetic construct
  misc_feature 1..22: note = chemically synthesized
  source 1..22: mol_type = other DNA
agctgatccctccgtttggagt

SEQ ID NO: 36595 - DNA, 22 bp, synthetic construct
  misc_feature 1..22: note = chemically synthesized
  source 1..22: mol_type = other DNA
atccctccgtttggagtcccag

SEQ ID NO: 36596 - DNA, 22 bp, synthetic construct
  misc_feature 1..22: note = chemically synthesized
  source 1..22: mol_type = other DNA
cgtttggagtcccagacttccc

SEQ ID NO: 36597 - DNA, 22 bp, synthetic construct
  misc_feature 1..22: note = chemically synthesized
  source 1..22: mol_type = other DNA
ggagtcccagacttcccgcaac

SEQ ID NO: 36598 - DNA, 22 bp, synthetic construct
  misc_feature 1..22: note = chemically synthesized
  source 1..22: mol_type = other DNA
gagtcccagacttcccgcaaca

SEQ ID NO: 36599 - DNA, 22 bp, synthetic construct
  misc_feature 1..22: note = chemically synthesized
  source 1..22: mol_type = other DNA
cccgcaacaactgagaactctg

SEQ ID NO: 36600 - DNA, 22 bp, synthetic construct
  misc_feature 1..22: note = chemically synthesized
  source 1..22: mol_type = other DNA
ccgcaacaactgagaactctgg

SEQ ID NO: 36601 - DNA, 22 bp, synthetic construct
  misc_feature 1..22: note = chemically synthesized
  source 1..22: mol_type = other DNA
agaactctggagggcctaccct

SEQ ID NO: 36602 - DNA, 22 bp, synthetic construct
  misc_feature 1..22: note = chemically synthesized
  source 1..22: mol_type = other DNA
tggagggcctacccttcaccca

SEQ ID NO: 36603 - DNA, 22 bp, synthetic construct
  misc_feature 1..22: note = chemically synthesized
  source 1..22: mol_type = other DNA
gagggcctacccttcacccact

SEQ ID NO: 36604 - DNA, 22 bp, synthetic construct
  misc_feature 1..22: note = chemically synthesized
  source 1..22: mol_type = other DNA
cccttcacccacttccaccctt

SEQ ID NO: 36605 - DNA, 22 bp, synthetic construct
  misc_feature 1..22: note = chemically synthesized
  source 1..22: mol_type = other DNA
cacccacttccacccttcttat

SEQ ID NO: 36606 - DNA, 22 bp, synthetic construct
  misc_feature 1..22: note = chemically synthesized
  source 1..22: mol_type = other DNA
acccacttccacccttcttata

SEQ ID NO: 36607 - DNA, 22 bp, synthetic construct
  misc_feature 1..22: note = chemically synthesized
  source 1..22: mol_type = other DNA
ccacccttcttatatctcttaa

SEQ ID NO: 36608 - DNA, 22 bp, synthetic construct
  misc_feature 1..22: note = chemically synthesized
  source 1..22: mol_type = other DNA
cacccttcttatatctcttaag

SEQ ID NO: 36609 - DNA, 22 bp, synthetic construct
  misc_feature 1..22: note = chemically synthesized
  source 1..22: mol_type = other DNA
cttatatctcttaaggagctgt

SEQ ID NO: 36610 - DNA, 22 bp, synthetic construct
  misc_feature 1..22: note = chemically synthesized
  source 1..22: mol_type = other DNA
ttatatctcttaaggagctgtg

SEQ ID NO: 36611 - DNA, 22 bp, synthetic construct
  misc_feature 1..22: note = chemically synthesized
  source 1..22: mol_type = other DNA
atatctcttaaggagctgtgtt

SEQ ID NO: 36612 - DNA, 22 bp, synthetic construct
  misc_feature 1..22: note = chemically synthesized
  source 1..22: mol_type = other DNA
tatctcttaaggagctgtgttc

SEQ ID NO: 36613 - DNA, 22 bp, synthetic construct
  misc_feature 1..22: note = chemically synthesized
  source 1..22: mol_type = other DNA
ttaaggagctgtgttcagatgg

SEQ ID NO: 36614 - DNA, 22 bp, synthetic construct
  misc_feature 1..22: note = chemically synthesized
  source 1..22: mol_type = other DNA
aaggagctgtgttcagatggtt

SEQ ID NO: 36615 - DNA, 22 bp, synthetic construct
  misc_feature 1..22: note = chemically synthesized
  source 1..22: mol_type = other DNA
aggagctgtgttcagatggtta

SEQ ID NO: 36616 - DNA, 22 bp, synthetic construct
  misc_feature 1..22: note = chemically synthesized
  source 1..22: mol_type = other DNA
tgttcagatggttacatttcgc

SEQ ID NO: 36617 - DNA, 22 bp, synthetic construct
  misc_feature 1..22: note = chemically synthesized
  source 1..22: mol_type = other DNA
agatggttacatttcgcttgct

SEQ ID NO: 36618 - DNA, 22 bp, synthetic construct
  misc_feature 1..22: note = chemically synthesized
  source 1..22: mol_type = other DNA
catttcgcttgctgagcaagac

SEQ ID NO: 36619 - DNA, 22 bp, synthetic construct
  misc_feature 1..22: note = chemically synthesized
  source 1..22: mol_type = other DNA
cgcttgctgagcaagactgcat

SEQ ID NO: 36620 - DNA, 22 bp, synthetic construct
  misc_feature 1..22: note = chemically synthesized
  source 1..22: mol_type = other DNA
gcttgctgagcaagactgcatt

SEQ ID NO: 36621 - DNA, 22 bp, synthetic construct
  misc_feature 1..22: note = chemically synthesized
  source 1..22: mol_type = other DNA
gctgagcaagactgcattttca

SEQ ID NO: 36622 - DNA, 22 bp, synthetic construct
  misc_feature 1..22: note = chemically synthesized
  source 1..22: mol_type = other DNA
ctgagcaagactgcattttcat

SEQ ID NO: 36623 - DNA, 22 bp, synthetic construct
  misc_feature 1..22: note = chemically synthesized
  source 1..22: mol_type = other DNA
agcaagactgcattttcattat

SEQ ID NO: 36624 - DNA, 22 bp, synthetic construct
  misc_feature 1..22: note = chemically synthesized
  source 1..22: mol_type = other DNA
cattttcattatcctgggctaa

SEQ ID NO: 36625 - DNA, 22 bp, synthetic construct
  misc_feature 1..22: note = chemically synthesized
  source 1..22: mol_type = other DNA
tcattatcctgggctaaaatca

SEQ ID NO: 36626 - DNA, 22 bp, synthetic construct
  misc_feature 1..22: note = chemically synthesized
  source 1..22: mol_type = other DNA
cattatcctgggctaaaatcaa

SEQ ID NO: 36627 - DNA, 22 bp, synthetic construct
  misc_feature 1..22: note = chemically synthesized
  source 1..22: mol_type = other DNA
attatcctgggctaaaatcaat

SEQ ID NO: 36628 - DNA, 22 bp, synthetic construct
  misc_feature 1..22: note = chemically synthesized
  source 1..22: mol_type = other DNA
tcctgggctaaaatcaattggt

SEQ ID NO: 36629 - DNA, 22 bp, synthetic construct
  misc_feature 1..22: note = chemically synthesized
  source 1..22: mol_type = other DNA
ggctaaaatcaattggtattta

SEQ ID NO: 36630 - DNA, 22 bp, synthetic construct
  misc_feature 1..22: note = chemically synthesized
  source 1..22: mol_type = other DNA
aaatcaattggtatttaagtta

SEQ ID NO: 36631 - DNA, 22 bp, synthetic construct
  misc_feature 1..22: note = chemically synthesized
  source 1..22: mol_type = other DNA
gtatttaagttagagcaaaaag

SEQ ID NO: 36632 - DNA, 22 bp, synthetic construct
  misc_feature 1..22: note = chemically synthesized
  source 1..22: mol_type = other DNA
aagttagagcaaaaagggttct

SEQ ID NO: 36633 - DNA, 22 bp, synthetic construct
  misc_feature 1..22: note = chemically synthesized
  source 1..22: mol_type = other DNA
agttagagcaaaaagggttcta

SEQ ID NO: 36634 - DNA, 22 bp, synthetic construct
  misc_feature 1..22: note = chemically synthesized
  source 1..22: mol_type = other DNA
gagcaaaaagggttctaaccct

SEQ ID NO: 36635 - DNA, 22 bp, synthetic construct
  misc_feature 1..22: note = chemically synthesized
  source 1..22: mol_type = other DNA
taaccctatttacagcagcaca

SEQ ID NO: 36636 - DNA, 22 bp, synthetic construct
  misc_feature 1..22: note = chemically synthesized
  source 1..22: mol_type = other DNA
accctatttacagcagcacaca

SEQ ID NO: 36637 - DNA, 22 bp, synthetic construct
  misc_feature 1..22: note = chemically synthesized
  source 1..22: mol_type = other DNA
tttacagcagcacacatacact

SEQ ID NO: 36638 - DNA, 22 bp, synthetic construct
  misc_feature 1..22: note = chemically synthesized
  source 1..22: mol_type = other DNA
acagcagcacacatacacttac

SEQ ID NO: 36639 - DNA, 22 bp, synthetic construct
  misc_feature 1..22: note = chemically synthesized
  source 1..22: mol_type = other DNA
cagcagcacacatacacttaca

SEQ ID NO: 36640 - DNA, 22 bp, synthetic construct
  misc_feature 1..22: note = chemically synthesized
  source 1..22: mol_type = other DNA
acattagaattggctttaaggg

SEQ ID NO: 36641 - DNA, 22 bp, synthetic construct
  misc_feature 1..22: note = chemically synthesized
  source 1..22: mol_type = other DNA
cattagaattggctttaaggga

SEQ ID NO: 36642 - DNA, 22 bp, synthetic construct
  misc_feature 1..22: note = chemically synthesized
  source 1..22: mol_type = other DNA
gaattggctttaagggaaaaat

SEQ ID NO: 36643 - DNA, 22 bp, synthetic construct
  misc_feature 1..22: note = chemically synthesized
  source 1..22: mol_type = other DNA
gctttaagggaaaaattcaatc

SEQ ID NO: 36644 - DNA, 22 bp, synthetic construct
  misc_feature 1..22: note = chemically synthesized
  source 1..22: mol_type = other DNA
taagggaaaaattcaatcaatc

SEQ ID NO: 36645 - DNA, 22 bp, synthetic construct
  misc_feature 1..22: note = chemically synthesized
  source 1..22: mol_type = other DNA
aagggaaaaattcaatcaatcg

SEQ ID NO: 36646 - DNA, 22 bp, synthetic construct
  misc_feature 1..22: note = chemically synthesized
  source 1..22: mol_type = other DNA
agggaaaaattcaatcaatcga

SEQ ID NO: 36647 - DNA, 22 bp, synthetic construct
  misc_feature 1..22: note = chemically synthesized
  source 1..22: mol_type = other DNA
aatcaatcgacaaatttccact

SEQ ID NO: 36648 - DNA, 22 bp, synthetic construct
  misc_feature 1..22: note = chemically synthesized
  source 1..22: mol_type = other DNA
ccactgattaccttctatgagc

SEQ ID NO: 36649 - DNA, 22 bp, synthetic construct
  misc_feature 1..22: note = chemically synthesized
  source 1..22: mol_type = other DNA
cactgattaccttctatgagcc

SEQ ID NO: 36650 - DNA, 22 bp, synthetic construct
  misc_feature 1..22: note = chemically synthesized
  source 1..22: mol_type = other DNA
attaccttctatgagccaagac

SEQ ID NO: 36651 - DNA, 22 bp, synthetic construct
  misc_feature 1..22: note = chemically synthesized
  source 1..22: mol_type = other DNA
ccttctatgagccaagactgcc

SEQ ID NO: 36652 - DNA, 22 bp, synthetic construct
  misc_feature 1..22: note = chemically synthesized
  source 1..22: mol_type = other DNA
ctatgagccaagactgccatag

SEQ ID NO: 36653 - DNA, 22 bp, synthetic construct
  misc_feature 1..22: note = chemically synthesized
  source 1..22: mol_type = other DNA
tatgagccaagactgccatagt

SEQ ID NO: 36654 - DNA, 22 bp, synthetic construct
  misc_feature 1..22: note = chemically synthesized
  source 1..22: mol_type = other DNA
tgagccaagactgccatagtct

SEQ ID NO: 36655 - DNA, 22 bp, synthetic construct
  misc_feature 1..22: note = chemically synthesized
  source 1..22: mol_type = other DNA
ccatagtctcagccttcatgca

SEQ ID NO: 36656 - DNA, 22 bp, synthetic construct
  misc_feature 1..22: note = chemically synthesized
  source 1..22: mol_type = other DNA
agccttcatgcagcttataggc

SEQ ID NO: 36657 - DNA, 22 bp, synthetic construct
  misc_feature 1..22: note = chemically synthesized
  source 1..22: mol_type = other DNA
catgcagcttataggctagcaa

SEQ ID NO: 36658 - DNA, 22 bp, synthetic construct
  misc_feature 1..22: note = chemically synthesized
  source 1..22: mol_type = other DNA
atgcagcttataggctagcaaa

SEQ ID NO: 36659 - DNA, 22 bp, synthetic construct
  misc_feature 1..22: note = chemically synthesized
  source 1..22: mol_type = other DNA
ataggctagcaaaaaagccaga

SEQ ID NO: 36660 - DNA, 22 bp, synthetic construct
  misc_feature 1..22: note = chemically synthesized
  source 1..22: mol_type = other DNA
taggctagcaaaaaagccagac

SEQ ID NO: 36661 - DNA, 22 bp, synthetic construct
  misc_feature 1..22: note = chemically synthesized
  source 1..22: mol_type = other DNA
gcaaaaaagccagacagtgcac

SEQ ID NO: 36662 - DNA, 22 bp, synthetic construct
  misc_feature 1..22: note = chemically synthesized
  source 1..22: mol_type = other DNA
acaagtgtgttgagtgttgcaa

SEQ ID NO: 36663 - DNA, 22 bp, synthetic construct
  misc_feature 1..22: note = chemically synthesized
  source 1..22: mol_type = other DNA
agtgttgcaagagtaagtttca

SEQ ID NO: 36664 - DNA, 22 bp, synthetic construct
  misc_feature 1..22: note = chemically synthesized
  source 1..22: mol_type = other DNA
caagagtaagtttcaggggctc

SEQ ID NO: 36665 - DNA, 22 bp, synthetic construct
  misc_feature 1..22: note = chemically synthesized
  source 1..22: mol_type = other DNA
caggggctctccatgacttacc

SEQ ID NO: 36666 - DNA, 22 bp, synthetic construct
  misc_feature 1..22: note = chemically synthesized
  source 1..22: mol_type = other DNA
aggggctctccatgacttacct

SEQ ID NO: 36667 - DNA, 22 bp, synthetic construct
  misc_feature 1..22: note = chemically synthesized
  source 1..22: mol_type = other DNA
tccatgacttacctggttgaga

SEQ ID NO: 36668 - DNA, 22 bp, synthetic construct
  misc_feature 1..22: note = chemically synthesized
  source 1..22: mol_type = other DNA
catgacttacctggttgagaaa

SEQ ID NO: 36669 - DNA, 22 bp, synthetic construct
  misc_feature 1..22: note = chemically synthesized
  source 1..22: mol_type = other DNA
acctggttgagaaaccctttaa

SEQ ID NO: 36670 - DNA, 22 bp, synthetic construct
  misc_feature 1..22: note = chemically synthesized
  source 1..22: mol_type = other DNA
cctggttgagaaaccctttaac

SEQ ID NO: 36671 - DNA, 22 bp, synthetic construct
  misc_feature 1..22: note = chemically synthesized
  source 1..22: mol_type = other DNA
gttgagaaaccctttaactttt

SEQ ID NO: 36672 - DNA, 22 bp, synthetic construct
  misc_feature 1..22: note = chemically synthesized
  source 1..22: mol_type = other DNA
agaaaccctttaactttttttt

SEQ ID NO: 36673 - DNA, 22 bp, synthetic construct
  misc_feature 1..22: note = chemically synthesized
  source 1..22: mol_type = other DNA
taactttttttttcctctgggt

SEQ ID NO: 36674 - DNA, 22 bp, synthetic construct
  misc_feature 1..22: note = chemically synthesized
  source 1..22: mol_type = other DNA
aactttttttttcctctgggtg

SEQ ID NO: 36675 - DNA, 22 bp, synthetic construct
  misc_feature 1..22: note = chemically synthesized
  source 1..22: mol_type = other DNA
actttttttttcctctgggtgt

SEQ ID NO: 36676 - DNA, 22 bp, synthetic construct
  misc_feature 1..22: note = chemically synthesized
  source 1..22: mol_type = other DNA
tttttttcctctgggtgtaaag

SEQ ID NO: 36677 - DNA, 22 bp, synthetic construct
  misc_feature 1..22: note = chemically synthesized
  source 1..22: mol_type = other DNA
ttttttcctctgggtgtaaagt

SEQ ID NO: 36678 - DNA, 22 bp, synthetic construct
  misc_feature 1..22: note = chemically synthesized
  source 1..22: mol_type = other DNA
tttttcctctgggtgtaaagtg

SEQ ID NO: 36679 - DNA, 22 bp, synthetic construct
  misc_feature 1..22: note = chemically synthesized
  source 1..22: mol_type = other DNA
ttttcctctgggtgtaaagtga

SEQ ID NO: 36680 - DNA, 22 bp, synthetic construct
  misc_feature 1..22: note = chemically synthesized
  source 1..22: mol_type = other DNA
tttcctctgggtgtaaagtgaa

SEQ ID NO: 36681 - DNA, 22 bp, synthetic construct
  misc_feature 1..22: note = chemically synthesized
  source 1..22: mol_type = other DNA
ttcctctgggtgtaaagtgaag

SEQ ID NO: 36682 - DNA, 22 bp, synthetic construct
  misc_feature 1..22: note = chemically synthesized
  source 1..22: mol_type = other DNA
tcctctgggtgtaaagtgaaga

SEQ ID NO: 36683 - DNA, 22 bp, synthetic construct
  misc_feature 1..22: note = chemically synthesized
  source 1..22: mol_type = other DNA
cctctgggtgtaaagtgaagag

SEQ ID NO: 36684 - DNA, 22 bp, synthetic construct
  misc_feature 1..22: note = chemically synthesized
  source 1..22: mol_type = other DNA
ctctgggtgtaaagtgaagaga

SEQ ID NO: 36685 - DNA, 22 bp, synthetic construct
  misc_feature 1..22: note = chemically synthesized
  source 1..22: mol_type = other DNA
tgggtgtaaagtgaagagatgg

SEQ ID NO: 36686 - DNA, 22 bp, synthetic construct
  misc_feature 1..22: note = chemically synthesized
  source 1..22: mol_type = other DNA
ggtgtaaagtgaagagatggca

SEQ ID NO: 36687 - DNA, 22 bp, synthetic construct
  misc_feature 1..22: note = chemically synthesized
  source 1..22: mol_type = other DNA
cattgtgtcattgtgaaaagat

SEQ ID NO: 36688 - DNA, 22 bp, synthetic construct
  misc_feature 1..22: note = chemically synthesized
  source 1..22: mol_type = other DNA
tgtcattgtgaaaagatgctgg

SEQ ID NO: 36689 - DNA, 22 bp, synthetic construct
  misc_feature 1..22: note = chemically synthesized
  source 1..22: mol_type = other DNA
tgaaaagatgctgggctggcgt

SEQ ID NO: 36690 - DNA, 22 bp, synthetic construct
  misc_feature 1..22: note = chemically synthesized
  source 1..22: mol_type = other DNA
ggctggcgtgtctcctgaaggc

SEQ ID NO: 36691 - DNA, 22 bp, synthetic construct
  misc_feature 1..22: note = chemically synthesized
  source 1..22: mol_type = other DNA
gcgtgtctcctgaaggccaccc

SEQ ID NO: 36692 - DNA, 22 bp, synthetic construct
  misc_feature 1..22: note = chemically synthesized
  source 1..22: mol_type = other DNA
ctgaaggccacccatatcttta

SEQ ID NO: 36693 - DNA, 22 bp, synthetic construct
  misc_feature 1..22: note = chemically synthesized
  source 1..22: mol_type = other DNA
aaggccacccatatctttaaac

SEQ ID NO: 36694 - DNA, 22 bp, synthetic construct
  misc_feature 1..22: note = chemically synthesized
  source 1..22: mol_type = other DNA
taaactttattttcatgcattc

SEQ ID NO: 36695 - DNA, 22 bp, synthetic construct
  misc_feature 1..22: note = chemically synthesized
  source 1..22: mol_type = other DNA
aaactttattttcatgcattcg

SEQ ID NO: 36696 - DNA, 22 bp, synthetic construct
  misc_feature 1..22: note = chemically synthesized
  source 1..22: mol_type = other DNA
aactttattttcatgcattcgc

SEQ ID NO: 36697 - DNA, 22 bp, synthetic construct
  misc_feature 1..22: note = chemically synthesized
  source 1..22: mol_type = other DNA
tattttcatgcattcgcacaaa

SEQ ID NO: 36698 - DNA, 22 bp, synthetic construct
  misc_feature 1..22: note = chemically synthesized
  source 1..22: mol_type = other DNA
attttcatgcattcgcacaaat

SEQ ID NO: 36699 - DNA, 22 bp, synthetic construct
  misc_feature 1..22: note = chemically synthesized
  source 1..22: mol_type = other DNA
ttttcatgcattcgcacaaata

SEQ ID NO: 36700 - DNA, 22 bp, synthetic construct
  misc_feature 1..22: note = chemically synthesized
  source 1..22: mol_type = other DNA
tcatgcattcgcacaaatatag

SEQ ID NO: 36701 - DNA, 22 bp, synthetic construct
  misc_feature 1..22: note = chemically synthesized
  source 1..22: mol_type = other DNA
catgcattcgcacaaatataga

SEQ ID NO: 36702 - DNA, 22 bp, synthetic construct
  misc_feature 1..22: note = chemically synthesized
  source 1..22: mol_type = other DNA
atgcattcgcacaaatatagat

SEQ ID NO: 36703 - DNA, 22 bp, synthetic construct
  misc_feature 1..22: note = chemically synthesized
  source 1..22: mol_type = other DNA
gcacaaatatagatgtgttcca

SEQ ID NO: 36704 - DNA, 22 bp, synthetic construct
  misc_feature 1..22: note = chemically synthesized
  source 1..22: mol_type = other DNA
catagatgaggcagatagcaga

SEQ ID NO: 36705 - DNA, 22 bp, synthetic construct
  misc_feature 1..22: note = chemically synthesized
  source 1..22: mol_type = other DNA
ctgcctacagcaaggctagttt

SEQ ID NO: 36706 - DNA, 22 bp, synthetic construct
  misc_feature 1..22: note = chemically synthesized
  source 1..22: mol_type = other DNA
tgcctacagcaaggctagtttg

SEQ ID NO: 36707 - DNA, 22 bp, synthetic construct
  misc_feature 1..22: note = chemically synthesized
  source 1..22: mol_type = other DNA
cctacagcaaggctagtttgga

SEQ ID NO: 36708 - DNA, 22 bp, synthetic construct
  misc_feature 1..22: note = chemically synthesized
  source 1..22: mol_type = other DNA
cagcaaggctagtttggagagg

SEQ ID NO: 36709 - DNA, 22 bp, synthetic construct
  misc_feature 1..22: note = chemically synthesized
  source 1..22: mol_type = other DNA
gtttggagagggttttgctgtc

SEQ ID NO: 36710 - DNA, 22 bp, synthetic construct
  misc_feature 1..22: note = chemically synthesized
  source 1..22: mol_type = other DNA
ggagagggttttgctgtcaggg

SEQ ID NO: 36711 - DNA, 22 bp, synthetic construct
  misc_feature 1..22: note = chemically synthesized
  source 1..22: mol_type = other DNA
gagagggttttgctgtcagggt

SEQ ID NO: 36712 - DNA, 22 bp, synthetic construct
  misc_feature 1..22: note = chemically synthesized
  source 1..22: mol_type = other DNA
tgctgtcagggttggacccaca

SEQ ID NO: 36713 - DNA, 22 bp, synthetic construct
  misc_feature 1..22: note = chemically synthesized
  source 1..22: mol_type = other DNA
gctgtcagggttggacccacac

SEQ ID NO: 36714 - DNA, 22 bp, synthetic construct
  misc_feature 1..22: note = chemically synthesized
  source 1..22: mol_type = other DNA
ctgtcagggttggacccacaca

SEQ ID NO: 36715 - DNA, 22 bp, synthetic construct
  misc_feature 1..22: note = chemically synthesized
  source 1..22: mol_type = other DNA
tcagggttggacccacacacct

SEQ ID NO: 36716 - DNA, 22 bp, synthetic construct
  misc_feature 1..22: note = chemically synthesized
  source 1..22: mol_type = other DNA
gacccacacacctcttcataga

SEQ ID NO: 36717 - DNA, 22 bp, synthetic construct
  misc_feature 1..22: note = chemically synthesized
  source 1..22: mol_type = other DNA
ttcatagatgctttttcttttt

SEQ ID NO: 36718 - DNA, 22 bp, synthetic construct
  misc_feature 1..22: note = chemically synthesized
  source 1..22: mol_type = other DNA
catagatgctttttcttttttt

SEQ ID NO: 36719 - DNA, 22 bp, synthetic construct
  misc_feature 1..22: note = chemically synthesized
  source 1..22: mol_type = other DNA
atagatgctttttctttttttt

SEQ ID NO: 36720 - DNA, 22 bp, synthetic construct
  misc_feature 1..22: note = chemically synthesized
  source 1..22: mol_type = other DNA
tttcttttttttcccagagttt

SEQ ID NO: 36721 - DNA, 22 bp, synthetic construct
  misc_feature 1..22: note = chemically synthesized
  source 1..22: mol_type = other DNA
ttcttttttttcccagagtttg

SEQ ID NO: 36722 - DNA, 22 bp, synthetic construct
  misc_feature 1..22: note = chemically synthesized
  source 1..22: mol_type = other DNA
tcttttttttcccagagtttga

SEQ ID NO: 36723 - DNA, 22 bp, synthetic construct
  misc_feature 1..22: note = chemically synthesized
  source 1..22: mol_type = other DNA
cttttttttcccagagtttgaa

SEQ ID NO: 36724 - DNA, 22 bp, synthetic construct
  misc_feature 1..22: note = chemically synthesized
  source 1..22: mol_type = other DNA
ttttttttcccagagtttgaaa

SEQ ID NO: 36725 - DNA, 22 bp, synthetic construct
  misc_feature 1..22: note = chemically synthesized
  source 1..22: mol_type = other DNA
ttttttcccagagtttgaaagg

SEQ ID NO: 36726 - DNA, 22 bp, synthetic construct
  misc_feature 1..22: note = chemically synthesized
  source 1..22: mol_type = other DNA
tttttcccagagtttgaaaggg

SEQ ID NO: 36727 - DNA, 22 bp, synthetic construct
  misc_feature 1..22: note = chemically synthesized
  source 1..22: mol_type = other DNA
ttttcccagagtttgaaaggga

SEQ ID NO: 36728 - DNA, 22 bp, synthetic construct
  misc_feature 1..22: note = chemically synthesized
  source 1..22: mol_type = other DNA
tttcccagagtttgaaagggaa

SEQ ID NO: 36729 - DNA, 22 bp, synthetic construct
  misc_feature 1..22: note = chemically synthesized
  source 1..22: mol_type = other DNA
ttcccagagtttgaaagggaaa

SEQ ID NO: 36730 - DNA, 22 bp, synthetic construct
  misc_feature 1..22: note = chemically synthesized
  source 1..22: mol_type = other DNA
tcccagagtttgaaagggaaat

SEQ ID NO: 36731 - DNA, 22 bp, synthetic construct
  misc_feature 1..22: note = chemically synthesized
  source 1..22: mol_type = other DNA
cccagagtttgaaagggaaatg

SEQ ID NO: 36732 - DNA, 22 bp, synthetic construct
  misc_feature 1..22: note = chemically synthesized
  source 1..22: mol_type = other DNA
ccagagtttgaaagggaaatgg

SEQ ID NO: 36733 - DNA, 22 bp, synthetic construct
  misc_feature 1..22: note = chemically synthesized
  source 1..22: mol_type = other DNA
gaaagggaaatggagtctcaag

SEQ ID NO: 36734 - DNA, 22 bp, synthetic construct
  misc_feature 1..22: note = chemically synthesized
  source 1..22: mol_type = other DNA
aaagggaaatggagtctcaagt

SEQ ID NO: 36735 - DNA, 22 bp, synthetic construct
  misc_feature 1..22: note = chemically synthesized
  source 1..22: mol_type = other DNA
aagttcagggaggttacagtgt

SEQ ID NO: 36736 - DNA, 22 bp, synthetic construct
  misc_feature 1..22: note = chemically synthesized
  source 1..22: mol_type = other DNA
agggaggttacagtgtagaccc

SEQ ID NO: 36737 - DNA, 22 bp, synthetic construct
  misc_feature 1..22: note = chemically synthesized
  source 1..22: mol_type = other DNA
cagtgtagacccacaaatcagc

SEQ ID NO: 36738 - DNA, 22 bp, synthetic construct
  misc_feature 1..22: note = chemically synthesized
  source 1..22: mol_type = other DNA
agtacagctaagggtggagaag

SEQ ID NO: 36739 - DNA, 22 bp, synthetic construct
  misc_feature 1..22: note = chemically synthesized
  source 1..22: mol_type = other DNA
agggtggagaagtctatgcaat

SEQ ID NO: 36740 - DNA, 22 bp, synthetic construct
  misc_feature 1..22: note = chemically synthesized
  source 1..22: mol_type = other DNA
tgcaatatccagcactcttctg

SEQ ID NO: 36741 - DNA, 22 bp, synthetic construct
  misc_feature 1..22: note = chemically synthesized
  source 1..22: mol_type = other DNA
ttctgattaattagaagtcttt

SEQ ID NO: 36742 - DNA, 22 bp, synthetic construct
  misc_feature 1..22: note = chemically synthesized
  source 1..22: mol_type = other DNA
ctgattaattagaagtctttaa

SEQ ID NO: 36743 - DNA, 22 bp, synthetic construct
  misc_feature 1..22: note = chemically synthesized
  source 1..22: mol_type = other DNA
tgattaattagaagtctttaaa

SEQ ID NO: 36744 - DNA, 22 bp, synthetic construct
  misc_feature 1..22: note = chemically synthesized
  source 1..22: mol_type = other DNA
attaattagaagtctttaaaat

SEQ ID NO: 36745 - DNA, 22 bp, synthetic construct
  misc_feature 1..22: note = chemically synthesized
  source 1..22: mol_type = other DNA
attagaagtctttaaaattcac

SEQ ID NO: 36746 - DNA, 22 bp, synthetic construct
  misc_feature 1..22: note = chemically synthesized
  source 1..22: mol_type = other DNA
gaagtctttaaaattcacagaa

SEQ ID NO: 36747 - DNA, 22 bp, synthetic construct
  misc_feature 1..22: note = chemically synthesized
  source 1..22: mol_type = other DNA
taaaattcacagaaaccatatt

SEQ ID NO: 36748 - DNA, 22 bp, synthetic construct
  misc_feature 1..22: note = chemically synthesized
  source 1..22: mol_type = other DNA
aaaattcacagaaaccatattg

SEQ ID NO: 36749 - DNA, 22 bp, synthetic construct
  misc_feature 1..22: note = chemically synthesized
  source 1..22: mol_type = other DNA
aaattcacagaaaccatattgt

SEQ ID NO: 36750 - DNA, 22 bp, synthetic construct
  misc_feature 1..22: note = chemically synthesized
  source 1..22: mol_type = other DNA
acagaaaccatattgtcttccc

SEQ ID NO: 36751 - DNA, 22 bp, synthetic construct
  misc_feature 1..22: note = chemically synthesized
  source 1..22: mol_type = other DNA
tcttccctaaatgattcatatg

SEQ ID NO: 36752 - DNA, 22 bp, synthetic construct
  misc_feature 1..22: note = chemically synthesized
  source 1..22: mol_type = other DNA
ccctaaatgattcatatgtcaa

SEQ ID NO: 36753 - DNA, 22 bp, synthetic construct
  misc_feature 1..22: note = chemically synthesized
  source 1..22: mol_type = other DNA
cctaaatgattcatatgtcaag

SEQ ID NO: 36754 - DNA, 22 bp, synthetic construct
  misc_feature 1..22: note = chemically synthesized
  source 1..22: mol_type = other DNA
aatgattcatatgtcaagacac

SEQ ID NO: 36755 - DNA, 22 bp, synthetic construct
  misc_feature 1..22: note = chemically synthesized
  source 1..22: mol_type = other DNA
atatgtcaagacacagtaaaga

SEQ ID NO: 36756 - DNA, 22 bp, synthetic construct
  misc_feature 1..22: note = chemically synthesized
  source 1..22: mol_type = other DNA
tatgtggaacatcatacacaaa

SEQ ID NO: 36757 - DNA, 22 bp, synthetic construct
  misc_feature 1..22: note = chemically synthesized
  source 1..22: mol_type = other DNA
ttaccttagtaaactgccaatt

SEQ ID NO: 36758 - DNA, 22 bp, synthetic construct
  misc_feature 1..22: note = chemically synthesized
  source 1..22: mol_type = other DNA
accttagtaaactgccaatttt

SEQ ID NO: 36759 - DNA, 22 bp, synthetic construct
  misc_feature 1..22: note = chemically synthesized
  source 1..22: mol_type = other DNA
ccttagtaaactgccaattttc

SEQ ID NO: 36760 - DNA, 22 bp, synthetic construct
  misc_feature 1..22: note = chemically synthesized
  source 1..22: mol_type = other DNA
agtaaactgccaattttctgaa

SEQ ID NO: 36761 - DNA, 22 bp, synthetic construct
  misc_feature 1..22: note = chemically synthesized
  source 1..22: mol_type = other DNA
gtaaactgccaattttctgaaa

SEQ ID NO: 36762 - DNA, 22 bp, synthetic construct
  misc_feature 1..22: note = chemically synthesized
  source 1..22: mol_type = other DNA
ccaattttctgaaatgctcttt

SEQ ID NO: 36763 - DNA, 22 bp, synthetic construct
  misc_feature 1..22: note = chemically synthesized
  source 1..22: mol_type = other DNA
tctgaaatgctctttaaatcct

SEQ ID NO: 36764 - DNA, 22 bp, synthetic construct
  misc_feature 1..22: note = chemically synthesized
  source 1..22: mol_type = other DNA
ctgaaatgctctttaaatcctg

SEQ ID NO: 36765 - DNA, 22 bp, synthetic construct
  misc_feature 1..22: note = chemically synthesized
  source 1..22: mol_type = other DNA
tgaaatgctctttaaatcctgc

SEQ ID NO: 36766 - DNA, 22 bp, synthetic construct
  misc_feature 1..22: note = chemically synthesized
  source 1..22: mol_type = other DNA
aaatgctctttaaatcctgcta

SEQ ID NO: 36767 - DNA, 22 bp, synthetic construct
  misc_feature 1..22: note = chemically synthesized
  source 1..22: mol_type = other DNA
tttaaatcctgctaatggtggc

SEQ ID NO: 36768 - DNA, 22 bp, synthetic construct
  misc_feature 1..22: note = chemically synthesized
  source 1..22: mol_type = other DNA
taaatcctgctaatggtggcat

SEQ ID NO: 36769 - DNA, 22 bp, synthetic construct
  misc_feature 1..22: note = chemically synthesized
  source 1..22: mol_type = other DNA
aaatcctgctaatggtggcatt

SEQ ID NO: 36770 - DNA, 22 bp, synthetic construct
  misc_feature 1..22: note = chemically synthesized
  source 1..22: mol_type = other DNA
aatcctgctaatggtggcattt

SEQ ID NO: 36771 - DNA, 22 bp, synthetic construct
  misc_feature 1..22: note = chemically synthesized
  source 1..22: mol_type = other DNA
ctaatggtggcatttgtgtctt

SEQ ID NO: 36772 - DNA, 22 bp, synthetic construct
  misc_feature 1..22: note = chemically synthesized
  source 1..22: mol_type = other DNA
atggtggcatttgtgtctttgt

SEQ ID NO: 36773 - DNA, 22 bp, synthetic construct
  misc_feature 1..22: note = chemically synthesized
  source 1..22: mol_type = other DNA
gtgtctttgtcacctacagtac

SEQ ID NO: 36774 - DNA, 22 bp, synthetic construct
  misc_feature 1..22: note = chemically synthesized
  source 1..22: mol_type = other DNA
tgtctttgtcacctacagtaca

SEQ ID NO: 36775 - DNA, 22 bp, synthetic construct
  misc_feature 1..22: note = chemically synthesized
  source 1..22: mol_type = other DNA
tgtcacctacagtacatttctg

SEQ ID NO: 36776 - DNA, 22 bp, synthetic construct
  misc_feature 1..22: note = chemically synthesized
  source 1..22: mol_type = other DNA
gtcacctacagtacatttctgg

SEQ ID NO: 36777 - DNA, 22 bp, synthetic construct
  misc_feature 1..22: note = chemically synthesized
  source 1..22: mol_type = other DNA
tcacctacagtacatttctgga

SEQ ID NO: 36778 - DNA, 22 bp, synthetic construct
  misc_feature 1..22: note = chemically synthesized
  source 1..22: mol_type = other DNA
cagtacatttctggatttggga

SEQ ID NO: 36779 - DNA, 22 bp, synthetic construct
  misc_feature 1..22: note = chemically synthesized
  source 1..22: mol_type = other DNA
ctggatttgggaatgagtgttc

SEQ ID NO: 36780 - DNA, 22 bp, synthetic construct
  misc_feature 1..22: note = chemically synthesized
  source 1..22: mol_type = other DNA
tggatttgggaatgagtgttct

SEQ ID NO: 36781 - DNA, 22 bp, synthetic construct
  misc_feature 1..22: note = chemically synthesized
  source 1..22: mol_type = other DNA
gatttgggaatgagtgttcttc

SEQ ID NO: 36782 - DNA, 22 bp, synthetic construct
  misc_feature 1..22: note = chemically synthesized
  source 1..22: mol_type = other DNA
gggaatgagtgttcttcagagg

SEQ ID NO: 36783 - DNA, 22 bp, synthetic construct
  misc_feature 1..22: note = chemically synthesized
  source 1..22: mol_type = other DNA
ggaatgagtgttcttcagagga

SEQ ID NO: 36784 - DNA, 22 bp, synthetic construct
  misc_feature 1..22: note = chemically synthesized
  source 1..22: mol_type = other DNA
ttcagaggatcctcgctgccca

SEQ ID NO: 36785 - DNA, 22 bp, synthetic construct
  misc_feature 1..22: note = chemically synthesized
  source 1..22: mol_type = other DNA
cagaggatcctcgctgcccagg

SEQ ID NO: 36786 - DNA, 22 bp, synthetic construct
  misc_feature 1..22: note = chemically synthesized
  source 1..22: mol_type = other DNA
agaggatcctcgctgcccaggt

SEQ ID NO: 36787 - DNA, 22 bp, synthetic construct
  misc_feature 1..22: note = chemically synthesized
  source 1..22: mol_type = other DNA
gctgcccaggttccctgccaga

SEQ ID NO: 36788 - DNA, 22 bp, synthetic construct
  misc_feature 1..22: note = chemically synthesized
  source 1..22: mol_type = other DNA
cccaggttccctgccagaagga

SEQ ID NO: 36789 - DNA, 20 bp, synthetic construct
  misc_feature 1..20: note = chemically synthesized
  source 1..20: mol_type = other DNA
ctccttttgccacaccctca

SEQ ID NO: 36790 - DNA, 20 bp, synthetic construct
  misc_feature 1..20: note = chemically synthesized
  source 1..20: mol_type = other DNA
acaccctcacagacataacc

SEQ ID NO: 36791 - DNA, 20 bp, synthetic construct
  misc_feature 1..20: note = chemically synthesized
  source 1..20: mol_type = other DNA
ttgcatctttcaatccaatc

SEQ ID NO: 36792 - DNA, 20 bp, synthetic construct
  misc_feature 1..20: note = chemically synthesized
  source 1..20: mol_type = other DNA
tttcaatccaatcaagttga

SEQ ID NO: 36793 - DNA, 20 bp, synthetic construct
  misc_feature 1..20: note = chemically synthesized
  source 1..20: mol_type = other DNA
ttgacagtattaaccatcac

SEQ ID NO: 36794 - DNA, 20 bp, synthetic construct
  misc_feature 1..20: note = chemically synthesized
  source 1..20: mol_type = other DNA
tcatacataatcttcaaata

SEQ ID NO: 36795 - DNA, 20 bp, synthetic construct
  misc_feature 1..20: note = chemically synthesized
  source 1..20: mol_type = other DNA
cttcaaataaagacaataat

SEQ ID NO: 36796 - DNA, 20 bp, synthetic construct
  misc_feature 1..20: note = chemically synthesized
  source 1..20: mol_type = other DNA
ttcaaataaagacaataata

SEQ ID NO: 36797 - DNA, 20 bp, synthetic construct
  misc_feature 1..20: note = chemically synthesized
  source 1..20: mol_type = other DNA
tacaactatcctcatacaac

SEQ ID NO: 36798 - DNA, 20 bp, synthetic construct
  misc_feature 1..20: note = chemically synthesized
  source 1..20: mol_type = other DNA
cgcaccaatccccaaaccaa

SEQ ID NO: 36799 - DNA, 20 bp, synthetic construct
  misc_feature 1..20: note = chemically synthesized
  source 1..20: mol_type = other DNA
caaaccaaaagttattacat

SEQ ID NO: 36800 - DNA, 20 bp, synthetic construct
  misc_feature 1..20: note = chemically synthesized
  source 1..20: mol_type = other DNA
aaaccaaaagttattacata

SEQ ID NO: 36801 - DNA, 20 bp, synthetic construct
  misc_feature 1..20: note = chemically synthesized
  source 1..20: mol_type = other DNA
aatgcttaaatgctgatgtg

SEQ ID NO: 36802 - DNA, 20 bp, synthetic construct
  misc_feature 1..20: note = chemically synthesized
  source 1..20: mol_type = other DNA
gatgtgaagtccataaatct

SEQ ID NO: 36803 - DNA, 20 bp, synthetic construct
  misc_feature 1..20: note = chemically synthesized
  source 1..20: mol_type = other DNA
atgtgaagtccataaatcta

SEQ ID NO: 36804 - DNA, 20 bp, synthetic construct
  misc_feature 1..20: note = chemically synthesized
  source 1..20: mol_type = other DNA
aaatctaaggtcacatgata

SEQ ID NO: 36805 - DNA, 20 bp, synthetic construct
  misc_feature 1..20: note = chemically synthesized
  source 1..20: mol_type = other DNA
aatctaaggtcacatgataa

SEQ ID NO: 36806 - DNA, 20 bp, synthetic construct
  misc_feature 1..20: note = chemically synthesized
  source 1..20: mol_type = other DNA
cacatgataaaggaaaaata

SEQ ID NO: 36807 - DNA, 20 bp, synthetic construct
  misc_feature 1..20: note = chemically synthesized
  source 1..20: mol_type = other DNA
acatgataaaggaaaaataa

SEQ ID NO: 36808 - DNA, 20 bp, synthetic construct
  misc_feature 1..20: note = chemically synthesized
  source 1..20: mol_type = other DNA
aaaataaaggaaataaaata

SEQ ID NO: 36809 - DNA, 20 bp, synthetic construct
  misc_feature 1..20: note = chemically synthesized
  source 1..20: mol_type = other DNA
ataaaataaagatattttct

SEQ ID NO: 36810 - DNA, 20 bp, synthetic construct
  misc_feature 1..20: note = chemically synthesized
  source 1..20: mol_type = other DNA
taaagatattttcttagcac

SEQ ID NO: 36811 - DNA, 20 bp, synthetic construct
  misc_feature 1..20: note = chemically synthesized
  source 1..20: mol_type = other DNA
cacaagtgtacacatgcatt

SEQ ID NO: 36812 - DNA, 20 bp, synthetic construct
  misc_feature 1..20: note = chemically synthesized
  source 1..20: mol_type = other DNA
agtgtacacatgcatttaga

SEQ ID NO: 36813 - DNA, 20 bp, synthetic construct
  misc_feature 1..20: note = chemically synthesized
  source 1..20: mol_type = other DNA
gtacacatgcatttagaaag

SEQ ID NO: 36814 - DNA, 20 bp, synthetic construct
  misc_feature 1..20: note = chemically synthesized
  source 1..20: mol_type = other DNA
atgcatttagaaagtggata

SEQ ID NO: 36815 - DNA, 20 bp, synthetic construct
  misc_feature 1..20: note = chemically synthesized
  source 1..20: mol_type = other DNA
agaaagtggatatagtgctg

SEQ ID NO: 36816 - DNA, 20 bp, synthetic construct
  misc_feature 1..20: note = chemically synthesized
  source 1..20: mol_type = other DNA
gtgctgcagctgtccacttt

SEQ ID NO: 36817 - DNA, 20 bp, synthetic construct
  misc_feature 1..20: note = chemically synthesized
  source 1..20: mol_type = other DNA
tgctgcagctgtccactttc

SEQ ID NO: 36818 - DNA, 20 bp, synthetic construct
  misc_feature 1..20: note = chemically synthesized
  source 1..20: mol_type = other DNA
tgcagctgtccactttcggg

SEQ ID NO: 36819 - DNA, 20 bp, synthetic construct
  misc_feature 1..20: note = chemically synthesized
  source 1..20: mol_type = other DNA
ggtggtgcctgcatatcgtg

SEQ ID NO: 36820 - DNA, 20 bp, synthetic construct
  misc_feature 1..20: note = chemically synthesized
  source 1..20: mol_type = other DNA
gtgcagaaccatctatgaac

SEQ ID NO: 36821 - DNA, 20 bp, synthetic construct
  misc_feature 1..20: note = chemically synthesized
  source 1..20: mol_type = other DNA
accatctatgaaccagtcct

SEQ ID NO: 36822 - DNA, 20 bp, synthetic construct
  misc_feature 1..20: note = chemically synthesized
  source 1..20: mol_type = other DNA
cttcctctgtcaactgatca

SEQ ID NO: 36823 - DNA, 20 bp, synthetic construct
  misc_feature 1..20: note = chemically synthesized
  source 1..20: mol_type = other DNA
ttcctctgtcaactgatcat

SEQ ID NO: 36824 - DNA, 20 bp, synthetic construct
  misc_feature 1..20: note = chemically synthesized
  source 1..20: mol_type = other DNA
tcctctgtcaactgatcata

SEQ ID NO: 36825 - DNA, 20 bp, synthetic construct
  misc_feature 1..20: note = chemically synthesized
  source 1..20: mol_type = other DNA
gatcatagggaactccccat

SEQ ID NO: 36826 - DNA, 20 bp, synthetic construct
  misc_feature 1..20: note = chemically synthesized
  source 1..20: mol_type = other DNA
atcatagggaactccccatg

SEQ ID NO: 36827 - DNA, 20 bp, synthetic construct
  misc_feature 1..20: note = chemically synthesized
  source 1..20: mol_type = other DNA
ggaactccccatgaggccat

SEQ ID NO: 36828 - DNA, 20 bp, synthetic construct
  misc_feature 1..20: note = chemically synthesized
  source 1..20: mol_type = other DNA
tccccatgaggccattggtg

SEQ ID NO: 36829 - DNA, 20 bp, synthetic construct
  misc_feature 1..20: note = chemically synthesized
  source 1..20: mol_type = other DNA
ccccatgaggccattggtgc

SEQ ID NO: 36830 - DNA, 20 bp, synthetic construct
  misc_feature 1..20: note = chemically synthesized
  source 1..20: mol_type = other DNA
atgaggccattggtgcaggc

SEQ ID NO: 36831 - DNA, 20 bp, synthetic construct
  misc_feature 1..20: note = chemically synthesized
  source 1..20: mol_type = other DNA
tgaggccattggtgcaggct

SEQ ID NO: 36832 - DNA, 20 bp, synthetic construct
  misc_feature 1..20: note = chemically synthesized
  source 1..20: mol_type = other DNA
gaggccattggtgcaggctg

SEQ ID NO: 36833 - DNA, 20 bp, synthetic construct
  misc_feature 1..20: note = chemically synthesized
  source 1..20: mol_type = other DNA
aggccattggtgcaggctgg

SEQ ID NO: 36834 - DNA, 20 bp, synthetic construct
  misc_feature 1..20: note = chemically synthesized
  source 1..20: mol_type = other DNA
gccattggtgcaggctgggg

SEQ ID NO: 36835 - DNA, 20 bp, synthetic construct
  misc_feature 1..20: note = chemically synthesized
  source 1..20: mol_type = other DNA
ccattggtgcaggctggggg

SEQ ID NO: 36836 - DNA, 20 bp, synthetic construct
  misc_feature 1..20: note = chemically synthesized
  source 1..20: mol_type = other DNA
cattggtgcaggctggggga

SEQ ID NO: 36837 - DNA, 20 bp, synthetic construct
  misc_feature 1..20: note = chemically synthesized
  source 1..20: mol_type = other DNA
tggtgcaggctgggggaggg

SEQ ID NO: 36838 - DNA, 20 bp, synthetic construct
  misc_feature 1..20: note = chemically synthesized
  source 1..20: mol_type = other DNA
ggtgcaggctgggggaggga

SEQ ID NO: 36839 - DNA, 20 bp, synthetic construct
  misc_feature 1..20: note = chemically synthesized
  source 1..20: mol_type = other DNA
gcaggctgggggagggaagg

SEQ ID NO: 36840 - DNA, 20 bp, synthetic construct
  misc_feature 1..20: note = chemically synthesized
  source 1..20: mol_type = other DNA
caggctgggggagggaaggc

SEQ ID NO: 36841 - DNA, 20 bp, synthetic construct
  misc_feature 1..20: note = chemically synthesized
  source 1..20: mol_type = other DNA
aggctgggggagggaaggca

SEQ ID NO: 36842 - DNA, 20 bp, synthetic construct
  misc_feature 1..20: note = chemically synthesized
  source 1..20: mol_type = other DNA
ctgggggagggaaggcaggg

SEQ ID NO: 36843 - DNA, 20 bp, synthetic construct
  misc_feature 1..20: note = chemically synthesized
  source 1..20: mol_type = other DNA
gagggaaggcagggtggcat

SEQ ID NO: 36844 - DNA, 20 bp, synthetic construct
  misc_feature 1..20: note = chemically synthesized
  source 1..20: mol_type = other DNA
ggaaggcagggtggcatgag

SEQ ID NO: 36845 - DNA, 20 bp, synthetic construct
  misc_feature 1..20: note = chemically synthesized
  source 1..20: mol_type = other DNA
aaggcagggtggcatgagtg

SEQ ID NO: 36846 - DNA, 20 bp, synthetic construct
  misc_feature 1..20: note = chemically synthesized
  source 1..20: mol_type = other DNA
ggtggcatgagtggagaaca

SEQ ID NO: 36847 - DNA, 20 bp, synthetic construct
  misc_feature 1..20: note = chemically synthesized
  source 1..20: mol_type = other DNA
gtggcatgagtggagaacat

SEQ ID NO: 36848 - DNA, 20 bp, synthetic construct
  misc_feature 1..20: note = chemically synthesized
  source 1..20: mol_type = other DNA
agtggagaacatgggcattt

SEQ ID NO: 36849 - DNA, 20 bp, synthetic construct
  misc_feature 1..20: note = chemically synthesized
  source 1..20: mol_type = other DNA
atgtaacttacttgtgcctt

SEQ ID NO: 36850 - DNA, 20 bp, synthetic construct
  misc_feature 1..20: note = chemically synthesized
  source 1..20: mol_type = other DNA
tgtaacttacttgtgccttc

SEQ ID NO: 36851 - DNA, 20 bp, synthetic construct
  misc_feature 1..20: note = chemically synthesized
  source 1..20: mol_type = other DNA
tgtgccttcaggacctgctc

SEQ ID NO: 36852 - DNA, 20 bp, synthetic construct
  misc_feature 1..20: note = chemically synthesized
  source 1..20: mol_type = other DNA
cgctgtgctgacccacttca

SEQ ID NO: 36853 - DNA, 20 bp, synthetic construct
  misc_feature 1..20: note = chemically synthesized
  source 1..20: mol_type = other DNA
gtgctgacccacttcatggc

SEQ ID NO: 36854 - DNA, 20 bp, synthetic construct
  misc_feature 1..20: note = chemically synthesized
  source 1..20: mol_type = other DNA
tgacccacttcatggctaga

SEQ ID NO: 36855 - DNA, 20 bp, synthetic construct
  misc_feature 1..20: note = chemically synthesized
  source 1..20: mol_type = other DNA
gacccacttcatggctagat

SEQ ID NO: 36856 - DNA, 20 bp, synthetic construct
  misc_feature 1..20: note = chemically synthesized
  source 1..20: mol_type = other DNA
cacttcatggctagatgggt

SEQ ID NO: 36857 - DNA, 20 bp, synthetic construct
  misc_feature 1..20: note = chemically synthesized
  source 1..20: mol_type = other DNA
tcatggctagatgggtcaga

SEQ ID NO: 36858 - DNA, 20 bp, synthetic construct
  misc_feature 1..20: note = chemically synthesized
  source 1..20: mol_type = other DNA
tagatgggtcagaaagcaac

SEQ ID NO: 36859 - DNA, 20 bp, synthetic construct
  misc_feature 1..20: note = chemically synthesized
  source 1..20: mol_type = other DNA
agaaagcaaccagttcatga

SEQ ID NO: 36860 - DNA, 20 bp, synthetic construct
  misc_feature 1..20: note = chemically synthesized
  source 1..20: mol_type = other DNA
gaaagcaaccagttcatgat

SEQ ID NO: 36861 - DNA, 20 bp, synthetic construct
  misc_feature 1..20: note = chemically synthesized
  source 1..20: mol_type = other DNA
agcaaccagttcatgatagg

SEQ ID NO: 36862 - DNA, 20 bp, synthetic construct
  misc_feature 1..20: note = chemically synthesized
  source 1..20: mol_type = other DNA
gcaaccagttcatgataggc

SEQ ID NO: 36863 - DNA, 20 bp, synthetic construct
  misc_feature 1..20: note = chemically synthesized
  source 1..20: mol_type = other DNA
cagttcatgataggcaggtt

SEQ ID NO: 36864 - DNA, 20 bp, synthetic construct
  misc_feature 1..20: note = chemically synthesized
  source 1..20: mol_type = other DNA
agttcatgataggcaggttc

SEQ ID NO: 36865 - DNA, 20 bp, synthetic construct
  misc_feature 1..20: note = chemically synthesized
  source 1..20: mol_type = other DNA
tcatgataggcaggttcagg

SEQ ID NO: 36866 - DNA, 20 bp, synthetic construct
  misc_feature 1..20: note = chemically synthesized
  source 1..20: mol_type = other DNA
ataggcaggttcaggtagca

SEQ ID NO: 36867 - DNA, 20 bp, synthetic construct
  misc_feature 1..20: note = chemically synthesized
  source 1..20: mol_type = other DNA
catggtgactttatgaccca

SEQ ID NO: 36868 - DNA, 20 bp, synthetic construct
  misc_feature 1..20: note = chemically synthesized
  source 1..20: mol_type = other DNA
atgacccacagtcaaacgtt

SEQ ID NO: 36869 - DNA, 20 bp, synthetic construct
  misc_feature 1..20: note = chemically synthesized
  source 1..20: mol_type = other DNA
caaacgttcagttaccacca

SEQ ID NO: 36870 - DNA, 20 bp, synthetic construct
  misc_feature 1..20: note = chemically synthesized
  source 1..20: mol_type = other DNA
ttaccaccaaagcccaataa

SEQ ID NO: 36871 - DNA, 20 bp, synthetic construct
  misc_feature 1..20: note = chemically synthesized
  source 1..20: mol_type = other DNA
aaagcccaataacagaccaa

SEQ ID NO: 36872 - DNA, 20 bp, synthetic construct
  misc_feature 1..20: note = chemically synthesized
  source 1..20: mol_type = other DNA
gaccaatagctgtctctcaa

SEQ ID NO: 36873 - DNA, 20 bp, synthetic construct
  misc_feature 1..20: note = chemically synthesized
  source 1..20: mol_type = other DNA
accaatagctgtctctcaaa

SEQ ID NO: 36874 - DNA, 20 bp, synthetic construct
  misc_feature 1..20: note = chemically synthesized
  source 1..20: mol_type = other DNA
caatagctgtctctcaaaag

SEQ ID NO: 36875 - DNA, 20 bp, synthetic construct
  misc_feature 1..20: note = chemically synthesized
  source 1..20: mol_type = other DNA
atagctgtctctcaaaagga

SEQ ID NO: 36876 - DNA, 20 bp, synthetic construct
  misc_feature 1..20: note = chemically synthesized
  source 1..20: mol_type = other DNA
gctgtctctcaaaaggagag

SEQ ID NO: 36877 - DNA, 20 bp, synthetic construct
  misc_feature 1..20: note = chemically synthesized
  source 1..20: mol_type = other DNA
aaaaggagagtagttatctg

SEQ ID NO: 36878 - DNA, 20 bp, synthetic construct
  misc_feature 1..20: note = chemically synthesized
  source 1..20: mol_type = other DNA
aggagagtagttatctgcag

SEQ ID NO: 36879 - DNA, 20 bp, synthetic construct
  misc_feature 1..20: note = chemically synthesized
  source 1..20: mol_type = other DNA
agagtagttatctgcagaag

SEQ ID NO: 36880 - DNA, 20 bp, synthetic construct
  misc_feature 1..20: note = chemically synthesized
  source 1..20: mol_type = other DNA
gtagttatctgcagaagtgg

SEQ ID NO: 36881 - DNA, 20 bp, synthetic construct
  misc_feature 1..20: note = chemically synthesized
  source 1..20: mol_type = other DNA
tagttatctgcagaagtggc

SEQ ID NO: 36882 - DNA, 20 bp, synthetic construct
  misc_feature 1..20: note = chemically synthesized
  source 1..20: mol_type = other DNA
agttatctgcagaagtggca

SEQ ID NO: 36883 - DNA, 20 bp, synthetic construct
  misc_feature 1..20: note = chemically synthesized
  source 1..20: mol_type = other DNA
agggccttgctccaaaatcc

SEQ ID NO: 36884 - DNA, 20 bp, synthetic construct
  misc_feature 1..20: note = chemically synthesized
  source 1..20: mol_type = other DNA
ggccttgctccaaaatccta

SEQ ID NO: 36885 - DNA, 20 bp, synthetic construct
  misc_feature 1..20: note = chemically synthesized
  source 1..20: mol_type = other DNA
gccttgctccaaaatcctag

SEQ ID NO: 36886 - DNA, 20 bp, synthetic construct
  misc_feature 1..20: note = chemically synthesized
  source 1..20: mol_type = other DNA
tctccactgtgattcaccta

SEQ ID NO: 36887 - DNA, 20 bp, synthetic construct
  misc_feature 1..20: note = chemically synthesized
  source 1..20: mol_type = other DNA
ctccactgtgattcacctat

SEQ ID NO: 36888 - DNA, 20 bp, synthetic construct
  misc_feature 1..20: note = chemically synthesized
  source 1..20: mol_type = other DNA
tccactgtgattcacctatg

SEQ ID NO: 36889 - DNA, 20 bp, synthetic construct
  misc_feature 1..20: note = chemically synthesized
  source 1..20: mol_type = other DNA
ccactgtgattcacctatgg

SEQ ID NO: 36890 - DNA, 20 bp, synthetic construct
  misc_feature 1..20: note = chemically synthesized
  source 1..20: mol_type = other DNA
tcacctatgggggcctgcca

SEQ ID NO: 36891 - DNA, 20 bp, synthetic construct
  misc_feature 1..20: note = chemically synthesized
  source 1..20: mol_type = other DNA
cacctatgggggcctgccaa

SEQ ID NO: 36892 - DNA, 20 bp, synthetic construct
  misc_feature 1..20: note = chemically synthesized
  source 1..20: mol_type = other DNA
ggcctgccaaaggctccaaa

SEQ ID NO: 36893 - DNA, 20 bp, synthetic construct
  misc_feature 1..20: note = chemically synthesized
  source 1..20: mol_type = other DNA
ctatctgccactgacacctc

SEQ ID NO: 36894 - DNA, 20 bp, synthetic construct
  misc_feature 1..20: note = chemically synthesized
  source 1..20: mol_type = other DNA
actgacacctcaagcaccat

SEQ ID NO: 36895 - DNA, 20 bp, synthetic construct
  misc_feature 1..20: note = chemically synthesized
  source 1..20: mol_type = other DNA
ctcaagcaccattggatctg

SEQ ID NO: 36896 - DNA, 20 bp, synthetic construct
  misc_feature 1..20: note = chemically synthesized
  source 1..20: mol_type = other DNA
tcaagcaccattggatctgc

SEQ ID NO: 36897 - DNA, 20 bp, synthetic construct
  misc_feature 1..20: note = chemically synthesized
  source 1..20: mol_type = other DNA
caagcaccattggatctgcg

SEQ ID NO: 36898 - DNA, 20 bp, synthetic construct
  misc_feature 1..20: note = chemically synthesized
  source 1..20: mol_type = other DNA
attggatctgcggggtcatg

SEQ ID NO: 36899 - DNA, 20 bp, synthetic construct
  misc_feature 1..20: note = chemically synthesized
  source 1..20: mol_type = other DNA
gcggggtcatgtggcccaaa

SEQ ID NO: 36900 - DNA, 20 bp, synthetic construct
  misc_feature 1..20: note = chemically synthesized
  source 1..20: mol_type = other DNA
gggtcatgtggcccaaatgg

SEQ ID NO: 36901 - DNA, 20 bp, synthetic construct
  misc_feature 1..20: note = chemically synthesized
  source 1..20: mol_type = other DNA
gtcatgtggcccaaatggca

SEQ ID NO: 36902 - DNA, 20 bp, synthetic construct
  misc_feature 1..20: note = chemically synthesized
  source 1..20: mol_type = other DNA
atgtggcccaaatggcagag

SEQ ID NO: 36903 - DNA, 20 bp, synthetic construct
  misc_feature 1..20: note = chemically synthesized
  source 1..20: mol_type = other DNA
aaatggcagagcagctttca

SEQ ID NO: 36904 - DNA, 20 bp, synthetic construct
  misc_feature 1..20: note = chemically synthesized
  source 1..20: mol_type = other DNA
tggcagagcagctttcacag

SEQ ID NO: 36905 - DNA, 20 bp, synthetic construct
  misc_feature 1..20: note = chemically synthesized
  source 1..20: mol_type = other DNA
gagcagctttcacagcagcc

SEQ ID NO: 36906 - DNA, 20 bp, synthetic construct
  misc_feature 1..20: note = chemically synthesized
  source 1..20: mol_type = other DNA
acagcagcctggacctgttt

SEQ ID NO: 36907 - DNA, 20 bp, synthetic construct
  misc_feature 1..20: note = chemically synthesized
  source 1..20: mol_type = other DNA
agcagcctggacctgtttca

SEQ ID NO: 36908 - DNA, 20 bp, synthetic construct
  misc_feature 1..20: note = chemically synthesized
  source 1..20: mol_type = other DNA
ttcagagccttcttttgttc

SEQ ID NO: 36909 - DNA, 20 bp, synthetic construct
  misc_feature 1..20: note = chemically synthesized
  source 1..20: mol_type = other DNA
ttctagactgcacttaaatc

SEQ ID NO: 36910 - DNA, 20 bp, synthetic construct
  misc_feature 1..20: note = chemically synthesized
  source 1..20: mol_type = other DNA
tagactgcacttaaatctgg

SEQ ID NO: 36911 - DNA, 20 bp, synthetic construct
  misc_feature 1..20: note = chemically synthesized
  source 1..20: mol_type = other DNA
acttaaatctggcagccttt

SEQ ID NO: 36912 - DNA, 20 bp, synthetic construct
  misc_feature 1..20: note = chemically synthesized
  source 1..20: mol_type = other DNA
cttaaatctggcagcctttc

SEQ ID NO: 36913 - DNA, 20 bp, synthetic construct
  misc_feature 1..20: note = chemically synthesized
  source 1..20: mol_type = other DNA
ctttcaggtcactcgataaa

SEQ ID NO: 36914 - DNA, 20 bp, synthetic construct
  misc_feature 1..20: note = chemically synthesized
  source 1..20: mol_type = other DNA
tttcaggtcactcgataaat

SEQ ID NO: 36915 - DNA, 20 bp, synthetic construct
  misc_feature 1..20: note = chemically synthesized
  source 1..20: mol_type = other DNA
aggtcactcgataaatgggc

SEQ ID NO: 36916 - DNA, 20 bp, synthetic construct
  misc_feature 1..20: note = chemically synthesized
  source 1..20: mol_type = other DNA
gtcactcgataaatgggcca

SEQ ID NO: 36917 - DNA, 20 bp, synthetic construct
  misc_feature 1..20: note = chemically synthesized
  source 1..20: mol_type = other DNA
ccagagtaacacacccaaac

SEQ ID NO: 36918 - DNA, 20 bp, synthetic construct
  misc_feature 1..20: note = chemically synthesized
  source 1..20: mol_type = other DNA
cagagtaacacacccaaacg

SEQ ID NO: 36919 - DNA, 20 bp, synthetic construct
  misc_feature 1..20: note = chemically synthesized
  source 1..20: mol_type = other DNA
tgttgcctccaaaatccaaa

SEQ ID NO: 36920 - DNA, 20 bp, synthetic construct
  misc_feature 1..20: note = chemically synthesized
  source 1..20: mol_type = other DNA
gttgcctccaaaatccaaat

SEQ ID NO: 36921 - DNA, 20 bp, synthetic construct
  misc_feature 1..20: note = chemically synthesized
  source 1..20: mol_type = other DNA
caaaatccaaataggcccac

SEQ ID NO: 36922 - DNA, 20 bp, synthetic construct
  misc_feature 1..20: note = chemically synthesized
  source 1..20: mol_type = other DNA
aaaatccaaataggcccacc

SEQ ID NO: 36923 - DNA, 20 bp, synthetic construct
  misc_feature 1..20: note = chemically synthesized
  source 1..20: mol_type = other DNA
caggcattgtgcctctttct

SEQ ID NO: 36924 - DNA, 20 bp, synthetic construct
  misc_feature 1..20: note = chemically synthesized
  source 1..20: mol_type = other DNA
tgtgcctctttcttggttgt

SEQ ID NO: 36925 - DNA, 20 bp, synthetic construct
  misc_feature 1..20: note = chemically synthesized
  source 1..20: mol_type = other DNA
tgcctctttcttggttgtaa

SEQ ID NO: 36926 - DNA, 20 bp, synthetic construct
  misc_feature 1..20: note = chemically synthesized
  source 1..20: mol_type = other DNA
gcctctttcttggttgtaag

SEQ ID NO: 36927 - DNA, 20 bp, synthetic construct
  misc_feature 1..20: note = chemically synthesized
  source 1..20: mol_type = other DNA
cctctttcttggttgtaaga

SEQ ID NO: 36928 - DNA, 20 bp, synthetic construct
  misc_feature 1..20: note = chemically synthesized
  source 1..20: mol_type = other DNA
ctctttcttggttgtaagag

SEQ ID NO: 36929 - DNA, 20 bp, synthetic construct
  misc_feature 1..20: note = chemically synthesized
  source 1..20: mol_type = other DNA
gttgtaagaggggccaaacg

SEQ ID NO: 36930 - DNA, 20 bp, synthetic construct
  misc_feature 1..20: note = chemically synthesized
  source 1..20: mol_type = other DNA
taagaggggccaaacgcagc

SEQ ID NO: 36931 - DNA, 20 bp, synthetic construct
  misc_feature 1..20: note = chemically synthesized
  source 1..20: mol_type = other DNA
cagcaagttatgcttcacct

SEQ ID NO: 36932 - DNA, 20 bp, synthetic construct
  misc_feature 1..20: note = chemically synthesized
  source 1..20: mol_type = other DNA
caagttatgcttcaccttag

SEQ ID NO: 36933 - DNA, 20 bp, synthetic construct
  misc_feature 1..20: note = chemically synthesized
  source 1..20: mol_type = other DNA
aagttatgcttcaccttaga

SEQ ID NO: 36934 - DNA, 20 bp, synthetic construct
  misc_feature 1..20: note = chemically synthesized
  source 1..20: mol_type = other DNA
ccttagaaggaatatctcca

SEQ ID NO: 36935 - DNA, 20 bp, synthetic construct
  misc_feature 1..20: note = chemically synthesized
  source 1..20: mol_type = other DNA
cttagaaggaatatctccat

SEQ ID NO: 36936 - DNA, 20 bp, synthetic construct
  misc_feature 1..20: note = chemically synthesized
  source 1..20: mol_type = other DNA
ctccataggtctcatgccac

SEQ ID NO: 36937 - DNA, 20 bp, synthetic construct
  misc_feature 1..20: note = chemically synthesized
  source 1..20: mol_type = other DNA
gtctcatgccactggaaccc

SEQ ID NO: 36938 - DNA, 20 bp, synthetic construct
  misc_feature 1..20: note = chemically synthesized
  source 1..20: mol_type = other DNA
ggaaccctagaaattttacc

SEQ ID NO: 36939 - DNA, 20 bp, synthetic construct
  misc_feature 1..20: note = chemically synthesized
  source 1..20: mol_type = other DNA
gaaccctagaaattttaccg

SEQ ID NO: 36940 - DNA, 20 bp, synthetic construct
  misc_feature 1..20: note = chemically synthesized
  source 1..20: mol_type = other DNA
ccctagaaattttaccgagg

SEQ ID NO: 36941 - DNA, 20 bp, synthetic construct
  misc_feature 1..20: note = chemically synthesized
  source 1..20: mol_type = other DNA
agaaattttaccgaggtaga

SEQ ID NO: 36942 - DNA, 20 bp, synthetic construct
  misc_feature 1..20: note = chemically synthesized
  source 1..20: mol_type = other DNA
ggtagaaagtccctaaattt

SEQ ID NO: 36943 - DNA, 20 bp, synthetic construct
  misc_feature 1..20: note = chemically synthesized
  source 1..20: mol_type = other DNA
gaaagtccctaaattttagc

SEQ ID NO: 36944 - DNA, 20 bp, synthetic construct
  misc_feature 1..20: note = chemically synthesized
  source 1..20: mol_type = other DNA
tggatttatttcccatcctc

SEQ ID NO: 36945 - DNA, 20 bp, synthetic construct
  misc_feature 1..20: note = chemically synthesized
  source 1..20: mol_type = other DNA
catacaaatgtctcaccaat

SEQ ID NO: 36946 - DNA, 20 bp, synthetic construct
  misc_feature 1..20: note = chemically synthesized
  source 1..20: mol_type = other DNA
aaatgtctcaccaataagtt

SEQ ID NO: 36947 - DNA, 20 bp, synthetic construct
  misc_feature 1..20: note = chemically synthesized
  source 1..20: mol_type = other DNA
tcataatgtcatgaatgtaa

SEQ ID NO: 36948 - DNA, 20 bp, synthetic construct
  misc_feature 1..20: note = chemically synthesized
  source 1..20: mol_type = other DNA
atgtcatgaatgtaatggac

SEQ ID NO: 36949 - DNA, 20 bp, synthetic construct
  misc_feature 1..20: note = chemically synthesized
  source 1..20: mol_type = other DNA
tggaccagtgttatatctcg

SEQ ID NO: 36950 - DNA, 20 bp, synthetic construct
  misc_feature 1..20: note = chemically synthesized
  source 1..20: mol_type = other DNA
accagtgttatatctcgtgg

SEQ ID NO: 36951 - DNA, 20 bp, synthetic construct
  misc_feature 1..20: note = chemically synthesized
  source 1..20: mol_type = other DNA
ttatatctcgtggaagtgaa

SEQ ID NO: 36952 - DNA, 20 bp, synthetic construct
  misc_feature 1..20: note = chemically synthesized
  source 1..20: mol_type = other DNA
atctcgtggaagtgaaaagc

SEQ ID NO: 36953 - DNA, 20 bp, synthetic construct
  misc_feature 1..20: note = chemically synthesized
  source 1..20: mol_type = other DNA
cgtggaagtgaaaagcgagc

SEQ ID NO: 36954 - DNA, 20 bp, synthetic construct
  misc_feature 1..20: note = chemically synthesized
  source 1..20: mol_type = other DNA
gtggaagtgaaaagcgagca

SEQ ID NO: 36955 - DNA, 20 bp, synthetic construct
  misc_feature 1..20: note = chemically synthesized
  source 1..20: mol_type = other DNA
cgagcaaggtctctccaaat

SEQ ID NO: 36956 - DNA, 20 bp, synthetic construct
  misc_feature 1..20: note = chemically synthesized
  source 1..20: mol_type = other DNA
ccaaataagattatgacaca

SEQ ID NO: 36957 - DNA, 20 bp, synthetic construct
  misc_feature 1..20: note = chemically synthesized
  source 1..20: mol_type = other DNA
ataagattatgacacaaagc

SEQ ID NO: 36958 - DNA, 20 bp, synthetic construct
  misc_feature 1..20: note = chemically synthesized
  source 1..20: mol_type = other DNA
aagattatgacacaaagctg

SEQ ID NO: 36959 - DNA, 20 bp, synthetic construct
  misc_feature 1..20: note = chemically synthesized
  source 1..20: mol_type = other DNA
gattatgacacaaagctgga

SEQ ID NO: 36960 - DNA, 20 bp, synthetic construct
  misc_feature 1..20: note = chemically synthesized
  source 1..20: mol_type = other DNA
tggagagttgatacacccct

SEQ ID NO: 36961 - DNA, 20 bp, synthetic construct
  misc_feature 1..20: note = chemically synthesized
  source 1..20: mol_type = other DNA
ggagagttgatacacccctg

SEQ ID NO: 36962 - DNA, 20 bp, synthetic construct
  misc_feature 1..20: note = chemically synthesized
  source 1..20: mol_type = other DNA
gagttgatacacccctgagg

SEQ ID NO: 36963 - DNA, 20 bp, synthetic construct
  misc_feature 1..20: note = chemically synthesized
  source 1..20: mol_type = other DNA
agttgatacacccctgaggt

SEQ ID NO: 36964 - DNA, 20 bp, synthetic construct
  misc_feature 1..20: note = chemically synthesized
  source 1..20: mol_type = other DNA
gttgatacacccctgaggta

SEQ ID NO: 36965 - DNA, 20 bp, synthetic construct
  misc_feature 1..20: note = chemically synthesized
  source 1..20: mol_type = other DNA
gatacacccctgaggtaggg

SEQ ID NO: 36966 - DNA, 20 bp, synthetic construct
  misc_feature 1..20: note = chemically synthesized
  source 1..20: mol_type = other DNA
acccctgaggtagggtggta

SEQ ID NO: 36967 - DNA, 20 bp, synthetic construct
  misc_feature 1..20: note = chemically synthesized
  source 1..20: mol_type = other DNA
cccctgaggtagggtggtaa

SEQ ID NO: 36968 - DNA, 20 bp, synthetic construct
  misc_feature 1..20: note = chemically synthesized
  source 1..20: mol_type = other DNA
gggtggtaaaggtataatgc

SEQ ID NO: 36969 - DNA, 20 bp, synthetic construct
  misc_feature 1..20: note = chemically synthesized
  source 1..20: mol_type = other DNA
aggtataatgctggccttgt

SEQ ID NO: 36970 - DNA, 20 bp, synthetic construct
  misc_feature 1..20: note = chemically synthesized
  source 1..20: mol_type = other DNA
aatgctggccttgtcagctg

SEQ ID NO: 36971 - DNA, 20 bp, synthetic construct
  misc_feature 1..20: note = chemically synthesized
  source 1..20: mol_type = other DNA
atgctggccttgtcagctga

SEQ ID NO: 36972 - DNA, 20 bp, synthetic construct
  misc_feature 1..20: note = chemically synthesized
  source 1..20: mol_type = other DNA
agctgaaggcaaattgcttc

SEQ ID NO: 36973 - DNA, 20 bp, synthetic construct
  misc_feature 1..20: note = chemically synthesized
  source 1..20: mol_type = other DNA
tgaaggcaaattgcttctgg

SEQ ID NO: 36974 - DNA, 20 bp, synthetic construct
  misc_feature 1..20: note = chemically synthesized
  source 1..20: mol_type = other DNA
gaaggcaaattgcttctggt

SEQ ID NO: 36975 - DNA, 20 bp, synthetic construct
  misc_feature 1..20: note = chemically synthesized
  source 1..20: mol_type = other DNA
attgcttctggtgggtctta

SEQ ID NO: 36976 - DNA, 20 bp, synthetic construct
  misc_feature 1..20: note = chemically synthesized
  source 1..20: mol_type = other DNA
cttctggtgggtcttatgga

SEQ ID NO: 36977 - DNA, 20 bp, synthetic construct
  misc_feature 1..20: note = chemically synthesized
  source 1..20: mol_type = other DNA
ttctggtgggtcttatggac

SEQ ID NO: 36978 - DNA, 20 bp, synthetic construct
  misc_feature 1..20: note = chemically synthesized
  source 1..20: mol_type = other DNA
gtgggtcttatggacaggaa

SEQ ID NO: 36979 - DNA, 20 bp, synthetic construct
  misc_feature 1..20: note = chemically synthesized
  source 1..20: mol_type = other DNA
gggtcttatggacaggaatg

SEQ ID NO: 36980 - DNA, 20 bp, synthetic construct
  misc_feature 1..20: note = chemically synthesized
  source 1..20: mol_type = other DNA
tatggacaggaatggagaaa

SEQ ID NO: 36981 - DNA, 20 bp, synthetic construct
  misc_feature 1..20: note = chemically synthesized
  source 1..20: mol_type = other DNA
tggagaaaaagccacttgcc

SEQ ID NO: 36982 - DNA, 20 bp, synthetic construct
  misc_feature 1..20: note = chemically synthesized
  source 1..20: mol_type = other DNA
aaagccacttgccaagccaa

SEQ ID NO: 36983 - DNA, 20 bp, synthetic construct
  misc_feature 1..20: note = chemically synthesized
  source 1..20: mol_type = other DNA
ccaagccaatggctgcatac

SEQ ID NO: 36984 - DNA, 20 bp, synthetic construct
  misc_feature 1..20: note = chemically synthesized
  source 1..20: mol_type = other DNA
caagccaatggctgcatacc

SEQ ID NO: 36985 - DNA, 20 bp, synthetic construct
  misc_feature 1..20: note = chemically synthesized
  source 1..20: mol_type = other DNA
aatggctgcataccaggcac

SEQ ID NO: 36986 - DNA, 20 bp, synthetic construct
  misc_feature 1..20: note = chemically synthesized
  source 1..20: mol_type = other DNA
atggctgcataccaggcacc

SEQ ID NO: 36987 - DNA, 20 bp, synthetic construct
  misc_feature 1..20: note = chemically synthesized
  source 1..20: mol_type = other DNA
ggctgcataccaggcaccag

SEQ ID NO: 36988 - DNA, 20 bp, synthetic construct
  misc_feature 1..20: note = chemically synthesized
  source 1..20: mol_type = other DNA
ggagatgtgttaatttgctc

SEQ ID NO: 36989 - DNA, 20 bp, synthetic construct
  misc_feature 1..20: note = chemically synthesized
  source 1..20: mol_type = other DNA
tcaagcaacaaaaccacaac

SEQ ID NO: 36990 - DNA, 20 bp, synthetic construct
  misc_feature 1..20: note = chemically synthesized
  source 1..20: mol_type = other DNA
agcaacaaaaccacaactgg

SEQ ID NO: 36991 - DNA, 20 bp, synthetic construct
  misc_feature 1..20: note = chemically synthesized
  source 1..20: mol_type = other DNA
caacaaaaccacaactggta

SEQ ID NO: 36992 - DNA, 20 bp, synthetic construct
  misc_feature 1..20: note = chemically synthesized
  source 1..20: mol_type = other DNA
caaaaccacaactggtagag

SEQ ID NO: 36993 - DNA, 20 bp, synthetic construct
  misc_feature 1..20: note = chemically synthesized
  source 1..20: mol_type = other DNA
actggtagagcagctgcaat

SEQ ID NO: 36994 - DNA, 20 bp, synthetic construct
  misc_feature 1..20: note = chemically synthesized
  source 1..20: mol_type = other DNA
tggtagagcagctgcaattg

SEQ ID NO: 36995 - DNA, 20 bp, synthetic construct
  misc_feature 1..20: note = chemically synthesized
  source 1..20: mol_type = other DNA
ctgcaattggagtcaccact

SEQ ID NO: 36996 - DNA, 20 bp, synthetic construct
  misc_feature 1..20: note = chemically synthesized
  source 1..20: mol_type = other DNA
attggagtcaccacttggtt

SEQ ID NO: 36997 - DNA, 20 bp, synthetic construct
  misc_feature 1..20: note = chemically synthesized
  source 1..20: mol_type = other DNA
ataatccaccatcattttcc

SEQ ID NO: 36998 - DNA, 20 bp, synthetic construct
  misc_feature 1..20: note = chemically synthesized
  source 1..20: mol_type = other DNA
agatccatctgtcctctgca

SEQ ID NO: 36999 - DNA, 20 bp, synthetic construct
  misc_feature 1..20: note = chemically synthesized
  source 1..20: mol_type = other DNA
gatccatctgtcctctgcac

SEQ ID NO: 37000 - DNA, 20 bp, synthetic construct
  misc_feature 1..20: note = chemically synthesized
  source 1..20: mol_type = other DNA
tgtcctctgcacaggtcaaa

SEQ ID NO: 37001 - DNA, 20 bp, synthetic construct
  misc_feature 1..20: note = chemically synthesized
  source 1..20: mol_type = other DNA
gtcctctgcacaggtcaaat

SEQ ID NO: 37002 - DNA, 20 bp, synthetic construct
  misc_feature 1..20: note = chemically synthesized
  source 1..20: mol_type = other DNA
cctctgcacaggtcaaatgg

SEQ ID NO: 37003 - DNA, 20 bp, synthetic construct
  misc_feature 1..20: note = chemically synthesized
  source 1..20: mol_type = other DNA
tctgcacaggtcaaatggga

SEQ ID NO: 37004 - DNA, 20 bp, synthetic construct
  misc_feature 1..20: note = chemically synthesized
  source 1..20: mol_type = other DNA
ggtcaaatgggagagttgaa

SEQ ID NO: 37005 - DNA, 20 bp, synthetic construct
  misc_feature 1..20: note = chemically synthesized
  source 1..20: mol_type = other DNA
gtcaaatgggagagttgaac

SEQ ID NO: 37006 - DNA, 20 bp, synthetic construct
  misc_feature 1..20: note = chemically synthesized
  source 1..20: mol_type = other DNA
tcaaatgggagagttgaaca

SEQ ID NO: 37007 - DNA, 20 bp, synthetic construct
  misc_feature 1..20: note = chemically synthesized
  source 1..20: mol_type = other DNA
gggagagttgaacagggatg

SEQ ID NO: 37008 - DNA, 20 bp, synthetic construct
  misc_feature 1..20: note = chemically synthesized
  source 1..20: mol_type = other DNA
agagttgaacagggatgtgg

SEQ ID NO: 37009 - DNA, 20 bp, synthetic construct
  misc_feature 1..20: note = chemically synthesized
  source 1..20: mol_type = other DNA
gagttgaacagggatgtggt

SEQ ID NO: 37010 - DNA, 20 bp, synthetic construct
  misc_feature 1..20: note = chemically synthesized
  source 1..20: mol_type = other DNA
tcaccacccctgcgtctttc

SEQ ID NO: 37011 - DNA, 20 bp, synthetic construct
  misc_feature 1..20: note = chemically synthesized
  source 1..20: mol_type = other DNA
tgcgtctttcaagtccttga

SEQ ID NO: 37012 - DNA, 20 bp, synthetic construct
  misc_feature 1..20: note = chemically synthesized
  source 1..20: mol_type = other DNA
gatggtgacactaatcactt

SEQ ID NO: 37013 - DNA, 20 bp, synthetic construct
  misc_feature 1..20: note = chemically synthesized
  source 1..20: mol_type = other DNA
actaatcacttcagtccctc

SEQ ID NO: 37014 - DNA, 20 bp, synthetic construct
  misc_feature 1..20: note = chemically synthesized
  source 1..20: mol_type = other DNA
ctaatcacttcagtccctcc

SEQ ID NO: 37015 - DNA, 20 bp, synthetic construct
  misc_feature 1..20: note = chemically synthesized
  source 1..20: mol_type = other DNA
taatcacttcagtccctcca

SEQ ID NO: 37016 - DNA, 20 bp, synthetic construct
  misc_feature 1..20: note = chemically synthesized
  source 1..20: mol_type = other DNA
cacttcagtccctccaggga

SEQ ID NO: 37017 - DNA, 20 bp, synthetic construct
  misc_feature 1..20: note = chemically synthesized
  source 1..20: mol_type = other DNA
acttcagtccctccagggat

SEQ ID NO: 37018 - DNA, 20 bp, synthetic construct
  misc_feature 1..20: note = chemically synthesized
  source 1..20: mol_type = other DNA
ttttgatttttttatttttc

SEQ ID NO: 37019 - DNA, 20 bp, synthetic construct
  misc_feature 1..20: note = chemically synthesized
  source 1..20: mol_type = other DNA
tttgatttttttatttttct

SEQ ID NO: 37020 - DNA, 20 bp, synthetic construct
  misc_feature 1..20: note = chemically synthesized
  source 1..20: mol_type = other DNA
gatttttttatttttctagg

SEQ ID NO: 37021 - DNA, 20 bp, synthetic construct
  misc_feature 1..20: note = chemically synthesized
  source 1..20: mol_type = other DNA
tttttttatttttctaggta

SEQ ID NO: 37022 - DNA, 20 bp, synthetic construct
  misc_feature 1..20: note = chemically synthesized
  source 1..20: mol_type = other DNA
tttatttttctaggtagaga

SEQ ID NO: 37023 - DNA, 20 bp, synthetic construct
  misc_feature 1..20: note = chemically synthesized
  source 1..20: mol_type = other DNA
ctaggtagagacagctctaa

SEQ ID NO: 37024 - DNA, 20 bp, synthetic construct
  misc_feature 1..20: note = chemically synthesized
  source 1..20: mol_type = other DNA
cagctctaatggcttctgtt

SEQ ID NO: 37025 - DNA, 20 bp, synthetic construct
  misc_feature 1..20: note = chemically synthesized
  source 1..20: mol_type = other DNA
tttggcctttcccaccataa

SEQ ID NO: 37026 - DNA, 20 bp, synthetic construct
  misc_feature 1..20: note = chemically synthesized
  source 1..20: mol_type = other DNA
cataatagccctcatcctac

SEQ ID NO: 37027 - DNA, 20 bp, synthetic construct
  misc_feature 1..20: note = chemically synthesized
  source 1..20: mol_type = other DNA
atagccctcatcctaccagt

SEQ ID NO: 37028 - DNA, 20 bp, synthetic construct
  misc_feature 1..20: note = chemically synthesized
  source 1..20: mol_type = other DNA
tagccctcatcctaccagtc

SEQ ID NO: 37029 - DNA, 20 bp, synthetic construct
  misc_feature 1..20: note = chemically synthesized
  source 1..20: mol_type = other DNA
agccctcatcctaccagtca

SEQ ID NO: 37030 - DNA, 20 bp, synthetic construct
  misc_feature 1..20: note = chemically synthesized
  source 1..20: mol_type = other DNA
ccctcatcctaccagtcagg

SEQ ID NO: 37031 - DNA, 20 bp, synthetic construct
  misc_feature 1..20: note = chemically synthesized
  source 1..20: mol_type = other DNA
taccagtcagggagccaatg

SEQ ID NO: 37032 - DNA, 20 bp, synthetic construct
  misc_feature 1..20: note = chemically synthesized
  source 1..20: mol_type = other DNA
agccaatgtggcatttctgc

SEQ ID NO: 37033 - DNA, 20 bp, synthetic construct
  misc_feature 1..20: note = chemically synthesized
  source 1..20: mol_type = other DNA
tggcatttctgccagctaat

SEQ ID NO: 37034 - DNA, 20 bp, synthetic construct
  misc_feature 1..20: note = chemically synthesized
  source 1..20: mol_type = other DNA
tctatacaaattatgcattt

SEQ ID NO: 37035 - DNA, 20 bp, synthetic construct
  misc_feature 1..20: note = chemically synthesized
  source 1..20: mol_type = other DNA
caaattatgcattttggcac

SEQ ID NO: 37036 - DNA, 20 bp, synthetic construct
  misc_feature 1..20: note = chemically synthesized
  source 1..20: mol_type = other DNA
aaattatgcattttggcact

SEQ ID NO: 37037 - DNA, 20 bp, synthetic construct
  misc_feature 1..20: note = chemically synthesized
  source 1..20: mol_type = other DNA
tttggcactgggaaaatgac

SEQ ID NO: 37038 - DNA, 20 bp, synthetic construct
  misc_feature 1..20: note = chemically synthesized
  source 1..20: mol_type = other DNA
tggcactgggaaaatgacca

SEQ ID NO: 37039 - DNA, 20 bp, synthetic construct
  misc_feature 1..20: note = chemically synthesized
  source 1..20: mol_type = other DNA
ggcactgggaaaatgaccag

SEQ ID NO: 37040 - DNA, 20 bp, synthetic construct
  misc_feature 1..20: note = chemically synthesized
  source 1..20: mol_type = other DNA
tgggaaaatgaccagaggat

SEQ ID NO: 37041 - DNA, 20 bp, synthetic construct
  misc_feature 1..20: note = chemically synthesized
  source 1..20: mol_type = other DNA
aaatgaccagaggataagtc

SEQ ID NO: 37042 - DNA, 20 bp, synthetic construct
  misc_feature 1..20: note = chemically synthesized
  source 1..20: mol_type = other DNA
aatgaccagaggataagtcc

SEQ ID NO: 37043 - DNA, 20 bp, synthetic construct
  misc_feature 1..20: note = chemically synthesized
  source 1..20: mol_type = other DNA
atgaccagaggataagtcca

SEQ ID NO: 37044 - DNA, 20 bp, synthetic construct
  misc_feature 1..20: note = chemically synthesized
  source 1..20: mol_type = other DNA
ggataagtccagggacccac

SEQ ID NO: 37045 - DNA, 20 bp, synthetic construct
  misc_feature 1..20: note = chemically synthesized
  source 1..20: mol_type = other DNA
ggacccactggaaccactgt

SEQ ID NO: 37046 - DNA, 20 bp, synthetic construct
  misc_feature 1..20: note = chemically synthesized
  source 1..20: mol_type = other DNA
ccactggaaccactgtaagt

SEQ ID NO: 37047 - DNA, 20 bp, synthetic construct
  misc_feature 1..20: note = chemically synthesized
  source 1..20: mol_type = other DNA
aaccactgtaagtcagaaat

SEQ ID NO: 37048 - DNA, 20 bp, synthetic construct
  misc_feature 1..20: note = chemically synthesized
  source 1..20: mol_type = other DNA
attaattacctaacctccat

SEQ ID NO: 37049 - DNA, 20 bp, synthetic construct
  misc_feature 1..20: note = chemically synthesized
  source 1..20: mol_type = other DNA
ccataagcccctactttaac

SEQ ID NO: 37050 - DNA, 20 bp, synthetic construct
  misc_feature 1..20: note = chemically synthesized
  source 1..20: mol_type = other DNA
cataagcccctactttaact

SEQ ID NO: 37051 - DNA, 20 bp, synthetic construct
  misc_feature 1..20: note = chemically synthesized
  source 1..20: mol_type = other DNA
ataagcccctactttaactg

SEQ ID NO: 37052 - DNA, 20 bp, synthetic construct
  misc_feature 1..20: note = chemically synthesized
  source 1..20: mol_type = other DNA
ggggaaccacaataacgttt

SEQ ID NO: 37053 - DNA, 20 bp, synthetic construct
  misc_feature 1..20: note = chemically synthesized
  source 1..20: mol_type = other DNA
gggaaccacaataacgtttt

SEQ ID NO: 37054 - DNA, 20 bp, synthetic construct
  misc_feature 1..20: note = chemically synthesized
  source 1..20: mol_type = other DNA
caataacgttttgggtaccc

SEQ ID NO: 37055 - DNA, 20 bp, synthetic construct
  misc_feature 1..20: note = chemically synthesized
  source 1..20: mol_type = other DNA
gggtaccctggaatcaacgt

SEQ ID NO: 37056 - DNA, 20 bp, synthetic construct
  misc_feature 1..20: note = chemically synthesized
  source 1..20: mol_type = other DNA
ccctggaatcaacgtcagct

SEQ ID NO: 37057 - DNA, 20 bp, synthetic construct
  misc_feature 1..20: note = chemically synthesized
  source 1..20: mol_type = other DNA
ctggaatcaacgtcagctca

SEQ ID NO: 37058 - DNA, 20 bp, synthetic construct
  misc_feature 1..20: note = chemically synthesized
  source 1..20: mol_type = other DNA
aatcaacgtcagctcagagc

SEQ ID NO: 37059 - DNA, 20 bp, synthetic construct
  misc_feature 1..20: note = chemically synthesized
  source 1..20: mol_type = other DNA
gtcagctcagagccagtgtc

SEQ ID NO: 37060 - DNA, 20 bp, synthetic construct
  misc_feature 1..20: note = chemically synthesized
  source 1..20: mol_type = other DNA
tctcattacttccctttctc

SEQ ID NO: 37061 - DNA, 20 bp, synthetic construct
  misc_feature 1..20: note = chemically synthesized
  source 1..20: mol_type = other DNA
ttccctttctccagtacaca

SEQ ID NO: 37062 - DNA, 20 bp, synthetic construct
  misc_feature 1..20: note = chemically synthesized
  source 1..20: mol_type = other DNA
tccagtacacacagttaccc

SEQ ID NO: 37063 - DNA, 20 bp, synthetic construct
  misc_feature 1..20: note = chemically synthesized
  source 1..20: mol_type = other DNA
acacacagttaccctggtaa

SEQ ID NO: 37064 - DNA, 20 bp, synthetic construct
  misc_feature 1..20: note = chemically synthesized
  source 1..20: mol_type = other DNA
cacacagttaccctggtaaa

SEQ ID NO: 37065 - DNA, 20 bp, synthetic construct
  misc_feature 1..20: note = chemically synthesized
  source 1..20: mol_type = other DNA
cagttaccctggtaaaaggc

SEQ ID NO: 37066 - DNA, 20 bp, synthetic construct
  misc_feature 1..20: note = chemically synthesized
  source 1..20: mol_type = other DNA
gttaccctggtaaaaggcca

SEQ ID NO: 37067 - DNA, 20 bp, synthetic construct
  misc_feature 1..20: note = chemically synthesized
  source 1..20: mol_type = other DNA
ttaccctggtaaaaggccag

SEQ ID NO: 37068 - DNA, 20 bp, synthetic construct
  misc_feature 1..20: note = chemically synthesized
  source 1..20: mol_type = other DNA
taaaaggccagaggtctcct

SEQ ID NO: 37069 - DNA, 20 bp, synthetic construct
  misc_feature 1..20: note = chemically synthesized
  source 1..20: mol_type = other DNA
aaaaggccagaggtctcctt

SEQ ID NO: 37070 - DNA, 20 bp, synthetic construct
  misc_feature 1..20: note = chemically synthesized
  source 1..20: mol_type = other DNA
aaaggccagaggtctcctta

SEQ ID NO: 37071 - DNA, 20 bp, synthetic construct
  misc_feature 1..20: note = chemically synthesized
  source 1..20: mol_type = other DNA
ggccagaggtctccttaggg

SEQ ID NO: 37072 - DNA, 20 bp, synthetic construct
  misc_feature 1..20: note = chemically synthesized
  source 1..20: mol_type = other DNA
gccagaggtctccttaggga

SEQ ID NO: 37073 - DNA, 20 bp, synthetic construct
  misc_feature 1..20: note = chemically synthesized
  source 1..20: mol_type = other DNA
gaggtctccttagggaagga

SEQ ID NO: 37074 - DNA, 20 bp, synthetic construct
  misc_feature 1..20: note = chemically synthesized
  source 1..20: mol_type = other DNA
aggtctccttagggaaggat

SEQ ID NO: 37075 - DNA, 20 bp, synthetic construct
  misc_feature 1..20: note = chemically synthesized
  source 1..20: mol_type = other DNA
gtctccttagggaaggatgg

SEQ ID NO: 37076 - DNA, 20 bp, synthetic construct
  misc_feature 1..20: note = chemically synthesized
  source 1..20: mol_type = other DNA
ccttagggaaggatgggaga

SEQ ID NO: 37077 - DNA, 20 bp, synthetic construct
  misc_feature 1..20: note = chemically synthesized
  source 1..20: mol_type = other DNA
ttagggaaggatgggagaaa

SEQ ID NO: 37078 - DNA, 20 bp, synthetic construct
  misc_feature 1..20: note = chemically synthesized
  source 1..20: mol_type = other DNA
aaggatgggagaaagagtaa

SEQ ID NO: 37079 - DNA, 20 bp, synthetic construct
  misc_feature 1..20: note = chemically synthesized
  source 1..20: mol_type = other DNA
gggagaaagagtaacagcat

SEQ ID NO: 37080 - DNA, 20 bp, synthetic construct
  misc_feature 1..20: note = chemically synthesized
  source 1..20: mol_type = other DNA
agagtaacagcataagttgt

SEQ ID NO: 37081 - DNA, 20 bp, synthetic construct
  misc_feature 1..20: note = chemically synthesized
  source 1..20: mol_type = other DNA
gtaacagcataagttgtcag

SEQ ID NO: 37082 - DNA, 20 bp, synthetic construct
  misc_feature 1..20: note = chemically synthesized
  source 1..20: mol_type = other DNA
agcataagttgtcagtagcc

SEQ ID NO: 37083 - DNA, 20 bp, synthetic construct
  misc_feature 1..20: note = chemically synthesized
  source 1..20: mol_type = other DNA
ataagttgtcagtagcctag

SEQ ID NO: 37084 - DNA, 20 bp, synthetic construct
  misc_feature 1..20: note = chemically synthesized
  source 1..20: mol_type = other DNA
gcctagtggtgtccttcctc

SEQ ID NO: 37085 - DNA, 20 bp, synthetic construct
  misc_feature 1..20: note = chemically synthesized
  source 1..20: mol_type = other DNA
cctagtggtgtccttcctca

SEQ ID NO: 37086 - DNA, 20 bp, synthetic construct
  misc_feature 1..20: note = chemically synthesized
  source 1..20: mol_type = other DNA
ctagtggtgtccttcctcaa

SEQ ID NO: 37087 - DNA, 20 bp, synthetic construct
  misc_feature 1..20: note = chemically synthesized
  source 1..20: mol_type = other DNA
tagtggtgtccttcctcaag

SEQ ID NO: 37088 - DNA, 20 bp, synthetic construct
  misc_feature 1..20: note = chemically synthesized
  source 1..20: mol_type = other DNA
tgtccttcctcaaggggatc

SEQ ID NO: 37089 - DNA, 20 bp, synthetic construct
  misc_feature 1..20: note = chemically synthesized
  source 1..20: mol_type = other DNA
gatccagcctccccttcatt

SEQ ID NO: 37090 - DNA, 20 bp, synthetic construct
  misc_feature 1..20: note = chemically synthesized
  source 1..20: mol_type = other DNA
ccagcctccccttcattcag

SEQ ID NO: 37091 - DNA, 20 bp, synthetic construct
  misc_feature 1..20: note = chemically synthesized
  source 1..20: mol_type = other DNA
cagcctccccttcattcagt

SEQ ID NO: 37092 - DNA, 20 bp, synthetic construct
  misc_feature 1..20: note = chemically synthesized
  source 1..20: mol_type = other DNA
ccccttcattcagtgggttc

SEQ ID NO: 37093 - DNA, 20 bp, synthetic construct
  misc_feature 1..20: note = chemically synthesized
  source 1..20: mol_type = other DNA
agtgggttctggaactgtaa

SEQ ID NO: 37094 - DNA, 20 bp, synthetic construct
  misc_feature 1..20: note = chemically synthesized
  source 1..20: mol_type = other DNA
gtgggttctggaactgtaac

SEQ ID NO: 37095 - DNA, 20 bp, synthetic construct
  misc_feature 1..20: note = chemically synthesized
  source 1..20: mol_type = other DNA
tctggaactgtaacaggttc

SEQ ID NO: 37096 - DNA, 20 bp, synthetic construct
  misc_feature 1..20: note = chemically synthesized
  source 1..20: mol_type = other DNA
aactgtaacaggttcgagtc

SEQ ID NO: 37097 - DNA, 20 bp, synthetic construct
  misc_feature 1..20: note = chemically synthesized
  source 1..20: mol_type = other DNA
ttcgagtctggaaattgatt

SEQ ID NO: 37098 - DNA, 20 bp, synthetic construct
  misc_feature 1..20: note = chemically synthesized
  source 1..20: mol_type = other DNA
tcgagtctggaaattgattg

SEQ ID NO: 37099 - DNA, 20 bp, synthetic construct
  misc_feature 1..20: note = chemically synthesized
  source 1..20: mol_type = other DNA
cgagtctggaaattgattga

SEQ ID NO: 37100 - DNA, 20 bp, synthetic construct
  misc_feature 1..20: note = chemically synthesized
  source 1..20: mol_type = other DNA
gattctctgtttttataatt

SEQ ID NO: 37101 - DNA, 20 bp, synthetic construct
  misc_feature 1..20: note = chemically synthesized
  source 1..20: mol_type = other DNA
tctgtttttataattcagat

SEQ ID NO: 37102 - DNA, 20 bp, synthetic construct
  misc_feature 1..20: note = chemically synthesized
  source 1..20: mol_type = other DNA
ttataattcagattagtctt

SEQ ID NO: 37103 - DNA, 20 bp, synthetic construct
  misc_feature 1..20: note = chemically synthesized
  source 1..20: mol_type = other DNA
agtctttagtccattctacc

SEQ ID NO: 37104 - DNA, 20 bp, synthetic construct
  misc_feature 1..20: note = chemically synthesized
  source 1..20: mol_type = other DNA
ctttagtccattctacctgg

SEQ ID NO: 37105 - DNA, 20 bp, synthetic construct
  misc_feature 1..20: note = chemically synthesized
  source 1..20: mol_type = other DNA
gttttttgtttatataaatc

SEQ ID NO: 37106 - DNA, 20 bp, synthetic construct
  misc_feature 1..20: note = chemically synthesized
  source 1..20: mol_type = other DNA
ttttgtttatataaatcaag

SEQ ID NO: 37107 - DNA, 20 bp, synthetic construct
  misc_feature 1..20: note = chemically synthesized
  source 1..20: mol_type = other DNA
tttgtttatataaatcaagt

SEQ ID NO: 37108 - DNA, 20 bp, synthetic construct
  misc_feature 1..20: note = chemically synthesized
  source 1..20: mol_type = other DNA
atataaatcaagtaggaata

SEQ ID NO: 37109 - DNA, 20 bp, synthetic construct
  misc_feature 1..20: note = chemically synthesized
  source 1..20: mol_type = other DNA
taaatcaagtaggaatacag

SEQ ID NO: 37110 - DNA, 20 bp, synthetic construct
  misc_feature 1..20: note = chemically synthesized
  source 1..20: mol_type = other DNA
aaatcaagtaggaatacagt

SEQ ID NO: 37111 - DNA, 20 bp, synthetic construct
  misc_feature 1..20: note = chemically synthesized
  source 1..20: mol_type = other DNA
tttcccatcaatttcacttc

SEQ ID NO: 37112 - DNA, 20 bp, synthetic construct
  misc_feature 1..20: note = chemically synthesized
  source 1..20: mol_type = other DNA
ttcccatcaatttcacttct

SEQ ID NO: 37113 - DNA, 20 bp, synthetic construct
  misc_feature 1..20: note = chemically synthesized
  source 1..20: mol_type = other DNA
ctaggaacaccatgattaat

SEQ ID NO: 37114 - DNA, 20 bp, synthetic construct
  misc_feature 1..20: note = chemically synthesized
  source 1..20: mol_type = other DNA
catgattaattagccaatgc

SEQ ID NO: 37115 - DNA, 20 bp, synthetic construct
  misc_feature 1..20: note = chemically synthesized
  source 1..20: mol_type = other DNA
tgattaattagccaatgcca

SEQ ID NO: 37116 - DNA, 20 bp, synthetic construct
  misc_feature 1..20: note = chemically synthesized
  source 1..20: mol_type = other DNA
ccaatgccagagctctacat

SEQ ID NO: 37117 - DNA, 20 bp, synthetic construct
  misc_feature 1..20: note = chemically synthesized
  source 1..20: mol_type = other DNA
tgccagagctctacatgagt

SEQ ID NO: 37118 - DNA, 20 bp, synthetic construct
  misc_feature 1..20: note = chemically synthesized
  source 1..20: mol_type = other DNA
catgagtcagactattctga

SEQ ID NO: 37119 - DNA, 20 bp, synthetic construct
  misc_feature 1..20: note = chemically synthesized
  source 1..20: mol_type = other DNA
tttgcctctgctgtctatta

SEQ ID NO: 37120 - DNA, 20 bp, synthetic construct
  misc_feature 1..20: note = chemically synthesized
  source 1..20: mol_type = other DNA
gcctctgctgtctattatgg

SEQ ID NO: 37121 - DNA, 20 bp, synthetic construct
  misc_feature 1..20: note = chemically synthesized
  source 1..20: mol_type = other DNA
tatgcccaccttgcctttga

SEQ ID NO: 37122 - DNA, 20 bp, synthetic construct
  misc_feature 1..20: note = chemically synthesized
  source 1..20: mol_type = other DNA
ccaccttgcctttgatggtt

SEQ ID NO: 37123 - DNA, 20 bp, synthetic construct
  misc_feature 1..20: note = chemically synthesized
  source 1..20: mol_type = other DNA
gatggttcagtgccaacact

SEQ ID NO: 37124 - DNA, 20 bp, synthetic construct
  misc_feature 1..20: note = chemically synthesized
  source 1..20: mol_type = other DNA
acacttggcccctgccacct

SEQ ID NO: 37125 - DNA, 20 bp, synthetic construct
  misc_feature 1..20: note = chemically synthesized
  source 1..20: mol_type = other DNA
cacttggcccctgccacctc

SEQ ID NO: 37126 - DNA, 20 bp, synthetic construct
  misc_feature 1..20: note = chemically synthesized
  source 1..20: mol_type = other DNA
cccattgtatttaaattttg

SEQ ID NO: 37127 - DNA, 20 bp, synthetic construct
  misc_feature 1..20: note = chemically synthesized
  source 1..20: mol_type = other DNA
tgtatttaaattttgtagtt

SEQ ID NO: 37128 - DNA, 20 bp, synthetic construct
  misc_feature 1..20: note = chemically synthesized
  source 1..20: mol_type = other DNA
attttgtagttgagtgactg

SEQ ID NO: 37129 - DNA, 20 bp, synthetic construct
  misc_feature 1..20: note = chemically synthesized
  source 1..20: mol_type = other DNA
gtgactgtggttcctactgt

SEQ ID NO: 37130 - DNA, 20 bp, synthetic construct
  misc_feature 1..20: note = chemically synthesized
  source 1..20: mol_type = other DNA
ctactgttagatctgacata

SEQ ID NO: 37131 - DNA, 20 bp, synthetic construct
  misc_feature 1..20: note = chemically synthesized
  source 1..20: mol_type = other DNA
actgttagatctgacataca

SEQ ID NO: 37132 - DNA, 20 bp, synthetic construct
  misc_feature 1..20: note = chemically synthesized
  source 1..20: mol_type = other DNA
gttagatctgacatacagag

SEQ ID NO: 37133 - DNA, 20 bp, synthetic construct
  misc_feature 1..20: note = chemically synthesized
  source 1..20: mol_type = other DNA
tagatctgacatacagagaa

SEQ ID NO: 37134 - DNA, 20 bp, synthetic construct
  misc_feature 1..20: note = chemically synthesized
  source 1..20: mol_type = other DNA
catacagagaagagcaatta

SEQ ID NO: 37135 - DNA, 20 bp, synthetic construct
  misc_feature 1..20: note = chemically synthesized
  source 1..20: mol_type = other DNA
atacagagaagagcaattac

SEQ ID NO: 37136 - DNA, 20 bp, synthetic construct
  misc_feature 1..20: note = chemically synthesized
  source 1..20: mol_type = other DNA
ttacgggctcttcaaaaata

SEQ ID NO: 37137 - DNA, 20 bp, synthetic construct
  misc_feature 1..20: note = chemically synthesized
  source 1..20: mol_type = other DNA
tacgggctcttcaaaaatac

SEQ ID NO: 37138 - DNA, 20 bp, synthetic construct
  misc_feature 1..20: note = chemically synthesized
  source 1..20: mol_type = other DNA
tctcacaaatctatttcaca

SEQ ID NO: 37139 - DNA, 20 bp, synthetic construct
  misc_feature 1..20: note = chemically synthesized
  source 1..20: mol_type = other DNA
aaatctatttcacaaagctt

SEQ ID NO: 37140 - DNA, 20 bp, synthetic construct
  misc_feature 1..20: note = chemically synthesized
  source 1..20: mol_type = other DNA
tatttcacaaagcttcggcc

SEQ ID NO: 37141 - DNA, 20 bp, synthetic construct
  misc_feature 1..20: note = chemically synthesized
  source 1..20: mol_type = other DNA
atttcacaaagcttcggcca

SEQ ID NO: 37142 - DNA, 20 bp, synthetic construct
  misc_feature 1..20: note = chemically synthesized
  source 1..20: mol_type = other DNA
tttcacaaagcttcggccaa

SEQ ID NO: 37143 - DNA, 20 bp, synthetic construct
  misc_feature 1..20: note = chemically synthesized
  source 1..20: mol_type = other DNA
tcggccaagggtgtatcttc

SEQ ID NO: 37144 - DNA, 20 bp, synthetic construct
  misc_feature 1..20: note = chemically synthesized
  source 1..20: mol_type = other DNA
gtgtatcttctggaccctcc

SEQ ID NO: 37145 - DNA, 20 bp, synthetic construct
  misc_feature 1..20: note = chemically synthesized
  source 1..20: mol_type = other DNA
atcttctggaccctcccagc

SEQ ID NO: 37146 - DNA, 20 bp, synthetic construct
  misc_feature 1..20: note = chemically synthesized
  source 1..20: mol_type = other DNA
tcttctggaccctcccagct

SEQ ID NO: 37147 - DNA, 20 bp, synthetic construct
  misc_feature 1..20: note = chemically synthesized
  source 1..20: mol_type = other DNA
tggaccctcccagctgggat

SEQ ID NO: 37148 - DNA, 20 bp, synthetic construct
  misc_feature 1..20: note = chemically synthesized
  source 1..20: mol_type = other DNA
accctcccagctgggatgag

SEQ ID NO: 37149 - DNA, 20 bp, synthetic construct
  misc_feature 1..20: note = chemically synthesized
  source 1..20: mol_type = other DNA
ccctcccagctgggatgagt

SEQ ID NO: 37150 - DNA, 20 bp, synthetic construct
  misc_feature 1..20: note = chemically synthesized
  source 1..20: mol_type = other DNA
agctgggatgagtaggtcta

SEQ ID NO: 37151 - DNA, 20 bp, synthetic construct
  misc_feature 1..20: note = chemically synthesized
  source 1..20: mol_type = other DNA
tccaccatcctaatctccct

SEQ ID NO: 37152 - DNA, 20 bp, synthetic construct
  misc_feature 1..20: note = chemically synthesized
  source 1..20: mol_type = other DNA
tcctaatctccctaagcctt

SEQ ID NO: 37153 - DNA, 20 bp, synthetic construct
  misc_feature 1..20: note = chemically synthesized
  source 1..20: mol_type = other DNA
cacttcctctacattaaacc

SEQ ID NO: 37154 - DNA, 20 bp, synthetic construct
  misc_feature 1..20: note = chemically synthesized
  source 1..20: mol_type = other DNA
acttcctctacattaaacca

SEQ ID NO: 37155 - DNA, 20 bp, synthetic construct
  misc_feature 1..20: note = chemically synthesized
  source 1..20: mol_type = other DNA
acattaaaccaaggcatttc

SEQ ID NO: 37156 - DNA, 20 bp, synthetic construct
  misc_feature 1..20: note = chemically synthesized
  source 1..20: mol_type = other DNA
catttccagctcactaacat

SEQ ID NO: 37157 - DNA, 20 bp, synthetic construct
  misc_feature 1..20: note = chemically synthesized
  source 1..20: mol_type = other DNA
ccatcttttaatccatattt

SEQ ID NO: 37158 - DNA, 20 bp, synthetic construct
  misc_feature 1..20: note = chemically synthesized
  source 1..20: mol_type = other DNA
aatccatatttcagctaacc

SEQ ID NO: 37159 - DNA, 20 bp, synthetic construct
  misc_feature 1..20: note = chemically synthesized
  source 1..20: mol_type = other DNA
aacttttttttttttttttt

SEQ ID NO: 37160 - DNA, 20 bp, synthetic construct
  misc_feature 1..20: note = chemically synthesized
  source 1..20: mol_type = other DNA
tttttttttttttttggaaa

SEQ ID NO: 37161 - DNA, 20 bp, synthetic construct
  misc_feature 1..20: note = chemically synthesized
  source 1..20: mol_type = other DNA
tttttttttttttggaaatg

SEQ ID NO: 37162 - DNA, 20 bp, synthetic construct
  misc_feature 1..20: note = chemically synthesized
  source 1..20: mol_type = other DNA
atggagtcttgctctgttac

SEQ ID NO: 37163 - DNA, 20 bp, synthetic construct
  misc_feature 1..20: note = chemically synthesized
  source 1..20: mol_type = other DNA
tggagtcttgctctgttacc

SEQ ID NO: 37164 - DNA, 20 bp, synthetic construct
  misc_feature 1..20: note = chemically synthesized
  source 1..20: mol_type = other DNA
gtcttgctctgttaccaggc

SEQ ID NO: 37165 - DNA, 20 bp, synthetic construct
  misc_feature 1..20: note = chemically synthesized
  source 1..20: mol_type = other DNA
tctgttaccaggctggaatg

SEQ ID NO: 37166 - DNA, 20 bp, synthetic construct
  misc_feature 1..20: note = chemically synthesized
  source 1..20: mol_type = other DNA
gttaccaggctggaatgcag

SEQ ID NO: 37167 - DNA, 20 bp, synthetic construct
  misc_feature 1..20: note = chemically synthesized
  source 1..20: mol_type = other DNA
ttaccaggctggaatgcagt

SEQ ID NO: 37168 - DNA, 20 bp, synthetic construct
  misc_feature 1..20: note = chemically synthesized
  source 1..20: mol_type = other DNA
taccaggctggaatgcagtg

SEQ ID NO: 37169 - DNA, 20 bp, synthetic construct
  misc_feature 1..20: note = chemically synthesized
  source 1..20: mol_type = other DNA
ggaatgcagtggggcgatct

SEQ ID NO: 37170 - DNA, 20 bp, synthetic construct
  misc_feature 1..20: note = chemically synthesized
  source 1..20: mol_type = other DNA
tcactgcaatctctgcctca

SEQ ID NO: 37171 - DNA, 20 bp, synthetic construct
  misc_feature 1..20: note = chemically synthesized
  source 1..20: mol_type = other DNA
cactgcaatctctgcctcac

SEQ ID NO: 37172 - DNA, 20 bp, synthetic construct
  misc_feature 1..20: note = chemically synthesized
  source 1..20: mol_type = other DNA
aatctctgcctcacaggttc

SEQ ID NO: 37173 - DNA, 20 bp, synthetic construct
  misc_feature 1..20: note = chemically synthesized
  source 1..20: mol_type = other DNA
ctctgcctcacaggttcaag

SEQ ID NO: 37174 - DNA, 20 bp, synthetic construct
  misc_feature 1..20: note = chemically synthesized
  source 1..20: mol_type = other DNA
ttcaagcagttctcttgcct

SEQ ID NO: 37175 - DNA, 20 bp, synthetic construct
  misc_feature 1..20: note = chemically synthesized
  source 1..20: mol_type = other DNA
ttctcttgcctcagcctccc

SEQ ID NO: 37176 - DNA, 20 bp, synthetic construct
  misc_feature 1..20: note = chemically synthesized
  source 1..20: mol_type = other DNA
tcttgcctcagcctcccaag

SEQ ID NO: 37177 - DNA, 20 bp, synthetic construct
  misc_feature 1..20: note = chemically synthesized
  source 1..20: mol_type = other DNA
cctcagcctcccaagtagat

SEQ ID NO: 37178 - DNA, 20 bp, synthetic construct
  misc_feature 1..20: note = chemically synthesized
  source 1..20: mol_type = other DNA
ctcccaagtagatgagatta

SEQ ID NO: 37179 - DNA, 20 bp, synthetic construct
  misc_feature 1..20: note = chemically synthesized
  source 1..20: mol_type = other DNA
cagttacgcatcaccatgcc

SEQ ID NO: 37180 - DNA, 20 bp, synthetic construct
  misc_feature 1..20: note = chemically synthesized
  source 1..20: mol_type = other DNA
ccagctaatttttgtatttt

SEQ ID NO: 37181 - DNA, 20 bp, synthetic construct
  misc_feature 1..20: note = chemically synthesized
  source 1..20: mol_type = other DNA
gctaatttttgtatttttag

SEQ ID NO: 37182 - DNA, 20 bp, synthetic construct
  misc_feature 1..20: note = chemically synthesized
  source 1..20: mol_type = other DNA
taatttttgtatttttagca

SEQ ID NO: 37183 - DNA, 20 bp, synthetic construct
  misc_feature 1..20: note = chemically synthesized
  source 1..20: mol_type = other DNA
ttttgtatttttagcagaga

SEQ ID NO: 37184 - DNA, 20 bp, synthetic construct
  misc_feature 1..20: note = chemically synthesized
  source 1..20: mol_type = other DNA
tttgtatttttagcagagat

SEQ ID NO: 37185 - DNA, 20 bp, synthetic construct
  misc_feature 1..20: note = chemically synthesized
  source 1..20: mol_type = other DNA
ttgtatttttagcagagatg

SEQ ID NO: 37186 - DNA, 20 bp, synthetic construct
  misc_feature 1..20: note = chemically synthesized
  source 1..20: mol_type = other DNA
gagatggggtttcaccattt

SEQ ID NO: 37187 - DNA, 20 bp, synthetic construct
  misc_feature 1..20: note = chemically synthesized
  source 1..20: mol_type = other DNA
tggggtttcaccattttagc

SEQ ID NO: 37188 - DNA, 20 bp, synthetic construct
  misc_feature 1..20: note = chemically synthesized
  source 1..20: mol_type = other DNA
tctgcccgcccccgcctccc

SEQ ID NO: 37189 - DNA, 20 bp, synthetic construct
  misc_feature 1..20: note = chemically synthesized
  source 1..20: mol_type = other DNA
ctgcccgcccccgcctccca

SEQ ID NO: 37190 - DNA, 20 bp, synthetic construct
  misc_feature 1..20: note = chemically synthesized
  source 1..20: mol_type = other DNA
gcccccgcctcccaaggtgc

SEQ ID NO: 37191 - DNA, 20 bp, synthetic construct
  misc_feature 1..20: note = chemically synthesized
  source 1..20: mol_type = other DNA
cccccgcctcccaaggtgct

SEQ ID NO: 37192 - DNA, 20 bp, synthetic construct
  misc_feature 1..20: note = chemically synthesized
  source 1..20: mol_type = other DNA
ctcccaaggtgctgggatta

SEQ ID NO: 37193 - DNA, 20 bp, synthetic construct
  misc_feature 1..20: note = chemically synthesized
  source 1..20: mol_type = other DNA
tcccaaggtgctgggattac

SEQ ID NO: 37194 - DNA, 20 bp, synthetic construct
  misc_feature 1..20: note = chemically synthesized
  source 1..20: mol_type = other DNA
ggtgctgggattacaggcgt

SEQ ID NO: 37195 - DNA, 20 bp, synthetic construct
  misc_feature 1..20: note = chemically synthesized
  source 1..20: mol_type = other DNA
caggcgtgagccactgctcc

SEQ ID NO: 37196 - DNA, 20 bp, synthetic construct
  misc_feature 1..20: note = chemically synthesized
  source 1..20: mol_type = other DNA
gccactgctcccggccctat

SEQ ID NO: 37197 - DNA, 20 bp, synthetic construct
  misc_feature 1..20: note = chemically synthesized
  source 1..20: mol_type = other DNA
gccctatcagaaccttttct

SEQ ID NO: 37198 - DNA, 20 bp, synthetic construct
  misc_feature 1..20: note = chemically synthesized
  source 1..20: mol_type = other DNA
agaaccttttctaagtcccc

SEQ ID NO: 37199 - DNA, 20 bp, synthetic construct
  misc_feature 1..20: note = chemically synthesized
  source 1..20: mol_type = other DNA
ccgagctgcaacattaaatg

SEQ ID NO: 37200 - DNA, 20 bp, synthetic construct
  misc_feature 1..20: note = chemically synthesized
  source 1..20: mol_type = other DNA
ttaaatgcagaatccctact

SEQ ID NO: 37201 - DNA, 20 bp, synthetic construct
  misc_feature 1..20: note = chemically synthesized
  source 1..20: mol_type = other DNA
aatgcagaatccctacttag

SEQ ID NO: 37202 - DNA, 20 bp, synthetic construct
  misc_feature 1..20: note = chemically synthesized
  source 1..20: mol_type = other DNA
atgcagaatccctacttagt

SEQ ID NO: 37203 - DNA, 20 bp, synthetic construct
  misc_feature 1..20: note = chemically synthesized
  source 1..20: mol_type = other DNA
tgcagaatccctacttagta

SEQ ID NO: 37204 - DNA, 20 bp, synthetic construct
  misc_feature 1..20: note = chemically synthesized
  source 1..20: mol_type = other DNA
tagggccaaaccaataaatt

SEQ ID NO: 37205 - DNA, 20 bp, synthetic construct
  misc_feature 1..20: note = chemically synthesized
  source 1..20: mol_type = other DNA
ccattcccatgcctgttctc

SEQ ID NO: 37206 - DNA, 20 bp, synthetic construct
  misc_feature 1..20: note = chemically synthesized
  source 1..20: mol_type = other DNA
agatttctgccaatataaat

SEQ ID NO: 37207 - DNA, 20 bp, synthetic construct
  misc_feature 1..20: note = chemically synthesized
  source 1..20: mol_type = other DNA
ttctgccaatataaattaga

SEQ ID NO: 37208 - DNA, 20 bp, synthetic construct
  misc_feature 1..20: note = chemically synthesized
  source 1..20: mol_type = other DNA
caatataaattagaaagctt

SEQ ID NO: 37209 - DNA, 20 bp, synthetic construct
  misc_feature 1..20: note = chemically synthesized
  source 1..20: mol_type = other DNA
tataaattagaaagcttaag

SEQ ID NO: 37210 - DNA, 20 bp, synthetic construct
  misc_feature 1..20: note = chemically synthesized
  source 1..20: mol_type = other DNA
gaaagcttaagcagttcttt

SEQ ID NO: 37211 - DNA, 20 bp, synthetic construct
  misc_feature 1..20: note = chemically synthesized
  source 1..20: mol_type = other DNA
aagcttaagcagttctttta

SEQ ID NO: 37212 - DNA, 20 bp, synthetic construct
  misc_feature 1..20: note = chemically synthesized
  source 1..20: mol_type = other DNA
gagtataatgcacctcctca

SEQ ID NO: 37213 - DNA, 20 bp, synthetic construct
  misc_feature 1..20: note = chemically synthesized
  source 1..20: mol_type = other DNA
agtataatgcacctcctcat

SEQ ID NO: 37214 - DNA, 20 bp, synthetic construct
  misc_feature 1..20: note = chemically synthesized
  source 1..20: mol_type = other DNA
cacactctgaacctcacctc

SEQ ID NO: 37215 - DNA, 20 bp, synthetic construct
  misc_feature 1..20: note = chemically synthesized
  source 1..20: mol_type = other DNA
acactctgaacctcacctct

SEQ ID NO: 37216 - DNA, 20 bp, synthetic construct
  misc_feature 1..20: note = chemically synthesized
  source 1..20: mol_type = other DNA
cactctgaacctcacctctg

SEQ ID NO: 37217 - DNA, 20 bp, synthetic construct
  misc_feature 1..20: note = chemically synthesized
  source 1..20: mol_type = other DNA
acctcacctctggggcccgc

SEQ ID NO: 37218 - DNA, 20 bp, synthetic construct
  misc_feature 1..20: note = chemically synthesized
  source 1..20: mol_type = other DNA
cctcacctctggggcccgca

SEQ ID NO: 37219 - DNA, 20 bp, synthetic construct
  misc_feature 1..20: note = chemically synthesized
  source 1..20: mol_type = other DNA
tctggggcccgcaaggaatt

SEQ ID NO: 37220 - DNA, 20 bp, synthetic construct
  misc_feature 1..20: note = chemically synthesized
  source 1..20: mol_type = other DNA
ggcccgcaaggaatttagcc

SEQ ID NO: 37221 - DNA, 20 bp, synthetic construct
  misc_feature 1..20: note = chemically synthesized
  source 1..20: mol_type = other DNA
caaggaatttagcctagtta

SEQ ID NO: 37222 - DNA, 20 bp, synthetic construct
  misc_feature 1..20: note = chemically synthesized
  source 1..20: mol_type = other DNA
aaggaatttagcctagttat

SEQ ID NO: 37223 - DNA, 20 bp, synthetic construct
  misc_feature 1..20: note = chemically synthesized
  source 1..20: mol_type = other DNA
atttagcctagttataggtc

SEQ ID NO: 37224 - DNA, 20 bp, synthetic construct
  misc_feature 1..20: note = chemically synthesized
  source 1..20: mol_type = other DNA
tagcctagttataggtctag

SEQ ID NO: 37225 - DNA, 20 bp, synthetic construct
  misc_feature 1..20: note = chemically synthesized
  source 1..20: mol_type = other DNA
gttataggtctagaagcatt

SEQ ID NO: 37226 - DNA, 20 bp, synthetic construct
  misc_feature 1..20: note = chemically synthesized
  source 1..20: mol_type = other DNA
ttataggtctagaagcattc

SEQ ID NO: 37227 - DNA, 20 bp, synthetic construct
  misc_feature 1..20: note = chemically synthesized
  source 1..20: mol_type = other DNA
tataggtctagaagcattca

SEQ ID NO: 37228 - DNA, 20 bp, synthetic construct
  misc_feature 1..20: note = chemically synthesized
  source 1..20: mol_type = other DNA
ataggtctagaagcattcag

SEQ ID NO: 37229 - DNA, 20 bp, synthetic construct
  misc_feature 1..20: note = chemically synthesized
  source 1..20: mol_type = other DNA
ctagaagcattcaggggcat

SEQ ID NO: 37230 - DNA, 20 bp, synthetic construct
  misc_feature 1..20: note = chemically synthesized
  source 1..20: mol_type = other DNA
tagaagcattcaggggcatt

SEQ ID NO: 37231 - DNA, 20 bp, synthetic construct
  misc_feature 1..20: note = chemically synthesized
  source 1..20: mol_type = other DNA
agaagcattcaggggcatta

SEQ ID NO: 37232 - DNA, 20 bp, synthetic construct
  misc_feature 1..20: note = chemically synthesized
  source 1..20: mol_type = other DNA
gaagcattcaggggcattag

SEQ ID NO: 37233 - DNA, 20 bp, synthetic construct
  misc_feature 1..20: note = chemically synthesized
  source 1..20: mol_type = other DNA
gggcattaggggtgcctctt

SEQ ID NO: 37234 - DNA, 20 bp, synthetic construct
  misc_feature 1..20: note = chemically synthesized
  source 1..20: mol_type = other DNA
ggcattaggggtgcctcttg

SEQ ID NO: 37235 - DNA, 20 bp, synthetic construct
  misc_feature 1..20: note = chemically synthesized
  source 1..20: mol_type = other DNA
cattaggggtgcctcttgag

SEQ ID NO: 37236 - DNA, 20 bp, synthetic construct
  misc_feature 1..20: note = chemically synthesized
  source 1..20: mol_type = other DNA
agaatcaacattatcttgcc

SEQ ID NO: 37237 - DNA, 20 bp, synthetic construct
  misc_feature 1..20: note = chemically synthesized
  source 1..20: mol_type = other DNA
atcaacattatcttgcctgg

SEQ ID NO: 37238 - DNA, 20 bp, synthetic construct
  misc_feature 1..20: note = chemically synthesized
  source 1..20: mol_type = other DNA
atcttgcctggcagctgcct

SEQ ID NO: 37239 - DNA, 20 bp, synthetic construct
  misc_feature 1..20: note = chemically synthesized
  source 1..20: mol_type = other DNA
tcttgcctggcagctgcctc

SEQ ID NO: 37240 - DNA, 20 bp, synthetic construct
  misc_feature 1..20: note = chemically synthesized
  source 1..20: mol_type = other DNA
cttgcctggcagctgcctca

SEQ ID NO: 37241 - DNA, 20 bp, synthetic construct
  misc_feature 1..20: note = chemically synthesized
  source 1..20: mol_type = other DNA
gcctggcagctgcctcaggg

SEQ ID NO: 37242 - DNA, 20 bp, synthetic construct
  misc_feature 1..20: note = chemically synthesized
  source 1..20: mol_type = other DNA
cctggcagctgcctcaggga

SEQ ID NO: 37243 - DNA, 20 bp, synthetic construct
  misc_feature 1..20: note = chemically synthesized
  source 1..20: mol_type = other DNA
aaggccatcactgttgcctc

SEQ ID NO: 37244 - DNA, 20 bp, synthetic construct
  misc_feature 1..20: note = chemically synthesized
  source 1..20: mol_type = other DNA
gccatcactgttgcctcaag

SEQ ID NO: 37245 - DNA, 20 bp, synthetic construct
  misc_feature 1..20: note = chemically synthesized
  source 1..20: mol_type = other DNA
cactgttgcctcaagcagtg

SEQ ID NO: 37246 - DNA, 20 bp, synthetic construct
  misc_feature 1..20: note = chemically synthesized
  source 1..20: mol_type = other DNA
actgttgcctcaagcagtgc

SEQ ID NO: 37247 - DNA, 20 bp, synthetic construct
  misc_feature 1..20: note = chemically synthesized
  source 1..20: mol_type = other DNA
ctgttgcctcaagcagtgca

SEQ ID NO: 37248 - DNA, 20 bp, synthetic construct
  misc_feature 1..20: note = chemically synthesized
  source 1..20: mol_type = other DNA
cagtgcagggtttacatcct

SEQ ID NO: 37249 - DNA, 20 bp, synthetic construct
  misc_feature 1..20: note = chemically synthesized
  source 1..20: mol_type = other DNA
agggtttacatcctcagaca

SEQ ID NO: 37250 - DNA, 20 bp, synthetic construct
  misc_feature 1..20: note = chemically synthesized
  source 1..20: mol_type = other DNA
gggtttacatcctcagacaa

SEQ ID NO: 37251 - DNA, 20 bp, synthetic construct
  misc_feature 1..20: note = chemically synthesized
  source 1..20: mol_type = other DNA
tttacatcctcagacaaagg

SEQ ID NO: 37252 - DNA, 20 bp, synthetic construct
  misc_feature 1..20: note = chemically synthesized
  source 1..20: mol_type = other DNA
catcctcagacaaaggtgga

SEQ ID NO: 37253 - DNA, 20 bp, synthetic construct
  misc_feature 1..20: note = chemically synthesized
  source 1..20: mol_type = other DNA
atcctcagacaaaggtggaa

SEQ ID NO: 37254 - DNA, 20 bp, synthetic construct
  misc_feature 1..20: note = chemically synthesized
  source 1..20: mol_type = other DNA
gacaaaggtggaaaggctaa

SEQ ID NO: 37255 - DNA, 20 bp, synthetic construct
  misc_feature 1..20: note = chemically synthesized
  source 1..20: mol_type = other DNA
aaaggtggaaaggctaatgg

SEQ ID NO: 37256 - DNA, 20 bp, synthetic construct
  misc_feature 1..20: note = chemically synthesized
  source 1..20: mol_type = other DNA
tggaaaggctaatggcagca

SEQ ID NO: 37257 - DNA, 20 bp, synthetic construct
  misc_feature 1..20: note = chemically synthesized
  source 1..20: mol_type = other DNA
ggaaaggctaatggcagcac

SEQ ID NO: 37258 - DNA, 20 bp, synthetic construct
  misc_feature 1..20: note = chemically synthesized
  source 1..20: mol_type = other DNA
aggctaatggcagcacgggt

SEQ ID NO: 37259 - DNA, 20 bp, synthetic construct
  misc_feature 1..20: note = chemically synthesized
  source 1..20: mol_type = other DNA
ggctaatggcagcacgggtc

SEQ ID NO: 37260 - DNA, 20 bp, synthetic construct
  misc_feature 1..20: note = chemically synthesized
  source 1..20: mol_type = other DNA
gctaatggcagcacgggtca

SEQ ID NO: 37261 - DNA, 20 bp, synthetic construct
  misc_feature 1..20: note = chemically synthesized
  source 1..20: mol_type = other DNA
taatggcagcacgggtcagg

SEQ ID NO: 37262 - DNA, 20 bp, synthetic construct
  misc_feature 1..20: note = chemically synthesized
  source 1..20: mol_type = other DNA
aatggcagcacgggtcaggg

SEQ ID NO: 37263 - DNA, 20 bp, synthetic construct
  misc_feature 1..20: note = chemically synthesized
  source 1..20: mol_type = other DNA
atggcagcacgggtcaggga

SEQ ID NO: 37264 - DNA, 20 bp, synthetic construct
  misc_feature 1..20: note = chemically synthesized
  source 1..20: mol_type = other DNA
tggcagcacgggtcagggag

SEQ ID NO: 37265 - DNA, 20 bp, synthetic construct
  misc_feature 1..20: note = chemically synthesized
  source 1..20: mol_type = other DNA
ggaggggatgttaccactac

SEQ ID NO: 37266 - DNA, 20 bp, synthetic construct
  misc_feature 1..20: note = chemically synthesized
  source 1..20: mol_type = other DNA
gaggggatgttaccactact

SEQ ID NO: 37267 - DNA, 20 bp, synthetic construct
  misc_feature 1..20: note = chemically synthesized
  source 1..20: mol_type = other DNA
aggggatgttaccactactg

SEQ ID NO: 37268 - DNA, 20 bp, synthetic construct
  misc_feature 1..20: note = chemically synthesized
  source 1..20: mol_type = other DNA
gatgttaccactactgggga

SEQ ID NO: 37269 - DNA, 20 bp, synthetic construct
  misc_feature 1..20: note = chemically synthesized
  source 1..20: mol_type = other DNA
atgttaccactactggggat

SEQ ID NO: 37270 - DNA, 20 bp, synthetic construct
  misc_feature 1..20: note = chemically synthesized
  source 1..20: mol_type = other DNA
tgttaccactactggggatg

SEQ ID NO: 37271 - DNA, 20 bp, synthetic construct
  misc_feature 1..20: note = chemically synthesized
  source 1..20: mol_type = other DNA
gatggggaaactgtttcttc

SEQ ID NO: 37272 - DNA, 20 bp, synthetic construct
  misc_feature 1..20: note = chemically synthesized
  source 1..20: mol_type = other DNA
aactgtttcttctggcaaaa

SEQ ID NO: 37273 - DNA, 20 bp, synthetic construct
  misc_feature 1..20: note = chemically synthesized
  source 1..20: mol_type = other DNA
ttctggcaaaaaagtttcat

SEQ ID NO: 37274 - DNA, 20 bp, synthetic construct
  misc_feature 1..20: note = chemically synthesized
  source 1..20: mol_type = other DNA
ctggcaaaaaagtttcatca

SEQ ID NO: 37275 - DNA, 20 bp, synthetic construct
  misc_feature 1..20: note = chemically synthesized
  source 1..20: mol_type = other DNA
ttcatcagagttcacaaact

SEQ ID NO: 37276 - DNA, 20 bp, synthetic construct
  misc_feature 1..20: note = chemically synthesized
  source 1..20: mol_type = other DNA
gttcacaaactcagtgtcct

SEQ ID NO: 37277 - DNA, 20 bp, synthetic construct
  misc_feature 1..20: note = chemically synthesized
  source 1..20: mol_type = other DNA
ctcagtgtcctcagcttcat

SEQ ID NO: 37278 - DNA, 20 bp, synthetic construct
  misc_feature 1..20: note = chemically synthesized
  source 1..20: mol_type = other DNA
tcagtgtcctcagcttcatc

SEQ ID NO: 37279 - DNA, 20 bp, synthetic construct
  misc_feature 1..20: note = chemically synthesized
  source 1..20: mol_type = other DNA
cagtgtcctcagcttcatca

SEQ ID NO: 37280 - DNA, 20 bp, synthetic construct
  misc_feature 1..20: note = chemically synthesized
  source 1..20: mol_type = other DNA
ctcccacacatccccactcc

SEQ ID NO: 37281 - DNA, 20 bp, synthetic construct
  misc_feature 1..20: note = chemically synthesized
  source 1..20: mol_type = other DNA
cacatccccactccaagttc

SEQ ID NO: 37282 - DNA, 20 bp, synthetic construct
  misc_feature 1..20: note = chemically synthesized
  source 1..20: mol_type = other DNA
acatccccactccaagttcc

SEQ ID NO: 37283 - DNA, 20 bp, synthetic construct
  misc_feature 1..20: note = chemically synthesized
  source 1..20: mol_type = other DNA
catccccactccaagttcca

SEQ ID NO: 37284 - DNA, 20 bp, synthetic construct
  misc_feature 1..20: note = chemically synthesized
  source 1..20: mol_type = other DNA
tccagggtcccatttttttc

SEQ ID NO: 37285 - DNA, 20 bp, synthetic construct
  misc_feature 1..20: note = chemically synthesized
  source 1..20: mol_type = other DNA
agtcaatgccctcactttaa

SEQ ID NO: 37286 - DNA, 20 bp, synthetic construct
  misc_feature 1..20: note = chemically synthesized
  source 1..20: mol_type = other DNA
tcactttaacagtaaacacc

SEQ ID NO: 37287 - DNA, 20 bp, synthetic construct
  misc_feature 1..20: note = chemically synthesized
  source 1..20: mol_type = other DNA
tttaacagtaaacacctggc

SEQ ID NO: 37288 - DNA, 20 bp, synthetic construct
  misc_feature 1..20: note = chemically synthesized
  source 1..20: mol_type = other DNA
ttaacagtaaacacctggca

SEQ ID NO: 37289 - DNA, 20 bp, synthetic construct
  misc_feature 1..20: note = chemically synthesized
  source 1..20: mol_type = other DNA
tgtgcatgcacctcttgttg

SEQ ID NO: 37290 - DNA, 20 bp, synthetic construct
  misc_feature 1..20: note = chemically synthesized
  source 1..20: mol_type = other DNA
atgcacctcttgttgcagat

SEQ ID NO: 37291 - DNA, 20 bp, synthetic construct
  misc_feature 1..20: note = chemically synthesized
  source 1..20: mol_type = other DNA
atcagctactcgcatgataa

SEQ ID NO: 37292 - DNA, 20 bp, synthetic construct
  misc_feature 1..20: note = chemically synthesized
  source 1..20: mol_type = other DNA
caatttcaactctttctcta

SEQ ID NO: 37293 - DNA, 20 bp, synthetic construct
  misc_feature 1..20: note = chemically synthesized
  source 1..20: mol_type = other DNA
aatttcaactctttctctac

SEQ ID NO: 37294 - DNA, 20 bp, synthetic construct
  misc_feature 1..20: note = chemically synthesized
  source 1..20: mol_type = other DNA
tttcaactctttctctacag

SEQ ID NO: 37295 - DNA, 20 bp, synthetic construct
  misc_feature 1..20: note = chemically synthesized
  source 1..20: mol_type = other DNA
caggagttaaaactctcatt

SEQ ID NO: 37296 - DNA, 20 bp, synthetic construct
  misc_feature 1..20: note = chemically synthesized
  source 1..20: mol_type = other DNA
aggagttaaaactctcattc

SEQ ID NO: 37297 - DNA, 20 bp, synthetic construct
  misc_feature 1..20: note = chemically synthesized
  source 1..20: mol_type = other DNA
ggagttaaaactctcattca

SEQ ID NO: 37298 - DNA, 20 bp, synthetic construct
  misc_feature 1..20: note = chemically synthesized
  source 1..20: mol_type = other DNA
actctcattcagggcaatct

SEQ ID NO: 37299 - DNA, 20 bp, synthetic construct
  misc_feature 1..20: note = chemically synthesized
  source 1..20: mol_type = other DNA
ctcattcagggcaatcttag

SEQ ID NO: 37300 - DNA, 20 bp, synthetic construct
  misc_feature 1..20: note = chemically synthesized
  source 1..20: mol_type = other DNA
gggcaatcttagcagatttg

SEQ ID NO: 37301 - DNA, 20 bp, synthetic construct
  misc_feature 1..20: note = chemically synthesized
  source 1..20: mol_type = other DNA
atcttagcagatttgtggct

SEQ ID NO: 37302 - DNA, 20 bp, synthetic construct
  misc_feature 1..20: note = chemically synthesized
  source 1..20: mol_type = other DNA
tggctcagtatctgcttctg

SEQ ID NO: 37303 - DNA, 20 bp, synthetic construct
  misc_feature 1..20: note = chemically synthesized
  source 1..20: mol_type = other DNA
ggctcagtatctgcttctga

SEQ ID NO: 37304 - DNA, 20 bp, synthetic construct
  misc_feature 1..20: note = chemically synthesized
  source 1..20: mol_type = other DNA
tcagtatctgcttctgaagg

SEQ ID NO: 37305 - DNA, 20 bp, synthetic construct
  misc_feature 1..20: note = chemically synthesized
  source 1..20: mol_type = other DNA
cagtatctgcttctgaaggt

SEQ ID NO: 37306 - DNA, 20 bp, synthetic construct
  misc_feature 1..20: note = chemically synthesized
  source 1..20: mol_type = other DNA
gtatctgcttctgaaggtgg

SEQ ID NO: 37307 - DNA, 20 bp, synthetic construct
  misc_feature 1..20: note = chemically synthesized
  source 1..20: mol_type = other DNA
ctgcttctgaaggtgggaga

SEQ ID NO: 37308 - DNA, 20 bp, synthetic construct
  misc_feature 1..20: note = chemically synthesized
  source 1..20: mol_type = other DNA
aggtgggagacagatcccct

SEQ ID NO: 37309 - DNA, 20 bp, synthetic construct
  misc_feature 1..20: note = chemically synthesized
  source 1..20: mol_type = other DNA
ttttctttcatctctttctc

SEQ ID NO: 37310 - DNA, 20 bp, synthetic construct
  misc_feature 1..20: note = chemically synthesized
  source 1..20: mol_type = other DNA
ttctttcatctctttctcca

SEQ ID NO: 37311 - DNA, 20 bp, synthetic construct
  misc_feature 1..20: note = chemically synthesized
  source 1..20: mol_type = other DNA
atctctttctccagagaact

SEQ ID NO: 37312 - DNA, 20 bp, synthetic construct
  misc_feature 1..20: note = chemically synthesized
  source 1..20: mol_type = other DNA
tctctttctccagagaactt

SEQ ID NO: 37313 - DNA, 20 bp, synthetic construct
  misc_feature 1..20: note = chemically synthesized
  source 1..20: mol_type = other DNA
tctttctccagagaacttag

SEQ ID NO: 37314 - DNA, 20 bp, synthetic construct
  misc_feature 1..20: note = chemically synthesized
  source 1..20: mol_type = other DNA
accaacttcattatgttcct

SEQ ID NO: 37315 - DNA, 20 bp, synthetic construct
  misc_feature 1..20: note = chemically synthesized
  source 1..20: mol_type = other DNA
gttccttggttctccacata

SEQ ID NO: 37316 - DNA, 20 bp, synthetic construct
  misc_feature 1..20: note = chemically synthesized
  source 1..20: mol_type = other DNA
tggttctccacatatagtca

SEQ ID NO: 37317 - DNA, 20 bp, synthetic construct
  misc_feature 1..20: note = chemically synthesized
  source 1..20: mol_type = other DNA
ggttctccacatatagtcaa

SEQ ID NO: 37318 - DNA, 20 bp, synthetic construct
  misc_feature 1..20: note = chemically synthesized
  source 1..20: mol_type = other DNA
atagtcaaaggtattatgta

SEQ ID NO: 37319 - DNA, 20 bp, synthetic construct
  misc_feature 1..20: note = chemically synthesized
  source 1..20: mol_type = other DNA
agtcaaaggtattatgtata

SEQ ID NO: 37320 - DNA, 20 bp, synthetic construct
  misc_feature 1..20: note = chemically synthesized
  source 1..20: mol_type = other DNA
ctaaactccttgcctctcat

SEQ ID NO: 37321 - DNA, 20 bp, synthetic construct
  misc_feature 1..20: note = chemically synthesized
  source 1..20: mol_type = other DNA
gcctctcataagtgatgaat

SEQ ID NO: 37322 - DNA, 20 bp, synthetic construct
  misc_feature 1..20: note = chemically synthesized
  source 1..20: mol_type = other DNA
tctcataagtgatgaatcag

SEQ ID NO: 37323 - DNA, 20 bp, synthetic construct
  misc_feature 1..20: note = chemically synthesized
  source 1..20: mol_type = other DNA
gcataactctctaaacaatt

SEQ ID NO: 37324 - DNA, 20 bp, synthetic construct
  misc_feature 1..20: note = chemically synthesized
  source 1..20: mol_type = other DNA
cataactctctaaacaattc

SEQ ID NO: 37325 - DNA, 20 bp, synthetic construct
  misc_feature 1..20: note = chemically synthesized
  source 1..20: mol_type = other DNA
ctctctaaacaattcaggcc

SEQ ID NO: 37326 - DNA, 20 bp, synthetic construct
  misc_feature 1..20: note = chemically synthesized
  source 1..20: mol_type = other DNA
caattcaggccaagtactat

SEQ ID NO: 37327 - DNA, 20 bp, synthetic construct
  misc_feature 1..20: note = chemically synthesized
  source 1..20: mol_type = other DNA
atcagtgttctccatactat

SEQ ID NO: 37328 - DNA, 20 bp, synthetic construct
  misc_feature 1..20: note = chemically synthesized
  source 1..20: mol_type = other DNA
agtgttctccatactattag

SEQ ID NO: 37329 - DNA, 20 bp, synthetic construct
  misc_feature 1..20: note = chemically synthesized
  source 1..20: mol_type = other DNA
gttctccatactattagaag

SEQ ID NO: 37330 - DNA, 20 bp, synthetic construct
  misc_feature 1..20: note = chemically synthesized
  source 1..20: mol_type = other DNA
tctccatactattagaagta

SEQ ID NO: 37331 - DNA, 20 bp, synthetic construct
  misc_feature 1..20: note = chemically synthesized
  source 1..20: mol_type = other DNA
actattagaagtagagtcct

SEQ ID NO: 37332 - DNA, 20 bp, synthetic construct
  misc_feature 1..20: note = chemically synthesized
  source 1..20: mol_type = other DNA
gtagagtccttagcattttt

SEQ ID NO: 37333 - DNA, 20 bp, synthetic construct
  misc_feature 1..20: note = chemically synthesized
  source 1..20: mol_type = other DNA
tttggtctaatcatattaat

SEQ ID NO: 37334 - DNA, 20 bp, synthetic construct
  misc_feature 1..20: note = chemically synthesized
  source 1..20: mol_type = other DNA
tcatattaatcagccaacac

SEQ ID NO: 37335 - DNA, 20 bp, synthetic construct
  misc_feature 1..20: note = chemically synthesized
  source 1..20: mol_type = other DNA
tattaatcagccaacaccag

SEQ ID NO: 37336 - DNA, 20 bp, synthetic construct
  misc_feature 1..20: note = chemically synthesized
  source 1..20: mol_type = other DNA
agaagtcccaaaaccaatga

SEQ ID NO: 37337 - DNA, 20 bp, synthetic construct
  misc_feature 1..20: note = chemically synthesized
  source 1..20: mol_type = other DNA
tccttaatattctgttcctc

SEQ ID NO: 37338 - DNA, 20 bp, synthetic construct
  misc_feature 1..20: note = chemically synthesized
  source 1..20: mol_type = other DNA
tgttcctcaagaaccacttc

SEQ ID NO: 37339 - DNA, 20 bp, synthetic construct
  misc_feature 1..20: note = chemically synthesized
  source 1..20: mol_type = other DNA
tctggtatgaaaatctgtat

SEQ ID NO: 37340 - DNA, 20 bp, synthetic construct
  misc_feature 1..20: note = chemically synthesized
  source 1..20: mol_type = other DNA
gtatgaaaatctgtattagt

SEQ ID NO: 37341 - DNA, 20 bp, synthetic construct
  misc_feature 1..20: note = chemically synthesized
  source 1..20: mol_type = other DNA
tatgaaaatctgtattagtc

SEQ ID NO: 37342 - DNA, 20 bp, synthetic construct
  misc_feature 1..20: note = chemically synthesized
  source 1..20: mol_type = other DNA
atgaaaatctgtattagtcg

SEQ ID NO: 37343 - DNA, 20 bp, synthetic construct
  misc_feature 1..20: note = chemically synthesized
  source 1..20: mol_type = other DNA
ctgtattagtcggggttctc

SEQ ID NO: 37344 - DNA, 20 bp, synthetic construct
  misc_feature 1..20: note = chemically synthesized
  source 1..20: mol_type = other DNA
gtattagtcggggttctcta

SEQ ID NO: 37345 - DNA, 20 bp, synthetic construct
  misc_feature 1..20: note = chemically synthesized
  source 1..20: mol_type = other DNA
tattagtcggggttctctag

SEQ ID NO: 37346 - DNA, 20 bp, synthetic construct
  misc_feature 1..20: note = chemically synthesized
  source 1..20: mol_type = other DNA
attagtcggggttctctaga

SEQ ID NO: 37347 - DNA, 20 bp, synthetic construct
  misc_feature 1..20: note = chemically synthesized
  source 1..20: mol_type = other DNA
gtcggggttctctagaggga

SEQ ID NO: 37348 - DNA, 20 bp, synthetic construct
  misc_feature 1..20: note = chemically synthesized
  source 1..20: mol_type = other DNA
ctctagagggacagaactaa

SEQ ID NO: 37349 - DNA, 20 bp, synthetic construct
  misc_feature 1..20: note = chemically synthesized
  source 1..20: mol_type = other DNA
tctagagggacagaactaat

SEQ ID NO: 37350 - DNA, 20 bp, synthetic construct
  misc_feature 1..20: note = chemically synthesized
  source 1..20: mol_type = other DNA
tagagggacagaactaatag

SEQ ID NO: 37351 - DNA, 20 bp, synthetic construct
  misc_feature 1..20: note = chemically synthesized
  source 1..20: mol_type = other DNA
gattatatatatatatatat

SEQ ID NO: 37352 - DNA, 20 bp, synthetic construct
  misc_feature 1..20: note = chemically synthesized
  source 1..20: mol_type = other DNA
ttatatatatatatatatga

SEQ ID NO: 37353 - DNA, 20 bp, synthetic construct
  misc_feature 1..20: note = chemically synthesized
  source 1..20: mol_type = other DNA
atatatatatatatatgaga

SEQ ID NO: 37354 - DNA, 20 bp, synthetic construct
  misc_feature 1..20: note = chemically synthesized
  source 1..20: mol_type = other DNA
atatatatatatatgagaga

SEQ ID NO: 37355 - DNA, 20 bp, synthetic construct
  misc_feature 1..20: note = chemically synthesized
  source 1..20: mol_type = other DNA
atatatatatatgagagaga

SEQ ID NO: 37356 - DNA, 20 bp, synthetic construct
  misc_feature 1..20: note = chemically synthesized
  source 1..20: mol_type = other DNA
atatatatatgagagagaga

SEQ ID NO: 37357 - DNA, 20 bp, synthetic construct
  misc_feature 1..20: note = chemically synthesized
  source 1..20: mol_type = other DNA
atatatatgagagagagaga

SEQ ID NO: 37358 - DNA, 20 bp, synthetic construct
  misc_feature 1..20: note = chemically synthesized
  source 1..20: mol_type = other DNA
atatatgagagagagagaga

SEQ ID NO: 37359 - DNA, 20 bp, synthetic construct
  misc_feature 1..20: note = chemically synthesized
  source 1..20: mol_type = other DNA
atatgagagagagagagaga

SEQ ID NO: 37360 - DNA, 20 bp, synthetic construct
  misc_feature 1..20: note = chemically synthesized
  source 1..20: mol_type = other DNA
tatgtatatatgtgtatata

SEQ ID NO: 37361 - DNA, 20 bp, synthetic construct
  misc_feature 1..20: note = chemically synthesized
  source 1..20: mol_type = other DNA
tatatatgtgtatatatagt

SEQ ID NO: 37362 - DNA, 20 bp, synthetic construct
  misc_feature 1..20: note = chemically synthesized
  source 1..20: mol_type = other DNA
agtatacctatatctatcta

SEQ ID NO: 37363 - DNA, 20 bp, synthetic construct
  misc_feature 1..20: note = chemically synthesized
  source 1..20: mol_type = other DNA
cctatatctatctatagata

SEQ ID NO: 37364 - DNA, 20 bp, synthetic construct
  misc_feature 1..20: note = chemically synthesized
  source 1..20: mol_type = other DNA
gatatagatatactcacaca

SEQ ID NO: 37365 - DNA, 20 bp, synthetic construct
  misc_feature 1..20: note = chemically synthesized
  source 1..20: mol_type = other DNA
atatagatatactcacacaa

SEQ ID NO: 37366 - DNA, 20 bp, synthetic construct
  misc_feature 1..20: note = chemically synthesized
  source 1..20: mol_type = other DNA
tatagatatactcacacaaa

SEQ ID NO: 37367 - DNA, 20 bp, synthetic construct
  misc_feature 1..20: note = chemically synthesized
  source 1..20: mol_type = other DNA
atagatatactcacacaaag

SEQ ID NO: 37368 - DNA, 20 bp, synthetic construct
  misc_feature 1..20: note = chemically synthesized
  source 1..20: mol_type = other DNA
agatatactcacacaaaggg

SEQ ID NO: 37369 - DNA, 20 bp, synthetic construct
  misc_feature 1..20: note = chemically synthesized
  source 1..20: mol_type = other DNA
cacacaaaggggagcttatt

SEQ ID NO: 37370 - DNA, 20 bp, synthetic construct
  misc_feature 1..20: note = chemically synthesized
  source 1..20: mol_type = other DNA
acaaaggggagcttattaag

SEQ ID NO: 37371 - DNA, 20 bp, synthetic construct
  misc_feature 1..20: note = chemically synthesized
  source 1..20: mol_type = other DNA
attaagtggtattaactcac

SEQ ID NO: 37372 - DNA, 20 bp, synthetic construct
  misc_feature 1..20: note = chemically synthesized
  source 1..20: mol_type = other DNA
gtattaactcacaagattac

SEQ ID NO: 37373 - DNA, 20 bp, synthetic construct
  misc_feature 1..20: note = chemically synthesized
  source 1..20: mol_type = other DNA
tattaactcacaagattaca

SEQ ID NO: 37374 - DNA, 20 bp, synthetic construct
  misc_feature 1..20: note = chemically synthesized
  source 1..20: mol_type = other DNA
aagattacaaggtcccataa

SEQ ID NO: 37375 - DNA, 20 bp, synthetic construct
  misc_feature 1..20: note = chemically synthesized
  source 1..20: mol_type = other DNA
agattacaaggtcccataat

SEQ ID NO: 37376 - DNA, 20 bp, synthetic construct
  misc_feature 1..20: note = chemically synthesized
  source 1..20: mol_type = other DNA
taataggccacctgcaatct

SEQ ID NO: 37377 - DNA, 20 bp, synthetic construct
  misc_feature 1..20: note = chemically synthesized
  source 1..20: mol_type = other DNA
aataggccacctgcaatctg

SEQ ID NO: 37378 - DNA, 20 bp, synthetic construct
  misc_feature 1..20: note = chemically synthesized
  source 1..20: mol_type = other DNA
taggccacctgcaatctgag

SEQ ID NO: 37379 - DNA, 20 bp, synthetic construct
  misc_feature 1..20: note = chemically synthesized
  source 1..20: mol_type = other DNA
ccacctgcaatctgaggagc

SEQ ID NO: 37380 - DNA, 20 bp, synthetic construct
  misc_feature 1..20: note = chemically synthesized
  source 1..20: mol_type = other DNA
cacctgcaatctgaggagca

SEQ ID NO: 37381 - DNA, 20 bp, synthetic construct
  misc_feature 1..20: note = chemically synthesized
  source 1..20: mol_type = other DNA
ctgcaatctgaggagcaagg

SEQ ID NO: 37382 - DNA, 20 bp, synthetic construct
  misc_feature 1..20: note = chemically synthesized
  source 1..20: mol_type = other DNA
aatctgaggagcaaggaaga

SEQ ID NO: 37383 - DNA, 20 bp, synthetic construct
  misc_feature 1..20: note = chemically synthesized
  source 1..20: mol_type = other DNA
aggagcaaggaagacagtcc

SEQ ID NO: 37384 - DNA, 20 bp, synthetic construct
  misc_feature 1..20: note = chemically synthesized
  source 1..20: mol_type = other DNA
ggaagacagtccaagtccca

SEQ ID NO: 37385 - DNA, 20 bp, synthetic construct
  misc_feature 1..20: note = chemically synthesized
  source 1..20: mol_type = other DNA
cagtccaagtcccacagctg

SEQ ID NO: 37386 - DNA, 20 bp, synthetic construct
  misc_feature 1..20: note = chemically synthesized
  source 1..20: mol_type = other DNA
agtcccacagctgaagaact

SEQ ID NO: 37387 - DNA, 20 bp, synthetic construct
  misc_feature 1..20: note = chemically synthesized
  source 1..20: mol_type = other DNA
tcccacagctgaagaacttg

SEQ ID NO: 37388 - DNA, 20 bp, synthetic construct
  misc_feature 1..20: note = chemically synthesized
  source 1..20: mol_type = other DNA
gaacttggagtccgatgttc

SEQ ID NO: 37389 - DNA, 20 bp, synthetic construct
  misc_feature 1..20: note = chemically synthesized
  source 1..20: mol_type = other DNA
acttggagtccgatgttcaa

SEQ ID NO: 37390 - DNA, 20 bp, synthetic construct
  misc_feature 1..20: note = chemically synthesized
  source 1..20: mol_type = other DNA
tggagtccgatgttcaagag

SEQ ID NO: 37391 - DNA, 20 bp, synthetic construct
  misc_feature 1..20: note = chemically synthesized
  source 1..20: mol_type = other DNA
ggagtccgatgttcaagagc

SEQ ID NO: 37392 - DNA, 20 bp, synthetic construct
  misc_feature 1..20: note = chemically synthesized
  source 1..20: mol_type = other DNA
gtccgatgttcaagagcagg

SEQ ID NO: 37393 - DNA, 20 bp, synthetic construct
  misc_feature 1..20: note = chemically synthesized
  source 1..20: mol_type = other DNA
tccgatgttcaagagcagga

SEQ ID NO: 37394 - DNA, 20 bp, synthetic construct
  misc_feature 1..20: note = chemically synthesized
  source 1..20: mol_type = other DNA
gttcaagagcaggaaggatc

SEQ ID NO: 37395 - DNA, 20 bp, synthetic construct
  misc_feature 1..20: note = chemically synthesized
  source 1..20: mol_type = other DNA
agagcaggaaggatccagca

SEQ ID NO: 37396 - DNA, 20 bp, synthetic construct
  misc_feature 1..20: note = chemically synthesized
  source 1..20: mol_type = other DNA
gagcaggaaggatccagcac

SEQ ID NO: 37397 - DNA, 20 bp, synthetic construct
  misc_feature 1..20: note = chemically synthesized
  source 1..20: mol_type = other DNA
gcaggaaggatccagcacag

SEQ ID NO: 37398 - DNA, 20 bp, synthetic construct
  misc_feature 1..20: note = chemically synthesized
  source 1..20: mol_type = other DNA
gaaggatccagcacaggaga

SEQ ID NO: 37399 - DNA, 20 bp, synthetic construct
  misc_feature 1..20: note = chemically synthesized
  source 1..20: mol_type = other DNA
tccagcacaggagaaagatg

SEQ ID NO: 37400 - DNA, 20 bp, synthetic construct
  misc_feature 1..20: note = chemically synthesized
  source 1..20: mol_type = other DNA
ccagcacaggagaaagatgt

SEQ ID NO: 37401 - DNA, 20 bp, synthetic construct
  misc_feature 1..20: note = chemically synthesized
  source 1..20: mol_type = other DNA
cacaggagaaagatgtaggc

SEQ ID NO: 37402 - DNA, 20 bp, synthetic construct
  misc_feature 1..20: note = chemically synthesized
  source 1..20: mol_type = other DNA
acaggagaaagatgtaggct

SEQ ID NO: 37403 - DNA, 20 bp, synthetic construct
  misc_feature 1..20: note = chemically synthesized
  source 1..20: mol_type = other DNA
aggagaaagatgtaggctgg

SEQ ID NO: 37404 - DNA, 20 bp, synthetic construct
  misc_feature 1..20: note = chemically synthesized
  source 1..20: mol_type = other DNA
ggagaaagatgtaggctggg

SEQ ID NO: 37405 - DNA, 20 bp, synthetic construct
  misc_feature 1..20: note = chemically synthesized
  source 1..20: mol_type = other DNA
aagatgtaggctgggaggct

SEQ ID NO: 37406 - DNA, 20 bp, synthetic construct
  misc_feature 1..20: note = chemically synthesized
  source 1..20: mol_type = other DNA
tgtaggctgggaggctaagc

SEQ ID NO: 37407 - DNA, 20 bp, synthetic construct
  misc_feature 1..20: note = chemically synthesized
  source 1..20: mol_type = other DNA
gctgggaggctaagccagtc

SEQ ID NO: 37408 - DNA, 20 bp, synthetic construct
  misc_feature 1..20: note = chemically synthesized
  source 1..20: mol_type = other DNA
gcctttttacatttttctgc

SEQ ID NO: 37409 - DNA, 20 bp, synthetic construct
  misc_feature 1..20: note = chemically synthesized
  source 1..20: mol_type = other DNA
tttctgccagctttatattc

SEQ ID NO: 37410 - DNA, 20 bp, synthetic construct
  misc_feature 1..20: note = chemically synthesized
  source 1..20: mol_type = other DNA
agctttatattctggctcta

SEQ ID NO: 37411 - DNA, 20 bp, synthetic construct
  misc_feature 1..20: note = chemically synthesized
  source 1..20: mol_type = other DNA
tatattctggctctacagct

SEQ ID NO: 37412 - DNA, 20 bp, synthetic construct
  misc_feature 1..20: note = chemically synthesized
  source 1..20: mol_type = other DNA
atattctggctctacagctt

SEQ ID NO: 37413 - DNA, 20 bp, synthetic construct
  misc_feature 1..20: note = chemically synthesized
  source 1..20: mol_type = other DNA
tattctggctctacagcttg

SEQ ID NO: 37414 - DNA, 20 bp, synthetic construct
  misc_feature 1..20: note = chemically synthesized
  source 1..20: mol_type = other DNA
attctggctctacagcttgg

SEQ ID NO: 37415 - DNA, 20 bp, synthetic construct
  misc_feature 1..20: note = chemically synthesized
  source 1..20: mol_type = other DNA
ctggctctacagcttggggg

SEQ ID NO: 37416 - DNA, 20 bp, synthetic construct
  misc_feature 1..20: note = chemically synthesized
  source 1..20: mol_type = other DNA
gctctacagcttgggggcag

SEQ ID NO: 37417 - DNA, 20 bp, synthetic construct
  misc_feature 1..20: note = chemically synthesized
  source 1..20: mol_type = other DNA
ctctacagcttgggggcagc

SEQ ID NO: 37418 - DNA, 20 bp, synthetic construct
  misc_feature 1..20: note = chemically synthesized
  source 1..20: mol_type = other DNA
tctacagcttgggggcagca

SEQ ID NO: 37419 - DNA, 20 bp, synthetic construct
  misc_feature 1..20: note = chemically synthesized
  source 1..20: mol_type = other DNA
ctacagcttgggggcagcag

SEQ ID NO: 37420 - DNA, 20 bp, synthetic construct
  misc_feature 1..20: note = chemically synthesized
  source 1..20: mol_type = other DNA
cagcttgggggcagcagggg

SEQ ID NO: 37421 - DNA, 20 bp, synthetic construct
  misc_feature 1..20: note = chemically synthesized
  source 1..20: mol_type = other DNA
agcttgggggcagcaggggc

SEQ ID NO: 37422 - DNA, 20 bp, synthetic construct
  misc_feature 1..20: note = chemically synthesized
  source 1..20: mol_type = other DNA
gcttgggggcagcaggggca

SEQ ID NO: 37423 - DNA, 20 bp, synthetic construct
  misc_feature 1..20: note = chemically synthesized
  source 1..20: mol_type = other DNA
cttgggggcagcaggggcag

SEQ ID NO: 37424 - DNA, 20 bp, synthetic construct
  misc_feature 1..20: note = chemically synthesized
  source 1..20: mol_type = other DNA
ggcagcaggggcaggggcct

SEQ ID NO: 37425 - DNA, 20 bp, synthetic construct
  misc_feature 1..20: note = chemically synthesized
  source 1..20: mol_type = other DNA
gcagcaggggcaggggcctc

SEQ ID NO: 37426 - DNA, 20 bp, synthetic construct
  misc_feature 1..20: note = chemically synthesized
  source 1..20: mol_type = other DNA
cagcaggggcaggggcctca

SEQ ID NO: 37427 - DNA, 20 bp, synthetic construct
  misc_feature 1..20: note = chemically synthesized
  source 1..20: mol_type = other DNA
caggggcctcagggtgcttg

SEQ ID NO: 37428 - DNA, 20 bp, synthetic construct
  misc_feature 1..20: note = chemically synthesized
  source 1..20: mol_type = other DNA
aggggcctcagggtgcttgc

SEQ ID NO: 37429 - DNA, 20 bp, synthetic construct
  misc_feature 1..20: note = chemically synthesized
  source 1..20: mol_type = other DNA
ggggcctcagggtgcttgca

SEQ ID NO: 37430 - DNA, 20 bp, synthetic construct
  misc_feature 1..20: note = chemically synthesized
  source 1..20: mol_type = other DNA
tgcttgcagggatgacacac

SEQ ID NO: 37431 - DNA, 20 bp, synthetic construct
  misc_feature 1..20: note = chemically synthesized
  source 1..20: mol_type = other DNA
acacactggcctcttttcca

SEQ ID NO: 37432 - DNA, 20 bp, synthetic construct
  misc_feature 1..20: note = chemically synthesized
  source 1..20: mol_type = other DNA
cacactggcctcttttccat

SEQ ID NO: 37433 - DNA, 20 bp, synthetic construct
  misc_feature 1..20: note = chemically synthesized
  source 1..20: mol_type = other DNA
acactggcctcttttccata

SEQ ID NO: 37434 - DNA, 20 bp, synthetic construct
  misc_feature 1..20: note = chemically synthesized
  source 1..20: mol_type = other DNA
ctggcctcttttccataggg

SEQ ID NO: 37435 - DNA, 20 bp, synthetic construct
  misc_feature 1..20: note = chemically synthesized
  source 1..20: mol_type = other DNA
cctcttttccatagggtggc

SEQ ID NO: 37436 - DNA, 20 bp, synthetic construct
  misc_feature 1..20: note = chemically synthesized
  source 1..20: mol_type = other DNA
ctcttttccatagggtggct

SEQ ID NO: 37437 - DNA, 20 bp, synthetic construct
  misc_feature 1..20: note = chemically synthesized
  source 1..20: mol_type = other DNA
tcttttccatagggtggctg

SEQ ID NO: 37438 - DNA, 20 bp, synthetic construct
  misc_feature 1..20: note = chemically synthesized
  source 1..20: mol_type = other DNA
atagggtggctggggcacac

SEQ ID NO: 37439 - DNA, 20 bp, synthetic construct
  misc_feature 1..20: note = chemically synthesized
  source 1..20: mol_type = other DNA
tagggtggctggggcacact

SEQ ID NO: 37440 - DNA, 20 bp, synthetic construct
  misc_feature 1..20: note = chemically synthesized
  source 1..20: mol_type = other DNA
agggtggctggggcacactg

SEQ ID NO: 37441 - DNA, 20 bp, synthetic construct
  misc_feature 1..20: note = chemically synthesized
  source 1..20: mol_type = other DNA
gctggggcacactggggtgt

SEQ ID NO: 37442 - DNA, 20 bp, synthetic construct
  misc_feature 1..20: note = chemically synthesized
  source 1..20: mol_type = other DNA
ggcacactggggtgtgagta

SEQ ID NO: 37443 - DNA, 20 bp, synthetic construct
  misc_feature 1..20: note = chemically synthesized
  source 1..20: mol_type = other DNA
tggggtgtgagtaaagcact

SEQ ID NO: 37444 - DNA, 20 bp, synthetic construct
  misc_feature 1..20: note = chemically synthesized
  source 1..20: mol_type = other DNA
ggggtgtgagtaaagcactc

SEQ ID NO: 37445 - DNA, 20 bp, synthetic construct
  misc_feature 1..20: note = chemically synthesized
  source 1..20: mol_type = other DNA
caggatcttttttccttccc

SEQ ID NO: 37446 - DNA, 20 bp, synthetic construct
  misc_feature 1..20: note = chemically synthesized
  source 1..20: mol_type = other DNA
cttttttccttccctagtcc

SEQ ID NO: 37447 - DNA, 20 bp, synthetic construct
  misc_feature 1..20: note = chemically synthesized
  source 1..20: mol_type = other DNA
ttccttccctagtccaagta

SEQ ID NO: 37448 - DNA, 20 bp, synthetic construct
  misc_feature 1..20: note = chemically synthesized
  source 1..20: mol_type = other DNA
ttccctagtccaagtacagc

SEQ ID NO: 37449 - DNA, 20 bp, synthetic construct
  misc_feature 1..20: note = chemically synthesized
  source 1..20: mol_type = other DNA
tccctagtccaagtacagca

SEQ ID NO: 37450 - DNA, 20 bp, synthetic construct
  misc_feature 1..20: note = chemically synthesized
  source 1..20: mol_type = other DNA
ccctagtccaagtacagcaa

SEQ ID NO: 37451 - DNA, 20 bp, synthetic construct
  misc_feature 1..20: note = chemically synthesized
  source 1..20: mol_type = other DNA
tagtccaagtacagcaaggg

SEQ ID NO: 37452 - DNA, 20 bp, synthetic construct
  misc_feature 1..20: note = chemically synthesized
  source 1..20: mol_type = other DNA
cagcaagggcagtatgactg

SEQ ID NO: 37453 - DNA, 20 bp, synthetic construct
  misc_feature 1..20: note = chemically synthesized
  source 1..20: mol_type = other DNA
gggcagtatgactgcagtgt

SEQ ID NO: 37454 - DNA, 20 bp, synthetic construct
  misc_feature 1..20: note = chemically synthesized
  source 1..20: mol_type = other DNA
cagtatgactgcagtgttag

SEQ ID NO: 37455 - DNA, 20 bp, synthetic construct
  misc_feature 1..20: note = chemically synthesized
  source 1..20: mol_type = other DNA
tatgactgcagtgttagtgg

SEQ ID NO: 37456 - DNA, 20 bp, synthetic construct
  misc_feature 1..20: note = chemically synthesized
  source 1..20: mol_type = other DNA
gactgcagtgttagtggcag

SEQ ID NO: 37457 - DNA, 20 bp, synthetic construct
  misc_feature 1..20: note = chemically synthesized
  source 1..20: mol_type = other DNA
actgcagtgttagtggcaga

SEQ ID NO: 37458 - DNA, 20 bp, synthetic construct
  misc_feature 1..20: note = chemically synthesized
  source 1..20: mol_type = other DNA
gttagtggcagaaggacttt

SEQ ID NO: 37459 - DNA, 20 bp, synthetic construct
  misc_feature 1..20: note = chemically synthesized
  source 1..20: mol_type = other DNA
gaaggactttcagtcacctc

SEQ ID NO: 37460 - DNA, 20 bp, synthetic construct
  misc_feature 1..20: note = chemically synthesized
  source 1..20: mol_type = other DNA
aaggactttcagtcacctct

SEQ ID NO: 37461 - DNA, 20 bp, synthetic construct
  misc_feature 1..20: note = chemically synthesized
  source 1..20: mol_type = other DNA
ggactttcagtcacctctgg

SEQ ID NO: 37462 - DNA, 20 bp, synthetic construct
  misc_feature 1..20: note = chemically synthesized
  source 1..20: mol_type = other DNA
agcttcaccccacaaaaaca

SEQ ID NO: 37463 - DNA, 20 bp, synthetic construct
  misc_feature 1..20: note = chemically synthesized
  source 1..20: mol_type = other DNA
cttcaccccacaaaaacaca

SEQ ID NO: 37464 - DNA, 20 bp, synthetic construct
  misc_feature 1..20: note = chemically synthesized
  source 1..20: mol_type = other DNA
ccccacaaaaacacagagtg

SEQ ID NO: 37465 - DNA, 20 bp, synthetic construct
  misc_feature 1..20: note = chemically synthesized
  source 1..20: mol_type = other DNA
acaaaaacacagagtgcagc

SEQ ID NO: 37466 - DNA, 20 bp, synthetic construct
  misc_feature 1..20: note = chemically synthesized
  source 1..20: mol_type = other DNA
aaaacacagagtgcagccag

SEQ ID NO: 37467 - DNA, 20 bp, synthetic construct
  misc_feature 1..20: note = chemically synthesized
  source 1..20: mol_type = other DNA
gccagtggaaatgttcaact

SEQ ID NO: 37468 - DNA, 20 bp, synthetic construct
  misc_feature 1..20: note = chemically synthesized
  source 1..20: mol_type = other DNA
ggaaatgttcaactgagttc

SEQ ID NO: 37469 - DNA, 20 bp, synthetic construct
  misc_feature 1..20: note = chemically synthesized
  source 1..20: mol_type = other DNA
gaaatgttcaactgagttcg

SEQ ID NO: 37470 - DNA, 20 bp, synthetic construct
  misc_feature 1..20: note = chemically synthesized
  source 1..20: mol_type = other DNA
agttcgaggtgcctgcactg

SEQ ID NO: 37471 - DNA, 20 bp, synthetic construct
  misc_feature 1..20: note = chemically synthesized
  source 1..20: mol_type = other DNA
gttcgaggtgcctgcactgt

SEQ ID NO: 37472 - DNA, 20 bp, synthetic construct
  misc_feature 1..20: note = chemically synthesized
  source 1..20: mol_type = other DNA
ggtgcctgcactgtgggccc

SEQ ID NO: 37473 - DNA, 20 bp, synthetic construct
  misc_feature 1..20: note = chemically synthesized
  source 1..20: mol_type = other DNA
cctgcactgtgggcccaagc

SEQ ID NO: 37474 - DNA, 20 bp, synthetic construct
  misc_feature 1..20: note = chemically synthesized
  source 1..20: mol_type = other DNA
ctgcactgtgggcccaagcc

SEQ ID NO: 37475 - DNA, 20 bp, synthetic construct
  misc_feature 1..20: note = chemically synthesized
  source 1..20: mol_type = other DNA
gcactgtgggcccaagccag

SEQ ID NO: 37476 - DNA, 20 bp, synthetic construct
  misc_feature 1..20: note = chemically synthesized
  source 1..20: mol_type = other DNA
cccaagccaggagccttgcc

SEQ ID NO: 37477 - DNA, 20 bp, synthetic construct
  misc_feature 1..20: note = chemically synthesized
  source 1..20: mol_type = other DNA
gccaggagccttgcctggtg

SEQ ID NO: 37478 - DNA, 20 bp, synthetic construct
  misc_feature 1..20: note = chemically synthesized
  source 1..20: mol_type = other DNA
caggagccttgcctggtgaa

SEQ ID NO: 37479 - DNA, 20 bp, synthetic construct
  misc_feature 1..20: note = chemically synthesized
  source 1..20: mol_type = other DNA
gagccttgcctggtgaagag

SEQ ID NO: 37480 - DNA, 20 bp, synthetic construct
  misc_feature 1..20: note = chemically synthesized
  source 1..20: mol_type = other DNA
ccttgcctggtgaagagtag

SEQ ID NO: 37481 - DNA, 20 bp, synthetic construct
  misc_feature 1..20: note = chemically synthesized
  source 1..20: mol_type = other DNA
cttgcctggtgaagagtagc

SEQ ID NO: 37482 - DNA, 20 bp, synthetic construct
  misc_feature 1..20: note = chemically synthesized
  source 1..20: mol_type = other DNA
tggtgaagagtagcaggtga

SEQ ID NO: 37483 - DNA, 20 bp, synthetic construct
  misc_feature 1..20: note = chemically synthesized
  source 1..20: mol_type = other DNA
agtagcaggtgaaagctcac

SEQ ID NO: 37484 - DNA, 20 bp, synthetic construct
  misc_feature 1..20: note = chemically synthesized
  source 1..20: mol_type = other DNA
gcaggtgaaagctcacaaga

SEQ ID NO: 37485 - DNA, 20 bp, synthetic construct
  misc_feature 1..20: note = chemically synthesized
  source 1..20: mol_type = other DNA
aggtgaaagctcacaagaaa

SEQ ID NO: 37486 - DNA, 20 bp, synthetic construct
  misc_feature 1..20: note = chemically synthesized
  source 1..20: mol_type = other DNA
agctcacaagaaagagaaac

SEQ ID NO: 37487 - DNA, 20 bp, synthetic construct
  misc_feature 1..20: note = chemically synthesized
  source 1..20: mol_type = other DNA
attctttccctgctgtgtgc

SEQ ID NO: 37488 - DNA, 20 bp, synthetic construct
  misc_feature 1..20: note = chemically synthesized
  source 1..20: mol_type = other DNA
tctttccctgctgtgtgctg

SEQ ID NO: 37489 - DNA, 20 bp, synthetic construct
  misc_feature 1..20: note = chemically synthesized
  source 1..20: mol_type = other DNA
ctttccctgctgtgtgctgg

SEQ ID NO: 37490 - DNA, 20 bp, synthetic construct
  misc_feature 1..20: note = chemically synthesized
  source 1..20: mol_type = other DNA
ctgctgtgtgctggaggtgt

SEQ ID NO: 37491 - DNA, 20 bp, synthetic construct
  misc_feature 1..20: note = chemically synthesized
  source 1..20: mol_type = other DNA
tgctgtgtgctggaggtgtc

SEQ ID NO: 37492 - DNA, 20 bp, synthetic construct
  misc_feature 1..20: note = chemically synthesized
  source 1..20: mol_type = other DNA
gctgtgtgctggaggtgtca

SEQ ID NO: 37493 - DNA, 20 bp, synthetic construct
  misc_feature 1..20: note = chemically synthesized
  source 1..20: mol_type = other DNA
gtgtgctggaggtgtcaggg

SEQ ID NO: 37494 - DNA, 20 bp, synthetic construct
  misc_feature 1..20: note = chemically synthesized
  source 1..20: mol_type = other DNA
tgctggaggtgtcagggaag

SEQ ID NO: 37495 - DNA, 20 bp, synthetic construct
  misc_feature 1..20: note = chemically synthesized
  source 1..20: mol_type = other DNA
ggaggtgtcagggaagtggc

SEQ ID NO: 37496 - DNA, 20 bp, synthetic construct
  misc_feature 1..20: note = chemically synthesized
  source 1..20: mol_type = other DNA
gaggtgtcagggaagtggcc

SEQ ID NO: 37497 - DNA, 20 bp, synthetic construct
  misc_feature 1..20: note = chemically synthesized
  source 1..20: mol_type = other DNA
ggccaggtcccttctttctc

SEQ ID NO: 37498 - DNA, 20 bp, synthetic construct
  misc_feature 1..20: note = chemically synthesized
  source 1..20: mol_type = other DNA
gtcccttctttctcaagccc

SEQ ID NO: 37499 - DNA, 20 bp, synthetic construct
  misc_feature 1..20: note = chemically synthesized
  source 1..20: mol_type = other DNA
tcccttctttctcaagccca

SEQ ID NO: 37500 - DNA, 20 bp, synthetic construct
  misc_feature 1..20: note = chemically synthesized
  source 1..20: mol_type = other DNA
cccttctttctcaagcccaa

SEQ ID NO: 37501 - DNA, 20 bp, synthetic construct
  misc_feature 1..20: note = chemically synthesized
  source 1..20: mol_type = other DNA
ctcaagcccaagggcattaa

SEQ ID NO: 37502 - DNA, 20 bp, synthetic construct
  misc_feature 1..20: note = chemically synthesized
  source 1..20: mol_type = other DNA
aagcccaagggcattaacgg

SEQ ID NO: 37503 - DNA, 20 bp, synthetic construct
  misc_feature 1..20: note = chemically synthesized
  source 1..20: mol_type = other DNA
cattaacggtggtactgctg

SEQ ID NO: 37504 - DNA, 20 bp, synthetic construct
  misc_feature 1..20: note = chemically synthesized
  source 1..20: mol_type = other DNA
tggtactgctgcagctgaaa

SEQ ID NO: 37505 - DNA, 20 bp, synthetic construct
  misc_feature 1..20: note = chemically synthesized
  source 1..20: mol_type = other DNA
tactgctgcagctgaaatgg

SEQ ID NO: 37506 - DNA, 20 bp, synthetic construct
  misc_feature 1..20: note = chemically synthesized
  source 1..20: mol_type = other DNA
ctgctgcagctgaaatggca

SEQ ID NO: 37507 - DNA, 20 bp, synthetic construct
  misc_feature 1..20: note = chemically synthesized
  source 1..20: mol_type = other DNA
tgctgcagctgaaatggcag

SEQ ID NO: 37508 - DNA, 20 bp, synthetic construct
  misc_feature 1..20: note = chemically synthesized
  source 1..20: mol_type = other DNA
gctgcagctgaaatggcaga

SEQ ID NO: 37509 - DNA, 20 bp, synthetic construct
  misc_feature 1..20: note = chemically synthesized
  source 1..20: mol_type = other DNA
ctgcagctgaaatggcagag

SEQ ID NO: 37510 - DNA, 20 bp, synthetic construct
  misc_feature 1..20: note = chemically synthesized
  source 1..20: mol_type = other DNA
ctgaaatggcagaggggctg

SEQ ID NO: 37511 - DNA, 20 bp, synthetic construct
  misc_feature 1..20: note = chemically synthesized
  source 1..20: mol_type = other DNA
tgaaatggcagaggggctgt

SEQ ID NO: 37512 - DNA, 20 bp, synthetic construct
  misc_feature 1..20: note = chemically synthesized
  source 1..20: mol_type = other DNA
aggggctgtgggttgtctct

SEQ ID NO: 37513 - DNA, 20 bp, synthetic construct
  misc_feature 1..20: note = chemically synthesized
  source 1..20: mol_type = other DNA
tgtctcttggatttcctccc

SEQ ID NO: 37514 - DNA, 20 bp, synthetic construct
  misc_feature 1..20: note = chemically synthesized
  source 1..20: mol_type = other DNA
tctcttggatttcctcccca

SEQ ID NO: 37515 - DNA, 20 bp, synthetic construct
  misc_feature 1..20: note = chemically synthesized
  source 1..20: mol_type = other DNA
cttggatttcctccccagag

SEQ ID NO: 37516 - DNA, 20 bp, synthetic construct
  misc_feature 1..20: note = chemically synthesized
  source 1..20: mol_type = other DNA
atttcctccccagagaagca

SEQ ID NO: 37517 - DNA, 20 bp, synthetic construct
  misc_feature 1..20: note = chemically synthesized
  source 1..20: mol_type = other DNA
ttcctccccagagaagcaca

SEQ ID NO: 37518 - DNA, 20 bp, synthetic construct
  misc_feature 1..20: note = chemically synthesized
  source 1..20: mol_type = other DNA
ccaacactgactaaaatgtt

SEQ ID NO: 37519 - DNA, 20 bp, synthetic construct
  misc_feature 1..20: note = chemically synthesized
  source 1..20: mol_type = other DNA
caacactgactaaaatgttc

SEQ ID NO: 37520 - DNA, 20 bp, synthetic construct
  misc_feature 1..20: note = chemically synthesized
  source 1..20: mol_type = other DNA
cactgactaaaatgttcagg

SEQ ID NO: 37521 - DNA, 20 bp, synthetic construct
  misc_feature 1..20: note = chemically synthesized
  source 1..20: mol_type = other DNA
actgactaaaatgttcaggc

SEQ ID NO: 37522 - DNA, 20 bp, synthetic construct
  misc_feature 1..20: note = chemically synthesized
  source 1..20: mol_type = other DNA
ctgactaaaatgttcaggca

SEQ ID NO: 37523 - DNA, 20 bp, synthetic construct
  misc_feature 1..20: note = chemically synthesized
  source 1..20: mol_type = other DNA
ctaaaatgttcaggcagggc

SEQ ID NO: 37524 - DNA, 20 bp, synthetic construct
  misc_feature 1..20: note = chemically synthesized
  source 1..20: mol_type = other DNA
taaaatgttcaggcagggcc

SEQ ID NO: 37525 - DNA, 20 bp, synthetic construct
  misc_feature 1..20: note = chemically synthesized
  source 1..20: mol_type = other DNA
aaaatgttcaggcagggcca

SEQ ID NO: 37526 - DNA, 20 bp, synthetic construct
  misc_feature 1..20: note = chemically synthesized
  source 1..20: mol_type = other DNA
atgttcaggcagggccaggg

SEQ ID NO: 37527 - DNA, 20 bp, synthetic construct
  misc_feature 1..20: note = chemically synthesized
  source 1..20: mol_type = other DNA
cagggtggctgtgctctgcc

SEQ ID NO: 37528 - DNA, 20 bp, synthetic construct
  misc_feature 1..20: note = chemically synthesized
  source 1..20: mol_type = other DNA
gtggctgtgctctgcccagt

SEQ ID NO: 37529 - DNA, 20 bp, synthetic construct
  misc_feature 1..20: note = chemically synthesized
  source 1..20: mol_type = other DNA
tggctgtgctctgcccagtg

SEQ ID NO: 37530 - DNA, 20 bp, synthetic construct
  misc_feature 1..20: note = chemically synthesized
  source 1..20: mol_type = other DNA
gtgctctgcccagtgaggaa

SEQ ID NO: 37531 - DNA, 20 bp, synthetic construct
  misc_feature 1..20: note = chemically synthesized
  source 1..20: mol_type = other DNA
ctctgcccagtgaggaatag

SEQ ID NO: 37532 - DNA, 20 bp, synthetic construct
  misc_feature 1..20: note = chemically synthesized
  source 1..20: mol_type = other DNA
tctgcccagtgaggaatagt

SEQ ID NO: 37533 - DNA, 20 bp, synthetic construct
  misc_feature 1..20: note = chemically synthesized
  source 1..20: mol_type = other DNA
ctgcccagtgaggaatagta

SEQ ID NO: 37534 - DNA, 20 bp, synthetic construct
  misc_feature 1..20: note = chemically synthesized
  source 1..20: mol_type = other DNA
tgcccagtgaggaatagtag

SEQ ID NO: 37535 - DNA, 20 bp, synthetic construct
  misc_feature 1..20: note = chemically synthesized
  source 1..20: mol_type = other DNA
ccagtgaggaatagtagggg

SEQ ID NO: 37536 - DNA, 20 bp, synthetic construct
  misc_feature 1..20: note = chemically synthesized
  source 1..20: mol_type = other DNA
cagtgaggaatagtaggggc

SEQ ID NO: 37537 - DNA, 20 bp, synthetic construct
  misc_feature 1..20: note = chemically synthesized
  source 1..20: mol_type = other DNA
agtgaggaatagtaggggca

SEQ ID NO: 37538 - DNA, 20 bp, synthetic construct
  misc_feature 1..20: note = chemically synthesized
  source 1..20: mol_type = other DNA
ggaatagtaggggcagggac

SEQ ID NO: 37539 - DNA, 20 bp, synthetic construct
  misc_feature 1..20: note = chemically synthesized
  source 1..20: mol_type = other DNA
agtaggggcagggaccagtg

SEQ ID NO: 37540 - DNA, 20 bp, synthetic construct
  misc_feature 1..20: note = chemically synthesized
  source 1..20: mol_type = other DNA
gcagggaccagtgcagaaaa

SEQ ID NO: 37541 - DNA, 20 bp, synthetic construct
  misc_feature 1..20: note = chemically synthesized
  source 1..20: mol_type = other DNA
gaccagtgcagaaaacagtg

SEQ ID NO: 37542 - DNA, 20 bp, synthetic construct
  misc_feature 1..20: note = chemically synthesized
  source 1..20: mol_type = other DNA
cagtgtggccacttttccat

SEQ ID NO: 37543 - DNA, 20 bp, synthetic construct
  misc_feature 1..20: note = chemically synthesized
  source 1..20: mol_type = other DNA
agtgtggccacttttccata

SEQ ID NO: 37544 - DNA, 20 bp, synthetic construct
  misc_feature 1..20: note = chemically synthesized
  source 1..20: mol_type = other DNA
gtggccacttttccataagg

SEQ ID NO: 37545 - DNA, 20 bp, synthetic construct
  misc_feature 1..20: note = chemically synthesized
  source 1..20: mol_type = other DNA
ataaggcagctacactgtgc

SEQ ID NO: 37546 - DNA, 20 bp, synthetic construct
  misc_feature 1..20: note = chemically synthesized
  source 1..20: mol_type = other DNA
aaggcagctacactgtgctg

SEQ ID NO: 37547 - DNA, 20 bp, synthetic construct
  misc_feature 1..20: note = chemically synthesized
  source 1..20: mol_type = other DNA
aggcagctacactgtgctgg

SEQ ID NO: 37548 - DNA, 20 bp, synthetic construct
  misc_feature 1..20: note = chemically synthesized
  source 1..20: mol_type = other DNA
acactgtgctggaggtccgt

SEQ ID NO: 37549 - DNA, 20 bp, synthetic construct
  misc_feature 1..20: note = chemically synthesized
  source 1..20: mol_type = other DNA
actgtgctggaggtccgtga

SEQ ID NO: 37550 - DNA, 20 bp, synthetic construct
  misc_feature 1..20: note = chemically synthesized
  source 1..20: mol_type = other DNA
ggaggtccgtgagagtcctg

SEQ ID NO: 37551 - DNA, 20 bp, synthetic construct
  misc_feature 1..20: note = chemically synthesized
  source 1..20: mol_type = other DNA
gaagctcctcgctccctcct

SEQ ID NO: 37552 - DNA, 20 bp, synthetic construct
  misc_feature 1..20: note = chemically synthesized
  source 1..20: mol_type = other DNA
tgagcccatactttaatctc

SEQ ID NO: 37553 - DNA, 20 bp, synthetic construct
  misc_feature 1..20: note = chemically synthesized
  source 1..20: mol_type = other DNA
agcccatactttaatctcaa

SEQ ID NO: 37554 - DNA, 20 bp, synthetic construct
  misc_feature 1..20: note = chemically synthesized
  source 1..20: mol_type = other DNA
tactttaatctcaagagttt

SEQ ID NO: 37555 - DNA, 20 bp, synthetic construct
  misc_feature 1..20: note = chemically synthesized
  source 1..20: mol_type = other DNA
tctcaagagtttgagataaa

SEQ ID NO: 37556 - DNA, 20 bp, synthetic construct
  misc_feature 1..20: note = chemically synthesized
  source 1..20: mol_type = other DNA
caagagtttgagataaacag

SEQ ID NO: 37557 - DNA, 20 bp, synthetic construct
  misc_feature 1..20: note = chemically synthesized
  source 1..20: mol_type = other DNA
agtttgagataaacagtggt

SEQ ID NO: 37558 - DNA, 20 bp, synthetic construct
  misc_feature 1..20: note = chemically synthesized
  source 1..20: mol_type = other DNA
gtttgagataaacagtggta

SEQ ID NO: 37559 - DNA, 20 bp, synthetic construct
  misc_feature 1..20: note = chemically synthesized
  source 1..20: mol_type = other DNA
tgagataaacagtggtaagg

SEQ ID NO: 37560 - DNA, 20 bp, synthetic construct
  misc_feature 1..20: note = chemically synthesized
  source 1..20: mol_type = other DNA
ataaacagtggtaaggaaga

SEQ ID NO: 37561 - DNA, 20 bp, synthetic construct
  misc_feature 1..20: note = chemically synthesized
  source 1..20: mol_type = other DNA
tggtaaggaagaaagtacaa

SEQ ID NO: 37562 - DNA, 20 bp, synthetic construct
  misc_feature 1..20: note = chemically synthesized
  source 1..20: mol_type = other DNA
ggtaaggaagaaagtacaac

SEQ ID NO: 37563 - DNA, 20 bp, synthetic construct
  misc_feature 1..20: note = chemically synthesized
  source 1..20: mol_type = other DNA
ggaagaaagtacaacgggta

SEQ ID NO: 37564 - DNA, 20 bp, synthetic construct
  misc_feature 1..20: note = chemically synthesized
  source 1..20: mol_type = other DNA
cgggtacggctaatgaaacc

SEQ ID NO: 37565 - DNA, 20 bp, synthetic construct
  misc_feature 1..20: note = chemically synthesized
  source 1..20: mol_type = other DNA
gggtacggctaatgaaaccc

SEQ ID NO: 37566 - DNA, 20 bp, synthetic construct
  misc_feature 1..20: note = chemically synthesized
  source 1..20: mol_type = other DNA
tacggctaatgaaacccagg

SEQ ID NO: 37567 - DNA, 20 bp, synthetic construct
  misc_feature 1..20: note = chemically synthesized
  source 1..20: mol_type = other DNA
ctaatgaaacccaggaagat

SEQ ID NO: 37568 - DNA, 20 bp, synthetic construct
  misc_feature 1..20: note = chemically synthesized
  source 1..20: mol_type = other DNA
caggaagataagtcaatgcg

SEQ ID NO: 37569 - DNA, 20 bp, synthetic construct
  misc_feature 1..20: note = chemically synthesized
  source 1..20: mol_type = other DNA
gaagataagtcaatgcgtag

SEQ ID NO: 37570 - DNA, 20 bp, synthetic construct
  misc_feature 1..20: note = chemically synthesized
  source 1..20: mol_type = other DNA
gtagaagtaattccaaccta

SEQ ID NO: 37571 - DNA, 20 bp, synthetic construct
  misc_feature 1..20: note = chemically synthesized
  source 1..20: mol_type = other DNA
ctttttaaaaatcatattta

SEQ ID NO: 37572 - DNA, 20 bp, synthetic construct
  misc_feature 1..20: note = chemically synthesized
  source 1..20: mol_type = other DNA
ttttaaaaatcatatttata

SEQ ID NO: 37573 - DNA, 20 bp, synthetic construct
  misc_feature 1..20: note = chemically synthesized
  source 1..20: mol_type = other DNA
tttaaaaatcatatttatag

SEQ ID NO: 37574 - DNA, 20 bp, synthetic construct
  misc_feature 1..20: note = chemically synthesized
  source 1..20: mol_type = other DNA
atcatatttatagaggtttg

SEQ ID NO: 37575 - DNA, 20 bp, synthetic construct
  misc_feature 1..20: note = chemically synthesized
  source 1..20: mol_type = other DNA
agaggtttgcagtgatacta

SEQ ID NO: 37576 - DNA, 20 bp, synthetic construct
  misc_feature 1..20: note = chemically synthesized
  source 1..20: mol_type = other DNA
caatattgcaaatcattatt

SEQ ID NO: 37577 - DNA, 20 bp, synthetic construct
  misc_feature 1..20: note = chemically synthesized
  source 1..20: mol_type = other DNA
caaatcattattaagaatac

SEQ ID NO: 37578 - DNA, 20 bp, synthetic construct
  misc_feature 1..20: note = chemically synthesized
  source 1..20: mol_type = other DNA
atcattattaagaatacaag

SEQ ID NO: 37579 - DNA, 20 bp, synthetic construct
  misc_feature 1..20: note = chemically synthesized
  source 1..20: mol_type = other DNA
tttctttaacacctgtgata

SEQ ID NO: 37580 - DNA, 20 bp, synthetic construct
  misc_feature 1..20: note = chemically synthesized
  source 1..20: mol_type = other DNA
ttctttaacacctgtgatac

SEQ ID NO: 37581 - DNA, 20 bp, synthetic construct
  misc_feature 1..20: note = chemically synthesized
  source 1..20: mol_type = other DNA
ttgatatgaattctacgtaa

SEQ ID NO: 37582 - DNA, 20 bp, synthetic construct
  misc_feature 1..20: note = chemically synthesized
  source 1..20: mol_type = other DNA
ttgcttcttgccaccaccca

SEQ ID NO: 37583 - DNA, 20 bp, synthetic construct
  misc_feature 1..20: note = chemically synthesized
  source 1..20: mol_type = other DNA
cttcttgccaccacccaaag

SEQ ID NO: 37584 - DNA, 20 bp, synthetic construct
  misc_feature 1..20: note = chemically synthesized
  source 1..20: mol_type = other DNA
ttcttgccaccacccaaaga

SEQ ID NO: 37585 - DNA, 20 bp, synthetic construct
  misc_feature 1..20: note = chemically synthesized
  source 1..20: mol_type = other DNA
accacccaaagaaggttgta

SEQ ID NO: 37586 - DNA, 20 bp, synthetic construct
  misc_feature 1..20: note = chemically synthesized
  source 1..20: mol_type = other DNA
aaagaaggttgtatagcact

SEQ ID NO: 37587 - DNA, 20 bp, synthetic construct
  misc_feature 1..20: note = chemically synthesized
  source 1..20: mol_type = other DNA
aactgcaaccgtgtatctct

SEQ ID NO: 37588 - DNA, 20 bp, synthetic construct
  misc_feature 1..20: note = chemically synthesized
  source 1..20: mol_type = other DNA
actgcaaccgtgtatctctt

SEQ ID NO: 37589 - DNA, 20 bp, synthetic construct
  misc_feature 1..20: note = chemically synthesized
  source 1..20: mol_type = other DNA
ttgccctcttccctccctat

SEQ ID NO: 37590 - DNA, 20 bp, synthetic construct
  misc_feature 1..20: note = chemically synthesized
  source 1..20: mol_type = other DNA
cctccctatcagcatgtatc

SEQ ID NO: 37591 - DNA, 20 bp, synthetic construct
  misc_feature 1..20: note = chemically synthesized
  source 1..20: mol_type = other DNA
ccctatcagcatgtatctag

SEQ ID NO: 37592 - DNA, 20 bp, synthetic construct
  misc_feature 1..20: note = chemically synthesized
  source 1..20: mol_type = other DNA
gtatctagcagcattctgaa

SEQ ID NO: 37593 - DNA, 20 bp, synthetic construct
  misc_feature 1..20: note = chemically synthesized
  source 1..20: mol_type = other DNA
attctgaaaagttaactgca

SEQ ID NO: 37594 - DNA, 20 bp, synthetic construct
  misc_feature 1..20: note = chemically synthesized
  source 1..20: mol_type = other DNA
tgaaaagttaactgcacagt

SEQ ID NO: 37595 - DNA, 20 bp, synthetic construct
  misc_feature 1..20: note = chemically synthesized
  source 1..20: mol_type = other DNA
actgcacagtgagcgactgc

SEQ ID NO: 37596 - DNA, 20 bp, synthetic construct
  misc_feature 1..20: note = chemically synthesized
  source 1..20: mol_type = other DNA
ctgcacagtgagcgactgct

SEQ ID NO: 37597 - DNA, 20 bp, synthetic construct
  misc_feature 1..20: note = chemically synthesized
  source 1..20: mol_type = other DNA
gagcgactgctgggcatctt

SEQ ID NO: 37598 - DNA, 20 bp, synthetic construct
  misc_feature 1..20: note = chemically synthesized
  source 1..20: mol_type = other DNA
agcgactgctgggcatctta

SEQ ID NO: 37599 - DNA, 20 bp, synthetic construct
  misc_feature 1..20: note = chemically synthesized
  source 1..20: mol_type = other DNA
gcgactgctgggcatcttaa

SEQ ID NO: 37600 - DNA, 20 bp, synthetic construct
  misc_feature 1..20: note = chemically synthesized
  source 1..20: mol_type = other DNA
cgactgctgggcatcttaag

SEQ ID NO: 37601 - DNA, 20 bp, synthetic construct
  misc_feature 1..20: note = chemically synthesized
  source 1..20: mol_type = other DNA
aaggggcattcttttctacc

SEQ ID NO: 37602 - DNA, 20 bp, synthetic construct
  misc_feature 1..20: note = chemically synthesized
  source 1..20: mol_type = other DNA
aggggcattcttttctacct

SEQ ID NO: 37603 - DNA, 20 bp, synthetic construct
  misc_feature 1..20: note = chemically synthesized
  source 1..20: mol_type = other DNA
ccccctcctccactcatgtc

SEQ ID NO: 37604 - DNA, 20 bp, synthetic construct
  misc_feature 1..20: note = chemically synthesized
  source 1..20: mol_type = other DNA
ctccactcatgtctagcatg

SEQ ID NO: 37605 - DNA, 20 bp, synthetic construct
  misc_feature 1..20: note = chemically synthesized
  source 1..20: mol_type = other DNA
tccactcatgtctagcatgc

SEQ ID NO: 37606 - DNA, 20 bp, synthetic construct
  misc_feature 1..20: note = chemically synthesized
  source 1..20: mol_type = other DNA
catgtctagcatgcaggact

SEQ ID NO: 37607 - DNA, 20 bp, synthetic construct
  misc_feature 1..20: note = chemically synthesized
  source 1..20: mol_type = other DNA
atgtctagcatgcaggactt

SEQ ID NO: 37608 - DNA, 20 bp, synthetic construct
  misc_feature 1..20: note = chemically synthesized
  source 1..20: mol_type = other DNA
tgcaggacttgggtaatctc

SEQ ID NO: 37609 - DNA, 20 bp, synthetic construct
  misc_feature 1..20: note = chemically synthesized
  source 1..20: mol_type = other DNA
gcaggacttgggtaatctct

SEQ ID NO: 37610 - DNA, 20 bp, synthetic construct
  misc_feature 1..20: note = chemically synthesized
  source 1..20: mol_type = other DNA
caggacttgggtaatctctg

SEQ ID NO: 37611 - DNA, 20 bp, synthetic construct
  misc_feature 1..20: note = chemically synthesized
  source 1..20: mol_type = other DNA
ttgggtaatctctggggttt

SEQ ID NO: 37612 - DNA, 20 bp, synthetic construct
  misc_feature 1..20: note = chemically synthesized
  source 1..20: mol_type = other DNA
ctctggggtttcagattctc

SEQ ID NO: 37613 - DNA, 20 bp, synthetic construct
  misc_feature 1..20: note = chemically synthesized
  source 1..20: mol_type = other DNA
tctccagacctccattctct

SEQ ID NO: 37614 - DNA, 20 bp, synthetic construct
  misc_feature 1..20: note = chemically synthesized
  source 1..20: mol_type = other DNA
ctccagacctccattctctc

SEQ ID NO: 37615 - DNA, 20 bp, synthetic construct
  misc_feature 1..20: note = chemically synthesized
  source 1..20: mol_type = other DNA
tccagacctccattctctca

SEQ ID NO: 37616 - DNA, 20 bp, synthetic construct
  misc_feature 1..20: note = chemically synthesized
  source 1..20: mol_type = other DNA
ccagacctccattctctcag

SEQ ID NO: 37617 - DNA, 20 bp, synthetic construct
  misc_feature 1..20: note = chemically synthesized
  source 1..20: mol_type = other DNA
ttccacctcctgctcatatc

SEQ ID NO: 37618 - DNA, 20 bp, synthetic construct
  misc_feature 1..20: note = chemically synthesized
  source 1..20: mol_type = other DNA
ctcatatctagctatctgcc

SEQ ID NO: 37619 - DNA, 20 bp, synthetic construct
  misc_feature 1..20: note = chemically synthesized
  source 1..20: mol_type = other DNA
ctaaccataaaatcttaaat

SEQ ID NO: 37620 - DNA, 20 bp, synthetic construct
  misc_feature 1..20: note = chemically synthesized
  source 1..20: mol_type = other DNA
catgtcatgataaaaaaaat

SEQ ID NO: 37621 - DNA, 20 bp, synthetic construct
  misc_feature 1..20: note = chemically synthesized
  source 1..20: mol_type = other DNA
taaaaaaaataagacaccat

SEQ ID NO: 37622 - DNA, 20 bp, synthetic construct
  misc_feature 1..20: note = chemically synthesized
  source 1..20: mol_type = other DNA
aaaaaataagacaccatcag

SEQ ID NO: 37623 - DNA, 20 bp, synthetic construct
  misc_feature 1..20: note = chemically synthesized
  source 1..20: mol_type = other DNA
tcagtggcaactgtgttgcc

SEQ ID NO: 37624 - DNA, 20 bp, synthetic construct
  misc_feature 1..20: note = chemically synthesized
  source 1..20: mol_type = other DNA
ttgatctgctaatccctgtg

SEQ ID NO: 37625 - DNA, 20 bp, synthetic construct
  misc_feature 1..20: note = chemically synthesized
  source 1..20: mol_type = other DNA
ccctgtgtagaaatgaacct

SEQ ID NO: 37626 - DNA, 20 bp, synthetic construct
  misc_feature 1..20: note = chemically synthesized
  source 1..20: mol_type = other DNA
ctgtgtagaaatgaaccttg

SEQ ID NO: 37627 - DNA, 20 bp, synthetic construct
  misc_feature 1..20: note = chemically synthesized
  source 1..20: mol_type = other DNA
tgtgtagaaatgaaccttgg

SEQ ID NO: 37628 - DNA, 20 bp, synthetic construct
  misc_feature 1..20: note = chemically synthesized
  source 1..20: mol_type = other DNA
atttcttacaatatgtgcat

SEQ ID NO: 37629 - DNA, 20 bp, synthetic construct
  misc_feature 1..20: note = chemically synthesized
  source 1..20: mol_type = other DNA
ttgtaacactgtcactttga

SEQ ID NO: 37630 - DNA, 20 bp, synthetic construct
  misc_feature 1..20: note = chemically synthesized
  source 1..20: mol_type = other DNA
ctgtcactttgacagttgat

SEQ ID NO: 37631 - DNA, 20 bp, synthetic construct
  misc_feature 1..20: note = chemically synthesized
  source 1..20: mol_type = other DNA
gttgataagcatcttctgaa

SEQ ID NO: 37632 - DNA, 20 bp, synthetic construct
  misc_feature 1..20: note = chemically synthesized
  source 1..20: mol_type = other DNA
cttctgaatggtccctcctt

SEQ ID NO: 37633 - DNA, 20 bp, synthetic construct
  misc_feature 1..20: note = chemically synthesized
  source 1..20: mol_type = other DNA
tcctttagttacaaaaatgt

SEQ ID NO: 37634 - DNA, 20 bp, synthetic construct
  misc_feature 1..20: note = chemically synthesized
  source 1..20: mol_type = other DNA
gttacaaaaatgttggtgca

SEQ ID NO: 37635 - DNA, 20 bp, synthetic construct
  misc_feature 1..20: note = chemically synthesized
  source 1..20: mol_type = other DNA
tgttggtgcatggatgatgt

SEQ ID NO: 37636 - DNA, 20 bp, synthetic construct
  misc_feature 1..20: note = chemically synthesized
  source 1..20: mol_type = other DNA
gttggtgcatggatgatgtt

SEQ ID NO: 37637 - DNA, 20 bp, synthetic construct
  misc_feature 1..20: note = chemically synthesized
  source 1..20: mol_type = other DNA
tgatgttgggaataaataaa

SEQ ID NO: 37638 - DNA, 20 bp, synthetic construct
  misc_feature 1..20: note = chemically synthesized
  source 1..20: mol_type = other DNA
actaaattatgttctcatct

SEQ ID NO: 37639 - DNA, 20 bp, synthetic construct
  misc_feature 1..20: note = chemically synthesized
  source 1..20: mol_type = other DNA
ctaaattatgttctcatctt

SEQ ID NO: 37640 - DNA, 20 bp, synthetic construct
  misc_feature 1..20: note = chemically synthesized
  source 1..20: mol_type = other DNA
tctcatcttgggcaaaaatt

SEQ ID NO: 37641 - DNA, 20 bp, synthetic construct
  misc_feature 1..20: note = chemically synthesized
  source 1..20: mol_type = other DNA
aaaattaagcaaaaaaaaaa

SEQ ID NO: 37642 - DNA, 20 bp, synthetic construct
  misc_feature 1..20: note = chemically synthesized
  source 1..20: mol_type = other DNA
aattaagcaaaaaaaaaatg

SEQ ID NO: 37643 - DNA, 20 bp, synthetic construct
  misc_feature 1..20: note = chemically synthesized
  source 1..20: mol_type = other DNA
attaagcaaaaaaaaaatgg

SEQ ID NO: 37644 - DNA, 20 bp, synthetic construct
  misc_feature 1..20: note = chemically synthesized
  source 1..20: mol_type = other DNA
aaaaaaaaatggaggatatg

SEQ ID NO: 37645 - DNA, 20 bp, synthetic construct
  misc_feature 1..20: note = chemically synthesized
  source 1..20: mol_type = other DNA
ggatatgaagctcctccaca

SEQ ID NO: 37646 - DNA, 20 bp, synthetic construct
  misc_feature 1..20: note = chemically synthesized
  source 1..20: mol_type = other DNA
tatgaagctcctccacaaag

SEQ ID NO: 37647 - DNA, 20 bp, synthetic construct
  misc_feature 1..20: note = chemically synthesized
  source 1..20: mol_type = other DNA
atgaagctcctccacaaaga

SEQ ID NO: 37648 - DNA, 20 bp, synthetic construct
  misc_feature 1..20: note = chemically synthesized
  source 1..20: mol_type = other DNA
aaagaaggccatttttgtac

SEQ ID NO: 37649 - DNA, 20 bp, synthetic construct
  misc_feature 1..20: note = chemically synthesized
  source 1..20: mol_type = other DNA
aagaaggccatttttgtact

SEQ ID NO: 37650 - DNA, 20 bp, synthetic construct
  misc_feature 1..20: note = chemically synthesized
  source 1..20: mol_type = other DNA
tttttgtactaggcttacta

SEQ ID NO: 37651 - DNA, 20 bp, synthetic construct
  misc_feature 1..20: note = chemically synthesized
  source 1..20: mol_type = other DNA
ctacagtgacacaccactat

SEQ ID NO: 37652 - DNA, 20 bp, synthetic construct
  misc_feature 1..20: note = chemically synthesized
  source 1..20: mol_type = other DNA
agtgacacaccactattagt

SEQ ID NO: 37653 - DNA, 20 bp, synthetic construct
  misc_feature 1..20: note = chemically synthesized
  source 1..20: mol_type = other DNA
gtgacacaccactattagtt

SEQ ID NO: 37654 - DNA, 20 bp, synthetic construct
  misc_feature 1..20: note = chemically synthesized
  source 1..20: mol_type = other DNA
tgacacaccactattagttg

SEQ ID NO: 37655 - DNA, 20 bp, synthetic construct
  misc_feature 1..20: note = chemically synthesized
  source 1..20: mol_type = other DNA
acacaccactattagttggg

SEQ ID NO: 37656 - DNA, 20 bp, synthetic construct
  misc_feature 1..20: note = chemically synthesized
  source 1..20: mol_type = other DNA
actattagttggggagaatt

SEQ ID NO: 37657 - DNA, 20 bp, synthetic construct
  misc_feature 1..20: note = chemically synthesized
  source 1..20: mol_type = other DNA
ggggagaattcagtttttcc

SEQ ID NO: 37658 - DNA, 20 bp, synthetic construct
  misc_feature 1..20: note = chemically synthesized
  source 1..20: mol_type = other DNA
gggagaattcagtttttcca

SEQ ID NO: 37659 - DNA, 20 bp, synthetic construct
  misc_feature 1..20: note = chemically synthesized
  source 1..20: mol_type = other DNA
cagtttttccaaggtgttga

SEQ ID NO: 37660 - DNA, 20 bp, synthetic construct
  misc_feature 1..20: note = chemically synthesized
  source 1..20: mol_type = other DNA
agtttttccaaggtgttgat

SEQ ID NO: 37661 - DNA, 20 bp, synthetic construct
  misc_feature 1..20: note = chemically synthesized
  source 1..20: mol_type = other DNA
ccaaggtgttgataggcatc

SEQ ID NO: 37662 - DNA, 20 bp, synthetic construct
  misc_feature 1..20: note = chemically synthesized
  source 1..20: mol_type = other DNA
gttgataggcatccagattt

SEQ ID NO: 37663 - DNA, 20 bp, synthetic construct
  misc_feature 1..20: note = chemically synthesized
  source 1..20: mol_type = other DNA
tgataggcatccagatttca

SEQ ID NO: 37664 - DNA, 20 bp, synthetic construct
  misc_feature 1..20: note = chemically synthesized
  source 1..20: mol_type = other DNA
gataggcatccagatttcag

SEQ ID NO: 37665 - DNA, 20 bp, synthetic construct
  misc_feature 1..20: note = chemically synthesized
  source 1..20: mol_type = other DNA
tttcagaggaaattgtaaaa

SEQ ID NO: 37666 - DNA, 20 bp, synthetic construct
  misc_feature 1..20: note = chemically synthesized
  source 1..20: mol_type = other DNA
cagaggaaattgtaaaaaag

SEQ ID NO: 37667 - DNA, 20 bp, synthetic construct
  misc_feature 1..20: note = chemically synthesized
  source 1..20: mol_type = other DNA
aattgtaaaaaagcagaacc

SEQ ID NO: 37668 - DNA, 20 bp, synthetic construct
  misc_feature 1..20: note = chemically synthesized
  source 1..20: mol_type = other DNA
attgtaaaaaagcagaacct

SEQ ID NO: 37669 - DNA, 20 bp, synthetic construct
  misc_feature 1..20: note = chemically synthesized
  source 1..20: mol_type = other DNA
actgcccacgatttttcttt

SEQ ID NO: 37670 - DNA, 20 bp, synthetic construct
  misc_feature 1..20: note = chemically synthesized
  source 1..20: mol_type = other DNA
ttttctttgagatcaaatct

SEQ ID NO: 37671 - DNA, 20 bp, synthetic construct
  misc_feature 1..20: note = chemically synthesized
  source 1..20: mol_type = other DNA
tttctttgagatcaaatctg

SEQ ID NO: 37672 - DNA, 20 bp, synthetic construct
  misc_feature 1..20: note = chemically synthesized
  source 1..20: mol_type = other DNA
gaggcaacaaatctgttcaa

SEQ ID NO: 37673 - DNA, 20 bp, synthetic construct
  misc_feature 1..20: note = chemically synthesized
  source 1..20: mol_type = other DNA
ttcaaaagctgctttctgcc

SEQ ID NO: 37674 - DNA, 20 bp, synthetic construct
  misc_feature 1..20: note = chemically synthesized
  source 1..20: mol_type = other DNA
agctgctttctgcctggttg

SEQ ID NO: 37675 - DNA, 20 bp, synthetic construct
  misc_feature 1..20: note = chemically synthesized
  source 1..20: mol_type = other DNA
ctttctgcctggttgtggca

SEQ ID NO: 37676 - DNA, 20 bp, synthetic construct
  misc_feature 1..20: note = chemically synthesized
  source 1..20: mol_type = other DNA
tttctgcctggttgtggcaa

SEQ ID NO: 37677 - DNA, 20 bp, synthetic construct
  misc_feature 1..20: note = chemically synthesized
  source 1..20: mol_type = other DNA
ttctgcctggttgtggcaaa

SEQ ID NO: 37678 - DNA, 20 bp, synthetic construct
  misc_feature 1..20: note = chemically synthesized
  source 1..20: mol_type = other DNA
tgcctggttgtggcaaaggg

SEQ ID NO: 37679 - DNA, 20 bp, synthetic construct
  misc_feature 1..20: note = chemically synthesized
  source 1..20: mol_type = other DNA
ggttgtggcaaagggtggcc

SEQ ID NO: 37680 - DNA, 20 bp, synthetic construct
  misc_feature 1..20: note = chemically synthesized
  source 1..20: mol_type = other DNA
tgtggcaaagggtggccaag

SEQ ID NO: 37681 - DNA, 20 bp, synthetic construct
  misc_feature 1..20: note = chemically synthesized
  source 1..20: mol_type = other DNA
gtggcaaagggtggccaagt

SEQ ID NO: 37682 - DNA, 20 bp, synthetic construct
  misc_feature 1..20: note = chemically synthesized
  source 1..20: mol_type = other DNA
tggcaaagggtggccaagtg

SEQ ID NO: 37683 - DNA, 20 bp, synthetic construct
  misc_feature 1..20: note = chemically synthesized
  source 1..20: mol_type = other DNA
aagggtggccaagtggggct

SEQ ID NO: 37684 - DNA, 20 bp, synthetic construct
  misc_feature 1..20: note = chemically synthesized
  source 1..20: mol_type = other DNA
ctcagctgtgttcccattgc

SEQ ID NO: 37685 - DNA, 20 bp, synthetic construct
  misc_feature 1..20: note = chemically synthesized
  source 1..20: mol_type = other DNA
tcagctgtgttcccattgca

SEQ ID NO: 37686 - DNA, 20 bp, synthetic construct
  misc_feature 1..20: note = chemically synthesized
  source 1..20: mol_type = other DNA
gttcccattgcaaggctact

SEQ ID NO: 37687 - DNA, 20 bp, synthetic construct
  misc_feature 1..20: note = chemically synthesized
  source 1..20: mol_type = other DNA
tactgagcatcccctgtcct

SEQ ID NO: 37688 - DNA, 20 bp, synthetic construct
  misc_feature 1..20: note = chemically synthesized
  source 1..20: mol_type = other DNA
actgagcatcccctgtcctg

SEQ ID NO: 37689 - DNA, 20 bp, synthetic construct
  misc_feature 1..20: note = chemically synthesized
  source 1..20: mol_type = other DNA
tcccctgtcctgaggctcct

SEQ ID NO: 37690 - DNA, 20 bp, synthetic construct
  misc_feature 1..20: note = chemically synthesized
  source 1..20: mol_type = other DNA
cccctgtcctgaggctcctt

SEQ ID NO: 37691 - DNA, 20 bp, synthetic construct
  misc_feature 1..20: note = chemically synthesized
  source 1..20: mol_type = other DNA
ctgaggctccttaggacacc

SEQ ID NO: 37692 - DNA, 20 bp, synthetic construct
  misc_feature 1..20: note = chemically synthesized
  source 1..20: mol_type = other DNA
gctccttaggacacctggct

SEQ ID NO: 37693 - DNA, 20 bp, synthetic construct
  misc_feature 1..20: note = chemically synthesized
  source 1..20: mol_type = other DNA
taggacacctggctgagctt

SEQ ID NO: 37694 - DNA, 20 bp, synthetic construct
  misc_feature 1..20: note = chemically synthesized
  source 1..20: mol_type = other DNA
gacacctggctgagcttcag

SEQ ID NO: 37695 - DNA, 20 bp, synthetic construct
  misc_feature 1..20: note = chemically synthesized
  source 1..20: mol_type = other DNA
agcttcagcagccctcttcc

SEQ ID NO: 37696 - DNA, 20 bp, synthetic construct
  misc_feature 1..20: note = chemically synthesized
  source 1..20: mol_type = other DNA
cagcagccctcttccaagcc

SEQ ID NO: 37697 - DNA, 20 bp, synthetic construct
  misc_feature 1..20: note = chemically synthesized
  source 1..20: mol_type = other DNA
gcagccctcttccaagcctg

SEQ ID NO: 37698 - DNA, 20 bp, synthetic construct
  misc_feature 1..20: note = chemically synthesized
  source 1..20: mol_type = other DNA
tcttccaagcctggagatgc

SEQ ID NO: 37699 - DNA, 20 bp, synthetic construct
  misc_feature 1..20: note = chemically synthesized
  source 1..20: mol_type = other DNA
ggagatgccagctccatctc

SEQ ID NO: 37700 - DNA, 20 bp, synthetic construct
  misc_feature 1..20: note = chemically synthesized
  source 1..20: mol_type = other DNA
tccatctctggcacaaaatg

SEQ ID NO: 37701 - DNA, 20 bp, synthetic construct
  misc_feature 1..20: note = chemically synthesized
  source 1..20: mol_type = other DNA
acaaaatgtagtgattttca

SEQ ID NO: 37702 - DNA, 20 bp, synthetic construct
  misc_feature 1..20: note = chemically synthesized
  source 1..20: mol_type = other DNA
caaaatgtagtgattttcac

SEQ ID NO: 37703 - DNA, 20 bp, synthetic construct
  misc_feature 1..20: note = chemically synthesized
  source 1..20: mol_type = other DNA
aaaatgtagtgattttcaca

SEQ ID NO: 37704 - DNA, 20 bp, synthetic construct
  misc_feature 1..20: note = chemically synthesized
  source 1..20: mol_type = other DNA
tgtagtgattttcacagggt

SEQ ID NO: 37705 - DNA, 20 bp, synthetic construct
  misc_feature 1..20: note = chemically synthesized
  source 1..20: mol_type = other DNA
tagtgattttcacagggtga

SEQ ID NO: 37706 - DNA, 20 bp, synthetic construct
  misc_feature 1..20: note = chemically synthesized
  source 1..20: mol_type = other DNA
agtgattttcacagggtgag

SEQ ID NO: 37707 - DNA, 20 bp, synthetic construct
  misc_feature 1..20: note = chemically synthesized
  source 1..20: mol_type = other DNA
ttcacagggtgagaggccaa

SEQ ID NO: 37708 - DNA, 20 bp, synthetic construct
  misc_feature 1..20: note = chemically synthesized
  source 1..20: mol_type = other DNA
cacagggtgagaggccaaaa

SEQ ID NO: 37709 - DNA, 20 bp, synthetic construct
  misc_feature 1..20: note = chemically synthesized
  source 1..20: mol_type = other DNA
acagggtgagaggccaaaag

SEQ ID NO: 37710 - DNA, 20 bp, synthetic construct
  misc_feature 1..20: note = chemically synthesized
  source 1..20: mol_type = other DNA
caaaagaggctaataaaatg

SEQ ID NO: 37711 - DNA, 20 bp, synthetic construct
  misc_feature 1..20: note = chemically synthesized
  source 1..20: mol_type = other DNA
agaggctaataaaatgaaga

SEQ ID NO: 37712 - DNA, 20 bp, synthetic construct
  misc_feature 1..20: note = chemically synthesized
  source 1..20: mol_type = other DNA
ctaataaaatgaagatagcc

SEQ ID NO: 37713 - DNA, 20 bp, synthetic construct
  misc_feature 1..20: note = chemically synthesized
  source 1..20: mol_type = other DNA
tgaagatagccaagcttcca

SEQ ID NO: 37714 - DNA, 20 bp, synthetic construct
  misc_feature 1..20: note = chemically synthesized
  source 1..20: mol_type = other DNA
agccaagcttccatggaatt

SEQ ID NO: 37715 - DNA, 20 bp, synthetic construct
  misc_feature 1..20: note = chemically synthesized
  source 1..20: mol_type = other DNA
gcttccatggaattaagcaa

SEQ ID NO: 37716 - DNA, 20 bp, synthetic construct
  misc_feature 1..20: note = chemically synthesized
  source 1..20: mol_type = other DNA
cttccatggaattaagcaac

SEQ ID NO: 37717 - DNA, 20 bp, synthetic construct
  misc_feature 1..20: note = chemically synthesized
  source 1..20: mol_type = other DNA
aggacaaccttgaccacttt

SEQ ID NO: 37718 - DNA, 20 bp, synthetic construct
  misc_feature 1..20: note = chemically synthesized
  source 1..20: mol_type = other DNA
ggacaaccttgaccactttg

SEQ ID NO: 37719 - DNA, 20 bp, synthetic construct
  misc_feature 1..20: note = chemically synthesized
  source 1..20: mol_type = other DNA
gacaaccttgaccactttga

SEQ ID NO: 37720 - DNA, 20 bp, synthetic construct
  misc_feature 1..20: note = chemically synthesized
  source 1..20: mol_type = other DNA
acaaccttgaccactttgag

SEQ ID NO: 37721 - DNA, 20 bp, synthetic construct
  misc_feature 1..20: note = chemically synthesized
  source 1..20: mol_type = other DNA
cttgaccactttgaggggtg

SEQ ID NO: 37722 - DNA, 20 bp, synthetic construct
  misc_feature 1..20: note = chemically synthesized
  source 1..20: mol_type = other DNA
gaccactttgaggggtgtgg

SEQ ID NO: 37723 - DNA, 20 bp, synthetic construct
  misc_feature 1..20: note = chemically synthesized
  source 1..20: mol_type = other DNA
accactttgaggggtgtggt

SEQ ID NO: 37724 - DNA, 20 bp, synthetic construct
  misc_feature 1..20: note = chemically synthesized
  source 1..20: mol_type = other DNA
ccactttgaggggtgtggtg

SEQ ID NO: 37725 - DNA, 20 bp, synthetic construct
  misc_feature 1..20: note = chemically synthesized
  source 1..20: mol_type = other DNA
cactttgaggggtgtggtgg

SEQ ID NO: 37726 - DNA, 20 bp, synthetic construct
  misc_feature 1..20: note = chemically synthesized
  source 1..20: mol_type = other DNA
ggtgtggtgggggccacatg

SEQ ID NO: 37727 - DNA, 20 bp, synthetic construct
  misc_feature 1..20: note = chemically synthesized
  source 1..20: mol_type = other DNA
tggtgggggccacatgcaga

SEQ ID NO: 37728 - DNA, 20 bp, synthetic construct
  misc_feature 1..20: note = chemically synthesized
  source 1..20: mol_type = other DNA
gtgggggccacatgcagatg

SEQ ID NO: 37729 - DNA, 20 bp, synthetic construct
  misc_feature 1..20: note = chemically synthesized
  source 1..20: mol_type = other DNA
ggggccacatgcagatggag

SEQ ID NO: 37730 - DNA, 20 bp, synthetic construct
  misc_feature 1..20: note = chemically synthesized
  source 1..20: mol_type = other DNA
gggccacatgcagatggagt

SEQ ID NO: 37731 - DNA, 20 bp, synthetic construct
  misc_feature 1..20: note = chemically synthesized
  source 1..20: mol_type = other DNA
catgcagatggagtgggtta

SEQ ID NO: 37732 - DNA, 20 bp, synthetic construct
  misc_feature 1..20: note = chemically synthesized
  source 1..20: mol_type = other DNA
tgcagatggagtgggttaaa

SEQ ID NO: 37733 - DNA, 20 bp, synthetic construct
  misc_feature 1..20: note = chemically synthesized
  source 1..20: mol_type = other DNA
ggagtgggttaaagagtgac

SEQ ID NO: 37734 - DNA, 20 bp, synthetic construct
  misc_feature 1..20: note = chemically synthesized
  source 1..20: mol_type = other DNA
gtgggttaaagagtgactag

SEQ ID NO: 37735 - DNA, 20 bp, synthetic construct
  misc_feature 1..20: note = chemically synthesized
  source 1..20: mol_type = other DNA
gggttaaagagtgactagaa

SEQ ID NO: 37736 - DNA, 20 bp, synthetic construct
  misc_feature 1..20: note = chemically synthesized
  source 1..20: mol_type = other DNA
ttaaagagtgactagaagag

SEQ ID NO: 37737 - DNA, 20 bp, synthetic construct
  misc_feature 1..20: note = chemically synthesized
  source 1..20: mol_type = other DNA
aagagtgactagaagagcag

SEQ ID NO: 37738 - DNA, 20 bp, synthetic construct
  misc_feature 1..20: note = chemically synthesized
  source 1..20: mol_type = other DNA
agagtgactagaagagcagt

SEQ ID NO: 37739 - DNA, 20 bp, synthetic construct
  misc_feature 1..20: note = chemically synthesized
  source 1..20: mol_type = other DNA
gagtgactagaagagcagtg

SEQ ID NO: 37740 - DNA, 20 bp, synthetic construct
  misc_feature 1..20: note = chemically synthesized
  source 1..20: mol_type = other DNA
agtgactagaagagcagtgg

SEQ ID NO: 37741 - DNA, 20 bp, synthetic construct
  misc_feature 1..20: note = chemically synthesized
  source 1..20: mol_type = other DNA
gactagaagagcagtggggg

SEQ ID NO: 37742 - DNA, 20 bp, synthetic construct
  misc_feature 1..20: note = chemically synthesized
  source 1..20: mol_type = other DNA
tagaagagcagtgggggtgg

SEQ ID NO: 37743 - DNA, 20 bp, synthetic construct
  misc_feature 1..20: note = chemically synthesized
  source 1..20: mol_type = other DNA
aagagcagtgggggtggcag

SEQ ID NO: 37744 - DNA, 20 bp, synthetic construct
  misc_feature 1..20: note = chemically synthesized
  source 1..20: mol_type = other DNA
agagcagtgggggtggcagc

SEQ ID NO: 37745 - DNA, 20 bp, synthetic construct
  misc_feature 1..20: note = chemically synthesized
  source 1..20: mol_type = other DNA
agcagtgggggtggcagcag

SEQ ID NO: 37746 - DNA, 20 bp, synthetic construct
  misc_feature 1..20: note = chemically synthesized
  source 1..20: mol_type = other DNA
cagtgggggtggcagcagga

SEQ ID NO: 37747 - DNA, 20 bp, synthetic construct
  misc_feature 1..20: note = chemically synthesized
  source 1..20: mol_type = other DNA
tgggggtggcagcaggagag

SEQ ID NO: 37748 - DNA, 20 bp, synthetic construct
  misc_feature 1..20: note = chemically synthesized
  source 1..20: mol_type = other DNA
gtggcagcaggagagaagcc

SEQ ID NO: 37749 - DNA, 20 bp, synthetic construct
  misc_feature 1..20: note = chemically synthesized
  source 1..20: mol_type = other DNA
ggagagaagcctggctctga

SEQ ID NO: 37750 - DNA, 20 bp, synthetic construct
  misc_feature 1..20: note = chemically synthesized
  source 1..20: mol_type = other DNA
gagaagcctggctctgaaag

SEQ ID NO: 37751 - DNA, 20 bp, synthetic construct
  misc_feature 1..20: note = chemically synthesized
  source 1..20: mol_type = other DNA
agcctggctctgaaagcagc

SEQ ID NO: 37752 - DNA, 20 bp, synthetic construct
  misc_feature 1..20: note = chemically synthesized
  source 1..20: mol_type = other DNA
tctgaaagcagcgagacttc

SEQ ID NO: 37753 - DNA, 20 bp, synthetic construct
  misc_feature 1..20: note = chemically synthesized
  source 1..20: mol_type = other DNA
ctgaaagcagcgagacttct

SEQ ID NO: 37754 - DNA, 20 bp, synthetic construct
  misc_feature 1..20: note = chemically synthesized
  source 1..20: mol_type = other DNA
tgaaagcagcgagacttcta

SEQ ID NO: 37755 - DNA, 20 bp, synthetic construct
  misc_feature 1..20: note = chemically synthesized
  source 1..20: mol_type = other DNA
agcgagacttctagggaata

SEQ ID NO: 37756 - DNA, 20 bp, synthetic construct
  misc_feature 1..20: note = chemically synthesized
  source 1..20: mol_type = other DNA
gcgagacttctagggaatac

SEQ ID NO: 37757 - DNA, 20 bp, synthetic construct
  misc_feature 1..20: note = chemically synthesized
  source 1..20: mol_type = other DNA
cgagacttctagggaataca

SEQ ID NO: 37758 - DNA, 20 bp, synthetic construct
  misc_feature 1..20: note = chemically synthesized
  source 1..20: mol_type = other DNA
acttctagggaatacagggt

SEQ ID NO: 37759 - DNA, 20 bp, synthetic construct
  misc_feature 1..20: note = chemically synthesized
  source 1..20: mol_type = other DNA
cttctagggaatacagggtc

SEQ ID NO: 37760 - DNA, 20 bp, synthetic construct
  misc_feature 1..20: note = chemically synthesized
  source 1..20: mol_type = other DNA
ttctagggaatacagggtca

SEQ ID NO: 37761 - DNA, 20 bp, synthetic construct
  misc_feature 1..20: note = chemically synthesized
  source 1..20: mol_type = other DNA
tctagggaatacagggtcag

SEQ ID NO: 37762 - DNA, 20 bp, synthetic construct
  misc_feature 1..20: note = chemically synthesized
  source 1..20: mol_type = other DNA
tagggaatacagggtcaggg

SEQ ID NO: 37763 - DNA, 20 bp, synthetic construct
  misc_feature 1..20: note = chemically synthesized
  source 1..20: mol_type = other DNA
agggaatacagggtcagggg

SEQ ID NO: 37764 - DNA, 20 bp, synthetic construct
  misc_feature 1..20: note = chemically synthesized
  source 1..20: mol_type = other DNA
agggtcaggggaggttctga

SEQ ID NO: 37765 - DNA, 20 bp, synthetic construct
  misc_feature 1..20: note = chemically synthesized
  source 1..20: mol_type = other DNA
ttctgaaagatgacacactg

SEQ ID NO: 37766 - DNA, 20 bp, synthetic construct
  misc_feature 1..20: note = chemically synthesized
  source 1..20: mol_type = other DNA
ctgaaagatgacacactgca

SEQ ID NO: 37767 - DNA, 20 bp, synthetic construct
  misc_feature 1..20: note = chemically synthesized
  source 1..20: mol_type = other DNA
tgtgtttgtatgccgatgac

SEQ ID NO: 37768 - DNA, 20 bp, synthetic construct
  misc_feature 1..20: note = chemically synthesized
  source 1..20: mol_type = other DNA
gtatgccgatgacaagtatc

SEQ ID NO: 37769 - DNA, 20 bp, synthetic construct
  misc_feature 1..20: note = chemically synthesized
  source 1..20: mol_type = other DNA
tgccgatgacaagtatccag

SEQ ID NO: 37770 - DNA, 20 bp, synthetic construct
  misc_feature 1..20: note = chemically synthesized
  source 1..20: mol_type = other DNA
gatgacaagtatccagtaga

SEQ ID NO: 37771 - DNA, 20 bp, synthetic construct
  misc_feature 1..20: note = chemically synthesized
  source 1..20: mol_type = other DNA
atgacaagtatccagtagaa

SEQ ID NO: 37772 - DNA, 20 bp, synthetic construct
  misc_feature 1..20: note = chemically synthesized
  source 1..20: mol_type = other DNA
acaagtatccagtagaaagg

SEQ ID NO: 37773 - DNA, 20 bp, synthetic construct
  misc_feature 1..20: note = chemically synthesized
  source 1..20: mol_type = other DNA
ccagtagaaaggcagatgaa

SEQ ID NO: 37774 - DNA, 20 bp, synthetic construct
  misc_feature 1..20: note = chemically synthesized
  source 1..20: mol_type = other DNA
gatgaacagattctcattct

SEQ ID NO: 37775 - DNA, 20 bp, synthetic construct
  misc_feature 1..20: note = chemically synthesized
  source 1..20: mol_type = other DNA
aacagattctcattctcaga

SEQ ID NO: 37776 - DNA, 20 bp, synthetic construct
  misc_feature 1..20: note = chemically synthesized
  source 1..20: mol_type = other DNA
acagattctcattctcagaa

SEQ ID NO: 37777 - DNA, 20 bp, synthetic construct
  misc_feature 1..20: note = chemically synthesized
  source 1..20: mol_type = other DNA
aaggcctgtcctgacctcct

SEQ ID NO: 37778 - DNA, 20 bp, synthetic construct
  misc_feature 1..20: note = chemically synthesized
  source 1..20: mol_type = other DNA
ggcctgtcctgacctcctga

SEQ ID NO: 37779 - DNA, 20 bp, synthetic construct
  misc_feature 1..20: note = chemically synthesized
  source 1..20: mol_type = other DNA
cctgacctcctgagagtaca

SEQ ID NO: 37780 - DNA, 20 bp, synthetic construct
  misc_feature 1..20: note = chemically synthesized
  source 1..20: mol_type = other DNA
cctgagagtacacagaccat

SEQ ID NO: 37781 - DNA, 20 bp, synthetic construct
  misc_feature 1..20: note = chemically synthesized
  source 1..20: mol_type = other DNA
ctgagagtacacagaccatg

SEQ ID NO: 37782 - DNA, 20 bp, synthetic construct
  misc_feature 1..20: note = chemically synthesized
  source 1..20: mol_type = other DNA
tgagagtacacagaccatga

SEQ ID NO: 37783 - DNA, 20 bp, synthetic construct
  misc_feature 1..20: note = chemically synthesized
  source 1..20: mol_type = other DNA
gagtacacagaccatgaggg

SEQ ID NO: 37784 - DNA, 20 bp, synthetic construct
  misc_feature 1..20: note = chemically synthesized
  source 1..20: mol_type = other DNA
agtacacagaccatgagggc

SEQ ID NO: 37785 - DNA, 20 bp, synthetic construct
  misc_feature 1..20: note = chemically synthesized
  source 1..20: mol_type = other DNA
gtacacagaccatgagggca

SEQ ID NO: 37786 - DNA, 20 bp, synthetic construct
  misc_feature 1..20: note = chemically synthesized
  source 1..20: mol_type = other DNA
acagaccatgagggcagggc

SEQ ID NO: 37787 - DNA, 20 bp, synthetic construct
  misc_feature 1..20: note = chemically synthesized
  source 1..20: mol_type = other DNA
cagaccatgagggcagggca

SEQ ID NO: 37788 - DNA, 20 bp, synthetic construct
  misc_feature 1..20: note = chemically synthesized
  source 1..20: mol_type = other DNA
gaccatgagggcagggcaag

SEQ ID NO: 37789 - DNA, 20 bp, synthetic construct
  misc_feature 1..20: note = chemically synthesized
  source 1..20: mol_type = other DNA
accatgagggcagggcaagg

SEQ ID NO: 37790 - DNA, 20 bp, synthetic construct
  misc_feature 1..20: note = chemically synthesized
  source 1..20: mol_type = other DNA
catgagggcagggcaaggag

SEQ ID NO: 37791 - DNA, 20 bp, synthetic construct
  misc_feature 1..20: note = chemically synthesized
  source 1..20: mol_type = other DNA
atgagggcagggcaaggagg

SEQ ID NO: 37792 - DNA, 20 bp, synthetic construct
  misc_feature 1..20: note = chemically synthesized
  source 1..20: mol_type = other DNA
cacgctcactgtttcatgca

SEQ ID NO: 37793 - DNA, 20 bp, synthetic construct
  misc_feature 1..20: note = chemically synthesized
  source 1..20: mol_type = other DNA
actgtttcatgcaaagtcct

SEQ ID NO: 37794 - DNA, 20 bp, synthetic construct
  misc_feature 1..20: note = chemically synthesized
  source 1..20: mol_type = other DNA
tcatgcaaagtccttggcca

SEQ ID NO: 37795 - DNA, 20 bp, synthetic construct
  misc_feature 1..20: note = chemically synthesized
  source 1..20: mol_type = other DNA
caatttaatatgctctatgc

SEQ ID NO: 37796 - DNA, 20 bp, synthetic construct
  misc_feature 1..20: note = chemically synthesized
  source 1..20: mol_type = other DNA
tatgctctatgctggaaaac

SEQ ID NO: 37797 - DNA, 20 bp, synthetic construct
  misc_feature 1..20: note = chemically synthesized
  source 1..20: mol_type = other DNA
tggaaaactggattattgaa

SEQ ID NO: 37798 - DNA, 20 bp, synthetic construct
  misc_feature 1..20: note = chemically synthesized
  source 1..20: mol_type = other DNA
ggaaaactggattattgaac

SEQ ID NO: 37799 - DNA, 20 bp, synthetic construct
  misc_feature 1..20: note = chemically synthesized
  source 1..20: mol_type = other DNA
ctggattattgaacaggcat

SEQ ID NO: 37800 - DNA, 20 bp, synthetic construct
  misc_feature 1..20: note = chemically synthesized
  source 1..20: mol_type = other DNA
tctgaacctaatccactaaa

SEQ ID NO: 37801 - DNA, 20 bp, synthetic construct
  misc_feature 1..20: note = chemically synthesized
  source 1..20: mol_type = other DNA
atccactaaaaagcacttga

SEQ ID NO: 37802 - DNA, 20 bp, synthetic construct
  misc_feature 1..20: note = chemically synthesized
  source 1..20: mol_type = other DNA
agatatatcaaaatatcatt

SEQ ID NO: 37803 - DNA, 20 bp, synthetic construct
  misc_feature 1..20: note = chemically synthesized
  source 1..20: mol_type = other DNA
atcaaaatatcattgagaaa

SEQ ID NO: 37804 - DNA, 20 bp, synthetic construct
  misc_feature 1..20: note = chemically synthesized
  source 1..20: mol_type = other DNA
tcattgagaaatagatattt

SEQ ID NO: 37805 - DNA, 20 bp, synthetic construct
  misc_feature 1..20: note = chemically synthesized
  source 1..20: mol_type = other DNA
cattgagaaatagatatttt

SEQ ID NO: 37806 - DNA, 20 bp, synthetic construct
  misc_feature 1..20: note = chemically synthesized
  source 1..20: mol_type = other DNA
ctcatttgaactctcttttc

SEQ ID NO: 37807 - DNA, 20 bp, synthetic construct
  misc_feature 1..20: note = chemically synthesized
  source 1..20: mol_type = other DNA
tcatttgaactctcttttcc

SEQ ID NO: 37808 - DNA, 20 bp, synthetic construct
  misc_feature 1..20: note = chemically synthesized
  source 1..20: mol_type = other DNA
tttgaactctcttttccagg

SEQ ID NO: 37809 - DNA, 20 bp, synthetic construct
  misc_feature 1..20: note = chemically synthesized
  source 1..20: mol_type = other DNA
tgaactctcttttccaggaa

SEQ ID NO: 37810 - DNA, 20 bp, synthetic construct
  misc_feature 1..20: note = chemically synthesized
  source 1..20: mol_type = other DNA
tttccaggaagagttgtgct

SEQ ID NO: 37811 - DNA, 20 bp, synthetic construct
  misc_feature 1..20: note = chemically synthesized
  source 1..20: mol_type = other DNA
ttccaggaagagttgtgctt

SEQ ID NO: 37812 - DNA, 20 bp, synthetic construct
  misc_feature 1..20: note = chemically synthesized
  source 1..20: mol_type = other DNA
ttgtgcttgggtaaattcta

SEQ ID NO: 37813 - DNA, 20 bp, synthetic construct
  misc_feature 1..20: note = chemically synthesized
  source 1..20: mol_type = other DNA
tgggtaaattctatagctca

SEQ ID NO: 37814 - DNA, 20 bp, synthetic construct
  misc_feature 1..20: note = chemically synthesized
  source 1..20: mol_type = other DNA
aaaacacacaataaattaat

SEQ ID NO: 37815 - DNA, 20 bp, synthetic construct
  misc_feature 1..20: note = chemically synthesized
  source 1..20: mol_type = other DNA
aaacacacaataaattaata

SEQ ID NO: 37816 - DNA, 20 bp, synthetic construct
  misc_feature 1..20: note = chemically synthesized
  source 1..20: mol_type = other DNA
aattaataaggtgcttccta

SEQ ID NO: 37817 - DNA, 20 bp, synthetic construct
  misc_feature 1..20: note = chemically synthesized
  source 1..20: mol_type = other DNA
aataaggtgcttcctacagt

SEQ ID NO: 37818 - DNA, 20 bp, synthetic construct
  misc_feature 1..20: note = chemically synthesized
  source 1..20: mol_type = other DNA
ggtgcttcctacagtgagtt

SEQ ID NO: 37819 - DNA, 20 bp, synthetic construct
  misc_feature 1..20: note = chemically synthesized
  source 1..20: mol_type = other DNA
gagttcagttaaacattttg

SEQ ID NO: 37820 - DNA, 20 bp, synthetic construct
  misc_feature 1..20: note = chemically synthesized
  source 1..20: mol_type = other DNA
gttcagttaaacattttgaa

SEQ ID NO: 37821 - DNA, 20 bp, synthetic construct
  misc_feature 1..20: note = chemically synthesized
  source 1..20: mol_type = other DNA
tgaagagtgtttttgaaatg

SEQ ID NO: 37822 - DNA, 20 bp, synthetic construct
  misc_feature 1..20: note = chemically synthesized
  source 1..20: mol_type = other DNA
agagtgtttttgaaatgtag

SEQ ID NO: 37823 - DNA, 20 bp, synthetic construct
  misc_feature 1..20: note = chemically synthesized
  source 1..20: mol_type = other DNA
agtgtttttgaaatgtagca

SEQ ID NO: 37824 - DNA, 20 bp, synthetic construct
  misc_feature 1..20: note = chemically synthesized
  source 1..20: mol_type = other DNA
gtttttgaaatgtagcagag

SEQ ID NO: 37825 - DNA, 20 bp, synthetic construct
  misc_feature 1..20: note = chemically synthesized
  source 1..20: mol_type = other DNA
tttttgaaatgtagcagagc

SEQ ID NO: 37826 - DNA, 20 bp, synthetic construct
  misc_feature 1..20: note = chemically synthesized
  source 1..20: mol_type = other DNA
ggctacaattgatattcaaa

SEQ ID NO: 37827 - DNA, 20 bp, synthetic construct
  misc_feature 1..20: note = chemically synthesized
  source 1..20: mol_type = other DNA
ctacaattgatattcaaaaa

SEQ ID NO: 37828 - DNA, 20 bp, synthetic construct
  misc_feature 1..20: note = chemically synthesized
  source 1..20: mol_type = other DNA
tacaattgatattcaaaaag

SEQ ID NO: 37829 - DNA, 20 bp, synthetic construct
  misc_feature 1..20: note = chemically synthesized
  source 1..20: mol_type = other DNA
atttatttccccctttaact

SEQ ID NO: 37830 - DNA, 20 bp, synthetic construct
  misc_feature 1..20: note = chemically synthesized
  source 1..20: mol_type = other DNA
tgtcattttattatgcttca

SEQ ID NO: 37831 - DNA, 20 bp, synthetic construct
  misc_feature 1..20: note = chemically synthesized
  source 1..20: mol_type = other DNA
tcattttattatgcttcata

SEQ ID NO: 37832 - DNA, 20 bp, synthetic construct
  misc_feature 1..20: note = chemically synthesized
  source 1..20: mol_type = other DNA
cttcatagagcatcactgct

SEQ ID NO: 37833 - DNA, 20 bp, synthetic construct
  misc_feature 1..20: note = chemically synthesized
  source 1..20: mol_type = other DNA
cactgctgagatcccctccc

SEQ ID NO: 37834 - DNA, 20 bp, synthetic construct
  misc_feature 1..20: note = chemically synthesized
  source 1..20: mol_type = other DNA
ccctccccagctcatgttgc

SEQ ID NO: 37835 - DNA, 20 bp, synthetic construct
  misc_feature 1..20: note = chemically synthesized
  source 1..20: mol_type = other DNA
cctccccagctcatgttgct

SEQ ID NO: 37836 - DNA, 20 bp, synthetic construct
  misc_feature 1..20: note = chemically synthesized
  source 1..20: mol_type = other DNA
tgctaggaaatatcccaaaa

SEQ ID NO: 37837 - DNA, 20 bp, synthetic construct
  misc_feature 1..20: note = chemically synthesized
  source 1..20: mol_type = other DNA
ttgtttctctgattcacctc

SEQ ID NO: 37838 - DNA, 20 bp, synthetic construct
  misc_feature 1..20: note = chemically synthesized
  source 1..20: mol_type = other DNA
tgtttctctgattcacctcc

SEQ ID NO: 37839 - DNA, 20 bp, synthetic construct
  misc_feature 1..20: note = chemically synthesized
  source 1..20: mol_type = other DNA
gtttctctgattcacctcca

SEQ ID NO: 37840 - DNA, 20 bp, synthetic construct
  misc_feature 1..20: note = chemically synthesized
  source 1..20: mol_type = other DNA
attcacctccagggctcata

SEQ ID NO: 37841 - DNA, 20 bp, synthetic construct
  misc_feature 1..20: note = chemically synthesized
  source 1..20: mol_type = other DNA
ctccagggctcatatggcaa

SEQ ID NO: 37842 - DNA, 20 bp, synthetic construct
  misc_feature 1..20: note = chemically synthesized
  source 1..20: mol_type = other DNA
tccagggctcatatggcaat

SEQ ID NO: 37843 - DNA, 20 bp, synthetic construct
  misc_feature 1..20: note = chemically synthesized
  source 1..20: mol_type = other DNA
ccagggctcatatggcaatg

SEQ ID NO: 37844 - DNA, 20 bp, synthetic construct
  misc_feature 1..20: note = chemically synthesized
  source 1..20: mol_type = other DNA
atatggcaatggggatttaa

SEQ ID NO: 37845 - DNA, 20 bp, synthetic construct
  misc_feature 1..20: note = chemically synthesized
  source 1..20: mol_type = other DNA
tatggcaatggggatttaat

SEQ ID NO: 37846 - DNA, 20 bp, synthetic construct
  misc_feature 1..20: note = chemically synthesized
  source 1..20: mol_type = other DNA
atggcaatggggatttaata

SEQ ID NO: 37847 - DNA, 20 bp, synthetic construct
  misc_feature 1..20: note = chemically synthesized
  source 1..20: mol_type = other DNA
atttaatagggtttatttgt

SEQ ID NO: 37848 - DNA, 20 bp, synthetic construct
  misc_feature 1..20: note = chemically synthesized
  source 1..20: mol_type = other DNA
atagggtttatttgttggtg

SEQ ID NO: 37849 - DNA, 20 bp, synthetic construct
  misc_feature 1..20: note = chemically synthesized
  source 1..20: mol_type = other DNA
acattaaacaaatcttttaa

SEQ ID NO: 37850 - DNA, 20 bp, synthetic construct
  misc_feature 1..20: note = chemically synthesized
  source 1..20: mol_type = other DNA
cattaaacaaatcttttaat

SEQ ID NO: 37851 - DNA, 20 bp, synthetic construct
  misc_feature 1..20: note = chemically synthesized
  source 1..20: mol_type = other DNA
ggaaaaatacttttatatta

SEQ ID NO: 37852 - DNA, 20 bp, synthetic construct
  misc_feature 1..20: note = chemically synthesized
  source 1..20: mol_type = other DNA
gaaaaatacttttatattat

SEQ ID NO: 37853 - DNA, 20 bp, synthetic construct
  misc_feature 1..20: note = chemically synthesized
  source 1..20: mol_type = other DNA
tttatattataggcaaaatg

SEQ ID NO: 37854 - DNA, 20 bp, synthetic construct
  misc_feature 1..20: note = chemically synthesized
  source 1..20: mol_type = other DNA
gtagatgtatattgctactg

SEQ ID NO: 37855 - DNA, 20 bp, synthetic construct
  misc_feature 1..20: note = chemically synthesized
  source 1..20: mol_type = other DNA
aagtaaatgtattttattaa

SEQ ID NO: 37856 - DNA, 20 bp, synthetic construct
  misc_feature 1..20: note = chemically synthesized
  source 1..20: mol_type = other DNA
atgtattttattaatggtgt

SEQ ID NO: 37857 - DNA, 20 bp, synthetic construct
  misc_feature 1..20: note = chemically synthesized
  source 1..20: mol_type = other DNA
tgagaatttcttcctcactg

SEQ ID NO: 37858 - DNA, 20 bp, synthetic construct
  misc_feature 1..20: note = chemically synthesized
  source 1..20: mol_type = other DNA
atgcatatttgcatgtgtaa

SEQ ID NO: 37859 - DNA, 20 bp, synthetic construct
  misc_feature 1..20: note = chemically synthesized
  source 1..20: mol_type = other DNA
atttgcatgtgtaaaagact

SEQ ID NO: 37860 - DNA, 20 bp, synthetic construct
  misc_feature 1..20: note = chemically synthesized
  source 1..20: mol_type = other DNA
aagacttagcaatttgtgaa

SEQ ID NO: 37861 - DNA, 20 bp, synthetic construct
  misc_feature 1..20: note = chemically synthesized
  source 1..20: mol_type = other DNA
acttagcaatttgtgaatag

SEQ ID NO: 37862 - DNA, 20 bp, synthetic construct
  misc_feature 1..20: note = chemically synthesized
  source 1..20: mol_type = other DNA
atgtttctccgcttctcact

SEQ ID NO: 37863 - DNA, 20 bp, synthetic construct
  misc_feature 1..20: note = chemically synthesized
  source 1..20: mol_type = other DNA
tctccgcttctcactgagca

SEQ ID NO: 37864 - DNA, 20 bp, synthetic construct
  misc_feature 1..20: note = chemically synthesized
  source 1..20: mol_type = other DNA
ctcactgagcatggctgtaa

SEQ ID NO: 37865 - DNA, 20 bp, synthetic construct
  misc_feature 1..20: note = chemically synthesized
  source 1..20: mol_type = other DNA
aagaaactttttcctctccc

SEQ ID NO: 37866 - DNA, 20 bp, synthetic construct
  misc_feature 1..20: note = chemically synthesized
  source 1..20: mol_type = other DNA
agaaactttttcctctcccc

SEQ ID NO: 37867 - DNA, 20 bp, synthetic construct
  misc_feature 1..20: note = chemically synthesized
  source 1..20: mol_type = other DNA
tttcctctccccgggcattc

SEQ ID NO: 37868 - DNA, 20 bp, synthetic construct
  misc_feature 1..20: note = chemically synthesized
  source 1..20: mol_type = other DNA
ccgggcattccagcacacat

SEQ ID NO: 37869 - DNA, 20 bp, synthetic construct
  misc_feature 1..20: note = chemically synthesized
  source 1..20: mol_type = other DNA
gcattccagcacacattgga

SEQ ID NO: 37870 - DNA, 20 bp, synthetic construct
  misc_feature 1..20: note = chemically synthesized
  source 1..20: mol_type = other DNA
ttggaaagataacacgtcca

SEQ ID NO: 37871 - DNA, 20 bp, synthetic construct
  misc_feature 1..20: note = chemically synthesized
  source 1..20: mol_type = other DNA
aaagataacacgtccacaga

SEQ ID NO: 37872 - DNA, 20 bp, synthetic construct
  misc_feature 1..20: note = chemically synthesized
  source 1..20: mol_type = other DNA
taacacgtccacagaaagcc

SEQ ID NO: 37873 - DNA, 20 bp, synthetic construct
  misc_feature 1..20: note = chemically synthesized
  source 1..20: mol_type = other DNA
cagaaagcctggctttccaa

SEQ ID NO: 37874 - DNA, 20 bp, synthetic construct
  misc_feature 1..20: note = chemically synthesized
  source 1..20: mol_type = other DNA
gaaagcctggctttccaaaa

SEQ ID NO: 37875 - DNA, 20 bp, synthetic construct
  misc_feature 1..20: note = chemically synthesized
  source 1..20: mol_type = other DNA
ggctttccaaaagagcttat

SEQ ID NO: 37876 - DNA, 20 bp, synthetic construct
  misc_feature 1..20: note = chemically synthesized
  source 1..20: mol_type = other DNA
ctttccaaaagagcttatca

SEQ ID NO: 37877 - DNA, 20 bp, synthetic construct
  misc_feature 1..20: note = chemically synthesized
  source 1..20: mol_type = other DNA
ttatcagagaatgtgccccc

SEQ ID NO: 37878 - DNA, 20 bp, synthetic construct
  misc_feature 1..20: note = chemically synthesized
  source 1..20: mol_type = other DNA
tatcagagaatgtgcccccc

SEQ ID NO: 37879 - DNA, 20 bp, synthetic construct
  misc_feature 1..20: note = chemically synthesized
  source 1..20: mol_type = other DNA
taaaacatatgttaatcctg

SEQ ID NO: 37880 - DNA, 20 bp, synthetic construct
  misc_feature 1..20: note = chemically synthesized
  source 1..20: mol_type = other DNA
aacatatgttaatcctgtgg

SEQ ID NO: 37881 - DNA, 20 bp, synthetic construct
  misc_feature 1..20: note = chemically synthesized
  source 1..20: mol_type = other DNA
catatgttaatcctgtggca

SEQ ID NO: 37882 - DNA, 20 bp, synthetic construct
  misc_feature 1..20: note = chemically synthesized
  source 1..20: mol_type = other DNA
atgttaatcctgtggcagag

SEQ ID NO: 37883 - DNA, 20 bp, synthetic construct
  misc_feature 1..20: note = chemically synthesized
  source 1..20: mol_type = other DNA
tgtggcagagaagtttgttc

SEQ ID NO: 37884 - DNA, 20 bp, synthetic construct
  misc_feature 1..20: note = chemically synthesized
  source 1..20: mol_type = other DNA
gagaagtttgttctagcctt

SEQ ID NO: 37885 - DNA, 20 bp, synthetic construct
  misc_feature 1..20: note = chemically synthesized
  source 1..20: mol_type = other DNA
agaagtttgttctagccttt

SEQ ID NO: 37886 - DNA, 20 bp, synthetic construct
  misc_feature 1..20: note = chemically synthesized
  source 1..20: mol_type = other DNA
tttgttctagcctttgggtg

SEQ ID NO: 37887 - DNA, 20 bp, synthetic construct
  misc_feature 1..20: note = chemically synthesized
  source 1..20: mol_type = other DNA
ttgggtgtagcctgctgaat

SEQ ID NO: 37888 - DNA, 20 bp, synthetic construct
  misc_feature 1..20: note = chemically synthesized
  source 1..20: mol_type = other DNA
tagcctgctgaataagttca

SEQ ID NO: 37889 - DNA, 20 bp, synthetic construct
  misc_feature 1..20: note = chemically synthesized
  source 1..20: mol_type = other DNA
gttcacagtgatctacatcc

SEQ ID NO: 37890 - DNA, 20 bp, synthetic construct
  misc_feature 1..20: note = chemically synthesized
  source 1..20: mol_type = other DNA
gatctacatcctagtttcca

SEQ ID NO: 37891 - DNA, 20 bp, synthetic construct
  misc_feature 1..20: note = chemically synthesized
  source 1..20: mol_type = other DNA
atctacatcctagtttccat

SEQ ID NO: 37892 - DNA, 20 bp, synthetic construct
  misc_feature 1..20: note = chemically synthesized
  source 1..20: mol_type = other DNA
ctagtttccatgggctgaaa

SEQ ID NO: 37893 - DNA, 20 bp, synthetic construct
  misc_feature 1..20: note = chemically synthesized
  source 1..20: mol_type = other DNA
ccctgcactccctacacaca

SEQ ID NO: 37894 - DNA, 20 bp, synthetic construct
  misc_feature 1..20: note = chemically synthesized
  source 1..20: mol_type = other DNA
actccctacacacacagaca

SEQ ID NO: 37895 - DNA, 20 bp, synthetic construct
  misc_feature 1..20: note = chemically synthesized
  source 1..20: mol_type = other DNA
ttctttgatattttcttgaa

SEQ ID NO: 37896 - DNA, 20 bp, synthetic construct
  misc_feature 1..20: note = chemically synthesized
  source 1..20: mol_type = other DNA
ttcaaatgtgtttgacttta

SEQ ID NO: 37897 - DNA, 20 bp, synthetic construct
  misc_feature 1..20: note = chemically synthesized
  source 1..20: mol_type = other DNA
tcaacttgtaaaattttatc

SEQ ID NO: 37898 - DNA, 20 bp, synthetic construct
  misc_feature 1..20: note = chemically synthesized
  source 1..20: mol_type = other DNA
aaattttatctggtaattta

SEQ ID NO: 37899 - DNA, 20 bp, synthetic construct
  misc_feature 1..20: note = chemically synthesized
  source 1..20: mol_type = other DNA
taatttatagattaaattgc

SEQ ID NO: 37900 - DNA, 20 bp, synthetic construct
  misc_feature 1..20: note = chemically synthesized
  source 1..20: mol_type = other DNA
agcatctacctccctttcat

SEQ ID NO: 37901 - DNA, 20 bp, synthetic construct
  misc_feature 1..20: note = chemically synthesized
  source 1..20: mol_type = other DNA
ctttcatcagactctccctg

SEQ ID NO: 37902 - DNA, 20 bp, synthetic construct
  misc_feature 1..20: note = chemically synthesized
  source 1..20: mol_type = other DNA
tttcatcagactctccctgc

SEQ ID NO: 37903 - DNA, 20 bp, synthetic construct
  misc_feature 1..20: note = chemically synthesized
  source 1..20: mol_type = other DNA
ttcatcagactctccctgca

SEQ ID NO: 37904 - DNA, 20 bp, synthetic construct
  misc_feature 1..20: note = chemically synthesized
  source 1..20: mol_type = other DNA
tcagactctccctgcagggc

SEQ ID NO: 37905 - DNA, 20 bp, synthetic construct
  misc_feature 1..20: note = chemically synthesized
  source 1..20: mol_type = other DNA
tctaactatgtatgtgcttc

SEQ ID NO: 37906 - DNA, 20 bp, synthetic construct
  misc_feature 1..20: note = chemically synthesized
  source 1..20: mol_type = other DNA
actatgtatgtgcttcaaga

SEQ ID NO: 37907 - DNA, 20 bp, synthetic construct
  misc_feature 1..20: note = chemically synthesized
  source 1..20: mol_type = other DNA
tgcttcaagatggaactcct

SEQ ID NO: 37908 - DNA, 20 bp, synthetic construct
  misc_feature 1..20: note = chemically synthesized
  source 1..20: mol_type = other DNA
agatggaactcctgagttca

SEQ ID NO: 37909 - DNA, 20 bp, synthetic construct
  misc_feature 1..20: note = chemically synthesized
  source 1..20: mol_type = other DNA
gatggaactcctgagttcac

SEQ ID NO: 37910 - DNA, 20 bp, synthetic construct
  misc_feature 1..20: note = chemically synthesized
  source 1..20: mol_type = other DNA
cacaggtgatttataaacca

SEQ ID NO: 37911 - DNA, 20 bp, synthetic construct
  misc_feature 1..20: note = chemically synthesized
  source 1..20: mol_type = other DNA
actacaaaactctcaccctc

SEQ ID NO: 37912 - DNA, 20 bp, synthetic construct
  misc_feature 1..20: note = chemically synthesized
  source 1..20: mol_type = other DNA
tacaaaactctcaccctcca

SEQ ID NO: 37913 - DNA, 20 bp, synthetic construct
  misc_feature 1..20: note = chemically synthesized
  source 1..20: mol_type = other DNA
accctccagagatttgcctc

SEQ ID NO: 37914 - DNA, 20 bp, synthetic construct
  misc_feature 1..20: note = chemically synthesized
  source 1..20: mol_type = other DNA
ccctccagagatttgcctca

SEQ ID NO: 37915 - DNA, 20 bp, synthetic construct
  misc_feature 1..20: note = chemically synthesized
  source 1..20: mol_type = other DNA
cctccagagatttgcctcaa

SEQ ID NO: 37916 - DNA, 20 bp, synthetic construct
  misc_feature 1..20: note = chemically synthesized
  source 1..20: mol_type = other DNA
gggacaacaccctgctcaca

SEQ ID NO: 37917 - DNA, 20 bp, synthetic construct
  misc_feature 1..20: note = chemically synthesized
  source 1..20: mol_type = other DNA
ggacaacaccctgctcacaa

SEQ ID NO: 37918 - DNA, 20 bp, synthetic construct
  misc_feature 1..20: note = chemically synthesized
  source 1..20: mol_type = other DNA
caccctgctcacaaaggcac

SEQ ID NO: 37919 - DNA, 20 bp, synthetic construct
  misc_feature 1..20: note = chemically synthesized
  source 1..20: mol_type = other DNA
cctgctcacaaaggcaccag

SEQ ID NO: 37920 - DNA, 20 bp, synthetic construct
  misc_feature 1..20: note = chemically synthesized
  source 1..20: mol_type = other DNA
ctgctcacaaaggcaccagc

SEQ ID NO: 37921 - DNA, 20 bp, synthetic construct
  misc_feature 1..20: note = chemically synthesized
  source 1..20: mol_type = other DNA
caggcaactgctcaactacc

SEQ ID NO: 37922 - DNA, 20 bp, synthetic construct
  misc_feature 1..20: note = chemically synthesized
  source 1..20: mol_type = other DNA
gcaactgctcaactacctgg

SEQ ID NO: 37923 - DNA, 20 bp, synthetic construct
  misc_feature 1..20: note = chemically synthesized
  source 1..20: mol_type = other DNA
tgctcaactacctggtggat

SEQ ID NO: 37924 - DNA, 20 bp, synthetic construct
  misc_feature 1..20: note = chemically synthesized
  source 1..20: mol_type = other DNA
gctcaactacctggtggata

SEQ ID NO: 37925 - DNA, 20 bp, synthetic construct
  misc_feature 1..20: note = chemically synthesized
  source 1..20: mol_type = other DNA
acctggtggataaggtgccc

SEQ ID NO: 37926 - DNA, 20 bp, synthetic construct
  misc_feature 1..20: note = chemically synthesized
  source 1..20: mol_type = other DNA
ggtggataaggtgcccaagc

SEQ ID NO: 37927 - DNA, 20 bp, synthetic construct
  misc_feature 1..20: note = chemically synthesized
  source 1..20: mol_type = other DNA
ataaggtgcccaagctagca

SEQ ID NO: 37928 - DNA, 20 bp, synthetic construct
  misc_feature 1..20: note = chemically synthesized
  source 1..20: mol_type = other DNA
cctcctctgttgccttttaa

SEQ ID NO: 37929 - DNA, 20 bp, synthetic construct
  misc_feature 1..20: note = chemically synthesized
  source 1..20: mol_type = other DNA
agtgccactttctgctccta

SEQ ID NO: 37930 - DNA, 20 bp, synthetic construct
  misc_feature 1..20: note = chemically synthesized
  source 1..20: mol_type = other DNA
cactttctgctcctaaagtg

SEQ ID NO: 37931 - DNA, 20 bp, synthetic construct
  misc_feature 1..20: note = chemically synthesized
  source 1..20: mol_type = other DNA
tttctgctcctaaagtgaag

SEQ ID NO: 37932 - DNA, 20 bp, synthetic construct
  misc_feature 1..20: note = chemically synthesized
  source 1..20: mol_type = other DNA
gctcctaaagtgaagtagta

SEQ ID NO: 37933 - DNA, 20 bp, synthetic construct
  misc_feature 1..20: note = chemically synthesized
  source 1..20: mol_type = other DNA
cctaaagtgaagtagtacgg

SEQ ID NO: 37934 - DNA, 20 bp, synthetic construct
  misc_feature 1..20: note = chemically synthesized
  source 1..20: mol_type = other DNA
ctaaagtgaagtagtacggc

SEQ ID NO: 37935 - DNA, 20 bp, synthetic construct
  misc_feature 1..20: note = chemically synthesized
  source 1..20: mol_type = other DNA
actgctgcatttcttcccct

SEQ ID NO: 37936 - DNA, 20 bp, synthetic construct
  misc_feature 1..20: note = chemically synthesized
  source 1..20: mol_type = other DNA
ctgcatttcttcccctaagc

SEQ ID NO: 37937 - DNA, 20 bp, synthetic construct
  misc_feature 1..20: note = chemically synthesized
  source 1..20: mol_type = other DNA
ttcttcccctaagctagctt

SEQ ID NO: 37938 - DNA, 20 bp, synthetic construct
  misc_feature 1..20: note = chemically synthesized
  source 1..20: mol_type = other DNA
ttcccctaagctagctttgg

SEQ ID NO: 37939 - DNA, 20 bp, synthetic construct
  misc_feature 1..20: note = chemically synthesized
  source 1..20: mol_type = other DNA
gcaaatcactttctttatac

SEQ ID NO: 37940 - DNA, 20 bp, synthetic construct
  misc_feature 1..20: note = chemically synthesized
  source 1..20: mol_type = other DNA
cagacttctctcttcttaat

SEQ ID NO: 37941 - DNA, 20 bp, synthetic construct
  misc_feature 1..20: note = chemically synthesized
  source 1..20: mol_type = other DNA
tcttcttaattggattctgc

SEQ ID NO: 37942 - DNA, 20 bp, synthetic construct
  misc_feature 1..20: note = chemically synthesized
  source 1..20: mol_type = other DNA
tcttaattggattctgcaag

SEQ ID NO: 37943 - DNA, 20 bp, synthetic construct
  misc_feature 1..20: note = chemically synthesized
  source 1..20: mol_type = other DNA
caaacaattaacctgctctt

SEQ ID NO: 37944 - DNA, 20 bp, synthetic construct
  misc_feature 1..20: note = chemically synthesized
  source 1..20: mol_type = other DNA
aacctgctcttcagttacat

SEQ ID NO: 37945 - DNA, 20 bp, synthetic construct
  misc_feature 1..20: note = chemically synthesized
  source 1..20: mol_type = other DNA
cagttacattggaatgtgtt

SEQ ID NO: 37946 - DNA, 20 bp, synthetic construct
  misc_feature 1..20: note = chemically synthesized
  source 1..20: mol_type = other DNA
agatttattttttcaaatgt

SEQ ID NO: 37947 - DNA, 20 bp, synthetic construct
  misc_feature 1..20: note = chemically synthesized
  source 1..20: mol_type = other DNA
ttttttcaaatgttggaaca

SEQ ID NO: 37948 - DNA, 20 bp, synthetic construct
  misc_feature 1..20: note = chemically synthesized
  source 1..20: mol_type = other DNA
atgttggaacaaagatgaaa

SEQ ID NO: 37949 - DNA, 20 bp, synthetic construct
  misc_feature 1..20: note = chemically synthesized
  source 1..20: mol_type = other DNA
tggaacaaagatgaaaaagt

SEQ ID NO: 37950 - DNA, 20 bp, synthetic construct
  misc_feature 1..20: note = chemically synthesized
  source 1..20: mol_type = other DNA
aacaaagatgaaaaagtgag

SEQ ID NO: 37951 - DNA, 20 bp, synthetic construct
  misc_feature 1..20: note = chemically synthesized
  source 1..20: mol_type = other DNA
caaagatgaaaaagtgagaa

SEQ ID NO: 37952 - DNA, 20 bp, synthetic construct
  misc_feature 1..20: note = chemically synthesized
  source 1..20: mol_type = other DNA
tgaaaaagtgagaagagccc

SEQ ID NO: 37953 - DNA, 20 bp, synthetic construct
  misc_feature 1..20: note = chemically synthesized
  source 1..20: mol_type = other DNA
aagagccctagattttttct

SEQ ID NO: 37954 - DNA, 20 bp, synthetic construct
  misc_feature 1..20: note = chemically synthesized
  source 1..20: mol_type = other DNA
tagattttttcttggaaatc

SEQ ID NO: 37955 - DNA, 20 bp, synthetic construct
  misc_feature 1..20: note = chemically synthesized
  source 1..20: mol_type = other DNA
ttggaaatctggcttaaatc

SEQ ID NO: 37956 - DNA, 20 bp, synthetic construct
  misc_feature 1..20: note = chemically synthesized
  source 1..20: mol_type = other DNA
tggaaatctggcttaaatcc

SEQ ID NO: 37957 - DNA, 20 bp, synthetic construct
  misc_feature 1..20: note = chemically synthesized
  source 1..20: mol_type = other DNA
gtttctttatttccttgatt

SEQ ID NO: 37958 - DNA, 20 bp, synthetic construct
  misc_feature 1..20: note = chemically synthesized
  source 1..20: mol_type = other DNA
tttctttatttccttgattt

SEQ ID NO: 37959 - DNA, 20 bp, synthetic construct
  misc_feature 1..20: note = chemically synthesized
  source 1..20: mol_type = other DNA
atttccttgatttgggaatt

SEQ ID NO: 37960 - DNA, 20 bp, synthetic construct
  misc_feature 1..20: note = chemically synthesized
  source 1..20: mol_type = other DNA
tgatttgggaatttggtcac

SEQ ID NO: 37961 - DNA, 20 bp, synthetic construct
  misc_feature 1..20: note = chemically synthesized
  source 1..20: mol_type = other DNA
acaaataacatgattttcct

SEQ ID NO: 37962 - DNA, 20 bp, synthetic construct
  misc_feature 1..20: note = chemically synthesized
  source 1..20: mol_type = other DNA
taacatgattttcctaagtc

SEQ ID NO: 37963 - DNA, 20 bp, synthetic construct
  misc_feature 1..20: note = chemically synthesized
  source 1..20: mol_type = other DNA
agatttctttgtttataaaa

SEQ ID NO: 37964 - DNA, 20 bp, synthetic construct
  misc_feature 1..20: note = chemically synthesized
  source 1..20: mol_type = other DNA
gatttctttgtttataaaat

SEQ ID NO: 37965 - DNA, 20 bp, synthetic construct
  misc_feature 1..20: note = chemically synthesized
  source 1..20: mol_type = other DNA
atttctttgtttataaaatg

SEQ ID NO: 37966 - DNA, 20 bp, synthetic construct
  misc_feature 1..20: note = chemically synthesized
  source 1..20: mol_type = other DNA
tgctaccctacctataccat

SEQ ID NO: 37967 - DNA, 20 bp, synthetic construct
  misc_feature 1..20: note = chemically synthesized
  source 1..20: mol_type = other DNA
acctataccatgagctaaat

SEQ ID NO: 37968 - DNA, 20 bp, synthetic construct
  misc_feature 1..20: note = chemically synthesized
  source 1..20: mol_type = other DNA
ataccatgagctaaataagc

SEQ ID NO: 37969 - DNA, 20 bp, synthetic construct
  misc_feature 1..20: note = chemically synthesized
  source 1..20: mol_type = other DNA
taaataagctagtatttgta

SEQ ID NO: 37970 - DNA, 20 bp, synthetic construct
  misc_feature 1..20: note = chemically synthesized
  source 1..20: mol_type = other DNA
aaataagctagtatttgtaa

SEQ ID NO: 37971 - DNA, 20 bp, synthetic construct
  misc_feature 1..20: note = chemically synthesized
  source 1..20: mol_type = other DNA
cttacattcacaatcacaca

SEQ ID NO: 37972 - DNA, 20 bp, synthetic construct
  misc_feature 1..20: note = chemically synthesized
  source 1..20: mol_type = other DNA
tgtatgtatgtataaaaatg

SEQ ID NO: 37973 - DNA, 20 bp, synthetic construct
  misc_feature 1..20: note = chemically synthesized
  source 1..20: mol_type = other DNA
gtatgtatgtataaaaatgt

SEQ ID NO: 37974 - DNA, 20 bp, synthetic construct
  misc_feature 1..20: note = chemically synthesized
  source 1..20: mol_type = other DNA
tatgtatgtataaaaatgtg

SEQ ID NO: 37975 - DNA, 20 bp, synthetic construct
  misc_feature 1..20: note = chemically synthesized
  source 1..20: mol_type = other DNA
acccactcaacaaataccct

SEQ ID NO: 37976 - DNA, 20 bp, synthetic construct
  misc_feature 1..20: note = chemically synthesized
  source 1..20: mol_type = other DNA
cattatatgcgtatatcatc

SEQ ID NO: 37977 - DNA, 20 bp, synthetic construct
  misc_feature 1..20: note = chemically synthesized
  source 1..20: mol_type = other DNA
tgcgtatatcatctggcaaa

SEQ ID NO: 37978 - DNA, 20 bp, synthetic construct
  misc_feature 1..20: note = chemically synthesized
  source 1..20: mol_type = other DNA
atggatgtgtataatttctc

SEQ ID NO: 37979 - DNA, 20 bp, synthetic construct
  misc_feature 1..20: note = chemically synthesized
  source 1..20: mol_type = other DNA
tggatgtgtataatttctcc

SEQ ID NO: 37980 - DNA, 20 bp, synthetic construct
  misc_feature 1..20: note = chemically synthesized
  source 1..20: mol_type = other DNA
ggatgtgtataatttctcca

SEQ ID NO: 37981 - DNA, 20 bp, synthetic construct
  misc_feature 1..20: note = chemically synthesized
  source 1..20: mol_type = other DNA
tgtataatttctccagggat

SEQ ID NO: 37982 - DNA, 20 bp, synthetic construct
  misc_feature 1..20: note = chemically synthesized
  source 1..20: mol_type = other DNA
ataatttctccagggataag

SEQ ID NO: 37983 - DNA, 20 bp, synthetic construct
  misc_feature 1..20: note = chemically synthesized
  source 1..20: mol_type = other DNA
aagaagcaaatgtataccga

SEQ ID NO: 37984 - DNA, 20 bp, synthetic construct
  misc_feature 1..20: note = chemically synthesized
  source 1..20: mol_type = other DNA
agcaaatgtataccgatgga

SEQ ID NO: 37985 - DNA, 20 bp, synthetic construct
  misc_feature 1..20: note = chemically synthesized
  source 1..20: mol_type = other DNA
taccgatggaaagccttact

SEQ ID NO: 37986 - DNA, 20 bp, synthetic construct
  misc_feature 1..20: note = chemically synthesized
  source 1..20: mol_type = other DNA
accgatggaaagccttactc

SEQ ID NO: 37987 - DNA, 20 bp, synthetic construct
  misc_feature 1..20: note = chemically synthesized
  source 1..20: mol_type = other DNA
gccttactcaggccataaca

SEQ ID NO: 37988 - DNA, 20 bp, synthetic construct
  misc_feature 1..20: note = chemically synthesized
  source 1..20: mol_type = other DNA
cttactcaggccataacaaa

SEQ ID NO: 37989 - DNA, 20 bp, synthetic construct
  misc_feature 1..20: note = chemically synthesized
  source 1..20: mol_type = other DNA
tactcaggccataacaaaga

SEQ ID NO: 37990 - DNA, 20 bp, synthetic construct
  misc_feature 1..20: note = chemically synthesized
  source 1..20: mol_type = other DNA
ataacaaagagagaaatgct

SEQ ID NO: 37991 - DNA, 20 bp, synthetic construct
  misc_feature 1..20: note = chemically synthesized
  source 1..20: mol_type = other DNA
gctgagtcccactccatgaa

SEQ ID NO: 37992 - DNA, 20 bp, synthetic construct
  misc_feature 1..20: note = chemically synthesized
  source 1..20: mol_type = other DNA
ctgagtcccactccatgaac

SEQ ID NO: 37993 - DNA, 20 bp, synthetic construct
  misc_feature 1..20: note = chemically synthesized
  source 1..20: mol_type = other DNA
tcccactccatgaacaggtc

SEQ ID NO: 37994 - DNA, 20 bp, synthetic construct
  misc_feature 1..20: note = chemically synthesized
  source 1..20: mol_type = other DNA
cccactccatgaacaggtca

SEQ ID NO: 37995 - DNA, 20 bp, synthetic construct
  misc_feature 1..20: note = chemically synthesized
  source 1..20: mol_type = other DNA
caaggaaccaaacatattca

SEQ ID NO: 37996 - DNA, 20 bp, synthetic construct
  misc_feature 1..20: note = chemically synthesized
  source 1..20: mol_type = other DNA
aggaaccaaacatattcaaa

SEQ ID NO: 37997 - DNA, 20 bp, synthetic construct
  misc_feature 1..20: note = chemically synthesized
  source 1..20: mol_type = other DNA
atttcattgtttcaacttgc

SEQ ID NO: 37998 - DNA, 20 bp, synthetic construct
  misc_feature 1..20: note = chemically synthesized
  source 1..20: mol_type = other DNA
cattgtttcaacttgctagt

SEQ ID NO: 37999 - DNA, 20 bp, synthetic construct
  misc_feature 1..20: note = chemically synthesized
  source 1..20: mol_type = other DNA
attgtttcaacttgctagtg

SEQ ID NO: 38000 - DNA, 20 bp, synthetic construct
  misc_feature 1..20: note = chemically synthesized
  source 1..20: mol_type = other DNA
ttgtttcaacttgctagtga

SEQ ID NO: 38001 - DNA, 20 bp, synthetic construct
  misc_feature 1..20: note = chemically synthesized
  source 1..20: mol_type = other DNA
tgtttcaacttgctagtgag

SEQ ID NO: 38002 - DNA, 20 bp, synthetic construct
  misc_feature 1..20: note = chemically synthesized
  source 1..20: mol_type = other DNA
tttcaacttgctagtgaggg

SEQ ID NO: 38003 - DNA, 20 bp, synthetic construct
  misc_feature 1..20: note = chemically synthesized
  source 1..20: mol_type = other DNA
acttgctagtgaggggagca

SEQ ID NO: 38004 - DNA, 20 bp, synthetic construct
  misc_feature 1..20: note = chemically synthesized
  source 1..20: mol_type = other DNA
aggggagcatggcacctgaa

SEQ ID NO: 38005 - DNA, 20 bp, synthetic construct
  misc_feature 1..20: note = chemically synthesized
  source 1..20: mol_type = other DNA
gggagcatggcacctgaaca

SEQ ID NO: 38006 - DNA, 20 bp, synthetic construct
  misc_feature 1..20: note = chemically synthesized
  source 1..20: mol_type = other DNA
tgatataaattaatgaaact

SEQ ID NO: 38007 - DNA, 20 bp, synthetic construct
  misc_feature 1..20: note = chemically synthesized
  source 1..20: mol_type = other DNA
aattaatgaaactgagaacc

SEQ ID NO: 38008 - DNA, 20 bp, synthetic construct
  misc_feature 1..20: note = chemically synthesized
  source 1..20: mol_type = other DNA
atgaaactgagaaccaagcg

SEQ ID NO: 38009 - DNA, 20 bp, synthetic construct
  misc_feature 1..20: note = chemically synthesized
  source 1..20: mol_type = other DNA
gaaactgagaaccaagcgaa

SEQ ID NO: 38010 - DNA, 20 bp, synthetic construct
  misc_feature 1..20: note = chemically synthesized
  source 1..20: mol_type = other DNA
tgagaaccaagcgaagagct

SEQ ID NO: 38011 - DNA, 20 bp, synthetic construct
  misc_feature 1..20: note = chemically synthesized
  source 1..20: mol_type = other DNA
gagcttagccatcctttgca

SEQ ID NO: 38012 - DNA, 20 bp, synthetic construct
  misc_feature 1..20: note = chemically synthesized
  source 1..20: mol_type = other DNA
ttagccatcctttgcatagt

SEQ ID NO: 38013 - DNA, 20 bp, synthetic construct
  misc_feature 1..20: note = chemically synthesized
  source 1..20: mol_type = other DNA
ctttgcatagttagctacaa

SEQ ID NO: 38014 - DNA, 20 bp, synthetic construct
  misc_feature 1..20: note = chemically synthesized
  source 1..20: mol_type = other DNA
tacaatggctatttattttt

SEQ ID NO: 38015 - DNA, 20 bp, synthetic construct
  misc_feature 1..20: note = chemically synthesized
  source 1..20: mol_type = other DNA
atggctatttatttttcagc

SEQ ID NO: 38016 - DNA, 20 bp, synthetic construct
  misc_feature 1..20: note = chemically synthesized
  source 1..20: mol_type = other DNA
tatttatttttcagccagac

SEQ ID NO: 38017 - DNA, 20 bp, synthetic construct
  misc_feature 1..20: note = chemically synthesized
  source 1..20: mol_type = other DNA
cagccagactggccatcatg

SEQ ID NO: 38018 - DNA, 20 bp, synthetic construct
  misc_feature 1..20: note = chemically synthesized
  source 1..20: mol_type = other DNA
agccagactggccatcatgt

SEQ ID NO: 38019 - DNA, 20 bp, synthetic construct
  misc_feature 1..20: note = chemically synthesized
  source 1..20: mol_type = other DNA
atcatgtaggcacactcttt

SEQ ID NO: 38020 - DNA, 20 bp, synthetic construct
  misc_feature 1..20: note = chemically synthesized
  source 1..20: mol_type = other DNA
gtaggcacactcttttagat

SEQ ID NO: 38021 - DNA, 20 bp, synthetic construct
  misc_feature 1..20: note = chemically synthesized
  source 1..20: mol_type = other DNA
ttttttctgcccattcattc

SEQ ID NO: 38022 - DNA, 20 bp, synthetic construct
  misc_feature 1..20: note = chemically synthesized
  source 1..20: mol_type = other DNA
cattcattccagcaccgtga

SEQ ID NO: 38023 - DNA, 20 bp, synthetic construct
  misc_feature 1..20: note = chemically synthesized
  source 1..20: mol_type = other DNA
cagcaccgtgacagtcttca

SEQ ID NO: 38024 - DNA, 20 bp, synthetic construct
  misc_feature 1..20: note = chemically synthesized
  source 1..20: mol_type = other DNA
agcaccgtgacagtcttcac

SEQ ID NO: 38025 - DNA, 20 bp, synthetic construct
  misc_feature 1..20: note = chemically synthesized
  source 1..20: mol_type = other DNA
gcaccgtgacagtcttcacg

SEQ ID NO: 38026 - DNA, 20 bp, synthetic construct
  misc_feature 1..20: note = chemically synthesized
  source 1..20: mol_type = other DNA
gaaattaaacttattttttt

SEQ ID NO: 38027 - DNA, 20 bp, synthetic construct
  misc_feature 1..20: note = chemically synthesized
  source 1..20: mol_type = other DNA
agaatttttcaatcatatac

SEQ ID NO: 38028 - DNA, 20 bp, synthetic construct
  misc_feature 1..20: note = chemically synthesized
  source 1..20: mol_type = other DNA
tcatatacaagattttgaac

SEQ ID NO: 38029 - DNA, 20 bp, synthetic construct
  misc_feature 1..20: note = chemically synthesized
  source 1..20: mol_type = other DNA
catatacaagattttgaact

SEQ ID NO: 38030 - DNA, 20 bp, synthetic construct
  misc_feature 1..20: note = chemically synthesized
  source 1..20: mol_type = other DNA
aattaaatgaattgcacata

SEQ ID NO: 38031 - DNA, 20 bp, synthetic construct
  misc_feature 1..20: note = chemically synthesized
  source 1..20: mol_type = other DNA
atgaattgcacataaagcca

SEQ ID NO: 38032 - DNA, 20 bp, synthetic construct
  misc_feature 1..20: note = chemically synthesized
  source 1..20: mol_type = other DNA
tatgtatttttactacattg

SEQ ID NO: 38033 - DNA, 20 bp, synthetic construct
  misc_feature 1..20: note = chemically synthesized
  source 1..20: mol_type = other DNA
atgtatttttactacattgt

SEQ ID NO: 38034 - DNA, 20 bp, synthetic construct
  misc_feature 1..20: note = chemically synthesized
  source 1..20: mol_type = other DNA
gtatttttactacattgtgg

SEQ ID NO: 38035 - DNA, 20 bp, synthetic construct
  misc_feature 1..20: note = chemically synthesized
  source 1..20: mol_type = other DNA
aactatgtcttacctgattt

SEQ ID NO: 38036 - DNA, 20 bp, synthetic construct
  misc_feature 1..20: note = chemically synthesized
  source 1..20: mol_type = other DNA
ttacctgatttcagaaataa

SEQ ID NO: 38037 - DNA, 20 bp, synthetic construct
  misc_feature 1..20: note = chemically synthesized
  source 1..20: mol_type = other DNA
cctgatttcagaaataaaag

SEQ ID NO: 38038 - DNA, 20 bp, synthetic construct
  misc_feature 1..20: note = chemically synthesized
  source 1..20: mol_type = other DNA
gatttcagaaataaaagaag

SEQ ID NO: 38039 - DNA, 20 bp, synthetic construct
  misc_feature 1..20: note = chemically synthesized
  source 1..20: mol_type = other DNA
ttcagaaataaaagaagtag

SEQ ID NO: 38040 - DNA, 20 bp, synthetic construct
  misc_feature 1..20: note = chemically synthesized
  source 1..20: mol_type = other DNA
cacttccttatgttccattt

SEQ ID NO: 38041 - DNA, 20 bp, synthetic construct
  misc_feature 1..20: note = chemically synthesized
  source 1..20: mol_type = other DNA
acttccttatgttccatttt

SEQ ID NO: 38042 - DNA, 20 bp, synthetic construct
  misc_feature 1..20: note = chemically synthesized
  source 1..20: mol_type = other DNA
cttatgttccattttgggac

SEQ ID NO: 38043 - DNA, 20 bp, synthetic construct
  misc_feature 1..20: note = chemically synthesized
  source 1..20: mol_type = other DNA
tgttccattttgggactggc

SEQ ID NO: 38044 - DNA, 20 bp, synthetic construct
  misc_feature 1..20: note = chemically synthesized
  source 1..20: mol_type = other DNA
tccattttgggactggccag

SEQ ID NO: 38045 - DNA, 20 bp, synthetic construct
  misc_feature 1..20: note = chemically synthesized
  source 1..20: mol_type = other DNA
tgggactggccagcagtgcc

SEQ ID NO: 38046 - DNA, 20 bp, synthetic construct
  misc_feature 1..20: note = chemically synthesized
  source 1..20: mol_type = other DNA
actggccagcagtgcccaga

SEQ ID NO: 38047 - DNA, 20 bp, synthetic construct
  misc_feature 1..20: note = chemically synthesized
  source 1..20: mol_type = other DNA
cagaaagtgtgtcccaatcc

SEQ ID NO: 38048 - DNA, 20 bp, synthetic construct
  misc_feature 1..20: note = chemically synthesized
  source 1..20: mol_type = other DNA
agaaagtgtgtcccaatccc

SEQ ID NO: 38049 - DNA, 20 bp, synthetic construct
  misc_feature 1..20: note = chemically synthesized
  source 1..20: mol_type = other DNA
aggacattgttgacttacat

SEQ ID NO: 38050 - DNA, 20 bp, synthetic construct
  misc_feature 1..20: note = chemically synthesized
  source 1..20: mol_type = other DNA
gacattgttgacttacatga

SEQ ID NO: 38051 - DNA, 20 bp, synthetic construct
  misc_feature 1..20: note = chemically synthesized
  source 1..20: mol_type = other DNA
gagtaaacgcacccacaaac

SEQ ID NO: 38052 - DNA, 20 bp, synthetic construct
  misc_feature 1..20: note = chemically synthesized
  source 1..20: mol_type = other DNA
aaacgcacccacaaaccaga

SEQ ID NO: 38053 - DNA, 20 bp, synthetic construct
  misc_feature 1..20: note = chemically synthesized
  source 1..20: mol_type = other DNA
acaaaccagatagtcaaatt

SEQ ID NO: 38054 - DNA, 20 bp, synthetic construct
  misc_feature 1..20: note = chemically synthesized
  source 1..20: mol_type = other DNA
aattaagttaatgattctct

SEQ ID NO: 38055 - DNA, 20 bp, synthetic construct
  misc_feature 1..20: note = chemically synthesized
  source 1..20: mol_type = other DNA
ttaagttaatgattctctca

SEQ ID NO: 38056 - DNA, 20 bp, synthetic construct
  misc_feature 1..20: note = chemically synthesized
  source 1..20: mol_type = other DNA
ctctcagagacccatgccac

SEQ ID NO: 38057 - DNA, 20 bp, synthetic construct
  misc_feature 1..20: note = chemically synthesized
  source 1..20: mol_type = other DNA
agagacccatgccactggct

SEQ ID NO: 38058 - DNA, 20 bp, synthetic construct
  misc_feature 1..20: note = chemically synthesized
  source 1..20: mol_type = other DNA
gacccatgccactggctcag

SEQ ID NO: 38059 - DNA, 20 bp, synthetic construct
  misc_feature 1..20: note = chemically synthesized
  source 1..20: mol_type = other DNA
acccatgccactggctcagc

SEQ ID NO: 38060 - DNA, 20 bp, synthetic construct
  misc_feature 1..20: note = chemically synthesized
  source 1..20: mol_type = other DNA
cccatgccactggctcagca

SEQ ID NO: 38061 - DNA, 20 bp, synthetic construct
  misc_feature 1..20: note = chemically synthesized
  source 1..20: mol_type = other DNA
ttcaaacattaccttgaata

SEQ ID NO: 38062 - DNA, 20 bp, synthetic construct
  misc_feature 1..20: note = chemically synthesized
  source 1..20: mol_type = other DNA
caaacattaccttgaatata

SEQ ID NO: 38063 - DNA, 20 bp, synthetic construct
  misc_feature 1..20: note = chemically synthesized
  source 1..20: mol_type = other DNA
tagagtcttataaaatattt

SEQ ID NO: 38064 - DNA, 20 bp, synthetic construct
  misc_feature 1..20: note = chemically synthesized
  source 1..20: mol_type = other DNA
gagtcttataaaatatttga

SEQ ID NO: 38065 - DNA, 20 bp, synthetic construct
  misc_feature 1..20: note = chemically synthesized
  source 1..20: mol_type = other DNA
atttgagagtgcaatgtcaa

SEQ ID NO: 38066 - DNA, 20 bp, synthetic construct
  misc_feature 1..20: note = chemically synthesized
  source 1..20: mol_type = other DNA
agtgcaatgtcaatagatgc

SEQ ID NO: 38067 - DNA, 20 bp, synthetic construct
  misc_feature 1..20: note = chemically synthesized
  source 1..20: mol_type = other DNA
gtgcaatgtcaatagatgct

SEQ ID NO: 38068 - DNA, 20 bp, synthetic construct
  misc_feature 1..20: note = chemically synthesized
  source 1..20: mol_type = other DNA
caatgtcaatagatgctggg

SEQ ID NO: 38069 - DNA, 20 bp, synthetic construct
  misc_feature 1..20: note = chemically synthesized
  source 1..20: mol_type = other DNA
tgtcaatagatgctgggaag

SEQ ID NO: 38070 - DNA, 20 bp, synthetic construct
  misc_feature 1..20: note = chemically synthesized
  source 1..20: mol_type = other DNA
tagatgctgggaagtggtga

SEQ ID NO: 38071 - DNA, 20 bp, synthetic construct
  misc_feature 1..20: note = chemically synthesized
  source 1..20: mol_type = other DNA
gtgaaagccatttcccccct

SEQ ID NO: 38072 - DNA, 20 bp, synthetic construct
  misc_feature 1..20: note = chemically synthesized
  source 1..20: mol_type = other DNA
cttactccttccctcacccc

SEQ ID NO: 38073 - DNA, 20 bp, synthetic construct
  misc_feature 1..20: note = chemically synthesized
  source 1..20: mol_type = other DNA
agaccttcatctttcctgat

SEQ ID NO: 38074 - DNA, 20 bp, synthetic construct
  misc_feature 1..20: note = chemically synthesized
  source 1..20: mol_type = other DNA
ttctttcattctctttcttt

SEQ ID NO: 38075 - DNA, 20 bp, synthetic construct
  misc_feature 1..20: note = chemically synthesized
  source 1..20: mol_type = other DNA
tggataaaataaaatcataa

SEQ ID NO: 38076 - DNA, 20 bp, synthetic construct
  misc_feature 1..20: note = chemically synthesized
  source 1..20: mol_type = other DNA
ataaaataaaatcataaaag

SEQ ID NO: 38077 - DNA, 20 bp, synthetic construct
  misc_feature 1..20: note = chemically synthesized
  source 1..20: mol_type = other DNA
taaaagtagctcatatttgc

SEQ ID NO: 38078 - DNA, 20 bp, synthetic construct
  misc_feature 1..20: note = chemically synthesized
  source 1..20: mol_type = other DNA
ttgctggtaacttccatgac

SEQ ID NO: 38079 - DNA, 20 bp, synthetic construct
  misc_feature 1..20: note = chemically synthesized
  source 1..20: mol_type = other DNA
ccatgaccagaccctctgcc

SEQ ID NO: 38080 - DNA, 20 bp, synthetic construct
  misc_feature 1..20: note = chemically synthesized
  source 1..20: mol_type = other DNA
tgccaagtgctgcacatcca

SEQ ID NO: 38081 - DNA, 20 bp, synthetic construct
  misc_feature 1..20: note = chemically synthesized
  source 1..20: mol_type = other DNA
gcacatccatagcctccctc

SEQ ID NO: 38082 - DNA, 20 bp, synthetic construct
  misc_feature 1..20: note = chemically synthesized
  source 1..20: mol_type = other DNA
gcctccctcaagctttccaa

SEQ ID NO: 38083 - DNA, 20 bp, synthetic construct
  misc_feature 1..20: note = chemically synthesized
  source 1..20: mol_type = other DNA
cctccctcaagctttccaac

SEQ ID NO: 38084 - DNA, 20 bp, synthetic construct
  misc_feature 1..20: note = chemically synthesized
  source 1..20: mol_type = other DNA
ccctcaagctttccaacagg

SEQ ID NO: 38085 - DNA, 20 bp, synthetic construct
  misc_feature 1..20: note = chemically synthesized
  source 1..20: mol_type = other DNA
tccaacaggcagtgctgtac

SEQ ID NO: 38086 - DNA, 20 bp, synthetic construct
  misc_feature 1..20: note = chemically synthesized
  source 1..20: mol_type = other DNA
ccaacaggcagtgctgtacg

SEQ ID NO: 38087 - DNA, 20 bp, synthetic construct
  misc_feature 1..20: note = chemically synthesized
  source 1..20: mol_type = other DNA
aacaggcagtgctgtacgag

SEQ ID NO: 38088 - DNA, 20 bp, synthetic construct
  misc_feature 1..20: note = chemically synthesized
  source 1..20: mol_type = other DNA
acaggcagtgctgtacgagg

SEQ ID NO: 38089 - DNA, 20 bp, synthetic construct
  misc_feature 1..20: note = chemically synthesized
  source 1..20: mol_type = other DNA
caggcagtgctgtacgagga

SEQ ID NO: 38090 - DNA, 20 bp, synthetic construct
  misc_feature 1..20: note = chemically synthesized
  source 1..20: mol_type = other DNA
aggcagtgctgtacgaggag

SEQ ID NO: 38091 - DNA, 20 bp, synthetic construct
  misc_feature 1..20: note = chemically synthesized
  source 1..20: mol_type = other DNA
ggcagtgctgtacgaggagg

SEQ ID NO: 38092 - DNA, 20 bp, synthetic construct
  misc_feature 1..20: note = chemically synthesized
  source 1..20: mol_type = other DNA
tgctgtacgaggagggggct

SEQ ID NO: 38093 - DNA, 20 bp, synthetic construct
  misc_feature 1..20: note = chemically synthesized
  source 1..20: mol_type = other DNA
gctgtacgaggagggggctg

SEQ ID NO: 38094 - DNA, 20 bp, synthetic construct
  misc_feature 1..20: note = chemically synthesized
  source 1..20: mol_type = other DNA
gagggggctgaggccttccc

SEQ ID NO: 38095 - DNA, 20 bp, synthetic construct
  misc_feature 1..20: note = chemically synthesized
  source 1..20: mol_type = other DNA
agggggctgaggccttcccg

SEQ ID NO: 38096 - DNA, 20 bp, synthetic construct
  misc_feature 1..20: note = chemically synthesized
  source 1..20: mol_type = other DNA
cccgaggttgtgtcgctacc

SEQ ID NO: 38097 - DNA, 20 bp, synthetic construct
  misc_feature 1..20: note = chemically synthesized
  source 1..20: mol_type = other DNA
ccgaggttgtgtcgctaccc

SEQ ID NO: 38098 - DNA, 20 bp, synthetic construct
  misc_feature 1..20: note = chemically synthesized
  source 1..20: mol_type = other DNA
cgaggttgtgtcgctaccca

SEQ ID NO: 38099 - DNA, 20 bp, synthetic construct
  misc_feature 1..20: note = chemically synthesized
  source 1..20: mol_type = other DNA
gaggttgtgtcgctacccag

SEQ ID NO: 38100 - DNA, 20 bp, synthetic construct
  misc_feature 1..20: note = chemically synthesized
  source 1..20: mol_type = other DNA
tgtgtcgctacccaggggtg

SEQ ID NO: 38101 - DNA, 20 bp, synthetic construct
  misc_feature 1..20: note = chemically synthesized
  source 1..20: mol_type = other DNA
ctacccaggggtgcagctga

SEQ ID NO: 38102 - DNA, 20 bp, synthetic construct
  misc_feature 1..20: note = chemically synthesized
  source 1..20: mol_type = other DNA
gctgatagacacaacccttt

SEQ ID NO: 38103 - DNA, 20 bp, synthetic construct
  misc_feature 1..20: note = chemically synthesized
  source 1..20: mol_type = other DNA
ctgatagacacaaccctttc

SEQ ID NO: 38104 - DNA, 20 bp, synthetic construct
  misc_feature 1..20: note = chemically synthesized
  source 1..20: mol_type = other DNA
gacacaaccctttcaggtct

SEQ ID NO: 38105 - DNA, 20 bp, synthetic construct
  misc_feature 1..20: note = chemically synthesized
  source 1..20: mol_type = other DNA
cctttcaggtcttagtttac

SEQ ID NO: 38106 - DNA, 20 bp, synthetic construct
  misc_feature 1..20: note = chemically synthesized
  source 1..20: mol_type = other DNA
tcaggtcttagtttacgagc

SEQ ID NO: 38107 - DNA, 20 bp, synthetic construct
  misc_feature 1..20: note = chemically synthesized
  source 1..20: mol_type = other DNA
gtcttagtttacgagcaagc

SEQ ID NO: 38108 - DNA, 20 bp, synthetic construct
  misc_feature 1..20: note = chemically synthesized
  source 1..20: mol_type = other DNA
tcttagtttacgagcaagct

SEQ ID NO: 38109 - DNA, 20 bp, synthetic construct
  misc_feature 1..20: note = chemically synthesized
  source 1..20: mol_type = other DNA
ctgtgccgaaatgacaacat

SEQ ID NO: 38110 - DNA, 20 bp, synthetic construct
  misc_feature 1..20: note = chemically synthesized
  source 1..20: mol_type = other DNA
cttcaaaatttatttattcc

SEQ ID NO: 38111 - DNA, 20 bp, synthetic construct
  misc_feature 1..20: note = chemically synthesized
  source 1..20: mol_type = other DNA
gtaattataaattatgttat

SEQ ID NO: 38112 - DNA, 20 bp, synthetic construct
  misc_feature 1..20: note = chemically synthesized
  source 1..20: mol_type = other DNA
ttataagatatcaatccttc

SEQ ID NO: 38113 - DNA, 20 bp, synthetic construct
  misc_feature 1..20: note = chemically synthesized
  source 1..20: mol_type = other DNA
tataagatatcaatccttcc

SEQ ID NO: 38114 - DNA, 20 bp, synthetic construct
  misc_feature 1..20: note = chemically synthesized
  source 1..20: mol_type = other DNA
taagatatcaatccttccag

SEQ ID NO: 38115 - DNA, 20 bp, synthetic construct
  misc_feature 1..20: note = chemically synthesized
  source 1..20: mol_type = other DNA
aagatatcaatccttccagg

SEQ ID NO: 38116 - DNA, 20 bp, synthetic construct
  misc_feature 1..20: note = chemically synthesized
  source 1..20: mol_type = other DNA
agatatcaatccttccagga

SEQ ID NO: 38117 - DNA, 20 bp, synthetic construct
  misc_feature 1..20: note = chemically synthesized
  source 1..20: mol_type = other DNA
gatatcaatccttccaggag

SEQ ID NO: 38118 - DNA, 20 bp, synthetic construct
  misc_feature 1..20: note = chemically synthesized
  source 1..20: mol_type = other DNA
atatcaatccttccaggagg

SEQ ID NO: 38119 - DNA, 20 bp, synthetic construct
  misc_feature 1..20: note = chemically synthesized
  source 1..20: mol_type = other DNA
tcaatccttccaggaggggg

SEQ ID NO: 38120 - DNA, 20 bp, synthetic construct
  misc_feature 1..20: note = chemically synthesized
  source 1..20: mol_type = other DNA
atccttccaggagggggtgg

SEQ ID NO: 38121 - DNA, 20 bp, synthetic construct
  misc_feature 1..20: note = chemically synthesized
  source 1..20: mol_type = other DNA
gtggctcatgcctataatcc

SEQ ID NO: 38122 - DNA, 20 bp, synthetic construct
  misc_feature 1..20: note = chemically synthesized
  source 1..20: mol_type = other DNA
tgcctataatcccagcattt

SEQ ID NO: 38123 - DNA, 20 bp, synthetic construct
  misc_feature 1..20: note = chemically synthesized
  source 1..20: mol_type = other DNA
gcctataatcccagcatttt

SEQ ID NO: 38124 - DNA, 20 bp, synthetic construct
  misc_feature 1..20: note = chemically synthesized
  source 1..20: mol_type = other DNA
ctataatcccagcattttgg

SEQ ID NO: 38125 - DNA, 20 bp, synthetic construct
  misc_feature 1..20: note = chemically synthesized
  source 1..20: mol_type = other DNA
tataatcccagcattttggg

SEQ ID NO: 38126 - DNA, 20 bp, synthetic construct
  misc_feature 1..20: note = chemically synthesized
  source 1..20: mol_type = other DNA
cccagcattttgggaggcca

SEQ ID NO: 38127 - DNA, 20 bp, synthetic construct
  misc_feature 1..20: note = chemically synthesized
  source 1..20: mol_type = other DNA
agcattttgggaggccacgg

SEQ ID NO: 38128 - DNA, 20 bp, synthetic construct
  misc_feature 1..20: note = chemically synthesized
  source 1..20: mol_type = other DNA
ttttgggaggccacggcaga

SEQ ID NO: 38129 - DNA, 20 bp, synthetic construct
  misc_feature 1..20: note = chemically synthesized
  source 1..20: mol_type = other DNA
ccacggcagatggatcacct

SEQ ID NO: 38130 - DNA, 20 bp, synthetic construct
  misc_feature 1..20: note = chemically synthesized
  source 1..20: mol_type = other DNA
cacggcagatggatcacctg

SEQ ID NO: 38131 - DNA, 20 bp, synthetic construct
  misc_feature 1..20: note = chemically synthesized
  source 1..20: mol_type = other DNA
gcagatggatcacctgaggc

SEQ ID NO: 38132 - DNA, 20 bp, synthetic construct
  misc_feature 1..20: note = chemically synthesized
  source 1..20: mol_type = other DNA
cagatggatcacctgaggcc

SEQ ID NO: 38133 - DNA, 20 bp, synthetic construct
  misc_feature 1..20: note = chemically synthesized
  source 1..20: mol_type = other DNA
gatggatcacctgaggccag

SEQ ID NO: 38134 - DNA, 20 bp, synthetic construct
  misc_feature 1..20: note = chemically synthesized
  source 1..20: mol_type = other DNA
tcacctgaggccaggagttt

SEQ ID NO: 38135 - DNA, 20 bp, synthetic construct
  misc_feature 1..20: note = chemically synthesized
  source 1..20: mol_type = other DNA
tgaggccaggagtttgagac

SEQ ID NO: 38136 - DNA, 20 bp, synthetic construct
  misc_feature 1..20: note = chemically synthesized
  source 1..20: mol_type = other DNA
ccaggagtttgagacaagcc

SEQ ID NO: 38137 - DNA, 20 bp, synthetic construct
  misc_feature 1..20: note = chemically synthesized
  source 1..20: mol_type = other DNA
caggagtttgagacaagcct

SEQ ID NO: 38138 - DNA, 20 bp, synthetic construct
  misc_feature 1..20: note = chemically synthesized
  source 1..20: mol_type = other DNA
tctacaaaaaatacaaaaat

SEQ ID NO: 38139 - DNA, 20 bp, synthetic construct
  misc_feature 1..20: note = chemically synthesized
  source 1..20: mol_type = other DNA
caaaaaatacaaaaattagc

SEQ ID NO: 38140 - DNA, 20 bp, synthetic construct
  misc_feature 1..20: note = chemically synthesized
  source 1..20: mol_type = other DNA
aaaaaatacaaaaattagct

SEQ ID NO: 38141 - DNA, 20 bp, synthetic construct
  misc_feature 1..20: note = chemically synthesized
  source 1..20: mol_type = other DNA
atacaaaaattagctgggtg

SEQ ID NO: 38142 - DNA, 20 bp, synthetic construct
  misc_feature 1..20: note = chemically synthesized
  source 1..20: mol_type = other DNA
acaaaaattagctgggtgtg

SEQ ID NO: 38143 - DNA, 20 bp, synthetic construct
  misc_feature 1..20: note = chemically synthesized
  source 1..20: mol_type = other DNA
caaaaattagctgggtgtgg

SEQ ID NO: 38144 - DNA, 20 bp, synthetic construct
  misc_feature 1..20: note = chemically synthesized
  source 1..20: mol_type = other DNA
ctgggtgtggaggcacatgc

SEQ ID NO: 38145 - DNA, 20 bp, synthetic construct
  misc_feature 1..20: note = chemically synthesized
  source 1..20: mol_type = other DNA
gaggcacatgccagtcatcc

SEQ ID NO: 38146 - DNA, 20 bp, synthetic construct
  misc_feature 1..20: note = chemically synthesized
  source 1..20: mol_type = other DNA
tgccagtcatcccagctact

SEQ ID NO: 38147 - DNA, 20 bp, synthetic construct
  misc_feature 1..20: note = chemically synthesized
  source 1..20: mol_type = other DNA
cagtcatcccagctactaag

SEQ ID NO: 38148 - DNA, 20 bp, synthetic construct
  misc_feature 1..20: note = chemically synthesized
  source 1..20: mol_type = other DNA
agtcatcccagctactaagt

SEQ ID NO: 38149 - DNA, 20 bp, synthetic construct
  misc_feature 1..20: note = chemically synthesized
  source 1..20: mol_type = other DNA
tcccagctactaagtaggct

SEQ ID NO: 38150 - DNA, 20 bp, synthetic construct
  misc_feature 1..20: note = chemically synthesized
  source 1..20: mol_type = other DNA
cccagctactaagtaggctg

SEQ ID NO: 38151 - DNA, 20 bp, synthetic construct
  misc_feature 1..20: note = chemically synthesized
  source 1..20: mol_type = other DNA
tactaagtaggctgaggcac

SEQ ID NO: 38152 - DNA, 20 bp, synthetic construct
  misc_feature 1..20: note = chemically synthesized
  source 1..20: mol_type = other DNA
gcactagaattgcttgaaca

SEQ ID NO: 38153 - DNA, 20 bp, synthetic construct
  misc_feature 1..20: note = chemically synthesized
  source 1..20: mol_type = other DNA
cactagaattgcttgaacac

SEQ ID NO: 38154 - DNA, 20 bp, synthetic construct
  misc_feature 1..20: note = chemically synthesized
  source 1..20: mol_type = other DNA
ctagaattgcttgaacacag

SEQ ID NO: 38155 - DNA, 20 bp, synthetic construct
  misc_feature 1..20: note = chemically synthesized
  source 1..20: mol_type = other DNA
aattgcttgaacacaggaga

SEQ ID NO: 38156 - DNA, 20 bp, synthetic construct
  misc_feature 1..20: note = chemically synthesized
  source 1..20: mol_type = other DNA
ttgcttgaacacaggagatg

SEQ ID NO: 38157 - DNA, 20 bp, synthetic construct
  misc_feature 1..20: note = chemically synthesized
  source 1..20: mol_type = other DNA
tgcttgaacacaggagatgg

SEQ ID NO: 38158 - DNA, 20 bp, synthetic construct
  misc_feature 1..20: note = chemically synthesized
  source 1..20: mol_type = other DNA
aacacaggagatggaggttg

SEQ ID NO: 38159 - DNA, 20 bp, synthetic construct
  misc_feature 1..20: note = chemically synthesized
  source 1..20: mol_type = other DNA
caggagatggaggttgcagt

SEQ ID NO: 38160 - DNA, 20 bp, synthetic construct
  misc_feature 1..20: note = chemically synthesized
  source 1..20: mol_type = other DNA
gatggaggttgcagtgagcc

SEQ ID NO: 38161 - DNA, 20 bp, synthetic construct
  misc_feature 1..20: note = chemically synthesized
  source 1..20: mol_type = other DNA
aagaatgtgccactgcactc

SEQ ID NO: 38162 - DNA, 20 bp, synthetic construct
  misc_feature 1..20: note = chemically synthesized
  source 1..20: mol_type = other DNA
tgtgccactgcactccagcc

SEQ ID NO: 38163 - DNA, 20 bp, synthetic construct
  misc_feature 1..20: note = chemically synthesized
  source 1..20: mol_type = other DNA
gtgccactgcactccagcct

SEQ ID NO: 38164 - DNA, 20 bp, synthetic construct
  misc_feature 1..20: note = chemically synthesized
  source 1..20: mol_type = other DNA
ctgcactccagcctgggtga

SEQ ID NO: 38165 - DNA, 20 bp, synthetic construct
  misc_feature 1..20: note = chemically synthesized
  source 1..20: mol_type = other DNA
gcactccagcctgggtgaca

SEQ ID NO: 38166 - DNA, 20 bp, synthetic construct
  misc_feature 1..20: note = chemically synthesized
  source 1..20: mol_type = other DNA
tccagcctgggtgacagagc

SEQ ID NO: 38167 - DNA, 20 bp, synthetic construct
  misc_feature 1..20: note = chemically synthesized
  source 1..20: mol_type = other DNA
gtgacagagcaagaatgtct

SEQ ID NO: 38168 - DNA, 20 bp, synthetic construct
  misc_feature 1..20: note = chemically synthesized
  source 1..20: mol_type = other DNA
tgacagagcaagaatgtctc

SEQ ID NO: 38169 - DNA, 20 bp, synthetic construct
  misc_feature 1..20: note = chemically synthesized
  source 1..20: mol_type = other DNA
agagcaagaatgtctcagga

SEQ ID NO: 38170 - DNA, 20 bp, synthetic construct
  misc_feature 1..20: note = chemically synthesized
  source 1..20: mol_type = other DNA
aatatcaatccttcctattc

SEQ ID NO: 38171 - DNA, 20 bp, synthetic construct
  misc_feature 1..20: note = chemically synthesized
  source 1..20: mol_type = other DNA
atcaatccttcctattctag

SEQ ID NO: 38172 - DNA, 20 bp, synthetic construct
  misc_feature 1..20: note = chemically synthesized
  source 1..20: mol_type = other DNA
ccttcctattctagtagttg

SEQ ID NO: 38173 - DNA, 20 bp, synthetic construct
  misc_feature 1..20: note = chemically synthesized
  source 1..20: mol_type = other DNA
atatttttaaaaataaaaca

SEQ ID NO: 38174 - DNA, 20 bp, synthetic construct
  misc_feature 1..20: note = chemically synthesized
  source 1..20: mol_type = other DNA
tatttttaaaaataaaacat

SEQ ID NO: 38175 - DNA, 20 bp, synthetic construct
  misc_feature 1..20: note = chemically synthesized
  source 1..20: mol_type = other DNA
atttttaaaaataaaacata

SEQ ID NO: 38176 - DNA, 20 bp, synthetic construct
  misc_feature 1..20: note = chemically synthesized
  source 1..20: mol_type = other DNA
taaaaataaaacatagggtc

SEQ ID NO: 38177 - DNA, 20 bp, synthetic construct
  misc_feature 1..20: note = chemically synthesized
  source 1..20: mol_type = other DNA
ataaaacatagggtcgagtg

SEQ ID NO: 38178 - DNA, 20 bp, synthetic construct
  misc_feature 1..20: note = chemically synthesized
  source 1..20: mol_type = other DNA
aaacatagggtcgagtgcgg

SEQ ID NO: 38179 - DNA, 20 bp, synthetic construct
  misc_feature 1..20: note = chemically synthesized
  source 1..20: mol_type = other DNA
gtggctcaactctgtaatcc

SEQ ID NO: 38180 - DNA, 20 bp, synthetic construct
  misc_feature 1..20: note = chemically synthesized
  source 1..20: mol_type = other DNA
actctgtaatcccagcactt

SEQ ID NO: 38181 - DNA, 20 bp, synthetic construct
  misc_feature 1..20: note = chemically synthesized
  source 1..20: mol_type = other DNA
ctctgtaatcccagcacttt

SEQ ID NO: 38182 - DNA, 20 bp, synthetic construct
  misc_feature 1..20: note = chemically synthesized
  source 1..20: mol_type = other DNA
ctgtaatcccagcactttgg

SEQ ID NO: 38183 - DNA, 20 bp, synthetic construct
  misc_feature 1..20: note = chemically synthesized
  source 1..20: mol_type = other DNA
tgtaatcccagcactttggg

SEQ ID NO: 38184 - DNA, 20 bp, synthetic construct
  misc_feature 1..20: note = chemically synthesized
  source 1..20: mol_type = other DNA
tcccagcactttgggaggcc

SEQ ID NO: 38185 - DNA, 20 bp, synthetic construct
  misc_feature 1..20: note = chemically synthesized
  source 1..20: mol_type = other DNA
agcactttgggaggccaaga

SEQ ID NO: 38186 - DNA, 20 bp, synthetic construct
  misc_feature 1..20: note = chemically synthesized
  source 1..20: mol_type = other DNA
gcactttgggaggccaagac

SEQ ID NO: 38187 - DNA, 20 bp, synthetic construct
  misc_feature 1..20: note = chemically synthesized
  source 1..20: mol_type = other DNA
ctttgggaggccaagacagg

SEQ ID NO: 38188 - DNA, 20 bp, synthetic construct
  misc_feature 1..20: note = chemically synthesized
  source 1..20: mol_type = other DNA
ggccaagacaggtggatcac

SEQ ID NO: 38189 - DNA, 20 bp, synthetic construct
  misc_feature 1..20: note = chemically synthesized
  source 1..20: mol_type = other DNA
gccaagacaggtggatcaca

SEQ ID NO: 38190 - DNA, 20 bp, synthetic construct
  misc_feature 1..20: note = chemically synthesized
  source 1..20: mol_type = other DNA
agacaggtggatcacaaggt

SEQ ID NO: 38191 - DNA, 20 bp, synthetic construct
  misc_feature 1..20: note = chemically synthesized
  source 1..20: mol_type = other DNA
gacaggtggatcacaaggtc

SEQ ID NO: 38192 - DNA, 20 bp, synthetic construct
  misc_feature 1..20: note = chemically synthesized
  source 1..20: mol_type = other DNA
caggtggatcacaaggtcag

SEQ ID NO: 38193 - DNA, 20 bp, synthetic construct
  misc_feature 1..20: note = chemically synthesized
  source 1..20: mol_type = other DNA
gatcacaaggtcaggagttt

SEQ ID NO: 38194 - DNA, 20 bp, synthetic construct
  misc_feature 1..20: note = chemically synthesized
  source 1..20: mol_type = other DNA
caaggtcaggagtttgagac

SEQ ID NO: 38195 - DNA, 20 bp, synthetic construct
  misc_feature 1..20: note = chemically synthesized
  source 1..20: mol_type = other DNA
gtcaggagtttgagaccagc

SEQ ID NO: 38196 - DNA, 20 bp, synthetic construct
  misc_feature 1..20: note = chemically synthesized
  source 1..20: mol_type = other DNA
tcaggagtttgagaccagcc

SEQ ID NO: 38197 - DNA, 20 bp, synthetic construct
  misc_feature 1..20: note = chemically synthesized
  source 1..20: mol_type = other DNA
tgagaccagccaggccaatg

SEQ ID NO: 38198 - DNA, 20 bp, synthetic construct
  misc_feature 1..20: note = chemically synthesized
  source 1..20: mol_type = other DNA
tctactaaaaatacaaaaat

SEQ ID NO: 38199 - DNA, 20 bp, synthetic construct
  misc_feature 1..20: note = chemically synthesized
  source 1..20: mol_type = other DNA
ctaaaaatacaaaaattagc

SEQ ID NO: 38200 - DNA, 20 bp, synthetic construct
  misc_feature 1..20: note = chemically synthesized
  source 1..20: mol_type = other DNA
taaaaatacaaaaattagcc

SEQ ID NO: 38201 - DNA, 20 bp, synthetic construct
  misc_feature 1..20: note = chemically synthesized
  source 1..20: mol_type = other DNA
atacaaaaattagccaggcg

SEQ ID NO: 38202 - DNA, 20 bp, synthetic construct
  misc_feature 1..20: note = chemically synthesized
  source 1..20: mol_type = other DNA
caaaaattagccaggcgtgg

SEQ ID NO: 38203 - DNA, 20 bp, synthetic construct
  misc_feature 1..20: note = chemically synthesized
  source 1..20: mol_type = other DNA
aaattagccaggcgtggtgg

SEQ ID NO: 38204 - DNA, 20 bp, synthetic construct
  misc_feature 1..20: note = chemically synthesized
  source 1..20: mol_type = other DNA
aattagccaggcgtggtggt

SEQ ID NO: 38205 - DNA, 20 bp, synthetic construct
  misc_feature 1..20: note = chemically synthesized
  source 1..20: mol_type = other DNA
gtggtgggcacctgtaatcc

SEQ ID NO: 38206 - DNA, 20 bp, synthetic construct
  misc_feature 1..20: note = chemically synthesized
  source 1..20: mol_type = other DNA
gcacctgtaatcccagctac

SEQ ID NO: 38207 - DNA, 20 bp, synthetic construct
  misc_feature 1..20: note = chemically synthesized
  source 1..20: mol_type = other DNA
cacctgtaatcccagctact

SEQ ID NO: 38208 - DNA, 20 bp, synthetic construct
  misc_feature 1..20: note = chemically synthesized
  source 1..20: mol_type = other DNA
acctgtaatcccagctacta

SEQ ID NO: 38209 - DNA, 20 bp, synthetic construct
  misc_feature 1..20: note = chemically synthesized
  source 1..20: mol_type = other DNA
ctgtaatcccagctactagg

SEQ ID NO: 38210 - DNA, 20 bp, synthetic construct
  misc_feature 1..20: note = chemically synthesized
  source 1..20: mol_type = other DNA
tgtaatcccagctactaggg

SEQ ID NO: 38211 - DNA, 20 bp, synthetic construct
  misc_feature 1..20: note = chemically synthesized
  source 1..20: mol_type = other DNA
atcccagctactagggaggc

SEQ ID NO: 38212 - DNA, 20 bp, synthetic construct
  misc_feature 1..20: note = chemically synthesized
  source 1..20: mol_type = other DNA
cccagctactagggaggctg

SEQ ID NO: 38213 - DNA, 20 bp, synthetic construct
  misc_feature 1..20: note = chemically synthesized
  source 1..20: mol_type = other DNA
ctggagtattcacttgaacc

SEQ ID NO: 38214 - DNA, 20 bp, synthetic construct
  misc_feature 1..20: note = chemically synthesized
  source 1..20: mol_type = other DNA
tggagtattcacttgaaccc

SEQ ID NO: 38215 - DNA, 20 bp, synthetic construct
  misc_feature 1..20: note = chemically synthesized
  source 1..20: mol_type = other DNA
gagtattcacttgaacccag

SEQ ID NO: 38216 - DNA, 20 bp, synthetic construct
  misc_feature 1..20: note = chemically synthesized
  source 1..20: mol_type = other DNA
agtattcacttgaacccagg

SEQ ID NO: 38217 - DNA, 20 bp, synthetic construct
  misc_feature 1..20: note = chemically synthesized
  source 1..20: mol_type = other DNA
attcacttgaacccaggagg

SEQ ID NO: 38218 - DNA, 20 bp, synthetic construct
  misc_feature 1..20: note = chemically synthesized
  source 1..20: mol_type = other DNA
cacttgaacccaggaggtgg

SEQ ID NO: 38219 - DNA, 20 bp, synthetic construct
  misc_feature 1..20: note = chemically synthesized
  source 1..20: mol_type = other DNA
aacccaggaggtggaagttg

SEQ ID NO: 38220 - DNA, 20 bp, synthetic construct
  misc_feature 1..20: note = chemically synthesized
  source 1..20: mol_type = other DNA
caggaggtggaagttgcagt

SEQ ID NO: 38221 - DNA, 20 bp, synthetic construct
  misc_feature 1..20: note = chemically synthesized
  source 1..20: mol_type = other DNA
gcagtgagccaaaatcacgt

SEQ ID NO: 38222 - DNA, 20 bp, synthetic construct
  misc_feature 1..20: note = chemically synthesized
  source 1..20: mol_type = other DNA
tcacgtcagtgcacttcaac

SEQ ID NO: 38223 - DNA, 20 bp, synthetic construct
  misc_feature 1..20: note = chemically synthesized
  source 1..20: mol_type = other DNA
cacgtcagtgcacttcaacc

SEQ ID NO: 38224 - DNA, 20 bp, synthetic construct
  misc_feature 1..20: note = chemically synthesized
  source 1..20: mol_type = other DNA
acgtcagtgcacttcaaccg

SEQ ID NO: 38225 - DNA, 20 bp, synthetic construct
  misc_feature 1..20: note = chemically synthesized
  source 1..20: mol_type = other DNA
cagtgcacttcaaccggggt

SEQ ID NO: 38226 - DNA, 20 bp, synthetic construct
  misc_feature 1..20: note = chemically synthesized
  source 1..20: mol_type = other DNA
gtgcacttcaaccggggtga

SEQ ID NO: 38227 - DNA, 20 bp, synthetic construct
  misc_feature 1..20: note = chemically synthesized
  source 1..20: mol_type = other DNA
aataaaataaaataaaataa

SEQ ID NO: 38228 - DNA, 20 bp, synthetic construct
  misc_feature 1..20: note = chemically synthesized
  source 1..20: mol_type = other DNA
aataaaataaaataaaagca

SEQ ID NO: 38229 - DNA, 20 bp, synthetic construct
  misc_feature 1..20: note = chemically synthesized
  source 1..20: mol_type = other DNA
tctttccgcaaatgaattca

SEQ ID NO: 38230 - DNA, 20 bp, synthetic construct
  misc_feature 1..20: note = chemically synthesized
  source 1..20: mol_type = other DNA
cttacattttcgttctcatg

SEQ ID NO: 38231 - DNA, 20 bp, synthetic construct
  misc_feature 1..20: note = chemically synthesized
  source 1..20: mol_type = other DNA
attttcgttctcatgaagta

SEQ ID NO: 38232 - DNA, 20 bp, synthetic construct
  misc_feature 1..20: note = chemically synthesized
  source 1..20: mol_type = other DNA
tcgttctcatgaagtaaagc

SEQ ID NO: 38233 - DNA, 20 bp, synthetic construct
  misc_feature 1..20: note = chemically synthesized
  source 1..20: mol_type = other DNA
gttctcatgaagtaaagcaa

SEQ ID NO: 38234 - DNA, 20 bp, synthetic construct
  misc_feature 1..20: note = chemically synthesized
  source 1..20: mol_type = other DNA
ctcatgaagtaaagcaagag

SEQ ID NO: 38235 - DNA, 20 bp, synthetic construct
  misc_feature 1..20: note = chemically synthesized
  source 1..20: mol_type = other DNA
atgaagtaaagcaagagtgg

SEQ ID NO: 38236 - DNA, 20 bp, synthetic construct
  misc_feature 1..20: note = chemically synthesized
  source 1..20: mol_type = other DNA
aaagcaagagtggtagaatt

SEQ ID NO: 38237 - DNA, 20 bp, synthetic construct
  misc_feature 1..20: note = chemically synthesized
  source 1..20: mol_type = other DNA
gcaagagtggtagaattaag

SEQ ID NO: 38238 - DNA, 20 bp, synthetic construct
  misc_feature 1..20: note = chemically synthesized
  source 1..20: mol_type = other DNA
gagtggtagaattaagtgga

SEQ ID NO: 38239 - DNA, 20 bp, synthetic construct
  misc_feature 1..20: note = chemically synthesized
  source 1..20: mol_type = other DNA
gtggtagaattaagtggaaa

SEQ ID NO: 38240 - DNA, 20 bp, synthetic construct
  misc_feature 1..20: note = chemically synthesized
  source 1..20: mol_type = other DNA
aagtggaaagagtctatctc

SEQ ID NO: 38241 - DNA, 20 bp, synthetic construct
  misc_feature 1..20: note = chemically synthesized
  source 1..20: mol_type = other DNA
gaaagagtctatctctagtg

SEQ ID NO: 38242 - DNA, 20 bp, synthetic construct
  misc_feature 1..20: note = chemically synthesized
  source 1..20: mol_type = other DNA
tatctctagtgtagtcacgt

SEQ ID NO: 38243 - DNA, 20 bp, synthetic construct
  misc_feature 1..20: note = chemically synthesized
  source 1..20: mol_type = other DNA
ctctagtgtagtcacgtcag

SEQ ID NO: 38244 - DNA, 20 bp, synthetic construct
  misc_feature 1..20: note = chemically synthesized
  source 1..20: mol_type = other DNA
gtcacgtcagtggttgtgtc

SEQ ID NO: 38245 - DNA, 20 bp, synthetic construct
  misc_feature 1..20: note = chemically synthesized
  source 1..20: mol_type = other DNA
cgtcagtggttgtgtcaaga

SEQ ID NO: 38246 - DNA, 20 bp, synthetic construct
  misc_feature 1..20: note = chemically synthesized
  source 1..20: mol_type = other DNA
agtggttgtgtcaagatggt

SEQ ID NO: 38247 - DNA, 20 bp, synthetic construct
  misc_feature 1..20: note = chemically synthesized
  source 1..20: mol_type = other DNA
gtggttgtgtcaagatggtt

SEQ ID NO: 38248 - DNA, 20 bp, synthetic construct
  misc_feature 1..20: note = chemically synthesized
  source 1..20: mol_type = other DNA
ggttgtgtcaagatggttag

SEQ ID NO: 38249 - DNA, 20 bp, synthetic construct
  misc_feature 1..20: note = chemically synthesized
  source 1..20: mol_type = other DNA
gttgtgtcaagatggttagg

SEQ ID NO: 38250 - DNA, 20 bp, synthetic construct
  misc_feature 1..20: note = chemically synthesized
  source 1..20: mol_type = other DNA
gaggctcctcccgtttaaaa

SEQ ID NO: 38251 - DNA, 20 bp, synthetic construct
  misc_feature 1..20: note = chemically synthesized
  source 1..20: mol_type = other DNA
tcccgtttaaaacagtatcc

SEQ ID NO: 38252 - DNA, 20 bp, synthetic construct
  misc_feature 1..20: note = chemically synthesized
  source 1..20: mol_type = other DNA
ttaaaacagtatccaagccc

SEQ ID NO: 38253 - DNA, 20 bp, synthetic construct
  misc_feature 1..20: note = chemically synthesized
  source 1..20: mol_type = other DNA
agccccagttgtaaatcaat

SEQ ID NO: 38254 - DNA, 20 bp, synthetic construct
  misc_feature 1..20: note = chemically synthesized
  source 1..20: mol_type = other DNA
gccccagttgtaaatcaatt

SEQ ID NO: 38255 - DNA, 20 bp, synthetic construct
  misc_feature 1..20: note = chemically synthesized
  source 1..20: mol_type = other DNA
ccccagttgtaaatcaattg

SEQ ID NO: 38256 - DNA, 20 bp, synthetic construct
  misc_feature 1..20: note = chemically synthesized
  source 1..20: mol_type = other DNA
ccagttgtaaatcaattggg

SEQ ID NO: 38257 - DNA, 20 bp, synthetic construct
  misc_feature 1..20: note = chemically synthesized
  source 1..20: mol_type = other DNA
gacacgccaactctgatcat

SEQ ID NO: 38258 - DNA, 20 bp, synthetic construct
  misc_feature 1..20: note = chemically synthesized
  source 1..20: mol_type = other DNA
tctgatcatcagcaatatct

SEQ ID NO: 38259 - DNA, 20 bp, synthetic construct
  misc_feature 1..20: note = chemically synthesized
  source 1..20: mol_type = other DNA
catcagcaatatctgagctc

SEQ ID NO: 38260 - DNA, 20 bp, synthetic construct
  misc_feature 1..20: note = chemically synthesized
  source 1..20: mol_type = other DNA
caatatctgagctccagtct

SEQ ID NO: 38261 - DNA, 20 bp, synthetic construct
  misc_feature 1..20: note = chemically synthesized
  source 1..20: mol_type = other DNA
ccagtctcagatattgtgtg

SEQ ID NO: 38262 - DNA, 20 bp, synthetic construct
  misc_feature 1..20: note = chemically synthesized
  source 1..20: mol_type = other DNA
tctcagatattgtgtgcagt

SEQ ID NO: 38263 - DNA, 20 bp, synthetic construct
  misc_feature 1..20: note = chemically synthesized
  source 1..20: mol_type = other DNA
ccctctacctccttccctac

SEQ ID NO: 38264 - DNA, 20 bp, synthetic construct
  misc_feature 1..20: note = chemically synthesized
  source 1..20: mol_type = other DNA
taccagaaaaatcaccactt

SEQ ID NO: 38265 - DNA, 20 bp, synthetic construct
  misc_feature 1..20: note = chemically synthesized
  source 1..20: mol_type = other DNA
aaaatcaccactttagtccc

SEQ ID NO: 38266 - DNA, 20 bp, synthetic construct
  misc_feature 1..20: note = chemically synthesized
  source 1..20: mol_type = other DNA
ccactttagtccctggccac

SEQ ID NO: 38267 - DNA, 20 bp, synthetic construct
  misc_feature 1..20: note = chemically synthesized
  source 1..20: mol_type = other DNA
cactttagtccctggccacc

SEQ ID NO: 38268 - DNA, 20 bp, synthetic construct
  misc_feature 1..20: note = chemically synthesized
  source 1..20: mol_type = other DNA
ccctggccaccgggacaccc

SEQ ID NO: 38269 - DNA, 20 bp, synthetic construct
  misc_feature 1..20: note = chemically synthesized
  source 1..20: mol_type = other DNA
cctggccaccgggacacccc

SEQ ID NO: 38270 - DNA, 20 bp, synthetic construct
  misc_feature 1..20: note = chemically synthesized
  source 1..20: mol_type = other DNA
tggccaccgggacaccccag

SEQ ID NO: 38271 - DNA, 20 bp, synthetic construct
  misc_feature 1..20: note = chemically synthesized
  source 1..20: mol_type = other DNA
ggccaccgggacaccccagg

SEQ ID NO: 38272 - DNA, 20 bp, synthetic construct
  misc_feature 1..20: note = chemically synthesized
  source 1..20: mol_type = other DNA
gccaccgggacaccccagga

SEQ ID NO: 38273 - DNA, 20 bp, synthetic construct
  misc_feature 1..20: note = chemically synthesized
  source 1..20: mol_type = other DNA
ccgggacaccccaggagggt

SEQ ID NO: 38274 - DNA, 20 bp, synthetic construct
  misc_feature 1..20: note = chemically synthesized
  source 1..20: mol_type = other DNA
ggacaccccaggagggtgag

SEQ ID NO: 38275 - DNA, 20 bp, synthetic construct
  misc_feature 1..20: note = chemically synthesized
  source 1..20: mol_type = other DNA
cccaggagggtgagtggtct

SEQ ID NO: 38276 - DNA, 20 bp, synthetic construct
  misc_feature 1..20: note = chemically synthesized
  source 1..20: mol_type = other DNA
ccaggagggtgagtggtctg

SEQ ID NO: 38277 - DNA, 20 bp, synthetic construct
  misc_feature 1..20: note = chemically synthesized
  source 1..20: mol_type = other DNA
ggagggtgagtggtctgagg

SEQ ID NO: 38278 - DNA, 20 bp, synthetic construct
  misc_feature 1..20: note = chemically synthesized
  source 1..20: mol_type = other DNA
tgagtggtctgaggtagtta

SEQ ID NO: 38279 - DNA, 20 bp, synthetic construct
  misc_feature 1..20: note = chemically synthesized
  source 1..20: mol_type = other DNA
tgaggtagttatggcactta

SEQ ID NO: 38280 - DNA, 20 bp, synthetic construct
  misc_feature 1..20: note = chemically synthesized
  source 1..20: mol_type = other DNA
tggctcccttgctgctgatc

SEQ ID NO: 38281 - DNA, 20 bp, synthetic construct
  misc_feature 1..20: note = chemically synthesized
  source 1..20: mol_type = other DNA
ttgctgctgatctggaactc

SEQ ID NO: 38282 - DNA, 20 bp, synthetic construct
  misc_feature 1..20: note = chemically synthesized
  source 1..20: mol_type = other DNA
tgatctggaactcaagcccc

SEQ ID NO: 38283 - DNA, 20 bp, synthetic construct
  misc_feature 1..20: note = chemically synthesized
  source 1..20: mol_type = other DNA
tctggaactcaagccccaag

SEQ ID NO: 38284 - DNA, 20 bp, synthetic construct
  misc_feature 1..20: note = chemically synthesized
  source 1..20: mol_type = other DNA
caagccccaagaagtcccct

SEQ ID NO: 38285 - DNA, 20 bp, synthetic construct
  misc_feature 1..20: note = chemically synthesized
  source 1..20: mol_type = other DNA
ggatgatctgaatatacatt

SEQ ID NO: 38286 - DNA, 20 bp, synthetic construct
  misc_feature 1..20: note = chemically synthesized
  source 1..20: mol_type = other DNA
gatgatctgaatatacattt

SEQ ID NO: 38287 - DNA, 20 bp, synthetic construct
  misc_feature 1..20: note = chemically synthesized
  source 1..20: mol_type = other DNA
atctgaatatacatttggga

SEQ ID NO: 38288 - DNA, 20 bp, synthetic construct
  misc_feature 1..20: note = chemically synthesized
  source 1..20: mol_type = other DNA
atatacatttgggacagatc

SEQ ID NO: 38289 - DNA, 20 bp, synthetic construct
  misc_feature 1..20: note = chemically synthesized
  source 1..20: mol_type = other DNA
tatacatttgggacagatct

SEQ ID NO: 38290 - DNA, 20 bp, synthetic construct
  misc_feature 1..20: note = chemically synthesized
  source 1..20: mol_type = other DNA
atacatttgggacagatcta

SEQ ID NO: 38291 - DNA, 20 bp, synthetic construct
  misc_feature 1..20: note = chemically synthesized
  source 1..20: mol_type = other DNA
acatttgggacagatctagg

SEQ ID NO: 38292 - DNA, 20 bp, synthetic construct
  misc_feature 1..20: note = chemically synthesized
  source 1..20: mol_type = other DNA
gacagatctagggagtttct

SEQ ID NO: 38293 - DNA, 20 bp, synthetic construct
  misc_feature 1..20: note = chemically synthesized
  source 1..20: mol_type = other DNA
gggagtttctgagcaacact

SEQ ID NO: 38294 - DNA, 20 bp, synthetic construct
  misc_feature 1..20: note = chemically synthesized
  source 1..20: mol_type = other DNA
tttctgagcaacacttagac

SEQ ID NO: 38295 - DNA, 20 bp, synthetic construct
  misc_feature 1..20: note = chemically synthesized
  source 1..20: mol_type = other DNA
ttctgagcaacacttagact

SEQ ID NO: 38296 - DNA, 20 bp, synthetic construct
  misc_feature 1..20: note = chemically synthesized
  source 1..20: mol_type = other DNA
tctgagcaacacttagactg

SEQ ID NO: 38297 - DNA, 20 bp, synthetic construct
  misc_feature 1..20: note = chemically synthesized
  source 1..20: mol_type = other DNA
cctacttgaattcgctactt

SEQ ID NO: 38298 - DNA, 20 bp, synthetic construct
  misc_feature 1..20: note = chemically synthesized
  source 1..20: mol_type = other DNA
ctacttgaattcgctacttt

SEQ ID NO: 38299 - DNA, 20 bp, synthetic construct
  misc_feature 1..20: note = chemically synthesized
  source 1..20: mol_type = other DNA
aattcgctactttgggactc

SEQ ID NO: 38300 - DNA, 20 bp, synthetic construct
  misc_feature 1..20: note = chemically synthesized
  source 1..20: mol_type = other DNA
ctactttgggactcaagtct

SEQ ID NO: 38301 - DNA, 20 bp, synthetic construct
  misc_feature 1..20: note = chemically synthesized
  source 1..20: mol_type = other DNA
tactttgggactcaagtcta

SEQ ID NO: 38302 - DNA, 20 bp, synthetic construct
  misc_feature 1..20: note = chemically synthesized
  source 1..20: mol_type = other DNA
actttgggactcaagtctaa

SEQ ID NO: 38303 - DNA, 20 bp, synthetic construct
  misc_feature 1..20: note = chemically synthesized
  source 1..20: mol_type = other DNA
ggactcaagtctaagggact

SEQ ID NO: 38304 - DNA, 20 bp, synthetic construct
  misc_feature 1..20: note = chemically synthesized
  source 1..20: mol_type = other DNA
aagtctaagggactgagact

SEQ ID NO: 38305 - DNA, 20 bp, synthetic construct
  misc_feature 1..20: note = chemically synthesized
  source 1..20: mol_type = other DNA
ctaagggactgagactgaga

SEQ ID NO: 38306 - DNA, 20 bp, synthetic construct
  misc_feature 1..20: note = chemically synthesized
  source 1..20: mol_type = other DNA
taagggactgagactgagac

SEQ ID NO: 38307 - DNA, 20 bp, synthetic construct
  misc_feature 1..20: note = chemically synthesized
  source 1..20: mol_type = other DNA
agggactgagactgagacag

SEQ ID NO: 38308 - DNA, 20 bp, synthetic construct
  misc_feature 1..20: note = chemically synthesized
  source 1..20: mol_type = other DNA
ggactgagactgagacagga

SEQ ID NO: 38309 - DNA, 20 bp, synthetic construct
  misc_feature 1..20: note = chemically synthesized
  source 1..20: mol_type = other DNA
agactgagacaggagagcac

SEQ ID NO: 38310 - DNA, 20 bp, synthetic construct
  misc_feature 1..20: note = chemically synthesized
  source 1..20: mol_type = other DNA
ggagagcacaagactaactt

SEQ ID NO: 38311 - DNA, 20 bp, synthetic construct
  misc_feature 1..20: note = chemically synthesized
  source 1..20: mol_type = other DNA
cttgcaactgtcaatgcctc

SEQ ID NO: 38312 - DNA, 20 bp, synthetic construct
  misc_feature 1..20: note = chemically synthesized
  source 1..20: mol_type = other DNA
aatgcctccagccaaatgcc

SEQ ID NO: 38313 - DNA, 20 bp, synthetic construct
  misc_feature 1..20: note = chemically synthesized
  source 1..20: mol_type = other DNA
ctccagccaaatgcccagca

SEQ ID NO: 38314 - DNA, 20 bp, synthetic construct
  misc_feature 1..20: note = chemically synthesized
  source 1..20: mol_type = other DNA
ccagccaaatgcccagcaca

SEQ ID NO: 38315 - DNA, 20 bp, synthetic construct
  misc_feature 1..20: note = chemically synthesized
  source 1..20: mol_type = other DNA
caaatgcccagcacagagct

SEQ ID NO: 38316 - DNA, 20 bp, synthetic construct
  misc_feature 1..20: note = chemically synthesized
  source 1..20: mol_type = other DNA
atgcccagcacagagctcag

SEQ ID NO: 38317 - DNA, 20 bp, synthetic construct
  misc_feature 1..20: note = chemically synthesized
  source 1..20: mol_type = other DNA
gtggatttgactcttccatt

SEQ ID NO: 38318 - DNA, 20 bp, synthetic construct
  misc_feature 1..20: note = chemically synthesized
  source 1..20: mol_type = other DNA
ctcttccattcagaaactca

SEQ ID NO: 38319 - DNA, 20 bp, synthetic construct
  misc_feature 1..20: note = chemically synthesized
  source 1..20: mol_type = other DNA
gcacacttcattctcaatca

SEQ ID NO: 38320 - DNA, 20 bp, synthetic construct
  misc_feature 1..20: note = chemically synthesized
  source 1..20: mol_type = other DNA
cacacttcattctcaatcac

SEQ ID NO: 38321 - DNA, 20 bp, synthetic construct
  misc_feature 1..20: note = chemically synthesized
  source 1..20: mol_type = other DNA
acacttcattctcaatcaca

SEQ ID NO: 38322 - DNA, 20 bp, synthetic construct
  misc_feature 1..20: note = chemically synthesized
  source 1..20: mol_type = other DNA
acttcattctcaatcacagg

SEQ ID NO: 38323 - DNA, 20 bp, synthetic construct
  misc_feature 1..20: note = chemically synthesized
  source 1..20: mol_type = other DNA
cattctcaatcacagggagc

SEQ ID NO: 38324 - DNA, 20 bp, synthetic construct
  misc_feature 1..20: note = chemically synthesized
  source 1..20: mol_type = other DNA
attctcaatcacagggagct

SEQ ID NO: 38325 - DNA, 20 bp, synthetic construct
  misc_feature 1..20: note = chemically synthesized
  source 1..20: mol_type = other DNA
acagggagctgggcttcctt

SEQ ID NO: 38326 - DNA, 20 bp, synthetic construct
  misc_feature 1..20: note = chemically synthesized
  source 1..20: mol_type = other DNA
ggagctgggcttccttgaga

SEQ ID NO: 38327 - DNA, 20 bp, synthetic construct
  misc_feature 1..20: note = chemically synthesized
  source 1..20: mol_type = other DNA
ctgggcttccttgagaaagc

SEQ ID NO: 38328 - DNA, 20 bp, synthetic construct
  misc_feature 1..20: note = chemically synthesized
  source 1..20: mol_type = other DNA
ccttgagaaagccagcccca

SEQ ID NO: 38329 - DNA, 20 bp, synthetic construct
  misc_feature 1..20: note = chemically synthesized
  source 1..20: mol_type = other DNA
cttgagaaagccagccccaa

SEQ ID NO: 38330 - DNA, 20 bp, synthetic construct
  misc_feature 1..20: note = chemically synthesized
  source 1..20: mol_type = other DNA
caaaggtacctgtgtttaaa

SEQ ID NO: 38331 - DNA, 20 bp, synthetic construct
  misc_feature 1..20: note = chemically synthesized
  source 1..20: mol_type = other DNA
acctgtgtttaaaaagatga

SEQ ID NO: 38332 - DNA, 20 bp, synthetic construct
  misc_feature 1..20: note = chemically synthesized
  source 1..20: mol_type = other DNA
gtttaaaaagatgaaagaaa

SEQ ID NO: 38333 - DNA, 20 bp, synthetic construct
  misc_feature 1..20: note = chemically synthesized
  source 1..20: mol_type = other DNA
tacgtccacaacatgttcac

SEQ ID NO: 38334 - DNA, 20 bp, synthetic construct
  misc_feature 1..20: note = chemically synthesized
  source 1..20: mol_type = other DNA
acgtccacaacatgttcaca

SEQ ID NO: 38335 - DNA, 20 bp, synthetic construct
  misc_feature 1..20: note = chemically synthesized
  source 1..20: mol_type = other DNA
acatgttcacaaggaaactc

SEQ ID NO: 38336 - DNA, 20 bp, synthetic construct
  misc_feature 1..20: note = chemically synthesized
  source 1..20: mol_type = other DNA
tgttcacaaggaaactccag

SEQ ID NO: 38337 - DNA, 20 bp, synthetic construct
  misc_feature 1..20: note = chemically synthesized
  source 1..20: mol_type = other DNA
acaaggaaactccagaagaa

SEQ ID NO: 38338 - DNA, 20 bp, synthetic construct
  misc_feature 1..20: note = chemically synthesized
  source 1..20: mol_type = other DNA
aaggaaactccagaagaaca

SEQ ID NO: 38339 - DNA, 20 bp, synthetic construct
  misc_feature 1..20: note = chemically synthesized
  source 1..20: mol_type = other DNA
gaaactccagaagaacagag

SEQ ID NO: 38340 - DNA, 20 bp, synthetic construct
  misc_feature 1..20: note = chemically synthesized
  source 1..20: mol_type = other DNA
actccagaagaacagagcag

SEQ ID NO: 38341 - DNA, 20 bp, synthetic construct
  misc_feature 1..20: note = chemically synthesized
  source 1..20: mol_type = other DNA
gaagaacagagcagtggtga

SEQ ID NO: 38342 - DNA, 20 bp, synthetic construct
  misc_feature 1..20: note = chemically synthesized
  source 1..20: mol_type = other DNA
tggacctcctgtctgtccgt

SEQ ID NO: 38343 - DNA, 20 bp, synthetic construct
  misc_feature 1..20: note = chemically synthesized
  source 1..20: mol_type = other DNA
ggacctcctgtctgtccgtg

SEQ ID NO: 38344 - DNA, 20 bp, synthetic construct
  misc_feature 1..20: note = chemically synthesized
  source 1..20: mol_type = other DNA
cctgtctgtccgtgaggctg

SEQ ID NO: 38345 - DNA, 20 bp, synthetic construct
  misc_feature 1..20: note = chemically synthesized
  source 1..20: mol_type = other DNA
tccgtgaggctgtagaacac

SEQ ID NO: 38346 - DNA, 20 bp, synthetic construct
  misc_feature 1..20: note = chemically synthesized
  source 1..20: mol_type = other DNA
ccgtgaggctgtagaacaca

SEQ ID NO: 38347 - DNA, 20 bp, synthetic construct
  misc_feature 1..20: note = chemically synthesized
  source 1..20: mol_type = other DNA
tgaggctgtagaacacaagg

SEQ ID NO: 38348 - DNA, 20 bp, synthetic construct
  misc_feature 1..20: note = chemically synthesized
  source 1..20: mol_type = other DNA
aaggcagctcccaatgctgc

SEQ ID NO: 38349 - DNA, 20 bp, synthetic construct
  misc_feature 1..20: note = chemically synthesized
  source 1..20: mol_type = other DNA
ctgccagactctctgaaccc

SEQ ID NO: 38350 - DNA, 20 bp, synthetic construct
  misc_feature 1..20: note = chemically synthesized
  source 1..20: mol_type = other DNA
gccagactctctgaaccctg

SEQ ID NO: 38351 - DNA, 20 bp, synthetic construct
  misc_feature 1..20: note = chemically synthesized
  source 1..20: mol_type = other DNA
cagactctctgaaccctgga

SEQ ID NO: 38352 - DNA, 20 bp, synthetic construct
  misc_feature 1..20: note = chemically synthesized
  source 1..20: mol_type = other DNA
ggagagtgtaaacgtcatat

SEQ ID NO: 38353 - DNA, 20 bp, synthetic construct
  misc_feature 1..20: note = chemically synthesized
  source 1..20: mol_type = other DNA
agagtgtaaacgtcatataa

SEQ ID NO: 38354 - DNA, 20 bp, synthetic construct
  misc_feature 1..20: note = chemically synthesized
  source 1..20: mol_type = other DNA
gagtctatgttccaaaaacc

SEQ ID NO: 38355 - DNA, 20 bp, synthetic construct
  misc_feature 1..20: note = chemically synthesized
  source 1..20: mol_type = other DNA
aaacctggatttaacaatct

SEQ ID NO: 38356 - DNA, 20 bp, synthetic construct
  misc_feature 1..20: note = chemically synthesized
  source 1..20: mol_type = other DNA
taacaatctgagctttgtca

SEQ ID NO: 38357 - DNA, 20 bp, synthetic construct
  misc_feature 1..20: note = chemically synthesized
  source 1..20: mol_type = other DNA
agctttgtcatggtgctttg

SEQ ID NO: 38358 - DNA, 20 bp, synthetic construct
  misc_feature 1..20: note = chemically synthesized
  source 1..20: mol_type = other DNA
ttgtcatggtgctttgcggt

SEQ ID NO: 38359 - DNA, 20 bp, synthetic construct
  misc_feature 1..20: note = chemically synthesized
  source 1..20: mol_type = other DNA
tctttgcttttaaaaccata

SEQ ID NO: 38360 - DNA, 20 bp, synthetic construct
  misc_feature 1..20: note = chemically synthesized
  source 1..20: mol_type = other DNA
taaagaataatgtttaaatg

SEQ ID NO: 38361 - DNA, 20 bp, synthetic construct
  misc_feature 1..20: note = chemically synthesized
  source 1..20: mol_type = other DNA
aagaataatgtttaaatgta

SEQ ID NO: 38362 - DNA, 20 bp, synthetic construct
  misc_feature 1..20: note = chemically synthesized
  source 1..20: mol_type = other DNA
aatgtttaaatgtagagtct

SEQ ID NO: 38363 - DNA, 20 bp, synthetic construct
  misc_feature 1..20: note = chemically synthesized
  source 1..20: mol_type = other DNA
tgctattgtttttatatttt

SEQ ID NO: 38364 - DNA, 20 bp, synthetic construct
  misc_feature 1..20: note = chemically synthesized
  source 1..20: mol_type = other DNA
ttcactcaacattacataat

SEQ ID NO: 38365 - DNA, 20 bp, synthetic construct
  misc_feature 1..20: note = chemically synthesized
  source 1..20: mol_type = other DNA
attacataatgagttttgta

SEQ ID NO: 38366 - DNA, 20 bp, synthetic construct
  misc_feature 1..20: note = chemically synthesized
  source 1..20: mol_type = other DNA
tcttcataactaatatttta

SEQ ID NO: 38367 - DNA, 20 bp, synthetic construct
  misc_feature 1..20: note = chemically synthesized
  source 1..20: mol_type = other DNA
cttcataactaatattttaa

SEQ ID NO: 38368 - DNA, 20 bp, synthetic construct
  misc_feature 1..20: note = chemically synthesized
  source 1..20: mol_type = other DNA
tcataactaatattttaaag

SEQ ID NO: 38369 - DNA, 20 bp, synthetic construct
  misc_feature 1..20: note = chemically synthesized
  source 1..20: mol_type = other DNA
ataactaatattttaaagga

SEQ ID NO: 38370 - DNA, 20 bp, synthetic construct
  misc_feature 1..20: note = chemically synthesized
  source 1..20: mol_type = other DNA
aaggagagctactgattaat

SEQ ID NO: 38371 - DNA, 20 bp, synthetic construct
  misc_feature 1..20: note = chemically synthesized
  source 1..20: mol_type = other DNA
agctactgattaatgagcat

SEQ ID NO: 38372 - DNA, 20 bp, synthetic construct
  misc_feature 1..20: note = chemically synthesized
  source 1..20: mol_type = other DNA
gctactgattaatgagcatg

SEQ ID NO: 38373 - DNA, 20 bp, synthetic construct
  misc_feature 1..20: note = chemically synthesized
  source 1..20: mol_type = other DNA
aatgagcatgaggtttcctt

SEQ ID NO: 38374 - DNA, 20 bp, synthetic construct
  misc_feature 1..20: note = chemically synthesized
  source 1..20: mol_type = other DNA
atgagcatgaggtttccttt

SEQ ID NO: 38375 - DNA, 20 bp, synthetic construct
  misc_feature 1..20: note = chemically synthesized
  source 1..20: mol_type = other DNA
tgagcatgaggtttcctttg

SEQ ID NO: 38376 - DNA, 20 bp, synthetic construct
  misc_feature 1..20: note = chemically synthesized
  source 1..20: mol_type = other DNA
atgaggtttcctttggggat

SEQ ID NO: 38377 - DNA, 20 bp, synthetic construct
  misc_feature 1..20: note = chemically synthesized
  source 1..20: mol_type = other DNA
tgaggtttcctttggggatg

SEQ ID NO: 38378 - DNA, 20 bp, synthetic construct
  misc_feature 1..20: note = chemically synthesized
  source 1..20: mol_type = other DNA
tggggatgaggaaaatattc

SEQ ID NO: 38379 - DNA, 20 bp, synthetic construct
  misc_feature 1..20: note = chemically synthesized
  source 1..20: mol_type = other DNA
atattctggaaatatgatga

SEQ ID NO: 38380 - DNA, 20 bp, synthetic construct
  misc_feature 1..20: note = chemically synthesized
  source 1..20: mol_type = other DNA
tgaatgtactaaatgccact

SEQ ID NO: 38381 - DNA, 20 bp, synthetic construct
  misc_feature 1..20: note = chemically synthesized
  source 1..20: mol_type = other DNA
atgtactaaatgccacttgg

SEQ ID NO: 38382 - DNA, 20 bp, synthetic construct
  misc_feature 1..20: note = chemically synthesized
  source 1..20: mol_type = other DNA
ttggtggtaccctgcaaaaa

SEQ ID NO: 38383 - DNA, 20 bp, synthetic construct
  misc_feature 1..20: note = chemically synthesized
  source 1..20: mol_type = other DNA
ccctgcaaaaatggttaaaa

SEQ ID NO: 38384 - DNA, 20 bp, synthetic construct
  misc_feature 1..20: note = chemically synthesized
  source 1..20: mol_type = other DNA
tacattttattgcaataaaa

SEQ ID NO: 38385 - DNA, 20 bp, synthetic construct
  misc_feature 1..20: note = chemically synthesized
  source 1..20: mol_type = other DNA
tttattgcaataaaaaagaa

SEQ ID NO: 38386 - DNA, 20 bp, synthetic construct
  misc_feature 1..20: note = chemically synthesized
  source 1..20: mol_type = other DNA
aagaatagtcatcatttact

SEQ ID NO: 38387 - DNA, 20 bp, synthetic construct
  misc_feature 1..20: note = chemically synthesized
  source 1..20: mol_type = other DNA
ttactaagcattatcctttc

SEQ ID NO: 38388 - DNA, 20 bp, synthetic construct
  misc_feature 1..20: note = chemically synthesized
  source 1..20: mol_type = other DNA
tactaagcattatcctttcc

SEQ ID NO: 38389 - DNA, 20 bp, synthetic construct
  misc_feature 1..20: note = chemically synthesized
  source 1..20: mol_type = other DNA
gcattatcctttccaggcac

SEQ ID NO: 38390 - DNA, 20 bp, synthetic construct
  misc_feature 1..20: note = chemically synthesized
  source 1..20: mol_type = other DNA
ccaggcacaagcttataatg

SEQ ID NO: 38391 - DNA, 20 bp, synthetic construct
  misc_feature 1..20: note = chemically synthesized
  source 1..20: mol_type = other DNA
atctcacttcatcctcacaa

SEQ ID NO: 38392 - DNA, 20 bp, synthetic construct
  misc_feature 1..20: note = chemically synthesized
  source 1..20: mol_type = other DNA
ctcacaacagtcctatgaaa

SEQ ID NO: 38393 - DNA, 20 bp, synthetic construct
  misc_feature 1..20: note = chemically synthesized
  source 1..20: mol_type = other DNA
tcacaacagtcctatgaaac

SEQ ID NO: 38394 - DNA, 20 bp, synthetic construct
  misc_feature 1..20: note = chemically synthesized
  source 1..20: mol_type = other DNA
caacagtcctatgaaacagg

SEQ ID NO: 38395 - DNA, 20 bp, synthetic construct
  misc_feature 1..20: note = chemically synthesized
  source 1..20: mol_type = other DNA
gttccatcactcctgctcta

SEQ ID NO: 38396 - DNA, 20 bp, synthetic construct
  misc_feature 1..20: note = chemically synthesized
  source 1..20: mol_type = other DNA
atcactcctgctctacagtt

SEQ ID NO: 38397 - DNA, 20 bp, synthetic construct
  misc_feature 1..20: note = chemically synthesized
  source 1..20: mol_type = other DNA
tcactcctgctctacagtta

SEQ ID NO: 38398 - DNA, 20 bp, synthetic construct
  misc_feature 1..20: note = chemically synthesized
  source 1..20: mol_type = other DNA
gctctacagttaaggaaact

SEQ ID NO: 38399 - DNA, 20 bp, synthetic construct
  misc_feature 1..20: note = chemically synthesized
  source 1..20: mol_type = other DNA
ctctacagttaaggaaactg

SEQ ID NO: 38400 - DNA, 20 bp, synthetic construct
  misc_feature 1..20: note = chemically synthesized
  source 1..20: mol_type = other DNA
agttaaggaaactgaggtgt

SEQ ID NO: 38401 - DNA, 20 bp, synthetic construct
  misc_feature 1..20: note = chemically synthesized
  source 1..20: mol_type = other DNA
gttaaggaaactgaggtgta

SEQ ID NO: 38402 - DNA, 20 bp, synthetic construct
  misc_feature 1..20: note = chemically synthesized
  source 1..20: mol_type = other DNA
taaggaaactgaggtgtaag

SEQ ID NO: 38403 - DNA, 20 bp, synthetic construct
  misc_feature 1..20: note = chemically synthesized
  source 1..20: mol_type = other DNA
aaggaaactgaggtgtaagg

SEQ ID NO: 38404 - DNA, 20 bp, synthetic construct
  misc_feature 1..20: note = chemically synthesized
  source 1..20: mol_type = other DNA
tgaggtgtaaggaggttgtc

SEQ ID NO: 38405 - DNA, 20 bp, synthetic construct
  misc_feature 1..20: note = chemically synthesized
  source 1..20: mol_type = other DNA
gaggttgtctagttcaacct

SEQ ID NO: 38406 - DNA, 20 bp, synthetic construct
  misc_feature 1..20: note = chemically synthesized
  source 1..20: mol_type = other DNA
tgtctagttcaacctgagcc

SEQ ID NO: 38407 - DNA, 20 bp, synthetic construct
  misc_feature 1..20: note = chemically synthesized
  source 1..20: mol_type = other DNA
gtctagttcaacctgagcct

SEQ ID NO: 38408 - DNA, 20 bp, synthetic construct
  misc_feature 1..20: note = chemically synthesized
  source 1..20: mol_type = other DNA
tcaacctgagcctgggtctg

SEQ ID NO: 38409 - DNA, 20 bp, synthetic construct
  misc_feature 1..20: note = chemically synthesized
  source 1..20: mol_type = other DNA
aacctgagcctgggtctgcg

SEQ ID NO: 38410 - DNA, 20 bp, synthetic construct
  misc_feature 1..20: note = chemically synthesized
  source 1..20: mol_type = other DNA
tgcttcctccccgtgcgcgt

SEQ ID NO: 38411 - DNA, 20 bp, synthetic construct
  misc_feature 1..20: note = chemically synthesized
  source 1..20: mol_type = other DNA
cctccacatctttgttcata

SEQ ID NO: 38412 - DNA, 20 bp, synthetic construct
  misc_feature 1..20: note = chemically synthesized
  source 1..20: mol_type = other DNA
cttattccttaatattttct

SEQ ID NO: 38413 - DNA, 20 bp, synthetic construct
  misc_feature 1..20: note = chemically synthesized
  source 1..20: mol_type = other DNA
ccttaatattttctgagcct

SEQ ID NO: 38414 - DNA, 20 bp, synthetic construct
  misc_feature 1..20: note = chemically synthesized
  source 1..20: mol_type = other DNA
ctaagttcccataaattata

SEQ ID NO: 38415 - DNA, 20 bp, synthetic construct
  misc_feature 1..20: note = chemically synthesized
  source 1..20: mol_type = other DNA
aacactgccaatttattttc

SEQ ID NO: 38416 - DNA, 20 bp, synthetic construct
  misc_feature 1..20: note = chemically synthesized
  source 1..20: mol_type = other DNA
actgccaatttattttctag

SEQ ID NO: 38417 - DNA, 20 bp, synthetic construct
  misc_feature 1..20: note = chemically synthesized
  source 1..20: mol_type = other DNA
ctgccaatttattttctaga

SEQ ID NO: 38418 - DNA, 20 bp, synthetic construct
  misc_feature 1..20: note = chemically synthesized
  source 1..20: mol_type = other DNA
tattttctagaaggttatga

SEQ ID NO: 38419 - DNA, 20 bp, synthetic construct
  misc_feature 1..20: note = chemically synthesized
  source 1..20: mol_type = other DNA
atgacagtgtaaaatgtcac

SEQ ID NO: 38420 - DNA, 20 bp, synthetic construct
  misc_feature 1..20: note = chemically synthesized
  source 1..20: mol_type = other DNA
tcacttcaccacacttgtat

SEQ ID NO: 38421 - DNA, 20 bp, synthetic construct
  misc_feature 1..20: note = chemically synthesized
  source 1..20: mol_type = other DNA
agtgttcaatttttaaatat

SEQ ID NO: 38422 - DNA, 20 bp, synthetic construct
  misc_feature 1..20: note = chemically synthesized
  source 1..20: mol_type = other DNA
ttaaatattagctaatctaa

SEQ ID NO: 38423 - DNA, 20 bp, synthetic construct
  misc_feature 1..20: note = chemically synthesized
  source 1..20: mol_type = other DNA
taaatattagctaatctaac

SEQ ID NO: 38424 - DNA, 20 bp, synthetic construct
  misc_feature 1..20: note = chemically synthesized
  source 1..20: mol_type = other DNA
tttatacttctttgacaatt

SEQ ID NO: 38425 - DNA, 20 bp, synthetic construct
  misc_feature 1..20: note = chemically synthesized
  source 1..20: mol_type = other DNA
ttatacttctttgacaattt

SEQ ID NO: 38426 - DNA, 20 bp, synthetic construct
  misc_feature 1..20: note = chemically synthesized
  source 1..20: mol_type = other DNA
atacttctttgacaatttgg

SEQ ID NO: 38427 - DNA, 20 bp, synthetic construct
  misc_feature 1..20: note = chemically synthesized
  source 1..20: mol_type = other DNA
acttctttgacaatttggga

SEQ ID NO: 38428 - DNA, 20 bp, synthetic construct
  misc_feature 1..20: note = chemically synthesized
  source 1..20: mol_type = other DNA
tttgacaatttgggagagtg

SEQ ID NO: 38429 - DNA, 20 bp, synthetic construct
  misc_feature 1..20: note = chemically synthesized
  source 1..20: mol_type = other DNA
tgggagagtgaagattctcc

SEQ ID NO: 38430 - DNA, 20 bp, synthetic construct
  misc_feature 1..20: note = chemically synthesized
  source 1..20: mol_type = other DNA
ttttctttgccaaattcaaa

SEQ ID NO: 38431 - DNA, 20 bp, synthetic construct
  misc_feature 1..20: note = chemically synthesized
  source 1..20: mol_type = other DNA
tttgccaaattcaaatagaa

SEQ ID NO: 38432 - DNA, 20 bp, synthetic construct
  misc_feature 1..20: note = chemically synthesized
  source 1..20: mol_type = other DNA
tagaacggttgcaaaattgc

SEQ ID NO: 38433 - DNA, 20 bp, synthetic construct
  misc_feature 1..20: note = chemically synthesized
  source 1..20: mol_type = other DNA
gaacggttgcaaaattgcca

SEQ ID NO: 38434 - DNA, 20 bp, synthetic construct
  misc_feature 1..20: note = chemically synthesized
  source 1..20: mol_type = other DNA
aacggttgcaaaattgccag

SEQ ID NO: 38435 - DNA, 20 bp, synthetic construct
  misc_feature 1..20: note = chemically synthesized
  source 1..20: mol_type = other DNA
cagaggaaatgctgtttttc

SEQ ID NO: 38436 - DNA, 20 bp, synthetic construct
  misc_feature 1..20: note = chemically synthesized
  source 1..20: mol_type = other DNA
ggaaatgctgtttttccaga

SEQ ID NO: 38437 - DNA, 20 bp, synthetic construct
  misc_feature 1..20: note = chemically synthesized
  source 1..20: mol_type = other DNA
tttttccagatggacacacc

SEQ ID NO: 38438 - DNA, 20 bp, synthetic construct
  misc_feature 1..20: note = chemically synthesized
  source 1..20: mol_type = other DNA
ttttccagatggacacaccc

SEQ ID NO: 38439 - DNA, 20 bp, synthetic construct
  misc_feature 1..20: note = chemically synthesized
  source 1..20: mol_type = other DNA
tttccagatggacacaccca

SEQ ID NO: 38440 - DNA, 20 bp, synthetic construct
  misc_feature 1..20: note = chemically synthesized
  source 1..20: mol_type = other DNA
ggacacacccagggatgttt

SEQ ID NO: 38441 - DNA, 20 bp, synthetic construct
  misc_feature 1..20: note = chemically synthesized
  source 1..20: mol_type = other DNA
cagtgttctcacaaataatc

SEQ ID NO: 38442 - DNA, 20 bp, synthetic construct
  misc_feature 1..20: note = chemically synthesized
  source 1..20: mol_type = other DNA
atccagttttctaattttgc

SEQ ID NO: 38443 - DNA, 20 bp, synthetic construct
  misc_feature 1..20: note = chemically synthesized
  source 1..20: mol_type = other DNA
gttttctaattttgcaagcc

SEQ ID NO: 38444 - DNA, 20 bp, synthetic construct
  misc_feature 1..20: note = chemically synthesized
  source 1..20: mol_type = other DNA
tttgcaagcccagctttcat

SEQ ID NO: 38445 - DNA, 20 bp, synthetic construct
  misc_feature 1..20: note = chemically synthesized
  source 1..20: mol_type = other DNA
tgcaaaaatccttgctttgc

SEQ ID NO: 38446 - DNA, 20 bp, synthetic construct
  misc_feature 1..20: note = chemically synthesized
  source 1..20: mol_type = other DNA
aaatccttgctttgcgagca

SEQ ID NO: 38447 - DNA, 20 bp, synthetic construct
  misc_feature 1..20: note = chemically synthesized
  source 1..20: mol_type = other DNA
cttgctttgcgagcatggca

SEQ ID NO: 38448 - DNA, 20 bp, synthetic construct
  misc_feature 1..20: note = chemically synthesized
  source 1..20: mol_type = other DNA
ttgctttgcgagcatggcac

SEQ ID NO: 38449 - DNA, 20 bp, synthetic construct
  misc_feature 1..20: note = chemically synthesized
  source 1..20: mol_type = other DNA
tttgcgagcatggcacaggc

SEQ ID NO: 38450 - DNA, 20 bp, synthetic construct
  misc_feature 1..20: note = chemically synthesized
  source 1..20: mol_type = other DNA
tgcgagcatggcacaggcaa

SEQ ID NO: 38451 - DNA, 20 bp, synthetic construct
  misc_feature 1..20: note = chemically synthesized
  source 1..20: mol_type = other DNA
gcatggcacaggcaagagat

SEQ ID NO: 38452 - DNA, 20 bp, synthetic construct
  misc_feature 1..20: note = chemically synthesized
  source 1..20: mol_type = other DNA
catggcacaggcaagagatg

SEQ ID NO: 38453 - DNA, 20 bp, synthetic construct
  misc_feature 1..20: note = chemically synthesized
  source 1..20: mol_type = other DNA
gcactctctctttcttcccc

SEQ ID NO: 38454 - DNA, 20 bp, synthetic construct
  misc_feature 1..20: note = chemically synthesized
  source 1..20: mol_type = other DNA
actctctctttcttccccca

SEQ ID NO: 38455 - DNA, 20 bp, synthetic construct
  misc_feature 1..20: note = chemically synthesized
  source 1..20: mol_type = other DNA
ccagagcctttgactgcact

SEQ ID NO: 38456 - DNA, 20 bp, synthetic construct
  misc_feature 1..20: note = chemically synthesized
  source 1..20: mol_type = other DNA
tgcacttagatcattgactt

SEQ ID NO: 38457 - DNA, 20 bp, synthetic construct
  misc_feature 1..20: note = chemically synthesized
  source 1..20: mol_type = other DNA
ttagatcattgactttggtt

SEQ ID NO: 38458 - DNA, 20 bp, synthetic construct
  misc_feature 1..20: note = chemically synthesized
  source 1..20: mol_type = other DNA
ttcagaaacctgactgcatc

SEQ ID NO: 38459 - DNA, 20 bp, synthetic construct
  misc_feature 1..20: note = chemically synthesized
  source 1..20: mol_type = other DNA
cagaaacctgactgcatctg

SEQ ID NO: 38460 - DNA, 20 bp, synthetic construct
  misc_feature 1..20: note = chemically synthesized
  source 1..20: mol_type = other DNA
actgcatctggagttgacat

SEQ ID NO: 38461 - DNA, 20 bp, synthetic construct
  misc_feature 1..20: note = chemically synthesized
  source 1..20: mol_type = other DNA
gcatctggagttgacatgag

SEQ ID NO: 38462 - DNA, 20 bp, synthetic construct
  misc_feature 1..20: note = chemically synthesized
  source 1..20: mol_type = other DNA
tggagttgacatgagcagca

SEQ ID NO: 38463 - DNA, 20 bp, synthetic construct
  misc_feature 1..20: note = chemically synthesized
  source 1..20: mol_type = other DNA
agttgacatgagcagcatgg

SEQ ID NO: 38464 - DNA, 20 bp, synthetic construct
  misc_feature 1..20: note = chemically synthesized
  source 1..20: mol_type = other DNA
agcatggaagatgtttgtcc

SEQ ID NO: 38465 - DNA, 20 bp, synthetic construct
  misc_feature 1..20: note = chemically synthesized
  source 1..20: mol_type = other DNA
tttgtcccagcacctcactc

SEQ ID NO: 38466 - DNA, 20 bp, synthetic construct
  misc_feature 1..20: note = chemically synthesized
  source 1..20: mol_type = other DNA
tgtcccagcacctcactcca

SEQ ID NO: 38467 - DNA, 20 bp, synthetic construct
  misc_feature 1..20: note = chemically synthesized
  source 1..20: mol_type = other DNA
gtcccagcacctcactccag

SEQ ID NO: 38468 - DNA, 20 bp, synthetic construct
  misc_feature 1..20: note = chemically synthesized
  source 1..20: mol_type = other DNA
cagcacctcactccagaggc

SEQ ID NO: 38469 - DNA, 20 bp, synthetic construct
  misc_feature 1..20: note = chemically synthesized
  source 1..20: mol_type = other DNA
cctcactccagaggccagct

SEQ ID NO: 38470 - DNA, 20 bp, synthetic construct
  misc_feature 1..20: note = chemically synthesized
  source 1..20: mol_type = other DNA
gaggccagctcagctcaatc

SEQ ID NO: 38471 - DNA, 20 bp, synthetic construct
  misc_feature 1..20: note = chemically synthesized
  source 1..20: mol_type = other DNA
aggccagctcagctcaatct

SEQ ID NO: 38472 - DNA, 20 bp, synthetic construct
  misc_feature 1..20: note = chemically synthesized
  source 1..20: mol_type = other DNA
ccagctcagctcaatctggg

SEQ ID NO: 38473 - DNA, 20 bp, synthetic construct
  misc_feature 1..20: note = chemically synthesized
  source 1..20: mol_type = other DNA
agctcagctcaatctgggca

SEQ ID NO: 38474 - DNA, 20 bp, synthetic construct
  misc_feature 1..20: note = chemically synthesized
  source 1..20: mol_type = other DNA
atctgggcagagctgcatga

SEQ ID NO: 38475 - DNA, 20 bp, synthetic construct
  misc_feature 1..20: note = chemically synthesized
  source 1..20: mol_type = other DNA
tgggcagagctgcatgatgg

SEQ ID NO: 38476 - DNA, 20 bp, synthetic construct
  misc_feature 1..20: note = chemically synthesized
  source 1..20: mol_type = other DNA
gatggaagtttctgactacc

SEQ ID NO: 38477 - DNA, 20 bp, synthetic construct
  misc_feature 1..20: note = chemically synthesized
  source 1..20: mol_type = other DNA
agtttctgactaccaagcat

SEQ ID NO: 38478 - DNA, 20 bp, synthetic construct
  misc_feature 1..20: note = chemically synthesized
  source 1..20: mol_type = other DNA
gtttctgactaccaagcatc

SEQ ID NO: 38479 - DNA, 20 bp, synthetic construct
  misc_feature 1..20: note = chemically synthesized
  source 1..20: mol_type = other DNA
tctgactaccaagcatcggg

SEQ ID NO: 38480 - DNA, 20 bp, synthetic construct
  misc_feature 1..20: note = chemically synthesized
  source 1..20: mol_type = other DNA
tgactaccaagcatcgggca

SEQ ID NO: 38481 - DNA, 20 bp, synthetic construct
  misc_feature 1..20: note = chemically synthesized
  source 1..20: mol_type = other DNA
gactaccaagcatcgggcag

SEQ ID NO: 38482 - DNA, 20 bp, synthetic construct
  misc_feature 1..20: note = chemically synthesized
  source 1..20: mol_type = other DNA
actaccaagcatcgggcaga

SEQ ID NO: 38483 - DNA, 20 bp, synthetic construct
  misc_feature 1..20: note = chemically synthesized
  source 1..20: mol_type = other DNA
cgggcagagggtgcatcacc

SEQ ID NO: 38484 - DNA, 20 bp, synthetic construct
  misc_feature 1..20: note = chemically synthesized
  source 1..20: mol_type = other DNA
ggtgcatcacctggactaca

SEQ ID NO: 38485 - DNA, 20 bp, synthetic construct
  misc_feature 1..20: note = chemically synthesized
  source 1..20: mol_type = other DNA
cctggactacatagttgtgt

SEQ ID NO: 38486 - DNA, 20 bp, synthetic construct
  misc_feature 1..20: note = chemically synthesized
  source 1..20: mol_type = other DNA
ctggactacatagttgtgtg

SEQ ID NO: 38487 - DNA, 20 bp, synthetic construct
  misc_feature 1..20: note = chemically synthesized
  source 1..20: mol_type = other DNA
tggactacatagttgtgtga

SEQ ID NO: 38488 - DNA, 20 bp, synthetic construct
  misc_feature 1..20: note = chemically synthesized
  source 1..20: mol_type = other DNA
gactacatagttgtgtgagg

SEQ ID NO: 38489 - DNA, 20 bp, synthetic construct
  misc_feature 1..20: note = chemically synthesized
  source 1..20: mol_type = other DNA
tgtgagggagcaccgttctc

SEQ ID NO: 38490 - DNA, 20 bp, synthetic construct
  misc_feature 1..20: note = chemically synthesized
  source 1..20: mol_type = other DNA
ttctctagaatctgctattt

SEQ ID NO: 38491 - DNA, 20 bp, synthetic construct
  misc_feature 1..20: note = chemically synthesized
  source 1..20: mol_type = other DNA
ctagaatctgctatttgagc

SEQ ID NO: 38492 - DNA, 20 bp, synthetic construct
  misc_feature 1..20: note = chemically synthesized
  source 1..20: mol_type = other DNA
tagaatctgctatttgagca

SEQ ID NO: 38493 - DNA, 20 bp, synthetic construct
  misc_feature 1..20: note = chemically synthesized
  source 1..20: mol_type = other DNA
caaggcaaacatcctgataa

SEQ ID NO: 38494 - DNA, 20 bp, synthetic construct
  misc_feature 1..20: note = chemically synthesized
  source 1..20: mol_type = other DNA
taatggtgaaaacctaccgc

SEQ ID NO: 38495 - DNA, 20 bp, synthetic construct
  misc_feature 1..20: note = chemically synthesized
  source 1..20: mol_type = other DNA
gaaaacctaccgcaagttgc

SEQ ID NO: 38496 - DNA, 20 bp, synthetic construct
  misc_feature 1..20: note = chemically synthesized
  source 1..20: mol_type = other DNA
aaaacctaccgcaagttgcc

SEQ ID NO: 38497 - DNA, 20 bp, synthetic construct
  misc_feature 1..20: note = chemically synthesized
  source 1..20: mol_type = other DNA
cctaccgcaagttgccagga

SEQ ID NO: 38498 - DNA, 20 bp, synthetic construct
  misc_feature 1..20: note = chemically synthesized
  source 1..20: mol_type = other DNA
agttgccaggaaagttgatg

SEQ ID NO: 38499 - DNA, 20 bp, synthetic construct
  misc_feature 1..20: note = chemically synthesized
  source 1..20: mol_type = other DNA
ggaaagttgatgtggtctgc

SEQ ID NO: 38500 - DNA, 20 bp, synthetic construct
  misc_feature 1..20: note = chemically synthesized
  source 1..20: mol_type = other DNA
aagttgatgtggtctgcgag

SEQ ID NO: 38501 - DNA, 20 bp, synthetic construct
  misc_feature 1..20: note = chemically synthesized
  source 1..20: mol_type = other DNA
agttgatgtggtctgcgagt

SEQ ID NO: 38502 - DNA, 20 bp, synthetic construct
  misc_feature 1..20: note = chemically synthesized
  source 1..20: mol_type = other DNA
tgcgagtaggtgctgccatc

SEQ ID NO: 38503 - DNA, 20 bp, synthetic construct
  misc_feature 1..20: note = chemically synthesized
  source 1..20: mol_type = other DNA
gagtaggtgctgccatccag

SEQ ID NO: 38504 - DNA, 20 bp, synthetic construct
  misc_feature 1..20: note = chemically synthesized
  source 1..20: mol_type = other DNA
ctgccatccagtggccgaca

SEQ ID NO: 38505 - DNA, 20 bp, synthetic construct
  misc_feature 1..20: note = chemically synthesized
  source 1..20: mol_type = other DNA
gccatccagtggccgacata

SEQ ID NO: 38506 - DNA, 20 bp, synthetic construct
  misc_feature 1..20: note = chemically synthesized
  source 1..20: mol_type = other DNA
gacatagagatgtcatctct

SEQ ID NO: 38507 - DNA, 20 bp, synthetic construct
  misc_feature 1..20: note = chemically synthesized
  source 1..20: mol_type = other DNA
acatagagatgtcatctctg

SEQ ID NO: 38508 - DNA, 20 bp, synthetic construct
  misc_feature 1..20: note = chemically synthesized
  source 1..20: mol_type = other DNA
catagagatgtcatctctga

SEQ ID NO: 38509 - DNA, 20 bp, synthetic construct
  misc_feature 1..20: note = chemically synthesized
  source 1..20: mol_type = other DNA
agagatgtcatctctgaggg

SEQ ID NO: 38510 - DNA, 20 bp, synthetic construct
  misc_feature 1..20: note = chemically synthesized
  source 1..20: mol_type = other DNA
gagatgtcatctctgagggc

SEQ ID NO: 38511 - DNA, 20 bp, synthetic construct
  misc_feature 1..20: note = chemically synthesized
  source 1..20: mol_type = other DNA
atgtcatctctgagggcagg

SEQ ID NO: 38512 - DNA, 20 bp, synthetic construct
  misc_feature 1..20: note = chemically synthesized
  source 1..20: mol_type = other DNA
tgtcatctctgagggcaggt

SEQ ID NO: 38513 - DNA, 20 bp, synthetic construct
  misc_feature 1..20: note = chemically synthesized
  source 1..20: mol_type = other DNA
ctctgagggcaggtaggcca

SEQ ID NO: 38514 - DNA, 20 bp, synthetic construct
  misc_feature 1..20: note = chemically synthesized
  source 1..20: mol_type = other DNA
tctgagggcaggtaggccac

SEQ ID NO: 38515 - DNA, 20 bp, synthetic construct
  misc_feature 1..20: note = chemically synthesized
  source 1..20: mol_type = other DNA
gcaggtaggccacaggtgac

SEQ ID NO: 38516 - DNA, 20 bp, synthetic construct
  misc_feature 1..20: note = chemically synthesized
  source 1..20: mol_type = other DNA
aggtaggccacaggtgacaa

SEQ ID NO: 38517 - DNA, 20 bp, synthetic construct
  misc_feature 1..20: note = chemically synthesized
  source 1..20: mol_type = other DNA
ggtaggccacaggtgacaag

SEQ ID NO: 38518 - DNA, 20 bp, synthetic construct
  misc_feature 1..20: note = chemically synthesized
  source 1..20: mol_type = other DNA
cacaggtgacaagaggattg

SEQ ID NO: 38519 - DNA, 20 bp, synthetic construct
  misc_feature 1..20: note = chemically synthesized
  source 1..20: mol_type = other DNA
aggattgaagccctccctga

SEQ ID NO: 38520 - DNA, 20 bp, synthetic construct
  misc_feature 1..20: note = chemically synthesized
  source 1..20: mol_type = other DNA
ggattgaagccctccctgat

SEQ ID NO: 38521 - DNA, 20 bp, synthetic construct
  misc_feature 1..20: note = chemically synthesized
  source 1..20: mol_type = other DNA
gattgaagccctccctgatg

SEQ ID NO: 38522 - DNA, 20 bp, synthetic construct
  misc_feature 1..20: note = chemically synthesized
  source 1..20: mol_type = other DNA
agccctccctgatggggcct

SEQ ID NO: 38523 - DNA, 20 bp, synthetic construct
  misc_feature 1..20: note = chemically synthesized
  source 1..20: mol_type = other DNA
gccctccctgatggggcctt

SEQ ID NO: 38524 - DNA, 20 bp, synthetic construct
  misc_feature 1..20: note = chemically synthesized
  source 1..20: mol_type = other DNA
ccctccctgatggggccttg

SEQ ID NO: 38525 - DNA, 20 bp, synthetic construct
  misc_feature 1..20: note = chemically synthesized
  source 1..20: mol_type = other DNA
ctccctgatggggccttggg

SEQ ID NO: 38526 - DNA, 20 bp, synthetic construct
  misc_feature 1..20: note = chemically synthesized
  source 1..20: mol_type = other DNA
ccctgatggggccttgggga

SEQ ID NO: 38527 - DNA, 20 bp, synthetic construct
  misc_feature 1..20: note = chemically synthesized
  source 1..20: mol_type = other DNA
cctgatggggccttggggag

SEQ ID NO: 38528 - DNA, 20 bp, synthetic construct
  misc_feature 1..20: note = chemically synthesized
  source 1..20: mol_type = other DNA
ctgatggggccttggggaga

SEQ ID NO: 38529 - DNA, 20 bp, synthetic construct
  misc_feature 1..20: note = chemically synthesized
  source 1..20: mol_type = other DNA
atggggccttggggagaggg

SEQ ID NO: 38530 - DNA, 20 bp, synthetic construct
  misc_feature 1..20: note = chemically synthesized
  source 1..20: mol_type = other DNA
gggccttggggagagggcag

SEQ ID NO: 38531 - DNA, 20 bp, synthetic construct
  misc_feature 1..20: note = chemically synthesized
  source 1..20: mol_type = other DNA
ggccttggggagagggcagc

SEQ ID NO: 38532 - DNA, 20 bp, synthetic construct
  misc_feature 1..20: note = chemically synthesized
  source 1..20: mol_type = other DNA
gccttggggagagggcagca

SEQ ID NO: 38533 - DNA, 20 bp, synthetic construct
  misc_feature 1..20: note = chemically synthesized
  source 1..20: mol_type = other DNA
tggggagagggcagcagggt

SEQ ID NO: 38534 - DNA, 20 bp, synthetic construct
  misc_feature 1..20: note = chemically synthesized
  source 1..20: mol_type = other DNA
agagggcagcagggtaagtc

SEQ ID NO: 38535 - DNA, 20 bp, synthetic construct
  misc_feature 1..20: note = chemically synthesized
  source 1..20: mol_type = other DNA
gggcagcagggtaagtccag

SEQ ID NO: 38536 - DNA, 20 bp, synthetic construct
  misc_feature 1..20: note = chemically synthesized
  source 1..20: mol_type = other DNA
cagcagggtaagtccagcgg

SEQ ID NO: 38537 - DNA, 20 bp, synthetic construct
  misc_feature 1..20: note = chemically synthesized
  source 1..20: mol_type = other DNA
agcagggtaagtccagcggc

SEQ ID NO: 38538 - DNA, 20 bp, synthetic construct
  misc_feature 1..20: note = chemically synthesized
  source 1..20: mol_type = other DNA
ggtaagtccagcggcaggat

SEQ ID NO: 38539 - DNA, 20 bp, synthetic construct
  misc_feature 1..20: note = chemically synthesized
  source 1..20: mol_type = other DNA
caggatcagtccattgattg

SEQ ID NO: 38540 - DNA, 20 bp, synthetic construct
  misc_feature 1..20: note = chemically synthesized
  source 1..20: mol_type = other DNA
attgtggatgacgactgacc

SEQ ID NO: 38541 - DNA, 20 bp, synthetic construct
  misc_feature 1..20: note = chemically synthesized
  source 1..20: mol_type = other DNA
actgacctggaaaatcccct

SEQ ID NO: 38542 - DNA, 20 bp, synthetic construct
  misc_feature 1..20: note = chemically synthesized
  source 1..20: mol_type = other DNA
ccaaactctgcatttgatcc

SEQ ID NO: 38543 - DNA, 20 bp, synthetic construct
  misc_feature 1..20: note = chemically synthesized
  source 1..20: mol_type = other DNA
actctgcatttgatccaagt

SEQ ID NO: 38544 - DNA, 20 bp, synthetic construct
  misc_feature 1..20: note = chemically synthesized
  source 1..20: mol_type = other DNA
ctctgcatttgatccaagtc

SEQ ID NO: 38545 - DNA, 20 bp, synthetic construct
  misc_feature 1..20: note = chemically synthesized
  source 1..20: mol_type = other DNA
tctgcatttgatccaagtca

SEQ ID NO: 38546 - DNA, 20 bp, synthetic construct
  misc_feature 1..20: note = chemically synthesized
  source 1..20: mol_type = other DNA
gatccaagtcagggaacacc

SEQ ID NO: 38547 - DNA, 20 bp, synthetic construct
  misc_feature 1..20: note = chemically synthesized
  source 1..20: mol_type = other DNA
agggaacacctggaaacatg

SEQ ID NO: 38548 - DNA, 20 bp, synthetic construct
  misc_feature 1..20: note = chemically synthesized
  source 1..20: mol_type = other DNA
gggaacacctggaaacatga

SEQ ID NO: 38549 - DNA, 20 bp, synthetic construct
  misc_feature 1..20: note = chemically synthesized
  source 1..20: mol_type = other DNA
ggaacacctggaaacatgaa

SEQ ID NO: 38550 - DNA, 20 bp, synthetic construct
  misc_feature 1..20: note = chemically synthesized
  source 1..20: mol_type = other DNA
gaacacctggaaacatgaag

SEQ ID NO: 38551 - DNA, 20 bp, synthetic construct
  misc_feature 1..20: note = chemically synthesized
  source 1..20: mol_type = other DNA
acacctggaaacatgaaggg

SEQ ID NO: 38552 - DNA, 20 bp, synthetic construct
  misc_feature 1..20: note = chemically synthesized
  source 1..20: mol_type = other DNA
acctggaaacatgaagggga

SEQ ID NO: 38553 - DNA, 20 bp, synthetic construct
  misc_feature 1..20: note = chemically synthesized
  source 1..20: mol_type = other DNA
tggaaacatgaaggggagag

SEQ ID NO: 38554 - DNA, 20 bp, synthetic construct
  misc_feature 1..20: note = chemically synthesized
  source 1..20: mol_type = other DNA
ggaaacatgaaggggagagc

SEQ ID NO: 38555 - DNA, 20 bp, synthetic construct
  misc_feature 1..20: note = chemically synthesized
  source 1..20: mol_type = other DNA
gaaaactttgacctccctct

SEQ ID NO: 38556 - DNA, 20 bp, synthetic construct
  misc_feature 1..20: note = chemically synthesized
  source 1..20: mol_type = other DNA
aaactttgacctccctctca

SEQ ID NO: 38557 - DNA, 20 bp, synthetic construct
  misc_feature 1..20: note = chemically synthesized
  source 1..20: mol_type = other DNA
aactttgacctccctctcag

SEQ ID NO: 38558 - DNA, 20 bp, synthetic construct
  misc_feature 1..20: note = chemically synthesized
  source 1..20: mol_type = other DNA
tgacctccctctcagaggct

SEQ ID NO: 38559 - DNA, 20 bp, synthetic construct
  misc_feature 1..20: note = chemically synthesized
  source 1..20: mol_type = other DNA
ctgatgtcattattgacatg

SEQ ID NO: 38560 - DNA, 20 bp, synthetic construct
  misc_feature 1..20: note = chemically synthesized
  source 1..20: mol_type = other DNA
acatgtagaaaattgatgaa

SEQ ID NO: 38561 - DNA, 20 bp, synthetic construct
  misc_feature 1..20: note = chemically synthesized
  source 1..20: mol_type = other DNA
catgtagaaaattgatgaac

SEQ ID NO: 38562 - DNA, 20 bp, synthetic construct
  misc_feature 1..20: note = chemically synthesized
  source 1..20: mol_type = other DNA
gaaaattgatgaacaggcct

SEQ ID NO: 38563 - DNA, 20 bp, synthetic construct
  misc_feature 1..20: note = chemically synthesized
  source 1..20: mol_type = other DNA
caggcctgagttatgttttg

SEQ ID NO: 38564 - DNA, 20 bp, synthetic construct
  misc_feature 1..20: note = chemically synthesized
  source 1..20: mol_type = other DNA
ttatgttttgtggcacctca

SEQ ID NO: 38565 - DNA, 20 bp, synthetic construct
  misc_feature 1..20: note = chemically synthesized
  source 1..20: mol_type = other DNA
ttttgtggcacctcatggtc

SEQ ID NO: 38566 - DNA, 20 bp, synthetic construct
  misc_feature 1..20: note = chemically synthesized
  source 1..20: mol_type = other DNA
gtggcacctcatggtctagt

SEQ ID NO: 38567 - DNA, 20 bp, synthetic construct
  misc_feature 1..20: note = chemically synthesized
  source 1..20: mol_type = other DNA
catggtctagttagtgttct

SEQ ID NO: 38568 - DNA, 20 bp, synthetic construct
  misc_feature 1..20: note = chemically synthesized
  source 1..20: mol_type = other DNA
tgttctgagaatcattttct

SEQ ID NO: 38569 - DNA, 20 bp, synthetic construct
  misc_feature 1..20: note = chemically synthesized
  source 1..20: mol_type = other DNA
tctgagaatcattttctcag

SEQ ID NO: 38570 - DNA, 20 bp, synthetic construct
  misc_feature 1..20: note = chemically synthesized
  source 1..20: mol_type = other DNA
tcattttctcagtggacctg

SEQ ID NO: 38571 - DNA, 20 bp, synthetic construct
  misc_feature 1..20: note = chemically synthesized
  source 1..20: mol_type = other DNA
cattttctcagtggacctgc

SEQ ID NO: 38572 - DNA, 20 bp, synthetic construct
  misc_feature 1..20: note = chemically synthesized
  source 1..20: mol_type = other DNA
ttctcagtggacctgcaggt

SEQ ID NO: 38573 - DNA, 20 bp, synthetic construct
  misc_feature 1..20: note = chemically synthesized
  source 1..20: mol_type = other DNA
agtggacctgcaggtgagac

SEQ ID NO: 38574 - DNA, 20 bp, synthetic construct
  misc_feature 1..20: note = chemically synthesized
  source 1..20: mol_type = other DNA
gtggacctgcaggtgagacc

SEQ ID NO: 38575 - DNA, 20 bp, synthetic construct
  misc_feature 1..20: note = chemically synthesized
  source 1..20: mol_type = other DNA
acctgcaggtgagaccaggc

SEQ ID NO: 38576 - DNA, 20 bp, synthetic construct
  misc_feature 1..20: note = chemically synthesized
  source 1..20: mol_type = other DNA
cctgcaggtgagaccaggcg

SEQ ID NO: 38577 - DNA, 20 bp, synthetic construct
  misc_feature 1..20: note = chemically synthesized
  source 1..20: mol_type = other DNA
gcaggtgagaccaggcgagg

SEQ ID NO: 38578 - DNA, 20 bp, synthetic construct
  misc_feature 1..20: note = chemically synthesized
  source 1..20: mol_type = other DNA
ggtgagaccaggcgaggcag

SEQ ID NO: 38579 - DNA, 20 bp, synthetic construct
  misc_feature 1..20: note = chemically synthesized
  source 1..20: mol_type = other DNA
gaccaggcgaggcagaagcc

SEQ ID NO: 38580 - DNA, 20 bp, synthetic construct
  misc_feature 1..20: note = chemically synthesized
  source 1..20: mol_type = other DNA
caggcgaggcagaagcctag

SEQ ID NO: 38581 - DNA, 20 bp, synthetic construct
  misc_feature 1..20: note = chemically synthesized
  source 1..20: mol_type = other DNA
aggcgaggcagaagcctagt

SEQ ID NO: 38582 - DNA, 20 bp, synthetic construct
  misc_feature 1..20: note = chemically synthesized
  source 1..20: mol_type = other DNA
ggcgaggcagaagcctagtg

SEQ ID NO: 38583 - DNA, 20 bp, synthetic construct
  misc_feature 1..20: note = chemically synthesized
  source 1..20: mol_type = other DNA
gcgaggcagaagcctagtgg

SEQ ID NO: 38584 - DNA, 20 bp, synthetic construct
  misc_feature 1..20: note = chemically synthesized
  source 1..20: mol_type = other DNA
ggcagaagcctagtggggga

SEQ ID NO: 38585 - DNA, 20 bp, synthetic construct
  misc_feature 1..20: note = chemically synthesized
  source 1..20: mol_type = other DNA
agaagcctagtgggggatgg

SEQ ID NO: 38586 - DNA, 20 bp, synthetic construct
  misc_feature 1..20: note = chemically synthesized
  source 1..20: mol_type = other DNA
gcctagtgggggatggtggt

SEQ ID NO: 38587 - DNA, 20 bp, synthetic construct
  misc_feature 1..20: note = chemically synthesized
  source 1..20: mol_type = other DNA
ggatggtggttagaaatgtg

SEQ ID NO: 38588 - DNA, 20 bp, synthetic construct
  misc_feature 1..20: note = chemically synthesized
  source 1..20: mol_type = other DNA
ggtggttagaaatgtgtgga

SEQ ID NO: 38589 - DNA, 20 bp, synthetic construct
  misc_feature 1..20: note = chemically synthesized
  source 1..20: mol_type = other DNA
tagaaatgtgtggatggttg

SEQ ID NO: 38590 - DNA, 20 bp, synthetic construct
  misc_feature 1..20: note = chemically synthesized
  source 1..20: mol_type = other DNA
agaaatgtgtggatggttgt

SEQ ID NO: 38591 - DNA, 20 bp, synthetic construct
  misc_feature 1..20: note = chemically synthesized
  source 1..20: mol_type = other DNA
gaaatgtgtggatggttgtg

SEQ ID NO: 38592 - DNA, 20 bp, synthetic construct
  misc_feature 1..20: note = chemically synthesized
  source 1..20: mol_type = other DNA
atgtgtggatggttgtgggg

SEQ ID NO: 38593 - DNA, 20 bp, synthetic construct
  misc_feature 1..20: note = chemically synthesized
  source 1..20: mol_type = other DNA
tgtggatggttgtggggcag

SEQ ID NO: 38594 - DNA, 20 bp, synthetic construct
  misc_feature 1..20: note = chemically synthesized
  source 1..20: mol_type = other DNA
tggttgtggggcagaagaaa

SEQ ID NO: 38595 - DNA, 20 bp, synthetic construct
  misc_feature 1..20: note = chemically synthesized
  source 1..20: mol_type = other DNA
tgtggggcagaagaaacagc

SEQ ID NO: 38596 - DNA, 20 bp, synthetic construct
  misc_feature 1..20: note = chemically synthesized
  source 1..20: mol_type = other DNA
ggggcagaagaaacagcaag

SEQ ID NO: 38597 - DNA, 20 bp, synthetic construct
  misc_feature 1..20: note = chemically synthesized
  source 1..20: mol_type = other DNA
gggcagaagaaacagcaagt

SEQ ID NO: 38598 - DNA, 20 bp, synthetic construct
  misc_feature 1..20: note = chemically synthesized
  source 1..20: mol_type = other DNA
aagaaacagcaagtaggctc

SEQ ID NO: 38599 - DNA, 20 bp, synthetic construct
  misc_feature 1..20: note = chemically synthesized
  source 1..20: mol_type = other DNA
agaaacagcaagtaggctct

SEQ ID NO: 38600 - DNA, 20 bp, synthetic construct
  misc_feature 1..20: note = chemically synthesized
  source 1..20: mol_type = other DNA
acagcaagtaggctctgggc

SEQ ID NO: 38601 - DNA, 20 bp, synthetic construct
  misc_feature 1..20: note = chemically synthesized
  source 1..20: mol_type = other DNA
gctctgggccagctacaaac

SEQ ID NO: 38602 - DNA, 20 bp, synthetic construct
  misc_feature 1..20: note = chemically synthesized
  source 1..20: mol_type = other DNA
atgatgtctactgatgatga

SEQ ID NO: 38603 - DNA, 20 bp, synthetic construct
  misc_feature 1..20: note = chemically synthesized
  source 1..20: mol_type = other DNA
tctactgatgatgatagtga

SEQ ID NO: 38604 - DNA, 20 bp, synthetic construct
  misc_feature 1..20: note = chemically synthesized
  source 1..20: mol_type = other DNA
actgatgatgatagtgatgg

SEQ ID NO: 38605 - DNA, 20 bp, synthetic construct
  misc_feature 1..20: note = chemically synthesized
  source 1..20: mol_type = other DNA
gatgatgatagtgatggtgg

SEQ ID NO: 38606 - DNA, 20 bp, synthetic construct
  misc_feature 1..20: note = chemically synthesized
  source 1..20: mol_type = other DNA
gatgatagtgatggtggtgg

SEQ ID NO: 38607 - DNA, 20 bp, synthetic construct
  misc_feature 1..20: note = chemically synthesized
  source 1..20: mol_type = other DNA
gatagtgatggtggtggtgg

SEQ ID NO: 38608 - DNA, 20 bp, synthetic construct
  misc_feature 1..20: note = chemically synthesized
  source 1..20: mol_type = other DNA
gatggtggtggtggtggtga

SEQ ID NO: 38609 - DNA, 20 bp, synthetic construct
  misc_feature 1..20: note = chemically synthesized
  source 1..20: mol_type = other DNA
ggtggtggtggtggtgatgg

SEQ ID NO: 38610 - DNA, 20 bp, synthetic construct
  misc_feature 1..20: note = chemically synthesized
  source 1..20: mol_type = other DNA
ggtggtggtggtgatggtgg

SEQ ID NO: 38611 - DNA, 20 bp, synthetic construct
  misc_feature 1..20: note = chemically synthesized
  source 1..20: mol_type = other DNA
ggtggtggtgatggtggtgg

SEQ ID NO: 38612 - DNA, 20 bp, synthetic construct
  misc_feature 1..20: note = chemically synthesized
  source 1..20: mol_type = other DNA
ggtggtggtaataattgtga

SEQ ID NO: 38613 - DNA, 20 bp, synthetic construct
  misc_feature 1..20: note = chemically synthesized
  source 1..20: mol_type = other DNA
ggtggtaataattgtgatgg

SEQ ID NO: 38614 - DNA, 20 bp, synthetic construct
  misc_feature 1..20: note = chemically synthesized
  source 1..20: mol_type = other DNA
ggtaataattgtgatggtgg

SEQ ID NO: 38615 - DNA, 20 bp, synthetic construct
  misc_feature 1..20: note = chemically synthesized
  source 1..20: mol_type = other DNA
tggtggtggaatgatgatga

SEQ ID NO: 38616 - DNA, 20 bp, synthetic construct
  misc_feature 1..20: note = chemically synthesized
  source 1..20: mol_type = other DNA
tggtggaatgatgatgatgg

SEQ ID NO: 38617 - DNA, 20 bp, synthetic construct
  misc_feature 1..20: note = chemically synthesized
  source 1..20: mol_type = other DNA
tggaatgatgatgatggtgg

SEQ ID NO: 38618 - DNA, 20 bp, synthetic construct
  misc_feature 1..20: note = chemically synthesized
  source 1..20: mol_type = other DNA
aatgatgatgatggtggtgg

SEQ ID NO: 38619 - DNA, 20 bp, synthetic construct
  misc_feature 1..20: note = chemically synthesized
  source 1..20: mol_type = other DNA
atgatgatgatggtggtggt

SEQ ID NO: 38620 - DNA, 20 bp, synthetic construct
  misc_feature 1..20: note = chemically synthesized
  source 1..20: mol_type = other DNA
atgatgatggtggtggtggg

SEQ ID NO: 38621 - DNA, 20 bp, synthetic construct
  misc_feature 1..20: note = chemically synthesized
  source 1..20: mol_type = other DNA
gtggtggtgggtagtaatga

SEQ ID NO: 38622 - DNA, 20 bp, synthetic construct
  misc_feature 1..20: note = chemically synthesized
  source 1..20: mol_type = other DNA
gtgggtagtaatgatggtgt

SEQ ID NO: 38623 - DNA, 20 bp, synthetic construct
  misc_feature 1..20: note = chemically synthesized
  source 1..20: mol_type = other DNA
agtaatgatggtgttggtga

SEQ ID NO: 38624 - DNA, 20 bp, synthetic construct
  misc_feature 1..20: note = chemically synthesized
  source 1..20: mol_type = other DNA
aatgatggtgttggtgatgg

SEQ ID NO: 38625 - DNA, 20 bp, synthetic construct
  misc_feature 1..20: note = chemically synthesized
  source 1..20: mol_type = other DNA
gatggtgttggtgatggtgg

SEQ ID NO: 38626 - DNA, 20 bp, synthetic construct
  misc_feature 1..20: note = chemically synthesized
  source 1..20: mol_type = other DNA
ggtgttggtgatggtggtag

SEQ ID NO: 38627 - DNA, 20 bp, synthetic construct
  misc_feature 1..20: note = chemically synthesized
  source 1..20: mol_type = other DNA
ggtgatggtggtagtggtcg

SEQ ID NO: 38628 - DNA, 20 bp, synthetic construct
  misc_feature 1..20: note = chemically synthesized
  source 1..20: mol_type = other DNA
ggtggtagtggtcgtggtga

SEQ ID NO: 38629 - DNA, 20 bp, synthetic construct
  misc_feature 1..20: note = chemically synthesized
  source 1..20: mol_type = other DNA
agtggtcgtggtgatggtga

SEQ ID NO: 38630 - DNA, 20 bp, synthetic construct
  misc_feature 1..20: note = chemically synthesized
  source 1..20: mol_type = other DNA
cgtggtgatggtgatagtga

SEQ ID NO: 38631 - DNA, 20 bp, synthetic construct
  misc_feature 1..20: note = chemically synthesized
  source 1..20: mol_type = other DNA
gatggtgatagtgatagtga

SEQ ID NO: 38632 - DNA, 20 bp, synthetic construct
  misc_feature 1..20: note = chemically synthesized
  source 1..20: mol_type = other DNA
ggtgatagtgatagtgatgg

SEQ ID NO: 38633 - DNA, 20 bp, synthetic construct
  misc_feature 1..20: note = chemically synthesized
  source 1..20: mol_type = other DNA
gatagtgatagtgatggtgg

SEQ ID NO: 38634 - DNA, 20 bp, synthetic construct
  misc_feature 1..20: note = chemically synthesized
  source 1..20: mol_type = other DNA
ggtggtaatgataatgctaa

SEQ ID NO: 38635 - DNA, 20 bp, synthetic construct
  misc_feature 1..20: note = chemically synthesized
  source 1..20: mol_type = other DNA
ggtaatgataatgctaatgg

SEQ ID NO: 38636 - DNA, 20 bp, synthetic construct
  misc_feature 1..20: note = chemically synthesized
  source 1..20: mol_type = other DNA
aatgataatgctaatggtgg

SEQ ID NO: 38637 - DNA, 20 bp, synthetic construct
  misc_feature 1..20: note = chemically synthesized
  source 1..20: mol_type = other DNA
gataatgattatcatgatga

SEQ ID NO: 38638 - DNA, 20 bp, synthetic construct
  misc_feature 1..20: note = chemically synthesized
  source 1..20: mol_type = other DNA
aatgattatcatgatgatag

SEQ ID NO: 38639 - DNA, 20 bp, synthetic construct
  misc_feature 1..20: note = chemically synthesized
  source 1..20: mol_type = other DNA
gattatcatgatgatagcgg

SEQ ID NO: 38640 - DNA, 20 bp, synthetic construct
  misc_feature 1..20: note = chemically synthesized
  source 1..20: mol_type = other DNA
catgatgatagcggtggtga

SEQ ID NO: 38641 - DNA, 20 bp, synthetic construct
  misc_feature 1..20: note = chemically synthesized
  source 1..20: mol_type = other DNA
gatagcggtggtgatggtga

SEQ ID NO: 38642 - DNA, 20 bp, synthetic construct
  misc_feature 1..20: note = chemically synthesized
  source 1..20: mol_type = other DNA
gatggtgatggtgatgataa

SEQ ID NO: 38643 - DNA, 20 bp, synthetic construct
  misc_feature 1..20: note = chemically synthesized
  source 1..20: mol_type = other DNA
gatggtgatgataatggtga

SEQ ID NO: 38644 - DNA, 20 bp, synthetic construct
  misc_feature 1..20: note = chemically synthesized
  source 1..20: mol_type = other DNA
ggtgatgataatggtgatgg

SEQ ID NO: 38645 - DNA, 20 bp, synthetic construct
  misc_feature 1..20: note = chemically synthesized
  source 1..20: mol_type = other DNA
gatgataatggtgatggtgg

SEQ ID NO: 38646 - DNA, 20 bp, synthetic construct
  misc_feature 1..20: note = chemically synthesized
  source 1..20: mol_type = other DNA
tggtggtagaatgatgatga

SEQ ID NO: 38647 - DNA, 20 bp, synthetic construct
  misc_feature 1..20: note = chemically synthesized
  source 1..20: mol_type = other DNA
tagaatgatgatgatggtga

SEQ ID NO: 38648 - DNA, 20 bp, synthetic construct
  misc_feature 1..20: note = chemically synthesized
  source 1..20: mol_type = other DNA
aatgatgatgatggtgatgg

SEQ ID NO: 38649 - DNA, 20 bp, synthetic construct
  misc_feature 1..20: note = chemically synthesized
  source 1..20: mol_type = other DNA
gatgatgatggtgatggtgg

SEQ ID NO: 38650 - DNA, 20 bp, synthetic construct
  misc_feature 1..20: note = chemically synthesized
  source 1..20: mol_type = other DNA
gatgatggtgatggtggtgg

SEQ ID NO: 38651 - DNA, 20 bp, synthetic construct
  misc_feature 1..20: note = chemically synthesized
  source 1..20: mol_type = other DNA
gatggtgatggtggtggtgg

SEQ ID NO: 38652 - DNA, 20 bp, synthetic construct
  misc_feature 1..20: note = chemically synthesized
  source 1..20: mol_type = other DNA
ggtgatggtggtggtggtgg

SEQ ID NO: 38653 - DNA, 20 bp, synthetic construct
  misc_feature 1..20: note = chemically synthesized
  source 1..20: mol_type = other DNA
ggtggtggtagtaatgatga

SEQ ID NO: 38654 - DNA, 20 bp, synthetic construct
  misc_feature 1..20: note = chemically synthesized
  source 1..20: mol_type = other DNA
ggtggtagtaatgatgatgg

SEQ ID NO: 38655 - DNA, 20 bp, synthetic construct
  misc_feature 1..20: note = chemically synthesized
  source 1..20: mol_type = other DNA
ggtagtaatgatgatggtgg

SEQ ID NO: 38656 - DNA, 20 bp, synthetic construct
  misc_feature 1..20: note = chemically synthesized
  source 1..20: mol_type = other DNA
atggtggtggtgatgatgtt

SEQ ID NO: 38657 - DNA, 20 bp, synthetic construct
  misc_feature 1..20: note = chemically synthesized
  source 1..20: mol_type = other DNA
tggtggtggtgatgatgttg

SEQ ID NO: 38658 - DNA, 20 bp, synthetic construct
  misc_feature 1..20: note = chemically synthesized
  source 1..20: mol_type = other DNA
ggtggtggtgatgatgttga

SEQ ID NO: 38659 - DNA, 20 bp, synthetic construct
  misc_feature 1..20: note = chemically synthesized
  source 1..20: mol_type = other DNA
gatgttgagggtgatgataa

SEQ ID NO: 38660 - DNA, 20 bp, synthetic construct
  misc_feature 1..20: note = chemically synthesized
  source 1..20: mol_type = other DNA
gagggtgatgataatagtga

SEQ ID NO: 38661 - DNA, 20 bp, synthetic construct
  misc_feature 1..20: note = chemically synthesized
  source 1..20: mol_type = other DNA
ggtgatgataatagtgacag

SEQ ID NO: 38662 - DNA, 20 bp, synthetic construct
  misc_feature 1..20: note = chemically synthesized
  source 1..20: mol_type = other DNA
gatgataatagtgacagtgg

SEQ ID NO: 38663 - DNA, 20 bp, synthetic construct
  misc_feature 1..20: note = chemically synthesized
  source 1..20: mol_type = other DNA
gataatagtgacagtggtgg

SEQ ID NO: 38664 - DNA, 20 bp, synthetic construct
  misc_feature 1..20: note = chemically synthesized
  source 1..20: mol_type = other DNA
agtggtggtggtaatgataa

SEQ ID NO: 38665 - DNA, 20 bp, synthetic construct
  misc_feature 1..20: note = chemically synthesized
  source 1..20: mol_type = other DNA
ggtggtaatgataatggtga

SEQ ID NO: 38666 - DNA, 20 bp, synthetic construct
  misc_feature 1..20: note = chemically synthesized
  source 1..20: mol_type = other DNA
ggtaatgataatggtgatgg

SEQ ID NO: 38667 - DNA, 20 bp, synthetic construct
  misc_feature 1..20: note = chemically synthesized
  source 1..20: mol_type = other DNA
taatggtgatggtggaatga

SEQ ID NO: 38668 - DNA, 20 bp, synthetic construct
  misc_feature 1..20: note = chemically synthesized
  source 1..20: mol_type = other DNA
tgatggtggaatgatggtga

SEQ ID NO: 38669 - DNA, 20 bp, synthetic construct
  misc_feature 1..20: note = chemically synthesized
  source 1..20: mol_type = other DNA
tggtggaatgatggtgatgg

SEQ ID NO: 38670 - DNA, 20 bp, synthetic construct
  misc_feature 1..20: note = chemically synthesized
  source 1..20: mol_type = other DNA
tggaatgatggtgatggtgg

SEQ ID NO: 38671 - DNA, 20 bp, synthetic construct
  misc_feature 1..20: note = chemically synthesized
  source 1..20: mol_type = other DNA
tgatggtggtggaatgatga

SEQ ID NO: 38672 - DNA, 20 bp, synthetic construct
  misc_feature 1..20: note = chemically synthesized
  source 1..20: mol_type = other DNA
tggtggtggaatgatgatgg

SEQ ID NO: 38673 - DNA, 20 bp, synthetic construct
  misc_feature 1..20: note = chemically synthesized
  source 1..20: mol_type = other DNA
ggaatgatgatggtggtgct

SEQ ID NO: 38674 - DNA, 20 bp, synthetic construct
  misc_feature 1..20: note = chemically synthesized
  source 1..20: mol_type = other DNA
atgatgatggtggtgctgag

SEQ ID NO: 38675 - DNA, 20 bp, synthetic construct
  misc_feature 1..20: note = chemically synthesized
  source 1..20: mol_type = other DNA
gtggtgctgagtagtaatga

SEQ ID NO: 38676 - DNA, 20 bp, synthetic construct
  misc_feature 1..20: note = chemically synthesized
  source 1..20: mol_type = other DNA
ctgagtagtaatgatggtga

SEQ ID NO: 38677 - DNA, 20 bp, synthetic construct
  misc_feature 1..20: note = chemically synthesized
  source 1..20: mol_type = other DNA
agtagtaatgatggtgatgg

SEQ ID NO: 38678 - DNA, 20 bp, synthetic construct
  misc_feature 1..20: note = chemically synthesized
  source 1..20: mol_type = other DNA
agtaatgatggtgatggtgg

SEQ ID NO: 38679 - DNA, 20 bp, synthetic construct
  misc_feature 1..20: note = chemically synthesized
  source 1..20: mol_type = other DNA
aatgatggtgatggtggtgg

SEQ ID NO: 38680 - DNA, 20 bp, synthetic construct
  misc_feature 1..20: note = chemically synthesized
  source 1..20: mol_type = other DNA
ggtgatggtggtggtggctg

SEQ ID NO: 38681 - DNA, 20 bp, synthetic construct
  misc_feature 1..20: note = chemically synthesized
  source 1..20: mol_type = other DNA
ggtggtggctgtggtgatga

SEQ ID NO: 38682 - DNA, 20 bp, synthetic construct
  misc_feature 1..20: note = chemically synthesized
  source 1..20: mol_type = other DNA
ggtggctgtggtgatgatgg

SEQ ID NO: 38683 - DNA, 20 bp, synthetic construct
  misc_feature 1..20: note = chemically synthesized
  source 1..20: mol_type = other DNA
ggctgtggtgatgatggtgg

SEQ ID NO: 38684 - DNA, 20 bp, synthetic construct
  misc_feature 1..20: note = chemically synthesized
  source 1..20: mol_type = other DNA
tgtggtgatgatggtggtgg

SEQ ID NO: 38685 - DNA, 20 bp, synthetic construct
  misc_feature 1..20: note = chemically synthesized
  source 1..20: mol_type = other DNA
ggtgatgatggtggtggtag

SEQ ID NO: 38686 - DNA, 20 bp, synthetic construct
  misc_feature 1..20: note = chemically synthesized
  source 1..20: mol_type = other DNA
gatgatggtggtggtagtgg

SEQ ID NO: 38687 - DNA, 20 bp, synthetic construct
  misc_feature 1..20: note = chemically synthesized
  source 1..20: mol_type = other DNA
ggtagtggtagtaacgatga

SEQ ID NO: 38688 - DNA, 20 bp, synthetic construct
  misc_feature 1..20: note = chemically synthesized
  source 1..20: mol_type = other DNA
agtggtagtaacgatgatgg

SEQ ID NO: 38689 - DNA, 20 bp, synthetic construct
  misc_feature 1..20: note = chemically synthesized
  source 1..20: mol_type = other DNA
ggtagtaacgatgatggtgg

SEQ ID NO: 38690 - DNA, 20 bp, synthetic construct
  misc_feature 1..20: note = chemically synthesized
  source 1..20: mol_type = other DNA
gatgatggtggtggtgatga

SEQ ID NO: 38691 - DNA, 20 bp, synthetic construct
  misc_feature 1..20: note = chemically synthesized
  source 1..20: mol_type = other DNA
ggtggtgatgatagtgatga

SEQ ID NO: 38692 - DNA, 20 bp, synthetic construct
  misc_feature 1..20: note = chemically synthesized
  source 1..20: mol_type = other DNA
gtgatgatggtgatgatgtt

SEQ ID NO: 38693 - DNA, 20 bp, synthetic construct
  misc_feature 1..20: note = chemically synthesized
  source 1..20: mol_type = other DNA
tgatgatggtgatgatgttg

SEQ ID NO: 38694 - DNA, 20 bp, synthetic construct
  misc_feature 1..20: note = chemically synthesized
  source 1..20: mol_type = other DNA
gatgatggtgatgatgttga

SEQ ID NO: 38695 - DNA, 20 bp, synthetic construct
  misc_feature 1..20: note = chemically synthesized
  source 1..20: mol_type = other DNA
gatgttgagggtgatgataa

SEQ ID NO: 38696 - DNA, 20 bp, synthetic construct
  misc_feature 1..20: note = chemically synthesized
  source 1..20: mol_type = other DNA
gagggtgatgataatagtga

SEQ ID NO: 38697 - DNA, 20 bp, synthetic construct
  misc_feature 1..20: note = chemically synthesized
  source 1..20: mol_type = other DNA
ggtgatgataatagtgatag

SEQ ID NO: 38698 - DNA, 20 bp, synthetic construct
  misc_feature 1..20: note = chemically synthesized
  source 1..20: mol_type = other DNA
gatgataatagtgatagcgg

SEQ ID NO: 38699 - DNA, 20 bp, synthetic construct
  misc_feature 1..20: note = chemically synthesized
  source 1..20: mol_type = other DNA
taccaccaccatcatcacca

SEQ ID NO: 38700 - DNA, 20 bp, synthetic construct
  misc_feature 1..20: note = chemically synthesized
  source 1..20: mol_type = other DNA
ccatcaccatcattactact

SEQ ID NO: 38701 - DNA, 20 bp, synthetic construct
  misc_feature 1..20: note = chemically synthesized
  source 1..20: mol_type = other DNA
attatcattaccaccaccat

SEQ ID NO: 38702 - DNA, 20 bp, synthetic construct
  misc_feature 1..20: note = chemically synthesized
  source 1..20: mol_type = other DNA
accaccatcactatcatcat

SEQ ID NO: 38703 - DNA, 20 bp, synthetic construct
  misc_feature 1..20: note = chemically synthesized
  source 1..20: mol_type = other DNA
accatcactatcatcatcag

SEQ ID NO: 38704 - DNA, 20 bp, synthetic construct
  misc_feature 1..20: note = chemically synthesized
  source 1..20: mol_type = other DNA
atcagtagacatcatataac

SEQ ID NO: 38705 - DNA, 20 bp, synthetic construct
  misc_feature 1..20: note = chemically synthesized
  source 1..20: mol_type = other DNA
gacatcatataaccagtttg

SEQ ID NO: 38706 - DNA, 20 bp, synthetic construct
  misc_feature 1..20: note = chemically synthesized
  source 1..20: mol_type = other DNA
tcatataaccagtttgtagc

SEQ ID NO: 38707 - DNA, 20 bp, synthetic construct
  misc_feature 1..20: note = chemically synthesized
  source 1..20: mol_type = other DNA
taaccagtttgtagctggcc

SEQ ID NO: 38708 - DNA, 20 bp, synthetic construct
  misc_feature 1..20: note = chemically synthesized
  source 1..20: mol_type = other DNA
accagtttgtagctggccca

SEQ ID NO: 38709 - DNA, 20 bp, synthetic construct
  misc_feature 1..20: note = chemically synthesized
  source 1..20: mol_type = other DNA
ttctaaccaccatcccccac

SEQ ID NO: 38710 - DNA, 20 bp, synthetic construct
  misc_feature 1..20: note = chemically synthesized
  source 1..20: mol_type = other DNA
tctaaccaccatcccccact

SEQ ID NO: 38711 - DNA, 20 bp, synthetic construct
  misc_feature 1..20: note = chemically synthesized
  source 1..20: mol_type = other DNA
cactaggcttctgcctcgcc

SEQ ID NO: 38712 - DNA, 20 bp, synthetic construct
  misc_feature 1..20: note = chemically synthesized
  source 1..20: mol_type = other DNA
gcctcgcctggtctcacctg

SEQ ID NO: 38713 - DNA, 20 bp, synthetic construct
  misc_feature 1..20: note = chemically synthesized
  source 1..20: mol_type = other DNA
cctcgcctggtctcacctgc

SEQ ID NO: 38714 - DNA, 20 bp, synthetic construct
  misc_feature 1..20: note = chemically synthesized
  source 1..20: mol_type = other DNA
gtctcacctgcaggtccact

SEQ ID NO: 38715 - DNA, 20 bp, synthetic construct
  misc_feature 1..20: note = chemically synthesized
  source 1..20: mol_type = other DNA
tccactgagaaaatgattct

SEQ ID NO: 38716 - DNA, 20 bp, synthetic construct
  misc_feature 1..20: note = chemically synthesized
  source 1..20: mol_type = other DNA
atgattctcagaacactaac

SEQ ID NO: 38717 - DNA, 20 bp, synthetic construct
  misc_feature 1..20: note = chemically synthesized
  source 1..20: mol_type = other DNA
cagaacactaactagaccat

SEQ ID NO: 38718 - DNA, 20 bp, synthetic construct
  misc_feature 1..20: note = chemically synthesized
  source 1..20: mol_type = other DNA
agaacactaactagaccatg

SEQ ID NO: 38719 - DNA, 20 bp, synthetic construct
  misc_feature 1..20: note = chemically synthesized
  source 1..20: mol_type = other DNA
aggtgccacaaaacataact

SEQ ID NO: 38720 - DNA, 20 bp, synthetic construct
  misc_feature 1..20: note = chemically synthesized
  source 1..20: mol_type = other DNA
ggtgccacaaaacataactc

SEQ ID NO: 38721 - DNA, 20 bp, synthetic construct
  misc_feature 1..20: note = chemically synthesized
  source 1..20: mol_type = other DNA
ctacatgtcaataatgacat

SEQ ID NO: 38722 - DNA, 20 bp, synthetic construct
  misc_feature 1..20: note = chemically synthesized
  source 1..20: mol_type = other DNA
tacatgtcaataatgacatc

SEQ ID NO: 38723 - DNA, 20 bp, synthetic construct
  misc_feature 1..20: note = chemically synthesized
  source 1..20: mol_type = other DNA
aataatgacatcaggtcaat

SEQ ID NO: 38724 - DNA, 20 bp, synthetic construct
  misc_feature 1..20: note = chemically synthesized
  source 1..20: mol_type = other DNA
atcaggtcaattggcgttct

SEQ ID NO: 38725 - DNA, 20 bp, synthetic construct
  misc_feature 1..20: note = chemically synthesized
  source 1..20: mol_type = other DNA
aattggcgttctcagcctct

SEQ ID NO: 38726 - DNA, 20 bp, synthetic construct
  misc_feature 1..20: note = chemically synthesized
  source 1..20: mol_type = other DNA
ttggcgttctcagcctctga

SEQ ID NO: 38727 - DNA, 20 bp, synthetic construct
  misc_feature 1..20: note = chemically synthesized
  source 1..20: mol_type = other DNA
tggcgttctcagcctctgag

SEQ ID NO: 38728 - DNA, 20 bp, synthetic construct
  misc_feature 1..20: note = chemically synthesized
  source 1..20: mol_type = other DNA
ggcgttctcagcctctgaga

SEQ ID NO: 38729 - DNA, 20 bp, synthetic construct
  misc_feature 1..20: note = chemically synthesized
  source 1..20: mol_type = other DNA
cgttctcagcctctgagagg

SEQ ID NO: 38730 - DNA, 20 bp, synthetic construct
  misc_feature 1..20: note = chemically synthesized
  source 1..20: mol_type = other DNA
gttctcagcctctgagaggg

SEQ ID NO: 38731 - DNA, 20 bp, synthetic construct
  misc_feature 1..20: note = chemically synthesized
  source 1..20: mol_type = other DNA
agcctctgagagggaggtca

SEQ ID NO: 38732 - DNA, 20 bp, synthetic construct
  misc_feature 1..20: note = chemically synthesized
  source 1..20: mol_type = other DNA
tgctctccccttcatgtttc

SEQ ID NO: 38733 - DNA, 20 bp, synthetic construct
  misc_feature 1..20: note = chemically synthesized
  source 1..20: mol_type = other DNA
gctctccccttcatgtttcc

SEQ ID NO: 38734 - DNA, 20 bp, synthetic construct
  misc_feature 1..20: note = chemically synthesized
  source 1..20: mol_type = other DNA
tttccaggtgttccctgact

SEQ ID NO: 38735 - DNA, 20 bp, synthetic construct
  misc_feature 1..20: note = chemically synthesized
  source 1..20: mol_type = other DNA
tccctgacttggatcaaatg

SEQ ID NO: 38736 - DNA, 20 bp, synthetic construct
  misc_feature 1..20: note = chemically synthesized
  source 1..20: mol_type = other DNA
cctgacttggatcaaatgca

SEQ ID NO: 38737 - DNA, 20 bp, synthetic construct
  misc_feature 1..20: note = chemically synthesized
  source 1..20: mol_type = other DNA
cttggatcaaatgcagagtt

SEQ ID NO: 38738 - DNA, 20 bp, synthetic construct
  misc_feature 1..20: note = chemically synthesized
  source 1..20: mol_type = other DNA
tggatcaaatgcagagtttg

SEQ ID NO: 38739 - DNA, 20 bp, synthetic construct
  misc_feature 1..20: note = chemically synthesized
  source 1..20: mol_type = other DNA
ggatcaaatgcagagtttgg

SEQ ID NO: 38740 - DNA, 20 bp, synthetic construct
  misc_feature 1..20: note = chemically synthesized
  source 1..20: mol_type = other DNA
atgcagagtttggaggtgtt

SEQ ID NO: 38741 - DNA, 20 bp, synthetic construct
  misc_feature 1..20: note = chemically synthesized
  source 1..20: mol_type = other DNA
tgcagagtttggaggtgttg

SEQ ID NO: 38742 - DNA, 20 bp, synthetic construct
  misc_feature 1..20: note = chemically synthesized
  source 1..20: mol_type = other DNA
agtttggaggtgttgaggcc

SEQ ID NO: 38743 - DNA, 20 bp, synthetic construct
  misc_feature 1..20: note = chemically synthesized
  source 1..20: mol_type = other DNA
gtttggaggtgttgaggcca

SEQ ID NO: 38744 - DNA, 20 bp, synthetic construct
  misc_feature 1..20: note = chemically synthesized
  source 1..20: mol_type = other DNA
tttggaggtgttgaggccaa

SEQ ID NO: 38745 - DNA, 20 bp, synthetic construct
  misc_feature 1..20: note = chemically synthesized
  source 1..20: mol_type = other DNA
ttggaggtgttgaggccaag

SEQ ID NO: 38746 - DNA, 20 bp, synthetic construct
  misc_feature 1..20: note = chemically synthesized
  source 1..20: mol_type = other DNA
ttgaggccaaggggattttc

SEQ ID NO: 38747 - DNA, 20 bp, synthetic construct
  misc_feature 1..20: note = chemically synthesized
  source 1..20: mol_type = other DNA
tgaggccaaggggattttcc

SEQ ID NO: 38748 - DNA, 20 bp, synthetic construct
  misc_feature 1..20: note = chemically synthesized
  source 1..20: mol_type = other DNA
gccaaggggattttccaggt

SEQ ID NO: 38749 - DNA, 20 bp, synthetic construct
  misc_feature 1..20: note = chemically synthesized
  source 1..20: mol_type = other DNA
cagtcgtcatccacaatcaa

SEQ ID NO: 38750 - DNA, 20 bp, synthetic construct
  misc_feature 1..20: note = chemically synthesized
  source 1..20: mol_type = other DNA
caatggactgatcctgccgc

SEQ ID NO: 38751 - DNA, 20 bp, synthetic construct
  misc_feature 1..20: note = chemically synthesized
  source 1..20: mol_type = other DNA
taccctgctgccctctcccc

SEQ ID NO: 38752 - DNA, 20 bp, synthetic construct
  misc_feature 1..20: note = chemically synthesized
  source 1..20: mol_type = other DNA
accctgctgccctctcccca

SEQ ID NO: 38753 - DNA, 20 bp, synthetic construct
  misc_feature 1..20: note = chemically synthesized
  source 1..20: mol_type = other DNA
ccctctccccaaggccccat

SEQ ID NO: 38754 - DNA, 20 bp, synthetic construct
  misc_feature 1..20: note = chemically synthesized
  source 1..20: mol_type = other DNA
cctctccccaaggccccatc

SEQ ID NO: 38755 - DNA, 20 bp, synthetic construct
  misc_feature 1..20: note = chemically synthesized
  source 1..20: mol_type = other DNA
ctctccccaaggccccatca

SEQ ID NO: 38756 - DNA, 20 bp, synthetic construct
  misc_feature 1..20: note = chemically synthesized
  source 1..20: mol_type = other DNA
ctccccaaggccccatcagg

SEQ ID NO: 38757 - DNA, 20 bp, synthetic construct
  misc_feature 1..20: note = chemically synthesized
  source 1..20: mol_type = other DNA
tccccaaggccccatcaggg

SEQ ID NO: 38758 - DNA, 20 bp, synthetic construct
  misc_feature 1..20: note = chemically synthesized
  source 1..20: mol_type = other DNA
ccccaaggccccatcaggga

SEQ ID NO: 38759 - DNA, 20 bp, synthetic construct
  misc_feature 1..20: note = chemically synthesized
  source 1..20: mol_type = other DNA
ttcaatcctcttgtcacctg

SEQ ID NO: 38760 - DNA, 20 bp, synthetic construct
  misc_feature 1..20: note = chemically synthesized
  source 1..20: mol_type = other DNA
acctgtggcctacctgccct

SEQ ID NO: 38761 - DNA, 20 bp, synthetic construct
  misc_feature 1..20: note = chemically synthesized
  source 1..20: mol_type = other DNA
ctgtggcctacctgccctca

SEQ ID NO: 38762 - DNA, 20 bp, synthetic construct
  misc_feature 1..20: note = chemically synthesized
  source 1..20: mol_type = other DNA
cagagatgacatctctatgt

SEQ ID NO: 38763 - DNA, 20 bp, synthetic construct
  misc_feature 1..20: note = chemically synthesized
  source 1..20: mol_type = other DNA
gacatctctatgtcggccac

SEQ ID NO: 38764 - DNA, 20 bp, synthetic construct
  misc_feature 1..20: note = chemically synthesized
  source 1..20: mol_type = other DNA
tctctatgtcggccactgga

SEQ ID NO: 38765 - DNA, 20 bp, synthetic construct
  misc_feature 1..20: note = chemically synthesized
  source 1..20: mol_type = other DNA
ctatgtcggccactggatgg

SEQ ID NO: 38766 - DNA, 20 bp, synthetic construct
  misc_feature 1..20: note = chemically synthesized
  source 1..20: mol_type = other DNA
tggatggcagcacctactcg

SEQ ID NO: 38767 - DNA, 20 bp, synthetic construct
  misc_feature 1..20: note = chemically synthesized
  source 1..20: mol_type = other DNA
gcagaccacatcaactttcc

SEQ ID NO: 38768 - DNA, 20 bp, synthetic construct
  misc_feature 1..20: note = chemically synthesized
  source 1..20: mol_type = other DNA
tcaactttcctggcaacttg

SEQ ID NO: 38769 - DNA, 20 bp, synthetic construct
  misc_feature 1..20: note = chemically synthesized
  source 1..20: mol_type = other DNA
actttcctggcaacttgcgg

SEQ ID NO: 38770 - DNA, 20 bp, synthetic construct
  misc_feature 1..20: note = chemically synthesized
  source 1..20: mol_type = other DNA
ctttcctggcaacttgcggt

SEQ ID NO: 38771 - DNA, 20 bp, synthetic construct
  misc_feature 1..20: note = chemically synthesized
  source 1..20: mol_type = other DNA
cggtaggttttcaccattat

SEQ ID NO: 38772 - DNA, 20 bp, synthetic construct
  misc_feature 1..20: note = chemically synthesized
  source 1..20: mol_type = other DNA
ggtaggttttcaccattatc

SEQ ID NO: 38773 - DNA, 20 bp, synthetic construct
  misc_feature 1..20: note = chemically synthesized
  source 1..20: mol_type = other DNA
ggatgtttgccttgctcaaa

SEQ ID NO: 38774 - DNA, 20 bp, synthetic construct
  misc_feature 1..20: note = chemically synthesized
  source 1..20: mol_type = other DNA
tgtttgccttgctcaaatag

SEQ ID NO: 38775 - DNA, 20 bp, synthetic construct
  misc_feature 1..20: note = chemically synthesized
  source 1..20: mol_type = other DNA
cttgctcaaatagcagattc

SEQ ID NO: 38776 - DNA, 20 bp, synthetic construct
  misc_feature 1..20: note = chemically synthesized
  source 1..20: mol_type = other DNA
tgctcaaatagcagattcta

SEQ ID NO: 38777 - DNA, 20 bp, synthetic construct
  misc_feature 1..20: note = chemically synthesized
  source 1..20: mol_type = other DNA
aaatagcagattctagagaa

SEQ ID NO: 38778 - DNA, 20 bp, synthetic construct
  misc_feature 1..20: note = chemically synthesized
  source 1..20: mol_type = other DNA
tgctccctcacacaactatg

SEQ ID NO: 38779 - DNA, 20 bp, synthetic construct
  misc_feature 1..20: note = chemically synthesized
  source 1..20: mol_type = other DNA
cctcacacaactatgtagtc

SEQ ID NO: 38780 - DNA, 20 bp, synthetic construct
  misc_feature 1..20: note = chemically synthesized
  source 1..20: mol_type = other DNA
ctcacacaactatgtagtcc

SEQ ID NO: 38781 - DNA, 20 bp, synthetic construct
  misc_feature 1..20: note = chemically synthesized
  source 1..20: mol_type = other DNA
tgcaccctctgcccgatgct

SEQ ID NO: 38782 - DNA, 20 bp, synthetic construct
  misc_feature 1..20: note = chemically synthesized
  source 1..20: mol_type = other DNA
accctctgcccgatgcttgg

SEQ ID NO: 38783 - DNA, 20 bp, synthetic construct
  misc_feature 1..20: note = chemically synthesized
  source 1..20: mol_type = other DNA
tctgcccgatgcttggtagt

SEQ ID NO: 38784 - DNA, 20 bp, synthetic construct
  misc_feature 1..20: note = chemically synthesized
  source 1..20: mol_type = other DNA
agtcagaaacttccatcatg

SEQ ID NO: 38785 - DNA, 20 bp, synthetic construct
  misc_feature 1..20: note = chemically synthesized
  source 1..20: mol_type = other DNA
ttccatcatgcagctctgcc

SEQ ID NO: 38786 - DNA, 20 bp, synthetic construct
  misc_feature 1..20: note = chemically synthesized
  source 1..20: mol_type = other DNA
catgcagctctgcccagatt

SEQ ID NO: 38787 - DNA, 20 bp, synthetic construct
  misc_feature 1..20: note = chemically synthesized
  source 1..20: mol_type = other DNA
agctctgcccagattgagct

SEQ ID NO: 38788 - DNA, 20 bp, synthetic construct
  misc_feature 1..20: note = chemically synthesized
  source 1..20: mol_type = other DNA
ctgcccagattgagctgagc

SEQ ID NO: 38789 - DNA, 20 bp, synthetic construct
  misc_feature 1..20: note = chemically synthesized
  source 1..20: mol_type = other DNA
gattgagctgagctggcctc

SEQ ID NO: 38790 - DNA, 20 bp, synthetic construct
  misc_feature 1..20: note = chemically synthesized
  source 1..20: mol_type = other DNA
ttgagctgagctggcctctg

SEQ ID NO: 38791 - DNA, 20 bp, synthetic construct
  misc_feature 1..20: note = chemically synthesized
  source 1..20: mol_type = other DNA
gctgagctggcctctggagt

SEQ ID NO: 38792 - DNA, 20 bp, synthetic construct
  misc_feature 1..20: note = chemically synthesized
  source 1..20: mol_type = other DNA
ctgagctggcctctggagtg

SEQ ID NO: 38793 - DNA, 20 bp, synthetic construct
  misc_feature 1..20: note = chemically synthesized
  source 1..20: mol_type = other DNA
tggcctctggagtgaggtgc

SEQ ID NO: 38794 - DNA, 20 bp, synthetic construct
  misc_feature 1..20: note = chemically synthesized
  source 1..20: mol_type = other DNA
ggcctctggagtgaggtgct

SEQ ID NO: 38795 - DNA, 20 bp, synthetic construct
  misc_feature 1..20: note = chemically synthesized
  source 1..20: mol_type = other DNA
catgctgctcatgtcaactc

SEQ ID NO: 38796 - DNA, 20 bp, synthetic construct
  misc_feature 1..20: note = chemically synthesized
  source 1..20: mol_type = other DNA
gctcatgtcaactccagatg

SEQ ID NO: 38797 - DNA, 20 bp, synthetic construct
  misc_feature 1..20: note = chemically synthesized
  source 1..20: mol_type = other DNA
atgtcaactccagatgcagt

SEQ ID NO: 38798 - DNA, 20 bp, synthetic construct
  misc_feature 1..20: note = chemically synthesized
  source 1..20: mol_type = other DNA
tgtcaactccagatgcagtc

SEQ ID NO: 38799 - DNA, 20 bp, synthetic construct
  misc_feature 1..20: note = chemically synthesized
  source 1..20: mol_type = other DNA
gcagtcaggtttctgaacca

SEQ ID NO: 38800 - DNA, 20 bp, synthetic construct
  misc_feature 1..20: note = chemically synthesized
  source 1..20: mol_type = other DNA
tgaaccaaagtcaatgatct

SEQ ID NO: 38801 - DNA, 20 bp, synthetic construct
  misc_feature 1..20: note = chemically synthesized
  source 1..20: mol_type = other DNA
caaagtcaatgatctaagtg

SEQ ID NO: 38802 - DNA, 20 bp, synthetic construct
  misc_feature 1..20: note = chemically synthesized
  source 1..20: mol_type = other DNA
caatgatctaagtgcagtca

SEQ ID NO: 38803 - DNA, 20 bp, synthetic construct
  misc_feature 1..20: note = chemically synthesized
  source 1..20: mol_type = other DNA
aatgatctaagtgcagtcaa

SEQ ID NO: 38804 - DNA, 20 bp, synthetic construct
  misc_feature 1..20: note = chemically synthesized
  source 1..20: mol_type = other DNA
ctaagtgcagtcaaaggctc

SEQ ID NO: 38805 - DNA, 20 bp, synthetic construct
  misc_feature 1..20: note = chemically synthesized
  source 1..20: mol_type = other DNA
taagtgcagtcaaaggctct

SEQ ID NO: 38806 - DNA, 20 bp, synthetic construct
  misc_feature 1..20: note = chemically synthesized
  source 1..20: mol_type = other DNA
aagtgcagtcaaaggctctg

SEQ ID NO: 38807 - DNA, 20 bp, synthetic construct
  misc_feature 1..20: note = chemically synthesized
  source 1..20: mol_type = other DNA
agtgcagtcaaaggctctgg

SEQ ID NO: 38808 - DNA, 20 bp, synthetic construct
  misc_feature 1..20: note = chemically synthesized
  source 1..20: mol_type = other DNA
gcagtcaaaggctctggggg

SEQ ID NO: 38809 - DNA, 20 bp, synthetic construct
  misc_feature 1..20: note = chemically synthesized
  source 1..20: mol_type = other DNA
tcaaaggctctgggggaaga

SEQ ID NO: 38810 - DNA, 20 bp, synthetic construct
  misc_feature 1..20: note = chemically synthesized
  source 1..20: mol_type = other DNA
aaaggctctgggggaagaaa

SEQ ID NO: 38811 - DNA, 20 bp, synthetic construct
  misc_feature 1..20: note = chemically synthesized
  source 1..20: mol_type = other DNA
aggctctgggggaagaaaga

SEQ ID NO: 38812 - DNA, 20 bp, synthetic construct
  misc_feature 1..20: note = chemically synthesized
  source 1..20: mol_type = other DNA
gctctgggggaagaaagaga

SEQ ID NO: 38813 - DNA, 20 bp, synthetic construct
  misc_feature 1..20: note = chemically synthesized
  source 1..20: mol_type = other DNA
ttgcctgtgccatgctcgca

SEQ ID NO: 38814 - DNA, 20 bp, synthetic construct
  misc_feature 1..20: note = chemically synthesized
  source 1..20: mol_type = other DNA
ctgtgccatgctcgcaaagc

SEQ ID NO: 38815 - DNA, 20 bp, synthetic construct
  misc_feature 1..20: note = chemically synthesized
  source 1..20: mol_type = other DNA
tgtgccatgctcgcaaagca

SEQ ID NO: 38816 - DNA, 20 bp, synthetic construct
  misc_feature 1..20: note = chemically synthesized
  source 1..20: mol_type = other DNA
tttttgcaaaattctaatga

SEQ ID NO: 38817 - DNA, 20 bp, synthetic construct
  misc_feature 1..20: note = chemically synthesized
  source 1..20: mol_type = other DNA
tgcaaaattctaatgaaagc

SEQ ID NO: 38818 - DNA, 20 bp, synthetic construct
  misc_feature 1..20: note = chemically synthesized
  source 1..20: mol_type = other DNA
gcaaaattctaatgaaagct

SEQ ID NO: 38819 - DNA, 20 bp, synthetic construct
  misc_feature 1..20: note = chemically synthesized
  source 1..20: mol_type = other DNA
gaaagctgggcttgcaaaat

SEQ ID NO: 38820 - DNA, 20 bp, synthetic construct
  misc_feature 1..20: note = chemically synthesized
  source 1..20: mol_type = other DNA
ggcttgcaaaattagaaaac

SEQ ID NO: 38821 - DNA, 20 bp, synthetic construct
  misc_feature 1..20: note = chemically synthesized
  source 1..20: mol_type = other DNA
tagaaaactggattatttgt

SEQ ID NO: 38822 - DNA, 20 bp, synthetic construct
  misc_feature 1..20: note = chemically synthesized
  source 1..20: mol_type = other DNA
tgagaacactgaaacatccc

SEQ ID NO: 38823 - DNA, 20 bp, synthetic construct
  misc_feature 1..20: note = chemically synthesized
  source 1..20: mol_type = other DNA
gagaacactgaaacatccct

SEQ ID NO: 38824 - DNA, 20 bp, synthetic construct
  misc_feature 1..20: note = chemically synthesized
  source 1..20: mol_type = other DNA
catccctgggtgtgtccatc

SEQ ID NO: 38825 - DNA, 20 bp, synthetic construct
  misc_feature 1..20: note = chemically synthesized
  source 1..20: mol_type = other DNA
ggtgtgtccatctggaaaaa

SEQ ID NO: 38826 - DNA, 20 bp, synthetic construct
  misc_feature 1..20: note = chemically synthesized
  source 1..20: mol_type = other DNA
tggaaaaacagcatttcctc

SEQ ID NO: 38827 - DNA, 20 bp, synthetic construct
  misc_feature 1..20: note = chemically synthesized
  source 1..20: mol_type = other DNA
gcaaccgttctatttgaatt

SEQ ID NO: 38828 - DNA, 20 bp, synthetic construct
  misc_feature 1..20: note = chemically synthesized
  source 1..20: mol_type = other DNA
cgttctatttgaatttggca

SEQ ID NO: 38829 - DNA, 20 bp, synthetic construct
  misc_feature 1..20: note = chemically synthesized
  source 1..20: mol_type = other DNA
tgaatttggcaaagaaaata

SEQ ID NO: 38830 - DNA, 20 bp, synthetic construct
  misc_feature 1..20: note = chemically synthesized
  source 1..20: mol_type = other DNA
atttggcaaagaaaataaag

SEQ ID NO: 38831 - DNA, 20 bp, synthetic construct
  misc_feature 1..20: note = chemically synthesized
  source 1..20: mol_type = other DNA
aataaagcagtttttcacaa

SEQ ID NO: 38832 - DNA, 20 bp, synthetic construct
  misc_feature 1..20: note = chemically synthesized
  source 1..20: mol_type = other DNA
cacaaaagaataaacacaac

SEQ ID NO: 38833 - DNA, 20 bp, synthetic construct
  misc_feature 1..20: note = chemically synthesized
  source 1..20: mol_type = other DNA
acaaaagaataaacacaacc

SEQ ID NO: 38834 - DNA, 20 bp, synthetic construct
  misc_feature 1..20: note = chemically synthesized
  source 1..20: mol_type = other DNA
aaaagaataaacacaaccag

SEQ ID NO: 38835 - DNA, 20 bp, synthetic construct
  misc_feature 1..20: note = chemically synthesized
  source 1..20: mol_type = other DNA
ttcactctcccaaattgtca

SEQ ID NO: 38836 - DNA, 20 bp, synthetic construct
  misc_feature 1..20: note = chemically synthesized
  source 1..20: mol_type = other DNA
actctcccaaattgtcaaag

SEQ ID NO: 38837 - DNA, 20 bp, synthetic construct
  misc_feature 1..20: note = chemically synthesized
  source 1..20: mol_type = other DNA
attgtcaaagaagtataaat

SEQ ID NO: 38838 - DNA, 20 bp, synthetic construct
  misc_feature 1..20: note = chemically synthesized
  source 1..20: mol_type = other DNA
gtataaattagaaaatgaat

SEQ ID NO: 38839 - DNA, 20 bp, synthetic construct
  misc_feature 1..20: note = chemically synthesized
  source 1..20: mol_type = other DNA
tataaattagaaaatgaatc

SEQ ID NO: 38840 - DNA, 20 bp, synthetic construct
  misc_feature 1..20: note = chemically synthesized
  source 1..20: mol_type = other DNA
tcaggacaatttcaacctgt

SEQ ID NO: 38841 - DNA, 20 bp, synthetic construct
  misc_feature 1..20: note = chemically synthesized
  source 1..20: mol_type = other DNA
acaatttcaacctgttagat

SEQ ID NO: 38842 - DNA, 20 bp, synthetic construct
  misc_feature 1..20: note = chemically synthesized
  source 1..20: mol_type = other DNA
taaaaattgaacactcatac

SEQ ID NO: 38843 - DNA, 20 bp, synthetic construct
  misc_feature 1..20: note = chemically synthesized
  source 1..20: mol_type = other DNA
attgaacactcatacaagtg

SEQ ID NO: 38844 - DNA, 20 bp, synthetic construct
  misc_feature 1..20: note = chemically synthesized
  source 1..20: mol_type = other DNA
acactcatacaagtgtggtg

SEQ ID NO: 38845 - DNA, 20 bp, synthetic construct
  misc_feature 1..20: note = chemically synthesized
  source 1..20: mol_type = other DNA
gtggtgaagtgattgttttc

SEQ ID NO: 38846 - DNA, 20 bp, synthetic construct
  misc_feature 1..20: note = chemically synthesized
  source 1..20: mol_type = other DNA
tttacactgtcataaccttc

SEQ ID NO: 38847 - DNA, 20 bp, synthetic construct
  misc_feature 1..20: note = chemically synthesized
  source 1..20: mol_type = other DNA
taaccttctagaaaataaat

SEQ ID NO: 38848 - DNA, 20 bp, synthetic construct
  misc_feature 1..20: note = chemically synthesized
  source 1..20: mol_type = other DNA
ccttctagaaaataaattgg

SEQ ID NO: 38849 - DNA, 20 bp, synthetic construct
  misc_feature 1..20: note = chemically synthesized
  source 1..20: mol_type = other DNA
aaataaattggcagtgttat

SEQ ID NO: 38850 - DNA, 20 bp, synthetic construct
  misc_feature 1..20: note = chemically synthesized
  source 1..20: mol_type = other DNA
aataaattggcagtgttatt

SEQ ID NO: 38851 - DNA, 20 bp, synthetic construct
  misc_feature 1..20: note = chemically synthesized
  source 1..20: mol_type = other DNA
taaattggcagtgttattgg

SEQ ID NO: 38852 - DNA, 20 bp, synthetic construct
  misc_feature 1..20: note = chemically synthesized
  source 1..20: mol_type = other DNA
ttggcagtgttattgggaga

SEQ ID NO: 38853 - DNA, 20 bp, synthetic construct
  misc_feature 1..20: note = chemically synthesized
  source 1..20: mol_type = other DNA
aaatatgtctatataattta

SEQ ID NO: 38854 - DNA, 20 bp, synthetic construct
  misc_feature 1..20: note = chemically synthesized
  source 1..20: mol_type = other DNA
aatatgtctatataatttat

SEQ ID NO: 38855 - DNA, 20 bp, synthetic construct
  misc_feature 1..20: note = chemically synthesized
  source 1..20: mol_type = other DNA
ctatataatttatgggaact

SEQ ID NO: 38856 - DNA, 20 bp, synthetic construct
  misc_feature 1..20: note = chemically synthesized
  source 1..20: mol_type = other DNA
tatataatttatgggaactt

SEQ ID NO: 38857 - DNA, 20 bp, synthetic construct
  misc_feature 1..20: note = chemically synthesized
  source 1..20: mol_type = other DNA
aatttatgggaacttaggct

SEQ ID NO: 38858 - DNA, 20 bp, synthetic construct
  misc_feature 1..20: note = chemically synthesized
  source 1..20: mol_type = other DNA
acttaggctcagaaaatatt

SEQ ID NO: 38859 - DNA, 20 bp, synthetic construct
  misc_feature 1..20: note = chemically synthesized
  source 1..20: mol_type = other DNA
cttaggctcagaaaatatta

SEQ ID NO: 38860 - DNA, 20 bp, synthetic construct
  misc_feature 1..20: note = chemically synthesized
  source 1..20: mol_type = other DNA
ctcagaaaatattaaggaat

SEQ ID NO: 38861 - DNA, 20 bp, synthetic construct
  misc_feature 1..20: note = chemically synthesized
  source 1..20: mol_type = other DNA
aagaatgaactttatgaaca

SEQ ID NO: 38862 - DNA, 20 bp, synthetic construct
  misc_feature 1..20: note = chemically synthesized
  source 1..20: mol_type = other DNA
gaactttatgaacaaagatg

SEQ ID NO: 38863 - DNA, 20 bp, synthetic construct
  misc_feature 1..20: note = chemically synthesized
  source 1..20: mol_type = other DNA
actttatgaacaaagatgtg

SEQ ID NO: 38864 - DNA, 20 bp, synthetic construct
  misc_feature 1..20: note = chemically synthesized
  source 1..20: mol_type = other DNA
ctttatgaacaaagatgtgg

SEQ ID NO: 38865 - DNA, 20 bp, synthetic construct
  misc_feature 1..20: note = chemically synthesized
  source 1..20: mol_type = other DNA
tttatgaacaaagatgtgga

SEQ ID NO: 38866 - DNA, 20 bp, synthetic construct
  misc_feature 1..20: note = chemically synthesized
  source 1..20: mol_type = other DNA
tgaacaaagatgtggagggt

SEQ ID NO: 38867 - DNA, 20 bp, synthetic construct
  misc_feature 1..20: note = chemically synthesized
  source 1..20: mol_type = other DNA
acaaagatgtggagggttgg

SEQ ID NO: 38868 - DNA, 20 bp, synthetic construct
  misc_feature 1..20: note = chemically synthesized
  source 1..20: mol_type = other DNA
agatgtggagggttggaagc

SEQ ID NO: 38869 - DNA, 20 bp, synthetic construct
  misc_feature 1..20: note = chemically synthesized
  source 1..20: mol_type = other DNA
atgtggagggttggaagcaa

SEQ ID NO: 38870 - DNA, 20 bp, synthetic construct
  misc_feature 1..20: note = chemically synthesized
  source 1..20: mol_type = other DNA
tgtggagggttggaagcaag

SEQ ID NO: 38871 - DNA, 20 bp, synthetic construct
  misc_feature 1..20: note = chemically synthesized
  source 1..20: mol_type = other DNA
gtggagggttggaagcaaga

SEQ ID NO: 38872 - DNA, 20 bp, synthetic construct
  misc_feature 1..20: note = chemically synthesized
  source 1..20: mol_type = other DNA
tggagggttggaagcaagag

SEQ ID NO: 38873 - DNA, 20 bp, synthetic construct
  misc_feature 1..20: note = chemically synthesized
  source 1..20: mol_type = other DNA
ggagggttggaagcaagagg

SEQ ID NO: 38874 - DNA, 20 bp, synthetic construct
  misc_feature 1..20: note = chemically synthesized
  source 1..20: mol_type = other DNA
gagggttggaagcaagaggg

SEQ ID NO: 38875 - DNA, 20 bp, synthetic construct
  misc_feature 1..20: note = chemically synthesized
  source 1..20: mol_type = other DNA
aagaggggggccaacgcgca

SEQ ID NO: 38876 - DNA, 20 bp, synthetic construct
  misc_feature 1..20: note = chemically synthesized
  source 1..20: mol_type = other DNA
agaggggggccaacgcgcac

SEQ ID NO: 38877 - DNA, 20 bp, synthetic construct
  misc_feature 1..20: note = chemically synthesized
  source 1..20: mol_type = other DNA
gaggggggccaacgcgcacg

SEQ ID NO: 38878 - DNA, 20 bp, synthetic construct
  misc_feature 1..20: note = chemically synthesized
  source 1..20: mol_type = other DNA
ggggggccaacgcgcacggg

SEQ ID NO: 38879 - DNA, 20 bp, synthetic construct
  misc_feature 1..20: note = chemically synthesized
  source 1..20: mol_type = other DNA
gggggccaacgcgcacgggg

SEQ ID NO: 38880 - DNA, 20 bp, synthetic construct
  misc_feature 1..20: note = chemically synthesized
  source 1..20: mol_type = other DNA
ggccaacgcgcacggggagg

SEQ ID NO: 38881 - DNA, 20 bp, synthetic construct
  misc_feature 1..20: note = chemically synthesized
  source 1..20: mol_type = other DNA
gcgcacggggaggaagcatt

SEQ ID NO: 38882 - DNA, 20 bp, synthetic construct
  misc_feature 1..20: note = chemically synthesized
  source 1..20: mol_type = other DNA
cgcacggggaggaagcattt

SEQ ID NO: 38883 - DNA, 20 bp, synthetic construct
  misc_feature 1..20: note = chemically synthesized
  source 1..20: mol_type = other DNA
acggggaggaagcatttggg

SEQ ID NO: 38884 - DNA, 20 bp, synthetic construct
  misc_feature 1..20: note = chemically synthesized
  source 1..20: mol_type = other DNA
gcatttgggcagtgactccg

SEQ ID NO: 38885 - DNA, 20 bp, synthetic construct
  misc_feature 1..20: note = chemically synthesized
  source 1..20: mol_type = other DNA
gggcagtgactccgcagacc

SEQ ID NO: 38886 - DNA, 20 bp, synthetic construct
  misc_feature 1..20: note = chemically synthesized
  source 1..20: mol_type = other DNA
ggcagtgactccgcagaccc

SEQ ID NO: 38887 - DNA, 20 bp, synthetic construct
  misc_feature 1..20: note = chemically synthesized
  source 1..20: mol_type = other DNA
tgactccgcagacccaggct

SEQ ID NO: 38888 - DNA, 20 bp, synthetic construct
  misc_feature 1..20: note = chemically synthesized
  source 1..20: mol_type = other DNA
gactccgcagacccaggctc

SEQ ID NO: 38889 - DNA, 20 bp, synthetic construct
  misc_feature 1..20: note = chemically synthesized
  source 1..20: mol_type = other DNA
gacccaggctcaggttgaac

SEQ ID NO: 38890 - DNA, 20 bp, synthetic construct
  misc_feature 1..20: note = chemically synthesized
  source 1..20: mol_type = other DNA
tagacaacctccttacacct

SEQ ID NO: 38891 - DNA, 20 bp, synthetic construct
  misc_feature 1..20: note = chemically synthesized
  source 1..20: mol_type = other DNA
cacctcagtttccttaactg

SEQ ID NO: 38892 - DNA, 20 bp, synthetic construct
  misc_feature 1..20: note = chemically synthesized
  source 1..20: mol_type = other DNA
cctcagtttccttaactgta

SEQ ID NO: 38893 - DNA, 20 bp, synthetic construct
  misc_feature 1..20: note = chemically synthesized
  source 1..20: mol_type = other DNA
cagtttccttaactgtagag

SEQ ID NO: 38894 - DNA, 20 bp, synthetic construct
  misc_feature 1..20: note = chemically synthesized
  source 1..20: mol_type = other DNA
agtttccttaactgtagagc

SEQ ID NO: 38895 - DNA, 20 bp, synthetic construct
  misc_feature 1..20: note = chemically synthesized
  source 1..20: mol_type = other DNA
tttccttaactgtagagcag

SEQ ID NO: 38896 - DNA, 20 bp, synthetic construct
  misc_feature 1..20: note = chemically synthesized
  source 1..20: mol_type = other DNA
taactgtagagcaggagtga

SEQ ID NO: 38897 - DNA, 20 bp, synthetic construct
  misc_feature 1..20: note = chemically synthesized
  source 1..20: mol_type = other DNA
tgatggaactgcctgtttca

SEQ ID NO: 38898 - DNA, 20 bp, synthetic construct
  misc_feature 1..20: note = chemically synthesized
  source 1..20: mol_type = other DNA
gatggaactgcctgtttcat

SEQ ID NO: 38899 - DNA, 20 bp, synthetic construct
  misc_feature 1..20: note = chemically synthesized
  source 1..20: mol_type = other DNA
ctgtttcataggactgttgt

SEQ ID NO: 38900 - DNA, 20 bp, synthetic construct
  misc_feature 1..20: note = chemically synthesized
  source 1..20: mol_type = other DNA
tgtttcataggactgttgtg

SEQ ID NO: 38901 - DNA, 20 bp, synthetic construct
  misc_feature 1..20: note = chemically synthesized
  source 1..20: mol_type = other DNA
ataggactgttgtgaggatg

SEQ ID NO: 38902 - DNA, 20 bp, synthetic construct
  misc_feature 1..20: note = chemically synthesized
  source 1..20: mol_type = other DNA
gactgttgtgaggatgaagt

SEQ ID NO: 38903 - DNA, 20 bp, synthetic construct
  misc_feature 1..20: note = chemically synthesized
  source 1..20: mol_type = other DNA
agtgagatacaccacattat

SEQ ID NO: 38904 - DNA, 20 bp, synthetic construct
  misc_feature 1..20: note = chemically synthesized
  source 1..20: mol_type = other DNA
ccacattataagcttgtgcc

SEQ ID NO: 38905 - DNA, 20 bp, synthetic construct
  misc_feature 1..20: note = chemically synthesized
  source 1..20: mol_type = other DNA
attataagcttgtgcctgga

SEQ ID NO: 38906 - DNA, 20 bp, synthetic construct
  misc_feature 1..20: note = chemically synthesized
  source 1..20: mol_type = other DNA
ttataagcttgtgcctggaa

SEQ ID NO: 38907 - DNA, 20 bp, synthetic construct
  misc_feature 1..20: note = chemically synthesized
  source 1..20: mol_type = other DNA
tgcctggaaaggataatgct

SEQ ID NO: 38908 - DNA, 20 bp, synthetic construct
  misc_feature 1..20: note = chemically synthesized
  source 1..20: mol_type = other DNA
ttattgcaataaaatgtaca

SEQ ID NO: 38909 - DNA, 20 bp, synthetic construct
  misc_feature 1..20: note = chemically synthesized
  source 1..20: mol_type = other DNA
caataaaatgtacacagcgt

SEQ ID NO: 38910 - DNA, 20 bp, synthetic construct
  misc_feature 1..20: note = chemically synthesized
  source 1..20: mol_type = other DNA
ataaaatgtacacagcgtaa

SEQ ID NO: 38911 - DNA, 20 bp, synthetic construct
  misc_feature 1..20: note = chemically synthesized
  source 1..20: mol_type = other DNA
tactattttaaccatttttg

SEQ ID NO: 38912 - DNA, 20 bp, synthetic construct
  misc_feature 1..20: note = chemically synthesized
  source 1..20: mol_type = other DNA
actattttaaccatttttgc

SEQ ID NO: 38913 - DNA, 20 bp, synthetic construct
  misc_feature 1..20: note = chemically synthesized
  source 1..20: mol_type = other DNA
ctattttaaccatttttgca

SEQ ID NO: 38914 - DNA, 20 bp, synthetic construct
  misc_feature 1..20: note = chemically synthesized
  source 1..20: mol_type = other DNA
catttttgcagggtaccacc

SEQ ID NO: 38915 - DNA, 20 bp, synthetic construct
  misc_feature 1..20: note = chemically synthesized
  source 1..20: mol_type = other DNA
ttttgcagggtaccaccaag

SEQ ID NO: 38916 - DNA, 20 bp, synthetic construct
  misc_feature 1..20: note = chemically synthesized
  source 1..20: mol_type = other DNA
gggtaccaccaagtggcatt

SEQ ID NO: 38917 - DNA, 20 bp, synthetic construct
  misc_feature 1..20: note = chemically synthesized
  source 1..20: mol_type = other DNA
agtggcatttagtacattca

SEQ ID NO: 38918 - DNA, 20 bp, synthetic construct
  misc_feature 1..20: note = chemically synthesized
  source 1..20: mol_type = other DNA
ggcatttagtacattcacag

SEQ ID NO: 38919 - DNA, 20 bp, synthetic construct
  misc_feature 1..20: note = chemically synthesized
  source 1..20: mol_type = other DNA
tgcaaccatcatcatatttc

SEQ ID NO: 38920 - DNA, 20 bp, synthetic construct
  misc_feature 1..20: note = chemically synthesized
  source 1..20: mol_type = other DNA
gaatattttcctcatcccca

SEQ ID NO: 38921 - DNA, 20 bp, synthetic construct
  misc_feature 1..20: note = chemically synthesized
  source 1..20: mol_type = other DNA
aatattttcctcatccccaa

SEQ ID NO: 38922 - DNA, 20 bp, synthetic construct
  misc_feature 1..20: note = chemically synthesized
  source 1..20: mol_type = other DNA
gaaacctcatgctcattaat

SEQ ID NO: 38923 - DNA, 20 bp, synthetic construct
  misc_feature 1..20: note = chemically synthesized
  source 1..20: mol_type = other DNA
acctcatgctcattaatcag

SEQ ID NO: 38924 - DNA, 20 bp, synthetic construct
  misc_feature 1..20: note = chemically synthesized
  source 1..20: mol_type = other DNA
gtagctctcctttaaaatat

SEQ ID NO: 38925 - DNA, 20 bp, synthetic construct
  misc_feature 1..20: note = chemically synthesized
  source 1..20: mol_type = other DNA
cctttaaaatattagttatg

SEQ ID NO: 38926 - DNA, 20 bp, synthetic construct
  misc_feature 1..20: note = chemically synthesized
  source 1..20: mol_type = other DNA
aatattagttatgaagatca

SEQ ID NO: 38927 - DNA, 20 bp, synthetic construct
  misc_feature 1..20: note = chemically synthesized
  source 1..20: mol_type = other DNA
aaaactcattatgtaatgtt

SEQ ID NO: 38928 - DNA, 20 bp, synthetic construct
  misc_feature 1..20: note = chemically synthesized
  source 1..20: mol_type = other DNA
gtaatgttgagtgaaaaaat

SEQ ID NO: 38929 - DNA, 20 bp, synthetic construct
  misc_feature 1..20: note = chemically synthesized
  source 1..20: mol_type = other DNA
taatgttgagtgaaaaaatc

SEQ ID NO: 38930 - DNA, 20 bp, synthetic construct
  misc_feature 1..20: note = chemically synthesized
  source 1..20: mol_type = other DNA
aatgttgagtgaaaaaatca

SEQ ID NO: 38931 - DNA, 20 bp, synthetic construct
  misc_feature 1..20: note = chemically synthesized
  source 1..20: mol_type = other DNA
attttgtgatatgatgtaat

SEQ ID NO: 38932 - DNA, 20 bp, synthetic construct
  misc_feature 1..20: note = chemically synthesized
  source 1..20: mol_type = other DNA
tgatatgatgtaattagtga

SEQ ID NO: 38933 - DNA, 20 bp, synthetic construct
  misc_feature 1..20: note = chemically synthesized
  source 1..20: mol_type = other DNA
tatgatgtaattagtgaaag

SEQ ID NO: 38934 - DNA, 20 bp, synthetic construct
  misc_feature 1..20: note = chemically synthesized
  source 1..20: mol_type = other DNA
tagtgaaagaagcatacaaa

SEQ ID NO: 38935 - DNA, 20 bp, synthetic construct
  misc_feature 1..20: note = chemically synthesized
  source 1..20: mol_type = other DNA
gtctgaaaatataaaaacaa

SEQ ID NO: 38936 - DNA, 20 bp, synthetic construct
  misc_feature 1..20: note = chemically synthesized
  source 1..20: mol_type = other DNA
acaatagcaattgcatttct

SEQ ID NO: 38937 - DNA, 20 bp, synthetic construct
  misc_feature 1..20: note = chemically synthesized
  source 1..20: mol_type = other DNA
catttaaacattattcttta

SEQ ID NO: 38938 - DNA, 20 bp, synthetic construct
  misc_feature 1..20: note = chemically synthesized
  source 1..20: mol_type = other DNA
attattctttatggttttaa

SEQ ID NO: 38939 - DNA, 20 bp, synthetic construct
  misc_feature 1..20: note = chemically synthesized
  source 1..20: mol_type = other DNA
tctttatggttttaaaagca

SEQ ID NO: 38940 - DNA, 20 bp, synthetic construct
  misc_feature 1..20: note = chemically synthesized
  source 1..20: mol_type = other DNA
tggttttaaaagcaaagaaa

SEQ ID NO: 38941 - DNA, 20 bp, synthetic construct
  misc_feature 1..20: note = chemically synthesized
  source 1..20: mol_type = other DNA
ggttttaaaagcaaagaaaa

SEQ ID NO: 38942 - DNA, 20 bp, synthetic construct
  misc_feature 1..20: note = chemically synthesized
  source 1..20: mol_type = other DNA
taaaagcaaagaaaaaggta

SEQ ID NO: 38943 - DNA, 20 bp, synthetic construct
  misc_feature 1..20: note = chemically synthesized
  source 1..20: mol_type = other DNA
agaaacaacaaccaaccgca

SEQ ID NO: 38944 - DNA, 20 bp, synthetic construct
  misc_feature 1..20: note = chemically synthesized
  source 1..20: mol_type = other DNA
aaccgcaaagcaccatgaca

SEQ ID NO: 38945 - DNA, 20 bp, synthetic construct
  misc_feature 1..20: note = chemically synthesized
  source 1..20: mol_type = other DNA
caaagcaccatgacaaagct

SEQ ID NO: 38946 - DNA, 20 bp, synthetic construct
  misc_feature 1..20: note = chemically synthesized
  source 1..20: mol_type = other DNA
aaagctcagattgttaaatc

SEQ ID NO: 38947 - DNA, 20 bp, synthetic construct
  misc_feature 1..20: note = chemically synthesized
  source 1..20: mol_type = other DNA
aagctcagattgttaaatcc

SEQ ID NO: 38948 - DNA, 20 bp, synthetic construct
  misc_feature 1..20: note = chemically synthesized
  source 1..20: mol_type = other DNA
gattgttaaatccaggtttt

SEQ ID NO: 38949 - DNA, 20 bp, synthetic construct
  misc_feature 1..20: note = chemically synthesized
  source 1..20: mol_type = other DNA
aaatccaggtttttggaaca

SEQ ID NO: 38950 - DNA, 20 bp, synthetic construct
  misc_feature 1..20: note = chemically synthesized
  source 1..20: mol_type = other DNA
tatatgacgtttacactctc

SEQ ID NO: 38951 - DNA, 20 bp, synthetic construct
  misc_feature 1..20: note = chemically synthesized
  source 1..20: mol_type = other DNA
atatgacgtttacactctcc

SEQ ID NO: 38952 - DNA, 20 bp, synthetic construct
  misc_feature 1..20: note = chemically synthesized
  source 1..20: mol_type = other DNA
tatgacgtttacactctcca

SEQ ID NO: 38953 - DNA, 20 bp, synthetic construct
  misc_feature 1..20: note = chemically synthesized
  source 1..20: mol_type = other DNA
cgtttacactctccagggtt

SEQ ID NO: 38954 - DNA, 20 bp, synthetic construct
  misc_feature 1..20: note = chemically synthesized
  source 1..20: mol_type = other DNA
tttacactctccagggttca

SEQ ID NO: 38955 - DNA, 20 bp, synthetic construct
  misc_feature 1..20: note = chemically synthesized
  source 1..20: mol_type = other DNA
tacactctccagggttcaga

SEQ ID NO: 38956 - DNA, 20 bp, synthetic construct
  misc_feature 1..20: note = chemically synthesized
  source 1..20: mol_type = other DNA
tctccagggttcagagagtc

SEQ ID NO: 38957 - DNA, 20 bp, synthetic construct
  misc_feature 1..20: note = chemically synthesized
  source 1..20: mol_type = other DNA
ccagggttcagagagtctgg

SEQ ID NO: 38958 - DNA, 20 bp, synthetic construct
  misc_feature 1..20: note = chemically synthesized
  source 1..20: mol_type = other DNA
ttcagagagtctggcagcat

SEQ ID NO: 38959 - DNA, 20 bp, synthetic construct
  misc_feature 1..20: note = chemically synthesized
  source 1..20: mol_type = other DNA
tcagagagtctggcagcatt

SEQ ID NO: 38960 - DNA, 20 bp, synthetic construct
  misc_feature 1..20: note = chemically synthesized
  source 1..20: mol_type = other DNA
agagagtctggcagcattgg

SEQ ID NO: 38961 - DNA, 20 bp, synthetic construct
  misc_feature 1..20: note = chemically synthesized
  source 1..20: mol_type = other DNA
gggagctgccttgtgttcta

SEQ ID NO: 38962 - DNA, 20 bp, synthetic construct
  misc_feature 1..20: note = chemically synthesized
  source 1..20: mol_type = other DNA
ccttgtgttctacagcctca

SEQ ID NO: 38963 - DNA, 20 bp, synthetic construct
  misc_feature 1..20: note = chemically synthesized
  source 1..20: mol_type = other DNA
gtgttctacagcctcacgga

SEQ ID NO: 38964 - DNA, 20 bp, synthetic construct
  misc_feature 1..20: note = chemically synthesized
  source 1..20: mol_type = other DNA
tctacagcctcacggacaga

SEQ ID NO: 38965 - DNA, 20 bp, synthetic construct
  misc_feature 1..20: note = chemically synthesized
  source 1..20: mol_type = other DNA
ctacagcctcacggacagac

SEQ ID NO: 38966 - DNA, 20 bp, synthetic construct
  misc_feature 1..20: note = chemically synthesized
  source 1..20: mol_type = other DNA
acagcctcacggacagacag

SEQ ID NO: 38967 - DNA, 20 bp, synthetic construct
  misc_feature 1..20: note = chemically synthesized
  source 1..20: mol_type = other DNA
cagcctcacggacagacagg

SEQ ID NO: 38968 - DNA, 20 bp, synthetic construct
  misc_feature 1..20: note = chemically synthesized
  source 1..20: mol_type = other DNA
tcaccactgctctgttcttc

SEQ ID NO: 38969 - DNA, 20 bp, synthetic construct
  misc_feature 1..20: note = chemically synthesized
  source 1..20: mol_type = other DNA
accactgctctgttcttctg

SEQ ID NO: 38970 - DNA, 20 bp, synthetic construct
  misc_feature 1..20: note = chemically synthesized
  source 1..20: mol_type = other DNA
gtttccttgtgaacatgttg

SEQ ID NO: 38971 - DNA, 20 bp, synthetic construct
  misc_feature 1..20: note = chemically synthesized
  source 1..20: mol_type = other DNA
ttgtgaacatgttgtggacg

SEQ ID NO: 38972 - DNA, 20 bp, synthetic construct
  misc_feature 1..20: note = chemically synthesized
  source 1..20: mol_type = other DNA
ttctttcatctttttaaaca

SEQ ID NO: 38973 - DNA, 20 bp, synthetic construct
  misc_feature 1..20: note = chemically synthesized
  source 1..20: mol_type = other DNA
tctttcatctttttaaacac

SEQ ID NO: 38974 - DNA, 20 bp, synthetic construct
  misc_feature 1..20: note = chemically synthesized
  source 1..20: mol_type = other DNA
tttttaaacacaggtacctt

SEQ ID NO: 38975 - DNA, 20 bp, synthetic construct
  misc_feature 1..20: note = chemically synthesized
  source 1..20: mol_type = other DNA
ttttaaacacaggtaccttt

SEQ ID NO: 38976 - DNA, 20 bp, synthetic construct
  misc_feature 1..20: note = chemically synthesized
  source 1..20: mol_type = other DNA
tttaaacacaggtacctttg

SEQ ID NO: 38977 - DNA, 20 bp, synthetic construct
  misc_feature 1..20: note = chemically synthesized
  source 1..20: mol_type = other DNA
aacacaggtacctttggggc

SEQ ID NO: 38978 - DNA, 20 bp, synthetic construct
  misc_feature 1..20: note = chemically synthesized
  source 1..20: mol_type = other DNA
cctttggggctggctttctc

SEQ ID NO: 38979 - DNA, 20 bp, synthetic construct
  misc_feature 1..20: note = chemically synthesized
  source 1..20: mol_type = other DNA
ctttggggctggctttctca

SEQ ID NO: 38980 - DNA, 20 bp, synthetic construct
  misc_feature 1..20: note = chemically synthesized
  source 1..20: mol_type = other DNA
tggggctggctttctcaagg

SEQ ID NO: 38981 - DNA, 20 bp, synthetic construct
  misc_feature 1..20: note = chemically synthesized
  source 1..20: mol_type = other DNA
ctggctttctcaaggaagcc

SEQ ID NO: 38982 - DNA, 20 bp, synthetic construct
  misc_feature 1..20: note = chemically synthesized
  source 1..20: mol_type = other DNA
aagcccagctccctgtgatt

SEQ ID NO: 38983 - DNA, 20 bp, synthetic construct
  misc_feature 1..20: note = chemically synthesized
  source 1..20: mol_type = other DNA
gctccctgtgattgagaatg

SEQ ID NO: 38984 - DNA, 20 bp, synthetic construct
  misc_feature 1..20: note = chemically synthesized
  source 1..20: mol_type = other DNA
atgaagtgtgcaatcgctat

SEQ ID NO: 38985 - DNA, 20 bp, synthetic construct
  misc_feature 1..20: note = chemically synthesized
  source 1..20: mol_type = other DNA
aatcgctatgagtttctgaa

SEQ ID NO: 38986 - DNA, 20 bp, synthetic construct
  misc_feature 1..20: note = chemically synthesized
  source 1..20: mol_type = other DNA
cgctatgagtttctgaatgg

SEQ ID NO: 38987 - DNA, 20 bp, synthetic construct
  misc_feature 1..20: note = chemically synthesized
  source 1..20: mol_type = other DNA
ctatgagtttctgaatggaa

SEQ ID NO: 38988 - DNA, 20 bp, synthetic construct
  misc_feature 1..20: note = chemically synthesized
  source 1..20: mol_type = other DNA
atggaagagtcaaatccact

SEQ ID NO: 38989 - DNA, 20 bp, synthetic construct
  misc_feature 1..20: note = chemically synthesized
  source 1..20: mol_type = other DNA
aaatccactgagctctgtgc

SEQ ID NO: 38990 - DNA, 20 bp, synthetic construct
  misc_feature 1..20: note = chemically synthesized
  source 1..20: mol_type = other DNA
aatccactgagctctgtgct

SEQ ID NO: 38991 - DNA, 20 bp, synthetic construct
  misc_feature 1..20: note = chemically synthesized
  source 1..20: mol_type = other DNA
tgagctctgtgctgggcatt

SEQ ID NO: 38992 - DNA, 20 bp, synthetic construct
  misc_feature 1..20: note = chemically synthesized
  source 1..20: mol_type = other DNA
ctctgtgctgggcatttggc

SEQ ID NO: 38993 - DNA, 20 bp, synthetic construct
  misc_feature 1..20: note = chemically synthesized
  source 1..20: mol_type = other DNA
ctgtgctgggcatttggctg

SEQ ID NO: 38994 - DNA, 20 bp, synthetic construct
  misc_feature 1..20: note = chemically synthesized
  source 1..20: mol_type = other DNA
tgtgctgggcatttggctgg

SEQ ID NO: 38995 - DNA, 20 bp, synthetic construct
  misc_feature 1..20: note = chemically synthesized
  source 1..20: mol_type = other DNA
catttggctggaggcattga

SEQ ID NO: 38996 - DNA, 20 bp, synthetic construct
  misc_feature 1..20: note = chemically synthesized
  source 1..20: mol_type = other DNA
ctggaggcattgacagttgc

SEQ ID NO: 38997 - DNA, 20 bp, synthetic construct
  misc_feature 1..20: note = chemically synthesized
  source 1..20: mol_type = other DNA
tggaggcattgacagttgca

SEQ ID NO: 38998 - DNA, 20 bp, synthetic construct
  misc_feature 1..20: note = chemically synthesized
  source 1..20: mol_type = other DNA
ggcattgacagttgcaaggt

SEQ ID NO: 38999 - DNA, 20 bp, synthetic construct
  misc_feature 1..20: note = chemically synthesized
  source 1..20: mol_type = other DNA
tgacagttgcaaggtaagaa

SEQ ID NO: 39000 - DNA, 20 bp, synthetic construct
  misc_feature 1..20: note = chemically synthesized
  source 1..20: mol_type = other DNA
ttgcaaggtaagaaaagatc

SEQ ID NO: 39001 - DNA, 20 bp, synthetic construct
  misc_feature 1..20: note = chemically synthesized
  source 1..20: mol_type = other DNA
gcaaggtaagaaaagatcaa

SEQ ID NO: 39002 - DNA, 20 bp, synthetic construct
  misc_feature 1..20: note = chemically synthesized
  source 1..20: mol_type = other DNA
aagaaaagatcaagagacca

SEQ ID NO: 39003 - DNA, 20 bp, synthetic construct
  misc_feature 1..20: note = chemically synthesized
  source 1..20: mol_type = other DNA
aaagatcaagagaccaaagt

SEQ ID NO: 39004 - DNA, 20 bp, synthetic construct
  misc_feature 1..20: note = chemically synthesized
  source 1..20: mol_type = other DNA
agtcttgtgctctcctgtct

SEQ ID NO: 39005 - DNA, 20 bp, synthetic construct
  misc_feature 1..20: note = chemically synthesized
  source 1..20: mol_type = other DNA
gtgctctcctgtctcagtct

SEQ ID NO: 39006 - DNA, 20 bp, synthetic construct
  misc_feature 1..20: note = chemically synthesized
  source 1..20: mol_type = other DNA
ctgtctcagtctcagtccct

SEQ ID NO: 39007 - DNA, 20 bp, synthetic construct
  misc_feature 1..20: note = chemically synthesized
  source 1..20: mol_type = other DNA
agtctcagtcccttagactt

SEQ ID NO: 39008 - DNA, 20 bp, synthetic construct
  misc_feature 1..20: note = chemically synthesized
  source 1..20: mol_type = other DNA
tcccttagacttgagtccca

SEQ ID NO: 39009 - DNA, 20 bp, synthetic construct
  misc_feature 1..20: note = chemically synthesized
  source 1..20: mol_type = other DNA
cttagacttgagtcccaaag

SEQ ID NO: 39010 - DNA, 20 bp, synthetic construct
  misc_feature 1..20: note = chemically synthesized
  source 1..20: mol_type = other DNA
agtcccaaagtagcgaattc

SEQ ID NO: 39011 - DNA, 20 bp, synthetic construct
  misc_feature 1..20: note = chemically synthesized
  source 1..20: mol_type = other DNA
cccaaagtagcgaattcaag

SEQ ID NO: 39012 - DNA, 20 bp, synthetic construct
  misc_feature 1..20: note = chemically synthesized
  source 1..20: mol_type = other DNA
ccaaagtagcgaattcaagt

SEQ ID NO: 39013 - DNA, 20 bp, synthetic construct
  misc_feature 1..20: note = chemically synthesized
  source 1..20: mol_type = other DNA
ttcaagtaggatttaatcaa

SEQ ID NO: 39014 - DNA, 20 bp, synthetic construct
  misc_feature 1..20: note = chemically synthesized
  source 1..20: mol_type = other DNA
aagtaggatttaatcaatgg

SEQ ID NO: 39015 - DNA, 20 bp, synthetic construct
  misc_feature 1..20: note = chemically synthesized
  source 1..20: mol_type = other DNA
atttaatcaatggaagaccc

SEQ ID NO: 39016 - DNA, 20 bp, synthetic construct
  misc_feature 1..20: note = chemically synthesized
  source 1..20: mol_type = other DNA
tcaatggaagaccccagtct

SEQ ID NO: 39017 - DNA, 20 bp, synthetic construct
  misc_feature 1..20: note = chemically synthesized
  source 1..20: mol_type = other DNA
accccagtctaagtgttgct

SEQ ID NO: 39018 - DNA, 20 bp, synthetic construct
  misc_feature 1..20: note = chemically synthesized
  source 1..20: mol_type = other DNA
agtgttgctcagaaactccc

SEQ ID NO: 39019 - DNA, 20 bp, synthetic construct
  misc_feature 1..20: note = chemically synthesized
  source 1..20: mol_type = other DNA
atctgtcccaaatgtatatt

SEQ ID NO: 39020 - DNA, 20 bp, synthetic construct
  misc_feature 1..20: note = chemically synthesized
  source 1..20: mol_type = other DNA
aatgtatattcagatcatcc

SEQ ID NO: 39021 - DNA, 20 bp, synthetic construct
  misc_feature 1..20: note = chemically synthesized
  source 1..20: mol_type = other DNA
atgtatattcagatcatcca

SEQ ID NO: 39022 - DNA, 20 bp, synthetic construct
  misc_feature 1..20: note = chemically synthesized
  source 1..20: mol_type = other DNA
tgtatattcagatcatccaa

SEQ ID NO: 39023 - DNA, 20 bp, synthetic construct
  misc_feature 1..20: note = chemically synthesized
  source 1..20: mol_type = other DNA
gtatattcagatcatccaag

SEQ ID NO: 39024 - DNA, 20 bp, synthetic construct
  misc_feature 1..20: note = chemically synthesized
  source 1..20: mol_type = other DNA
gatcatccaaggggacttct

SEQ ID NO: 39025 - DNA, 20 bp, synthetic construct
  misc_feature 1..20: note = chemically synthesized
  source 1..20: mol_type = other DNA
atcatccaaggggacttctt

SEQ ID NO: 39026 - DNA, 20 bp, synthetic construct
  misc_feature 1..20: note = chemically synthesized
  source 1..20: mol_type = other DNA
tcatccaaggggacttcttg

SEQ ID NO: 39027 - DNA, 20 bp, synthetic construct
  misc_feature 1..20: note = chemically synthesized
  source 1..20: mol_type = other DNA
aaggggacttcttggggctt

SEQ ID NO: 39028 - DNA, 20 bp, synthetic construct
  misc_feature 1..20: note = chemically synthesized
  source 1..20: mol_type = other DNA
acttcttggggcttgagttc

SEQ ID NO: 39029 - DNA, 20 bp, synthetic construct
  misc_feature 1..20: note = chemically synthesized
  source 1..20: mol_type = other DNA
ttggggcttgagttccagat

SEQ ID NO: 39030 - DNA, 20 bp, synthetic construct
  misc_feature 1..20: note = chemically synthesized
  source 1..20: mol_type = other DNA
gggcttgagttccagatcag

SEQ ID NO: 39031 - DNA, 20 bp, synthetic construct
  misc_feature 1..20: note = chemically synthesized
  source 1..20: mol_type = other DNA
ttgagttccagatcagcagc

SEQ ID NO: 39032 - DNA, 20 bp, synthetic construct
  misc_feature 1..20: note = chemically synthesized
  source 1..20: mol_type = other DNA
tgagttccagatcagcagca

SEQ ID NO: 39033 - DNA, 20 bp, synthetic construct
  misc_feature 1..20: note = chemically synthesized
  source 1..20: mol_type = other DNA
gagttccagatcagcagcaa

SEQ ID NO: 39034 - DNA, 20 bp, synthetic construct
  misc_feature 1..20: note = chemically synthesized
  source 1..20: mol_type = other DNA
gttccagatcagcagcaagg

SEQ ID NO: 39035 - DNA, 20 bp, synthetic construct
  misc_feature 1..20: note = chemically synthesized
  source 1..20: mol_type = other DNA
atcagcagcaagggagccat

SEQ ID NO: 39036 - DNA, 20 bp, synthetic construct
  misc_feature 1..20: note = chemically synthesized
  source 1..20: mol_type = other DNA
cataagtgccataactacct

SEQ ID NO: 39037 - DNA, 20 bp, synthetic construct
  misc_feature 1..20: note = chemically synthesized
  source 1..20: mol_type = other DNA
cctcagaccactcaccctcc

SEQ ID NO: 39038 - DNA, 20 bp, synthetic construct
  misc_feature 1..20: note = chemically synthesized
  source 1..20: mol_type = other DNA
ctcagaccactcaccctcct

SEQ ID NO: 39039 - DNA, 20 bp, synthetic construct
  misc_feature 1..20: note = chemically synthesized
  source 1..20: mol_type = other DNA
tcagaccactcaccctcctg

SEQ ID NO: 39040 - DNA, 20 bp, synthetic construct
  misc_feature 1..20: note = chemically synthesized
  source 1..20: mol_type = other DNA
ctcaccctcctggggtgtcc

SEQ ID NO: 39041 - DNA, 20 bp, synthetic construct
  misc_feature 1..20: note = chemically synthesized
  source 1..20: mol_type = other DNA
accctcctggggtgtcccgg

SEQ ID NO: 39042 - DNA, 20 bp, synthetic construct
  misc_feature 1..20: note = chemically synthesized
  source 1..20: mol_type = other DNA
tcctggggtgtcccggtggc

SEQ ID NO: 39043 - DNA, 20 bp, synthetic construct
  misc_feature 1..20: note = chemically synthesized
  source 1..20: mol_type = other DNA
cctggggtgtcccggtggcc

SEQ ID NO: 39044 - DNA, 20 bp, synthetic construct
  misc_feature 1..20: note = chemically synthesized
  source 1..20: mol_type = other DNA
ctggggtgtcccggtggcca

SEQ ID NO: 39045 - DNA, 20 bp, synthetic construct
  misc_feature 1..20: note = chemically synthesized
  source 1..20: mol_type = other DNA
gtcccggtggccagggacta

SEQ ID NO: 39046 - DNA, 20 bp, synthetic construct
  misc_feature 1..20: note = chemically synthesized
  source 1..20: mol_type = other DNA
ccggtggccagggactaaag

SEQ ID NO: 39047 - DNA, 20 bp, synthetic construct
  misc_feature 1..20: note = chemically synthesized
  source 1..20: mol_type = other DNA
gactaaagtggtgatttttc

SEQ ID NO: 39048 - DNA, 20 bp, synthetic construct
  misc_feature 1..20: note = chemically synthesized
  source 1..20: mol_type = other DNA
taaagtggtgatttttctgg

SEQ ID NO: 39049 - DNA, 20 bp, synthetic construct
  misc_feature 1..20: note = chemically synthesized
  source 1..20: mol_type = other DNA
aaagtggtgatttttctggt

SEQ ID NO: 39050 - DNA, 20 bp, synthetic construct
  misc_feature 1..20: note = chemically synthesized
  source 1..20: mol_type = other DNA
aagtggtgatttttctggta

SEQ ID NO: 39051 - DNA, 20 bp, synthetic construct
  misc_feature 1..20: note = chemically synthesized
  source 1..20: mol_type = other DNA
tggtgatttttctggtaggg

SEQ ID NO: 39052 - DNA, 20 bp, synthetic construct
  misc_feature 1..20: note = chemically synthesized
  source 1..20: mol_type = other DNA
ggtgatttttctggtaggga

SEQ ID NO: 39053 - DNA, 20 bp, synthetic construct
  misc_feature 1..20: note = chemically synthesized
  source 1..20: mol_type = other DNA
tgatttttctggtagggaag

SEQ ID NO: 39054 - DNA, 20 bp, synthetic construct
  misc_feature 1..20: note = chemically synthesized
  source 1..20: mol_type = other DNA
gatttttctggtagggaagg

SEQ ID NO: 39055 - DNA, 20 bp, synthetic construct
  misc_feature 1..20: note = chemically synthesized
  source 1..20: mol_type = other DNA
ttttctggtagggaaggagg

SEQ ID NO: 39056 - DNA, 20 bp, synthetic construct
  misc_feature 1..20: note = chemically synthesized
  source 1..20: mol_type = other DNA
ttctggtagggaaggaggta

SEQ ID NO: 39057 - DNA, 20 bp, synthetic construct
  misc_feature 1..20: note = chemically synthesized
  source 1..20: mol_type = other DNA
tctggtagggaaggaggtag

SEQ ID NO: 39058 - DNA, 20 bp, synthetic construct
  misc_feature 1..20: note = chemically synthesized
  source 1..20: mol_type = other DNA
ctggtagggaaggaggtaga

SEQ ID NO: 39059 - DNA, 20 bp, synthetic construct
  misc_feature 1..20: note = chemically synthesized
  source 1..20: mol_type = other DNA
agggaaggaggtagagggta

SEQ ID NO: 39060 - DNA, 20 bp, synthetic construct
  misc_feature 1..20: note = chemically synthesized
  source 1..20: mol_type = other DNA
gggaaggaggtagagggtac

SEQ ID NO: 39061 - DNA, 20 bp, synthetic construct
  misc_feature 1..20: note = chemically synthesized
  source 1..20: mol_type = other DNA
aggaggtagagggtacagga

SEQ ID NO: 39062 - DNA, 20 bp, synthetic construct
  misc_feature 1..20: note = chemically synthesized
  source 1..20: mol_type = other DNA
gaggtagagggtacaggaca

SEQ ID NO: 39063 - DNA, 20 bp, synthetic construct
  misc_feature 1..20: note = chemically synthesized
  source 1..20: mol_type = other DNA
actaactgcacacaatatct

SEQ ID NO: 39064 - DNA, 20 bp, synthetic construct
  misc_feature 1..20: note = chemically synthesized
  source 1..20: mol_type = other DNA
ctgcacacaatatctgagac

SEQ ID NO: 39065 - DNA, 20 bp, synthetic construct
  misc_feature 1..20: note = chemically synthesized
  source 1..20: mol_type = other DNA
gcacacaatatctgagactg

SEQ ID NO: 39066 - DNA, 20 bp, synthetic construct
  misc_feature 1..20: note = chemically synthesized
  source 1..20: mol_type = other DNA
caatatctgagactggagct

SEQ ID NO: 39067 - DNA, 20 bp, synthetic construct
  misc_feature 1..20: note = chemically synthesized
  source 1..20: mol_type = other DNA
gctcagatattgctgatgat

SEQ ID NO: 39068 - DNA, 20 bp, synthetic construct
  misc_feature 1..20: note = chemically synthesized
  source 1..20: mol_type = other DNA
tcagatattgctgatgatca

SEQ ID NO: 39069 - DNA, 20 bp, synthetic construct
  misc_feature 1..20: note = chemically synthesized
  source 1..20: mol_type = other DNA
atattgctgatgatcagagt

SEQ ID NO: 39070 - DNA, 20 bp, synthetic construct
  misc_feature 1..20: note = chemically synthesized
  source 1..20: mol_type = other DNA
ctccccaattgatttacaac

SEQ ID NO: 39071 - DNA, 20 bp, synthetic construct
  misc_feature 1..20: note = chemically synthesized
  source 1..20: mol_type = other DNA
tccccaattgatttacaact

SEQ ID NO: 39072 - DNA, 20 bp, synthetic construct
  misc_feature 1..20: note = chemically synthesized
  source 1..20: mol_type = other DNA
ccccaattgatttacaactg

SEQ ID NO: 39073 - DNA, 20 bp, synthetic construct
  misc_feature 1..20: note = chemically synthesized
  source 1..20: mol_type = other DNA
attgatttacaactggggct

SEQ ID NO: 39074 - DNA, 20 bp, synthetic construct
  misc_feature 1..20: note = chemically synthesized
  source 1..20: mol_type = other DNA
ggcttggatactgttttaaa

SEQ ID NO: 39075 - DNA, 20 bp, synthetic construct
  misc_feature 1..20: note = chemically synthesized
  source 1..20: mol_type = other DNA
gcttggatactgttttaaac

SEQ ID NO: 39076 - DNA, 20 bp, synthetic construct
  misc_feature 1..20: note = chemically synthesized
  source 1..20: mol_type = other DNA
ttggatactgttttaaacgg

SEQ ID NO: 39077 - DNA, 20 bp, synthetic construct
  misc_feature 1..20: note = chemically synthesized
  source 1..20: mol_type = other DNA
tggatactgttttaaacggg

SEQ ID NO: 39078 - DNA, 20 bp, synthetic construct
  misc_feature 1..20: note = chemically synthesized
  source 1..20: mol_type = other DNA
gatactgttttaaacgggag

SEQ ID NO: 39079 - DNA, 20 bp, synthetic construct
  misc_feature 1..20: note = chemically synthesized
  source 1..20: mol_type = other DNA
aaccactgacgtgactacac

SEQ ID NO: 39080 - DNA, 20 bp, synthetic construct
  misc_feature 1..20: note = chemically synthesized
  source 1..20: mol_type = other DNA
ccactgacgtgactacacta

SEQ ID NO: 39081 - DNA, 20 bp, synthetic construct
  misc_feature 1..20: note = chemically synthesized
  source 1..20: mol_type = other DNA
tgacgtgactacactagaga

SEQ ID NO: 39082 - DNA, 20 bp, synthetic construct
  misc_feature 1..20: note = chemically synthesized
  source 1..20: mol_type = other DNA
ccactcttgctttacttcat

SEQ ID NO: 39083 - DNA, 20 bp, synthetic construct
  misc_feature 1..20: note = chemically synthesized
  source 1..20: mol_type = other DNA
cttcatgagaacgaaaatgt

SEQ ID NO: 39084 - DNA, 20 bp, synthetic construct
  misc_feature 1..20: note = chemically synthesized
  source 1..20: mol_type = other DNA
ttgcaccatgaattcatttg

SEQ ID NO: 39085 - DNA, 20 bp, synthetic construct
  misc_feature 1..20: note = chemically synthesized
  source 1..20: mol_type = other DNA
accatgaattcatttgcgga

SEQ ID NO: 39086 - DNA, 20 bp, synthetic construct
  misc_feature 1..20: note = chemically synthesized
  source 1..20: mol_type = other DNA
ttattttattttattttatt

SEQ ID NO: 39087 - DNA, 20 bp, synthetic construct
  misc_feature 1..20: note = chemically synthesized
  source 1..20: mol_type = other DNA
ttttattgagactctcaccc

SEQ ID NO: 39088 - DNA, 20 bp, synthetic construct
  misc_feature 1..20: note = chemically synthesized
  source 1..20: mol_type = other DNA
tgagactctcaccccggttg

SEQ ID NO: 39089 - DNA, 20 bp, synthetic construct
  misc_feature 1..20: note = chemically synthesized
  source 1..20: mol_type = other DNA
gaagtgcactgacgtgattt

SEQ ID NO: 39090 - DNA, 20 bp, synthetic construct
  misc_feature 1..20: note = chemically synthesized
  source 1..20: mol_type = other DNA
tcactgcaacttccacctcc

SEQ ID NO: 39091 - DNA, 20 bp, synthetic construct
  misc_feature 1..20: note = chemically synthesized
  source 1..20: mol_type = other DNA
cactgcaacttccacctcct

SEQ ID NO: 39092 - DNA, 20 bp, synthetic construct
  misc_feature 1..20: note = chemically synthesized
  source 1..20: mol_type = other DNA
aacttccacctcctgggttc

SEQ ID NO: 39093 - DNA, 20 bp, synthetic construct
  misc_feature 1..20: note = chemically synthesized
  source 1..20: mol_type = other DNA
ctgggttcaagtgaatactc

SEQ ID NO: 39094 - DNA, 20 bp, synthetic construct
  misc_feature 1..20: note = chemically synthesized
  source 1..20: mol_type = other DNA
agtgaatactccagcctccc

SEQ ID NO: 39095 - DNA, 20 bp, synthetic construct
  misc_feature 1..20: note = chemically synthesized
  source 1..20: mol_type = other DNA
gaatactccagcctccctag

SEQ ID NO: 39096 - DNA, 20 bp, synthetic construct
  misc_feature 1..20: note = chemically synthesized
  source 1..20: mol_type = other DNA
actccagcctccctagtagc

SEQ ID NO: 39097 - DNA, 20 bp, synthetic construct
  misc_feature 1..20: note = chemically synthesized
  source 1..20: mol_type = other DNA
ctccagcctccctagtagct

SEQ ID NO: 39098 - DNA, 20 bp, synthetic construct
  misc_feature 1..20: note = chemically synthesized
  source 1..20: mol_type = other DNA
ctccctagtagctgggatta

SEQ ID NO: 39099 - DNA, 20 bp, synthetic construct
  misc_feature 1..20: note = chemically synthesized
  source 1..20: mol_type = other DNA
tccctagtagctgggattac

SEQ ID NO: 39100 - DNA, 20 bp, synthetic construct
  misc_feature 1..20: note = chemically synthesized
  source 1..20: mol_type = other DNA
caggtgcccaccaccacgcc

SEQ ID NO: 39101 - DNA, 20 bp, synthetic construct
  misc_feature 1..20: note = chemically synthesized
  source 1..20: mol_type = other DNA
ctggctaatttttgtatttt

SEQ ID NO: 39102 - DNA, 20 bp, synthetic construct
  misc_feature 1..20: note = chemically synthesized
  source 1..20: mol_type = other DNA
gctaatttttgtatttttag

SEQ ID NO: 39103 - DNA, 20 bp, synthetic construct
  misc_feature 1..20: note = chemically synthesized
  source 1..20: mol_type = other DNA
taatttttgtatttttagta

SEQ ID NO: 39104 - DNA, 20 bp, synthetic construct
  misc_feature 1..20: note = chemically synthesized
  source 1..20: mol_type = other DNA
ttttgtatttttagtagaga

SEQ ID NO: 39105 - DNA, 20 bp, synthetic construct
  misc_feature 1..20: note = chemically synthesized
  source 1..20: mol_type = other DNA
tttgtatttttagtagagat

SEQ ID NO: 39106 - DNA, 20 bp, synthetic construct
  misc_feature 1..20: note = chemically synthesized
  source 1..20: mol_type = other DNA
ttgtatttttagtagagatg

SEQ ID NO: 39107 - DNA, 20 bp, synthetic construct
  misc_feature 1..20: note = chemically synthesized
  source 1..20: mol_type = other DNA
gagatggggtttcaccacat

SEQ ID NO: 39108 - DNA, 20 bp, synthetic construct
  misc_feature 1..20: note = chemically synthesized
  source 1..20: mol_type = other DNA
ggggtttcaccacattggcc

SEQ ID NO: 39109 - DNA, 20 bp, synthetic construct
  misc_feature 1..20: note = chemically synthesized
  source 1..20: mol_type = other DNA
tttcaccacattggcctggc

SEQ ID NO: 39110 - DNA, 20 bp, synthetic construct
  misc_feature 1..20: note = chemically synthesized
  source 1..20: mol_type = other DNA
accttgtgatccacctgtct

SEQ ID NO: 39111 - DNA, 20 bp, synthetic construct
  misc_feature 1..20: note = chemically synthesized
  source 1..20: mol_type = other DNA
ccacctgtcttggcctccca

SEQ ID NO: 39112 - DNA, 20 bp, synthetic construct
  misc_feature 1..20: note = chemically synthesized
  source 1..20: mol_type = other DNA
gtcttggcctcccaaagtgc

SEQ ID NO: 39113 - DNA, 20 bp, synthetic construct
  misc_feature 1..20: note = chemically synthesized
  source 1..20: mol_type = other DNA
tcttggcctcccaaagtgct

SEQ ID NO: 39114 - DNA, 20 bp, synthetic construct
  misc_feature 1..20: note = chemically synthesized
  source 1..20: mol_type = other DNA
ctcccaaagtgctgggatta

SEQ ID NO: 39115 - DNA, 20 bp, synthetic construct
  misc_feature 1..20: note = chemically synthesized
  source 1..20: mol_type = other DNA
cccaaagtgctgggattaca

SEQ ID NO: 39116 - DNA, 20 bp, synthetic construct
  misc_feature 1..20: note = chemically synthesized
  source 1..20: mol_type = other DNA
agtgctgggattacagagtt

SEQ ID NO: 39117 - DNA, 20 bp, synthetic construct
  misc_feature 1..20: note = chemically synthesized
  source 1..20: mol_type = other DNA
aaatatttatttatttattt

SEQ ID NO: 39118 - DNA, 20 bp, synthetic construct
  misc_feature 1..20: note = chemically synthesized
  source 1..20: mol_type = other DNA
tttatttaagccacaactac

SEQ ID NO: 39119 - DNA, 20 bp, synthetic construct
  misc_feature 1..20: note = chemically synthesized
  source 1..20: mol_type = other DNA
ttaagccacaactactagaa

SEQ ID NO: 39120 - DNA, 20 bp, synthetic construct
  misc_feature 1..20: note = chemically synthesized
  source 1..20: mol_type = other DNA
taagccacaactactagaat

SEQ ID NO: 39121 - DNA, 20 bp, synthetic construct
  misc_feature 1..20: note = chemically synthesized
  source 1..20: mol_type = other DNA
gccacaactactagaatagg

SEQ ID NO: 39122 - DNA, 20 bp, synthetic construct
  misc_feature 1..20: note = chemically synthesized
  source 1..20: mol_type = other DNA
ccacaactactagaatagga

SEQ ID NO: 39123 - DNA, 20 bp, synthetic construct
  misc_feature 1..20: note = chemically synthesized
  source 1..20: mol_type = other DNA
gatattttattaattttatt

SEQ ID NO: 39124 - DNA, 20 bp, synthetic construct
  misc_feature 1..20: note = chemically synthesized
  source 1..20: mol_type = other DNA
attatttttttttctttcct

SEQ ID NO: 39125 - DNA, 20 bp, synthetic construct
  misc_feature 1..20: note = chemically synthesized
  source 1..20: mol_type = other DNA
gacattcttgctctgtcacc

SEQ ID NO: 39126 - DNA, 20 bp, synthetic construct
  misc_feature 1..20: note = chemically synthesized
  source 1..20: mol_type = other DNA
acattcttgctctgtcaccc

SEQ ID NO: 39127 - DNA, 20 bp, synthetic construct
  misc_feature 1..20: note = chemically synthesized
  source 1..20: mol_type = other DNA
tcttgctctgtcacccaggc

SEQ ID NO: 39128 - DNA, 20 bp, synthetic construct
  misc_feature 1..20: note = chemically synthesized
  source 1..20: mol_type = other DNA
ttgctctgtcacccaggctg

SEQ ID NO: 39129 - DNA, 20 bp, synthetic construct
  misc_feature 1..20: note = chemically synthesized
  source 1..20: mol_type = other DNA
ctgtcacccaggctggagtg

SEQ ID NO: 39130 - DNA, 20 bp, synthetic construct
  misc_feature 1..20: note = chemically synthesized
  source 1..20: mol_type = other DNA
tcacccaggctggagtgcag

SEQ ID NO: 39131 - DNA, 20 bp, synthetic construct
  misc_feature 1..20: note = chemically synthesized
  source 1..20: mol_type = other DNA
ggagtgcagtggcacattct

SEQ ID NO: 39132 - DNA, 20 bp, synthetic construct
  misc_feature 1..20: note = chemically synthesized
  source 1..20: mol_type = other DNA
aacctccatctcctgtgttc

SEQ ID NO: 39133 - DNA, 20 bp, synthetic construct
  misc_feature 1..20: note = chemically synthesized
  source 1..20: mol_type = other DNA
ctcctgtgttcaagcaattc

SEQ ID NO: 39134 - DNA, 20 bp, synthetic construct
  misc_feature 1..20: note = chemically synthesized
  source 1..20: mol_type = other DNA
ttcaagcaattctagtgcct

SEQ ID NO: 39135 - DNA, 20 bp, synthetic construct
  misc_feature 1..20: note = chemically synthesized
  source 1..20: mol_type = other DNA
ttctagtgcctcagcctact

SEQ ID NO: 39136 - DNA, 20 bp, synthetic construct
  misc_feature 1..20: note = chemically synthesized
  source 1..20: mol_type = other DNA
tagtgcctcagcctacttag

SEQ ID NO: 39137 - DNA, 20 bp, synthetic construct
  misc_feature 1..20: note = chemically synthesized
  source 1..20: mol_type = other DNA
gcctcagcctacttagtagc

SEQ ID NO: 39138 - DNA, 20 bp, synthetic construct
  misc_feature 1..20: note = chemically synthesized
  source 1..20: mol_type = other DNA
cctcagcctacttagtagct

SEQ ID NO: 39139 - DNA, 20 bp, synthetic construct
  misc_feature 1..20: note = chemically synthesized
  source 1..20: mol_type = other DNA
tacttagtagctgggatgac

SEQ ID NO: 39140 - DNA, 20 bp, synthetic construct
  misc_feature 1..20: note = chemically synthesized
  source 1..20: mol_type = other DNA
ctggcatgtgcctccacacc

SEQ ID NO: 39141 - DNA, 20 bp, synthetic construct
  misc_feature 1..20: note = chemically synthesized
  source 1..20: mol_type = other DNA
gctaatttttgtattttttg

SEQ ID NO: 39142 - DNA, 20 bp, synthetic construct
  misc_feature 1..20: note = chemically synthesized
  source 1..20: mol_type = other DNA
taatttttgtattttttgta

SEQ ID NO: 39143 - DNA, 20 bp, synthetic construct
  misc_feature 1..20: note = chemically synthesized
  source 1..20: mol_type = other DNA
ttttgtattttttgtagaga

SEQ ID NO: 39144 - DNA, 20 bp, synthetic construct
  misc_feature 1..20: note = chemically synthesized
  source 1..20: mol_type = other DNA
tttgtattttttgtagagac

SEQ ID NO: 39145 - DNA, 20 bp, synthetic construct
  misc_feature 1..20: note = chemically synthesized
  source 1..20: mol_type = other DNA
ttgtattttttgtagagaca

SEQ ID NO: 39146 - DNA, 20 bp, synthetic construct
  misc_feature 1..20: note = chemically synthesized
  source 1..20: mol_type = other DNA
tttttgtagagacagggttt

SEQ ID NO: 39147 - DNA, 20 bp, synthetic construct
  misc_feature 1..20: note = chemically synthesized
  source 1..20: mol_type = other DNA
cagggttttggcatgttgcc

SEQ ID NO: 39148 - DNA, 20 bp, synthetic construct
  misc_feature 1..20: note = chemically synthesized
  source 1..20: mol_type = other DNA
agggttttggcatgttgccc

SEQ ID NO: 39149 - DNA, 20 bp, synthetic construct
  misc_feature 1..20: note = chemically synthesized
  source 1..20: mol_type = other DNA
ccaggcttgtctcaaactcc

SEQ ID NO: 39150 - DNA, 20 bp, synthetic construct
  misc_feature 1..20: note = chemically synthesized
  source 1..20: mol_type = other DNA
ttgtctcaaactcctggcct

SEQ ID NO: 39151 - DNA, 20 bp, synthetic construct
  misc_feature 1..20: note = chemically synthesized
  source 1..20: mol_type = other DNA
tgtctcaaactcctggcctc

SEQ ID NO: 39152 - DNA, 20 bp, synthetic construct
  misc_feature 1..20: note = chemically synthesized
  source 1..20: mol_type = other DNA
ctcaggtgatccatctgccg

SEQ ID NO: 39153 - DNA, 20 bp, synthetic construct
  misc_feature 1..20: note = chemically synthesized
  source 1..20: mol_type = other DNA
gccgtggcctcccaaaatgc

SEQ ID NO: 39154 - DNA, 20 bp, synthetic construct
  misc_feature 1..20: note = chemically synthesized
  source 1..20: mol_type = other DNA
ccgtggcctcccaaaatgct

SEQ ID NO: 39155 - DNA, 20 bp, synthetic construct
  misc_feature 1..20: note = chemically synthesized
  source 1..20: mol_type = other DNA
ctcccaaaatgctgggatta

SEQ ID NO: 39156 - DNA, 20 bp, synthetic construct
  misc_feature 1..20: note = chemically synthesized
  source 1..20: mol_type = other DNA
tcccaaaatgctgggattat

SEQ ID NO: 39157 - DNA, 20 bp, synthetic construct
  misc_feature 1..20: note = chemically synthesized
  source 1..20: mol_type = other DNA
aatgctgggattataggcat

SEQ ID NO: 39158 - DNA, 20 bp, synthetic construct
  misc_feature 1..20: note = chemically synthesized
  source 1..20: mol_type = other DNA
catgagccaccaccccctcc

SEQ ID NO: 39159 - DNA, 20 bp, synthetic construct
  misc_feature 1..20: note = chemically synthesized
  source 1..20: mol_type = other DNA
gagccaccaccccctcctgg

SEQ ID NO: 39160 - DNA, 20 bp, synthetic construct
  misc_feature 1..20: note = chemically synthesized
  source 1..20: mol_type = other DNA
agccaccaccccctcctgga

SEQ ID NO: 39161 - DNA, 20 bp, synthetic construct
  misc_feature 1..20: note = chemically synthesized
  source 1..20: mol_type = other DNA
tataacataatttataatta

SEQ ID NO: 39162 - DNA, 20 bp, synthetic construct
  misc_feature 1..20: note = chemically synthesized
  source 1..20: mol_type = other DNA
tataattacagaaaacatgt

SEQ ID NO: 39163 - DNA, 20 bp, synthetic construct
  misc_feature 1..20: note = chemically synthesized
  source 1..20: mol_type = other DNA
cagaaaacatgtgagttcac

SEQ ID NO: 39164 - DNA, 20 bp, synthetic construct
  misc_feature 1..20: note = chemically synthesized
  source 1..20: mol_type = other DNA
agaaaacatgtgagttcact

SEQ ID NO: 39165 - DNA, 20 bp, synthetic construct
  misc_feature 1..20: note = chemically synthesized
  source 1..20: mol_type = other DNA
ctaggaataaataaattttg

SEQ ID NO: 39166 - DNA, 20 bp, synthetic construct
  misc_feature 1..20: note = chemically synthesized
  source 1..20: mol_type = other DNA
ataaattttgaagataataa

SEQ ID NO: 39167 - DNA, 20 bp, synthetic construct
  misc_feature 1..20: note = chemically synthesized
  source 1..20: mol_type = other DNA
tttcacttatgttgtcattt

SEQ ID NO: 39168 - DNA, 20 bp, synthetic construct
  misc_feature 1..20: note = chemically synthesized
  source 1..20: mol_type = other DNA
cttatgttgtcatttcggca

SEQ ID NO: 39169 - DNA, 20 bp, synthetic construct
  misc_feature 1..20: note = chemically synthesized
  source 1..20: mol_type = other DNA
gttgtcatttcggcacagtt

SEQ ID NO: 39170 - DNA, 20 bp, synthetic construct
  misc_feature 1..20: note = chemically synthesized
  source 1..20: mol_type = other DNA
catttcggcacagtttggta

SEQ ID NO: 39171 - DNA, 20 bp, synthetic construct
  misc_feature 1..20: note = chemically synthesized
  source 1..20: mol_type = other DNA
atttcggcacagtttggtat

SEQ ID NO: 39172 - DNA, 20 bp, synthetic construct
  misc_feature 1..20: note = chemically synthesized
  source 1..20: mol_type = other DNA
gcacagtttggtataggatg

SEQ ID NO: 39173 - DNA, 20 bp, synthetic construct
  misc_feature 1..20: note = chemically synthesized
  source 1..20: mol_type = other DNA
acagtttggtataggatgtg

SEQ ID NO: 39174 - DNA, 20 bp, synthetic construct
  misc_feature 1..20: note = chemically synthesized
  source 1..20: mol_type = other DNA
gagatgttaacatttatacc

SEQ ID NO: 39175 - DNA, 20 bp, synthetic construct
  misc_feature 1..20: note = chemically synthesized
  source 1..20: mol_type = other DNA
acctagcttgctcgtaaact

SEQ ID NO: 39176 - DNA, 20 bp, synthetic construct
  misc_feature 1..20: note = chemically synthesized
  source 1..20: mol_type = other DNA
gctcgtaaactaagacctga

SEQ ID NO: 39177 - DNA, 20 bp, synthetic construct
  misc_feature 1..20: note = chemically synthesized
  source 1..20: mol_type = other DNA
ctcgtaaactaagacctgaa

SEQ ID NO: 39178 - DNA, 20 bp, synthetic construct
  misc_feature 1..20: note = chemically synthesized
  source 1..20: mol_type = other DNA
tcgtaaactaagacctgaaa

SEQ ID NO: 39179 - DNA, 20 bp, synthetic construct
  misc_feature 1..20: note = chemically synthesized
  source 1..20: mol_type = other DNA
cctgaaagggttgtgtctat

SEQ ID NO: 39180 - DNA, 20 bp, synthetic construct
  misc_feature 1..20: note = chemically synthesized
  source 1..20: mol_type = other DNA
gtgtctatcagctgcacccc

SEQ ID NO: 39181 - DNA, 20 bp, synthetic construct
  misc_feature 1..20: note = chemically synthesized
  source 1..20: mol_type = other DNA
tgtctatcagctgcacccct

SEQ ID NO: 39182 - DNA, 20 bp, synthetic construct
  misc_feature 1..20: note = chemically synthesized
  source 1..20: mol_type = other DNA
ctatcagctgcacccctggg

SEQ ID NO: 39183 - DNA, 20 bp, synthetic construct
  misc_feature 1..20: note = chemically synthesized
  source 1..20: mol_type = other DNA
cctgggtagcgacacaacct

SEQ ID NO: 39184 - DNA, 20 bp, synthetic construct
  misc_feature 1..20: note = chemically synthesized
  source 1..20: mol_type = other DNA
ctgggtagcgacacaacctc

SEQ ID NO: 39185 - DNA, 20 bp, synthetic construct
  misc_feature 1..20: note = chemically synthesized
  source 1..20: mol_type = other DNA
ggtagcgacacaacctcggg

SEQ ID NO: 39186 - DNA, 20 bp, synthetic construct
  misc_feature 1..20: note = chemically synthesized
  source 1..20: mol_type = other DNA
gtagcgacacaacctcggga

SEQ ID NO: 39187 - DNA, 20 bp, synthetic construct
  misc_feature 1..20: note = chemically synthesized
  source 1..20: mol_type = other DNA
acacaacctcgggaaggcct

SEQ ID NO: 39188 - DNA, 20 bp, synthetic construct
  misc_feature 1..20: note = chemically synthesized
  source 1..20: mol_type = other DNA
gcctcagccccctcctcgta

SEQ ID NO: 39189 - DNA, 20 bp, synthetic construct
  misc_feature 1..20: note = chemically synthesized
  source 1..20: mol_type = other DNA
cctcgtacagcactgcctgt

SEQ ID NO: 39190 - DNA, 20 bp, synthetic construct
  misc_feature 1..20: note = chemically synthesized
  source 1..20: mol_type = other DNA
gtacagcactgcctgttgga

SEQ ID NO: 39191 - DNA, 20 bp, synthetic construct
  misc_feature 1..20: note = chemically synthesized
  source 1..20: mol_type = other DNA
cactgcctgttggaaagctt

SEQ ID NO: 39192 - DNA, 20 bp, synthetic construct
  misc_feature 1..20: note = chemically synthesized
  source 1..20: mol_type = other DNA
actgcctgttggaaagcttg

SEQ ID NO: 39193 - DNA, 20 bp, synthetic construct
  misc_feature 1..20: note = chemically synthesized
  source 1..20: mol_type = other DNA
ctgcctgttggaaagcttga

SEQ ID NO: 39194 - DNA, 20 bp, synthetic construct
  misc_feature 1..20: note = chemically synthesized
  source 1..20: mol_type = other DNA
gcctgttggaaagcttgagg

SEQ ID NO: 39195 - DNA, 20 bp, synthetic construct
  misc_feature 1..20: note = chemically synthesized
  source 1..20: mol_type = other DNA
cctgttggaaagcttgaggg

SEQ ID NO: 39196 - DNA, 20 bp, synthetic construct
  misc_feature 1..20: note = chemically synthesized
  source 1..20: mol_type = other DNA
ggaaagcttgagggaggcta

SEQ ID NO: 39197 - DNA, 20 bp, synthetic construct
  misc_feature 1..20: note = chemically synthesized
  source 1..20: mol_type = other DNA
tgagggaggctatggatgtg

SEQ ID NO: 39198 - DNA, 20 bp, synthetic construct
  misc_feature 1..20: note = chemically synthesized
  source 1..20: mol_type = other DNA
ggctatggatgtgcagcact

SEQ ID NO: 39199 - DNA, 20 bp, synthetic construct
  misc_feature 1..20: note = chemically synthesized
  source 1..20: mol_type = other DNA
tatggatgtgcagcacttgg

SEQ ID NO: 39200 - DNA, 20 bp, synthetic construct
  misc_feature 1..20: note = chemically synthesized
  source 1..20: mol_type = other DNA
tggatgtgcagcacttggca

SEQ ID NO: 39201 - DNA, 20 bp, synthetic construct
  misc_feature 1..20: note = chemically synthesized
  source 1..20: mol_type = other DNA
ggatgtgcagcacttggcag

SEQ ID NO: 39202 - DNA, 20 bp, synthetic construct
  misc_feature 1..20: note = chemically synthesized
  source 1..20: mol_type = other DNA
gatgtgcagcacttggcaga

SEQ ID NO: 39203 - DNA, 20 bp, synthetic construct
  misc_feature 1..20: note = chemically synthesized
  source 1..20: mol_type = other DNA
gcagcacttggcagagggtc

SEQ ID NO: 39204 - DNA, 20 bp, synthetic construct
  misc_feature 1..20: note = chemically synthesized
  source 1..20: mol_type = other DNA
cttggcagagggtctggtca

SEQ ID NO: 39205 - DNA, 20 bp, synthetic construct
  misc_feature 1..20: note = chemically synthesized
  source 1..20: mol_type = other DNA
ggcagagggtctggtcatgg

SEQ ID NO: 39206 - DNA, 20 bp, synthetic construct
  misc_feature 1..20: note = chemically synthesized
  source 1..20: mol_type = other DNA
ggtctggtcatggaagttac

SEQ ID NO: 39207 - DNA, 20 bp, synthetic construct
  misc_feature 1..20: note = chemically synthesized
  source 1..20: mol_type = other DNA
tggaagttaccagcaaatat

SEQ ID NO: 39208 - DNA, 20 bp, synthetic construct
  misc_feature 1..20: note = chemically synthesized
  source 1..20: mol_type = other DNA
tatgattttattttatccaa

SEQ ID NO: 39209 - DNA, 20 bp, synthetic construct
  misc_feature 1..20: note = chemically synthesized
  source 1..20: mol_type = other DNA
attttattttatccaaaaga

SEQ ID NO: 39210 - DNA, 20 bp, synthetic construct
  misc_feature 1..20: note = chemically synthesized
  source 1..20: mol_type = other DNA
tttattttatccaaaagaaa

SEQ ID NO: 39211 - DNA, 20 bp, synthetic construct
  misc_feature 1..20: note = chemically synthesized
  source 1..20: mol_type = other DNA
atccaaaagaaagagaatga

SEQ ID NO: 39212 - DNA, 20 bp, synthetic construct
  misc_feature 1..20: note = chemically synthesized
  source 1..20: mol_type = other DNA
caaaagaaagagaatgaaag

SEQ ID NO: 39213 - DNA, 20 bp, synthetic construct
  misc_feature 1..20: note = chemically synthesized
  source 1..20: mol_type = other DNA
aaagaaagagaatgaaagaa

SEQ ID NO: 39214 - DNA, 20 bp, synthetic construct
  misc_feature 1..20: note = chemically synthesized
  source 1..20: mol_type = other DNA
aagaaagagaatgaaagaag

SEQ ID NO: 39215 - DNA, 20 bp, synthetic construct
  misc_feature 1..20: note = chemically synthesized
  source 1..20: mol_type = other DNA
agaaagagaatgaaagaaga

SEQ ID NO: 39216 - DNA, 20 bp, synthetic construct
  misc_feature 1..20: note = chemically synthesized
  source 1..20: mol_type = other DNA
gaaagagaatgaaagaagag

SEQ ID NO: 39217 - DNA, 20 bp, synthetic construct
  misc_feature 1..20: note = chemically synthesized
  source 1..20: mol_type = other DNA
aagagaatgaaagaagaggg

SEQ ID NO: 39218 - DNA, 20 bp, synthetic construct
  misc_feature 1..20: note = chemically synthesized
  source 1..20: mol_type = other DNA
agagaatgaaagaagagggg

SEQ ID NO: 39219 - DNA, 20 bp, synthetic construct
  misc_feature 1..20: note = chemically synthesized
  source 1..20: mol_type = other DNA
gaaagaagaggggaggaaac

SEQ ID NO: 39220 - DNA, 20 bp, synthetic construct
  misc_feature 1..20: note = chemically synthesized
  source 1..20: mol_type = other DNA
ggggaggaaacaagactaat

SEQ ID NO: 39221 - DNA, 20 bp, synthetic construct
  misc_feature 1..20: note = chemically synthesized
  source 1..20: mol_type = other DNA
gggaggaaacaagactaatc

SEQ ID NO: 39222 - DNA, 20 bp, synthetic construct
  misc_feature 1..20: note = chemically synthesized
  source 1..20: mol_type = other DNA
ggaaacaagactaatcagga

SEQ ID NO: 39223 - DNA, 20 bp, synthetic construct
  misc_feature 1..20: note = chemically synthesized
  source 1..20: mol_type = other DNA
aagactaatcaggaaagatg

SEQ ID NO: 39224 - DNA, 20 bp, synthetic construct
  misc_feature 1..20: note = chemically synthesized
  source 1..20: mol_type = other DNA
agactaatcaggaaagatga

SEQ ID NO: 39225 - DNA, 20 bp, synthetic construct
  misc_feature 1..20: note = chemically synthesized
  source 1..20: mol_type = other DNA
aatcaggaaagatgaaggtc

SEQ ID NO: 39226 - DNA, 20 bp, synthetic construct
  misc_feature 1..20: note = chemically synthesized
  source 1..20: mol_type = other DNA
atcaggaaagatgaaggtct

SEQ ID NO: 39227 - DNA, 20 bp, synthetic construct
  misc_feature 1..20: note = chemically synthesized
  source 1..20: mol_type = other DNA
tcaggaaagatgaaggtcta

SEQ ID NO: 39228 - DNA, 20 bp, synthetic construct
  misc_feature 1..20: note = chemically synthesized
  source 1..20: mol_type = other DNA
caggaaagatgaaggtctag

SEQ ID NO: 39229 - DNA, 20 bp, synthetic construct
  misc_feature 1..20: note = chemically synthesized
  source 1..20: mol_type = other DNA
aaagatgaaggtctaggggt

SEQ ID NO: 39230 - DNA, 20 bp, synthetic construct
  misc_feature 1..20: note = chemically synthesized
  source 1..20: mol_type = other DNA
aagatgaaggtctaggggtg

SEQ ID NO: 39231 - DNA, 20 bp, synthetic construct
  misc_feature 1..20: note = chemically synthesized
  source 1..20: mol_type = other DNA
agatgaaggtctaggggtga

SEQ ID NO: 39232 - DNA, 20 bp, synthetic construct
  misc_feature 1..20: note = chemically synthesized
  source 1..20: mol_type = other DNA
tgaaggtctaggggtgaggg

SEQ ID NO: 39233 - DNA, 20 bp, synthetic construct
  misc_feature 1..20: note = chemically synthesized
  source 1..20: mol_type = other DNA
gaaggtctaggggtgaggga

SEQ ID NO: 39234 - DNA, 20 bp, synthetic construct
  misc_feature 1..20: note = chemically synthesized
  source 1..20: mol_type = other DNA
aggtctaggggtgagggaag

SEQ ID NO: 39235 - DNA, 20 bp, synthetic construct
  misc_feature 1..20: note = chemically synthesized
  source 1..20: mol_type = other DNA
ctaggggtgagggaaggagt

SEQ ID NO: 39236 - DNA, 20 bp, synthetic construct
  misc_feature 1..20: note = chemically synthesized
  source 1..20: mol_type = other DNA
taggggtgagggaaggagta

SEQ ID NO: 39237 - DNA, 20 bp, synthetic construct
  misc_feature 1..20: note = chemically synthesized
  source 1..20: mol_type = other DNA
ggggtgagggaaggagtaag

SEQ ID NO: 39238 - DNA, 20 bp, synthetic construct
  misc_feature 1..20: note = chemically synthesized
  source 1..20: mol_type = other DNA
ggaaggagtaaggagacata

SEQ ID NO: 39239 - DNA, 20 bp, synthetic construct
  misc_feature 1..20: note = chemically synthesized
  source 1..20: mol_type = other DNA
gaaggagtaaggagacataa

SEQ ID NO: 39240 - DNA, 20 bp, synthetic construct
  misc_feature 1..20: note = chemically synthesized
  source 1..20: mol_type = other DNA
aaggagacataaaggcaatg

SEQ ID NO: 39241 - DNA, 20 bp, synthetic construct
  misc_feature 1..20: note = chemically synthesized
  source 1..20: mol_type = other DNA
ggagacataaaggcaatgtg

SEQ ID NO: 39242 - DNA, 20 bp, synthetic construct
  misc_feature 1..20: note = chemically synthesized
  source 1..20: mol_type = other DNA
gacataaaggcaatgtggag

SEQ ID NO: 39243 - DNA, 20 bp, synthetic construct
  misc_feature 1..20: note = chemically synthesized
  source 1..20: mol_type = other DNA
aaaggcaatgtggagcagct

SEQ ID NO: 39244 - DNA, 20 bp, synthetic construct
  misc_feature 1..20: note = chemically synthesized
  source 1..20: mol_type = other DNA
aaggcaatgtggagcagctg

SEQ ID NO: 39245 - DNA, 20 bp, synthetic construct
  misc_feature 1..20: note = chemically synthesized
  source 1..20: mol_type = other DNA
aggcaatgtggagcagctga

SEQ ID NO: 39246 - DNA, 20 bp, synthetic construct
  misc_feature 1..20: note = chemically synthesized
  source 1..20: mol_type = other DNA
ggcaatgtggagcagctgag

SEQ ID NO: 39247 - DNA, 20 bp, synthetic construct
  misc_feature 1..20: note = chemically synthesized
  source 1..20: mol_type = other DNA
gcaatgtggagcagctgagg

SEQ ID NO: 39248 - DNA, 20 bp, synthetic construct
  misc_feature 1..20: note = chemically synthesized
  source 1..20: mol_type = other DNA
caatgtggagcagctgaggg

SEQ ID NO: 39249 - DNA, 20 bp, synthetic construct
  misc_feature 1..20: note = chemically synthesized
  source 1..20: mol_type = other DNA
ggagcagctgaggggggaaa

SEQ ID NO: 39250 - DNA, 20 bp, synthetic construct
  misc_feature 1..20: note = chemically synthesized
  source 1..20: mol_type = other DNA
aaatggctttcaccacttcc

SEQ ID NO: 39251 - DNA, 20 bp, synthetic construct
  misc_feature 1..20: note = chemically synthesized
  source 1..20: mol_type = other DNA
tgcactctcaaatattttat

SEQ ID NO: 39252 - DNA, 20 bp, synthetic construct
  misc_feature 1..20: note = chemically synthesized
  source 1..20: mol_type = other DNA
ttttataagactctatattc

SEQ ID NO: 39253 - DNA, 20 bp, synthetic construct
  misc_feature 1..20: note = chemically synthesized
  source 1..20: mol_type = other DNA
tttataagactctatattca

SEQ ID NO: 39254 - DNA, 20 bp, synthetic construct
  misc_feature 1..20: note = chemically synthesized
  source 1..20: mol_type = other DNA
ggtaatgtttgaaccctgct

SEQ ID NO: 39255 - DNA, 20 bp, synthetic construct
  misc_feature 1..20: note = chemically synthesized
  source 1..20: mol_type = other DNA
atgtttgaaccctgctgagc

SEQ ID NO: 39256 - DNA, 20 bp, synthetic construct
  misc_feature 1..20: note = chemically synthesized
  source 1..20: mol_type = other DNA
tttgaaccctgctgagccag

SEQ ID NO: 39257 - DNA, 20 bp, synthetic construct
  misc_feature 1..20: note = chemically synthesized
  source 1..20: mol_type = other DNA
accctgctgagccagtggca

SEQ ID NO: 39258 - DNA, 20 bp, synthetic construct
  misc_feature 1..20: note = chemically synthesized
  source 1..20: mol_type = other DNA
ccctgctgagccagtggcat

SEQ ID NO: 39259 - DNA, 20 bp, synthetic construct
  misc_feature 1..20: note = chemically synthesized
  source 1..20: mol_type = other DNA
agccagtggcatgggtctct

SEQ ID NO: 39260 - DNA, 20 bp, synthetic construct
  misc_feature 1..20: note = chemically synthesized
  source 1..20: mol_type = other DNA
ccagtggcatgggtctctga

SEQ ID NO: 39261 - DNA, 20 bp, synthetic construct
  misc_feature 1..20: note = chemically synthesized
  source 1..20: mol_type = other DNA
attaacttaatttgactatc

SEQ ID NO: 39262 - DNA, 20 bp, synthetic construct
  misc_feature 1..20: note = chemically synthesized
  source 1..20: mol_type = other DNA
taatttgactatctggtttg

SEQ ID NO: 39263 - DNA, 20 bp, synthetic construct
  misc_feature 1..20: note = chemically synthesized
  source 1..20: mol_type = other DNA
aatttgactatctggtttgt

SEQ ID NO: 39264 - DNA, 20 bp, synthetic construct
  misc_feature 1..20: note = chemically synthesized
  source 1..20: mol_type = other DNA
gggtgcgtttactctcatgt

SEQ ID NO: 39265 - DNA, 20 bp, synthetic construct
  misc_feature 1..20: note = chemically synthesized
  source 1..20: mol_type = other DNA
catgtaagtcaacaatgtcc

SEQ ID NO: 39266 - DNA, 20 bp, synthetic construct
  misc_feature 1..20: note = chemically synthesized
  source 1..20: mol_type = other DNA
atgtaagtcaacaatgtcct

SEQ ID NO: 39267 - DNA, 20 bp, synthetic construct
  misc_feature 1..20: note = chemically synthesized
  source 1..20: mol_type = other DNA
agtcaacaatgtcctgggat

SEQ ID NO: 39268 - DNA, 20 bp, synthetic construct
  misc_feature 1..20: note = chemically synthesized
  source 1..20: mol_type = other DNA
gtcaacaatgtcctgggatt

SEQ ID NO: 39269 - DNA, 20 bp, synthetic construct
  misc_feature 1..20: note = chemically synthesized
  source 1..20: mol_type = other DNA
tgggattgggacacactttc

SEQ ID NO: 39270 - DNA, 20 bp, synthetic construct
  misc_feature 1..20: note = chemically synthesized
  source 1..20: mol_type = other DNA
gggattgggacacactttct

SEQ ID NO: 39271 - DNA, 20 bp, synthetic construct
  misc_feature 1..20: note = chemically synthesized
  source 1..20: mol_type = other DNA
acacactttctgggcactgc

SEQ ID NO: 39272 - DNA, 20 bp, synthetic construct
  misc_feature 1..20: note = chemically synthesized
  source 1..20: mol_type = other DNA
actttctgggcactgctggc

SEQ ID NO: 39273 - DNA, 20 bp, synthetic construct
  misc_feature 1..20: note = chemically synthesized
  source 1..20: mol_type = other DNA
actgctggccagtcccaaaa

SEQ ID NO: 39274 - DNA, 20 bp, synthetic construct
  misc_feature 1..20: note = chemically synthesized
  source 1..20: mol_type = other DNA
ccagtcccaaaatggaacat

SEQ ID NO: 39275 - DNA, 20 bp, synthetic construct
  misc_feature 1..20: note = chemically synthesized
  source 1..20: mol_type = other DNA
cagtcccaaaatggaacata

SEQ ID NO: 39276 - DNA, 20 bp, synthetic construct
  misc_feature 1..20: note = chemically synthesized
  source 1..20: mol_type = other DNA
tcccaaaatggaacataagg

SEQ ID NO: 39277 - DNA, 20 bp, synthetic construct
  misc_feature 1..20: note = chemically synthesized
  source 1..20: mol_type = other DNA
caaaatggaacataaggaag

SEQ ID NO: 39278 - DNA, 20 bp, synthetic construct
  misc_feature 1..20: note = chemically synthesized
  source 1..20: mol_type = other DNA
acttcttttatttctgaaat

SEQ ID NO: 39279 - DNA, 20 bp, synthetic construct
  misc_feature 1..20: note = chemically synthesized
  source 1..20: mol_type = other DNA
cttcttttatttctgaaatc

SEQ ID NO: 39280 - DNA, 20 bp, synthetic construct
  misc_feature 1..20: note = chemically synthesized
  source 1..20: mol_type = other DNA
ttttatttctgaaatcaggt

SEQ ID NO: 39281 - DNA, 20 bp, synthetic construct
  misc_feature 1..20: note = chemically synthesized
  source 1..20: mol_type = other DNA
ttctgaaatcaggtaagaca

SEQ ID NO: 39282 - DNA, 20 bp, synthetic construct
  misc_feature 1..20: note = chemically synthesized
  source 1..20: mol_type = other DNA
acatagtttttttaaattat

SEQ ID NO: 39283 - DNA, 20 bp, synthetic construct
  misc_feature 1..20: note = chemically synthesized
  source 1..20: mol_type = other DNA
ttattttttctcccacaatg

SEQ ID NO: 39284 - DNA, 20 bp, synthetic construct
  misc_feature 1..20: note = chemically synthesized
  source 1..20: mol_type = other DNA
tagtaaaaatacatatgcca

SEQ ID NO: 39285 - DNA, 20 bp, synthetic construct
  misc_feature 1..20: note = chemically synthesized
  source 1..20: mol_type = other DNA
tttttgattcatgaaattcc

SEQ ID NO: 39286 - DNA, 20 bp, synthetic construct
  misc_feature 1..20: note = chemically synthesized
  source 1..20: mol_type = other DNA
tgaaaaattcttaaaaaaat

SEQ ID NO: 39287 - DNA, 20 bp, synthetic construct
  misc_feature 1..20: note = chemically synthesized
  source 1..20: mol_type = other DNA
ataagtttaatttccccgtg

SEQ ID NO: 39288 - DNA, 20 bp, synthetic construct
  misc_feature 1..20: note = chemically synthesized
  source 1..20: mol_type = other DNA
tttccccgtgaagactgtca

SEQ ID NO: 39289 - DNA, 20 bp, synthetic construct
  misc_feature 1..20: note = chemically synthesized
  source 1..20: mol_type = other DNA
cgtgaagactgtcacggtgc

SEQ ID NO: 39290 - DNA, 20 bp, synthetic construct
  misc_feature 1..20: note = chemically synthesized
  source 1..20: mol_type = other DNA
tgtcacggtgctggaatgaa

SEQ ID NO: 39291 - DNA, 20 bp, synthetic construct
  misc_feature 1..20: note = chemically synthesized
  source 1..20: mol_type = other DNA
gtcacggtgctggaatgaat

SEQ ID NO: 39292 - DNA, 20 bp, synthetic construct
  misc_feature 1..20: note = chemically synthesized
  source 1..20: mol_type = other DNA
acggtgctggaatgaatggg

SEQ ID NO: 39293 - DNA, 20 bp, synthetic construct
  misc_feature 1..20: note = chemically synthesized
  source 1..20: mol_type = other DNA
tgaatgggcagaaaaaataa

SEQ ID NO: 39294 - DNA, 20 bp, synthetic construct
  misc_feature 1..20: note = chemically synthesized
  source 1..20: mol_type = other DNA
ggttgatttttctaatctaa

SEQ ID NO: 39295 - DNA, 20 bp, synthetic construct
  misc_feature 1..20: note = chemically synthesized
  source 1..20: mol_type = other DNA
ttgatttttctaatctaaaa

SEQ ID NO: 39296 - DNA, 20 bp, synthetic construct
  misc_feature 1..20: note = chemically synthesized
  source 1..20: mol_type = other DNA
aaaagagtgtgcctacatga

SEQ ID NO: 39297 - DNA, 20 bp, synthetic construct
  misc_feature 1..20: note = chemically synthesized
  source 1..20: mol_type = other DNA
gagtgtgcctacatgatggc

SEQ ID NO: 39298 - DNA, 20 bp, synthetic construct
  misc_feature 1..20: note = chemically synthesized
  source 1..20: mol_type = other DNA
tgcctacatgatggccagtc

SEQ ID NO: 39299 - DNA, 20 bp, synthetic construct
  misc_feature 1..20: note = chemically synthesized
  source 1..20: mol_type = other DNA
cagtctggctgaaaaataaa

SEQ ID NO: 39300 - DNA, 20 bp, synthetic construct
  misc_feature 1..20: note = chemically synthesized
  source 1..20: mol_type = other DNA
tgaaaaataaatagccattg

SEQ ID NO: 39301 - DNA, 20 bp, synthetic construct
  misc_feature 1..20: note = chemically synthesized
  source 1..20: mol_type = other DNA
ccattgtagctaactatgca

SEQ ID NO: 39302 - DNA, 20 bp, synthetic construct
  misc_feature 1..20: note = chemically synthesized
  source 1..20: mol_type = other DNA
cattgtagctaactatgcaa

SEQ ID NO: 39303 - DNA, 20 bp, synthetic construct
  misc_feature 1..20: note = chemically synthesized
  source 1..20: mol_type = other DNA
gtagctaactatgcaaagga

SEQ ID NO: 39304 - DNA, 20 bp, synthetic construct
  misc_feature 1..20: note = chemically synthesized
  source 1..20: mol_type = other DNA
taactatgcaaaggatggct

SEQ ID NO: 39305 - DNA, 20 bp, synthetic construct
  misc_feature 1..20: note = chemically synthesized
  source 1..20: mol_type = other DNA
ggatggctaagctcttcgct

SEQ ID NO: 39306 - DNA, 20 bp, synthetic construct
  misc_feature 1..20: note = chemically synthesized
  source 1..20: mol_type = other DNA
taagctcttcgcttggttct

SEQ ID NO: 39307 - DNA, 20 bp, synthetic construct
  misc_feature 1..20: note = chemically synthesized
  source 1..20: mol_type = other DNA
taatttatatcatctctgtt

SEQ ID NO: 39308 - DNA, 20 bp, synthetic construct
  misc_feature 1..20: note = chemically synthesized
  source 1..20: mol_type = other DNA
aatttatatcatctctgttc

SEQ ID NO: 39309 - DNA, 20 bp, synthetic construct
  misc_feature 1..20: note = chemically synthesized
  source 1..20: mol_type = other DNA
aggtgccatgctcccctcac

SEQ ID NO: 39310 - DNA, 20 bp, synthetic construct
  misc_feature 1..20: note = chemically synthesized
  source 1..20: mol_type = other DNA
gccatgctcccctcactagc

SEQ ID NO: 39311 - DNA, 20 bp, synthetic construct
  misc_feature 1..20: note = chemically synthesized
  source 1..20: mol_type = other DNA
aataactctttgaatatgtt

SEQ ID NO: 39312 - DNA, 20 bp, synthetic construct
  misc_feature 1..20: note = chemically synthesized
  source 1..20: mol_type = other DNA
ttggttccttgacctgttca

SEQ ID NO: 39313 - DNA, 20 bp, synthetic construct
  misc_feature 1..20: note = chemically synthesized
  source 1..20: mol_type = other DNA
ggttccttgacctgttcatg

SEQ ID NO: 39314 - DNA, 20 bp, synthetic construct
  misc_feature 1..20: note = chemically synthesized
  source 1..20: mol_type = other DNA
tccttgacctgttcatggag

SEQ ID NO: 39315 - DNA, 20 bp, synthetic construct
  misc_feature 1..20: note = chemically synthesized
  source 1..20: mol_type = other DNA
ccttgacctgttcatggagt

SEQ ID NO: 39316 - DNA, 20 bp, synthetic construct
  misc_feature 1..20: note = chemically synthesized
  source 1..20: mol_type = other DNA
cctgttcatggagtgggact

SEQ ID NO: 39317 - DNA, 20 bp, synthetic construct
  misc_feature 1..20: note = chemically synthesized
  source 1..20: mol_type = other DNA
cagcatttctctctttgtta

SEQ ID NO: 39318 - DNA, 20 bp, synthetic construct
  misc_feature 1..20: note = chemically synthesized
  source 1..20: mol_type = other DNA
ttctctctttgttatggcct

SEQ ID NO: 39319 - DNA, 20 bp, synthetic construct
  misc_feature 1..20: note = chemically synthesized
  source 1..20: mol_type = other DNA
ctctttgttatggcctgagt

SEQ ID NO: 39320 - DNA, 20 bp, synthetic construct
  misc_feature 1..20: note = chemically synthesized
  source 1..20: mol_type = other DNA
tctttgttatggcctgagta

SEQ ID NO: 39321 - DNA, 20 bp, synthetic construct
  misc_feature 1..20: note = chemically synthesized
  source 1..20: mol_type = other DNA
gcctgagtaaggctttccat

SEQ ID NO: 39322 - DNA, 20 bp, synthetic construct
  misc_feature 1..20: note = chemically synthesized
  source 1..20: mol_type = other DNA
atacatttgcttcttatccc

SEQ ID NO: 39323 - DNA, 20 bp, synthetic construct
  misc_feature 1..20: note = chemically synthesized
  source 1..20: mol_type = other DNA
acatttgcttcttatccctg

SEQ ID NO: 39324 - DNA, 20 bp, synthetic construct
  misc_feature 1..20: note = chemically synthesized
  source 1..20: mol_type = other DNA
aattatacacatccatttgc

SEQ ID NO: 39325 - DNA, 20 bp, synthetic construct
  misc_feature 1..20: note = chemically synthesized
  source 1..20: mol_type = other DNA
ataatgattcaacaaatact

SEQ ID NO: 39326 - DNA, 20 bp, synthetic construct
  misc_feature 1..20: note = chemically synthesized
  source 1..20: mol_type = other DNA
taatgattcaacaaatactc

SEQ ID NO: 39327 - DNA, 20 bp, synthetic construct
  misc_feature 1..20: note = chemically synthesized
  source 1..20: mol_type = other DNA
aatgattcaacaaatactca

SEQ ID NO: 39328 - DNA, 20 bp, synthetic construct
  misc_feature 1..20: note = chemically synthesized
  source 1..20: mol_type = other DNA
aaatactcagggtatttgtt

SEQ ID NO: 39329 - DNA, 20 bp, synthetic construct
  misc_feature 1..20: note = chemically synthesized
  source 1..20: mol_type = other DNA
tactcagggtatttgttgag

SEQ ID NO: 39330 - DNA, 20 bp, synthetic construct
  misc_feature 1..20: note = chemically synthesized
  source 1..20: mol_type = other DNA
actcagggtatttgttgagt

SEQ ID NO: 39331 - DNA, 20 bp, synthetic construct
  misc_feature 1..20: note = chemically synthesized
  source 1..20: mol_type = other DNA
agggtatttgttgagtgggt

SEQ ID NO: 39332 - DNA, 20 bp, synthetic construct
  misc_feature 1..20: note = chemically synthesized
  source 1..20: mol_type = other DNA
gggtatttgttgagtgggtt

SEQ ID NO: 39333 - DNA, 20 bp, synthetic construct
  misc_feature 1..20: note = chemically synthesized
  source 1..20: mol_type = other DNA
ccgtgtgtgattgtgaatgt

SEQ ID NO: 39334 - DNA, 20 bp, synthetic construct
  misc_feature 1..20: note = chemically synthesized
  source 1..20: mol_type = other DNA
tgtgtgtcctttacaaatac

SEQ ID NO: 39335 - DNA, 20 bp, synthetic construct
  misc_feature 1..20: note = chemically synthesized
  source 1..20: mol_type = other DNA
tttacaaatactagcttatt

SEQ ID NO: 39336 - DNA, 20 bp, synthetic construct
  misc_feature 1..20: note = chemically synthesized
  source 1..20: mol_type = other DNA
atactagcttatttagctca

SEQ ID NO: 39337 - DNA, 20 bp, synthetic construct
  misc_feature 1..20: note = chemically synthesized
  source 1..20: mol_type = other DNA
agcttatttagctcatggta

SEQ ID NO: 39338 - DNA, 20 bp, synthetic construct
  misc_feature 1..20: note = chemically synthesized
  source 1..20: mol_type = other DNA
gcttatttagctcatggtat

SEQ ID NO: 39339 - DNA, 20 bp, synthetic construct
  misc_feature 1..20: note = chemically synthesized
  source 1..20: mol_type = other DNA
tatttagctcatggtatagg

SEQ ID NO: 39340 - DNA, 20 bp, synthetic construct
  misc_feature 1..20: note = chemically synthesized
  source 1..20: mol_type = other DNA
atttagctcatggtataggt

SEQ ID NO: 39341 - DNA, 20 bp, synthetic construct
  misc_feature 1..20: note = chemically synthesized
  source 1..20: mol_type = other DNA
tttagctcatggtataggta

SEQ ID NO: 39342 - DNA, 20 bp, synthetic construct
  misc_feature 1..20: note = chemically synthesized
  source 1..20: mol_type = other DNA
agctcatggtataggtaggg

SEQ ID NO: 39343 - DNA, 20 bp, synthetic construct
  misc_feature 1..20: note = chemically synthesized
  source 1..20: mol_type = other DNA
atggtataggtagggtagca

SEQ ID NO: 39344 - DNA, 20 bp, synthetic construct
  misc_feature 1..20: note = chemically synthesized
  source 1..20: mol_type = other DNA
tcatccccattttataaaca

SEQ ID NO: 39345 - DNA, 20 bp, synthetic construct
  misc_feature 1..20: note = chemically synthesized
  source 1..20: mol_type = other DNA
attttataaacaaagaaatc

SEQ ID NO: 39346 - DNA, 20 bp, synthetic construct
  misc_feature 1..20: note = chemically synthesized
  source 1..20: mol_type = other DNA
taaacaaagaaatctagact

SEQ ID NO: 39347 - DNA, 20 bp, synthetic construct
  misc_feature 1..20: note = chemically synthesized
  source 1..20: mol_type = other DNA
aaacaaagaaatctagactt

SEQ ID NO: 39348 - DNA, 20 bp, synthetic construct
  misc_feature 1..20: note = chemically synthesized
  source 1..20: mol_type = other DNA
cgtgaccaaattcccaaatc

SEQ ID NO: 39349 - DNA, 20 bp, synthetic construct
  misc_feature 1..20: note = chemically synthesized
  source 1..20: mol_type = other DNA
gtgaccaaattcccaaatca

SEQ ID NO: 39350 - DNA, 20 bp, synthetic construct
  misc_feature 1..20: note = chemically synthesized
  source 1..20: mol_type = other DNA
attcccaaatcaaggaaata

SEQ ID NO: 39351 - DNA, 20 bp, synthetic construct
  misc_feature 1..20: note = chemically synthesized
  source 1..20: mol_type = other DNA
atcaaggaaataaagaaacc

SEQ ID NO: 39352 - DNA, 20 bp, synthetic construct
  misc_feature 1..20: note = chemically synthesized
  source 1..20: mol_type = other DNA
aaataaagaaacctggattt

SEQ ID NO: 39353 - DNA, 20 bp, synthetic construct
  misc_feature 1..20: note = chemically synthesized
  source 1..20: mol_type = other DNA
aaagaaacctggatttaagc

SEQ ID NO: 39354 - DNA, 20 bp, synthetic construct
  misc_feature 1..20: note = chemically synthesized
  source 1..20: mol_type = other DNA
tggatttaagccagatttcc

SEQ ID NO: 39355 - DNA, 20 bp, synthetic construct
  misc_feature 1..20: note = chemically synthesized
  source 1..20: mol_type = other DNA
cagatttccaagaaaaaatc

SEQ ID NO: 39356 - DNA, 20 bp, synthetic construct
  misc_feature 1..20: note = chemically synthesized
  source 1..20: mol_type = other DNA
agatttccaagaaaaaatct

SEQ ID NO: 39357 - DNA, 20 bp, synthetic construct
  misc_feature 1..20: note = chemically synthesized
  source 1..20: mol_type = other DNA
gatttccaagaaaaaatcta

SEQ ID NO: 39358 - DNA, 20 bp, synthetic construct
  misc_feature 1..20: note = chemically synthesized
  source 1..20: mol_type = other DNA
aacacattccaatgtaactg

SEQ ID NO: 39359 - DNA, 20 bp, synthetic construct
  misc_feature 1..20: note = chemically synthesized
  source 1..20: mol_type = other DNA
cacattccaatgtaactgaa

SEQ ID NO: 39360 - DNA, 20 bp, synthetic construct
  misc_feature 1..20: note = chemically synthesized
  source 1..20: mol_type = other DNA
attccaatgtaactgaagag

SEQ ID NO: 39361 - DNA, 20 bp, synthetic construct
  misc_feature 1..20: note = chemically synthesized
  source 1..20: mol_type = other DNA
ttccaatgtaactgaagagc

SEQ ID NO: 39362 - DNA, 20 bp, synthetic construct
  misc_feature 1..20: note = chemically synthesized
  source 1..20: mol_type = other DNA
ggttaattgtttgccacttg

SEQ ID NO: 39363 - DNA, 20 bp, synthetic construct
  misc_feature 1..20: note = chemically synthesized
  source 1..20: mol_type = other DNA
gccacttgcagaatccaatt

SEQ ID NO: 39364 - DNA, 20 bp, synthetic construct
  misc_feature 1..20: note = chemically synthesized
  source 1..20: mol_type = other DNA
acttgcagaatccaattaag

SEQ ID NO: 39365 - DNA, 20 bp, synthetic construct
  misc_feature 1..20: note = chemically synthesized
  source 1..20: mol_type = other DNA
ttgcagaatccaattaagaa

SEQ ID NO: 39366 - DNA, 20 bp, synthetic construct
  misc_feature 1..20: note = chemically synthesized
  source 1..20: mol_type = other DNA
gcagaatccaattaagaaga

SEQ ID NO: 39367 - DNA, 20 bp, synthetic construct
  misc_feature 1..20: note = chemically synthesized
  source 1..20: mol_type = other DNA
gaatccaattaagaagagag

SEQ ID NO: 39368 - DNA, 20 bp, synthetic construct
  misc_feature 1..20: note = chemically synthesized
  source 1..20: mol_type = other DNA
caattaagaagagagaagtc

SEQ ID NO: 39369 - DNA, 20 bp, synthetic construct
  misc_feature 1..20: note = chemically synthesized
  source 1..20: mol_type = other DNA
gaagagagaagtctggtata

SEQ ID NO: 39370 - DNA, 20 bp, synthetic construct
  misc_feature 1..20: note = chemically synthesized
  source 1..20: mol_type = other DNA
agagaagtctggtataaaga

SEQ ID NO: 39371 - DNA, 20 bp, synthetic construct
  misc_feature 1..20: note = chemically synthesized
  source 1..20: mol_type = other DNA
aagaaagtgatttgcttcca

SEQ ID NO: 39372 - DNA, 20 bp, synthetic construct
  misc_feature 1..20: note = chemically synthesized
  source 1..20: mol_type = other DNA
aagtgatttgcttccaaagc

SEQ ID NO: 39373 - DNA, 20 bp, synthetic construct
  misc_feature 1..20: note = chemically synthesized
  source 1..20: mol_type = other DNA
atttgcttccaaagctagct

SEQ ID NO: 39374 - DNA, 20 bp, synthetic construct
  misc_feature 1..20: note = chemically synthesized
  source 1..20: mol_type = other DNA
tttgcttccaaagctagctt

SEQ ID NO: 39375 - DNA, 20 bp, synthetic construct
  misc_feature 1..20: note = chemically synthesized
  source 1..20: mol_type = other DNA
ttgcttccaaagctagctta

SEQ ID NO: 39376 - DNA, 20 bp, synthetic construct
  misc_feature 1..20: note = chemically synthesized
  source 1..20: mol_type = other DNA
tgcttccaaagctagcttag

SEQ ID NO: 39377 - DNA, 20 bp, synthetic construct
  misc_feature 1..20: note = chemically synthesized
  source 1..20: mol_type = other DNA
ttccaaagctagcttagggg

SEQ ID NO: 39378 - DNA, 20 bp, synthetic construct
  misc_feature 1..20: note = chemically synthesized
  source 1..20: mol_type = other DNA
ctagcttaggggaagaaatg

SEQ ID NO: 39379 - DNA, 20 bp, synthetic construct
  misc_feature 1..20: note = chemically synthesized
  source 1..20: mol_type = other DNA
gcttaggggaagaaatgcag

SEQ ID NO: 39380 - DNA, 20 bp, synthetic construct
  misc_feature 1..20: note = chemically synthesized
  source 1..20: mol_type = other DNA
cctgccgtactacttcactt

SEQ ID NO: 39381 - DNA, 20 bp, synthetic construct
  misc_feature 1..20: note = chemically synthesized
  source 1..20: mol_type = other DNA
ctgccgtactacttcacttt

SEQ ID NO: 39382 - DNA, 20 bp, synthetic construct
  misc_feature 1..20: note = chemically synthesized
  source 1..20: mol_type = other DNA
gccgtactacttcactttag

SEQ ID NO: 39383 - DNA, 20 bp, synthetic construct
  misc_feature 1..20: note = chemically synthesized
  source 1..20: mol_type = other DNA
gtactacttcactttaggag

SEQ ID NO: 39384 - DNA, 20 bp, synthetic construct
  misc_feature 1..20: note = chemically synthesized
  source 1..20: mol_type = other DNA
tacttcactttaggagcaga

SEQ ID NO: 39385 - DNA, 20 bp, synthetic construct
  misc_feature 1..20: note = chemically synthesized
  source 1..20: mol_type = other DNA
ttcactttaggagcagaaag

SEQ ID NO: 39386 - DNA, 20 bp, synthetic construct
  misc_feature 1..20: note = chemically synthesized
  source 1..20: mol_type = other DNA
gcagaaagtggcacttttaa

SEQ ID NO: 39387 - DNA, 20 bp, synthetic construct
  misc_feature 1..20: note = chemically synthesized
  source 1..20: mol_type = other DNA
cagaaagtggcacttttaaa

SEQ ID NO: 39388 - DNA, 20 bp, synthetic construct
  misc_feature 1..20: note = chemically synthesized
  source 1..20: mol_type = other DNA
gtggcacttttaaaaggcaa

SEQ ID NO: 39389 - DNA, 20 bp, synthetic construct
  misc_feature 1..20: note = chemically synthesized
  source 1..20: mol_type = other DNA
ggcacttttaaaaggcaaca

SEQ ID NO: 39390 - DNA, 20 bp, synthetic construct
  misc_feature 1..20: note = chemically synthesized
  source 1..20: mol_type = other DNA
gcacttttaaaaggcaacag

SEQ ID NO: 39391 - DNA, 20 bp, synthetic construct
  misc_feature 1..20: note = chemically synthesized
  source 1..20: mol_type = other DNA
acttttaaaaggcaacagag

SEQ ID NO: 39392 - DNA, 20 bp, synthetic construct
  misc_feature 1..20: note = chemically synthesized
  source 1..20: mol_type = other DNA
cttttaaaaggcaacagagg

SEQ ID NO: 39393 - DNA, 20 bp, synthetic construct
  misc_feature 1..20: note = chemically synthesized
  source 1..20: mol_type = other DNA
taaaaggcaacagaggaggc

SEQ ID NO: 39394 - DNA, 20 bp, synthetic construct
  misc_feature 1..20: note = chemically synthesized
  source 1..20: mol_type = other DNA
aggcaacagaggaggcgagc

SEQ ID NO: 39395 - DNA, 20 bp, synthetic construct
  misc_feature 1..20: note = chemically synthesized
  source 1..20: mol_type = other DNA
ggcaacagaggaggcgagca

SEQ ID NO: 39396 - DNA, 20 bp, synthetic construct
  misc_feature 1..20: note = chemically synthesized
  source 1..20: mol_type = other DNA
agaggaggcgagcaaggatt

SEQ ID NO: 39397 - DNA, 20 bp, synthetic construct
  misc_feature 1..20: note = chemically synthesized
  source 1..20: mol_type = other DNA
gaggaggcgagcaaggattc

SEQ ID NO: 39398 - DNA, 20 bp, synthetic construct
  misc_feature 1..20: note = chemically synthesized
  source 1..20: mol_type = other DNA
aggaggcgagcaaggattca

SEQ ID NO: 39399 - DNA, 20 bp, synthetic construct
  misc_feature 1..20: note = chemically synthesized
  source 1..20: mol_type = other DNA
ggaggcgagcaaggattcag

SEQ ID NO: 39400 - DNA, 20 bp, synthetic construct
  misc_feature 1..20: note = chemically synthesized
  source 1..20: mol_type = other DNA
aaggattcaggggtccatgc

SEQ ID NO: 39401 - DNA, 20 bp, synthetic construct
  misc_feature 1..20: note = chemically synthesized
  source 1..20: mol_type = other DNA
ttcaggggtccatgctagct

SEQ ID NO: 39402 - DNA, 20 bp, synthetic construct
  misc_feature 1..20: note = chemically synthesized
  source 1..20: mol_type = other DNA
tcaggggtccatgctagctt

SEQ ID NO: 39403 - DNA, 20 bp, synthetic construct
  misc_feature 1..20: note = chemically synthesized
  source 1..20: mol_type = other DNA
agcttgggcaccttatccac

SEQ ID NO: 39404 - DNA, 20 bp, synthetic construct
  misc_feature 1..20: note = chemically synthesized
  source 1..20: mol_type = other DNA
gcttgggcaccttatccacc

SEQ ID NO: 39405 - DNA, 20 bp, synthetic construct
  misc_feature 1..20: note = chemically synthesized
  source 1..20: mol_type = other DNA
tgggcaccttatccaccagg

SEQ ID NO: 39406 - DNA, 20 bp, synthetic construct
  misc_feature 1..20: note = chemically synthesized
  source 1..20: mol_type = other DNA
accttatccaccaggtagtt

SEQ ID NO: 39407 - DNA, 20 bp, synthetic construct
  misc_feature 1..20: note = chemically synthesized
  source 1..20: mol_type = other DNA
ttatccaccaggtagttgag

SEQ ID NO: 39408 - DNA, 20 bp, synthetic construct
  misc_feature 1..20: note = chemically synthesized
  source 1..20: mol_type = other DNA
gtagttgagcagttgcctgc

SEQ ID NO: 39409 - DNA, 20 bp, synthetic construct
  misc_feature 1..20: note = chemically synthesized
  source 1..20: mol_type = other DNA
ttgcctgctggtgcctttgt

SEQ ID NO: 39410 - DNA, 20 bp, synthetic construct
  misc_feature 1..20: note = chemically synthesized
  source 1..20: mol_type = other DNA
cctgctggtgcctttgtgag

SEQ ID NO: 39411 - DNA, 20 bp, synthetic construct
  misc_feature 1..20: note = chemically synthesized
  source 1..20: mol_type = other DNA
ctgctggtgcctttgtgagc

SEQ ID NO: 39412 - DNA, 20 bp, synthetic construct
  misc_feature 1..20: note = chemically synthesized
  source 1..20: mol_type = other DNA
tgctggtgcctttgtgagca

SEQ ID NO: 39413 - DNA, 20 bp, synthetic construct
  misc_feature 1..20: note = chemically synthesized
  source 1..20: mol_type = other DNA
tgagcagggtgttgtccctt

SEQ ID NO: 39414 - DNA, 20 bp, synthetic construct
  misc_feature 1..20: note = chemically synthesized
  source 1..20: mol_type = other DNA
gagcagggtgttgtcccttg

SEQ ID NO: 39415 - DNA, 20 bp, synthetic construct
  misc_feature 1..20: note = chemically synthesized
  source 1..20: mol_type = other DNA
tgtcccttgaggcaaatctc

SEQ ID NO: 39416 - DNA, 20 bp, synthetic construct
  misc_feature 1..20: note = chemically synthesized
  source 1..20: mol_type = other DNA
tcccttgaggcaaatctctg

SEQ ID NO: 39417 - DNA, 20 bp, synthetic construct
  misc_feature 1..20: note = chemically synthesized
  source 1..20: mol_type = other DNA
cccttgaggcaaatctctgg

SEQ ID NO: 39418 - DNA, 20 bp, synthetic construct
  misc_feature 1..20: note = chemically synthesized
  source 1..20: mol_type = other DNA
ccttgaggcaaatctctgga

SEQ ID NO: 39419 - DNA, 20 bp, synthetic construct
  misc_feature 1..20: note = chemically synthesized
  source 1..20: mol_type = other DNA
gaggcaaatctctggagggt

SEQ ID NO: 39420 - DNA, 20 bp, synthetic construct
  misc_feature 1..20: note = chemically synthesized
  source 1..20: mol_type = other DNA
ggcaaatctctggagggtga

SEQ ID NO: 39421 - DNA, 20 bp, synthetic construct
  misc_feature 1..20: note = chemically synthesized
  source 1..20: mol_type = other DNA
tctggagggtgagagttttg

SEQ ID NO: 39422 - DNA, 20 bp, synthetic construct
  misc_feature 1..20: note = chemically synthesized
  source 1..20: mol_type = other DNA
ggagggtgagagttttgtag

SEQ ID NO: 39423 - DNA, 20 bp, synthetic construct
  misc_feature 1..20: note = chemically synthesized
  source 1..20: mol_type = other DNA
gagggtgagagttttgtagt

SEQ ID NO: 39424 - DNA, 20 bp, synthetic construct
  misc_feature 1..20: note = chemically synthesized
  source 1..20: mol_type = other DNA
gttttgtagtgggcatgctt

SEQ ID NO: 39425 - DNA, 20 bp, synthetic construct
  misc_feature 1..20: note = chemically synthesized
  source 1..20: mol_type = other DNA
ttataaatcacctgtgaact

SEQ ID NO: 39426 - DNA, 20 bp, synthetic construct
  misc_feature 1..20: note = chemically synthesized
  source 1..20: mol_type = other DNA
tataaatcacctgtgaactc

SEQ ID NO: 39427 - DNA, 20 bp, synthetic construct
  misc_feature 1..20: note = chemically synthesized
  source 1..20: mol_type = other DNA
taaatcacctgtgaactcag

SEQ ID NO: 39428 - DNA, 20 bp, synthetic construct
  misc_feature 1..20: note = chemically synthesized
  source 1..20: mol_type = other DNA
aactcaggagttccatcttg

SEQ ID NO: 39429 - DNA, 20 bp, synthetic construct
  misc_feature 1..20: note = chemically synthesized
  source 1..20: mol_type = other DNA
tccatcttgaagcacataca

SEQ ID NO: 39430 - DNA, 20 bp, synthetic construct
  misc_feature 1..20: note = chemically synthesized
  source 1..20: mol_type = other DNA
tcttgaagcacatacatagt

SEQ ID NO: 39431 - DNA, 20 bp, synthetic construct
  misc_feature 1..20: note = chemically synthesized
  source 1..20: mol_type = other DNA
agttagatgaacttgccctg

SEQ ID NO: 39432 - DNA, 20 bp, synthetic construct
  misc_feature 1..20: note = chemically synthesized
  source 1..20: mol_type = other DNA
gttagatgaacttgccctgc

SEQ ID NO: 39433 - DNA, 20 bp, synthetic construct
  misc_feature 1..20: note = chemically synthesized
  source 1..20: mol_type = other DNA
ttagatgaacttgccctgca

SEQ ID NO: 39434 - DNA, 20 bp, synthetic construct
  misc_feature 1..20: note = chemically synthesized
  source 1..20: mol_type = other DNA
agatgaacttgccctgcagg

SEQ ID NO: 39435 - DNA, 20 bp, synthetic construct
  misc_feature 1..20: note = chemically synthesized
  source 1..20: mol_type = other DNA
atgaacttgccctgcaggga

SEQ ID NO: 39436 - DNA, 20 bp, synthetic construct
  misc_feature 1..20: note = chemically synthesized
  source 1..20: mol_type = other DNA
ctgcagggagagtctgatga

SEQ ID NO: 39437 - DNA, 20 bp, synthetic construct
  misc_feature 1..20: note = chemically synthesized
  source 1..20: mol_type = other DNA
tgcagggagagtctgatgaa

SEQ ID NO: 39438 - DNA, 20 bp, synthetic construct
  misc_feature 1..20: note = chemically synthesized
  source 1..20: mol_type = other DNA
gcagggagagtctgatgaaa

SEQ ID NO: 39439 - DNA, 20 bp, synthetic construct
  misc_feature 1..20: note = chemically synthesized
  source 1..20: mol_type = other DNA
agggagagtctgatgaaagg

SEQ ID NO: 39440 - DNA, 20 bp, synthetic construct
  misc_feature 1..20: note = chemically synthesized
  source 1..20: mol_type = other DNA
gggagagtctgatgaaaggg

SEQ ID NO: 39441 - DNA, 20 bp, synthetic construct
  misc_feature 1..20: note = chemically synthesized
  source 1..20: mol_type = other DNA
agagtctgatgaaagggagg

SEQ ID NO: 39442 - DNA, 20 bp, synthetic construct
  misc_feature 1..20: note = chemically synthesized
  source 1..20: mol_type = other DNA
caatttaatctataaattac

SEQ ID NO: 39443 - DNA, 20 bp, synthetic construct
  misc_feature 1..20: note = chemically synthesized
  source 1..20: mol_type = other DNA
attaccagataaaattttac

SEQ ID NO: 39444 - DNA, 20 bp, synthetic construct
  misc_feature 1..20: note = chemically synthesized
  source 1..20: mol_type = other DNA
aattttacaagttgacttta

SEQ ID NO: 39445 - DNA, 20 bp, synthetic construct
  misc_feature 1..20: note = chemically synthesized
  source 1..20: mol_type = other DNA
aagtcaaacacatttgaatt

SEQ ID NO: 39446 - DNA, 20 bp, synthetic construct
  misc_feature 1..20: note = chemically synthesized
  source 1..20: mol_type = other DNA
tcaaacacatttgaatttag

SEQ ID NO: 39447 - DNA, 20 bp, synthetic construct
  misc_feature 1..20: note = chemically synthesized
  source 1..20: mol_type = other DNA
aacacatttgaatttagtgg

SEQ ID NO: 39448 - DNA, 20 bp, synthetic construct
  misc_feature 1..20: note = chemically synthesized
  source 1..20: mol_type = other DNA
gaatttagtggaagccattc

SEQ ID NO: 39449 - DNA, 20 bp, synthetic construct
  misc_feature 1..20: note = chemically synthesized
  source 1..20: mol_type = other DNA
agccattcaagaaaatatca

SEQ ID NO: 39450 - DNA, 20 bp, synthetic construct
  misc_feature 1..20: note = chemically synthesized
  source 1..20: mol_type = other DNA
agaaaatatcaaagaaaata

SEQ ID NO: 39451 - DNA, 20 bp, synthetic construct
  misc_feature 1..20: note = chemically synthesized
  source 1..20: mol_type = other DNA
aaaatatcaaagaaaataca

SEQ ID NO: 39452 - DNA, 20 bp, synthetic construct
  misc_feature 1..20: note = chemically synthesized
  source 1..20: mol_type = other DNA
atatcaaagaaaatacagag

SEQ ID NO: 39453 - DNA, 20 bp, synthetic construct
  misc_feature 1..20: note = chemically synthesized
  source 1..20: mol_type = other DNA
tatcaaagaaaatacagagc

SEQ ID NO: 39454 - DNA, 20 bp, synthetic construct
  misc_feature 1..20: note = chemically synthesized
  source 1..20: mol_type = other DNA
tcaaagaaaatacagagcag

SEQ ID NO: 39455 - DNA, 20 bp, synthetic construct
  misc_feature 1..20: note = chemically synthesized
  source 1..20: mol_type = other DNA
aagaaaatacagagcaggag

SEQ ID NO: 39456 - DNA, 20 bp, synthetic construct
  misc_feature 1..20: note = chemically synthesized
  source 1..20: mol_type = other DNA
atacagagcaggagaagatt

SEQ ID NO: 39457 - DNA, 20 bp, synthetic construct
  misc_feature 1..20: note = chemically synthesized
  source 1..20: mol_type = other DNA
gagcaggagaagattaagca

SEQ ID NO: 39458 - DNA, 20 bp, synthetic construct
  misc_feature 1..20: note = chemically synthesized
  source 1..20: mol_type = other DNA
gcaggagaagattaagcaaa

SEQ ID NO: 39459 - DNA, 20 bp, synthetic construct
  misc_feature 1..20: note = chemically synthesized
  source 1..20: mol_type = other DNA
agattaagcaaagagttttt

SEQ ID NO: 39460 - DNA, 20 bp, synthetic construct
  misc_feature 1..20: note = chemically synthesized
  source 1..20: mol_type = other DNA
gattaagcaaagagtttttt

SEQ ID NO: 39461 - DNA, 20 bp, synthetic construct
  misc_feature 1..20: note = chemically synthesized
  source 1..20: mol_type = other DNA
attaagcaaagagttttttg

SEQ ID NO: 39462 - DNA, 20 bp, synthetic construct
  misc_feature 1..20: note = chemically synthesized
  source 1..20: mol_type = other DNA
aaagagttttttggggaaat

SEQ ID NO: 39463 - DNA, 20 bp, synthetic construct
  misc_feature 1..20: note = chemically synthesized
  source 1..20: mol_type = other DNA
ggtgtctatgtctgtgtgtg

SEQ ID NO: 39464 - DNA, 20 bp, synthetic construct
  misc_feature 1..20: note = chemically synthesized
  source 1..20: mol_type = other DNA
gtgtctatgtctgtgtgtgt

SEQ ID NO: 39465 - DNA, 20 bp, synthetic construct
  misc_feature 1..20: note = chemically synthesized
  source 1..20: mol_type = other DNA
tgtctatgtctgtgtgtgta

SEQ ID NO: 39466 - DNA, 20 bp, synthetic construct
  misc_feature 1..20: note = chemically synthesized
  source 1..20: mol_type = other DNA
tctatgtctgtgtgtgtagg

SEQ ID NO: 39467 - DNA, 20 bp, synthetic construct
  misc_feature 1..20: note = chemically synthesized
  source 1..20: mol_type = other DNA
gtctgtgtgtgtagggagtg

SEQ ID NO: 39468 - DNA, 20 bp, synthetic construct
  misc_feature 1..20: note = chemically synthesized
  source 1..20: mol_type = other DNA
tctgtgtgtgtagggagtgc

SEQ ID NO: 39469 - DNA, 20 bp, synthetic construct
  misc_feature 1..20: note = chemically synthesized
  source 1..20: mol_type = other DNA
ctgtgtgtgtagggagtgca

SEQ ID NO: 39470 - DNA, 20 bp, synthetic construct
  misc_feature 1..20: note = chemically synthesized
  source 1..20: mol_type = other DNA
tgtgtgtgtagggagtgcag

SEQ ID NO: 39471 - DNA, 20 bp, synthetic construct
  misc_feature 1..20: note = chemically synthesized
  source 1..20: mol_type = other DNA
gggatatgaatattctattt

SEQ ID NO: 39472 - DNA, 20 bp, synthetic construct
  misc_feature 1..20: note = chemically synthesized
  source 1..20: mol_type = other DNA
gaatattctatttcagccca

SEQ ID NO: 39473 - DNA, 20 bp, synthetic construct
  misc_feature 1..20: note = chemically synthesized
  source 1..20: mol_type = other DNA
ctatttcagcccatggaaac

SEQ ID NO: 39474 - DNA, 20 bp, synthetic construct
  misc_feature 1..20: note = chemically synthesized
  source 1..20: mol_type = other DNA
tatttcagcccatggaaact

SEQ ID NO: 39475 - DNA, 20 bp, synthetic construct
  misc_feature 1..20: note = chemically synthesized
  source 1..20: mol_type = other DNA
agcccatggaaactaggatg

SEQ ID NO: 39476 - DNA, 20 bp, synthetic construct
  misc_feature 1..20: note = chemically synthesized
  source 1..20: mol_type = other DNA
tagatcactgtgaacttatt

SEQ ID NO: 39477 - DNA, 20 bp, synthetic construct
  misc_feature 1..20: note = chemically synthesized
  source 1..20: mol_type = other DNA
atcactgtgaacttattcag

SEQ ID NO: 39478 - DNA, 20 bp, synthetic construct
  misc_feature 1..20: note = chemically synthesized
  source 1..20: mol_type = other DNA
tcactgtgaacttattcagc

SEQ ID NO: 39479 - DNA, 20 bp, synthetic construct
  misc_feature 1..20: note = chemically synthesized
  source 1..20: mol_type = other DNA
tattcagcaggctacaccca

SEQ ID NO: 39480 - DNA, 20 bp, synthetic construct
  misc_feature 1..20: note = chemically synthesized
  source 1..20: mol_type = other DNA
attcagcaggctacacccaa

SEQ ID NO: 39481 - DNA, 20 bp, synthetic construct
  misc_feature 1..20: note = chemically synthesized
  source 1..20: mol_type = other DNA
agcaggctacacccaaaggc

SEQ ID NO: 39482 - DNA, 20 bp, synthetic construct
  misc_feature 1..20: note = chemically synthesized
  source 1..20: mol_type = other DNA
tagaacaaacttctctgcca

SEQ ID NO: 39483 - DNA, 20 bp, synthetic construct
  misc_feature 1..20: note = chemically synthesized
  source 1..20: mol_type = other DNA
agaacaaacttctctgccac

SEQ ID NO: 39484 - DNA, 20 bp, synthetic construct
  misc_feature 1..20: note = chemically synthesized
  source 1..20: mol_type = other DNA
aacatatgttttaatcgacc

SEQ ID NO: 39485 - DNA, 20 bp, synthetic construct
  misc_feature 1..20: note = chemically synthesized
  source 1..20: mol_type = other DNA
acatatgttttaatcgacct

SEQ ID NO: 39486 - DNA, 20 bp, synthetic construct
  misc_feature 1..20: note = chemically synthesized
  source 1..20: mol_type = other DNA
catatgttttaatcgacctg

SEQ ID NO: 39487 - DNA, 20 bp, synthetic construct
  misc_feature 1..20: note = chemically synthesized
  source 1..20: mol_type = other DNA
atatgttttaatcgacctgg

SEQ ID NO: 39488 - DNA, 20 bp, synthetic construct
  misc_feature 1..20: note = chemically synthesized
  source 1..20: mol_type = other DNA
tatgttttaatcgacctggg

SEQ ID NO: 39489 - DNA, 20 bp, synthetic construct
  misc_feature 1..20: note = chemically synthesized
  source 1..20: mol_type = other DNA
tggggggcacattctctgat

SEQ ID NO: 39490 - DNA, 20 bp, synthetic construct
  misc_feature 1..20: note = chemically synthesized
  source 1..20: mol_type = other DNA
cattctctgataagctcttt

SEQ ID NO: 39491 - DNA, 20 bp, synthetic construct
  misc_feature 1..20: note = chemically synthesized
  source 1..20: mol_type = other DNA
ctctgataagctcttttgga

SEQ ID NO: 39492 - DNA, 20 bp, synthetic construct
  misc_feature 1..20: note = chemically synthesized
  source 1..20: mol_type = other DNA
gataagctcttttggaaagc

SEQ ID NO: 39493 - DNA, 20 bp, synthetic construct
  misc_feature 1..20: note = chemically synthesized
  source 1..20: mol_type = other DNA
ataagctcttttggaaagcc

SEQ ID NO: 39494 - DNA, 20 bp, synthetic construct
  misc_feature 1..20: note = chemically synthesized
  source 1..20: mol_type = other DNA
ttggaaagccaggctttctg

SEQ ID NO: 39495 - DNA, 20 bp, synthetic construct
  misc_feature 1..20: note = chemically synthesized
  source 1..20: mol_type = other DNA
gttatctttccaatgtgtgc

SEQ ID NO: 39496 - DNA, 20 bp, synthetic construct
  misc_feature 1..20: note = chemically synthesized
  source 1..20: mol_type = other DNA
ccaatgtgtgctggaatgcc

SEQ ID NO: 39497 - DNA, 20 bp, synthetic construct
  misc_feature 1..20: note = chemically synthesized
  source 1..20: mol_type = other DNA
caatgtgtgctggaatgccc

SEQ ID NO: 39498 - DNA, 20 bp, synthetic construct
  misc_feature 1..20: note = chemically synthesized
  source 1..20: mol_type = other DNA
aatgtgtgctggaatgcccg

SEQ ID NO: 39499 - DNA, 20 bp, synthetic construct
  misc_feature 1..20: note = chemically synthesized
  source 1..20: mol_type = other DNA
tgtgtgctggaatgcccggg

SEQ ID NO: 39500 - DNA, 20 bp, synthetic construct
  misc_feature 1..20: note = chemically synthesized
  source 1..20: mol_type = other DNA
tgtgctggaatgcccgggga

SEQ ID NO: 39501 - DNA, 20 bp, synthetic construct
  misc_feature 1..20: note = chemically synthesized
  source 1..20: mol_type = other DNA
gtgctggaatgcccggggag

SEQ ID NO: 39502 - DNA, 20 bp, synthetic construct
  misc_feature 1..20: note = chemically synthesized
  source 1..20: mol_type = other DNA
gaatgcccggggagaggaaa

SEQ ID NO: 39503 - DNA, 20 bp, synthetic construct
  misc_feature 1..20: note = chemically synthesized
  source 1..20: mol_type = other DNA
agaggaaaaagtttctttta

SEQ ID NO: 39504 - DNA, 20 bp, synthetic construct
  misc_feature 1..20: note = chemically synthesized
  source 1..20: mol_type = other DNA
gtttcttttacagccatgct

SEQ ID NO: 39505 - DNA, 20 bp, synthetic construct
  misc_feature 1..20: note = chemically synthesized
  source 1..20: mol_type = other DNA
cttttacagccatgctcagt

SEQ ID NO: 39506 - DNA, 20 bp, synthetic construct
  misc_feature 1..20: note = chemically synthesized
  source 1..20: mol_type = other DNA
ttacagccatgctcagtgag

SEQ ID NO: 39507 - DNA, 20 bp, synthetic construct
  misc_feature 1..20: note = chemically synthesized
  source 1..20: mol_type = other DNA
cagccatgctcagtgagaag

SEQ ID NO: 39508 - DNA, 20 bp, synthetic construct
  misc_feature 1..20: note = chemically synthesized
  source 1..20: mol_type = other DNA
gccatgctcagtgagaagcg

SEQ ID NO: 39509 - DNA, 20 bp, synthetic construct
  misc_feature 1..20: note = chemically synthesized
  source 1..20: mol_type = other DNA
tcttctattcacaaattgct

SEQ ID NO: 39510 - DNA, 20 bp, synthetic construct
  misc_feature 1..20: note = chemically synthesized
  source 1..20: mol_type = other DNA
gcatacacattcacacacca

SEQ ID NO: 39511 - DNA, 20 bp, synthetic construct
  misc_feature 1..20: note = chemically synthesized
  source 1..20: mol_type = other DNA
acacattcacacaccacagt

SEQ ID NO: 39512 - DNA, 20 bp, synthetic construct
  misc_feature 1..20: note = chemically synthesized
  source 1..20: mol_type = other DNA
cacattcacacaccacagtg

SEQ ID NO: 39513 - DNA, 20 bp, synthetic construct
  misc_feature 1..20: note = chemically synthesized
  source 1..20: mol_type = other DNA
attcacacaccacagtgagg

SEQ ID NO: 39514 - DNA, 20 bp, synthetic construct
  misc_feature 1..20: note = chemically synthesized
  source 1..20: mol_type = other DNA
ttaataaaatacatttactt

SEQ ID NO: 39515 - DNA, 20 bp, synthetic construct
  misc_feature 1..20: note = chemically synthesized
  source 1..20: mol_type = other DNA
ataaaatacatttacttcag

SEQ ID NO: 39516 - DNA, 20 bp, synthetic construct
  misc_feature 1..20: note = chemically synthesized
  source 1..20: mol_type = other DNA
acattttgcctataatataa

SEQ ID NO: 39517 - DNA, 20 bp, synthetic construct
  misc_feature 1..20: note = chemically synthesized
  source 1..20: mol_type = other DNA
aaaagtatttttcctattaa

SEQ ID NO: 39518 - DNA, 20 bp, synthetic construct
  misc_feature 1..20: note = chemically synthesized
  source 1..20: mol_type = other DNA
ttaaatccccattgccatat

SEQ ID NO: 39519 - DNA, 20 bp, synthetic construct
  misc_feature 1..20: note = chemically synthesized
  source 1..20: mol_type = other DNA
ccccattgccatatgagccc

SEQ ID NO: 39520 - DNA, 20 bp, synthetic construct
  misc_feature 1..20: note = chemically synthesized
  source 1..20: mol_type = other DNA
ccattgccatatgagccctg

SEQ ID NO: 39521 - DNA, 20 bp, synthetic construct
  misc_feature 1..20: note = chemically synthesized
  source 1..20: mol_type = other DNA
cattgccatatgagccctgg

SEQ ID NO: 39522 - DNA, 20 bp, synthetic construct
  misc_feature 1..20: note = chemically synthesized
  source 1..20: mol_type = other DNA
tatgagccctggaggtgaat

SEQ ID NO: 39523 - DNA, 20 bp, synthetic construct
  misc_feature 1..20: note = chemically synthesized
  source 1..20: mol_type = other DNA
tgagccctggaggtgaatca

SEQ ID NO: 39524 - DNA, 20 bp, synthetic construct
  misc_feature 1..20: note = chemically synthesized
  source 1..20: mol_type = other DNA
gaggtgaatcagagaaacaa

SEQ ID NO: 39525 - DNA, 20 bp, synthetic construct
  misc_feature 1..20: note = chemically synthesized
  source 1..20: mol_type = other DNA
aggtgaatcagagaaacaaa

SEQ ID NO: 39526 - DNA, 20 bp, synthetic construct
  misc_feature 1..20: note = chemically synthesized
  source 1..20: mol_type = other DNA
tcagagaaacaaaaggattg

SEQ ID NO: 39527 - DNA, 20 bp, synthetic construct
  misc_feature 1..20: note = chemically synthesized
  source 1..20: mol_type = other DNA
aaggattgtggaaaaatcat

SEQ ID NO: 39528 - DNA, 20 bp, synthetic construct
  misc_feature 1..20: note = chemically synthesized
  source 1..20: mol_type = other DNA
aggattgtggaaaaatcatc

SEQ ID NO: 39529 - DNA, 20 bp, synthetic construct
  misc_feature 1..20: note = chemically synthesized
  source 1..20: mol_type = other DNA
aaaaatcatcaggttaaaaa

SEQ ID NO: 39530 - DNA, 20 bp, synthetic construct
  misc_feature 1..20: note = chemically synthesized
  source 1..20: mol_type = other DNA
aagaaaaattgattctgttt

SEQ ID NO: 39531 - DNA, 20 bp, synthetic construct
  misc_feature 1..20: note = chemically synthesized
  source 1..20: mol_type = other DNA
agaaaaattgattctgtttt

SEQ ID NO: 39532 - DNA, 20 bp, synthetic construct
  misc_feature 1..20: note = chemically synthesized
  source 1..20: mol_type = other DNA
ttctgttttgggatatttcc

SEQ ID NO: 39533 - DNA, 20 bp, synthetic construct
  misc_feature 1..20: note = chemically synthesized
  source 1..20: mol_type = other DNA
gggatatttcctagcaacat

SEQ ID NO: 39534 - DNA, 20 bp, synthetic construct
  misc_feature 1..20: note = chemically synthesized
  source 1..20: mol_type = other DNA
tatttcctagcaacatgagc

SEQ ID NO: 39535 - DNA, 20 bp, synthetic construct
  misc_feature 1..20: note = chemically synthesized
  source 1..20: mol_type = other DNA
atttcctagcaacatgagct

SEQ ID NO: 39536 - DNA, 20 bp, synthetic construct
  misc_feature 1..20: note = chemically synthesized
  source 1..20: mol_type = other DNA
tttcctagcaacatgagctg

SEQ ID NO: 39537 - DNA, 20 bp, synthetic construct
  misc_feature 1..20: note = chemically synthesized
  source 1..20: mol_type = other DNA
tcctagcaacatgagctggg

SEQ ID NO: 39538 - DNA, 20 bp, synthetic construct
  misc_feature 1..20: note = chemically synthesized
  source 1..20: mol_type = other DNA
cctagcaacatgagctgggg

SEQ ID NO: 39539 - DNA, 20 bp, synthetic construct
  misc_feature 1..20: note = chemically synthesized
  source 1..20: mol_type = other DNA
ctagcaacatgagctgggga

SEQ ID NO: 39540 - DNA, 20 bp, synthetic construct
  misc_feature 1..20: note = chemically synthesized
  source 1..20: mol_type = other DNA
tagcaacatgagctggggag

SEQ ID NO: 39541 - DNA, 20 bp, synthetic construct
  misc_feature 1..20: note = chemically synthesized
  source 1..20: mol_type = other DNA
atgagctggggaggggatct

SEQ ID NO: 39542 - DNA, 20 bp, synthetic construct
  misc_feature 1..20: note = chemically synthesized
  source 1..20: mol_type = other DNA
agctggggaggggatctcag

SEQ ID NO: 39543 - DNA, 20 bp, synthetic construct
  misc_feature 1..20: note = chemically synthesized
  source 1..20: mol_type = other DNA
ctcagcagtgatgctctatg

SEQ ID NO: 39544 - DNA, 20 bp, synthetic construct
  misc_feature 1..20: note = chemically synthesized
  source 1..20: mol_type = other DNA
tgaagcataataaaatgaca

SEQ ID NO: 39545 - DNA, 20 bp, synthetic construct
  misc_feature 1..20: note = chemically synthesized
  source 1..20: mol_type = other DNA
ataataaaatgacacagtta

SEQ ID NO: 39546 - DNA, 20 bp, synthetic construct
  misc_feature 1..20: note = chemically synthesized
  source 1..20: mol_type = other DNA
taataaaatgacacagttac

SEQ ID NO: 39547 - DNA, 20 bp, synthetic construct
  misc_feature 1..20: note = chemically synthesized
  source 1..20: mol_type = other DNA
tgacacagttacaggtaact

SEQ ID NO: 39548 - DNA, 20 bp, synthetic construct
  misc_feature 1..20: note = chemically synthesized
  source 1..20: mol_type = other DNA
agttacaggtaacttagtta

SEQ ID NO: 39549 - DNA, 20 bp, synthetic construct
  misc_feature 1..20: note = chemically synthesized
  source 1..20: mol_type = other DNA
gttacaggtaacttagttaa

SEQ ID NO: 39550 - DNA, 20 bp, synthetic construct
  misc_feature 1..20: note = chemically synthesized
  source 1..20: mol_type = other DNA
ttacaggtaacttagttaaa

SEQ ID NO: 39551 - DNA, 20 bp, synthetic construct
  misc_feature 1..20: note = chemically synthesized
  source 1..20: mol_type = other DNA
tacaggtaacttagttaaag

SEQ ID NO: 39552 - DNA, 20 bp, synthetic construct
  misc_feature 1..20: note = chemically synthesized
  source 1..20: mol_type = other DNA
acaggtaacttagttaaagg

SEQ ID NO: 39553 - DNA, 20 bp, synthetic construct
  misc_feature 1..20: note = chemically synthesized
  source 1..20: mol_type = other DNA
tagttaaagggggaaataaa

SEQ ID NO: 39554 - DNA, 20 bp, synthetic construct
  misc_feature 1..20: note = chemically synthesized
  source 1..20: mol_type = other DNA
ttaaagggggaaataaatgg

SEQ ID NO: 39555 - DNA, 20 bp, synthetic construct
  misc_feature 1..20: note = chemically synthesized
  source 1..20: mol_type = other DNA
ctctttttgaatatcaattg

SEQ ID NO: 39556 - DNA, 20 bp, synthetic construct
  misc_feature 1..20: note = chemically synthesized
  source 1..20: mol_type = other DNA
atgtttaactgaactcactg

SEQ ID NO: 39557 - DNA, 20 bp, synthetic construct
  misc_feature 1..20: note = chemically synthesized
  source 1..20: mol_type = other DNA
tgtttaactgaactcactgt

SEQ ID NO: 39558 - DNA, 20 bp, synthetic construct
  misc_feature 1..20: note = chemically synthesized
  source 1..20: mol_type = other DNA
ttaactgaactcactgtagg

SEQ ID NO: 39559 - DNA, 20 bp, synthetic construct
  misc_feature 1..20: note = chemically synthesized
  source 1..20: mol_type = other DNA
ttaatttattgtgtgttttg

SEQ ID NO: 39560 - DNA, 20 bp, synthetic construct
  misc_feature 1..20: note = chemically synthesized
  source 1..20: mol_type = other DNA
gtgttttgaagtcacactgt

SEQ ID NO: 39561 - DNA, 20 bp, synthetic construct
  misc_feature 1..20: note = chemically synthesized
  source 1..20: mol_type = other DNA
tgaagtcacactgtgagcta

SEQ ID NO: 39562 - DNA, 20 bp, synthetic construct
  misc_feature 1..20: note = chemically synthesized
  source 1..20: mol_type = other DNA
gtgagctatagaatttaccc

SEQ ID NO: 39563 - DNA, 20 bp, synthetic construct
  misc_feature 1..20: note = chemically synthesized
  source 1..20: mol_type = other DNA
tacccaagcacaactcttcc

SEQ ID NO: 39564 - DNA, 20 bp, synthetic construct
  misc_feature 1..20: note = chemically synthesized
  source 1..20: mol_type = other DNA
aagcacaactcttcctggaa

SEQ ID NO: 39565 - DNA, 20 bp, synthetic construct
  misc_feature 1..20: note = chemically synthesized
  source 1..20: mol_type = other DNA
gcacaactcttcctggaaaa

SEQ ID NO: 39566 - DNA, 20 bp, synthetic construct
  misc_feature 1..20: note = chemically synthesized
  source 1..20: mol_type = other DNA
acaactcttcctggaaaaga

SEQ ID NO: 39567 - DNA, 20 bp, synthetic construct
  misc_feature 1..20: note = chemically synthesized
  source 1..20: mol_type = other DNA
ctggaaaagagagttcaaat

SEQ ID NO: 39568 - DNA, 20 bp, synthetic construct
  misc_feature 1..20: note = chemically synthesized
  source 1..20: mol_type = other DNA
aagagagttcaaatgagaaa

SEQ ID NO: 39569 - DNA, 20 bp, synthetic construct
  misc_feature 1..20: note = chemically synthesized
  source 1..20: mol_type = other DNA
agttcaaatgagaaacagtg

SEQ ID NO: 39570 - DNA, 20 bp, synthetic construct
  misc_feature 1..20: note = chemically synthesized
  source 1..20: mol_type = other DNA
gttcaaatgagaaacagtgc

SEQ ID NO: 39571 - DNA, 20 bp, synthetic construct
  misc_feature 1..20: note = chemically synthesized
  source 1..20: mol_type = other DNA
ttcaaatgagaaacagtgcg

SEQ ID NO: 39572 - DNA, 20 bp, synthetic construct
  misc_feature 1..20: note = chemically synthesized
  source 1..20: mol_type = other DNA
atgagaaacagtgcggggtg

SEQ ID NO: 39573 - DNA, 20 bp, synthetic construct
  misc_feature 1..20: note = chemically synthesized
  source 1..20: mol_type = other DNA
aacagtgcggggtgaagaca

SEQ ID NO: 39574 - DNA, 20 bp, synthetic construct
  misc_feature 1..20: note = chemically synthesized
  source 1..20: mol_type = other DNA
gcggggtgaagacatggata

SEQ ID NO: 39575 - DNA, 20 bp, synthetic construct
  misc_feature 1..20: note = chemically synthesized
  source 1..20: mol_type = other DNA
cggggtgaagacatggatat

SEQ ID NO: 39576 - DNA, 20 bp, synthetic construct
  misc_feature 1..20: note = chemically synthesized
  source 1..20: mol_type = other DNA
gatattttgatatatctatc

SEQ ID NO: 39577 - DNA, 20 bp, synthetic construct
  misc_feature 1..20: note = chemically synthesized
  source 1..20: mol_type = other DNA
tatatctatcaagtgctttt

SEQ ID NO: 39578 - DNA, 20 bp, synthetic construct
  misc_feature 1..20: note = chemically synthesized
  source 1..20: mol_type = other DNA
atctatcaagtgctttttag

SEQ ID NO: 39579 - DNA, 20 bp, synthetic construct
  misc_feature 1..20: note = chemically synthesized
  source 1..20: mol_type = other DNA
tcaagtgctttttagtggat

SEQ ID NO: 39580 - DNA, 20 bp, synthetic construct
  misc_feature 1..20: note = chemically synthesized
  source 1..20: mol_type = other DNA
caagtgctttttagtggatt

SEQ ID NO: 39581 - DNA, 20 bp, synthetic construct
  misc_feature 1..20: note = chemically synthesized
  source 1..20: mol_type = other DNA
gctttttagtggattaggtt

SEQ ID NO: 39582 - DNA, 20 bp, synthetic construct
  misc_feature 1..20: note = chemically synthesized
  source 1..20: mol_type = other DNA
ggattaggttcagaatgcat

SEQ ID NO: 39583 - DNA, 20 bp, synthetic construct
  misc_feature 1..20: note = chemically synthesized
  source 1..20: mol_type = other DNA
ccaatgcctgttcaataatc

SEQ ID NO: 39584 - DNA, 20 bp, synthetic construct
  misc_feature 1..20: note = chemically synthesized
  source 1..20: mol_type = other DNA
tgttcaataatccagttttc

SEQ ID NO: 39585 - DNA, 20 bp, synthetic construct
  misc_feature 1..20: note = chemically synthesized
  source 1..20: mol_type = other DNA
aataatccagttttccagca

SEQ ID NO: 39586 - DNA, 20 bp, synthetic construct
  misc_feature 1..20: note = chemically synthesized
  source 1..20: mol_type = other DNA
taatccagttttccagcata

SEQ ID NO: 39587 - DNA, 20 bp, synthetic construct
  misc_feature 1..20: note = chemically synthesized
  source 1..20: mol_type = other DNA
agcatagagcatattaaatt

SEQ ID NO: 39588 - DNA, 20 bp, synthetic construct
  misc_feature 1..20: note = chemically synthesized
  source 1..20: mol_type = other DNA
gcatagagcatattaaattg

SEQ ID NO: 39589 - DNA, 20 bp, synthetic construct
  misc_feature 1..20: note = chemically synthesized
  source 1..20: mol_type = other DNA
tagagcatattaaattgagg

SEQ ID NO: 39590 - DNA, 20 bp, synthetic construct
  misc_feature 1..20: note = chemically synthesized
  source 1..20: mol_type = other DNA
agagcatattaaattgagga

SEQ ID NO: 39591 - DNA, 20 bp, synthetic construct
  misc_feature 1..20: note = chemically synthesized
  source 1..20: mol_type = other DNA
tattaaattgaggaaggaca

SEQ ID NO: 39592 - DNA, 20 bp, synthetic construct
  misc_feature 1..20: note = chemically synthesized
  source 1..20: mol_type = other DNA
attgaggaaggacaaagtca

SEQ ID NO: 39593 - DNA, 20 bp, synthetic construct
  misc_feature 1..20: note = chemically synthesized
  source 1..20: mol_type = other DNA
tgaggaaggacaaagtcaca

SEQ ID NO: 39594 - DNA, 20 bp, synthetic construct
  misc_feature 1..20: note = chemically synthesized
  source 1..20: mol_type = other DNA
gaggaaggacaaagtcacag

SEQ ID NO: 39595 - DNA, 20 bp, synthetic construct
  misc_feature 1..20: note = chemically synthesized
  source 1..20: mol_type = other DNA
gaaggacaaagtcacagagg

SEQ ID NO: 39596 - DNA, 20 bp, synthetic construct
  misc_feature 1..20: note = chemically synthesized
  source 1..20: mol_type = other DNA
aaggacaaagtcacagaggt

SEQ ID NO: 39597 - DNA, 20 bp, synthetic construct
  misc_feature 1..20: note = chemically synthesized
  source 1..20: mol_type = other DNA
aggacaaagtcacagaggtg

SEQ ID NO: 39598 - DNA, 20 bp, synthetic construct
  misc_feature 1..20: note = chemically synthesized
  source 1..20: mol_type = other DNA
gacaaagtcacagaggtggg

SEQ ID NO: 39599 - DNA, 20 bp, synthetic construct
  misc_feature 1..20: note = chemically synthesized
  source 1..20: mol_type = other DNA
aaagtcacagaggtggggag

SEQ ID NO: 39600 - DNA, 20 bp, synthetic construct
  misc_feature 1..20: note = chemically synthesized
  source 1..20: mol_type = other DNA
aagtcacagaggtggggagc

SEQ ID NO: 39601 - DNA, 20 bp, synthetic construct
  misc_feature 1..20: note = chemically synthesized
  source 1..20: mol_type = other DNA
tcacagaggtggggagcagg

SEQ ID NO: 39602 - DNA, 20 bp, synthetic construct
  misc_feature 1..20: note = chemically synthesized
  source 1..20: mol_type = other DNA
ggtggggagcaggtggactg

SEQ ID NO: 39603 - DNA, 20 bp, synthetic construct
  misc_feature 1..20: note = chemically synthesized
  source 1..20: mol_type = other DNA
ggagcaggtggactgtggcc

SEQ ID NO: 39604 - DNA, 20 bp, synthetic construct
  misc_feature 1..20: note = chemically synthesized
  source 1..20: mol_type = other DNA
gagcaggtggactgtggcca

SEQ ID NO: 39605 - DNA, 20 bp, synthetic construct
  misc_feature 1..20: note = chemically synthesized
  source 1..20: mol_type = other DNA
gccaaggactttgcatgaaa

SEQ ID NO: 39606 - DNA, 20 bp, synthetic construct
  misc_feature 1..20: note = chemically synthesized
  source 1..20: mol_type = other DNA
aggactttgcatgaaacagt

SEQ ID NO: 39607 - DNA, 20 bp, synthetic construct
  misc_feature 1..20: note = chemically synthesized
  source 1..20: mol_type = other DNA
tcctccttgccctgccctca

SEQ ID NO: 39608 - DNA, 20 bp, synthetic construct
  misc_feature 1..20: note = chemically synthesized
  source 1..20: mol_type = other DNA
cctcatggtctgtgtactct

SEQ ID NO: 39609 - DNA, 20 bp, synthetic construct
  misc_feature 1..20: note = chemically synthesized
  source 1..20: mol_type = other DNA
ctcatggtctgtgtactctc

SEQ ID NO: 39610 - DNA, 20 bp, synthetic construct
  misc_feature 1..20: note = chemically synthesized
  source 1..20: mol_type = other DNA
catggtctgtgtactctcag

SEQ ID NO: 39611 - DNA, 20 bp, synthetic construct
  misc_feature 1..20: note = chemically synthesized
  source 1..20: mol_type = other DNA
atggtctgtgtactctcagg

SEQ ID NO: 39612 - DNA, 20 bp, synthetic construct
  misc_feature 1..20: note = chemically synthesized
  source 1..20: mol_type = other DNA
tctgtgtactctcaggaggt

SEQ ID NO: 39613 - DNA, 20 bp, synthetic construct
  misc_feature 1..20: note = chemically synthesized
  source 1..20: mol_type = other DNA
ctgtgtactctcaggaggtc

SEQ ID NO: 39614 - DNA, 20 bp, synthetic construct
  misc_feature 1..20: note = chemically synthesized
  source 1..20: mol_type = other DNA
gtactctcaggaggtcagga

SEQ ID NO: 39615 - DNA, 20 bp, synthetic construct
  misc_feature 1..20: note = chemically synthesized
  source 1..20: mol_type = other DNA
tactctcaggaggtcaggac

SEQ ID NO: 39616 - DNA, 20 bp, synthetic construct
  misc_feature 1..20: note = chemically synthesized
  source 1..20: mol_type = other DNA
aggtcaggacaggcctttct

SEQ ID NO: 39617 - DNA, 20 bp, synthetic construct
  misc_feature 1..20: note = chemically synthesized
  source 1..20: mol_type = other DNA
ggacaggcctttctgagaat

SEQ ID NO: 39618 - DNA, 20 bp, synthetic construct
  misc_feature 1..20: note = chemically synthesized
  source 1..20: mol_type = other DNA
ctgttcatctgcctttctac

SEQ ID NO: 39619 - DNA, 20 bp, synthetic construct
  misc_feature 1..20: note = chemically synthesized
  source 1..20: mol_type = other DNA
ttctactggatacttgtcat

SEQ ID NO: 39620 - DNA, 20 bp, synthetic construct
  misc_feature 1..20: note = chemically synthesized
  source 1..20: mol_type = other DNA
atacaaacacatgttctctg

SEQ ID NO: 39621 - DNA, 20 bp, synthetic construct
  misc_feature 1..20: note = chemically synthesized
  source 1..20: mol_type = other DNA
ctctgcagtgtgtcatcttt

SEQ ID NO: 39622 - DNA, 20 bp, synthetic construct
  misc_feature 1..20: note = chemically synthesized
  source 1..20: mol_type = other DNA
tcccctgaccctgtattccc

SEQ ID NO: 39623 - DNA, 20 bp, synthetic construct
  misc_feature 1..20: note = chemically synthesized
  source 1..20: mol_type = other DNA
cctgaccctgtattccctag

SEQ ID NO: 39624 - DNA, 20 bp, synthetic construct
  misc_feature 1..20: note = chemically synthesized
  source 1..20: mol_type = other DNA
cctagaagtctcgctgcttt

SEQ ID NO: 39625 - DNA, 20 bp, synthetic construct
  misc_feature 1..20: note = chemically synthesized
  source 1..20: mol_type = other DNA
tagaagtctcgctgctttca

SEQ ID NO: 39626 - DNA, 20 bp, synthetic construct
  misc_feature 1..20: note = chemically synthesized
  source 1..20: mol_type = other DNA
agtctcgctgctttcagagc

SEQ ID NO: 39627 - DNA, 20 bp, synthetic construct
  misc_feature 1..20: note = chemically synthesized
  source 1..20: mol_type = other DNA
gtctcgctgctttcagagcc

SEQ ID NO: 39628 - DNA, 20 bp, synthetic construct
  misc_feature 1..20: note = chemically synthesized
  source 1..20: mol_type = other DNA
tgccacccccactgctcttc

SEQ ID NO: 39629 - DNA, 20 bp, synthetic construct
  misc_feature 1..20: note = chemically synthesized
  source 1..20: mol_type = other DNA
taacccactccatctgcatg

SEQ ID NO: 39630 - DNA, 20 bp, synthetic construct
  misc_feature 1..20: note = chemically synthesized
  source 1..20: mol_type = other DNA
ggcccccaccacacccctca

SEQ ID NO: 39631 - DNA, 20 bp, synthetic construct
  misc_feature 1..20: note = chemically synthesized
  source 1..20: mol_type = other DNA
ccccaccacacccctcaaag

SEQ ID NO: 39632 - DNA, 20 bp, synthetic construct
  misc_feature 1..20: note = chemically synthesized
  source 1..20: mol_type = other DNA
ccacacccctcaaagtggtc

SEQ ID NO: 39633 - DNA, 20 bp, synthetic construct
  misc_feature 1..20: note = chemically synthesized
  source 1..20: mol_type = other DNA
cacacccctcaaagtggtca

SEQ ID NO: 39634 - DNA, 20 bp, synthetic construct
  misc_feature 1..20: note = chemically synthesized
  source 1..20: mol_type = other DNA
tgtcctgttgcttaattcca

SEQ ID NO: 39635 - DNA, 20 bp, synthetic construct
  misc_feature 1..20: note = chemically synthesized
  source 1..20: mol_type = other DNA
cctgttgcttaattccatgg

SEQ ID NO: 39636 - DNA, 20 bp, synthetic construct
  misc_feature 1..20: note = chemically synthesized
  source 1..20: mol_type = other DNA
tgcttaattccatggaagct

SEQ ID NO: 39637 - DNA, 20 bp, synthetic construct
  misc_feature 1..20: note = chemically synthesized
  source 1..20: mol_type = other DNA
cttggctatcttcattttat

SEQ ID NO: 39638 - DNA, 20 bp, synthetic construct
  misc_feature 1..20: note = chemically synthesized
  source 1..20: mol_type = other DNA
ttcattttattagcctcttt

SEQ ID NO: 39639 - DNA, 20 bp, synthetic construct
  misc_feature 1..20: note = chemically synthesized
  source 1..20: mol_type = other DNA
aaaatcactacattttgtgc

SEQ ID NO: 39640 - DNA, 20 bp, synthetic construct
  misc_feature 1..20: note = chemically synthesized
  source 1..20: mol_type = other DNA
aatcactacattttgtgcca

SEQ ID NO: 39641 - DNA, 20 bp, synthetic construct
  misc_feature 1..20: note = chemically synthesized
  source 1..20: mol_type = other DNA
actacattttgtgccagaga

SEQ ID NO: 39642 - DNA, 20 bp, synthetic construct
  misc_feature 1..20: note = chemically synthesized
  source 1..20: mol_type = other DNA
tacattttgtgccagagatg

SEQ ID NO: 39643 - DNA, 20 bp, synthetic construct
  misc_feature 1..20: note = chemically synthesized
  source 1..20: mol_type = other DNA
ttttgtgccagagatggagc

SEQ ID NO: 39644 - DNA, 20 bp, synthetic construct
  misc_feature 1..20: note = chemically synthesized
  source 1..20: mol_type = other DNA
agagatggagctggcatctc

SEQ ID NO: 39645 - DNA, 20 bp, synthetic construct
  misc_feature 1..20: note = chemically synthesized
  source 1..20: mol_type = other DNA
gagatggagctggcatctcc

SEQ ID NO: 39646 - DNA, 20 bp, synthetic construct
  misc_feature 1..20: note = chemically synthesized
  source 1..20: mol_type = other DNA
ggagctggcatctccaggct

SEQ ID NO: 39647 - DNA, 20 bp, synthetic construct
  misc_feature 1..20: note = chemically synthesized
  source 1..20: mol_type = other DNA
gctggcatctccaggcttgg

SEQ ID NO: 39648 - DNA, 20 bp, synthetic construct
  misc_feature 1..20: note = chemically synthesized
  source 1..20: mol_type = other DNA
tggcatctccaggcttggaa

SEQ ID NO: 39649 - DNA, 20 bp, synthetic construct
  misc_feature 1..20: note = chemically synthesized
  source 1..20: mol_type = other DNA
ggcatctccaggcttggaag

SEQ ID NO: 39650 - DNA, 20 bp, synthetic construct
  misc_feature 1..20: note = chemically synthesized
  source 1..20: mol_type = other DNA
gcatctccaggcttggaaga

SEQ ID NO: 39651 - DNA, 20 bp, synthetic construct
  misc_feature 1..20: note = chemically synthesized
  source 1..20: mol_type = other DNA
ggcttggaagagggctgctg

SEQ ID NO: 39652 - DNA, 20 bp, synthetic construct
  misc_feature 1..20: note = chemically synthesized
  source 1..20: mol_type = other DNA
ggaagagggctgctgaagct

SEQ ID NO: 39653 - DNA, 20 bp, synthetic construct
  misc_feature 1..20: note = chemically synthesized
  source 1..20: mol_type = other DNA
gagggctgctgaagctcagc

SEQ ID NO: 39654 - DNA, 20 bp, synthetic construct
  misc_feature 1..20: note = chemically synthesized
  source 1..20: mol_type = other DNA
agggctgctgaagctcagcc

SEQ ID NO: 39655 - DNA, 20 bp, synthetic construct
  misc_feature 1..20: note = chemically synthesized
  source 1..20: mol_type = other DNA
gaagctcagccaggtgtcct

SEQ ID NO: 39656 - DNA, 20 bp, synthetic construct
  misc_feature 1..20: note = chemically synthesized
  source 1..20: mol_type = other DNA
aagctcagccaggtgtccta

SEQ ID NO: 39657 - DNA, 20 bp, synthetic construct
  misc_feature 1..20: note = chemically synthesized
  source 1..20: mol_type = other DNA
gctcagccaggtgtcctaag

SEQ ID NO: 39658 - DNA, 20 bp, synthetic construct
  misc_feature 1..20: note = chemically synthesized
  source 1..20: mol_type = other DNA
ccaggtgtcctaaggagcct

SEQ ID NO: 39659 - DNA, 20 bp, synthetic construct
  misc_feature 1..20: note = chemically synthesized
  source 1..20: mol_type = other DNA
caggtgtcctaaggagcctc

SEQ ID NO: 39660 - DNA, 20 bp, synthetic construct
  misc_feature 1..20: note = chemically synthesized
  source 1..20: mol_type = other DNA
tgtcctaaggagcctcagga

SEQ ID NO: 39661 - DNA, 20 bp, synthetic construct
  misc_feature 1..20: note = chemically synthesized
  source 1..20: mol_type = other DNA
gtcctaaggagcctcaggac

SEQ ID NO: 39662 - DNA, 20 bp, synthetic construct
  misc_feature 1..20: note = chemically synthesized
  source 1..20: mol_type = other DNA
tcctaaggagcctcaggaca

SEQ ID NO: 39663 - DNA, 20 bp, synthetic construct
  misc_feature 1..20: note = chemically synthesized
  source 1..20: mol_type = other DNA
cctaaggagcctcaggacag

SEQ ID NO: 39664 - DNA, 20 bp, synthetic construct
  misc_feature 1..20: note = chemically synthesized
  source 1..20: mol_type = other DNA
gcctcaggacaggggatgct

SEQ ID NO: 39665 - DNA, 20 bp, synthetic construct
  misc_feature 1..20: note = chemically synthesized
  source 1..20: mol_type = other DNA
tcaggacaggggatgctcag

SEQ ID NO: 39666 - DNA, 20 bp, synthetic construct
  misc_feature 1..20: note = chemically synthesized
  source 1..20: mol_type = other DNA
gatgctcagtagccttgcaa

SEQ ID NO: 39667 - DNA, 20 bp, synthetic construct
  misc_feature 1..20: note = chemically synthesized
  source 1..20: mol_type = other DNA
atgctcagtagccttgcaat

SEQ ID NO: 39668 - DNA, 20 bp, synthetic construct
  misc_feature 1..20: note = chemically synthesized
  source 1..20: mol_type = other DNA
gtagccttgcaatgggaaca

SEQ ID NO: 39669 - DNA, 20 bp, synthetic construct
  misc_feature 1..20: note = chemically synthesized
  source 1..20: mol_type = other DNA
cttgcaatgggaacacagct

SEQ ID NO: 39670 - DNA, 20 bp, synthetic construct
  misc_feature 1..20: note = chemically synthesized
  source 1..20: mol_type = other DNA
gaacacagctgagccccact

SEQ ID NO: 39671 - DNA, 20 bp, synthetic construct
  misc_feature 1..20: note = chemically synthesized
  source 1..20: mol_type = other DNA
tggccaccctttgccacaac

SEQ ID NO: 39672 - DNA, 20 bp, synthetic construct
  misc_feature 1..20: note = chemically synthesized
  source 1..20: mol_type = other DNA
ggccaccctttgccacaacc

SEQ ID NO: 39673 - DNA, 20 bp, synthetic construct
  misc_feature 1..20: note = chemically synthesized
  source 1..20: mol_type = other DNA
caccctttgccacaaccagg

SEQ ID NO: 39674 - DNA, 20 bp, synthetic construct
  misc_feature 1..20: note = chemically synthesized
  source 1..20: mol_type = other DNA
ctttgccacaaccaggcaga

SEQ ID NO: 39675 - DNA, 20 bp, synthetic construct
  misc_feature 1..20: note = chemically synthesized
  source 1..20: mol_type = other DNA
tgccacaaccaggcagaaag

SEQ ID NO: 39676 - DNA, 20 bp, synthetic construct
  misc_feature 1..20: note = chemically synthesized
  source 1..20: mol_type = other DNA
ggcagaaagcagcttttgaa

SEQ ID NO: 39677 - DNA, 20 bp, synthetic construct
  misc_feature 1..20: note = chemically synthesized
  source 1..20: mol_type = other DNA
tttgaacagatttgttgcct

SEQ ID NO: 39678 - DNA, 20 bp, synthetic construct
  misc_feature 1..20: note = chemically synthesized
  source 1..20: mol_type = other DNA
ttgcctcagatttgatctca

SEQ ID NO: 39679 - DNA, 20 bp, synthetic construct
  misc_feature 1..20: note = chemically synthesized
  source 1..20: mol_type = other DNA
ttgatctcaaagaaaaatcg

SEQ ID NO: 39680 - DNA, 20 bp, synthetic construct
  misc_feature 1..20: note = chemically synthesized
  source 1..20: mol_type = other DNA
tgatctcaaagaaaaatcgt

SEQ ID NO: 39681 - DNA, 20 bp, synthetic construct
  misc_feature 1..20: note = chemically synthesized
  source 1..20: mol_type = other DNA
tctcaaagaaaaatcgtggg

SEQ ID NO: 39682 - DNA, 20 bp, synthetic construct
  misc_feature 1..20: note = chemically synthesized
  source 1..20: mol_type = other DNA
agaaaaatcgtgggcagtat

SEQ ID NO: 39683 - DNA, 20 bp, synthetic construct
  misc_feature 1..20: note = chemically synthesized
  source 1..20: mol_type = other DNA
atcgtgggcagtattggtcc

SEQ ID NO: 39684 - DNA, 20 bp, synthetic construct
  misc_feature 1..20: note = chemically synthesized
  source 1..20: mol_type = other DNA
tcgtgggcagtattggtccc

SEQ ID NO: 39685 - DNA, 20 bp, synthetic construct
  misc_feature 1..20: note = chemically synthesized
  source 1..20: mol_type = other DNA
ttacaatttcctctgaaatc

SEQ ID NO: 39686 - DNA, 20 bp, synthetic construct
  misc_feature 1..20: note = chemically synthesized
  source 1..20: mol_type = other DNA
ctggatgcctatcaacacct

SEQ ID NO: 39687 - DNA, 20 bp, synthetic construct
  misc_feature 1..20: note = chemically synthesized
  source 1..20: mol_type = other DNA
actgaattctccccaactaa

SEQ ID NO: 39688 - DNA, 20 bp, synthetic construct
  misc_feature 1..20: note = chemically synthesized
  source 1..20: mol_type = other DNA
gaattctccccaactaatag

SEQ ID NO: 39689 - DNA, 20 bp, synthetic construct
  misc_feature 1..20: note = chemically synthesized
  source 1..20: mol_type = other DNA
ctaatagtggtgtgtcactg

SEQ ID NO: 39690 - DNA, 20 bp, synthetic construct
  misc_feature 1..20: note = chemically synthesized
  source 1..20: mol_type = other DNA
tagtggtgtgtcactgtagt

SEQ ID NO: 39691 - DNA, 20 bp, synthetic construct
  misc_feature 1..20: note = chemically synthesized
  source 1..20: mol_type = other DNA
gtgtgtcactgtagtaagcc

SEQ ID NO: 39692 - DNA, 20 bp, synthetic construct
  misc_feature 1..20: note = chemically synthesized
  source 1..20: mol_type = other DNA
tagtaagcctagtacaaaaa

SEQ ID NO: 39693 - DNA, 20 bp, synthetic construct
  misc_feature 1..20: note = chemically synthesized
  source 1..20: mol_type = other DNA
tacaaaaatggccttctttg

SEQ ID NO: 39694 - DNA, 20 bp, synthetic construct
  misc_feature 1..20: note = chemically synthesized
  source 1..20: mol_type = other DNA
caaaaatggccttctttgtg

SEQ ID NO: 39695 - DNA, 20 bp, synthetic construct
  misc_feature 1..20: note = chemically synthesized
  source 1..20: mol_type = other DNA
aaaaatggccttctttgtgg

SEQ ID NO: 39696 - DNA, 20 bp, synthetic construct
  misc_feature 1..20: note = chemically synthesized
  source 1..20: mol_type = other DNA
aaatggccttctttgtggag

SEQ ID NO: 39697 - DNA, 20 bp, synthetic construct
  misc_feature 1..20: note = chemically synthesized
  source 1..20: mol_type = other DNA
tttttgcttaatttttgccc

SEQ ID NO: 39698 - DNA, 20 bp, synthetic construct
  misc_feature 1..20: note = chemically synthesized
  source 1..20: mol_type = other DNA
gcttaatttttgcccaagat

SEQ ID NO: 39699 - DNA, 20 bp, synthetic construct
  misc_feature 1..20: note = chemically synthesized
  source 1..20: mol_type = other DNA
cccaagatgagaacataatt

SEQ ID NO: 39700 - DNA, 20 bp, synthetic construct
  misc_feature 1..20: note = chemically synthesized
  source 1..20: mol_type = other DNA
caccaacatttttgtaacta

SEQ ID NO: 39701 - DNA, 20 bp, synthetic construct
  misc_feature 1..20: note = chemically synthesized
  source 1..20: mol_type = other DNA
accaacatttttgtaactaa

SEQ ID NO: 39702 - DNA, 20 bp, synthetic construct
  misc_feature 1..20: note = chemically synthesized
  source 1..20: mol_type = other DNA
caacatttttgtaactaaag

SEQ ID NO: 39703 - DNA, 20 bp, synthetic construct
  misc_feature 1..20: note = chemically synthesized
  source 1..20: mol_type = other DNA
aacatttttgtaactaaagg

SEQ ID NO: 39704 - DNA, 20 bp, synthetic construct
  misc_feature 1..20: note = chemically synthesized
  source 1..20: mol_type = other DNA
acatttttgtaactaaagga

SEQ ID NO: 39705 - DNA, 20 bp, synthetic construct
  misc_feature 1..20: note = chemically synthesized
  source 1..20: mol_type = other DNA
taactaaaggagggaccatt

SEQ ID NO: 39706 - DNA, 20 bp, synthetic construct
  misc_feature 1..20: note = chemically synthesized
  source 1..20: mol_type = other DNA
ctaaaggagggaccattcag

SEQ ID NO: 39707 - DNA, 20 bp, synthetic construct
  misc_feature 1..20: note = chemically synthesized
  source 1..20: mol_type = other DNA
aagatgcttatcaactgtca

SEQ ID NO: 39708 - DNA, 20 bp, synthetic construct
  misc_feature 1..20: note = chemically synthesized
  source 1..20: mol_type = other DNA
cttatcaactgtcaaagtga

SEQ ID NO: 39709 - DNA, 20 bp, synthetic construct
  misc_feature 1..20: note = chemically synthesized
  source 1..20: mol_type = other DNA
acaaccaatgcacatattgt

SEQ ID NO: 39710 - DNA, 20 bp, synthetic construct
  misc_feature 1..20: note = chemically synthesized
  source 1..20: mol_type = other DNA
tattgtaagaaatcaaacaa

SEQ ID NO: 39711 - DNA, 20 bp, synthetic construct
  misc_feature 1..20: note = chemically synthesized
  source 1..20: mol_type = other DNA
gaaatcaaacaatggcctcc

SEQ ID NO: 39712 - DNA, 20 bp, synthetic construct
  misc_feature 1..20: note = chemically synthesized
  source 1..20: mol_type = other DNA
aaatcaaacaatggcctcca

SEQ ID NO: 39713 - DNA, 20 bp, synthetic construct
  misc_feature 1..20: note = chemically synthesized
  source 1..20: mol_type = other DNA
ctccaaggttcatttctaca

SEQ ID NO: 39714 - DNA, 20 bp, synthetic construct
  misc_feature 1..20: note = chemically synthesized
  source 1..20: mol_type = other DNA
tccaaggttcatttctacac

SEQ ID NO: 39715 - DNA, 20 bp, synthetic construct
  misc_feature 1..20: note = chemically synthesized
  source 1..20: mol_type = other DNA
ccaaggttcatttctacaca

SEQ ID NO: 39716 - DNA, 20 bp, synthetic construct
  misc_feature 1..20: note = chemically synthesized
  source 1..20: mol_type = other DNA
gttcatttctacacagggat

SEQ ID NO: 39717 - DNA, 20 bp, synthetic construct
  misc_feature 1..20: note = chemically synthesized
  source 1..20: mol_type = other DNA
catttctacacagggattag

SEQ ID NO: 39718 - DNA, 20 bp, synthetic construct
  misc_feature 1..20: note = chemically synthesized
  source 1..20: mol_type = other DNA
tagcagatcaacatcaatct

SEQ ID NO: 39719 - DNA, 20 bp, synthetic construct
  misc_feature 1..20: note = chemically synthesized
  source 1..20: mol_type = other DNA
caacatcaatcttggcaaca

SEQ ID NO: 39720 - DNA, 20 bp, synthetic construct
  misc_feature 1..20: note = chemically synthesized
  source 1..20: mol_type = other DNA
ggcaacacagttgccactga

SEQ ID NO: 39721 - DNA, 20 bp, synthetic construct
  misc_feature 1..20: note = chemically synthesized
  source 1..20: mol_type = other DNA
ttattttttttatcatgaca

SEQ ID NO: 39722 - DNA, 20 bp, synthetic construct
  misc_feature 1..20: note = chemically synthesized
  source 1..20: mol_type = other DNA
tttatcatgacatggcaatc

SEQ ID NO: 39723 - DNA, 20 bp, synthetic construct
  misc_feature 1..20: note = chemically synthesized
  source 1..20: mol_type = other DNA
tatcatgacatggcaatcaa

SEQ ID NO: 39724 - DNA, 20 bp, synthetic construct
  misc_feature 1..20: note = chemically synthesized
  source 1..20: mol_type = other DNA
aacatgatttattcttattt

SEQ ID NO: 39725 - DNA, 20 bp, synthetic construct
  misc_feature 1..20: note = chemically synthesized
  source 1..20: mol_type = other DNA
tattcttatttaagatttta

SEQ ID NO: 39726 - DNA, 20 bp, synthetic construct
  misc_feature 1..20: note = chemically synthesized
  source 1..20: mol_type = other DNA
cttatttaagattttatggt

SEQ ID NO: 39727 - DNA, 20 bp, synthetic construct
  misc_feature 1..20: note = chemically synthesized
  source 1..20: mol_type = other DNA
ttaagattttatggttagac

SEQ ID NO: 39728 - DNA, 20 bp, synthetic construct
  misc_feature 1..20: note = chemically synthesized
  source 1..20: mol_type = other DNA
taagattttatggttagact

SEQ ID NO: 39729 - DNA, 20 bp, synthetic construct
  misc_feature 1..20: note = chemically synthesized
  source 1..20: mol_type = other DNA
gattttatggttagactagg

SEQ ID NO: 39730 - DNA, 20 bp, synthetic construct
  misc_feature 1..20: note = chemically synthesized
  source 1..20: mol_type = other DNA
ttatggttagactaggcaga

SEQ ID NO: 39731 - DNA, 20 bp, synthetic construct
  misc_feature 1..20: note = chemically synthesized
  source 1..20: mol_type = other DNA
ggttagactaggcagatagc

SEQ ID NO: 39732 - DNA, 20 bp, synthetic construct
  misc_feature 1..20: note = chemically synthesized
  source 1..20: mol_type = other DNA
ctaggcagatagctagatat

SEQ ID NO: 39733 - DNA, 20 bp, synthetic construct
  misc_feature 1..20: note = chemically synthesized
  source 1..20: mol_type = other DNA
ggcagatagctagatatgag

SEQ ID NO: 39734 - DNA, 20 bp, synthetic construct
  misc_feature 1..20: note = chemically synthesized
  source 1..20: mol_type = other DNA
gcagatagctagatatgagc

SEQ ID NO: 39735 - DNA, 20 bp, synthetic construct
  misc_feature 1..20: note = chemically synthesized
  source 1..20: mol_type = other DNA
agatagctagatatgagcag

SEQ ID NO: 39736 - DNA, 20 bp, synthetic construct
  misc_feature 1..20: note = chemically synthesized
  source 1..20: mol_type = other DNA
gatagctagatatgagcagg

SEQ ID NO: 39737 - DNA, 20 bp, synthetic construct
  misc_feature 1..20: note = chemically synthesized
  source 1..20: mol_type = other DNA
agctagatatgagcaggagg

SEQ ID NO: 39738 - DNA, 20 bp, synthetic construct
  misc_feature 1..20: note = chemically synthesized
  source 1..20: mol_type = other DNA
tagatatgagcaggaggtgg

SEQ ID NO: 39739 - DNA, 20 bp, synthetic construct
  misc_feature 1..20: note = chemically synthesized
  source 1..20: mol_type = other DNA
agcaggaggtggaagcccct

SEQ ID NO: 39740 - DNA, 20 bp, synthetic construct
  misc_feature 1..20: note = chemically synthesized
  source 1..20: mol_type = other DNA
caggaggtggaagcccctga

SEQ ID NO: 39741 - DNA, 20 bp, synthetic construct
  misc_feature 1..20: note = chemically synthesized
  source 1..20: mol_type = other DNA
ggtggaagcccctgagagaa

SEQ ID NO: 39742 - DNA, 20 bp, synthetic construct
  misc_feature 1..20: note = chemically synthesized
  source 1..20: mol_type = other DNA
tggaagcccctgagagaatg

SEQ ID NO: 39743 - DNA, 20 bp, synthetic construct
  misc_feature 1..20: note = chemically synthesized
  source 1..20: mol_type = other DNA
ggaagcccctgagagaatgg

SEQ ID NO: 39744 - DNA, 20 bp, synthetic construct
  misc_feature 1..20: note = chemically synthesized
  source 1..20: mol_type = other DNA
cccctgagagaatggaggtc

SEQ ID NO: 39745 - DNA, 20 bp, synthetic construct
  misc_feature 1..20: note = chemically synthesized
  source 1..20: mol_type = other DNA
cctgagagaatggaggtctg

SEQ ID NO: 39746 - DNA, 20 bp, synthetic construct
  misc_feature 1..20: note = chemically synthesized
  source 1..20: mol_type = other DNA
gtctggagaatctgaaaccc

SEQ ID NO: 39747 - DNA, 20 bp, synthetic construct
  misc_feature 1..20: note = chemically synthesized
  source 1..20: mol_type = other DNA
ctggagaatctgaaacccca

SEQ ID NO: 39748 - DNA, 20 bp, synthetic construct
  misc_feature 1..20: note = chemically synthesized
  source 1..20: mol_type = other DNA
tgaaaccccagagattaccc

SEQ ID NO: 39749 - DNA, 20 bp, synthetic construct
  misc_feature 1..20: note = chemically synthesized
  source 1..20: mol_type = other DNA
attacccaagtcctgcatgc

SEQ ID NO: 39750 - DNA, 20 bp, synthetic construct
  misc_feature 1..20: note = chemically synthesized
  source 1..20: mol_type = other DNA
aagtcctgcatgctagacat

SEQ ID NO: 39751 - DNA, 20 bp, synthetic construct
  misc_feature 1..20: note = chemically synthesized
  source 1..20: mol_type = other DNA
tcctgcatgctagacatgag

SEQ ID NO: 39752 - DNA, 20 bp, synthetic construct
  misc_feature 1..20: note = chemically synthesized
  source 1..20: mol_type = other DNA
ctgcatgctagacatgagtg

SEQ ID NO: 39753 - DNA, 20 bp, synthetic construct
  misc_feature 1..20: note = chemically synthesized
  source 1..20: mol_type = other DNA
tgcatgctagacatgagtgg

SEQ ID NO: 39754 - DNA, 20 bp, synthetic construct
  misc_feature 1..20: note = chemically synthesized
  source 1..20: mol_type = other DNA
catgctagacatgagtggag

SEQ ID NO: 39755 - DNA, 20 bp, synthetic construct
  misc_feature 1..20: note = chemically synthesized
  source 1..20: mol_type = other DNA
atgctagacatgagtggagg

SEQ ID NO: 39756 - DNA, 20 bp, synthetic construct
  misc_feature 1..20: note = chemically synthesized
  source 1..20: mol_type = other DNA
tgctagacatgagtggagga

SEQ ID NO: 39757 - DNA, 20 bp, synthetic construct
  misc_feature 1..20: note = chemically synthesized
  source 1..20: mol_type = other DNA
gctagacatgagtggaggag

SEQ ID NO: 39758 - DNA, 20 bp, synthetic construct
  misc_feature 1..20: note = chemically synthesized
  source 1..20: mol_type = other DNA
ctagacatgagtggaggagg

SEQ ID NO: 39759 - DNA, 20 bp, synthetic construct
  misc_feature 1..20: note = chemically synthesized
  source 1..20: mol_type = other DNA
agtggaggagggggaatacc

SEQ ID NO: 39760 - DNA, 20 bp, synthetic construct
  misc_feature 1..20: note = chemically synthesized
  source 1..20: mol_type = other DNA
gtggaggagggggaatacct

SEQ ID NO: 39761 - DNA, 20 bp, synthetic construct
  misc_feature 1..20: note = chemically synthesized
  source 1..20: mol_type = other DNA
gaggagggggaatacctagg

SEQ ID NO: 39762 - DNA, 20 bp, synthetic construct
  misc_feature 1..20: note = chemically synthesized
  source 1..20: mol_type = other DNA
gggggaatacctaggtagaa

SEQ ID NO: 39763 - DNA, 20 bp, synthetic construct
  misc_feature 1..20: note = chemically synthesized
  source 1..20: mol_type = other DNA
ggtagaaaagaatgcccctt

SEQ ID NO: 39764 - DNA, 20 bp, synthetic construct
  misc_feature 1..20: note = chemically synthesized
  source 1..20: mol_type = other DNA
agaatgccccttaagatgcc

SEQ ID NO: 39765 - DNA, 20 bp, synthetic construct
  misc_feature 1..20: note = chemically synthesized
  source 1..20: mol_type = other DNA
atgccccttaagatgcccag

SEQ ID NO: 39766 - DNA, 20 bp, synthetic construct
  misc_feature 1..20: note = chemically synthesized
  source 1..20: mol_type = other DNA
cccagcagtcgctcactgtg

SEQ ID NO: 39767 - DNA, 20 bp, synthetic construct
  misc_feature 1..20: note = chemically synthesized
  source 1..20: mol_type = other DNA
tcactgtgcagttaactttt

SEQ ID NO: 39768 - DNA, 20 bp, synthetic construct
  misc_feature 1..20: note = chemically synthesized
  source 1..20: mol_type = other DNA
ttaacttttcagaatgctgc

SEQ ID NO: 39769 - DNA, 20 bp, synthetic construct
  misc_feature 1..20: note = chemically synthesized
  source 1..20: mol_type = other DNA
tgctgctagatacatgctga

SEQ ID NO: 39770 - DNA, 20 bp, synthetic construct
  misc_feature 1..20: note = chemically synthesized
  source 1..20: mol_type = other DNA
gctgctagatacatgctgat

SEQ ID NO: 39771 - DNA, 20 bp, synthetic construct
  misc_feature 1..20: note = chemically synthesized
  source 1..20: mol_type = other DNA
ctgctagatacatgctgata

SEQ ID NO: 39772 - DNA, 20 bp, synthetic construct
  misc_feature 1..20: note = chemically synthesized
  source 1..20: mol_type = other DNA
gctagatacatgctgatagg

SEQ ID NO: 39773 - DNA, 20 bp, synthetic construct
  misc_feature 1..20: note = chemically synthesized
  source 1..20: mol_type = other DNA
ctagatacatgctgataggg

SEQ ID NO: 39774 - DNA, 20 bp, synthetic construct
  misc_feature 1..20: note = chemically synthesized
  source 1..20: mol_type = other DNA
tagatacatgctgataggga

SEQ ID NO: 39775 - DNA, 20 bp, synthetic construct
  misc_feature 1..20: note = chemically synthesized
  source 1..20: mol_type = other DNA
atacatgctgatagggaggg

SEQ ID NO: 39776 - DNA, 20 bp, synthetic construct
  misc_feature 1..20: note = chemically synthesized
  source 1..20: mol_type = other DNA
acatgctgatagggagggaa

SEQ ID NO: 39777 - DNA, 20 bp, synthetic construct
  misc_feature 1..20: note = chemically synthesized
  source 1..20: mol_type = other DNA
catgctgatagggagggaag

SEQ ID NO: 39778 - DNA, 20 bp, synthetic construct
  misc_feature 1..20: note = chemically synthesized
  source 1..20: mol_type = other DNA
atgctgatagggagggaaga

SEQ ID NO: 39779 - DNA, 20 bp, synthetic construct
  misc_feature 1..20: note = chemically synthesized
  source 1..20: mol_type = other DNA
gatagggagggaagagggca

SEQ ID NO: 39780 - DNA, 20 bp, synthetic construct
  misc_feature 1..20: note = chemically synthesized
  source 1..20: mol_type = other DNA
atagggagggaagagggcaa

SEQ ID NO: 39781 - DNA, 20 bp, synthetic construct
  misc_feature 1..20: note = chemically synthesized
  source 1..20: mol_type = other DNA
agggagggaagagggcaaag

SEQ ID NO: 39782 - DNA, 20 bp, synthetic construct
  misc_feature 1..20: note = chemically synthesized
  source 1..20: mol_type = other DNA
agggcaaaggagaaattcct

SEQ ID NO: 39783 - DNA, 20 bp, synthetic construct
  misc_feature 1..20: note = chemically synthesized
  source 1..20: mol_type = other DNA
ggcaaaggagaaattcctaa

SEQ ID NO: 39784 - DNA, 20 bp, synthetic construct
  misc_feature 1..20: note = chemically synthesized
  source 1..20: mol_type = other DNA
agaaattcctaagagataca

SEQ ID NO: 39785 - DNA, 20 bp, synthetic construct
  misc_feature 1..20: note = chemically synthesized
  source 1..20: mol_type = other DNA
tcctaagagatacacggttg

SEQ ID NO: 39786 - DNA, 20 bp, synthetic construct
  misc_feature 1..20: note = chemically synthesized
  source 1..20: mol_type = other DNA
aagagatacacggttgcagt

SEQ ID NO: 39787 - DNA, 20 bp, synthetic construct
  misc_feature 1..20: note = chemically synthesized
  source 1..20: mol_type = other DNA
gttgcagttagtatacatct

SEQ ID NO: 39788 - DNA, 20 bp, synthetic construct
  misc_feature 1..20: note = chemically synthesized
  source 1..20: mol_type = other DNA
gagtgctatacaaccttctt

SEQ ID NO: 39789 - DNA, 20 bp, synthetic construct
  misc_feature 1..20: note = chemically synthesized
  source 1..20: mol_type = other DNA
agtgctatacaaccttcttt

SEQ ID NO: 39790 - DNA, 20 bp, synthetic construct
  misc_feature 1..20: note = chemically synthesized
  source 1..20: mol_type = other DNA
gctatacaaccttctttggg

SEQ ID NO: 39791 - DNA, 20 bp, synthetic construct
  misc_feature 1..20: note = chemically synthesized
  source 1..20: mol_type = other DNA
atacaaccttctttgggtgg

SEQ ID NO: 39792 - DNA, 20 bp, synthetic construct
  misc_feature 1..20: note = chemically synthesized
  source 1..20: mol_type = other DNA
aaccttctttgggtggtggc

SEQ ID NO: 39793 - DNA, 20 bp, synthetic construct
  misc_feature 1..20: note = chemically synthesized
  source 1..20: mol_type = other DNA
cttctttgggtggtggcaag

SEQ ID NO: 39794 - DNA, 20 bp, synthetic construct
  misc_feature 1..20: note = chemically synthesized
  source 1..20: mol_type = other DNA
ggtggtggcaagaagcaatg

SEQ ID NO: 39795 - DNA, 20 bp, synthetic construct
  misc_feature 1..20: note = chemically synthesized
  source 1..20: mol_type = other DNA
gaagcaatgcagccattacg

SEQ ID NO: 39796 - DNA, 20 bp, synthetic construct
  misc_feature 1..20: note = chemically synthesized
  source 1..20: mol_type = other DNA
catatcaaacacctgtatca

SEQ ID NO: 39797 - DNA, 20 bp, synthetic construct
  misc_feature 1..20: note = chemically synthesized
  source 1..20: mol_type = other DNA
atatcaaacacctgtatcac

SEQ ID NO: 39798 - DNA, 20 bp, synthetic construct
  misc_feature 1..20: note = chemically synthesized
  source 1..20: mol_type = other DNA
cacctgtatcacaggtgtta

SEQ ID NO: 39799 - DNA, 20 bp, synthetic construct
  misc_feature 1..20: note = chemically synthesized
  source 1..20: mol_type = other DNA
atcacaggtgttaaagaaac

SEQ ID NO: 39800 - DNA, 20 bp, synthetic construct
  misc_feature 1..20: note = chemically synthesized
  source 1..20: mol_type = other DNA
atgatttgcaatattgtctt

SEQ ID NO: 39801 - DNA, 20 bp, synthetic construct
  misc_feature 1..20: note = chemically synthesized
  source 1..20: mol_type = other DNA
ctataaatatgatttttaaa

SEQ ID NO: 39802 - DNA, 20 bp, synthetic construct
  misc_feature 1..20: note = chemically synthesized
  source 1..20: mol_type = other DNA
atttttaaaaagtatttctt

SEQ ID NO: 39803 - DNA, 20 bp, synthetic construct
  misc_feature 1..20: note = chemically synthesized
  source 1..20: mol_type = other DNA
tttttaaaaagtatttcttt

SEQ ID NO: 39804 - DNA, 20 bp, synthetic construct
  misc_feature 1..20: note = chemically synthesized
  source 1..20: mol_type = other DNA
taaaaagtatttctttaggt

SEQ ID NO: 39805 - DNA, 20 bp, synthetic construct
  misc_feature 1..20: note = chemically synthesized
  source 1..20: mol_type = other DNA
tacgcattgacttatcttcc

SEQ ID NO: 39806 - DNA, 20 bp, synthetic construct
  misc_feature 1..20: note = chemically synthesized
  source 1..20: mol_type = other DNA
acgcattgacttatcttcct

SEQ ID NO: 39807 - DNA, 20 bp, synthetic construct
  misc_feature 1..20: note = chemically synthesized
  source 1..20: mol_type = other DNA
cttatcttcctgggtttcat

SEQ ID NO: 39808 - DNA, 20 bp, synthetic construct
  misc_feature 1..20: note = chemically synthesized
  source 1..20: mol_type = other DNA
actgtttatctcaaactctt

SEQ ID NO: 39809 - DNA, 20 bp, synthetic construct
  misc_feature 1..20: note = chemically synthesized
  source 1..20: mol_type = other DNA
atctcaaactcttgagatta

SEQ ID NO: 39810 - DNA, 20 bp, synthetic construct
  misc_feature 1..20: note = chemically synthesized
  source 1..20: mol_type = other DNA
aaactcttgagattaaagta

SEQ ID NO: 39811 - DNA, 20 bp, synthetic construct
  misc_feature 1..20: note = chemically synthesized
  source 1..20: mol_type = other DNA
aactcttgagattaaagtat

SEQ ID NO: 39812 - DNA, 20 bp, synthetic construct
  misc_feature 1..20: note = chemically synthesized
  source 1..20: mol_type = other DNA
ttgagattaaagtatgggct

SEQ ID NO: 39813 - DNA, 20 bp, synthetic construct
  misc_feature 1..20: note = chemically synthesized
  source 1..20: mol_type = other DNA
tgagattaaagtatgggctc

SEQ ID NO: 39814 - DNA, 20 bp, synthetic construct
  misc_feature 1..20: note = chemically synthesized
  source 1..20: mol_type = other DNA
agattaaagtatgggctcag

SEQ ID NO: 39815 - DNA, 20 bp, synthetic construct
  misc_feature 1..20: note = chemically synthesized
  source 1..20: mol_type = other DNA
gattaaagtatgggctcagg

SEQ ID NO: 39816 - DNA, 20 bp, synthetic construct
  misc_feature 1..20: note = chemically synthesized
  source 1..20: mol_type = other DNA
attaaagtatgggctcagga

SEQ ID NO: 39817 - DNA, 20 bp, synthetic construct
  misc_feature 1..20: note = chemically synthesized
  source 1..20: mol_type = other DNA
taaagtatgggctcaggagg

SEQ ID NO: 39818 - DNA, 20 bp, synthetic construct
  misc_feature 1..20: note = chemically synthesized
  source 1..20: mol_type = other DNA
gtatgggctcaggagggagc

SEQ ID NO: 39819 - DNA, 20 bp, synthetic construct
  misc_feature 1..20: note = chemically synthesized
  source 1..20: mol_type = other DNA
tatgggctcaggagggagcg

SEQ ID NO: 39820 - DNA, 20 bp, synthetic construct
  misc_feature 1..20: note = chemically synthesized
  source 1..20: mol_type = other DNA
tgggctcaggagggagcgag

SEQ ID NO: 39821 - DNA, 20 bp, synthetic construct
  misc_feature 1..20: note = chemically synthesized
  source 1..20: mol_type = other DNA
caggagggagcgaggagctt

SEQ ID NO: 39822 - DNA, 20 bp, synthetic construct
  misc_feature 1..20: note = chemically synthesized
  source 1..20: mol_type = other DNA
aggagggagcgaggagcttc

SEQ ID NO: 39823 - DNA, 20 bp, synthetic construct
  misc_feature 1..20: note = chemically synthesized
  source 1..20: mol_type = other DNA
gaggagcttcaggactctca

SEQ ID NO: 39824 - DNA, 20 bp, synthetic construct
  misc_feature 1..20: note = chemically synthesized
  source 1..20: mol_type = other DNA
tcaggactctcacggacctc

SEQ ID NO: 39825 - DNA, 20 bp, synthetic construct
  misc_feature 1..20: note = chemically synthesized
  source 1..20: mol_type = other DNA
actctcacggacctccagca

SEQ ID NO: 39826 - DNA, 20 bp, synthetic construct
  misc_feature 1..20: note = chemically synthesized
  source 1..20: mol_type = other DNA
cacggacctccagcacagtg

SEQ ID NO: 39827 - DNA, 20 bp, synthetic construct
  misc_feature 1..20: note = chemically synthesized
  source 1..20: mol_type = other DNA
agcacagtgtagctgcctta

SEQ ID NO: 39828 - DNA, 20 bp, synthetic construct
  misc_feature 1..20: note = chemically synthesized
  source 1..20: mol_type = other DNA
agtgtagctgccttatggaa

SEQ ID NO: 39829 - DNA, 20 bp, synthetic construct
  misc_feature 1..20: note = chemically synthesized
  source 1..20: mol_type = other DNA
gtagctgccttatggaaaag

SEQ ID NO: 39830 - DNA, 20 bp, synthetic construct
  misc_feature 1..20: note = chemically synthesized
  source 1..20: mol_type = other DNA
ggccacactgttttctgcac

SEQ ID NO: 39831 - DNA, 20 bp, synthetic construct
  misc_feature 1..20: note = chemically synthesized
  source 1..20: mol_type = other DNA
ctgcccctactattcctcac

SEQ ID NO: 39832 - DNA, 20 bp, synthetic construct
  misc_feature 1..20: note = chemically synthesized
  source 1..20: mol_type = other DNA
tgcccctactattcctcact

SEQ ID NO: 39833 - DNA, 20 bp, synthetic construct
  misc_feature 1..20: note = chemically synthesized
  source 1..20: mol_type = other DNA
ccctactattcctcactggg

SEQ ID NO: 39834 - DNA, 20 bp, synthetic construct
  misc_feature 1..20: note = chemically synthesized
  source 1..20: mol_type = other DNA
ctactattcctcactgggca

SEQ ID NO: 39835 - DNA, 20 bp, synthetic construct
  misc_feature 1..20: note = chemically synthesized
  source 1..20: mol_type = other DNA
attcctcactgggcagagca

SEQ ID NO: 39836 - DNA, 20 bp, synthetic construct
  misc_feature 1..20: note = chemically synthesized
  source 1..20: mol_type = other DNA
tgggcagagcacagccaccc

SEQ ID NO: 39837 - DNA, 20 bp, synthetic construct
  misc_feature 1..20: note = chemically synthesized
  source 1..20: mol_type = other DNA
ctggccctgcctgaacattt

SEQ ID NO: 39838 - DNA, 20 bp, synthetic construct
  misc_feature 1..20: note = chemically synthesized
  source 1..20: mol_type = other DNA
ccctgcctgaacattttagt

SEQ ID NO: 39839 - DNA, 20 bp, synthetic construct
  misc_feature 1..20: note = chemically synthesized
  source 1..20: mol_type = other DNA
ctgaacattttagtcagtgt

SEQ ID NO: 39840 - DNA, 20 bp, synthetic construct
  misc_feature 1..20: note = chemically synthesized
  source 1..20: mol_type = other DNA
gtgttggctctgtgcttctc

SEQ ID NO: 39841 - DNA, 20 bp, synthetic construct
  misc_feature 1..20: note = chemically synthesized
  source 1..20: mol_type = other DNA
tgttggctctgtgcttctct

SEQ ID NO: 39842 - DNA, 20 bp, synthetic construct
  misc_feature 1..20: note = chemically synthesized
  source 1..20: mol_type = other DNA
gttggctctgtgcttctctg

SEQ ID NO: 39843 - DNA, 20 bp, synthetic construct
  misc_feature 1..20: note = chemically synthesized
  source 1..20: mol_type = other DNA
tggctctgtgcttctctggg

SEQ ID NO: 39844 - DNA, 20 bp, synthetic construct
  misc_feature 1..20: note = chemically synthesized
  source 1..20: mol_type = other DNA
ggctctgtgcttctctgggg

SEQ ID NO: 39845 - DNA, 20 bp, synthetic construct
  misc_feature 1..20: note = chemically synthesized
  source 1..20: mol_type = other DNA
cttctctggggaggaaatcc

SEQ ID NO: 39846 - DNA, 20 bp, synthetic construct
  misc_feature 1..20: note = chemically synthesized
  source 1..20: mol_type = other DNA
tctctggggaggaaatccaa

SEQ ID NO: 39847 - DNA, 20 bp, synthetic construct
  misc_feature 1..20: note = chemically synthesized
  source 1..20: mol_type = other DNA
gaaatccaagagacaaccca

SEQ ID NO: 39848 - DNA, 20 bp, synthetic construct
  misc_feature 1..20: note = chemically synthesized
  source 1..20: mol_type = other DNA
ccacagcccctctgccattt

SEQ ID NO: 39849 - DNA, 20 bp, synthetic construct
  misc_feature 1..20: note = chemically synthesized
  source 1..20: mol_type = other DNA
cccctctgccatttcagctg

SEQ ID NO: 39850 - DNA, 20 bp, synthetic construct
  misc_feature 1..20: note = chemically synthesized
  source 1..20: mol_type = other DNA
ctctgccatttcagctgcag

SEQ ID NO: 39851 - DNA, 20 bp, synthetic construct
  misc_feature 1..20: note = chemically synthesized
  source 1..20: mol_type = other DNA
agtaccaccgttaatgccct

SEQ ID NO: 39852 - DNA, 20 bp, synthetic construct
  misc_feature 1..20: note = chemically synthesized
  source 1..20: mol_type = other DNA
gtaccaccgttaatgccctt

SEQ ID NO: 39853 - DNA, 20 bp, synthetic construct
  misc_feature 1..20: note = chemically synthesized
  source 1..20: mol_type = other DNA
ccgttaatgcccttgggctt

SEQ ID NO: 39854 - DNA, 20 bp, synthetic construct
  misc_feature 1..20: note = chemically synthesized
  source 1..20: mol_type = other DNA
taatgcccttgggcttgaga

SEQ ID NO: 39855 - DNA, 20 bp, synthetic construct
  misc_feature 1..20: note = chemically synthesized
  source 1..20: mol_type = other DNA
tgcccttgggcttgagaaag

SEQ ID NO: 39856 - DNA, 20 bp, synthetic construct
  misc_feature 1..20: note = chemically synthesized
  source 1..20: mol_type = other DNA
gcccttgggcttgagaaaga

SEQ ID NO: 39857 - DNA, 20 bp, synthetic construct
  misc_feature 1..20: note = chemically synthesized
  source 1..20: mol_type = other DNA
cccttgggcttgagaaagaa

SEQ ID NO: 39858 - DNA, 20 bp, synthetic construct
  misc_feature 1..20: note = chemically synthesized
  source 1..20: mol_type = other DNA
ggcttgagaaagaagggacc

SEQ ID NO: 39859 - DNA, 20 bp, synthetic construct
  misc_feature 1..20: note = chemically synthesized
  source 1..20: mol_type = other DNA
ggccacttccctgacacctc

SEQ ID NO: 39860 - DNA, 20 bp, synthetic construct
  misc_feature 1..20: note = chemically synthesized
  source 1..20: mol_type = other DNA
tccctgacacctccagcaca

SEQ ID NO: 39861 - DNA, 20 bp, synthetic construct
  misc_feature 1..20: note = chemically synthesized
  source 1..20: mol_type = other DNA
ctgacacctccagcacacag

SEQ ID NO: 39862 - DNA, 20 bp, synthetic construct
  misc_feature 1..20: note = chemically synthesized
  source 1..20: mol_type = other DNA
tgacacctccagcacacagc

SEQ ID NO: 39863 - DNA, 20 bp, synthetic construct
  misc_feature 1..20: note = chemically synthesized
  source 1..20: mol_type = other DNA
gacacctccagcacacagca

SEQ ID NO: 39864 - DNA, 20 bp, synthetic construct
  misc_feature 1..20: note = chemically synthesized
  source 1..20: mol_type = other DNA
cctccagcacacagcaggga

SEQ ID NO: 39865 - DNA, 20 bp, synthetic construct
  misc_feature 1..20: note = chemically synthesized
  source 1..20: mol_type = other DNA
acacagcagggaaagaattc

SEQ ID NO: 39866 - DNA, 20 bp, synthetic construct
  misc_feature 1..20: note = chemically synthesized
  source 1..20: mol_type = other DNA
ttccagtttctctttcttgt

SEQ ID NO: 39867 - DNA, 20 bp, synthetic construct
  misc_feature 1..20: note = chemically synthesized
  source 1..20: mol_type = other DNA
tttcacctgctactcttcac

SEQ ID NO: 39868 - DNA, 20 bp, synthetic construct
  misc_feature 1..20: note = chemically synthesized
  source 1..20: mol_type = other DNA
ttcacctgctactcttcacc

SEQ ID NO: 39869 - DNA, 20 bp, synthetic construct
  misc_feature 1..20: note = chemically synthesized
  source 1..20: mol_type = other DNA
cctgctactcttcaccaggc

SEQ ID NO: 39870 - DNA, 20 bp, synthetic construct
  misc_feature 1..20: note = chemically synthesized
  source 1..20: mol_type = other DNA
ctgctactcttcaccaggca

SEQ ID NO: 39871 - DNA, 20 bp, synthetic construct
  misc_feature 1..20: note = chemically synthesized
  source 1..20: mol_type = other DNA
tcttcaccaggcaaggctcc

SEQ ID NO: 39872 - DNA, 20 bp, synthetic construct
  misc_feature 1..20: note = chemically synthesized
  source 1..20: mol_type = other DNA
accaggcaaggctcctggct

SEQ ID NO: 39873 - DNA, 20 bp, synthetic construct
  misc_feature 1..20: note = chemically synthesized
  source 1..20: mol_type = other DNA
ccaggcaaggctcctggctt

SEQ ID NO: 39874 - DNA, 20 bp, synthetic construct
  misc_feature 1..20: note = chemically synthesized
  source 1..20: mol_type = other DNA
aggctcctggcttgggccca

SEQ ID NO: 39875 - DNA, 20 bp, synthetic construct
  misc_feature 1..20: note = chemically synthesized
  source 1..20: mol_type = other DNA
cctggcttgggcccacagtg

SEQ ID NO: 39876 - DNA, 20 bp, synthetic construct
  misc_feature 1..20: note = chemically synthesized
  source 1..20: mol_type = other DNA
ctggcttgggcccacagtgc

SEQ ID NO: 39877 - DNA, 20 bp, synthetic construct
  misc_feature 1..20: note = chemically synthesized
  source 1..20: mol_type = other DNA
cagtgcaggcacctcgaact

SEQ ID NO: 39878 - DNA, 20 bp, synthetic construct
  misc_feature 1..20: note = chemically synthesized
  source 1..20: mol_type = other DNA
actcagttgaacatttccac

SEQ ID NO: 39879 - DNA, 20 bp, synthetic construct
  misc_feature 1..20: note = chemically synthesized
  source 1..20: mol_type = other DNA
ggctgcactctgtgtttttg

SEQ ID NO: 39880 - DNA, 20 bp, synthetic construct
  misc_feature 1..20: note = chemically synthesized
  source 1..20: mol_type = other DNA
gctgcactctgtgtttttgt

SEQ ID NO: 39881 - DNA, 20 bp, synthetic construct
  misc_feature 1..20: note = chemically synthesized
  source 1..20: mol_type = other DNA
ctgcactctgtgtttttgtg

SEQ ID NO: 39882 - DNA, 20 bp, synthetic construct
  misc_feature 1..20: note = chemically synthesized
  source 1..20: mol_type = other DNA
ctctgtgtttttgtggggtg

SEQ ID NO: 39883 - DNA, 20 bp, synthetic construct
  misc_feature 1..20: note = chemically synthesized
  source 1..20: mol_type = other DNA
tttttgtggggtgaagctcc

SEQ ID NO: 39884 - DNA, 20 bp, synthetic construct
  misc_feature 1..20: note = chemically synthesized
  source 1..20: mol_type = other DNA
tttgtggggtgaagctccca

SEQ ID NO: 39885 - DNA, 20 bp, synthetic construct
  misc_feature 1..20: note = chemically synthesized
  source 1..20: mol_type = other DNA
ttgtggggtgaagctcccag

SEQ ID NO: 39886 - DNA, 20 bp, synthetic construct
  misc_feature 1..20: note = chemically synthesized
  source 1..20: mol_type = other DNA
aagctcccagaggtgactga

SEQ ID NO: 39887 - DNA, 20 bp, synthetic construct
  misc_feature 1..20: note = chemically synthesized
  source 1..20: mol_type = other DNA
tccttctgccactaacactg

SEQ ID NO: 39888 - DNA, 20 bp, synthetic construct
  misc_feature 1..20: note = chemically synthesized
  source 1..20: mol_type = other DNA
catactgcccttgctgtact

SEQ ID NO: 39889 - DNA, 20 bp, synthetic construct
  misc_feature 1..20: note = chemically synthesized
  source 1..20: mol_type = other DNA
tgcccttgctgtacttggac

SEQ ID NO: 39890 - DNA, 20 bp, synthetic construct
  misc_feature 1..20: note = chemically synthesized
  source 1..20: mol_type = other DNA
gcccttgctgtacttggact

SEQ ID NO: 39891 - DNA, 20 bp, synthetic construct
  misc_feature 1..20: note = chemically synthesized
  source 1..20: mol_type = other DNA
cccttgctgtacttggacta

SEQ ID NO: 39892 - DNA, 20 bp, synthetic construct
  misc_feature 1..20: note = chemically synthesized
  source 1..20: mol_type = other DNA
ttgctgtacttggactaggg

SEQ ID NO: 39893 - DNA, 20 bp, synthetic construct
  misc_feature 1..20: note = chemically synthesized
  source 1..20: mol_type = other DNA
tgctgtacttggactaggga

SEQ ID NO: 39894 - DNA, 20 bp, synthetic construct
  misc_feature 1..20: note = chemically synthesized
  source 1..20: mol_type = other DNA
cttggactagggaaggaaaa

SEQ ID NO: 39895 - DNA, 20 bp, synthetic construct
  misc_feature 1..20: note = chemically synthesized
  source 1..20: mol_type = other DNA
agggaaggaaaaaagatcct

SEQ ID NO: 39896 - DNA, 20 bp, synthetic construct
  misc_feature 1..20: note = chemically synthesized
  source 1..20: mol_type = other DNA
tgagtgctttactcacaccc

SEQ ID NO: 39897 - DNA, 20 bp, synthetic construct
  misc_feature 1..20: note = chemically synthesized
  source 1..20: mol_type = other DNA
actcacaccccagtgtgccc

SEQ ID NO: 39898 - DNA, 20 bp, synthetic construct
  misc_feature 1..20: note = chemically synthesized
  source 1..20: mol_type = other DNA
agtgtgccccagccacccta

SEQ ID NO: 39899 - DNA, 20 bp, synthetic construct
  misc_feature 1..20: note = chemically synthesized
  source 1..20: mol_type = other DNA
gccccagccaccctatggaa

SEQ ID NO: 39900 - DNA, 20 bp, synthetic construct
  misc_feature 1..20: note = chemically synthesized
  source 1..20: mol_type = other DNA
cccagccaccctatggaaaa

SEQ ID NO: 39901 - DNA, 20 bp, synthetic construct
  misc_feature 1..20: note = chemically synthesized
  source 1..20: mol_type = other DNA
ccagccaccctatggaaaag

SEQ ID NO: 39902 - DNA, 20 bp, synthetic construct
  misc_feature 1..20: note = chemically synthesized
  source 1..20: mol_type = other DNA
ccaccctatggaaaagaggc

SEQ ID NO: 39903 - DNA, 20 bp, synthetic construct
  misc_feature 1..20: note = chemically synthesized
  source 1..20: mol_type = other DNA
ggccagtgtgtcatccctgc

SEQ ID NO: 39904 - DNA, 20 bp, synthetic construct
  misc_feature 1..20: note = chemically synthesized
  source 1..20: mol_type = other DNA
gtcatccctgcaagcaccct

SEQ ID NO: 39905 - DNA, 20 bp, synthetic construct
  misc_feature 1..20: note = chemically synthesized
  source 1..20: mol_type = other DNA
tcatccctgcaagcaccctg

SEQ ID NO: 39906 - DNA, 20 bp, synthetic construct
  misc_feature 1..20: note = chemically synthesized
  source 1..20: mol_type = other DNA
cccctgcccctgctgccccc

SEQ ID NO: 39907 - DNA, 20 bp, synthetic construct
  misc_feature 1..20: note = chemically synthesized
  source 1..20: mol_type = other DNA
cccctgctgcccccaagctg

SEQ ID NO: 39908 - DNA, 20 bp, synthetic construct
  misc_feature 1..20: note = chemically synthesized
  source 1..20: mol_type = other DNA
cctgctgcccccaagctgta

SEQ ID NO: 39909 - DNA, 20 bp, synthetic construct
  misc_feature 1..20: note = chemically synthesized
  source 1..20: mol_type = other DNA
ctgcccccaagctgtagagc

SEQ ID NO: 39910 - DNA, 20 bp, synthetic construct
  misc_feature 1..20: note = chemically synthesized
  source 1..20: mol_type = other DNA
agctgtagagccagaatata

SEQ ID NO: 39911 - DNA, 20 bp, synthetic construct
  misc_feature 1..20: note = chemically synthesized
  source 1..20: mol_type = other DNA
gtagagccagaatataaagc

SEQ ID NO: 39912 - DNA, 20 bp, synthetic construct
  misc_feature 1..20: note = chemically synthesized
  source 1..20: mol_type = other DNA
gagccagaatataaagctgg

SEQ ID NO: 39913 - DNA, 20 bp, synthetic construct
  misc_feature 1..20: note = chemically synthesized
  source 1..20: mol_type = other DNA
agctggcagaaaaatgtaaa

SEQ ID NO: 39914 - DNA, 20 bp, synthetic construct
  misc_feature 1..20: note = chemically synthesized
  source 1..20: mol_type = other DNA
gctggcagaaaaatgtaaaa

SEQ ID NO: 39915 - DNA, 20 bp, synthetic construct
  misc_feature 1..20: note = chemically synthesized
  source 1..20: mol_type = other DNA
gcagaaaaatgtaaaaaggc

SEQ ID NO: 39916 - DNA, 20 bp, synthetic construct
  misc_feature 1..20: note = chemically synthesized
  source 1..20: mol_type = other DNA
aaaatgtaaaaaggctagac

SEQ ID NO: 39917 - DNA, 20 bp, synthetic construct
  misc_feature 1..20: note = chemically synthesized
  source 1..20: mol_type = other DNA
gtaaaaaggctagactggct

SEQ ID NO: 39918 - DNA, 20 bp, synthetic construct
  misc_feature 1..20: note = chemically synthesized
  source 1..20: mol_type = other DNA
gctagactggcttagcctcc

SEQ ID NO: 39919 - DNA, 20 bp, synthetic construct
  misc_feature 1..20: note = chemically synthesized
  source 1..20: mol_type = other DNA
cctacatctttctcctgtgc

SEQ ID NO: 39920 - DNA, 20 bp, synthetic construct
  misc_feature 1..20: note = chemically synthesized
  source 1..20: mol_type = other DNA
tccttcctgctcttgaacat

SEQ ID NO: 39921 - DNA, 20 bp, synthetic construct
  misc_feature 1..20: note = chemically synthesized
  source 1..20: mol_type = other DNA
gctcttgaacatcggactcc

SEQ ID NO: 39922 - DNA, 20 bp, synthetic construct
  misc_feature 1..20: note = chemically synthesized
  source 1..20: mol_type = other DNA
acatcggactccaagttctt

SEQ ID NO: 39923 - DNA, 20 bp, synthetic construct
  misc_feature 1..20: note = chemically synthesized
  source 1..20: mol_type = other DNA
gactccaagttcttcagctg

SEQ ID NO: 39924 - DNA, 20 bp, synthetic construct
  misc_feature 1..20: note = chemically synthesized
  source 1..20: mol_type = other DNA
actccaagttcttcagctgt

SEQ ID NO: 39925 - DNA, 20 bp, synthetic construct
  misc_feature 1..20: note = chemically synthesized
  source 1..20: mol_type = other DNA
agttcttcagctgtgggact

SEQ ID NO: 39926 - DNA, 20 bp, synthetic construct
  misc_feature 1..20: note = chemically synthesized
  source 1..20: mol_type = other DNA
ggactgtcttccttgctcct

SEQ ID NO: 39927 - DNA, 20 bp, synthetic construct
  misc_feature 1..20: note = chemically synthesized
  source 1..20: mol_type = other DNA
cttccttgctcctcagattg

SEQ ID NO: 39928 - DNA, 20 bp, synthetic construct
  misc_feature 1..20: note = chemically synthesized
  source 1..20: mol_type = other DNA
ttccttgctcctcagattgc

SEQ ID NO: 39929 - DNA, 20 bp, synthetic construct
  misc_feature 1..20: note = chemically synthesized
  source 1..20: mol_type = other DNA
cttgctcctcagattgcagg

SEQ ID NO: 39930 - DNA, 20 bp, synthetic construct
  misc_feature 1..20: note = chemically synthesized
  source 1..20: mol_type = other DNA
agattgcaggtggcctatta

SEQ ID NO: 39931 - DNA, 20 bp, synthetic construct
  misc_feature 1..20: note = chemically synthesized
  source 1..20: mol_type = other DNA
gattgcaggtggcctattat

SEQ ID NO: 39932 - DNA, 20 bp, synthetic construct
  misc_feature 1..20: note = chemically synthesized
  source 1..20: mol_type = other DNA
atgggaccttgtaatcttgt

SEQ ID NO: 39933 - DNA, 20 bp, synthetic construct
  misc_feature 1..20: note = chemically synthesized
  source 1..20: mol_type = other DNA
gtgagttaataccacttaat

SEQ ID NO: 39934 - DNA, 20 bp, synthetic construct
  misc_feature 1..20: note = chemically synthesized
  source 1..20: mol_type = other DNA
taataagctcccctttgtgt

SEQ ID NO: 39935 - DNA, 20 bp, synthetic construct
  misc_feature 1..20: note = chemically synthesized
  source 1..20: mol_type = other DNA
tgtgagtatatctatatcta

SEQ ID NO: 39936 - DNA, 20 bp, synthetic construct
  misc_feature 1..20: note = chemically synthesized
  source 1..20: mol_type = other DNA
agtatatctatatctataga

SEQ ID NO: 39937 - DNA, 20 bp, synthetic construct
  misc_feature 1..20: note = chemically synthesized
  source 1..20: mol_type = other DNA
tctatatctatagatagata

SEQ ID NO: 39938 - DNA, 20 bp, synthetic construct
  misc_feature 1..20: note = chemically synthesized
  source 1..20: mol_type = other DNA
ctatatctatagatagatat

SEQ ID NO: 39939 - DNA, 20 bp, synthetic construct
  misc_feature 1..20: note = chemically synthesized
  source 1..20: mol_type = other DNA
atatatatataatctcctat

SEQ ID NO: 39940 - DNA, 20 bp, synthetic construct
  misc_feature 1..20: note = chemically synthesized
  source 1..20: mol_type = other DNA
tcctattagttctgtccctc

SEQ ID NO: 39941 - DNA, 20 bp, synthetic construct
  misc_feature 1..20: note = chemically synthesized
  source 1..20: mol_type = other DNA
ctattagttctgtccctcta

SEQ ID NO: 39942 - DNA, 20 bp, synthetic construct
  misc_feature 1..20: note = chemically synthesized
  source 1..20: mol_type = other DNA
ctagagaaccccgactaata

SEQ ID NO: 39943 - DNA, 20 bp, synthetic construct
  misc_feature 1..20: note = chemically synthesized
  source 1..20: mol_type = other DNA
actaatacagattttcatac

SEQ ID NO: 39944 - DNA, 20 bp, synthetic construct
  misc_feature 1..20: note = chemically synthesized
  source 1..20: mol_type = other DNA
aatacagattttcataccag

SEQ ID NO: 39945 - DNA, 20 bp, synthetic construct
  misc_feature 1..20: note = chemically synthesized
  source 1..20: mol_type = other DNA
acagattttcataccagaag

SEQ ID NO: 39946 - DNA, 20 bp, synthetic construct
  misc_feature 1..20: note = chemically synthesized
  source 1..20: mol_type = other DNA
tcataccagaagtggttctt

SEQ ID NO: 39947 - DNA, 20 bp, synthetic construct
  misc_feature 1..20: note = chemically synthesized
  source 1..20: mol_type = other DNA
cataccagaagtggttcttg

SEQ ID NO: 39948 - DNA, 20 bp, synthetic construct
  misc_feature 1..20: note = chemically synthesized
  source 1..20: mol_type = other DNA
cagaagtggttcttgaggaa

SEQ ID NO: 39949 - DNA, 20 bp, synthetic construct
  misc_feature 1..20: note = chemically synthesized
  source 1..20: mol_type = other DNA
ttcttgaggaacagaatatt

SEQ ID NO: 39950 - DNA, 20 bp, synthetic construct
  misc_feature 1..20: note = chemically synthesized
  source 1..20: mol_type = other DNA
tcttgaggaacagaatatta

SEQ ID NO: 39951 - DNA, 20 bp, synthetic construct
  misc_feature 1..20: note = chemically synthesized
  source 1..20: mol_type = other DNA
gaggaacagaatattaagga

SEQ ID NO: 39952 - DNA, 20 bp, synthetic construct
  misc_feature 1..20: note = chemically synthesized
  source 1..20: mol_type = other DNA
taaggatggaattctttcat

SEQ ID NO: 39953 - DNA, 20 bp, synthetic construct
  misc_feature 1..20: note = chemically synthesized
  source 1..20: mol_type = other DNA
tggaattctttcattggttt

SEQ ID NO: 39954 - DNA, 20 bp, synthetic construct
  misc_feature 1..20: note = chemically synthesized
  source 1..20: mol_type = other DNA
ggaattctttcattggtttt

SEQ ID NO: 39955 - DNA, 20 bp, synthetic construct
  misc_feature 1..20: note = chemically synthesized
  source 1..20: mol_type = other DNA
ttcattggttttgggacttc

SEQ ID NO: 39956 - DNA, 20 bp, synthetic construct
  misc_feature 1..20: note = chemically synthesized
  source 1..20: mol_type = other DNA
ggttttgggacttctggtgt

SEQ ID NO: 39957 - DNA, 20 bp, synthetic construct
  misc_feature 1..20: note = chemically synthesized
  source 1..20: mol_type = other DNA
tgttggctgattaatatgat

SEQ ID NO: 39958 - DNA, 20 bp, synthetic construct
  misc_feature 1..20: note = chemically synthesized
  source 1..20: mol_type = other DNA
tgattagaccaaaaaatgct

SEQ ID NO: 39959 - DNA, 20 bp, synthetic construct
  misc_feature 1..20: note = chemically synthesized
  source 1..20: mol_type = other DNA
gattagaccaaaaaatgcta

SEQ ID NO: 39960 - DNA, 20 bp, synthetic construct
  misc_feature 1..20: note = chemically synthesized
  source 1..20: mol_type = other DNA
gctaaggactctacttctaa

SEQ ID NO: 39961 - DNA, 20 bp, synthetic construct
  misc_feature 1..20: note = chemically synthesized
  source 1..20: mol_type = other DNA
ggactctacttctaatagta

SEQ ID NO: 39962 - DNA, 20 bp, synthetic construct
  misc_feature 1..20: note = chemically synthesized
  source 1..20: mol_type = other DNA
actctacttctaatagtatg

SEQ ID NO: 39963 - DNA, 20 bp, synthetic construct
  misc_feature 1..20: note = chemically synthesized
  source 1..20: mol_type = other DNA
aatagtatggagaacactga

SEQ ID NO: 39964 - DNA, 20 bp, synthetic construct
  misc_feature 1..20: note = chemically synthesized
  source 1..20: mol_type = other DNA
tggagaacactgatagtact

SEQ ID NO: 39965 - DNA, 20 bp, synthetic construct
  misc_feature 1..20: note = chemically synthesized
  source 1..20: mol_type = other DNA
agtacttggcctgaattgtt

SEQ ID NO: 39966 - DNA, 20 bp, synthetic construct
  misc_feature 1..20: note = chemically synthesized
  source 1..20: mol_type = other DNA
tacttggcctgaattgttta

SEQ ID NO: 39967 - DNA, 20 bp, synthetic construct
  misc_feature 1..20: note = chemically synthesized
  source 1..20: mol_type = other DNA
cttggcctgaattgtttaga

SEQ ID NO: 39968 - DNA, 20 bp, synthetic construct
  misc_feature 1..20: note = chemically synthesized
  source 1..20: mol_type = other DNA
actactgattcatcacttat

SEQ ID NO: 39969 - DNA, 20 bp, synthetic construct
  misc_feature 1..20: note = chemically synthesized
  source 1..20: mol_type = other DNA
tactgattcatcacttatga

SEQ ID NO: 39970 - DNA, 20 bp, synthetic construct
  misc_feature 1..20: note = chemically synthesized
  source 1..20: mol_type = other DNA
actgattcatcacttatgag

SEQ ID NO: 39971 - DNA, 20 bp, synthetic construct
  misc_feature 1..20: note = chemically synthesized
  source 1..20: mol_type = other DNA
attcatcacttatgagaggc

SEQ ID NO: 39972 - DNA, 20 bp, synthetic construct
  misc_feature 1..20: note = chemically synthesized
  source 1..20: mol_type = other DNA
ttcatcacttatgagaggca

SEQ ID NO: 39973 - DNA, 20 bp, synthetic construct
  misc_feature 1..20: note = chemically synthesized
  source 1..20: mol_type = other DNA
catcacttatgagaggcaag

SEQ ID NO: 39974 - DNA, 20 bp, synthetic construct
  misc_feature 1..20: note = chemically synthesized
  source 1..20: mol_type = other DNA
cttatgagaggcaaggagtt

SEQ ID NO: 39975 - DNA, 20 bp, synthetic construct
  misc_feature 1..20: note = chemically synthesized
  source 1..20: mol_type = other DNA
ataatacctttgactatatg

SEQ ID NO: 39976 - DNA, 20 bp, synthetic construct
  misc_feature 1..20: note = chemically synthesized
  source 1..20: mol_type = other DNA
aatacctttgactatatgtg

SEQ ID NO: 39977 - DNA, 20 bp, synthetic construct
  misc_feature 1..20: note = chemically synthesized
  source 1..20: mol_type = other DNA
ttgactatatgtggagaacc

SEQ ID NO: 39978 - DNA, 20 bp, synthetic construct
  misc_feature 1..20: note = chemically synthesized
  source 1..20: mol_type = other DNA
tgactatatgtggagaacca

SEQ ID NO: 39979 - DNA, 20 bp, synthetic construct
  misc_feature 1..20: note = chemically synthesized
  source 1..20: mol_type = other DNA
gagaaccaaggaacataatg

SEQ ID NO: 39980 - DNA, 20 bp, synthetic construct
  misc_feature 1..20: note = chemically synthesized
  source 1..20: mol_type = other DNA
accaaggaacataatgaagt

SEQ ID NO: 39981 - DNA, 20 bp, synthetic construct
  misc_feature 1..20: note = chemically synthesized
  source 1..20: mol_type = other DNA
gaagttggttgattgctcct

SEQ ID NO: 39982 - DNA, 20 bp, synthetic construct
  misc_feature 1..20: note = chemically synthesized
  source 1..20: mol_type = other DNA
ttgattgctcctaagttctc

SEQ ID NO: 39983 - DNA, 20 bp, synthetic construct
  misc_feature 1..20: note = chemically synthesized
  source 1..20: mol_type = other DNA
gattgctcctaagttctctg

SEQ ID NO: 39984 - DNA, 20 bp, synthetic construct
  misc_feature 1..20: note = chemically synthesized
  source 1..20: mol_type = other DNA
gctcctaagttctctggaga

SEQ ID NO: 39985 - DNA, 20 bp, synthetic construct
  misc_feature 1..20: note = chemically synthesized
  source 1..20: mol_type = other DNA
tcctaagttctctggagaaa

SEQ ID NO: 39986 - DNA, 20 bp, synthetic construct
  misc_feature 1..20: note = chemically synthesized
  source 1..20: mol_type = other DNA
ttctctggagaaagagatga

SEQ ID NO: 39987 - DNA, 20 bp, synthetic construct
  misc_feature 1..20: note = chemically synthesized
  source 1..20: mol_type = other DNA
atgaaagaaaatgatgatct

SEQ ID NO: 39988 - DNA, 20 bp, synthetic construct
  misc_feature 1..20: note = chemically synthesized
  source 1..20: mol_type = other DNA
tgaaagaaaatgatgatctc

SEQ ID NO: 39989 - DNA, 20 bp, synthetic construct
  misc_feature 1..20: note = chemically synthesized
  source 1..20: mol_type = other DNA
gaaagaaaatgatgatctca

SEQ ID NO: 39990 - DNA, 20 bp, synthetic construct
  misc_feature 1..20: note = chemically synthesized
  source 1..20: mol_type = other DNA
aaagaaaatgatgatctcag

SEQ ID NO: 39991 - DNA, 20 bp, synthetic construct
  misc_feature 1..20: note = chemically synthesized
  source 1..20: mol_type = other DNA
ggggatctgtctcccacctt

SEQ ID NO: 39992 - DNA, 20 bp, synthetic construct
  misc_feature 1..20: note = chemically synthesized
  source 1..20: mol_type = other DNA
gatctgtctcccaccttcag

SEQ ID NO: 39993 - DNA, 20 bp, synthetic construct
  misc_feature 1..20: note = chemically synthesized
  source 1..20: mol_type = other DNA
ctgtctcccaccttcagaag

SEQ ID NO: 39994 - DNA, 20 bp, synthetic construct
  misc_feature 1..20: note = chemically synthesized
  source 1..20: mol_type = other DNA
caccttcagaagcagatact

SEQ ID NO: 39995 - DNA, 20 bp, synthetic construct
  misc_feature 1..20: note = chemically synthesized
  source 1..20: mol_type = other DNA
tactgagccacaaatctgct

SEQ ID NO: 39996 - DNA, 20 bp, synthetic construct
  misc_feature 1..20: note = chemically synthesized
  source 1..20: mol_type = other DNA
ctgctaagattgccctgaat

SEQ ID NO: 39997 - DNA, 20 bp, synthetic construct
  misc_feature 1..20: note = chemically synthesized
  source 1..20: mol_type = other DNA
gctaagattgccctgaatga

SEQ ID NO: 39998 - DNA, 20 bp, synthetic construct
  misc_feature 1..20: note = chemically synthesized
  source 1..20: mol_type = other DNA
aatgagagttttaactcctg

SEQ ID NO: 39999 - DNA, 20 bp, synthetic construct
  misc_feature 1..20: note = chemically synthesized
  source 1..20: mol_type = other DNA
tgagagttttaactcctgta

SEQ ID NO: 40000 - DNA, 20 bp, synthetic construct
  misc_feature 1..20: note = chemically synthesized
  source 1..20: mol_type = other DNA
agttttaactcctgtagaga

SEQ ID NO: 40001 - DNA, 20 bp, synthetic construct
  misc_feature 1..20: note = chemically synthesized
  source 1..20: mol_type = other DNA
ttttaactcctgtagagaaa

SEQ ID NO: 40002 - DNA, 20 bp, synthetic construct
  misc_feature 1..20: note = chemically synthesized
  source 1..20: mol_type = other DNA
gagttgaaattgtgaaaaaa

SEQ ID NO: 40003 - DNA, 20 bp, synthetic construct
  misc_feature 1..20: note = chemically synthesized
  source 1..20: mol_type = other DNA
gttgaaattgtgaaaaaaca

SEQ ID NO: 40004 - DNA, 20 bp, synthetic construct
  misc_feature 1..20: note = chemically synthesized
  source 1..20: mol_type = other DNA
aattgtgaaaaaacagagac

SEQ ID NO: 40005 - DNA, 20 bp, synthetic construct
  misc_feature 1..20: note = chemically synthesized
  source 1..20: mol_type = other DNA
gagacaagctgttatcatgc

SEQ ID NO: 40006 - DNA, 20 bp, synthetic construct
  misc_feature 1..20: note = chemically synthesized
  source 1..20: mol_type = other DNA
acaagctgttatcatgcgag

SEQ ID NO: 40007 - DNA, 20 bp, synthetic construct
  misc_feature 1..20: note = chemically synthesized
  source 1..20: mol_type = other DNA
gcgagtagctgatctgcaac

SEQ ID NO: 40008 - DNA, 20 bp, synthetic construct
  misc_feature 1..20: note = chemically synthesized
  source 1..20: mol_type = other DNA
gagtagctgatctgcaacaa

SEQ ID NO: 40009 - DNA, 20 bp, synthetic construct
  misc_feature 1..20: note = chemically synthesized
  source 1..20: mol_type = other DNA
agtagctgatctgcaacaag

SEQ ID NO: 40010 - DNA, 20 bp, synthetic construct
  misc_feature 1..20: note = chemically synthesized
  source 1..20: mol_type = other DNA
tgcaacaagaggtgcatgca

SEQ ID NO: 40011 - DNA, 20 bp, synthetic construct
  misc_feature 1..20: note = chemically synthesized
  source 1..20: mol_type = other DNA
aggtgcatgcacagccttgc

SEQ ID NO: 40012 - DNA, 20 bp, synthetic construct
  misc_feature 1..20: note = chemically synthesized
  source 1..20: mol_type = other DNA
ggtgcatgcacagccttgcc

SEQ ID NO: 40013 - DNA, 20 bp, synthetic construct
  misc_feature 1..20: note = chemically synthesized
  source 1..20: mol_type = other DNA
ttgccaggtgtttactgtta

SEQ ID NO: 40014 - DNA, 20 bp, synthetic construct
  misc_feature 1..20: note = chemically synthesized
  source 1..20: mol_type = other DNA
caggtgtttactgttaaagt

SEQ ID NO: 40015 - DNA, 20 bp, synthetic construct
  misc_feature 1..20: note = chemically synthesized
  source 1..20: mol_type = other DNA
aggtgtttactgttaaagtg

SEQ ID NO: 40016 - DNA, 20 bp, synthetic construct
  misc_feature 1..20: note = chemically synthesized
  source 1..20: mol_type = other DNA
ggtgtttactgttaaagtga

SEQ ID NO: 40017 - DNA, 20 bp, synthetic construct
  misc_feature 1..20: note = chemically synthesized
  source 1..20: mol_type = other DNA
gttaaagtgagggcattgac

SEQ ID NO: 40018 - DNA, 20 bp, synthetic construct
  misc_feature 1..20: note = chemically synthesized
  source 1..20: mol_type = other DNA
gggcattgactggaaaaaaa

SEQ ID NO: 40019 - DNA, 20 bp, synthetic construct
  misc_feature 1..20: note = chemically synthesized
  source 1..20: mol_type = other DNA
ggcattgactggaaaaaaat

SEQ ID NO: 40020 - DNA, 20 bp, synthetic construct
  misc_feature 1..20: note = chemically synthesized
  source 1..20: mol_type = other DNA
actggaaaaaaatgggaccc

SEQ ID NO: 40021 - DNA, 20 bp, synthetic construct
  misc_feature 1..20: note = chemically synthesized
  source 1..20: mol_type = other DNA
aaaaatgggaccctggaact

SEQ ID NO: 40022 - DNA, 20 bp, synthetic construct
  misc_feature 1..20: note = chemically synthesized
  source 1..20: mol_type = other DNA
aaatgggaccctggaacttg

SEQ ID NO: 40023 - DNA, 20 bp, synthetic construct
  misc_feature 1..20: note = chemically synthesized
  source 1..20: mol_type = other DNA
tgggaccctggaacttggag

SEQ ID NO: 40024 - DNA, 20 bp, synthetic construct
  misc_feature 1..20: note = chemically synthesized
  source 1..20: mol_type = other DNA
gggaccctggaacttggagt

SEQ ID NO: 40025 - DNA, 20 bp, synthetic construct
  misc_feature 1..20: note = chemically synthesized
  source 1..20: mol_type = other DNA
ggaccctggaacttggagtg

SEQ ID NO: 40026 - DNA, 20 bp, synthetic construct
  misc_feature 1..20: note = chemically synthesized
  source 1..20: mol_type = other DNA
gaacttggagtggggatgtg

SEQ ID NO: 40027 - DNA, 20 bp, synthetic construct
  misc_feature 1..20: note = chemically synthesized
  source 1..20: mol_type = other DNA
aacttggagtggggatgtgt

SEQ ID NO: 40028 - DNA, 20 bp, synthetic construct
  misc_feature 1..20: note = chemically synthesized
  source 1..20: mol_type = other DNA
cttggagtggggatgtgtgg

SEQ ID NO: 40029 - DNA, 20 bp, synthetic construct
  misc_feature 1..20: note = chemically synthesized
  source 1..20: mol_type = other DNA
tgtgtgggagaaccctgatg

SEQ ID NO: 40030 - DNA, 20 bp, synthetic construct
  misc_feature 1..20: note = chemically synthesized
  source 1..20: mol_type = other DNA
gggagaaccctgatgaagct

SEQ ID NO: 40031 - DNA, 20 bp, synthetic construct
  misc_feature 1..20: note = chemically synthesized
  source 1..20: mol_type = other DNA
ggagaaccctgatgaagctg

SEQ ID NO: 40032 - DNA, 20 bp, synthetic construct
  misc_feature 1..20: note = chemically synthesized
  source 1..20: mol_type = other DNA
ctgatgaagctgaggacact

SEQ ID NO: 40033 - DNA, 20 bp, synthetic construct
  misc_feature 1..20: note = chemically synthesized
  source 1..20: mol_type = other DNA
ctctgatgaaacttttttgc

SEQ ID NO: 40034 - DNA, 20 bp, synthetic construct
  misc_feature 1..20: note = chemically synthesized
  source 1..20: mol_type = other DNA
tgatgaaacttttttgccag

SEQ ID NO: 40035 - DNA, 20 bp, synthetic construct
  misc_feature 1..20: note = chemically synthesized
  source 1..20: mol_type = other DNA
aacttttttgccagaagaaa

SEQ ID NO: 40036 - DNA, 20 bp, synthetic construct
  misc_feature 1..20: note = chemically synthesized
  source 1..20: mol_type = other DNA
agaaacagtttccccatccc

SEQ ID NO: 40037 - DNA, 20 bp, synthetic construct
  misc_feature 1..20: note = chemically synthesized
  source 1..20: mol_type = other DNA
aacagtttccccatccccag

SEQ ID NO: 40038 - DNA, 20 bp, synthetic construct
  misc_feature 1..20: note = chemically synthesized
  source 1..20: mol_type = other DNA
agtttccccatccccagtag

SEQ ID NO: 40039 - DNA, 20 bp, synthetic construct
  misc_feature 1..20: note = chemically synthesized
  source 1..20: mol_type = other DNA
tccctgacccgtgctgccat

SEQ ID NO: 40040 - DNA, 20 bp, synthetic construct
  misc_feature 1..20: note = chemically synthesized
  source 1..20: mol_type = other DNA
tagcctttccacctttgtct

SEQ ID NO: 40041 - DNA, 20 bp, synthetic construct
  misc_feature 1..20: note = chemically synthesized
  source 1..20: mol_type = other DNA
agcctttccacctttgtctg

SEQ ID NO: 40042 - DNA, 20 bp, synthetic construct
  misc_feature 1..20: note = chemically synthesized
  source 1..20: mol_type = other DNA
atgtaaaccctgcactgctt

SEQ ID NO: 40043 - DNA, 20 bp, synthetic construct
  misc_feature 1..20: note = chemically synthesized
  source 1..20: mol_type = other DNA
tgtaaaccctgcactgcttg

SEQ ID NO: 40044 - DNA, 20 bp, synthetic construct
  misc_feature 1..20: note = chemically synthesized
  source 1..20: mol_type = other DNA
ccctgcactgcttgaggcaa

SEQ ID NO: 40045 - DNA, 20 bp, synthetic construct
  misc_feature 1..20: note = chemically synthesized
  source 1..20: mol_type = other DNA
actgcttgaggcaacagtga

SEQ ID NO: 40046 - DNA, 20 bp, synthetic construct
  misc_feature 1..20: note = chemically synthesized
  source 1..20: mol_type = other DNA
caacagtgatggccttccct

SEQ ID NO: 40047 - DNA, 20 bp, synthetic construct
  misc_feature 1..20: note = chemically synthesized
  source 1..20: mol_type = other DNA
aacagtgatggccttccctg

SEQ ID NO: 40048 - DNA, 20 bp, synthetic construct
  misc_feature 1..20: note = chemically synthesized
  source 1..20: mol_type = other DNA
agtgatggccttccctgagg

SEQ ID NO: 40049 - DNA, 20 bp, synthetic construct
  misc_feature 1..20: note = chemically synthesized
  source 1..20: mol_type = other DNA
gccttccctgaggcagctgc

SEQ ID NO: 40050 - DNA, 20 bp, synthetic construct
  misc_feature 1..20: note = chemically synthesized
  source 1..20: mol_type = other DNA
ccttccctgaggcagctgcc

SEQ ID NO: 40051 - DNA, 20 bp, synthetic construct
  misc_feature 1..20: note = chemically synthesized
  source 1..20: mol_type = other DNA
ccctgaggcagctgccaggc

SEQ ID NO: 40052 - DNA, 20 bp, synthetic construct
  misc_feature 1..20: note = chemically synthesized
  source 1..20: mol_type = other DNA
agataatgttgattctcctc

SEQ ID NO: 40053 - DNA, 20 bp, synthetic construct
  misc_feature 1..20: note = chemically synthesized
  source 1..20: mol_type = other DNA
ataatgttgattctcctcaa

SEQ ID NO: 40054 - DNA, 20 bp, synthetic construct
  misc_feature 1..20: note = chemically synthesized
  source 1..20: mol_type = other DNA
taatgttgattctcctcaag

SEQ ID NO: 40055 - DNA, 20 bp, synthetic construct
  misc_feature 1..20: note = chemically synthesized
  source 1..20: mol_type = other DNA
ctaatgcccctgaatgcttc

SEQ ID NO: 40056 - DNA, 20 bp, synthetic construct
  misc_feature 1..20: note = chemically synthesized
  source 1..20: mol_type = other DNA
aatgcttctagacctataac

SEQ ID NO: 40057 - DNA, 20 bp, synthetic construct
  misc_feature 1..20: note = chemically synthesized
  source 1..20: mol_type = other DNA
atgcttctagacctataact

SEQ ID NO: 40058 - DNA, 20 bp, synthetic construct
  misc_feature 1..20: note = chemically synthesized
  source 1..20: mol_type = other DNA
taactaggctaaattccttg

SEQ ID NO: 40059 - DNA, 20 bp, synthetic construct
  misc_feature 1..20: note = chemically synthesized
  source 1..20: mol_type = other DNA
aactaggctaaattccttgc

SEQ ID NO: 40060 - DNA, 20 bp, synthetic construct
  misc_feature 1..20: note = chemically synthesized
  source 1..20: mol_type = other DNA
gctaaattccttgcgggccc

SEQ ID NO: 40061 - DNA, 20 bp, synthetic construct
  misc_feature 1..20: note = chemically synthesized
  source 1..20: mol_type = other DNA
taaattccttgcgggcccca

SEQ ID NO: 40062 - DNA, 20 bp, synthetic construct
  misc_feature 1..20: note = chemically synthesized
  source 1..20: mol_type = other DNA
aaattccttgcgggccccag

SEQ ID NO: 40063 - DNA, 20 bp, synthetic construct
  misc_feature 1..20: note = chemically synthesized
  source 1..20: mol_type = other DNA
tccttgcgggccccagaggt

SEQ ID NO: 40064 - DNA, 20 bp, synthetic construct
  misc_feature 1..20: note = chemically synthesized
  source 1..20: mol_type = other DNA
ccttgcgggccccagaggtg

SEQ ID NO: 40065 - DNA, 20 bp, synthetic construct
  misc_feature 1..20: note = chemically synthesized
  source 1..20: mol_type = other DNA
cgggccccagaggtgaggtt

SEQ ID NO: 40066 - DNA, 20 bp, synthetic construct
  misc_feature 1..20: note = chemically synthesized
  source 1..20: mol_type = other DNA
ggccccagaggtgaggttca

SEQ ID NO: 40067 - DNA, 20 bp, synthetic construct
  misc_feature 1..20: note = chemically synthesized
  source 1..20: mol_type = other DNA
aggttcagagtgtgacccat

SEQ ID NO: 40068 - DNA, 20 bp, synthetic construct
  misc_feature 1..20: note = chemically synthesized
  source 1..20: mol_type = other DNA
ggttcagagtgtgacccatg

SEQ ID NO: 40069 - DNA, 20 bp, synthetic construct
  misc_feature 1..20: note = chemically synthesized
  source 1..20: mol_type = other DNA
ttcagagtgtgacccatgag

SEQ ID NO: 40070 - DNA, 20 bp, synthetic construct
  misc_feature 1..20: note = chemically synthesized
  source 1..20: mol_type = other DNA
tcagagtgtgacccatgagg

SEQ ID NO: 40071 - DNA, 20 bp, synthetic construct
  misc_feature 1..20: note = chemically synthesized
  source 1..20: mol_type = other DNA
ggaggtgcattatactctaa

SEQ ID NO: 40072 - DNA, 20 bp, synthetic construct
  misc_feature 1..20: note = chemically synthesized
  source 1..20: mol_type = other DNA
atactctaaaagaactgctt

SEQ ID NO: 40073 - DNA, 20 bp, synthetic construct
  misc_feature 1..20: note = chemically synthesized
  source 1..20: mol_type = other DNA
ttaagctttctaatttatat

SEQ ID NO: 40074 - DNA, 20 bp, synthetic construct
  misc_feature 1..20: note = chemically synthesized
  source 1..20: mol_type = other DNA
agctttctaatttatattgg

SEQ ID NO: 40075 - DNA, 20 bp, synthetic construct
  misc_feature 1..20: note = chemically synthesized
  source 1..20: mol_type = other DNA
aatttatattggcagaaatc

SEQ ID NO: 40076 - DNA, 20 bp, synthetic construct
  misc_feature 1..20: note = chemically synthesized
  source 1..20: mol_type = other DNA
tttatattggcagaaatctg

SEQ ID NO: 40077 - DNA, 20 bp, synthetic construct
  misc_feature 1..20: note = chemically synthesized
  source 1..20: mol_type = other DNA
attggcagaaatctggagaa

SEQ ID NO: 40078 - DNA, 20 bp, synthetic construct
  misc_feature 1..20: note = chemically synthesized
  source 1..20: mol_type = other DNA
ttggcagaaatctggagaac

SEQ ID NO: 40079 - DNA, 20 bp, synthetic construct
  misc_feature 1..20: note = chemically synthesized
  source 1..20: mol_type = other DNA
agaaatctggagaacaggca

SEQ ID NO: 40080 - DNA, 20 bp, synthetic construct
  misc_feature 1..20: note = chemically synthesized
  source 1..20: mol_type = other DNA
gaaatctggagaacaggcat

SEQ ID NO: 40081 - DNA, 20 bp, synthetic construct
  misc_feature 1..20: note = chemically synthesized
  source 1..20: mol_type = other DNA
ctggagaacaggcatgggaa

SEQ ID NO: 40082 - DNA, 20 bp, synthetic construct
  misc_feature 1..20: note = chemically synthesized
  source 1..20: mol_type = other DNA
caggcatgggaatggatatt

SEQ ID NO: 40083 - DNA, 20 bp, synthetic construct
  misc_feature 1..20: note = chemically synthesized
  source 1..20: mol_type = other DNA
aggcatgggaatggatatta

SEQ ID NO: 40084 - DNA, 20 bp, synthetic construct
  misc_feature 1..20: note = chemically synthesized
  source 1..20: mol_type = other DNA
ggcatgggaatggatattaa

SEQ ID NO: 40085 - DNA, 20 bp, synthetic construct
  misc_feature 1..20: note = chemically synthesized
  source 1..20: mol_type = other DNA
tgggaatggatattaagggt

SEQ ID NO: 40086 - DNA, 20 bp, synthetic construct
  misc_feature 1..20: note = chemically synthesized
  source 1..20: mol_type = other DNA
gggaatggatattaagggta

SEQ ID NO: 40087 - DNA, 20 bp, synthetic construct
  misc_feature 1..20: note = chemically synthesized
  source 1..20: mol_type = other DNA
ggaatggatattaagggtaa

SEQ ID NO: 40088 - DNA, 20 bp, synthetic construct
  misc_feature 1..20: note = chemically synthesized
  source 1..20: mol_type = other DNA
atattaagggtaagggataa

SEQ ID NO: 40089 - DNA, 20 bp, synthetic construct
  misc_feature 1..20: note = chemically synthesized
  source 1..20: mol_type = other DNA
ttaagggtaagggataatgg

SEQ ID NO: 40090 - DNA, 20 bp, synthetic construct
  misc_feature 1..20: note = chemically synthesized
  source 1..20: mol_type = other DNA
agggtaagggataatggtgg

SEQ ID NO: 40091 - DNA, 20 bp, synthetic construct
  misc_feature 1..20: note = chemically synthesized
  source 1..20: mol_type = other DNA
gggtaagggataatggtgga

SEQ ID NO: 40092 - DNA, 20 bp, synthetic construct
  misc_feature 1..20: note = chemically synthesized
  source 1..20: mol_type = other DNA
ggtaagggataatggtggaa

SEQ ID NO: 40093 - DNA, 20 bp, synthetic construct
  misc_feature 1..20: note = chemically synthesized
  source 1..20: mol_type = other DNA
ggataatggtggaagggaca

SEQ ID NO: 40094 - DNA, 20 bp, synthetic construct
  misc_feature 1..20: note = chemically synthesized
  source 1..20: mol_type = other DNA
ataatggtggaagggacata

SEQ ID NO: 40095 - DNA, 20 bp, synthetic construct
  misc_feature 1..20: note = chemically synthesized
  source 1..20: mol_type = other DNA
tggtggaagggacatagagt

SEQ ID NO: 40096 - DNA, 20 bp, synthetic construct
  misc_feature 1..20: note = chemically synthesized
  source 1..20: mol_type = other DNA
aagggacatagagttggatc

SEQ ID NO: 40097 - DNA, 20 bp, synthetic construct
  misc_feature 1..20: note = chemically synthesized
  source 1..20: mol_type = other DNA
ttggatcaagctgaatttat

SEQ ID NO: 40098 - DNA, 20 bp, synthetic construct
  misc_feature 1..20: note = chemically synthesized
  source 1..20: mol_type = other DNA
tcaagctgaatttattggtt

SEQ ID NO: 40099 - DNA, 20 bp, synthetic construct
  misc_feature 1..20: note = chemically synthesized
  source 1..20: mol_type = other DNA
tttattggtttggccctact

SEQ ID NO: 40100 - DNA, 20 bp, synthetic construct
  misc_feature 1..20: note = chemically synthesized
  source 1..20: mol_type = other DNA
attggtttggccctactaag

SEQ ID NO: 40101 - DNA, 20 bp, synthetic construct
  misc_feature 1..20: note = chemically synthesized
  source 1..20: mol_type = other DNA
ttggtttggccctactaagt

SEQ ID NO: 40102 - DNA, 20 bp, synthetic construct
  misc_feature 1..20: note = chemically synthesized
  source 1..20: mol_type = other DNA
tggtttggccctactaagta

SEQ ID NO: 40103 - DNA, 20 bp, synthetic construct
  misc_feature 1..20: note = chemically synthesized
  source 1..20: mol_type = other DNA
ggattctgcatttaatgttg

SEQ ID NO: 40104 - DNA, 20 bp, synthetic construct
  misc_feature 1..20: note = chemically synthesized
  source 1..20: mol_type = other DNA
ctgcatttaatgttgcagct

SEQ ID NO: 40105 - DNA, 20 bp, synthetic construct
  misc_feature 1..20: note = chemically synthesized
  source 1..20: mol_type = other DNA
tgcatttaatgttgcagctc

SEQ ID NO: 40106 - DNA, 20 bp, synthetic construct
  misc_feature 1..20: note = chemically synthesized
  source 1..20: mol_type = other DNA
gcatttaatgttgcagctcg

SEQ ID NO: 40107 - DNA, 20 bp, synthetic construct
  misc_feature 1..20: note = chemically synthesized
  source 1..20: mol_type = other DNA
aatgttgcagctcggggact

SEQ ID NO: 40108 - DNA, 20 bp, synthetic construct
  misc_feature 1..20: note = chemically synthesized
  source 1..20: mol_type = other DNA
tgcagctcggggacttagaa

SEQ ID NO: 40109 - DNA, 20 bp, synthetic construct
  misc_feature 1..20: note = chemically synthesized
  source 1..20: mol_type = other DNA
gcagctcggggacttagaaa

SEQ ID NO: 40110 - DNA, 20 bp, synthetic construct
  misc_feature 1..20: note = chemically synthesized
  source 1..20: mol_type = other DNA
ggacttagaaaaggttctga

SEQ ID NO: 40111 - DNA, 20 bp, synthetic construct
  misc_feature 1..20: note = chemically synthesized
  source 1..20: mol_type = other DNA
gacttagaaaaggttctgat

SEQ ID NO: 40112 - DNA, 20 bp, synthetic construct
  misc_feature 1..20: note = chemically synthesized
  source 1..20: mol_type = other DNA
acttagaaaaggttctgata

SEQ ID NO: 40113 - DNA, 20 bp, synthetic construct
  misc_feature 1..20: note = chemically synthesized
  source 1..20: mol_type = other DNA
agaaaaggttctgatagggc

SEQ ID NO: 40114 - DNA, 20 bp, synthetic construct
  misc_feature 1..20: note = chemically synthesized
  source 1..20: mol_type = other DNA
gaaaaggttctgatagggcc

SEQ ID NO: 40115 - DNA, 20 bp, synthetic construct
  misc_feature 1..20: note = chemically synthesized
  source 1..20: mol_type = other DNA
aaaggttctgatagggccgg

SEQ ID NO: 40116 - DNA, 20 bp, synthetic construct
  misc_feature 1..20: note = chemically synthesized
  source 1..20: mol_type = other DNA
ggttctgatagggccgggag

SEQ ID NO: 40117 - DNA, 20 bp, synthetic construct
  misc_feature 1..20: note = chemically synthesized
  source 1..20: mol_type = other DNA
tctgatagggccgggagcag

SEQ ID NO: 40118 - DNA, 20 bp, synthetic construct
  misc_feature 1..20: note = chemically synthesized
  source 1..20: mol_type = other DNA
gtggctcacgcctgtaatcc

SEQ ID NO: 40119 - DNA, 20 bp, synthetic construct
  misc_feature 1..20: note = chemically synthesized
  source 1..20: mol_type = other DNA
cgcctgtaatcccagcacct

SEQ ID NO: 40120 - DNA, 20 bp, synthetic construct
  misc_feature 1..20: note = chemically synthesized
  source 1..20: mol_type = other DNA
gcctgtaatcccagcacctt

SEQ ID NO: 40121 - DNA, 20 bp, synthetic construct
  misc_feature 1..20: note = chemically synthesized
  source 1..20: mol_type = other DNA
ctgtaatcccagcaccttgg

SEQ ID NO: 40122 - DNA, 20 bp, synthetic construct
  misc_feature 1..20: note = chemically synthesized
  source 1..20: mol_type = other DNA
tgtaatcccagcaccttggg

SEQ ID NO: 40123 - DNA, 20 bp, synthetic construct
  misc_feature 1..20: note = chemically synthesized
  source 1..20: mol_type = other DNA
aatcccagcaccttgggagg

SEQ ID NO: 40124 - DNA, 20 bp, synthetic construct
  misc_feature 1..20: note = chemically synthesized
  source 1..20: mol_type = other DNA
atcccagcaccttgggaggc

SEQ ID NO: 40125 - DNA, 20 bp, synthetic construct
  misc_feature 1..20: note = chemically synthesized
  source 1..20: mol_type = other DNA
tcccagcaccttgggaggcg

SEQ ID NO: 40126 - DNA, 20 bp, synthetic construct
  misc_feature 1..20: note = chemically synthesized
  source 1..20: mol_type = other DNA
cccagcaccttgggaggcgg

SEQ ID NO: 40127 - DNA, 20 bp, synthetic construct
  misc_feature 1..20: note = chemically synthesized
  source 1..20: mol_type = other DNA
agcaccttgggaggcggggg

SEQ ID NO: 40128 - DNA, 20 bp, synthetic construct
  misc_feature 1..20: note = chemically synthesized
  source 1..20: mol_type = other DNA
gcaccttgggaggcgggggc

SEQ ID NO: 40129 - DNA, 20 bp, synthetic construct
  misc_feature 1..20: note = chemically synthesized
  source 1..20: mol_type = other DNA
ccttgggaggcgggggcggg

SEQ ID NO: 40130 - DNA, 20 bp, synthetic construct
  misc_feature 1..20: note = chemically synthesized
  source 1..20: mol_type = other DNA
ggcgggggcgggcagatcac

SEQ ID NO: 40131 - DNA, 20 bp, synthetic construct
  misc_feature 1..20: note = chemically synthesized
  source 1..20: mol_type = other DNA
gggcgggcagatcacgagat

SEQ ID NO: 40132 - DNA, 20 bp, synthetic construct
  misc_feature 1..20: note = chemically synthesized
  source 1..20: mol_type = other DNA
ggcgggcagatcacgagatc

SEQ ID NO: 40133 - DNA, 20 bp, synthetic construct
  misc_feature 1..20: note = chemically synthesized
  source 1..20: mol_type = other DNA
cgggcagatcacgagatcag

SEQ ID NO: 40134 - DNA, 20 bp, synthetic construct
  misc_feature 1..20: note = chemically synthesized
  source 1..20: mol_type = other DNA
gatcacgagatcaggagatt

SEQ ID NO: 40135 - DNA, 20 bp, synthetic construct
  misc_feature 1..20: note = chemically synthesized
  source 1..20: mol_type = other DNA
tcaggagattgagacaattc

SEQ ID NO: 40136 - DNA, 20 bp, synthetic construct
  misc_feature 1..20: note = chemically synthesized
  source 1..20: mol_type = other DNA
tgagacaattctggctaaaa

SEQ ID NO: 40137 - DNA, 20 bp, synthetic construct
  misc_feature 1..20: note = chemically synthesized
  source 1..20: mol_type = other DNA
tctgctaaaaatacaaaaat

SEQ ID NO: 40138 - DNA, 20 bp, synthetic construct
  misc_feature 1..20: note = chemically synthesized
  source 1..20: mol_type = other DNA
ctaaaaatacaaaaattagc

SEQ ID NO: 40139 - DNA, 20 bp, synthetic construct
  misc_feature 1..20: note = chemically synthesized
  source 1..20: mol_type = other DNA
taaaaatacaaaaattagct

SEQ ID NO: 40140 - DNA, 20 bp, synthetic construct
  misc_feature 1..20: note = chemically synthesized
  source 1..20: mol_type = other DNA
atacaaaaattagctgggca

SEQ ID NO: 40141 - DNA, 20 bp, synthetic construct
  misc_feature 1..20: note = chemically synthesized
  source 1..20: mol_type = other DNA
taactgtaatctcatctact

SEQ ID NO: 40142 - DNA, 20 bp, synthetic construct
  misc_feature 1..20: note = chemically synthesized
  source 1..20: mol_type = other DNA
aactgtaatctcatctactt

SEQ ID NO: 40143 - DNA, 20 bp, synthetic construct
  misc_feature 1..20: note = chemically synthesized
  source 1..20: mol_type = other DNA
ctgtaatctcatctacttgg

SEQ ID NO: 40144 - DNA, 20 bp, synthetic construct
  misc_feature 1..20: note = chemically synthesized
  source 1..20: mol_type = other DNA
tgtaatctcatctacttggg

SEQ ID NO: 40145 - DNA, 20 bp, synthetic construct
  misc_feature 1..20: note = chemically synthesized
  source 1..20: mol_type = other DNA
tctcatctacttgggaggct

SEQ ID NO: 40146 - DNA, 20 bp, synthetic construct
  misc_feature 1..20: note = chemically synthesized
  source 1..20: mol_type = other DNA
ctcatctacttgggaggctg

SEQ ID NO: 40147 - DNA, 20 bp, synthetic construct
  misc_feature 1..20: note = chemically synthesized
  source 1..20: mol_type = other DNA
tctacttgggaggctgaggc

SEQ ID NO: 40148 - DNA, 20 bp, synthetic construct
  misc_feature 1..20: note = chemically synthesized
  source 1..20: mol_type = other DNA
tacttgggaggctgaggcaa

SEQ ID NO: 40149 - DNA, 20 bp, synthetic construct
  misc_feature 1..20: note = chemically synthesized
  source 1..20: mol_type = other DNA
agagaactgcttgaacctgt

SEQ ID NO: 40150 - DNA, 20 bp, synthetic construct
  misc_feature 1..20: note = chemically synthesized
  source 1..20: mol_type = other DNA
gagaactgcttgaacctgtg

SEQ ID NO: 40151 - DNA, 20 bp, synthetic construct
  misc_feature 1..20: note = chemically synthesized
  source 1..20: mol_type = other DNA
aactgcttgaacctgtgagg

SEQ ID NO: 40152 - DNA, 20 bp, synthetic construct
  misc_feature 1..20: note = chemically synthesized
  source 1..20: mol_type = other DNA
ctgcttgaacctgtgaggca

SEQ ID NO: 40153 - DNA, 20 bp, synthetic construct
  misc_feature 1..20: note = chemically synthesized
  source 1..20: mol_type = other DNA
aacctgtgaggcagagattg

SEQ ID NO: 40154 - DNA, 20 bp, synthetic construct
  misc_feature 1..20: note = chemically synthesized
  source 1..20: mol_type = other DNA
tgtgaggcagagattgcagt

SEQ ID NO: 40155 - DNA, 20 bp, synthetic construct
  misc_feature 1..20: note = chemically synthesized
  source 1..20: mol_type = other DNA
ggcagagattgcagtgagcc

SEQ ID NO: 40156 - DNA, 20 bp, synthetic construct
  misc_feature 1..20: note = chemically synthesized
  source 1..20: mol_type = other DNA
aagatcgccccactgcattc

SEQ ID NO: 40157 - DNA, 20 bp, synthetic construct
  misc_feature 1..20: note = chemically synthesized
  source 1..20: mol_type = other DNA
cgccccactgcattccagcc

SEQ ID NO: 40158 - DNA, 20 bp, synthetic construct
  misc_feature 1..20: note = chemically synthesized
  source 1..20: mol_type = other DNA
actgcattccagcctggtaa

SEQ ID NO: 40159 - DNA, 20 bp, synthetic construct
  misc_feature 1..20: note = chemically synthesized
  source 1..20: mol_type = other DNA
tgcattccagcctggtaaca

SEQ ID NO: 40160 - DNA, 20 bp, synthetic construct
  misc_feature 1..20: note = chemically synthesized
  source 1..20: mol_type = other DNA
ttccagcctggtaacagagc

SEQ ID NO: 40161 - DNA, 20 bp, synthetic construct
  misc_feature 1..20: note = chemically synthesized
  source 1..20: mol_type = other DNA
ttccaaaaaaaaaaaaaaaa

SEQ ID NO: 40162 - DNA, 20 bp, synthetic construct
  misc_feature 1..20: note = chemically synthesized
  source 1..20: mol_type = other DNA
aaaaaaaaaaaaagttataa

SEQ ID NO: 40163 - DNA, 20 bp, synthetic construct
  misc_feature 1..20: note = chemically synthesized
  source 1..20: mol_type = other DNA
gttataatagtttatttgct

SEQ ID NO: 40164 - DNA, 20 bp, synthetic construct
  misc_feature 1..20: note = chemically synthesized
  source 1..20: mol_type = other DNA
taatagtttatttgcttggt

SEQ ID NO: 40165 - DNA, 20 bp, synthetic construct
  misc_feature 1..20: note = chemically synthesized
  source 1..20: mol_type = other DNA
ttgcttggttagctgaaata

SEQ ID NO: 40166 - DNA, 20 bp, synthetic construct
  misc_feature 1..20: note = chemically synthesized
  source 1..20: mol_type = other DNA
ttagctgaaatatggattaa

SEQ ID NO: 40167 - DNA, 20 bp, synthetic construct
  misc_feature 1..20: note = chemically synthesized
  source 1..20: mol_type = other DNA
ctgaaatatggattaaaaga

SEQ ID NO: 40168 - DNA, 20 bp, synthetic construct
  misc_feature 1..20: note = chemically synthesized
  source 1..20: mol_type = other DNA
attaaaagatggtccaatgt

SEQ ID NO: 40169 - DNA, 20 bp, synthetic construct
  misc_feature 1..20: note = chemically synthesized
  source 1..20: mol_type = other DNA
aaagatggtccaatgttagt

SEQ ID NO: 40170 - DNA, 20 bp, synthetic construct
  misc_feature 1..20: note = chemically synthesized
  source 1..20: mol_type = other DNA
atggtccaatgttagtgagc

SEQ ID NO: 40171 - DNA, 20 bp, synthetic construct
  misc_feature 1..20: note = chemically synthesized
  source 1..20: mol_type = other DNA
ttagtgagctggaaatgcct

SEQ ID NO: 40172 - DNA, 20 bp, synthetic construct
  misc_feature 1..20: note = chemically synthesized
  source 1..20: mol_type = other DNA
ggaaatgccttggtttaatg

SEQ ID NO: 40173 - DNA, 20 bp, synthetic construct
  misc_feature 1..20: note = chemically synthesized
  source 1..20: mol_type = other DNA
aaatgccttggtttaatgta

SEQ ID NO: 40174 - DNA, 20 bp, synthetic construct
  misc_feature 1..20: note = chemically synthesized
  source 1..20: mol_type = other DNA
aatgccttggtttaatgtag

SEQ ID NO: 40175 - DNA, 20 bp, synthetic construct
  misc_feature 1..20: note = chemically synthesized
  source 1..20: mol_type = other DNA
gccttggtttaatgtagagg

SEQ ID NO: 40176 - DNA, 20 bp, synthetic construct
  misc_feature 1..20: note = chemically synthesized
  source 1..20: mol_type = other DNA
aatgtagaggaagtgatcca

SEQ ID NO: 40177 - DNA, 20 bp, synthetic construct
  misc_feature 1..20: note = chemically synthesized
  source 1..20: mol_type = other DNA
atgtagaggaagtgatccaa

SEQ ID NO: 40178 - DNA, 20 bp, synthetic construct
  misc_feature 1..20: note = chemically synthesized
  source 1..20: mol_type = other DNA
gaggaagtgatccaaaggct

SEQ ID NO: 40179 - DNA, 20 bp, synthetic construct
  misc_feature 1..20: note = chemically synthesized
  source 1..20: mol_type = other DNA
aggaagtgatccaaaggctt

SEQ ID NO: 40180 - DNA, 20 bp, synthetic construct
  misc_feature 1..20: note = chemically synthesized
  source 1..20: mol_type = other DNA
ggaagtgatccaaaggctta

SEQ ID NO: 40181 - DNA, 20 bp, synthetic construct
  misc_feature 1..20: note = chemically synthesized
  source 1..20: mol_type = other DNA
aagtgatccaaaggcttagg

SEQ ID NO: 40182 - DNA, 20 bp, synthetic construct
  misc_feature 1..20: note = chemically synthesized
  source 1..20: mol_type = other DNA
atccaaaggcttagggagat

SEQ ID NO: 40183 - DNA, 20 bp, synthetic construct
  misc_feature 1..20: note = chemically synthesized
  source 1..20: mol_type = other DNA
tccaaaggcttagggagatt

SEQ ID NO: 40184 - DNA, 20 bp, synthetic construct
  misc_feature 1..20: note = chemically synthesized
  source 1..20: mol_type = other DNA
aaggcttagggagattagga

SEQ ID NO: 40185 - DNA, 20 bp, synthetic construct
  misc_feature 1..20: note = chemically synthesized
  source 1..20: mol_type = other DNA
gcttagggagattaggatgg

SEQ ID NO: 40186 - DNA, 20 bp, synthetic construct
  misc_feature 1..20: note = chemically synthesized
  source 1..20: mol_type = other DNA
ttagggagattaggatggtg

SEQ ID NO: 40187 - DNA, 20 bp, synthetic construct
  misc_feature 1..20: note = chemically synthesized
  source 1..20: mol_type = other DNA
gggagattaggatggtggag

SEQ ID NO: 40188 - DNA, 20 bp, synthetic construct
  misc_feature 1..20: note = chemically synthesized
  source 1..20: mol_type = other DNA
attaggatggtggagtggat

SEQ ID NO: 40189 - DNA, 20 bp, synthetic construct
  misc_feature 1..20: note = chemically synthesized
  source 1..20: mol_type = other DNA
gtggagtggattagtcactt

SEQ ID NO: 40190 - DNA, 20 bp, synthetic construct
  misc_feature 1..20: note = chemically synthesized
  source 1..20: mol_type = other DNA
cactttagacctactcatcc

SEQ ID NO: 40191 - DNA, 20 bp, synthetic construct
  misc_feature 1..20: note = chemically synthesized
  source 1..20: mol_type = other DNA
ttagacctactcatcccagc

SEQ ID NO: 40192 - DNA, 20 bp, synthetic construct
  misc_feature 1..20: note = chemically synthesized
  source 1..20: mol_type = other DNA
tagacctactcatcccagct

SEQ ID NO: 40193 - DNA, 20 bp, synthetic construct
  misc_feature 1..20: note = chemically synthesized
  source 1..20: mol_type = other DNA
gacctactcatcccagctgg

SEQ ID NO: 40194 - DNA, 20 bp, synthetic construct
  misc_feature 1..20: note = chemically synthesized
  source 1..20: mol_type = other DNA
acctactcatcccagctggg

SEQ ID NO: 40195 - DNA, 20 bp, synthetic construct
  misc_feature 1..20: note = chemically synthesized
  source 1..20: mol_type = other DNA
cctactcatcccagctggga

SEQ ID NO: 40196 - DNA, 20 bp, synthetic construct
  misc_feature 1..20: note = chemically synthesized
  source 1..20: mol_type = other DNA
tcatcccagctgggagggtc

SEQ ID NO: 40197 - DNA, 20 bp, synthetic construct
  misc_feature 1..20: note = chemically synthesized
  source 1..20: mol_type = other DNA
tcccagctgggagggtccag

SEQ ID NO: 40198 - DNA, 20 bp, synthetic construct
  misc_feature 1..20: note = chemically synthesized
  source 1..20: mol_type = other DNA
gggtccagaagatacaccct

SEQ ID NO: 40199 - DNA, 20 bp, synthetic construct
  misc_feature 1..20: note = chemically synthesized
  source 1..20: mol_type = other DNA
agaagatacacccttggccg

SEQ ID NO: 40200 - DNA, 20 bp, synthetic construct
  misc_feature 1..20: note = chemically synthesized
  source 1..20: mol_type = other DNA
ttggccgaagctttgtgaaa

SEQ ID NO: 40201 - DNA, 20 bp, synthetic construct
  misc_feature 1..20: note = chemically synthesized
  source 1..20: mol_type = other DNA
gctttgtgaaatagatttgt

SEQ ID NO: 40202 - DNA, 20 bp, synthetic construct
  misc_feature 1..20: note = chemically synthesized
  source 1..20: mol_type = other DNA
tttgtgaaatagatttgtga

SEQ ID NO: 40203 - DNA, 20 bp, synthetic construct
  misc_feature 1..20: note = chemically synthesized
  source 1..20: mol_type = other DNA
gtgaaatagatttgtgagag

SEQ ID NO: 40204 - DNA, 20 bp, synthetic construct
  misc_feature 1..20: note = chemically synthesized
  source 1..20: mol_type = other DNA
gagcagcacctgtatttttg

SEQ ID NO: 40205 - DNA, 20 bp, synthetic construct
  misc_feature 1..20: note = chemically synthesized
  source 1..20: mol_type = other DNA
gcagcacctgtatttttgaa

SEQ ID NO: 40206 - DNA, 20 bp, synthetic construct
  misc_feature 1..20: note = chemically synthesized
  source 1..20: mol_type = other DNA
aattgctcttctctgtatgt

SEQ ID NO: 40207 - DNA, 20 bp, synthetic construct
  misc_feature 1..20: note = chemically synthesized
  source 1..20: mol_type = other DNA
tctctgtatgtcagatctaa

SEQ ID NO: 40208 - DNA, 20 bp, synthetic construct
  misc_feature 1..20: note = chemically synthesized
  source 1..20: mol_type = other DNA
ctgtatgtcagatctaacag

SEQ ID NO: 40209 - DNA, 20 bp, synthetic construct
  misc_feature 1..20: note = chemically synthesized
  source 1..20: mol_type = other DNA
tgtatgtcagatctaacagt

SEQ ID NO: 40210 - DNA, 20 bp, synthetic construct
  misc_feature 1..20: note = chemically synthesized
  source 1..20: mol_type = other DNA
agatctaacagtaggaacca

SEQ ID NO: 40211 - DNA, 20 bp, synthetic construct
  misc_feature 1..20: note = chemically synthesized
  source 1..20: mol_type = other DNA
actacaaaatttaaatacaa

SEQ ID NO: 40212 - DNA, 20 bp, synthetic construct
  misc_feature 1..20: note = chemically synthesized
  source 1..20: mol_type = other DNA
ctacaaaatttaaatacaat

SEQ ID NO: 40213 - DNA, 20 bp, synthetic construct
  misc_feature 1..20: note = chemically synthesized
  source 1..20: mol_type = other DNA
ttaaatacaatgggaataat

SEQ ID NO: 40214 - DNA, 20 bp, synthetic construct
  misc_feature 1..20: note = chemically synthesized
  source 1..20: mol_type = other DNA
aatgggaataattggatcct

SEQ ID NO: 40215 - DNA, 20 bp, synthetic construct
  misc_feature 1..20: note = chemically synthesized
  source 1..20: mol_type = other DNA
atgggaataattggatcctg

SEQ ID NO: 40216 - DNA, 20 bp, synthetic construct
  misc_feature 1..20: note = chemically synthesized
  source 1..20: mol_type = other DNA
ggaataattggatcctgagg

SEQ ID NO: 40217 - DNA, 20 bp, synthetic construct
  misc_feature 1..20: note = chemically synthesized
  source 1..20: mol_type = other DNA
ataattggatcctgaggtgg

SEQ ID NO: 40218 - DNA, 20 bp, synthetic construct
  misc_feature 1..20: note = chemically synthesized
  source 1..20: mol_type = other DNA
taattggatcctgaggtggc

SEQ ID NO: 40219 - DNA, 20 bp, synthetic construct
  misc_feature 1..20: note = chemically synthesized
  source 1..20: mol_type = other DNA
aattggatcctgaggtggca

SEQ ID NO: 40220 - DNA, 20 bp, synthetic construct
  misc_feature 1..20: note = chemically synthesized
  source 1..20: mol_type = other DNA
attggatcctgaggtggcag

SEQ ID NO: 40221 - DNA, 20 bp, synthetic construct
  misc_feature 1..20: note = chemically synthesized
  source 1..20: mol_type = other DNA
atcctgaggtggcaggggcc

SEQ ID NO: 40222 - DNA, 20 bp, synthetic construct
  misc_feature 1..20: note = chemically synthesized
  source 1..20: mol_type = other DNA
aggtggcaggggccaagtgt

SEQ ID NO: 40223 - DNA, 20 bp, synthetic construct
  misc_feature 1..20: note = chemically synthesized
  source 1..20: mol_type = other DNA
gtgttggcactgaaccatca

SEQ ID NO: 40224 - DNA, 20 bp, synthetic construct
  misc_feature 1..20: note = chemically synthesized
  source 1..20: mol_type = other DNA
tgttggcactgaaccatcaa

SEQ ID NO: 40225 - DNA, 20 bp, synthetic construct
  misc_feature 1..20: note = chemically synthesized
  source 1..20: mol_type = other DNA
ggcactgaaccatcaaaggc

SEQ ID NO: 40226 - DNA, 20 bp, synthetic construct
  misc_feature 1..20: note = chemically synthesized
  source 1..20: mol_type = other DNA
gcactgaaccatcaaaggca

SEQ ID NO: 40227 - DNA, 20 bp, synthetic construct
  misc_feature 1..20: note = chemically synthesized
  source 1..20: mol_type = other DNA
ctgaaccatcaaaggcaagg

SEQ ID NO: 40228 - DNA, 20 bp, synthetic construct
  misc_feature 1..20: note = chemically synthesized
  source 1..20: mol_type = other DNA
tgaaccatcaaaggcaaggt

SEQ ID NO: 40229 - DNA, 20 bp, synthetic construct
  misc_feature 1..20: note = chemically synthesized
  source 1..20: mol_type = other DNA
ggtgggcataactaccataa

SEQ ID NO: 40230 - DNA, 20 bp, synthetic construct
  misc_feature 1..20: note = chemically synthesized
  source 1..20: mol_type = other DNA
ggcataactaccataataga

SEQ ID NO: 40231 - DNA, 20 bp, synthetic construct
  misc_feature 1..20: note = chemically synthesized
  source 1..20: mol_type = other DNA
ataactaccataatagacag

SEQ ID NO: 40232 - DNA, 20 bp, synthetic construct
  misc_feature 1..20: note = chemically synthesized
  source 1..20: mol_type = other DNA
aactaccataatagacagca

SEQ ID NO: 40233 - DNA, 20 bp, synthetic construct
  misc_feature 1..20: note = chemically synthesized
  source 1..20: mol_type = other DNA
actaccataatagacagcag

SEQ ID NO: 40234 - DNA, 20 bp, synthetic construct
  misc_feature 1..20: note = chemically synthesized
  source 1..20: mol_type = other DNA
cataatagacagcagaggca

SEQ ID NO: 40235 - DNA, 20 bp, synthetic construct
  misc_feature 1..20: note = chemically synthesized
  source 1..20: mol_type = other DNA
aatagacagcagaggcaaag

SEQ ID NO: 40236 - DNA, 20 bp, synthetic construct
  misc_feature 1..20: note = chemically synthesized
  source 1..20: mol_type = other DNA
agcagaggcaaagcagccat

SEQ ID NO: 40237 - DNA, 20 bp, synthetic construct
  misc_feature 1..20: note = chemically synthesized
  source 1..20: mol_type = other DNA
aggcaaagcagccatcagaa

SEQ ID NO: 40238 - DNA, 20 bp, synthetic construct
  misc_feature 1..20: note = chemically synthesized
  source 1..20: mol_type = other DNA
tcagaatagtctgactcatg

SEQ ID NO: 40239 - DNA, 20 bp, synthetic construct
  misc_feature 1..20: note = chemically synthesized
  source 1..20: mol_type = other DNA
agaatagtctgactcatgta

SEQ ID NO: 40240 - DNA, 20 bp, synthetic construct
  misc_feature 1..20: note = chemically synthesized
  source 1..20: mol_type = other DNA
gtctgactcatgtagagctc

SEQ ID NO: 40241 - DNA, 20 bp, synthetic construct
  misc_feature 1..20: note = chemically synthesized
  source 1..20: mol_type = other DNA
ctcatgtagagctctggcat

SEQ ID NO: 40242 - DNA, 20 bp, synthetic construct
  misc_feature 1..20: note = chemically synthesized
  source 1..20: mol_type = other DNA
tggcattggctaattaatca

SEQ ID NO: 40243 - DNA, 20 bp, synthetic construct
  misc_feature 1..20: note = chemically synthesized
  source 1..20: mol_type = other DNA
ctaattaatcatggtgttcc

SEQ ID NO: 40244 - DNA, 20 bp, synthetic construct
  misc_feature 1..20: note = chemically synthesized
  source 1..20: mol_type = other DNA
attaatcatggtgttcctag

SEQ ID NO: 40245 - DNA, 20 bp, synthetic construct
  misc_feature 1..20: note = chemically synthesized
  source 1..20: mol_type = other DNA
gttcctagaagtgaaattga

SEQ ID NO: 40246 - DNA, 20 bp, synthetic construct
  misc_feature 1..20: note = chemically synthesized
  source 1..20: mol_type = other DNA
ttcctagaagtgaaattgat

SEQ ID NO: 40247 - DNA, 20 bp, synthetic construct
  misc_feature 1..20: note = chemically synthesized
  source 1..20: mol_type = other DNA
ttatataaacaaaaaactgc

SEQ ID NO: 40248 - DNA, 20 bp, synthetic construct
  misc_feature 1..20: note = chemically synthesized
  source 1..20: mol_type = other DNA
tatataaacaaaaaactgcc

SEQ ID NO: 40249 - DNA, 20 bp, synthetic construct
  misc_feature 1..20: note = chemically synthesized
  source 1..20: mol_type = other DNA
ataaacaaaaaactgccagg

SEQ ID NO: 40250 - DNA, 20 bp, synthetic construct
  misc_feature 1..20: note = chemically synthesized
  source 1..20: mol_type = other DNA
caaaaaactgccaggtagaa

SEQ ID NO: 40251 - DNA, 20 bp, synthetic construct
  misc_feature 1..20: note = chemically synthesized
  source 1..20: mol_type = other DNA
ctgccaggtagaatggacta

SEQ ID NO: 40252 - DNA, 20 bp, synthetic construct
  misc_feature 1..20: note = chemically synthesized
  source 1..20: mol_type = other DNA
actaatctgaattataaaaa

SEQ ID NO: 40253 - DNA, 20 bp, synthetic construct
  misc_feature 1..20: note = chemically synthesized
  source 1..20: mol_type = other DNA
taatctgaattataaaaaca

SEQ ID NO: 40254 - DNA, 20 bp, synthetic construct
  misc_feature 1..20: note = chemically synthesized
  source 1..20: mol_type = other DNA
attataaaaacagagaatca

SEQ ID NO: 40255 - DNA, 20 bp, synthetic construct
  misc_feature 1..20: note = chemically synthesized
  source 1..20: mol_type = other DNA
ttataaaaacagagaatcat

SEQ ID NO: 40256 - DNA, 20 bp, synthetic construct
  misc_feature 1..20: note = chemically synthesized
  source 1..20: mol_type = other DNA
atgggccctcaatcaatttc

SEQ ID NO: 40257 - DNA, 20 bp, synthetic construct
  misc_feature 1..20: note = chemically synthesized
  source 1..20: mol_type = other DNA
ttccagactcgaacctgtta

SEQ ID NO: 40258 - DNA, 20 bp, synthetic construct
  misc_feature 1..20: note = chemically synthesized
  source 1..20: mol_type = other DNA
actcgaacctgttacagttc

SEQ ID NO: 40259 - DNA, 20 bp, synthetic construct
  misc_feature 1..20: note = chemically synthesized
  source 1..20: mol_type = other DNA
gttccagaacccactgaatg

SEQ ID NO: 40260 - DNA, 20 bp, synthetic construct
  misc_feature 1..20: note = chemically synthesized
  source 1..20: mol_type = other DNA
ttccagaacccactgaatga

SEQ ID NO: 40261 - DNA, 20 bp, synthetic construct
  misc_feature 1..20: note = chemically synthesized
  source 1..20: mol_type = other DNA
tccagaacccactgaatgaa

SEQ ID NO: 40262 - DNA, 20 bp, synthetic construct
  misc_feature 1..20: note = chemically synthesized
  source 1..20: mol_type = other DNA
ccagaacccactgaatgaag

SEQ ID NO: 40263 - DNA, 20 bp, synthetic construct
  misc_feature 1..20: note = chemically synthesized
  source 1..20: mol_type = other DNA
agaacccactgaatgaaggg

SEQ ID NO: 40264 - DNA, 20 bp, synthetic construct
  misc_feature 1..20: note = chemically synthesized
  source 1..20: mol_type = other DNA
gaacccactgaatgaagggg

SEQ ID NO: 40265 - DNA, 20 bp, synthetic construct
  misc_feature 1..20: note = chemically synthesized
  source 1..20: mol_type = other DNA
ccactgaatgaaggggaggc

SEQ ID NO: 40266 - DNA, 20 bp, synthetic construct
  misc_feature 1..20: note = chemically synthesized
  source 1..20: mol_type = other DNA
aggggaggctggatcccctt

SEQ ID NO: 40267 - DNA, 20 bp, synthetic construct
  misc_feature 1..20: note = chemically synthesized
  source 1..20: mol_type = other DNA
ggggaggctggatccccttg

SEQ ID NO: 40268 - DNA, 20 bp, synthetic construct
  misc_feature 1..20: note = chemically synthesized
  source 1..20: mol_type = other DNA
gaggctggatccccttgagg

SEQ ID NO: 40269 - DNA, 20 bp, synthetic construct
  misc_feature 1..20: note = chemically synthesized
  source 1..20: mol_type = other DNA
aggctggatccccttgagga

SEQ ID NO: 40270 - DNA, 20 bp, synthetic construct
  misc_feature 1..20: note = chemically synthesized
  source 1..20: mol_type = other DNA
cccttgaggaaggacaccac

SEQ ID NO: 40271 - DNA, 20 bp, synthetic construct
  misc_feature 1..20: note = chemically synthesized
  source 1..20: mol_type = other DNA
ccttgaggaaggacaccact

SEQ ID NO: 40272 - DNA, 20 bp, synthetic construct
  misc_feature 1..20: note = chemically synthesized
  source 1..20: mol_type = other DNA
tctttctcccatccttccct

SEQ ID NO: 40273 - DNA, 20 bp, synthetic construct
  misc_feature 1..20: note = chemically synthesized
  source 1..20: mol_type = other DNA
ctttctcccatccttcccta

SEQ ID NO: 40274 - DNA, 20 bp, synthetic construct
  misc_feature 1..20: note = chemically synthesized
  source 1..20: mol_type = other DNA
ttctcccatccttccctaag

SEQ ID NO: 40275 - DNA, 20 bp, synthetic construct
  misc_feature 1..20: note = chemically synthesized
  source 1..20: mol_type = other DNA
tccttccctaaggagacctc

SEQ ID NO: 40276 - DNA, 20 bp, synthetic construct
  misc_feature 1..20: note = chemically synthesized
  source 1..20: mol_type = other DNA
ggagacctctggccttttac

SEQ ID NO: 40277 - DNA, 20 bp, synthetic construct
  misc_feature 1..20: note = chemically synthesized
  source 1..20: mol_type = other DNA
gagacctctggccttttacc

SEQ ID NO: 40278 - DNA, 20 bp, synthetic construct
  misc_feature 1..20: note = chemically synthesized
  source 1..20: mol_type = other DNA
agacctctggccttttacca

SEQ ID NO: 40279 - DNA, 20 bp, synthetic construct
  misc_feature 1..20: note = chemically synthesized
  source 1..20: mol_type = other DNA
accagggtaactgtgtgtac

SEQ ID NO: 40280 - DNA, 20 bp, synthetic construct
  misc_feature 1..20: note = chemically synthesized
  source 1..20: mol_type = other DNA
cagggtaactgtgtgtactg

SEQ ID NO: 40281 - DNA, 20 bp, synthetic construct
  misc_feature 1..20: note = chemically synthesized
  source 1..20: mol_type = other DNA
gtaactgtgtgtactggaga

SEQ ID NO: 40282 - DNA, 20 bp, synthetic construct
  misc_feature 1..20: note = chemically synthesized
  source 1..20: mol_type = other DNA
taactgtgtgtactggagaa

SEQ ID NO: 40283 - DNA, 20 bp, synthetic construct
  misc_feature 1..20: note = chemically synthesized
  source 1..20: mol_type = other DNA
aactgtgtgtactggagaaa

SEQ ID NO: 40284 - DNA, 20 bp, synthetic construct
  misc_feature 1..20: note = chemically synthesized
  source 1..20: mol_type = other DNA
tgtgtgtactggagaaaggg

SEQ ID NO: 40285 - DNA, 20 bp, synthetic construct
  misc_feature 1..20: note = chemically synthesized
  source 1..20: mol_type = other DNA
actggagaaagggaagtaat

SEQ ID NO: 40286 - DNA, 20 bp, synthetic construct
  misc_feature 1..20: note = chemically synthesized
  source 1..20: mol_type = other DNA
agggaagtaatgagacattt

SEQ ID NO: 40287 - DNA, 20 bp, synthetic construct
  misc_feature 1..20: note = chemically synthesized
  source 1..20: mol_type = other DNA
aagtaatgagacatttcaga

SEQ ID NO: 40288 - DNA, 20 bp, synthetic construct
  misc_feature 1..20: note = chemically synthesized
  source 1..20: mol_type = other DNA
tgagacatttcagaaagtac

SEQ ID NO: 40289 - DNA, 20 bp, synthetic construct
  misc_feature 1..20: note = chemically synthesized
  source 1..20: mol_type = other DNA
tttcagaaagtactggacac

SEQ ID NO: 40290 - DNA, 20 bp, synthetic construct
  misc_feature 1..20: note = chemically synthesized
  source 1..20: mol_type = other DNA
aagtactggacactggctct

SEQ ID NO: 40291 - DNA, 20 bp, synthetic construct
  misc_feature 1..20: note = chemically synthesized
  source 1..20: mol_type = other DNA
ctctgagctgacgttgattc

SEQ ID NO: 40292 - DNA, 20 bp, synthetic construct
  misc_feature 1..20: note = chemically synthesized
  source 1..20: mol_type = other DNA
tctgagctgacgttgattcc

SEQ ID NO: 40293 - DNA, 20 bp, synthetic construct
  misc_feature 1..20: note = chemically synthesized
  source 1..20: mol_type = other DNA
ctgagctgacgttgattcca

SEQ ID NO: 40294 - DNA, 20 bp, synthetic construct
  misc_feature 1..20: note = chemically synthesized
  source 1..20: mol_type = other DNA
gggtacccaaaacgttattg

SEQ ID NO: 40295 - DNA, 20 bp, synthetic construct
  misc_feature 1..20: note = chemically synthesized
  source 1..20: mol_type = other DNA
aaaacgttattgtggttccc

SEQ ID NO: 40296 - DNA, 20 bp, synthetic construct
  misc_feature 1..20: note = chemically synthesized
  source 1..20: mol_type = other DNA
ttattgtggttccccagtta

SEQ ID NO: 40297 - DNA, 20 bp, synthetic construct
  misc_feature 1..20: note = chemically synthesized
  source 1..20: mol_type = other DNA
ttgtggttccccagttaaag

SEQ ID NO: 40298 - DNA, 20 bp, synthetic construct
  misc_feature 1..20: note = chemically synthesized
  source 1..20: mol_type = other DNA
tgtggttccccagttaaagt

SEQ ID NO: 40299 - DNA, 20 bp, synthetic construct
  misc_feature 1..20: note = chemically synthesized
  source 1..20: mol_type = other DNA
gtggttccccagttaaagta

SEQ ID NO: 40300 - DNA, 20 bp, synthetic construct
  misc_feature 1..20: note = chemically synthesized
  source 1..20: mol_type = other DNA
tggttccccagttaaagtag

SEQ ID NO: 40301 - DNA, 20 bp, synthetic construct
  misc_feature 1..20: note = chemically synthesized
  source 1..20: mol_type = other DNA
ccagttaaagtaggggctta

SEQ ID NO: 40302 - DNA, 20 bp, synthetic construct
  misc_feature 1..20: note = chemically synthesized
  source 1..20: mol_type = other DNA
agttaaagtaggggcttatg

SEQ ID NO: 40303 - DNA, 20 bp, synthetic construct
  misc_feature 1..20: note = chemically synthesized
  source 1..20: mol_type = other DNA
gttaaagtaggggcttatgg

SEQ ID NO: 40304 - DNA, 20 bp, synthetic construct
  misc_feature 1..20: note = chemically synthesized
  source 1..20: mol_type = other DNA
aagtaggggcttatggaggt

SEQ ID NO: 40305 - DNA, 20 bp, synthetic construct
  misc_feature 1..20: note = chemically synthesized
  source 1..20: mol_type = other DNA
agtaggggcttatggaggtt

SEQ ID NO: 40306 - DNA, 20 bp, synthetic construct
  misc_feature 1..20: note = chemically synthesized
  source 1..20: mol_type = other DNA
tatggaggttaggtaattaa

SEQ ID NO: 40307 - DNA, 20 bp, synthetic construct
  misc_feature 1..20: note = chemically synthesized
  source 1..20: mol_type = other DNA
tggaggttaggtaattaatg

SEQ ID NO: 40308 - DNA, 20 bp, synthetic construct
  misc_feature 1..20: note = chemically synthesized
  source 1..20: mol_type = other DNA
ttaggtaattaatggagttt

SEQ ID NO: 40309 - DNA, 20 bp, synthetic construct
  misc_feature 1..20: note = chemically synthesized
  source 1..20: mol_type = other DNA
tttagctcatttctgactta

SEQ ID NO: 40310 - DNA, 20 bp, synthetic construct
  misc_feature 1..20: note = chemically synthesized
  source 1..20: mol_type = other DNA
agctcatttctgacttacag

SEQ ID NO: 40311 - DNA, 20 bp, synthetic construct
  misc_feature 1..20: note = chemically synthesized
  source 1..20: mol_type = other DNA
tttctgacttacagtggttc

SEQ ID NO: 40312 - DNA, 20 bp, synthetic construct
  misc_feature 1..20: note = chemically synthesized
  source 1..20: mol_type = other DNA
ctgacttacagtggttccag

SEQ ID NO: 40313 - DNA, 20 bp, synthetic construct
  misc_feature 1..20: note = chemically synthesized
  source 1..20: mol_type = other DNA
tgacttacagtggttccagt

SEQ ID NO: 40314 - DNA, 20 bp, synthetic construct
  misc_feature 1..20: note = chemically synthesized
  source 1..20: mol_type = other DNA
cagtggttccagtgggtccc

SEQ ID NO: 40315 - DNA, 20 bp, synthetic construct
  misc_feature 1..20: note = chemically synthesized
  source 1..20: mol_type = other DNA
gggtccctggacttatcctc

SEQ ID NO: 40316 - DNA, 20 bp, synthetic construct
  misc_feature 1..20: note = chemically synthesized
  source 1..20: mol_type = other DNA
ttatcctctggtcattttcc

SEQ ID NO: 40317 - DNA, 20 bp, synthetic construct
  misc_feature 1..20: note = chemically synthesized
  source 1..20: mol_type = other DNA
gccaaaatgcataatttgta

SEQ ID NO: 40318 - DNA, 20 bp, synthetic construct
  misc_feature 1..20: note = chemically synthesized
  source 1..20: mol_type = other DNA
atttgtatagacatacttat

SEQ ID NO: 40319 - DNA, 20 bp, synthetic construct
  misc_feature 1..20: note = chemically synthesized
  source 1..20: mol_type = other DNA
gtatagacatacttattagc

SEQ ID NO: 40320 - DNA, 20 bp, synthetic construct
  misc_feature 1..20: note = chemically synthesized
  source 1..20: mol_type = other DNA
tagacatacttattagctgg

SEQ ID NO: 40321 - DNA, 20 bp, synthetic construct
  misc_feature 1..20: note = chemically synthesized
  source 1..20: mol_type = other DNA
agctggcagaaatgccacat

SEQ ID NO: 40322 - DNA, 20 bp, synthetic construct
  misc_feature 1..20: note = chemically synthesized
  source 1..20: mol_type = other DNA
tgccacattggctccctgac

SEQ ID NO: 40323 - DNA, 20 bp, synthetic construct
  misc_feature 1..20: note = chemically synthesized
  source 1..20: mol_type = other DNA
cacattggctccctgactgg

SEQ ID NO: 40324 - DNA, 20 bp, synthetic construct
  misc_feature 1..20: note = chemically synthesized
  source 1..20: mol_type = other DNA
acattggctccctgactggt

SEQ ID NO: 40325 - DNA, 20 bp, synthetic construct
  misc_feature 1..20: note = chemically synthesized
  source 1..20: mol_type = other DNA
ggctccctgactggtaggat

SEQ ID NO: 40326 - DNA, 20 bp, synthetic construct
  misc_feature 1..20: note = chemically synthesized
  source 1..20: mol_type = other DNA
gctccctgactggtaggatg

SEQ ID NO: 40327 - DNA, 20 bp, synthetic construct
  misc_feature 1..20: note = chemically synthesized
  source 1..20: mol_type = other DNA
ctccctgactggtaggatga

SEQ ID NO: 40328 - DNA, 20 bp, synthetic construct
  misc_feature 1..20: note = chemically synthesized
  source 1..20: mol_type = other DNA
tggtaggatgagggctatta

SEQ ID NO: 40329 - DNA, 20 bp, synthetic construct
  misc_feature 1..20: note = chemically synthesized
  source 1..20: mol_type = other DNA
taggatgagggctattatgg

SEQ ID NO: 40330 - DNA, 20 bp, synthetic construct
  misc_feature 1..20: note = chemically synthesized
  source 1..20: mol_type = other DNA
aggatgagggctattatggt

SEQ ID NO: 40331 - DNA, 20 bp, synthetic construct
  misc_feature 1..20: note = chemically synthesized
  source 1..20: mol_type = other DNA
tgagggctattatggtggga

SEQ ID NO: 40332 - DNA, 20 bp, synthetic construct
  misc_feature 1..20: note = chemically synthesized
  source 1..20: mol_type = other DNA
gagggctattatggtgggaa

SEQ ID NO: 40333 - DNA, 20 bp, synthetic construct
  misc_feature 1..20: note = chemically synthesized
  source 1..20: mol_type = other DNA
ttatggtgggaaaggccaaa

SEQ ID NO: 40334 - DNA, 20 bp, synthetic construct
  misc_feature 1..20: note = chemically synthesized
  source 1..20: mol_type = other DNA
tggtgggaaaggccaaacag

SEQ ID NO: 40335 - DNA, 20 bp, synthetic construct
  misc_feature 1..20: note = chemically synthesized
  source 1..20: mol_type = other DNA
aaaggccaaacagaagccat

SEQ ID NO: 40336 - DNA, 20 bp, synthetic construct
  misc_feature 1..20: note = chemically synthesized
  source 1..20: mol_type = other DNA
aggccaaacagaagccatta

SEQ ID NO: 40337 - DNA, 20 bp, synthetic construct
  misc_feature 1..20: note = chemically synthesized
  source 1..20: mol_type = other DNA
ccattagagctgtctctacc

SEQ ID NO: 40338 - DNA, 20 bp, synthetic construct
  misc_feature 1..20: note = chemically synthesized
  source 1..20: mol_type = other DNA
caaaaacaatatcccatccc

SEQ ID NO: 40339 - DNA, 20 bp, synthetic construct
  misc_feature 1..20: note = chemically synthesized
  source 1..20: mol_type = other DNA
aaaacaatatcccatccctg

SEQ ID NO: 40340 - DNA, 20 bp, synthetic construct
  misc_feature 1..20: note = chemically synthesized
  source 1..20: mol_type = other DNA
aaacaatatcccatccctgg

SEQ ID NO: 40341 - DNA, 20 bp, synthetic construct
  misc_feature 1..20: note = chemically synthesized
  source 1..20: mol_type = other DNA
aacaatatcccatccctgga

SEQ ID NO: 40342 - DNA, 20 bp, synthetic construct
  misc_feature 1..20: note = chemically synthesized
  source 1..20: mol_type = other DNA
tcccatccctggagggactg

SEQ ID NO: 40343 - DNA, 20 bp, synthetic construct
  misc_feature 1..20: note = chemically synthesized
  source 1..20: mol_type = other DNA
cctggagggactgaagtgat

SEQ ID NO: 40344 - DNA, 20 bp, synthetic construct
  misc_feature 1..20: note = chemically synthesized
  source 1..20: mol_type = other DNA
aagtgattagtgtcaccatc

SEQ ID NO: 40345 - DNA, 20 bp, synthetic construct
  misc_feature 1..20: note = chemically synthesized
  source 1..20: mol_type = other DNA
agtgattagtgtcaccatca

SEQ ID NO: 40346 - DNA, 20 bp, synthetic construct
  misc_feature 1..20: note = chemically synthesized
  source 1..20: mol_type = other DNA
tgtcaccatcaaggacttga

SEQ ID NO: 40347 - DNA, 20 bp, synthetic construct
  misc_feature 1..20: note = chemically synthesized
  source 1..20: mol_type = other DNA
catcaaggacttgaaagacg

SEQ ID NO: 40348 - DNA, 20 bp, synthetic construct
  misc_feature 1..20: note = chemically synthesized
  source 1..20: mol_type = other DNA
atcaaggacttgaaagacgc

SEQ ID NO: 40349 - DNA, 20 bp, synthetic construct
  misc_feature 1..20: note = chemically synthesized
  source 1..20: mol_type = other DNA
tcaaggacttgaaagacgca

SEQ ID NO: 40350 - DNA, 20 bp, synthetic construct
  misc_feature 1..20: note = chemically synthesized
  source 1..20: mol_type = other DNA
caaggacttgaaagacgcag

SEQ ID NO: 40351 - DNA, 20 bp, synthetic construct
  misc_feature 1..20: note = chemically synthesized
  source 1..20: mol_type = other DNA
ggacttgaaagacgcagggg

SEQ ID NO: 40352 - DNA, 20 bp, synthetic construct
  misc_feature 1..20: note = chemically synthesized
  source 1..20: mol_type = other DNA
actctcccatttgacctgtg

SEQ ID NO: 40353 - DNA, 20 bp, synthetic construct
  misc_feature 1..20: note = chemically synthesized
  source 1..20: mol_type = other DNA
tctcccatttgacctgtgca

SEQ ID NO: 40354 - DNA, 20 bp, synthetic construct
  misc_feature 1..20: note = chemically synthesized
  source 1..20: mol_type = other DNA
ctcccatttgacctgtgcag

SEQ ID NO: 40355 - DNA, 20 bp, synthetic construct
  misc_feature 1..20: note = chemically synthesized
  source 1..20: mol_type = other DNA
catttgacctgtgcagagga

SEQ ID NO: 40356 - DNA, 20 bp, synthetic construct
  misc_feature 1..20: note = chemically synthesized
  source 1..20: mol_type = other DNA
tgacctgtgcagaggacaga

SEQ ID NO: 40357 - DNA, 20 bp, synthetic construct
  misc_feature 1..20: note = chemically synthesized
  source 1..20: mol_type = other DNA
tgcagaggacagatggatct

SEQ ID NO: 40358 - DNA, 20 bp, synthetic construct
  misc_feature 1..20: note = chemically synthesized
  source 1..20: mol_type = other DNA
agatggatcttggaaaatga

SEQ ID NO: 40359 - DNA, 20 bp, synthetic construct
  misc_feature 1..20: note = chemically synthesized
  source 1..20: mol_type = other DNA
tggatcttggaaaatgatgg

SEQ ID NO: 40360 - DNA, 20 bp, synthetic construct
  misc_feature 1..20: note = chemically synthesized
  source 1..20: mol_type = other DNA
aaatgatggtggattatttt

SEQ ID NO: 40361 - DNA, 20 bp, synthetic construct
  misc_feature 1..20: note = chemically synthesized
  source 1..20: mol_type = other DNA
ggattattttaagcttaacc

SEQ ID NO: 40362 - DNA, 20 bp, synthetic construct
  misc_feature 1..20: note = chemically synthesized
  source 1..20: mol_type = other DNA
ttattttaagcttaaccaag

SEQ ID NO: 40363 - DNA, 20 bp, synthetic construct
  misc_feature 1..20: note = chemically synthesized
  source 1..20: mol_type = other DNA
ccaagtggtgactccaattg

SEQ ID NO: 40364 - DNA, 20 bp, synthetic construct
  misc_feature 1..20: note = chemically synthesized
  source 1..20: mol_type = other DNA
tccaattgcagctgctctac

SEQ ID NO: 40365 - DNA, 20 bp, synthetic construct
  misc_feature 1..20: note = chemically synthesized
  source 1..20: mol_type = other DNA
tgcagctgctctaccagttg

SEQ ID NO: 40366 - DNA, 20 bp, synthetic construct
  misc_feature 1..20: note = chemically synthesized
  source 1..20: mol_type = other DNA
cagttgtggttttgttgctt

SEQ ID NO: 40367 - DNA, 20 bp, synthetic construct
  misc_feature 1..20: note = chemically synthesized
  source 1..20: mol_type = other DNA
gagcaaattaacacatctcc

SEQ ID NO: 40368 - DNA, 20 bp, synthetic construct
  misc_feature 1..20: note = chemically synthesized
  source 1..20: mol_type = other DNA
ttaacacatctcctggtgcc

SEQ ID NO: 40369 - DNA, 20 bp, synthetic construct
  misc_feature 1..20: note = chemically synthesized
  source 1..20: mol_type = other DNA
atctcctggtgcctggtatg

SEQ ID NO: 40370 - DNA, 20 bp, synthetic construct
  misc_feature 1..20: note = chemically synthesized
  source 1..20: mol_type = other DNA
ggtgcctggtatgcagccat

SEQ ID NO: 40371 - DNA, 20 bp, synthetic construct
  misc_feature 1..20: note = chemically synthesized
  source 1..20: mol_type = other DNA
ctggtatgcagccattggct

SEQ ID NO: 40372 - DNA, 20 bp, synthetic construct
  misc_feature 1..20: note = chemically synthesized
  source 1..20: mol_type = other DNA
tatgcagccattggcttggc

SEQ ID NO: 40373 - DNA, 20 bp, synthetic construct
  misc_feature 1..20: note = chemically synthesized
  source 1..20: mol_type = other DNA
gcagccattggcttggcaag

SEQ ID NO: 40374 - DNA, 20 bp, synthetic construct
  misc_feature 1..20: note = chemically synthesized
  source 1..20: mol_type = other DNA
ttttctccattcctgtccat

SEQ ID NO: 40375 - DNA, 20 bp, synthetic construct
  misc_feature 1..20: note = chemically synthesized
  source 1..20: mol_type = other DNA
ttcctgtccataagacccac

SEQ ID NO: 40376 - DNA, 20 bp, synthetic construct
  misc_feature 1..20: note = chemically synthesized
  source 1..20: mol_type = other DNA
ctgtccataagacccaccag

SEQ ID NO: 40377 - DNA, 20 bp, synthetic construct
  misc_feature 1..20: note = chemically synthesized
  source 1..20: mol_type = other DNA
caccagaagcaatttgcctt

SEQ ID NO: 40378 - DNA, 20 bp, synthetic construct
  misc_feature 1..20: note = chemically synthesized
  source 1..20: mol_type = other DNA
gcaatttgccttcagctgac

SEQ ID NO: 40379 - DNA, 20 bp, synthetic construct
  misc_feature 1..20: note = chemically synthesized
  source 1..20: mol_type = other DNA
caatttgccttcagctgaca

SEQ ID NO: 40380 - DNA, 20 bp, synthetic construct
  misc_feature 1..20: note = chemically synthesized
  source 1..20: mol_type = other DNA
ttgccttcagctgacaaggc

SEQ ID NO: 40381 - DNA, 20 bp, synthetic construct
  misc_feature 1..20: note = chemically synthesized
  source 1..20: mol_type = other DNA
atacctttaccaccctacct

SEQ ID NO: 40382 - DNA, 20 bp, synthetic construct
  misc_feature 1..20: note = chemically synthesized
  source 1..20: mol_type = other DNA
tacctttaccaccctacctc

SEQ ID NO: 40383 - DNA, 20 bp, synthetic construct
  misc_feature 1..20: note = chemically synthesized
  source 1..20: mol_type = other DNA
acctttaccaccctacctca

SEQ ID NO: 40384 - DNA, 20 bp, synthetic construct
  misc_feature 1..20: note = chemically synthesized
  source 1..20: mol_type = other DNA
cctttaccaccctacctcag

SEQ ID NO: 40385 - DNA, 20 bp, synthetic construct
  misc_feature 1..20: note = chemically synthesized
  source 1..20: mol_type = other DNA
tcaggggtgtatcaactctc

SEQ ID NO: 40386 - DNA, 20 bp, synthetic construct
  misc_feature 1..20: note = chemically synthesized
  source 1..20: mol_type = other DNA
ctttgtgtcataatcttatt

SEQ ID NO: 40387 - DNA, 20 bp, synthetic construct
  misc_feature 1..20: note = chemically synthesized
  source 1..20: mol_type = other DNA
ttgtgtcataatcttatttg

SEQ ID NO: 40388 - DNA, 20 bp, synthetic construct
  misc_feature 1..20: note = chemically synthesized
  source 1..20: mol_type = other DNA
gtgtcataatcttatttgga

SEQ ID NO: 40389 - DNA, 20 bp, synthetic construct
  misc_feature 1..20: note = chemically synthesized
  source 1..20: mol_type = other DNA
tgctcgcttttcacttccac

SEQ ID NO: 40390 - DNA, 20 bp, synthetic construct
  misc_feature 1..20: note = chemically synthesized
  source 1..20: mol_type = other DNA
acttccacgagatataacac

SEQ ID NO: 40391 - DNA, 20 bp, synthetic construct
  misc_feature 1..20: note = chemically synthesized
  source 1..20: mol_type = other DNA
attcatgacattatgatgat

SEQ ID NO: 40392 - DNA, 20 bp, synthetic construct
  misc_feature 1..20: note = chemically synthesized
  source 1..20: mol_type = other DNA
gacattatgatgattggata

SEQ ID NO: 40393 - DNA, 20 bp, synthetic construct
  misc_feature 1..20: note = chemically synthesized
  source 1..20: mol_type = other DNA
ttatgatgattggatacagt

SEQ ID NO: 40394 - DNA, 20 bp, synthetic construct
  misc_feature 1..20: note = chemically synthesized
  source 1..20: mol_type = other DNA
gatgattggatacagtgagc

SEQ ID NO: 40395 - DNA, 20 bp, synthetic construct
  misc_feature 1..20: note = chemically synthesized
  source 1..20: mol_type = other DNA
gattggatacagtgagcaag

SEQ ID NO: 40396 - DNA, 20 bp, synthetic construct
  misc_feature 1..20: note = chemically synthesized
  source 1..20: mol_type = other DNA
tggatacagtgagcaagaag

SEQ ID NO: 40397 - DNA, 20 bp, synthetic construct
  misc_feature 1..20: note = chemically synthesized
  source 1..20: mol_type = other DNA
agcaaacacactgaacttat

SEQ ID NO: 40398 - DNA, 20 bp, synthetic construct
  misc_feature 1..20: note = chemically synthesized
  source 1..20: mol_type = other DNA
aacacactgaacttattggt

SEQ ID NO: 40399 - DNA, 20 bp, synthetic construct
  misc_feature 1..20: note = chemically synthesized
  source 1..20: mol_type = other DNA
ttggtgagacatttgtatgc

SEQ ID NO: 40400 - DNA, 20 bp, synthetic construct
  misc_feature 1..20: note = chemically synthesized
  source 1..20: mol_type = other DNA
ggtgagacatttgtatgcca

SEQ ID NO: 40401 - DNA, 20 bp, synthetic construct
  misc_feature 1..20: note = chemically synthesized
  source 1..20: mol_type = other DNA
gtgagacatttgtatgccag

SEQ ID NO: 40402 - DNA, 20 bp, synthetic construct
  misc_feature 1..20: note = chemically synthesized
  source 1..20: mol_type = other DNA
gacatttgtatgccagagga

SEQ ID NO: 40403 - DNA, 20 bp, synthetic construct
  misc_feature 1..20: note = chemically synthesized
  source 1..20: mol_type = other DNA
acatttgtatgccagaggat

SEQ ID NO: 40404 - DNA, 20 bp, synthetic construct
  misc_feature 1..20: note = chemically synthesized
  source 1..20: mol_type = other DNA
cagaggatgggaaataaatc

SEQ ID NO: 40405 - DNA, 20 bp, synthetic construct
  misc_feature 1..20: note = chemically synthesized
  source 1..20: mol_type = other DNA
aaataaatccagctaaaatt

SEQ ID NO: 40406 - DNA, 20 bp, synthetic construct
  misc_feature 1..20: note = chemically synthesized
  source 1..20: mol_type = other DNA
aataaatccagctaaaattt

SEQ ID NO: 40407 - DNA, 20 bp, synthetic construct
  misc_feature 1..20: note = chemically synthesized
  source 1..20: mol_type = other DNA
ataaatccagctaaaattta

SEQ ID NO: 40408 - DNA, 20 bp, synthetic construct
  misc_feature 1..20: note = chemically synthesized
  source 1..20: mol_type = other DNA
aatttagggactttctacct

SEQ ID NO: 40409 - DNA, 20 bp, synthetic construct
  misc_feature 1..20: note = chemically synthesized
  source 1..20: mol_type = other DNA
ttctacctcggtaaaatttc

SEQ ID NO: 40410 - DNA, 20 bp, synthetic construct
  misc_feature 1..20: note = chemically synthesized
  source 1..20: mol_type = other DNA
tctacctcggtaaaatttct

SEQ ID NO: 40411 - DNA, 20 bp, synthetic construct
  misc_feature 1..20: note = chemically synthesized
  source 1..20: mol_type = other DNA
ctacctcggtaaaatttcta

SEQ ID NO: 40412 - DNA, 20 bp, synthetic construct
  misc_feature 1..20: note = chemically synthesized
  source 1..20: mol_type = other DNA
cggtaaaatttctagggttc

SEQ ID NO: 40413 - DNA, 20 bp, synthetic construct
  misc_feature 1..20: note = chemically synthesized
  source 1..20: mol_type = other DNA
taaaatttctagggttccag

SEQ ID NO: 40414 - DNA, 20 bp, synthetic construct
  misc_feature 1..20: note = chemically synthesized
  source 1..20: mol_type = other DNA
ttctagggttccagtggcat

SEQ ID NO: 40415 - DNA, 20 bp, synthetic construct
  misc_feature 1..20: note = chemically synthesized
  source 1..20: mol_type = other DNA
ttccagtggcatgagaccta

SEQ ID NO: 40416 - DNA, 20 bp, synthetic construct
  misc_feature 1..20: note = chemically synthesized
  source 1..20: mol_type = other DNA
ccagtggcatgagacctatg

SEQ ID NO: 40417 - DNA, 20 bp, synthetic construct
  misc_feature 1..20: note = chemically synthesized
  source 1..20: mol_type = other DNA
cctatggagatattccttct

SEQ ID NO: 40418 - DNA, 20 bp, synthetic construct
  misc_feature 1..20: note = chemically synthesized
  source 1..20: mol_type = other DNA
ctatggagatattccttcta

SEQ ID NO: 40419 - DNA, 20 bp, synthetic construct
  misc_feature 1..20: note = chemically synthesized
  source 1..20: mol_type = other DNA
gagatattccttctaaggtg

SEQ ID NO: 40420 - DNA, 20 bp, synthetic construct
  misc_feature 1..20: note = chemically synthesized
  source 1..20: mol_type = other DNA
gaagcataacttgctgcgtt

SEQ ID NO: 40421 - DNA, 20 bp, synthetic construct
  misc_feature 1..20: note = chemically synthesized
  source 1..20: mol_type = other DNA
gtttggcccctcttacaacc

SEQ ID NO: 40422 - DNA, 20 bp, synthetic construct
  misc_feature 1..20: note = chemically synthesized
  source 1..20: mol_type = other DNA
ggcccctcttacaaccaaga

SEQ ID NO: 40423 - DNA, 20 bp, synthetic construct
  misc_feature 1..20: note = chemically synthesized
  source 1..20: mol_type = other DNA
cccctcttacaaccaagaaa

SEQ ID NO: 40424 - DNA, 20 bp, synthetic construct
  misc_feature 1..20: note = chemically synthesized
  source 1..20: mol_type = other DNA
ccctcttacaaccaagaaag

SEQ ID NO: 40425 - DNA, 20 bp, synthetic construct
  misc_feature 1..20: note = chemically synthesized
  source 1..20: mol_type = other DNA
caagaaagaggcacaatgcc

SEQ ID NO: 40426 - DNA, 20 bp, synthetic construct
  misc_feature 1..20: note = chemically synthesized
  source 1..20: mol_type = other DNA
gaaagaggcacaatgcctgg

SEQ ID NO: 40427 - DNA, 20 bp, synthetic construct
  misc_feature 1..20: note = chemically synthesized
  source 1..20: mol_type = other DNA
aaagaggcacaatgcctggt

SEQ ID NO: 40428 - DNA, 20 bp, synthetic construct
  misc_feature 1..20: note = chemically synthesized
  source 1..20: mol_type = other DNA
caatgcctggtgggcctatt

SEQ ID NO: 40429 - DNA, 20 bp, synthetic construct
  misc_feature 1..20: note = chemically synthesized
  source 1..20: mol_type = other DNA
tggtgggcctatttggattt

SEQ ID NO: 40430 - DNA, 20 bp, synthetic construct
  misc_feature 1..20: note = chemically synthesized
  source 1..20: mol_type = other DNA
gtgggcctatttggattttg

SEQ ID NO: 40431 - DNA, 20 bp, synthetic construct
  misc_feature 1..20: note = chemically synthesized
  source 1..20: mol_type = other DNA
tgggcctatttggattttgg

SEQ ID NO: 40432 - DNA, 20 bp, synthetic construct
  misc_feature 1..20: note = chemically synthesized
  source 1..20: mol_type = other DNA
gaggcaacacattcctcgtt

SEQ ID NO: 40433 - DNA, 20 bp, synthetic construct
  misc_feature 1..20: note = chemically synthesized
  source 1..20: mol_type = other DNA
aggcaacacattcctcgttt

SEQ ID NO: 40434 - DNA, 20 bp, synthetic construct
  misc_feature 1..20: note = chemically synthesized
  source 1..20: mol_type = other DNA
ctcgtttgggtgtgttactc

SEQ ID NO: 40435 - DNA, 20 bp, synthetic construct
  misc_feature 1..20: note = chemically synthesized
  source 1..20: mol_type = other DNA
gttactctggcccatttatc

SEQ ID NO: 40436 - DNA, 20 bp, synthetic construct
  misc_feature 1..20: note = chemically synthesized
  source 1..20: mol_type = other DNA
ccatttatcgagtgacctga

SEQ ID NO: 40437 - DNA, 20 bp, synthetic construct
  misc_feature 1..20: note = chemically synthesized
  source 1..20: mol_type = other DNA
catttatcgagtgacctgaa

SEQ ID NO: 40438 - DNA, 20 bp, synthetic construct
  misc_feature 1..20: note = chemically synthesized
  source 1..20: mol_type = other DNA
cgagtgacctgaaaggctgc

SEQ ID NO: 40439 - DNA, 20 bp, synthetic construct
  misc_feature 1..20: note = chemically synthesized
  source 1..20: mol_type = other DNA
cctgaaaggctgccagattt

SEQ ID NO: 40440 - DNA, 20 bp, synthetic construct
  misc_feature 1..20: note = chemically synthesized
  source 1..20: mol_type = other DNA
aaggctgccagatttaagtg

SEQ ID NO: 40441 - DNA, 20 bp, synthetic construct
  misc_feature 1..20: note = chemically synthesized
  source 1..20: mol_type = other DNA
tgccagatttaagtgcagtc

SEQ ID NO: 40442 - DNA, 20 bp, synthetic construct
  misc_feature 1..20: note = chemically synthesized
  source 1..20: mol_type = other DNA
ttaagtgcagtctagaacaa

SEQ ID NO: 40443 - DNA, 20 bp, synthetic construct
  misc_feature 1..20: note = chemically synthesized
  source 1..20: mol_type = other DNA
agtgcagtctagaacaaaag

SEQ ID NO: 40444 - DNA, 20 bp, synthetic construct
  misc_feature 1..20: note = chemically synthesized
  source 1..20: mol_type = other DNA
gtgcagtctagaacaaaaga

SEQ ID NO: 40445 - DNA, 20 bp, synthetic construct
  misc_feature 1..20: note = chemically synthesized
  source 1..20: mol_type = other DNA
aacaaaagaaggctctgaaa

SEQ ID NO: 40446 - DNA, 20 bp, synthetic construct
  misc_feature 1..20: note = chemically synthesized
  source 1..20: mol_type = other DNA
acaaaagaaggctctgaaac

SEQ ID NO: 40447 - DNA, 20 bp, synthetic construct
  misc_feature 1..20: note = chemically synthesized
  source 1..20: mol_type = other DNA
agaaggctctgaaacaggtc

SEQ ID NO: 40448 - DNA, 20 bp, synthetic construct
  misc_feature 1..20: note = chemically synthesized
  source 1..20: mol_type = other DNA
gaaggctctgaaacaggtcc

SEQ ID NO: 40449 - DNA, 20 bp, synthetic construct
  misc_feature 1..20: note = chemically synthesized
  source 1..20: mol_type = other DNA
acaggtccaggctgctgtga

SEQ ID NO: 40450 - DNA, 20 bp, synthetic construct
  misc_feature 1..20: note = chemically synthesized
  source 1..20: mol_type = other DNA
gtgaaagctgctctgccatt

SEQ ID NO: 40451 - DNA, 20 bp, synthetic construct
  misc_feature 1..20: note = chemically synthesized
  source 1..20: mol_type = other DNA
tgaaagctgctctgccattt

SEQ ID NO: 40452 - DNA, 20 bp, synthetic construct
  misc_feature 1..20: note = chemically synthesized
  source 1..20: mol_type = other DNA
atttgggccacatgaccccg

SEQ ID NO: 40453 - DNA, 20 bp, synthetic construct
  misc_feature 1..20: note = chemically synthesized
  source 1..20: mol_type = other DNA
acatgaccccgcagatccaa

SEQ ID NO: 40454 - DNA, 20 bp, synthetic construct
  misc_feature 1..20: note = chemically synthesized
  source 1..20: mol_type = other DNA
ccgcagatccaatggtgctt

SEQ ID NO: 40455 - DNA, 20 bp, synthetic construct
  misc_feature 1..20: note = chemically synthesized
  source 1..20: mol_type = other DNA
cgcagatccaatggtgcttg

SEQ ID NO: 40456 - DNA, 20 bp, synthetic construct
  misc_feature 1..20: note = chemically synthesized
  source 1..20: mol_type = other DNA
tccaatggtgcttgaggtgt

SEQ ID NO: 40457 - DNA, 20 bp, synthetic construct
  misc_feature 1..20: note = chemically synthesized
  source 1..20: mol_type = other DNA
aatggtgcttgaggtgtcag

SEQ ID NO: 40458 - DNA, 20 bp, synthetic construct
  misc_feature 1..20: note = chemically synthesized
  source 1..20: mol_type = other DNA
ggtgcttgaggtgtcagtgg

SEQ ID NO: 40459 - DNA, 20 bp, synthetic construct
  misc_feature 1..20: note = chemically synthesized
  source 1..20: mol_type = other DNA
cttgaggtgtcagtggcaga

SEQ ID NO: 40460 - DNA, 20 bp, synthetic construct
  misc_feature 1..20: note = chemically synthesized
  source 1..20: mol_type = other DNA
ttgaggtgtcagtggcagat

SEQ ID NO: 40461 - DNA, 20 bp, synthetic construct
  misc_feature 1..20: note = chemically synthesized
  source 1..20: mol_type = other DNA
tgaggtgtcagtggcagata

SEQ ID NO: 40462 - DNA, 20 bp, synthetic construct
  misc_feature 1..20: note = chemically synthesized
  source 1..20: mol_type = other DNA
tggcagatagggatgctgtt

SEQ ID NO: 40463 - DNA, 20 bp, synthetic construct
  misc_feature 1..20: note = chemically synthesized
  source 1..20: mol_type = other DNA
gcagatagggatgctgtttg

SEQ ID NO: 40464 - DNA, 20 bp, synthetic construct
  misc_feature 1..20: note = chemically synthesized
  source 1..20: mol_type = other DNA
gggatgctgtttggagcctt

SEQ ID NO: 40465 - DNA, 20 bp, synthetic construct
  misc_feature 1..20: note = chemically synthesized
  source 1..20: mol_type = other DNA
atgctgtttggagcctttgg

SEQ ID NO: 40466 - DNA, 20 bp, synthetic construct
  misc_feature 1..20: note = chemically synthesized
  source 1..20: mol_type = other DNA
tgctgtttggagcctttggc

SEQ ID NO: 40467 - DNA, 20 bp, synthetic construct
  misc_feature 1..20: note = chemically synthesized
  source 1..20: mol_type = other DNA
gagcctttggcaggccccca

SEQ ID NO: 40468 - DNA, 20 bp, synthetic construct
  misc_feature 1..20: note = chemically synthesized
  source 1..20: mol_type = other DNA
agcctttggcaggcccccat

SEQ ID NO: 40469 - DNA, 20 bp, synthetic construct
  misc_feature 1..20: note = chemically synthesized
  source 1..20: mol_type = other DNA
aggcccccataggtgaatca

SEQ ID NO: 40470 - DNA, 20 bp, synthetic construct
  misc_feature 1..20: note = chemically synthesized
  source 1..20: mol_type = other DNA
cccccataggtgaatcacag

SEQ ID NO: 40471 - DNA, 20 bp, synthetic construct
  misc_feature 1..20: note = chemically synthesized
  source 1..20: mol_type = other DNA
cccataggtgaatcacagtg

SEQ ID NO: 40472 - DNA, 20 bp, synthetic construct
  misc_feature 1..20: note = chemically synthesized
  source 1..20: mol_type = other DNA
tgaatcacagtggagacctc

SEQ ID NO: 40473 - DNA, 20 bp, synthetic construct
  misc_feature 1..20: note = chemically synthesized
  source 1..20: mol_type = other DNA
gaatcacagtggagacctct

SEQ ID NO: 40474 - DNA, 20 bp, synthetic construct
  misc_feature 1..20: note = chemically synthesized
  source 1..20: mol_type = other DNA
agtggagacctctaggattt

SEQ ID NO: 40475 - DNA, 20 bp, synthetic construct
  misc_feature 1..20: note = chemically synthesized
  source 1..20: mol_type = other DNA
tggagacctctaggattttg

SEQ ID NO: 40476 - DNA, 20 bp, synthetic construct
  misc_feature 1..20: note = chemically synthesized
  source 1..20: mol_type = other DNA
gacctctaggattttggagc

SEQ ID NO: 40477 - DNA, 20 bp, synthetic construct
  misc_feature 1..20: note = chemically synthesized
  source 1..20: mol_type = other DNA
acctctaggattttggagca

SEQ ID NO: 40478 - DNA, 20 bp, synthetic construct
  misc_feature 1..20: note = chemically synthesized
  source 1..20: mol_type = other DNA
gcaaggccctgccacttctg

SEQ ID NO: 40479 - DNA, 20 bp, synthetic construct
  misc_feature 1..20: note = chemically synthesized
  source 1..20: mol_type = other DNA
cagataactactctcctttt

SEQ ID NO: 40480 - DNA, 20 bp, synthetic construct
  misc_feature 1..20: note = chemically synthesized
  source 1..20: mol_type = other DNA
gataactactctccttttga

SEQ ID NO: 40481 - DNA, 20 bp, synthetic construct
  misc_feature 1..20: note = chemically synthesized
  source 1..20: mol_type = other DNA
actactctccttttgagaga

SEQ ID NO: 40482 - DNA, 20 bp, synthetic construct
  misc_feature 1..20: note = chemically synthesized
  source 1..20: mol_type = other DNA
tccttttgagagacagctat

SEQ ID NO: 40483 - DNA, 20 bp, synthetic construct
  misc_feature 1..20: note = chemically synthesized
  source 1..20: mol_type = other DNA
gacagctattggtctgttat

SEQ ID NO: 40484 - DNA, 20 bp, synthetic construct
  misc_feature 1..20: note = chemically synthesized
  source 1..20: mol_type = other DNA
acagctattggtctgttatt

SEQ ID NO: 40485 - DNA, 20 bp, synthetic construct
  misc_feature 1..20: note = chemically synthesized
  source 1..20: mol_type = other DNA
attggtctgttattgggctt

SEQ ID NO: 40486 - DNA, 20 bp, synthetic construct
  misc_feature 1..20: note = chemically synthesized
  source 1..20: mol_type = other DNA
ggtctgttattgggctttgg

SEQ ID NO: 40487 - DNA, 20 bp, synthetic construct
  misc_feature 1..20: note = chemically synthesized
  source 1..20: mol_type = other DNA
ggtaactgaacgtttgactg

SEQ ID NO: 40488 - DNA, 20 bp, synthetic construct
  misc_feature 1..20: note = chemically synthesized
  source 1..20: mol_type = other DNA
gtaactgaacgtttgactgt

SEQ ID NO: 40489 - DNA, 20 bp, synthetic construct
  misc_feature 1..20: note = chemically synthesized
  source 1..20: mol_type = other DNA
acgtttgactgtgggtcata

SEQ ID NO: 40490 - DNA, 20 bp, synthetic construct
  misc_feature 1..20: note = chemically synthesized
  source 1..20: mol_type = other DNA
tgaacctgcctatcatgaac

SEQ ID NO: 40491 - DNA, 20 bp, synthetic construct
  misc_feature 1..20: note = chemically synthesized
  source 1..20: mol_type = other DNA
tggttgctttctgacccatc

SEQ ID NO: 40492 - DNA, 20 bp, synthetic construct
  misc_feature 1..20: note = chemically synthesized
  source 1..20: mol_type = other DNA
ttctgacccatctagccatg

SEQ ID NO: 40493 - DNA, 20 bp, synthetic construct
  misc_feature 1..20: note = chemically synthesized
  source 1..20: mol_type = other DNA
tgacccatctagccatgaag

SEQ ID NO: 40494 - DNA, 20 bp, synthetic construct
  misc_feature 1..20: note = chemically synthesized
  source 1..20: mol_type = other DNA
gacccatctagccatgaagt

SEQ ID NO: 40495 - DNA, 20 bp, synthetic construct
  misc_feature 1..20: note = chemically synthesized
  source 1..20: mol_type = other DNA
catctagccatgaagtgggt

SEQ ID NO: 40496 - DNA, 20 bp, synthetic construct
  misc_feature 1..20: note = chemically synthesized
  source 1..20: mol_type = other DNA
agccatgaagtgggtcagca

SEQ ID NO: 40497 - DNA, 20 bp, synthetic construct
  misc_feature 1..20: note = chemically synthesized
  source 1..20: mol_type = other DNA
catgaagtgggtcagcacag

SEQ ID NO: 40498 - DNA, 20 bp, synthetic construct
  misc_feature 1..20: note = chemically synthesized
  source 1..20: mol_type = other DNA
ggcatttcatcatcaaattg

SEQ ID NO: 40499 - DNA, 20 bp, synthetic construct
  misc_feature 1..20: note = chemically synthesized
  source 1..20: mol_type = other DNA
atttcatcatcaaattgaag

SEQ ID NO: 40500 - DNA, 20 bp, synthetic construct
  misc_feature 1..20: note = chemically synthesized
  source 1..20: mol_type = other DNA
tgaagtggtgtgtatgtgat

SEQ ID NO: 40501 - DNA, 20 bp, synthetic construct
  misc_feature 1..20: note = chemically synthesized
  source 1..20: mol_type = other DNA
gaagtggtgtgtatgtgatc

SEQ ID NO: 40502 - DNA, 20 bp, synthetic construct
  misc_feature 1..20: note = chemically synthesized
  source 1..20: mol_type = other DNA
gtgtgtatgtgatcgggctt

SEQ ID NO: 40503 - DNA, 20 bp, synthetic construct
  misc_feature 1..20: note = chemically synthesized
  source 1..20: mol_type = other DNA
tgtatgtgatcgggcttgag

SEQ ID NO: 40504 - DNA, 20 bp, synthetic construct
  misc_feature 1..20: note = chemically synthesized
  source 1..20: mol_type = other DNA
gtatgtgatcgggcttgagc

SEQ ID NO: 40505 - DNA, 20 bp, synthetic construct
  misc_feature 1..20: note = chemically synthesized
  source 1..20: mol_type = other DNA
tcgggcttgagcaggtcctg

SEQ ID NO: 40506 - DNA, 20 bp, synthetic construct
  misc_feature 1..20: note = chemically synthesized
  source 1..20: mol_type = other DNA
cgggcttgagcaggtcctga

SEQ ID NO: 40507 - DNA, 20 bp, synthetic construct
  misc_feature 1..20: note = chemically synthesized
  source 1..20: mol_type = other DNA
tgagcaggtcctgaaggcac

SEQ ID NO: 40508 - DNA, 20 bp, synthetic construct
  misc_feature 1..20: note = chemically synthesized
  source 1..20: mol_type = other DNA
caggtcctgaaggcacaagt

SEQ ID NO: 40509 - DNA, 20 bp, synthetic construct
  misc_feature 1..20: note = chemically synthesized
  source 1..20: mol_type = other DNA
aaggcacaagtaagttacat

SEQ ID NO: 40510 - DNA, 20 bp, synthetic construct
  misc_feature 1..20: note = chemically synthesized
  source 1..20: mol_type = other DNA
aggcacaagtaagttacata

SEQ ID NO: 40511 - DNA, 20 bp, synthetic construct
  misc_feature 1..20: note = chemically synthesized
  source 1..20: mol_type = other DNA
cacaagtaagttacataagg

SEQ ID NO: 40512 - DNA, 20 bp, synthetic construct
  misc_feature 1..20: note = chemically synthesized
  source 1..20: mol_type = other DNA
aagtaagttacataaggaag

SEQ ID NO: 40513 - DNA, 20 bp, synthetic construct
  misc_feature 1..20: note = chemically synthesized
  source 1..20: mol_type = other DNA
ccaccctgccttccctcccc

SEQ ID NO: 40514 - DNA, 20 bp, synthetic construct
  misc_feature 1..20: note = chemically synthesized
  source 1..20: mol_type = other DNA
cctcccccagcctgcaccaa

SEQ ID NO: 40515 - DNA, 20 bp, synthetic construct
  misc_feature 1..20: note = chemically synthesized
  source 1..20: mol_type = other DNA
agcctgcaccaatggcctca

SEQ ID NO: 40516 - DNA, 20 bp, synthetic construct
  misc_feature 1..20: note = chemically synthesized
  source 1..20: mol_type = other DNA
gcctgcaccaatggcctcat

SEQ ID NO: 40517 - DNA, 20 bp, synthetic construct
  misc_feature 1..20: note = chemically synthesized
  source 1..20: mol_type = other DNA
cctgcaccaatggcctcatg

SEQ ID NO: 40518 - DNA, 20 bp, synthetic construct
  misc_feature 1..20: note = chemically synthesized
  source 1..20: mol_type = other DNA
tgcaccaatggcctcatggg

SEQ ID NO: 40519 - DNA, 20 bp, synthetic construct
  misc_feature 1..20: note = chemically synthesized
  source 1..20: mol_type = other DNA
catggggagttccctatgat

SEQ ID NO: 40520 - DNA, 20 bp, synthetic construct
  misc_feature 1..20: note = chemically synthesized
  source 1..20: mol_type = other DNA
agttccctatgatcagttga

SEQ ID NO: 40521 - DNA, 20 bp, synthetic construct
  misc_feature 1..20: note = chemically synthesized
  source 1..20: mol_type = other DNA
ttccctatgatcagttgaca

SEQ ID NO: 40522 - DNA, 20 bp, synthetic construct
  misc_feature 1..20: note = chemically synthesized
  source 1..20: mol_type = other DNA
tccctatgatcagttgacag

SEQ ID NO: 40523 - DNA, 20 bp, synthetic construct
  misc_feature 1..20: note = chemically synthesized
  source 1..20: mol_type = other DNA
ctatgatcagttgacagagg

SEQ ID NO: 40524 - DNA, 20 bp, synthetic construct
  misc_feature 1..20: note = chemically synthesized
  source 1..20: mol_type = other DNA
tatgatcagttgacagagga

SEQ ID NO: 40525 - DNA, 20 bp, synthetic construct
  misc_feature 1..20: note = chemically synthesized
  source 1..20: mol_type = other DNA
atgatcagttgacagaggaa

SEQ ID NO: 40526 - DNA, 20 bp, synthetic construct
  misc_feature 1..20: note = chemically synthesized
  source 1..20: mol_type = other DNA
atcagttgacagaggaaggg

SEQ ID NO: 40527 - DNA, 20 bp, synthetic construct
  misc_feature 1..20: note = chemically synthesized
  source 1..20: mol_type = other DNA
tgacagaggaagggaagact

SEQ ID NO: 40528 - DNA, 20 bp, synthetic construct
  misc_feature 1..20: note = chemically synthesized
  source 1..20: mol_type = other DNA
gacagaggaagggaagacta

SEQ ID NO: 40529 - DNA, 20 bp, synthetic construct
  misc_feature 1..20: note = chemically synthesized
  source 1..20: mol_type = other DNA
aggaagggaagactaaggac

SEQ ID NO: 40530 - DNA, 20 bp, synthetic construct
  misc_feature 1..20: note = chemically synthesized
  source 1..20: mol_type = other DNA
gaagactaaggactggttca

SEQ ID NO: 40531 - DNA, 20 bp, synthetic construct
  misc_feature 1..20: note = chemically synthesized
  source 1..20: mol_type = other DNA
actaaggactggttcataga

SEQ ID NO: 40532 - DNA, 20 bp, synthetic construct
  misc_feature 1..20: note = chemically synthesized
  source 1..20: mol_type = other DNA
agatggttctgcacgatatg

SEQ ID NO: 40533 - DNA, 20 bp, synthetic construct
  misc_feature 1..20: note = chemically synthesized
  source 1..20: mol_type = other DNA
gatggttctgcacgatatgc

SEQ ID NO: 40534 - DNA, 20 bp, synthetic construct
  misc_feature 1..20: note = chemically synthesized
  source 1..20: mol_type = other DNA
gatatgcaggcaccacccga

SEQ ID NO: 40535 - DNA, 20 bp, synthetic construct
  misc_feature 1..20: note = chemically synthesized
  source 1..20: mol_type = other DNA
atgcaggcaccacccgaaag

SEQ ID NO: 40536 - DNA, 20 bp, synthetic construct
  misc_feature 1..20: note = chemically synthesized
  source 1..20: mol_type = other DNA
aggcaccacccgaaagtgga

SEQ ID NO: 40537 - DNA, 20 bp, synthetic construct
  misc_feature 1..20: note = chemically synthesized
  source 1..20: mol_type = other DNA
cacccgaaagtggacagctg

SEQ ID NO: 40538 - DNA, 20 bp, synthetic construct
  misc_feature 1..20: note = chemically synthesized
  source 1..20: mol_type = other DNA
tgcatgtgtacacttgtgct

SEQ ID NO: 40539 - DNA, 20 bp, synthetic construct
  misc_feature 1..20: note = chemically synthesized
  source 1..20: mol_type = other DNA
tttcctttatcatgtgacct

SEQ ID NO: 40540 - DNA, 20 bp, synthetic construct
  misc_feature 1..20: note = chemically synthesized
  source 1..20: mol_type = other DNA
atcatgtgaccttagattta

SEQ ID NO: 40541 - DNA, 20 bp, synthetic construct
  misc_feature 1..20: note = chemically synthesized
  source 1..20: mol_type = other DNA
tagatttatggacttcacat

SEQ ID NO: 40542 - DNA, 20 bp, synthetic construct
  misc_feature 1..20: note = chemically synthesized
  source 1..20: mol_type = other DNA
tggacttcacatcagcattt

SEQ ID NO: 40543 - DNA, 20 bp, synthetic construct
  misc_feature 1..20: note = chemically synthesized
  source 1..20: mol_type = other DNA
acatcagcatttaagcattt

SEQ ID NO: 40544 - DNA, 20 bp, synthetic construct
  misc_feature 1..20: note = chemically synthesized
  source 1..20: mol_type = other DNA
catttaagtgttgttcatat

SEQ ID NO: 40545 - DNA, 20 bp, synthetic construct
  misc_feature 1..20: note = chemically synthesized
  source 1..20: mol_type = other DNA
taaccttatgtaataacttt

SEQ ID NO: 40546 - DNA, 20 bp, synthetic construct
  misc_feature 1..20: note = chemically synthesized
  source 1..20: mol_type = other DNA
ttatgtaataacttttggtt

SEQ ID NO: 40547 - DNA, 20 bp, synthetic construct
  misc_feature 1..20: note = chemically synthesized
  source 1..20: mol_type = other DNA
tatgtaataacttttggttt

SEQ ID NO: 40548 - DNA, 20 bp, synthetic construct
  misc_feature 1..20: note = chemically synthesized
  source 1..20: mol_type = other DNA
atgtaataacttttggtttg

SEQ ID NO: 40549 - DNA, 20 bp, synthetic construct
  misc_feature 1..20: note = chemically synthesized
  source 1..20: mol_type = other DNA
ataacttttggtttggggat

SEQ ID NO: 40550 - DNA, 20 bp, synthetic construct
  misc_feature 1..20: note = chemically synthesized
  source 1..20: mol_type = other DNA
tttggggattggtgcgtttc

SEQ ID NO: 40551 - DNA, 20 bp, synthetic construct
  misc_feature 1..20: note = chemically synthesized
  source 1..20: mol_type = other DNA
tggtgcgtttctggttgtat

SEQ ID NO: 40552 - DNA, 20 bp, synthetic construct
  misc_feature 1..20: note = chemically synthesized
  source 1..20: mol_type = other DNA
ggtgcgtttctggttgtatg

SEQ ID NO: 40553 - DNA, 20 bp, synthetic construct
  misc_feature 1..20: note = chemically synthesized
  source 1..20: mol_type = other DNA
cgtttctggttgtatgagga

SEQ ID NO: 40554 - DNA, 20 bp, synthetic construct
  misc_feature 1..20: note = chemically synthesized
  source 1..20: mol_type = other DNA
tgaggatagttgtattatat

SEQ ID NO: 40555 - DNA, 20 bp, synthetic construct
  misc_feature 1..20: note = chemically synthesized
  source 1..20: mol_type = other DNA
gaggatagttgtattatatt

SEQ ID NO: 40556 - DNA, 20 bp, synthetic construct
  misc_feature 1..20: note = chemically synthesized
  source 1..20: mol_type = other DNA
cttattattgtctttatttg

SEQ ID NO: 40557 - DNA, 20 bp, synthetic construct
  misc_feature 1..20: note = chemically synthesized
  source 1..20: mol_type = other DNA
ttgaagattatgtatgattt

SEQ ID NO: 40558 - DNA, 20 bp, synthetic construct
  misc_feature 1..20: note = chemically synthesized
  source 1..20: mol_type = other DNA
tgaagattatgtatgatttc

SEQ ID NO: 40559 - DNA, 20 bp, synthetic construct
  misc_feature 1..20: note = chemically synthesized
  source 1..20: mol_type = other DNA
atgatttcaggatgtgtgta

SEQ ID NO: 40560 - DNA, 20 bp, synthetic construct
  misc_feature 1..20: note = chemically synthesized
  source 1..20: mol_type = other DNA
tgatttcaggatgtgtgtat

SEQ ID NO: 40561 - DNA, 20 bp, synthetic construct
  misc_feature 1..20: note = chemically synthesized
  source 1..20: mol_type = other DNA
caggatgtgtgtatgggttc

SEQ ID NO: 40562 - DNA, 20 bp, synthetic construct
  misc_feature 1..20: note = chemically synthesized
  source 1..20: mol_type = other DNA
gtgtatgggttcaagttgac

SEQ ID NO: 40563 - DNA, 20 bp, synthetic construct
  misc_feature 1..20: note = chemically synthesized
  source 1..20: mol_type = other DNA
tgtatgggttcaagttgaca

SEQ ID NO: 40564 - DNA, 20 bp, synthetic construct
  misc_feature 1..20: note = chemically synthesized
  source 1..20: mol_type = other DNA
tatgggttcaagttgacaag

SEQ ID NO: 40565 - DNA, 20 bp, synthetic construct
  misc_feature 1..20: note = chemically synthesized
  source 1..20: mol_type = other DNA
ggttcaagttgacaaggagt

SEQ ID NO: 40566 - DNA, 20 bp, synthetic construct
  misc_feature 1..20: note = chemically synthesized
  source 1..20: mol_type = other DNA
acaaggagttggacttgtga

SEQ ID NO: 40567 - DNA, 20 bp, synthetic construct
  misc_feature 1..20: note = chemically synthesized
  source 1..20: mol_type = other DNA
gttaatactgtcaacttgat

SEQ ID NO: 40568 - DNA, 20 bp, synthetic construct
  misc_feature 1..20: note = chemically synthesized
  source 1..20: mol_type = other DNA
tgtcaacttgattggattga

SEQ ID NO: 40569 - DNA, 20 bp, synthetic construct
  misc_feature 1..20: note = chemically synthesized
  source 1..20: mol_type = other DNA
tgattggattgaaagatgca

SEQ ID NO: 40570 - DNA, 20 bp, synthetic construct
  misc_feature 1..20: note = chemically synthesized
  source 1..20: mol_type = other DNA
aagatgcaaagtattaatct

SEQ ID NO: 40571 - DNA, 20 bp, synthetic construct
  misc_feature 1..20: note = chemically synthesized
  source 1..20: mol_type = other DNA
ttaatctcggttatgtctgt

SEQ ID NO: 40572 - DNA, 20 bp, synthetic construct
  misc_feature 1..20: note = chemically synthesized
  source 1..20: mol_type = other DNA
taatctcggttatgtctgtg

SEQ ID NO: 40573 - DNA, 20 bp, synthetic construct
  misc_feature 1..20: note = chemically synthesized
  source 1..20: mol_type = other DNA
aatctcggttatgtctgtga

SEQ ID NO: 40574 - DNA, 20 bp, synthetic construct
  misc_feature 1..20: note = chemically synthesized
  source 1..20: mol_type = other DNA
cggttatgtctgtgagggtg

SEQ ID NO: 40575 - DNA, 20 bp, synthetic construct
  misc_feature 1..20: note = chemically synthesized
  source 1..20: mol_type = other DNA
tgtctgtgagggtgtggcaa

SEQ ID NO: 40576 - DNA, 20 bp, synthetic construct
  misc_feature 1..20: note = chemically synthesized
  source 1..20: mol_type = other DNA
gtctgtgagggtgtggcaaa

SEQ ID NO: 40577 - DNA, 20 bp, synthetic construct
  misc_feature 1..20: note = chemically synthesized
  source 1..20: mol_type = other DNA
ctgtgagggtgtggcaaaag

SEQ ID NO: 40578 - DNA, 20 bp, synthetic construct
  misc_feature 1..20: note = chemically synthesized
  source 1..20: mol_type = other DNA
gcaaaaggagattaacattt

SEQ ID NO: 40579 - DNA, 20 bp, synthetic construct
  misc_feature 1..20: note = chemically synthesized
  source 1..20: mol_type = other DNA
aaggagattaacatttgagt

SEQ ID NO: 40580 - DNA, 20 bp, synthetic construct
  misc_feature 1..20: note = chemically synthesized
  source 1..20: mol_type = other DNA
gagattaacatttgagtcag

SEQ ID NO: 40581 - DNA, 20 bp, synthetic construct
  misc_feature 1..20: note = chemically synthesized
  source 1..20: mol_type = other DNA
agattaacatttgagtcagt

SEQ ID NO: 40582 - DNA, 20 bp, synthetic construct
  misc_feature 1..20: note = chemically synthesized
  source 1..20: mol_type = other DNA
taacatttgagtcagtgggc

SEQ ID NO: 40583 - DNA, 20 bp, synthetic construct
  misc_feature 1..20: note = chemically synthesized
  source 1..20: mol_type = other DNA
aacatttgagtcagtgggct

SEQ ID NO: 40584 - DNA, 20 bp, synthetic construct
  misc_feature 1..20: note = chemically synthesized
  source 1..20: mol_type = other DNA
tgtacacatgcatttagaaa

SEQ ID NO: 40585 - DNA, 20 bp, synthetic construct
  misc_feature 1..20: note = chemically synthesized
  source 1..20: mol_type = other DNA
agtgctgcagctgtccactt

SEQ ID NO: 40586 - DNA, 20 bp, synthetic construct
  misc_feature 1..20: note = chemically synthesized
  source 1..20: mol_type = other DNA
gcaggctgggggagggaagg

SEQ ID NO: 40587 - DNA, 20 bp, synthetic construct
  misc_feature 1..20: note = chemically synthesized
  source 1..20: mol_type = other DNA
gggagggaaggcagggtggc

SEQ ID NO: 40588 - DNA, 20 bp, synthetic construct
  misc_feature 1..20: note = chemically synthesized
  source 1..20: mol_type = other DNA
ctgacccacttcatggctag

SEQ ID NO: 40589 - DNA, 20 bp, synthetic construct
  misc_feature 1..20: note = chemically synthesized
  source 1..20: mol_type = other DNA
caatagctgtctctcaaaag

SEQ ID NO: 40590 - DNA, 20 bp, synthetic construct
  misc_feature 1..20: note = chemically synthesized
  source 1..20: mol_type = other DNA
cactgacacctcaagcacca

SEQ ID NO: 40591 - DNA, 20 bp, synthetic construct
  misc_feature 1..20: note = chemically synthesized
  source 1..20: mol_type = other DNA
ctcaagcaccattggatctg

SEQ ID NO: 40592 - DNA, 20 bp, synthetic construct
  misc_feature 1..20: note = chemically synthesized
  source 1..20: mol_type = other DNA
aggtcactcgataaatgggc

SEQ ID NO: 40593 - DNA, 20 bp, synthetic construct
  misc_feature 1..20: note = chemically synthesized
  source 1..20: mol_type = other DNA
cagagtaacacacccaaacg

SEQ ID NO: 40594 - DNA, 20 bp, synthetic construct
  misc_feature 1..20: note = chemically synthesized
  source 1..20: mol_type = other DNA
aagttatgcttcaccttaga

SEQ ID NO: 40595 - DNA, 20 bp, synthetic construct
  misc_feature 1..20: note = chemically synthesized
  source 1..20: mol_type = other DNA
agaaagtccctaaattttag

SEQ ID NO: 40596 - DNA, 20 bp, synthetic construct
  misc_feature 1..20: note = chemically synthesized
  source 1..20: mol_type = other DNA
tatccaatcatcataatgtc

SEQ ID NO: 40597 - DNA, 20 bp, synthetic construct
  misc_feature 1..20: note = chemically synthesized
  source 1..20: mol_type = other DNA
aagattatgacacaaagctg

SEQ ID NO: 40598 - DNA, 20 bp, synthetic construct
  misc_feature 1..20: note = chemically synthesized
  source 1..20: mol_type = other DNA
gagttgatacacccctgagg

SEQ ID NO: 40599 - DNA, 20 bp, synthetic construct
  misc_feature 1..20: note = chemically synthesized
  source 1..20: mol_type = other DNA
ctgaaggcaaattgcttctg

SEQ ID NO: 40600 - DNA, 20 bp, synthetic construct
  misc_feature 1..20: note = chemically synthesized
  source 1..20: mol_type = other DNA
ttctggtgggtcttatggac

SEQ ID NO: 40601 - DNA, 20 bp, synthetic construct
  misc_feature 1..20: note = chemically synthesized
  source 1..20: mol_type = other DNA
actggtagagcagctgcaat

SEQ ID NO: 40602 - DNA, 20 bp, synthetic construct
  misc_feature 1..20: note = chemically synthesized
  source 1..20: mol_type = other DNA
cctctgcacaggtcaaatgg

SEQ ID NO: 40603 - DNA, 20 bp, synthetic construct
  misc_feature 1..20: note = chemically synthesized
  source 1..20: mol_type = other DNA
gtcaaatgggagagttgaac

SEQ ID NO: 40604 - DNA, 20 bp, synthetic construct
  misc_feature 1..20: note = chemically synthesized
  source 1..20: mol_type = other DNA
gagttgaacagggatgtggt

SEQ ID NO: 40605 - DNA, 20 bp, synthetic construct
  misc_feature 1..20: note = chemically synthesized
  source 1..20: mol_type = other DNA
ctaatcacttcagtccctcc

SEQ ID NO: 40606 - DNA, 20 bp, synthetic construct
  misc_feature 1..20: note = chemically synthesized
  source 1..20: mol_type = other DNA
cacttcagtccctccaggga

SEQ ID NO: 40607 - DNA, 20 bp, synthetic construct
  misc_feature 1..20: note = chemically synthesized
  source 1..20: mol_type = other DNA
tggcactgggaaaatgacca

SEQ ID NO: 40608 - DNA, 20 bp, synthetic construct
  misc_feature 1..20: note = chemically synthesized
  source 1..20: mol_type = other DNA
tggggaaccacaataacgtt

SEQ ID NO: 40609 - DNA, 20 bp, synthetic construct
  misc_feature 1..20: note = chemically synthesized
  source 1..20: mol_type = other DNA
caataacgttttgggtaccc

SEQ ID NO: 40610 - DNA, 20 bp, synthetic construct
  misc_feature 1..20: note = chemically synthesized
  source 1..20: mol_type = other DNA
ggccagaggtctccttaggg

SEQ ID NO: 40611 - DNA, 20 bp, synthetic construct
  misc_feature 1..20: note = chemically synthesized
  source 1..20: mol_type = other DNA
ccttagggaaggatgggaga

SEQ ID NO: 40612 - DNA, 20 bp, synthetic construct
  misc_feature 1..20: note = chemically synthesized
  source 1..20: mol_type = other DNA
ctagtggtgtccttcctcaa

SEQ ID NO: 40613 - DNA, 20 bp, synthetic construct
  misc_feature 1..20: note = chemically synthesized
  source 1..20: mol_type = other DNA
tccagcctccccttcattca

SEQ ID NO: 40614 - DNA, 20 bp, synthetic construct
  misc_feature 1..20: note = chemically synthesized
  source 1..20: mol_type = other DNA
gttctggaactgtaacaggt

SEQ ID NO: 40615 - DNA, 20 bp, synthetic construct
  misc_feature 1..20: note = chemically synthesized
  source 1..20: mol_type = other DNA
tttgtttatataaatcaagt

SEQ ID NO: 40616 - DNA, 20 bp, synthetic construct
  misc_feature 1..20: note = chemically synthesized
  source 1..20: mol_type = other DNA
agccaatgccagagctctac

SEQ ID NO: 40617 - DNA, 20 bp, synthetic construct
  misc_feature 1..20: note = chemically synthesized
  source 1..20: mol_type = other DNA
acacttggcccctgccacct

SEQ ID NO: 40618 - DNA, 20 bp, synthetic construct
  misc_feature 1..20: note = chemically synthesized
  source 1..20: mol_type = other DNA
attgtatttaaattttgtag

SEQ ID NO: 40619 - DNA, 20 bp, synthetic construct
  misc_feature 1..20: note = chemically synthesized
  source 1..20: mol_type = other DNA
tatttcacaaagcttcggcc

SEQ ID NO: 40620 - DNA, 20 bp, synthetic construct
  misc_feature 1..20: note = chemically synthesized
  source 1..20: mol_type = other DNA
atcttctggaccctcccagc

SEQ ID NO: 40621 - DNA, 20 bp, synthetic construct
  misc_feature 1..20: note = chemically synthesized
  source 1..20: mol_type = other DNA
tctggaccctcccagctggg

SEQ ID NO: 40622 - DNA, 20 bp, synthetic construct
  misc_feature 1..20: note = chemically synthesized
  source 1..20: mol_type = other DNA
atcctaatctccctaagcct

SEQ ID NO: 40623 - DNA, 20 bp, synthetic construct
  misc_feature 1..20: note = chemically synthesized
  source 1..20: mol_type = other DNA
tttttttttttttttggaaa

SEQ ID NO: 40624 - DNA, 20 bp, synthetic construct
  misc_feature 1..20: note = chemically synthesized
  source 1..20: mol_type = other DNA
gtcttgctctgttaccaggc

SEQ ID NO: 40625 - DNA, 20 bp, synthetic construct
  misc_feature 1..20: note = chemically synthesized
  source 1..20: mol_type = other DNA
ttttgtatttttagcagaga

SEQ ID NO: 40626 - DNA, 20 bp, synthetic construct
  misc_feature 1..20: note = chemically synthesized
  source 1..20: mol_type = other DNA
tggggtttcaccattttagc

SEQ ID NO: 40627 - DNA, 20 bp, synthetic construct
  misc_feature 1..20: note = chemically synthesized
  source 1..20: mol_type = other DNA
gcccccgcctcccaaggtgc

SEQ ID NO: 40628 - DNA, 20 bp, synthetic construct
  misc_feature 1..20: note = chemically synthesized
  source 1..20: mol_type = other DNA
ccgagctgcaacattaaatg

SEQ ID NO: 40629 - DNA, 20 bp, synthetic construct
  misc_feature 1..20: note = chemically synthesized
  source 1..20: mol_type = other DNA
gaaagcttaagcagttcttt

SEQ ID NO: 40630 - DNA, 20 bp, synthetic construct
  misc_feature 1..20: note = chemically synthesized
  source 1..20: mol_type = other DNA
agagtataatgcacctcctc

SEQ ID NO: 40631 - DNA, 20 bp, synthetic construct
  misc_feature 1..20: note = chemically synthesized
  source 1..20: mol_type = other DNA
cctcacctctggggcccgca

SEQ ID NO: 40632 - DNA, 20 bp, synthetic construct
  misc_feature 1..20: note = chemically synthesized
  source 1..20: mol_type = other DNA
tagaagcattcaggggcatt

SEQ ID NO: 40633 - DNA, 20 bp, synthetic construct
  misc_feature 1..20: note = chemically synthesized
  source 1..20: mol_type = other DNA
cattaggggtgcctcttgag

SEQ ID NO: 40634 - DNA, 20 bp, synthetic construct
  misc_feature 1..20: note = chemically synthesized
  source 1..20: mol_type = other DNA
cactgttgcctcaagcagtg

SEQ ID NO: 40635 - DNA, 20 bp, synthetic construct
  misc_feature 1..20: note = chemically synthesized
  source 1..20: mol_type = other DNA
gtggaaaggctaatggcagc

SEQ ID NO: 40636 - DNA, 20 bp, synthetic construct
  misc_feature 1..20: note = chemically synthesized
  source 1..20: mol_type = other DNA
atggcagcacgggtcaggga

SEQ ID NO: 40637 - DNA, 20 bp, synthetic construct
  misc_feature 1..20: note = chemically synthesized
  source 1..20: mol_type = other DNA
gaggggatgttaccactact

SEQ ID NO: 40638 - DNA, 20 bp, synthetic construct
  misc_feature 1..20: note = chemically synthesized
  source 1..20: mol_type = other DNA
ttctggcaaaaaagtttcat

SEQ ID NO: 40639 - DNA, 20 bp, synthetic construct
  misc_feature 1..20: note = chemically synthesized
  source 1..20: mol_type = other DNA
ctcagtgtcctcagcttcat

SEQ ID NO: 40640 - DNA, 20 bp, synthetic construct
  misc_feature 1..20: note = chemically synthesized
  source 1..20: mol_type = other DNA
cacatccccactccaagttc

SEQ ID NO: 40641 - DNA, 20 bp, synthetic construct
  misc_feature 1..20: note = chemically synthesized
  source 1..20: mol_type = other DNA
aatttcaactctttctctac

SEQ ID NO: 40642 - DNA, 20 bp, synthetic construct
  misc_feature 1..20: note = chemically synthesized
  source 1..20: mol_type = other DNA
atagtcaaaggtattatgta

SEQ ID NO: 40643 - DNA, 20 bp, synthetic construct
  misc_feature 1..20: note = chemically synthesized
  source 1..20: mol_type = other DNA
ctccttgcctctcataagtg

SEQ ID NO: 40644 - DNA, 20 bp, synthetic construct
  misc_feature 1..20: note = chemically synthesized
  source 1..20: mol_type = other DNA
gttctccatactattagaag

SEQ ID NO: 40645 - DNA, 20 bp, synthetic construct
  misc_feature 1..20: note = chemically synthesized
  source 1..20: mol_type = other DNA
agaagtcccaaaaccaatga

SEQ ID NO: 40646 - DNA, 20 bp, synthetic construct
  misc_feature 1..20: note = chemically synthesized
  source 1..20: mol_type = other DNA
gtatgaaaatctgtattagt

SEQ ID NO: 40647 - DNA, 20 bp, synthetic construct
  misc_feature 1..20: note = chemically synthesized
  source 1..20: mol_type = other DNA
atatatgagagagagagaga

SEQ ID NO: 40648 - DNA, 20 bp, synthetic construct
  misc_feature 1..20: note = chemically synthesized
  source 1..20: mol_type = other DNA
tgtatatatgtgtatatata

SEQ ID NO: 40649 - DNA, 20 bp, synthetic construct
  misc_feature 1..20: note = chemically synthesized
  source 1..20: mol_type = other DNA
agtcccacagctgaagaact

SEQ ID NO: 40650 - DNA, 20 bp, synthetic construct
  misc_feature 1..20: note = chemically synthesized
  source 1..20: mol_type = other DNA
gtccgatgttcaagagcagg

SEQ ID NO: 40651 - DNA, 20 bp, synthetic construct
  misc_feature 1..20: note = chemically synthesized
  source 1..20: mol_type = other DNA
ggcagcaggggcaggggcct

SEQ ID NO: 40652 - DNA, 20 bp, synthetic construct
  misc_feature 1..20: note = chemically synthesized
  source 1..20: mol_type = other DNA
aggggcctcagggtgcttgc

SEQ ID NO: 40653 - DNA, 20 bp, synthetic construct
  misc_feature 1..20: note = chemically synthesized
  source 1..20: mol_type = other DNA
acacactggcctcttttcca

SEQ ID NO: 40654 - DNA, 20 bp, synthetic construct
  misc_feature 1..20: note = chemically synthesized
  source 1..20: mol_type = other DNA
atagggtggctggggcacac

SEQ ID NO: 40655 - DNA, 20 bp, synthetic construct
  misc_feature 1..20: note = chemically synthesized
  source 1..20: mol_type = other DNA
tggctggggcacactggggt

SEQ ID NO: 40656 - DNA, 20 bp, synthetic construct
  misc_feature 1..20: note = chemically synthesized
  source 1..20: mol_type = other DNA
tggggtgtgagtaaagcact

SEQ ID NO: 40657 - DNA, 20 bp, synthetic construct
  misc_feature 1..20: note = chemically synthesized
  source 1..20: mol_type = other DNA
agcttcaccccacaaaaaca

SEQ ID NO: 40658 - DNA, 20 bp, synthetic construct
  misc_feature 1..20: note = chemically synthesized
  source 1..20: mol_type = other DNA
cagccagtggaaatgttcaa

SEQ ID NO: 40659 - DNA, 20 bp, synthetic construct
  misc_feature 1..20: note = chemically synthesized
  source 1..20: mol_type = other DNA
gccaggagccttgcctggtg

SEQ ID NO: 40660 - DNA, 20 bp, synthetic construct
  misc_feature 1..20: note = chemically synthesized
  source 1..20: mol_type = other DNA
agctcacaagaaagagaaac

SEQ ID NO: 40661 - DNA, 20 bp, synthetic construct
  misc_feature 1..20: note = chemically synthesized
  source 1..20: mol_type = other DNA
gctgaaatggcagaggggct

SEQ ID NO: 40662 - DNA, 20 bp, synthetic construct
  misc_feature 1..20: note = chemically synthesized
  source 1..20: mol_type = other DNA
gaggggctgtgggttgtctc

SEQ ID NO: 40663 - DNA, 20 bp, synthetic construct
  misc_feature 1..20: note = chemically synthesized
  source 1..20: mol_type = other DNA
ctaaaatgttcaggcagggc

SEQ ID NO: 40664 - DNA, 20 bp, synthetic construct
  misc_feature 1..20: note = chemically synthesized
  source 1..20: mol_type = other DNA
tggctgtgctctgcccagtg

SEQ ID NO: 40665 - DNA, 20 bp, synthetic construct
  misc_feature 1..20: note = chemically synthesized
  source 1..20: mol_type = other DNA
acactgtgctggaggtccgt

SEQ ID NO: 40666 - DNA, 20 bp, synthetic construct
  misc_feature 1..20: note = chemically synthesized
  source 1..20: mol_type = other DNA
tgagcccatactttaatctc

SEQ ID NO: 40667 - DNA, 20 bp, synthetic construct
  misc_feature 1..20: note = chemically synthesized
  source 1..20: mol_type = other DNA
gtggtaaggaagaaagtaca

SEQ ID NO: 40668 - DNA, 20 bp, synthetic construct
  misc_feature 1..20: note = chemically synthesized
  source 1..20: mol_type = other DNA
caatattgcaaatcattatt

SEQ ID NO: 40669 - DNA, 20 bp, synthetic construct
  misc_feature 1..20: note = chemically synthesized
  source 1..20: mol_type = other DNA
ctgtgatacaggtgtttgat

SEQ ID NO: 40670 - DNA, 20 bp, synthetic construct
  misc_feature 1..20: note = chemically synthesized
  source 1..20: mol_type = other DNA
actgcaaccgtgtatctctt

SEQ ID NO: 40671 - DNA, 20 bp, synthetic construct
  misc_feature 1..20: note = chemically synthesized
  source 1..20: mol_type = other DNA
tcatgtctagcatgcaggac

SEQ ID NO: 40672 - DNA, 20 bp, synthetic construct
  misc_feature 1..20: note = chemically synthesized
  source 1..20: mol_type = other DNA
tgcaggacttgggtaatctc

SEQ ID NO: 40673 - DNA, 20 bp, synthetic construct
  misc_feature 1..20: note = chemically synthesized
  source 1..20: mol_type = other DNA
ctaaccataaaatcttaaat

SEQ ID NO: 40674 - DNA, 20 bp, synthetic construct
  misc_feature 1..20: note = chemically synthesized
  source 1..20: mol_type = other DNA
tgacagttgataagcatctt

SEQ ID NO: 40675 - DNA, 20 bp, synthetic construct
  misc_feature 1..20: note = chemically synthesized
  source 1..20: mol_type = other DNA
agttacaaaaatgttggtgc

SEQ ID NO: 40676 - DNA, 20 bp, synthetic construct
  misc_feature 1..20: note = chemically synthesized
  source 1..20: mol_type = other DNA
gttggtgcatggatgatgtt

SEQ ID NO: 40677 - DNA, 20 bp, synthetic construct
  misc_feature 1..20: note = chemically synthesized
  source 1..20: mol_type = other DNA
aattaagcaaaaaaaaaatg

SEQ ID NO: 40678 - DNA, 20 bp, synthetic construct
  misc_feature 1..20: note = chemically synthesized
  source 1..20: mol_type = other DNA
acacaccactattagttggg

SEQ ID NO: 40679 - DNA, 20 bp, synthetic construct
  misc_feature 1..20: note = chemically synthesized
  source 1..20: mol_type = other DNA
ctttctgcctggttgtggca

SEQ ID NO: 40680 - DNA, 20 bp, synthetic construct
  misc_feature 1..20: note = chemically synthesized
  source 1..20: mol_type = other DNA
acaaaatgtagtgattttca

SEQ ID NO: 40681 - DNA, 20 bp, synthetic construct
  misc_feature 1..20: note = chemically synthesized
  source 1..20: mol_type = other DNA
tgaagatagccaagcttcca

SEQ ID NO: 40682 - DNA, 20 bp, synthetic construct
  misc_feature 1..20: note = chemically synthesized
  source 1..20: mol_type = other DNA
ggacaaccttgaccactttg

SEQ ID NO: 40683 - DNA, 20 bp, synthetic construct
  misc_feature 1..20: note = chemically synthesized
  source 1..20: mol_type = other DNA
tggtgggggccacatgcaga

SEQ ID NO: 40684 - DNA, 20 bp, synthetic construct
  misc_feature 1..20: note = chemically synthesized
  source 1..20: mol_type = other DNA
gggggccacatgcagatgga

SEQ ID NO: 40685 - DNA, 20 bp, synthetic construct
  misc_feature 1..20: note = chemically synthesized
  source 1..20: mol_type = other DNA
catgcagatggagtgggtta

SEQ ID NO: 40686 - DNA, 20 bp, synthetic construct
  misc_feature 1..20: note = chemically synthesized
  source 1..20: mol_type = other DNA
agagtgactagaagagcagt

SEQ ID NO: 40687 - DNA, 20 bp, synthetic construct
  misc_feature 1..20: note = chemically synthesized
  source 1..20: mol_type = other DNA
tgaaagcagcgagacttcta

SEQ ID NO: 40688 - DNA, 20 bp, synthetic construct
  misc_feature 1..20: note = chemically synthesized
  source 1..20: mol_type = other DNA
agcgagacttctagggaata

SEQ ID NO: 40689 - DNA, 20 bp, synthetic construct
  misc_feature 1..20: note = chemically synthesized
  source 1..20: mol_type = other DNA
aaggcctgtcctgacctcct

SEQ ID NO: 40690 - DNA, 20 bp, synthetic construct
  misc_feature 1..20: note = chemically synthesized
  source 1..20: mol_type = other DNA
catgagggcagggcaaggag

SEQ ID NO: 40691 - DNA, 20 bp, synthetic construct
  misc_feature 1..20: note = chemically synthesized
  source 1..20: mol_type = other DNA
atatgctctatgctggaaaa

SEQ ID NO: 40692 - DNA, 20 bp, synthetic construct
  misc_feature 1..20: note = chemically synthesized
  source 1..20: mol_type = other DNA
tttgaactctcttttccagg

SEQ ID NO: 40693 - DNA, 20 bp, synthetic construct
  misc_feature 1..20: note = chemically synthesized
  source 1..20: mol_type = other DNA
ttttccaggaagagttgtgc

SEQ ID NO: 40694 - DNA, 20 bp, synthetic construct
  misc_feature 1..20: note = chemically synthesized
  source 1..20: mol_type = other DNA
ttaataaggtgcttcctaca

SEQ ID NO: 40695 - DNA, 20 bp, synthetic construct
  misc_feature 1..20: note = chemically synthesized
  source 1..20: mol_type = other DNA
gagttcagttaaacattttg

SEQ ID NO: 40696 - DNA, 20 bp, synthetic construct
  misc_feature 1..20: note = chemically synthesized
  source 1..20: mol_type = other DNA
tgctaggaaatatcccaaaa

SEQ ID NO: 40697 - DNA, 20 bp, synthetic construct
  misc_feature 1..20: note = chemically synthesized
  source 1..20: mol_type = other DNA
tccagggctcatatggcaat

SEQ ID NO: 40698 - DNA, 20 bp, synthetic construct
  misc_feature 1..20: note = chemically synthesized
  source 1..20: mol_type = other DNA
atatggcaatggggatttaa

SEQ ID NO: 40699 - DNA, 20 bp, synthetic construct
  misc_feature 1..20: note = chemically synthesized
  source 1..20: mol_type = other DNA
atgtattttattaatggtgt

SEQ ID NO: 40700 - DNA, 20 bp, synthetic construct
  misc_feature 1..20: note = chemically synthesized
  source 1..20: mol_type = other DNA
tttcttcctcactgtggtgt

SEQ ID NO: 40701 - DNA, 20 bp, synthetic construct
  misc_feature 1..20: note = chemically synthesized
  source 1..20: mol_type = other DNA
tgtaaaagacttagcaattt

SEQ ID NO: 40702 - DNA, 20 bp, synthetic construct
  misc_feature 1..20: note = chemically synthesized
  source 1..20: mol_type = other DNA
ctttccaaaagagcttatca

SEQ ID NO: 40703 - DNA, 20 bp, synthetic construct
  misc_feature 1..20: note = chemically synthesized
  source 1..20: mol_type = other DNA
agagaagtttgttctagcct

SEQ ID NO: 40704 - DNA, 20 bp, synthetic construct
  misc_feature 1..20: note = chemically synthesized
  source 1..20: mol_type = other DNA
tagcctttgggtgtagcctg

SEQ ID NO: 40705 - DNA, 20 bp, synthetic construct
  misc_feature 1..20: note = chemically synthesized
  source 1..20: mol_type = other DNA
ctagtttccatgggctgaaa

SEQ ID NO: 40706 - DNA, 20 bp, synthetic construct
  misc_feature 1..20: note = chemically synthesized
  source 1..20: mol_type = other DNA
gtattttctttgatattttc

SEQ ID NO: 40707 - DNA, 20 bp, synthetic construct
  misc_feature 1..20: note = chemically synthesized
  source 1..20: mol_type = other DNA
tgtgcttcaagatggaactc

SEQ ID NO: 40708 - DNA, 20 bp, synthetic construct
  misc_feature 1..20: note = chemically synthesized
  source 1..20: mol_type = other DNA
ggcaactgctcaactacctg

SEQ ID NO: 40709 - DNA, 20 bp, synthetic construct
  misc_feature 1..20: note = chemically synthesized
  source 1..20: mol_type = other DNA
gcccaagctagcatggaccc

SEQ ID NO: 40710 - DNA, 20 bp, synthetic construct
  misc_feature 1..20: note = chemically synthesized
  source 1..20: mol_type = other DNA
ccagacttctctcttcttaa

SEQ ID NO: 40711 - DNA, 20 bp, synthetic construct
  misc_feature 1..20: note = chemically synthesized
  source 1..20: mol_type = other DNA
aacctgctcttcagttacat

SEQ ID NO: 40712 - DNA, 20 bp, synthetic construct
  misc_feature 1..20: note = chemically synthesized
  source 1..20: mol_type = other DNA
tttctttatttccttgattt

SEQ ID NO: 40713 - DNA, 20 bp, synthetic construct
  misc_feature 1..20: note = chemically synthesized
  source 1..20: mol_type = other DNA
gatttctttgtttataaaat

SEQ ID NO: 40714 - DNA, 20 bp, synthetic construct
  misc_feature 1..20: note = chemically synthesized
  source 1..20: mol_type = other DNA
taacccactcaacaaatacc

SEQ ID NO: 40715 - DNA, 20 bp, synthetic construct
  misc_feature 1..20: note = chemically synthesized
  source 1..20: mol_type = other DNA
acaaataccctgagtatttg

SEQ ID NO: 40716 - DNA, 20 bp, synthetic construct
  misc_feature 1..20: note = chemically synthesized
  source 1..20: mol_type = other DNA
atgcgtatatcatctggcaa

SEQ ID NO: 40717 - DNA, 20 bp, synthetic construct
  misc_feature 1..20: note = chemically synthesized
  source 1..20: mol_type = other DNA
tggatgtgtataatttctcc

SEQ ID NO: 40718 - DNA, 20 bp, synthetic construct
  misc_feature 1..20: note = chemically synthesized
  source 1..20: mol_type = other DNA
ccataacaaagagagaaatg

SEQ ID NO: 40719 - DNA, 20 bp, synthetic construct
  misc_feature 1..20: note = chemically synthesized
  source 1..20: mol_type = other DNA
caaggaaccaaacatattca

SEQ ID NO: 40720 - DNA, 20 bp, synthetic construct
  misc_feature 1..20: note = chemically synthesized
  source 1..20: mol_type = other DNA
gaaattaaacttattttttt

SEQ ID NO: 40721 - DNA, 20 bp, synthetic construct
  misc_feature 1..20: note = chemically synthesized
  source 1..20: mol_type = other DNA
catatacaagattttgaact

SEQ ID NO: 40722 - DNA, 20 bp, synthetic construct
  misc_feature 1..20: note = chemically synthesized
  source 1..20: mol_type = other DNA
gattttgaactgggaatttc

SEQ ID NO: 40723 - DNA, 20 bp, synthetic construct
  misc_feature 1..20: note = chemically synthesized
  source 1..20: mol_type = other DNA
tttcatgaatcaaaaattaa

SEQ ID NO: 40724 - DNA, 20 bp, synthetic construct
  misc_feature 1..20: note = chemically synthesized
  source 1..20: mol_type = other DNA
aggacattgttgacttacat

SEQ ID NO: 40725 - DNA, 20 bp, synthetic construct
  misc_feature 1..20: note = chemically synthesized
  source 1..20: mol_type = other DNA
gacccatgccactggctcag

SEQ ID NO: 40726 - DNA, 20 bp, synthetic construct
  misc_feature 1..20: note = chemically synthesized
  source 1..20: mol_type = other DNA
agcagggttcaaacattacc

SEQ ID NO: 40727 - DNA, 20 bp, synthetic construct
  misc_feature 1..20: note = chemically synthesized
  source 1..20: mol_type = other DNA
ttcaaacattaccttgaata

SEQ ID NO: 40728 - DNA, 20 bp, synthetic construct
  misc_feature 1..20: note = chemically synthesized
  source 1..20: mol_type = other DNA
tagagtcttataaaatattt

SEQ ID NO: 40729 - DNA, 20 bp, synthetic construct
  misc_feature 1..20: note = chemically synthesized
  source 1..20: mol_type = other DNA
cttctttcattctctttctt

SEQ ID NO: 40730 - DNA, 20 bp, synthetic construct
  misc_feature 1..20: note = chemically synthesized
  source 1..20: mol_type = other DNA
ccgaggttgtgtcgctaccc

SEQ ID NO: 40731 - DNA, 20 bp, synthetic construct
  misc_feature 1..20: note = chemically synthesized
  source 1..20: mol_type = other DNA
agatatcaatccttccagga

SEQ ID NO: 40732 - DNA, 20 bp, synthetic construct
  misc_feature 1..20: note = chemically synthesized
  source 1..20: mol_type = other DNA
attttgggaggccacggcag

SEQ ID NO: 40733 - DNA, 20 bp, synthetic construct
  misc_feature 1..20: note = chemically synthesized
  source 1..20: mol_type = other DNA
cagatggatcacctgaggcc

SEQ ID NO: 40734 - DNA, 20 bp, synthetic construct
  misc_feature 1..20: note = chemically synthesized
  source 1..20: mol_type = other DNA
acaaaaaatacaaaaattag

SEQ ID NO: 40735 - DNA, 20 bp, synthetic construct
  misc_feature 1..20: note = chemically synthesized
  source 1..20: mol_type = other DNA
tactaagtaggctgaggcac

SEQ ID NO: 40736 - DNA, 20 bp, synthetic construct
  misc_feature 1..20: note = chemically synthesized
  source 1..20: mol_type = other DNA
gatggaggttgcagtgagcc

SEQ ID NO: 40737 - DNA, 20 bp, synthetic construct
  misc_feature 1..20: note = chemically synthesized
  source 1..20: mol_type = other DNA
atgtgccactgcactccagc

SEQ ID NO: 40738 - DNA, 20 bp, synthetic construct
  misc_feature 1..20: note = chemically synthesized
  source 1..20: mol_type = other DNA
tccagcctgggtgacagagc

SEQ ID NO: 40739 - DNA, 20 bp, synthetic construct
  misc_feature 1..20: note = chemically synthesized
  source 1..20: mol_type = other DNA
atatttttaaaaataaaaca

SEQ ID NO: 40740 - DNA, 20 bp, synthetic construct
  misc_feature 1..20: note = chemically synthesized
  source 1..20: mol_type = other DNA
tttaaaaataaaacataggg

SEQ ID NO: 40741 - DNA, 20 bp, synthetic construct
  misc_feature 1..20: note = chemically synthesized
  source 1..20: mol_type = other DNA
actttgggaggccaagacag

SEQ ID NO: 40742 - DNA, 20 bp, synthetic construct
  misc_feature 1..20: note = chemically synthesized
  source 1..20: mol_type = other DNA
gacaggtggatcacaaggtc

SEQ ID NO: 40743 - DNA, 20 bp, synthetic construct
  misc_feature 1..20: note = chemically synthesized
  source 1..20: mol_type = other DNA
atcccagctactagggaggc

SEQ ID NO: 40744 - DNA, 20 bp, synthetic construct
  misc_feature 1..20: note = chemically synthesized
  source 1..20: mol_type = other DNA
tcacgtcagtgcacttcaac

SEQ ID NO: 40745 - DNA, 20 bp, synthetic construct
  misc_feature 1..20: note = chemically synthesized
  source 1..20: mol_type = other DNA
cagtgcacttcaaccggggt

SEQ ID NO: 40746 - DNA, 20 bp, synthetic construct
  misc_feature 1..20: note = chemically synthesized
  source 1..20: mol_type = other DNA
tagtatcaatctttccgcaa

SEQ ID NO: 40747 - DNA, 20 bp, synthetic construct
  misc_feature 1..20: note = chemically synthesized
  source 1..20: mol_type = other DNA
tcgttctcatgaagtaaagc

SEQ ID NO: 40748 - DNA, 20 bp, synthetic construct
  misc_feature 1..20: note = chemically synthesized
  source 1..20: mol_type = other DNA
atgaagtaaagcaagagtgg

SEQ ID NO: 40749 - DNA, 20 bp, synthetic construct
  misc_feature 1..20: note = chemically synthesized
  source 1..20: mol_type = other DNA
gagtggtagaattaagtgga

SEQ ID NO: 40750 - DNA, 20 bp, synthetic construct
  misc_feature 1..20: note = chemically synthesized
  source 1..20: mol_type = other DNA
tggccaccgggacaccccag

SEQ ID NO: 40751 - DNA, 20 bp, synthetic construct
  misc_feature 1..20: note = chemically synthesized
  source 1..20: mol_type = other DNA
caccgggacaccccaggagg

SEQ ID NO: 40752 - DNA, 20 bp, synthetic construct
  misc_feature 1..20: note = chemically synthesized
  source 1..20: mol_type = other DNA
tcaagccccaagaagtcccc

SEQ ID NO: 40753 - DNA, 20 bp, synthetic construct
  misc_feature 1..20: note = chemically synthesized
  source 1..20: mol_type = other DNA
aagaagtccccttggatgat

SEQ ID NO: 40754 - DNA, 20 bp, synthetic construct
  misc_feature 1..20: note = chemically synthesized
  source 1..20: mol_type = other DNA
atacatttgggacagatcta

SEQ ID NO: 40755 - DNA, 20 bp, synthetic construct
  misc_feature 1..20: note = chemically synthesized
  source 1..20: mol_type = other DNA
tttctgagcaacacttagac

SEQ ID NO: 40756 - DNA, 20 bp, synthetic construct
  misc_feature 1..20: note = chemically synthesized
  source 1..20: mol_type = other DNA
ttccattgattaaatcctac

SEQ ID NO: 40757 - DNA, 20 bp, synthetic construct
  misc_feature 1..20: note = chemically synthesized
  source 1..20: mol_type = other DNA
aatgcccagcacagagctca

SEQ ID NO: 40758 - DNA, 20 bp, synthetic construct
  misc_feature 1..20: note = chemically synthesized
  source 1..20: mol_type = other DNA
gccagactctctgaaccctg

SEQ ID NO: 40759 - DNA, 20 bp, synthetic construct
  misc_feature 1..20: note = chemically synthesized
  source 1..20: mol_type = other DNA
ggagagtgtaaacgtcatat

SEQ ID NO: 40760 - DNA, 20 bp, synthetic construct
  misc_feature 1..20: note = chemically synthesized
  source 1..20: mol_type = other DNA
agagtctatgttccaaaaac

SEQ ID NO: 40761 - DNA, 20 bp, synthetic construct
  misc_feature 1..20: note = chemically synthesized
  source 1..20: mol_type = other DNA
tctttgcttttaaaaccata

SEQ ID NO: 40762 - DNA, 20 bp, synthetic construct
  misc_feature 1..20: note = chemically synthesized
  source 1..20: mol_type = other DNA
taaagaataatgtttaaatg

SEQ ID NO: 40763 - DNA, 20 bp, synthetic construct
  misc_feature 1..20: note = chemically synthesized
  source 1..20: mol_type = other DNA
ttttcactcaacattacata

SEQ ID NO: 40764 - DNA, 20 bp, synthetic construct
  misc_feature 1..20: note = chemically synthesized
  source 1..20: mol_type = other DNA
atgagcatgaggtttccttt

SEQ ID NO: 40765 - DNA, 20 bp, synthetic construct
  misc_feature 1..20: note = chemically synthesized
  source 1..20: mol_type = other DNA
gatgatggttgcacaccact

SEQ ID NO: 40766 - DNA, 20 bp, synthetic construct
  misc_feature 1..20: note = chemically synthesized
  source 1..20: mol_type = other DNA
tacattttattgcaataaaa

SEQ ID NO: 40767 - DNA, 20 bp, synthetic construct
  misc_feature 1..20: note = chemically synthesized
  source 1..20: mol_type = other DNA
ttgtctagttcaacctgagc

SEQ ID NO: 40768 - DNA, 20 bp, synthetic construct
  misc_feature 1..20: note = chemically synthesized
  source 1..20: mol_type = other DNA
tcaacctgagcctgggtctg

SEQ ID NO: 40769 - DNA, 20 bp, synthetic construct
  misc_feature 1..20: note = chemically synthesized
  source 1..20: mol_type = other DNA
aatcacttcaccacacttgt

SEQ ID NO: 40770 - DNA, 20 bp, synthetic construct
  misc_feature 1..20: note = chemically synthesized
  source 1..20: mol_type = other DNA
atacttctttgacaatttgg

SEQ ID NO: 40771 - DNA, 20 bp, synthetic construct
  misc_feature 1..20: note = chemically synthesized
  source 1..20: mol_type = other DNA
ttttccagatggacacaccc

SEQ ID NO: 40772 - DNA, 20 bp, synthetic construct
  misc_feature 1..20: note = chemically synthesized
  source 1..20: mol_type = other DNA
tttgcaagcccagctttcat

SEQ ID NO: 40773 - DNA, 20 bp, synthetic construct
  misc_feature 1..20: note = chemically synthesized
  source 1..20: mol_type = other DNA
ttcagaaacctgactgcatc

SEQ ID NO: 40774 - DNA, 20 bp, synthetic construct
  misc_feature 1..20: note = chemically synthesized
  source 1..20: mol_type = other DNA
tgactaccaagcatcgggca

SEQ ID NO: 40775 - DNA, 20 bp, synthetic construct
  misc_feature 1..20: note = chemically synthesized
  source 1..20: mol_type = other DNA
tgtgagggagcaccgttctc

SEQ ID NO: 40776 - DNA, 20 bp, synthetic construct
  misc_feature 1..20: note = chemically synthesized
  source 1..20: mol_type = other DNA
caggaaagttgatgtggtct

SEQ ID NO: 40777 - DNA, 20 bp, synthetic construct
  misc_feature 1..20: note = chemically synthesized
  source 1..20: mol_type = other DNA
aggtaggccacaggtgacaa

SEQ ID NO: 40778 - DNA, 20 bp, synthetic construct
  misc_feature 1..20: note = chemically synthesized
  source 1..20: mol_type = other DNA
gggccttggggagagggcag

SEQ ID NO: 40779 - DNA, 20 bp, synthetic construct
  misc_feature 1..20: note = chemically synthesized
  source 1..20: mol_type = other DNA
cagcagggtaagtccagcgg

SEQ ID NO: 40780 - DNA, 20 bp, synthetic construct
  misc_feature 1..20: note = chemically synthesized
  source 1..20: mol_type = other DNA
gcaggatcagtccattgatt

SEQ ID NO: 40781 - DNA, 20 bp, synthetic construct
  misc_feature 1..20: note = chemically synthesized
  source 1..20: mol_type = other DNA
tagaaaattgatgaacaggc

SEQ ID NO: 40782 - DNA, 20 bp, synthetic construct
  misc_feature 1..20: note = chemically synthesized
  source 1..20: mol_type = other DNA
catggtctagttagtgttct

SEQ ID NO: 40783 - DNA, 20 bp, synthetic construct
  misc_feature 1..20: note = chemically synthesized
  source 1..20: mol_type = other DNA
ggcgaggcagaagcctagtg

SEQ ID NO: 40784 - DNA, 20 bp, synthetic construct
  misc_feature 1..20: note = chemically synthesized
  source 1..20: mol_type = other DNA
gggatggtggttagaaatgt

SEQ ID NO: 40785 - DNA, 20 bp, synthetic construct
  misc_feature 1..20: note = chemically synthesized
  source 1..20: mol_type = other DNA
ggtaataattgtgatggtgg

SEQ ID NO: 40786 - DNA, 20 bp, synthetic construct
  misc_feature 1..20: note = chemically synthesized
  source 1..20: mol_type = other DNA
gaatgatgatgatggtggtg

SEQ ID NO: 40787 - DNA, 20 bp, synthetic construct
  misc_feature 1..20: note = chemically synthesized
  source 1..20: mol_type = other DNA
gatgataatggtgatggtgg

SEQ ID NO: 40788 - DNA, 20 bp, synthetic construct
  misc_feature 1..20: note = chemically synthesized
  source 1..20: mol_type = other DNA
atggtggtggtgatgatgtt

SEQ ID NO: 40789 - DNA, 20 bp, synthetic construct
  misc_feature 1..20: note = chemically synthesized
  source 1..20: mol_type = other DNA
ggtaatgataatggtgatgg

SEQ ID NO: 40790 - DNA, 20 bp, synthetic construct
  misc_feature 1..20: note = chemically synthesized
  source 1..20: mol_type = other DNA
tggaatgatggtgatggtgg

SEQ ID NO: 40791 - DNA, 20 bp, synthetic construct
  misc_feature 1..20: note = chemically synthesized
  source 1..20: mol_type = other DNA
gtggaatgatgatggtggtg

SEQ ID NO: 40792 - DNA, 20 bp, synthetic construct
  misc_feature 1..20: note = chemically synthesized
  source 1..20: mol_type = other DNA
gtgatgatggtgatgatgtt

SEQ ID NO: 40793 - DNA, 20 bp, synthetic construct
  misc_feature 1..20: note = chemically synthesized
  source 1..20: mol_type = other DNA
gtttccaggtgttccctgac

SEQ ID NO: 40794 - DNA, 20 bp, synthetic construct
  misc_feature 1..20: note = chemically synthesized
  source 1..20: mol_type = other DNA
tccctgacttggatcaaatg

SEQ ID NO: 40795 - DNA, 20 bp, synthetic construct
  misc_feature 1..20: note = chemically synthesized
  source 1..20: mol_type = other DNA
tttggaggtgttgaggccaa

SEQ ID NO: 40796 - DNA, 20 bp, synthetic construct
  misc_feature 1..20: note = chemically synthesized
  source 1..20: mol_type = other DNA
tgacatctctatgtcggcca

SEQ ID NO: 40797 - DNA, 20 bp, synthetic construct
  misc_feature 1..20: note = chemically synthesized
  source 1..20: mol_type = other DNA
cggtaggttttcaccattat

SEQ ID NO: 40798 - DNA, 20 bp, synthetic construct
  misc_feature 1..20: note = chemically synthesized
  source 1..20: mol_type = other DNA
gattgagctgagctggcctc

SEQ ID NO: 40799 - DNA, 20 bp, synthetic construct
  misc_feature 1..20: note = chemically synthesized
  source 1..20: mol_type = other DNA
aggctctgggggaagaaaga

SEQ ID NO: 40800 - DNA, 20 bp, synthetic construct
  misc_feature 1..20: note = chemically synthesized
  source 1..20: mol_type = other DNA
ctgtgccatgctcgcaaagc

SEQ ID NO: 40801 - DNA, 20 bp, synthetic construct
  misc_feature 1..20: note = chemically synthesized
  source 1..20: mol_type = other DNA
gggcttgcaaaattagaaaa

SEQ ID NO: 40802 - DNA, 20 bp, synthetic construct
  misc_feature 1..20: note = chemically synthesized
  source 1..20: mol_type = other DNA
gtgagaacactgaaacatcc

SEQ ID NO: 40803 - DNA, 20 bp, synthetic construct
  misc_feature 1..20: note = chemically synthesized
  source 1..20: mol_type = other DNA
caattttgcaaccgttctat

SEQ ID NO: 40804 - DNA, 20 bp, synthetic construct
  misc_feature 1..20: note = chemically synthesized
  source 1..20: mol_type = other DNA
aataaagcagtttttcacaa

SEQ ID NO: 40805 - DNA, 20 bp, synthetic construct
  misc_feature 1..20: note = chemically synthesized
  source 1..20: mol_type = other DNA
aaaagaataaacacaaccag

SEQ ID NO: 40806 - DNA, 20 bp, synthetic construct
  misc_feature 1..20: note = chemically synthesized
  source 1..20: mol_type = other DNA
aaagaagtataaattagaaa

SEQ ID NO: 40807 - DNA, 20 bp, synthetic construct
  misc_feature 1..20: note = chemically synthesized
  source 1..20: mol_type = other DNA
cttaggctcagaaaatatta

SEQ ID NO: 40808 - DNA, 20 bp, synthetic construct
  misc_feature 1..20: note = chemically synthesized
  source 1..20: mol_type = other DNA
ctcagaaaatattaaggaat

SEQ ID NO: 40809 - DNA, 20 bp, synthetic construct
  misc_feature 1..20: note = chemically synthesized
  source 1..20: mol_type = other DNA
actttatgaacaaagatgtg

SEQ ID NO: 40810 - DNA, 20 bp, synthetic construct
  misc_feature 1..20: note = chemically synthesized
  source 1..20: mol_type = other DNA
agtttccttaactgtagagc

SEQ ID NO: 40811 - DNA, 20 bp, synthetic construct
  misc_feature 1..20: note = chemically synthesized
  source 1..20: mol_type = other DNA
ctgtttcataggactgttgt

SEQ ID NO: 40812 - DNA, 20 bp, synthetic construct
  misc_feature 1..20: note = chemically synthesized
  source 1..20: mol_type = other DNA
attataagcttgtgcctgga

SEQ ID NO: 40813 - DNA, 20 bp, synthetic construct
  misc_feature 1..20: note = chemically synthesized
  source 1..20: mol_type = other DNA
caataaaatgtacacagcgt

SEQ ID NO: 40814 - DNA, 20 bp, synthetic construct
  misc_feature 1..20: note = chemically synthesized
  source 1..20: mol_type = other DNA
tactattttaaccatttttg

SEQ ID NO: 40815 - DNA, 20 bp, synthetic construct
  misc_feature 1..20: note = chemically synthesized
  source 1..20: mol_type = other DNA
tgcaaccatcatcatatttc

SEQ ID NO: 40816 - DNA, 20 bp, synthetic construct
  misc_feature 1..20: note = chemically synthesized
  source 1..20: mol_type = other DNA
acaaaactcattatgtaatg

SEQ ID NO: 40817 - DNA, 20 bp, synthetic construct
  misc_feature 1..20: note = chemically synthesized
  source 1..20: mol_type = other DNA
gtaatgttgagtgaaaaaat

SEQ ID NO: 40818 - DNA, 20 bp, synthetic construct
  misc_feature 1..20: note = chemically synthesized
  source 1..20: mol_type = other DNA
tatatgacgtttacactctc

SEQ ID NO: 40819 - DNA, 20 bp, synthetic construct
  misc_feature 1..20: note = chemically synthesized
  source 1..20: mol_type = other DNA
tttacactctccagggttca

SEQ ID NO: 40820 - DNA, 20 bp, synthetic construct
  misc_feature 1..20: note = chemically synthesized
  source 1..20: mol_type = other DNA
tcaccactgctctgttcttc

SEQ ID NO: 40821 - DNA, 20 bp, synthetic construct
  misc_feature 1..20: note = chemically synthesized
  source 1..20: mol_type = other DNA
aagcccagctccctgtgatt

SEQ ID NO: 40822 - DNA, 20 bp, synthetic construct
  misc_feature 1..20: note = chemically synthesized
  source 1..20: mol_type = other DNA
gaatgaagtgtgcaatcgct

SEQ ID NO: 40823 - DNA, 20 bp, synthetic construct
  misc_feature 1..20: note = chemically synthesized
  source 1..20: mol_type = other DNA
tgtgcaatcgctatgagttt

SEQ ID NO: 40824 - DNA, 20 bp, synthetic construct
  misc_feature 1..20: note = chemically synthesized
  source 1..20: mol_type = other DNA
cgctatgagtttctgaatgg

SEQ ID NO: 40825 - DNA, 20 bp, synthetic construct
  misc_feature 1..20: note = chemically synthesized
  source 1..20: mol_type = other DNA
tcagtctcagtcccttagac

SEQ ID NO: 40826 - DNA, 20 bp, synthetic construct
  misc_feature 1..20: note = chemically synthesized
  source 1..20: mol_type = other DNA
tagacttgagtcccaaagta

SEQ ID NO: 40827 - DNA, 20 bp, synthetic construct
  misc_feature 1..20: note = chemically synthesized
  source 1..20: mol_type = other DNA
cccaaagtagcgaattcaag

SEQ ID NO: 40828 - DNA, 20 bp, synthetic construct
  misc_feature 1..20: note = chemically synthesized
  source 1..20: mol_type = other DNA
ccaaggggacttcttggggc

SEQ ID NO: 40829 - DNA, 20 bp, synthetic construct
  misc_feature 1..20: note = chemically synthesized
  source 1..20: mol_type = other DNA
cctcagaccactcaccctcc

SEQ ID NO: 40830 - DNA, 20 bp, synthetic construct
  misc_feature 1..20: note = chemically synthesized
  source 1..20: mol_type = other DNA
ttctggtagggaaggaggta

SEQ ID NO: 40831 - DNA, 20 bp, synthetic construct
  misc_feature 1..20: note = chemically synthesized
  source 1..20: mol_type = other DNA
gctcagatattgctgatgat

SEQ ID NO: 40832 - DNA, 20 bp, synthetic construct
  misc_feature 1..20: note = chemically synthesized
  source 1..20: mol_type = other DNA
aattgatttacaactggggc

SEQ ID NO: 40833 - DNA, 20 bp, synthetic construct
  misc_feature 1..20: note = chemically synthesized
  source 1..20: mol_type = other DNA
cgaaaatgtaagattgcacc

SEQ ID NO: 40834 - DNA, 20 bp, synthetic construct
  misc_feature 1..20: note = chemically synthesized
  source 1..20: mol_type = other DNA
ctcactgcaacttccacctc

SEQ ID NO: 40835 - DNA, 20 bp, synthetic construct
  misc_feature 1..20: note = chemically synthesized
  source 1..20: mol_type = other DNA
cttccacctcctgggttcaa

SEQ ID NO: 40836 - DNA, 20 bp, synthetic construct
  misc_feature 1..20: note = chemically synthesized
  source 1..20: mol_type = other DNA
actccagcctccctagtagc

SEQ ID NO: 40837 - DNA, 20 bp, synthetic construct
  misc_feature 1..20: note = chemically synthesized
  source 1..20: mol_type = other DNA
ttttgtatttttagtagaga

SEQ ID NO: 40838 - DNA, 20 bp, synthetic construct
  misc_feature 1..20: note = chemically synthesized
  source 1..20: mol_type = other DNA
gtcttggcctcccaaagtgc

SEQ ID NO: 40839 - DNA, 20 bp, synthetic construct
  misc_feature 1..20: note = chemically synthesized
  source 1..20: mol_type = other DNA
ctcccaaagtgctgggatta

SEQ ID NO: 40840 - DNA, 20 bp, synthetic construct
  misc_feature 1..20: note = chemically synthesized
  source 1..20: mol_type = other DNA
tttatttaagccacaactac

SEQ ID NO: 40841 - DNA, 20 bp, synthetic construct
  misc_feature 1..20: note = chemically synthesized
  source 1..20: mol_type = other DNA
gccacaactactagaatagg

SEQ ID NO: 40842 - DNA, 20 bp, synthetic construct
  misc_feature 1..20: note = chemically synthesized
  source 1..20: mol_type = other DNA
tcttgctctgtcacccaggc

SEQ ID NO: 40843 - DNA, 20 bp, synthetic construct
  misc_feature 1..20: note = chemically synthesized
  source 1..20: mol_type = other DNA
gcctcagcctacttagtagc

SEQ ID NO: 40844 - DNA, 20 bp, synthetic construct
  misc_feature 1..20: note = chemically synthesized
  source 1..20: mol_type = other DNA
ttttgtattttttgtagaga

SEQ ID NO: 40845 - DNA, 20 bp, synthetic construct
  misc_feature 1..20: note = chemically synthesized
  source 1..20: mol_type = other DNA
gccgtggcctcccaaaatgc

SEQ ID NO: 40846 - DNA, 20 bp, synthetic construct
  misc_feature 1..20: note = chemically synthesized
  source 1..20: mol_type = other DNA
gagccaccaccccctcctgg

SEQ ID NO: 40847 - DNA, 20 bp, synthetic construct
  misc_feature 1..20: note = chemically synthesized
  source 1..20: mol_type = other DNA
tttataattacagaaaacat

SEQ ID NO: 40848 - DNA, 20 bp, synthetic construct
  misc_feature 1..20: note = chemically synthesized
  source 1..20: mol_type = other DNA
agaaaacatgtgagttcact

SEQ ID NO: 40849 - DNA, 20 bp, synthetic construct
  misc_feature 1..20: note = chemically synthesized
  source 1..20: mol_type = other DNA
catttcggcacagtttggta

SEQ ID NO: 40850 - DNA, 20 bp, synthetic construct
  misc_feature 1..20: note = chemically synthesized
  source 1..20: mol_type = other DNA
gctcgtaaactaagacctga

SEQ ID NO: 40851 - DNA, 20 bp, synthetic construct
  misc_feature 1..20: note = chemically synthesized
  source 1..20: mol_type = other DNA
tgtgtctatcagctgcaccc

SEQ ID NO: 40852 - DNA, 20 bp, synthetic construct
  misc_feature 1..20: note = chemically synthesized
  source 1..20: mol_type = other DNA
tggaaagcttgagggaggct

SEQ ID NO: 40853 - DNA, 20 bp, synthetic construct
  misc_feature 1..20: note = chemically synthesized
  source 1..20: mol_type = other DNA
tggatgtgcagcacttggca

SEQ ID NO: 40854 - DNA, 20 bp, synthetic construct
  misc_feature 1..20: note = chemically synthesized
  source 1..20: mol_type = other DNA
tttattttatccaaaagaaa

SEQ ID NO: 40855 - DNA, 20 bp, synthetic construct
  misc_feature 1..20: note = chemically synthesized
  source 1..20: mol_type = other DNA
atcaggaaagatgaaggtct

SEQ ID NO: 40856 - DNA, 20 bp, synthetic construct
  misc_feature 1..20: note = chemically synthesized
  source 1..20: mol_type = other DNA
gaaggtctaggggtgaggga

SEQ ID NO: 40857 - DNA, 20 bp, synthetic construct
  misc_feature 1..20: note = chemically synthesized
  source 1..20: mol_type = other DNA
aaccctgctgagccagtggc

SEQ ID NO: 40858 - DNA, 20 bp, synthetic construct
  misc_feature 1..20: note = chemically synthesized
  source 1..20: mol_type = other DNA
ccagtggcatgggtctctga

SEQ ID NO: 40859 - DNA, 20 bp, synthetic construct
  misc_feature 1..20: note = chemically synthesized
  source 1..20: mol_type = other DNA
ttaatttgactatctggttt

SEQ ID NO: 40860 - DNA, 20 bp, synthetic construct
  misc_feature 1..20: note = chemically synthesized
  source 1..20: mol_type = other DNA
catgtaagtcaacaatgtcc

SEQ ID NO: 40861 - DNA, 20 bp, synthetic construct
  misc_feature 1..20: note = chemically synthesized
  source 1..20: mol_type = other DNA
acatagtttttttaaattat

SEQ ID NO: 40862 - DNA, 20 bp, synthetic construct
  misc_feature 1..20: note = chemically synthesized
  source 1..20: mol_type = other DNA
cgtgaagactgtcacggtgc

SEQ ID NO: 40863 - DNA, 20 bp, synthetic construct
  misc_feature 1..20: note = chemically synthesized
  source 1..20: mol_type = other DNA
aagactgtcacggtgctgga

SEQ ID NO: 40864 - DNA, 20 bp, synthetic construct
  misc_feature 1..20: note = chemically synthesized
  source 1..20: mol_type = other DNA
ggttgatttttctaatctaa

SEQ ID NO: 40865 - DNA, 20 bp, synthetic construct
  misc_feature 1..20: note = chemically synthesized
  source 1..20: mol_type = other DNA
ccattgtagctaactatgca

SEQ ID NO: 40866 - DNA, 20 bp, synthetic construct
  misc_feature 1..20: note = chemically synthesized
  source 1..20: mol_type = other DNA
tgaaacaatgaaataactct

SEQ ID NO: 40867 - DNA, 20 bp, synthetic construct
  misc_feature 1..20: note = chemically synthesized
  source 1..20: mol_type = other DNA
ttggttccttgacctgttca

SEQ ID NO: 40868 - DNA, 20 bp, synthetic construct
  misc_feature 1..20: note = chemically synthesized
  source 1..20: mol_type = other DNA
atttctctctttgttatggc

SEQ ID NO: 40869 - DNA, 20 bp, synthetic construct
  misc_feature 1..20: note = chemically synthesized
  source 1..20: mol_type = other DNA
ataatgattcaacaaatact

SEQ ID NO: 40870 - DNA, 20 bp, synthetic construct
  misc_feature 1..20: note = chemically synthesized
  source 1..20: mol_type = other DNA
acaaatactcagggtatttg

SEQ ID NO: 40871 - DNA, 20 bp, synthetic construct
  misc_feature 1..20: note = chemically synthesized
  source 1..20: mol_type = other DNA
atactcagggtatttgttga

SEQ ID NO: 40872 - DNA, 20 bp, synthetic construct
  misc_feature 1..20: note = chemically synthesized
  source 1..20: mol_type = other DNA
catacacaccgtgtgtgatt

SEQ ID NO: 40873 - DNA, 20 bp, synthetic construct
  misc_feature 1..20: note = chemically synthesized
  source 1..20: mol_type = other DNA
tatttagctcatggtatagg

SEQ ID NO: 40874 - DNA, 20 bp, synthetic construct
  misc_feature 1..20: note = chemically synthesized
  source 1..20: mol_type = other DNA
aatcaaggaaataaagaaac

SEQ ID NO: 40875 - DNA, 20 bp, synthetic construct
  misc_feature 1..20: note = chemically synthesized
  source 1..20: mol_type = other DNA
ggttaattgtttgccacttg

SEQ ID NO: 40876 - DNA, 20 bp, synthetic construct
  misc_feature 1..20: note = chemically synthesized
  source 1..20: mol_type = other DNA
aggcaacagaggaggcgagc

SEQ ID NO: 40877 - DNA, 20 bp, synthetic construct
  misc_feature 1..20: note = chemically synthesized
  source 1..20: mol_type = other DNA
gaggaggcgagcaaggattc

SEQ ID NO: 40878 - DNA, 20 bp, synthetic construct
  misc_feature 1..20: note = chemically synthesized
  source 1..20: mol_type = other DNA
cctgctggtgcctttgtgag

SEQ ID NO: 40879 - DNA, 20 bp, synthetic construct
  misc_feature 1..20: note = chemically synthesized
  source 1..20: mol_type = other DNA
tcccttgaggcaaatctctg

SEQ ID NO: 40880 - DNA, 20 bp, synthetic construct
  misc_feature 1..20: note = chemically synthesized
  source 1..20: mol_type = other DNA
gaggcaaatctctggagggt

SEQ ID NO: 40881 - DNA, 20 bp, synthetic construct
  misc_feature 1..20: note = chemically synthesized
  source 1..20: mol_type = other DNA
tataaatcacctgtgaactc

SEQ ID NO: 40882 - DNA, 20 bp, synthetic construct
  misc_feature 1..20: note = chemically synthesized
  source 1..20: mol_type = other DNA
agatgaacttgccctgcagg

SEQ ID NO: 40883 - DNA, 20 bp, synthetic construct
  misc_feature 1..20: note = chemically synthesized
  source 1..20: mol_type = other DNA
gactttaaagtcaaacacat

SEQ ID NO: 40884 - DNA, 20 bp, synthetic construct
  misc_feature 1..20: note = chemically synthesized
  source 1..20: mol_type = other DNA
gagcaggagaagattaagca

SEQ ID NO: 40885 - DNA, 20 bp, synthetic construct
  misc_feature 1..20: note = chemically synthesized
  source 1..20: mol_type = other DNA
tgtctatgtctgtgtgtgta

SEQ ID NO: 40886 - DNA, 20 bp, synthetic construct
  misc_feature 1..20: note = chemically synthesized
  source 1..20: mol_type = other DNA
ctgtgtgtgtagggagtgca

SEQ ID NO: 40887 - DNA, 20 bp, synthetic construct
  misc_feature 1..20: note = chemically synthesized
  source 1..20: mol_type = other DNA
gtgtagggagtgcaggggat

SEQ ID NO: 40888 - DNA, 20 bp, synthetic construct
  misc_feature 1..20: note = chemically synthesized
  source 1..20: mol_type = other DNA
ctatttcagcccatggaaac

SEQ ID NO: 40889 - DNA, 20 bp, synthetic construct
  misc_feature 1..20: note = chemically synthesized
  source 1..20: mol_type = other DNA
tagaacaaacttctctgcca

SEQ ID NO: 40890 - DNA, 20 bp, synthetic construct
  misc_feature 1..20: note = chemically synthesized
  source 1..20: mol_type = other DNA
gttatctttccaatgtgtgc

SEQ ID NO: 40891 - DNA, 20 bp, synthetic construct
  misc_feature 1..20: note = chemically synthesized
  source 1..20: mol_type = other DNA
ttgccatatgagccctggag

SEQ ID NO: 40892 - DNA, 20 bp, synthetic construct
  misc_feature 1..20: note = chemically synthesized
  source 1..20: mol_type = other DNA
gaggtgaatcagagaaacaa

SEQ ID NO: 40893 - DNA, 20 bp, synthetic construct
  misc_feature 1..20: note = chemically synthesized
  source 1..20: mol_type = other DNA
aagaaaaattgattctgttt

SEQ ID NO: 40894 - DNA, 20 bp, synthetic construct
  misc_feature 1..20: note = chemically synthesized
  source 1..20: mol_type = other DNA
ctagcaacatgagctgggga

SEQ ID NO: 40895 - DNA, 20 bp, synthetic construct
  misc_feature 1..20: note = chemically synthesized
  source 1..20: mol_type = other DNA
taaatggaagtttcctcttt

SEQ ID NO: 40896 - DNA, 20 bp, synthetic construct
  misc_feature 1..20: note = chemically synthesized
  source 1..20: mol_type = other DNA
tgaagtcacactgtgagcta

SEQ ID NO: 40897 - DNA, 20 bp, synthetic construct
  misc_feature 1..20: note = chemically synthesized
  source 1..20: mol_type = other DNA
gcacaactcttcctggaaaa

SEQ ID NO: 40898 - DNA, 20 bp, synthetic construct
  misc_feature 1..20: note = chemically synthesized
  source 1..20: mol_type = other DNA
agttcaaatgagaaacagtg

SEQ ID NO: 40899 - DNA, 20 bp, synthetic construct
  misc_feature 1..20: note = chemically synthesized
  source 1..20: mol_type = other DNA
aaacagtgcggggtgaagac

SEQ ID NO: 40900 - DNA, 20 bp, synthetic construct
  misc_feature 1..20: note = chemically synthesized
  source 1..20: mol_type = other DNA
tatctatcaagtgcttttta

SEQ ID NO: 40901 - DNA, 20 bp, synthetic construct
  misc_feature 1..20: note = chemically synthesized
  source 1..20: mol_type = other DNA
gctttttagtggattaggtt

SEQ ID NO: 40902 - DNA, 20 bp, synthetic construct
  misc_feature 1..20: note = chemically synthesized
  source 1..20: mol_type = other DNA
aggtcaggacaggcctttct

SEQ ID NO: 40903 - DNA, 20 bp, synthetic construct
  misc_feature 1..20: note = chemically synthesized
  source 1..20: mol_type = other DNA
ggacaggcctttctgagaat

SEQ ID NO: 40904 - DNA, 20 bp, synthetic construct
  misc_feature 1..20: note = chemically synthesized
  source 1..20: mol_type = other DNA
tctgttcatctgcctttcta

SEQ ID NO: 40905 - DNA, 20 bp, synthetic construct
  misc_feature 1..20: note = chemically synthesized
  source 1..20: mol_type = other DNA
tcctaaggagcctcaggaca

SEQ ID NO: 40906 - DNA, 20 bp, synthetic construct
  misc_feature 1..20: note = chemically synthesized
  source 1..20: mol_type = other DNA
tttacaatttcctctgaaat

SEQ ID NO: 40907 - DNA, 20 bp, synthetic construct
  misc_feature 1..20: note = chemically synthesized
  source 1..20: mol_type = other DNA
ctatcaacaccttggaaaaa

SEQ ID NO: 40908 - DNA, 20 bp, synthetic construct
  misc_feature 1..20: note = chemically synthesized
  source 1..20: mol_type = other DNA
tccaaggttcatttctacac

SEQ ID NO: 40909 - DNA, 20 bp, synthetic construct
  misc_feature 1..20: note = chemically synthesized
  source 1..20: mol_type = other DNA
caggaggtggaagcccctga

SEQ ID NO: 40910 - DNA, 20 bp, synthetic construct
  misc_feature 1..20: note = chemically synthesized
  source 1..20: mol_type = other DNA
cctgagagaatggaggtctg

SEQ ID NO: 40911 - DNA, 20 bp, synthetic construct
  misc_feature 1..20: note = chemically synthesized
  source 1..20: mol_type = other DNA
ccaagtcctgcatgctagac

SEQ ID NO: 40912 - DNA, 20 bp, synthetic construct
  misc_feature 1..20: note = chemically synthesized
  source 1..20: mol_type = other DNA
ctagacatgagtggaggagg

SEQ ID NO: 40913 - DNA, 20 bp, synthetic construct
  misc_feature 1..20: note = chemically synthesized
  source 1..20: mol_type = other DNA
gggggaatacctaggtagaa

SEQ ID NO: 40914 - DNA, 20 bp, synthetic construct
  misc_feature 1..20: note = chemically synthesized
  source 1..20: mol_type = other DNA
tcactgtgcagttaactttt

SEQ ID NO: 40915 - DNA, 20 bp, synthetic construct
  misc_feature 1..20: note = chemically synthesized
  source 1..20: mol_type = other DNA
cggttgcagttagtatacat

SEQ ID NO: 40916 - DNA, 20 bp, synthetic construct
  misc_feature 1..20: note = chemically synthesized
  source 1..20: mol_type = other DNA
tgagtgctatacaaccttct

SEQ ID NO: 40917 - DNA, 20 bp, synthetic construct
  misc_feature 1..20: note = chemically synthesized
  source 1..20: mol_type = other DNA
gaagcaatgcagccattacg

SEQ ID NO: 40918 - DNA, 20 bp, synthetic construct
  misc_feature 1..20: note = chemically synthesized
  source 1..20: mol_type = other DNA
taaaaagtatttctttaggt

SEQ ID NO: 40919 - DNA, 20 bp, synthetic construct
  misc_feature 1..20: note = chemically synthesized
  source 1..20: mol_type = other DNA
ctacgcattgacttatcttc

SEQ ID NO: 40920 - DNA, 20 bp, synthetic construct
  misc_feature 1..20: note = chemically synthesized
  source 1..20: mol_type = other DNA
cctccagcacacagcaggga

SEQ ID NO: 40921 - DNA, 20 bp, synthetic construct
  misc_feature 1..20: note = chemically synthesized
  source 1..20: mol_type = other DNA
ggctgcactctgtgtttttg

SEQ ID NO: 40922 - DNA, 20 bp, synthetic construct
  misc_feature 1..20: note = chemically synthesized
  source 1..20: mol_type = other DNA
ctagggaaggaaaaaagatc

SEQ ID NO: 40923 - DNA, 20 bp, synthetic construct
  misc_feature 1..20: note = chemically synthesized
  source 1..20: mol_type = other DNA
ctgcccccaagctgtagagc

SEQ ID NO: 40924 - DNA, 20 bp, synthetic construct
  misc_feature 1..20: note = chemically synthesized
  source 1..20: mol_type = other DNA
gcctacatctttctcctgtg

SEQ ID NO: 40925 - DNA, 20 bp, synthetic construct
  misc_feature 1..20: note = chemically synthesized
  source 1..20: mol_type = other DNA
ttatgggaccttgtaatctt

SEQ ID NO: 40926 - DNA, 20 bp, synthetic construct
  misc_feature 1..20: note = chemically synthesized
  source 1..20: mol_type = other DNA
cttaataagctcccctttgt

SEQ ID NO: 40927 - DNA, 20 bp, synthetic construct
  misc_feature 1..20: note = chemically synthesized
  source 1..20: mol_type = other DNA
cagaagtggttcttgaggaa

SEQ ID NO: 40928 - DNA, 20 bp, synthetic construct
  misc_feature 1..20: note = chemically synthesized
  source 1..20: mol_type = other DNA
ttcttgaggaacagaatatt

SEQ ID NO: 40929 - DNA, 20 bp, synthetic construct
  misc_feature 1..20: note = chemically synthesized
  source 1..20: mol_type = other DNA
gaggaacagaatattaagga

SEQ ID NO: 40930 - DNA, 20 bp, synthetic construct
  misc_feature 1..20: note = chemically synthesized
  source 1..20: mol_type = other DNA
gaacactgatagtacttggc

SEQ ID NO: 40931 - DNA, 20 bp, synthetic construct
  misc_feature 1..20: note = chemically synthesized
  source 1..20: mol_type = other DNA
tacttggcctgaattgttta

SEQ ID NO: 40932 - DNA, 20 bp, synthetic construct
  misc_feature 1..20: note = chemically synthesized
  source 1..20: mol_type = other DNA
ttcatcacttatgagaggca

SEQ ID NO: 40933 - DNA, 20 bp, synthetic construct
  misc_feature 1..20: note = chemically synthesized
  source 1..20: mol_type = other DNA
gaaagaaaatgatgatctca

SEQ ID NO: 40934 - DNA, 20 bp, synthetic construct
  misc_feature 1..20: note = chemically synthesized
  source 1..20: mol_type = other DNA
acaaatctgctaagattgcc

SEQ ID NO: 40935 - DNA, 20 bp, synthetic construct
  misc_feature 1..20: note = chemically synthesized
  source 1..20: mol_type = other DNA
ctgctaagattgccctgaat

SEQ ID NO: 40936 - DNA, 20 bp, synthetic construct
  misc_feature 1..20: note = chemically synthesized
  source 1..20: mol_type = other DNA
agttttaactcctgtagaga

SEQ ID NO: 40937 - DNA, 20 bp, synthetic construct
  misc_feature 1..20: note = chemically synthesized
  source 1..20: mol_type = other DNA
cagagacaagctgttatcat

SEQ ID NO: 40938 - DNA, 20 bp, synthetic construct
  misc_feature 1..20: note = chemically synthesized
  source 1..20: mol_type = other DNA
aaaaatgggaccctggaact

SEQ ID NO: 40939 - DNA, 20 bp, synthetic construct
  misc_feature 1..20: note = chemically synthesized
  source 1..20: mol_type = other DNA
gggaccctggaacttggagt

SEQ ID NO: 40940 - DNA, 20 bp, synthetic construct
  misc_feature 1..20: note = chemically synthesized
  source 1..20: mol_type = other DNA
ccctgatgaagctgaggaca

SEQ ID NO: 40941 - DNA, 20 bp, synthetic construct
  misc_feature 1..20: note = chemically synthesized
  source 1..20: mol_type = other DNA
tagcctttccacctttgtct

SEQ ID NO: 40942 - DNA, 20 bp, synthetic construct
  misc_feature 1..20: note = chemically synthesized
  source 1..20: mol_type = other DNA
aagaggcacccctaatgccc

SEQ ID NO: 40943 - DNA, 20 bp, synthetic construct
  misc_feature 1..20: note = chemically synthesized
  source 1..20: mol_type = other DNA
cgggccccagaggtgaggtt

SEQ ID NO: 40944 - DNA, 20 bp, synthetic construct
  misc_feature 1..20: note = chemically synthesized
  source 1..20: mol_type = other DNA
gaaatctggagaacaggcat

SEQ ID NO: 40945 - DNA, 20 bp, synthetic construct
  misc_feature 1..20: note = chemically synthesized
  source 1..20: mol_type = other DNA
tctggagaacaggcatggga

SEQ ID NO: 40946 - DNA, 20 bp, synthetic construct
  misc_feature 1..20: note = chemically synthesized
  source 1..20: mol_type = other DNA
caggcatgggaatggatatt

SEQ ID NO: 40947 - DNA, 20 bp, synthetic construct
  misc_feature 1..20: note = chemically synthesized
  source 1..20: mol_type = other DNA
gggaatggatattaagggta

SEQ ID NO: 40948 - DNA, 20 bp, synthetic construct
  misc_feature 1..20: note = chemically synthesized
  source 1..20: mol_type = other DNA
ggataatggtggaagggaca

SEQ ID NO: 40949 - DNA, 20 bp, synthetic construct
  misc_feature 1..20: note = chemically synthesized
  source 1..20: mol_type = other DNA
atggtggaagggacatagag

SEQ ID NO: 40950 - DNA, 20 bp, synthetic construct
  misc_feature 1..20: note = chemically synthesized
  source 1..20: mol_type = other DNA
ggacatagagttggatcaag

SEQ ID NO: 40951 - DNA, 20 bp, synthetic construct
  misc_feature 1..20: note = chemically synthesized
  source 1..20: mol_type = other DNA
ttggtttggccctactaagt

SEQ ID NO: 40952 - DNA, 20 bp, synthetic construct
  misc_feature 1..20: note = chemically synthesized
  source 1..20: mol_type = other DNA
tttgcttggttagctgaaat

SEQ ID NO: 40953 - DNA, 20 bp, synthetic construct
  misc_feature 1..20: note = chemically synthesized
  source 1..20: mol_type = other DNA
atccaaaggcttagggagat

SEQ ID NO: 40954 - DNA, 20 bp, synthetic construct
  misc_feature 1..20: note = chemically synthesized
  source 1..20: mol_type = other DNA
gcttagggagattaggatgg

SEQ ID NO: 40955 - DNA, 20 bp, synthetic construct
  misc_feature 1..20: note = chemically synthesized
  source 1..20: mol_type = other DNA
agggagattaggatggtgga

SEQ ID NO: 40956 - DNA, 20 bp, synthetic construct
  misc_feature 1..20: note = chemically synthesized
  source 1..20: mol_type = other DNA
gacctactcatcccagctgg

SEQ ID NO: 40957 - DNA, 20 bp, synthetic construct
  misc_feature 1..20: note = chemically synthesized
  source 1..20: mol_type = other DNA
ctacaaaatttaaatacaat

SEQ ID NO: 40958 - DNA, 20 bp, synthetic construct
  misc_feature 1..20: note = chemically synthesized
  source 1..20: mol_type = other DNA
tttaaatacaatgggaataa

SEQ ID NO: 40959 - DNA, 20 bp, synthetic construct
  misc_feature 1..20: note = chemically synthesized
  source 1..20: mol_type = other DNA
agcagaggcaaagcagccat

SEQ ID NO: 40960 - DNA, 20 bp, synthetic construct
  misc_feature 1..20: note = chemically synthesized
  source 1..20: mol_type = other DNA
ataaacaaaaaactgccagg

SEQ ID NO: 40961 - DNA, 20 bp, synthetic construct
  misc_feature 1..20: note = chemically synthesized
  source 1..20: mol_type = other DNA
agaatggactaaagactaat

SEQ ID NO: 40962 - DNA, 20 bp, synthetic construct
  misc_feature 1..20: note = chemically synthesized
  source 1..20: mol_type = other DNA
taatctgaattataaaaaca

SEQ ID NO: 40963 - DNA, 20 bp, synthetic construct
  misc_feature 1..20: note = chemically synthesized
  source 1..20: mol_type = other DNA
tgttacagttccagaaccca

SEQ ID NO: 40964 - DNA, 20 bp, synthetic construct
  misc_feature 1..20: note = chemically synthesized
  source 1..20: mol_type = other DNA
cccactgaatgaaggggagg

SEQ ID NO: 40965 - DNA, 20 bp, synthetic construct
  misc_feature 1..20: note = chemically synthesized
  source 1..20: mol_type = other DNA
ggagacctctggccttttac

SEQ ID NO: 40966 - DNA, 20 bp, synthetic construct
  misc_feature 1..20: note = chemically synthesized
  source 1..20: mol_type = other DNA
ctctgagctgacgttgattc

SEQ ID NO: 40967 - DNA, 20 bp, synthetic construct
  misc_feature 1..20: note = chemically synthesized
  source 1..20: mol_type = other DNA
tatggaggttaggtaattaa

SEQ ID NO: 40968 - DNA, 20 bp, synthetic construct
  misc_feature 1..20: note = chemically synthesized
  source 1..20: mol_type = other DNA
tctgacttacagtggttcca

SEQ ID NO: 40969 - DNA, 20 bp, synthetic construct
  misc_feature 1..20: note = chemically synthesized
  source 1..20: mol_type = other DNA
cacattggctccctgactgg

SEQ ID NO: 40970 - DNA, 20 bp, synthetic construct
  misc_feature 1..20: note = chemically synthesized
  source 1..20: mol_type = other DNA
atcaaggacttgaaagacgc

SEQ ID NO: 40971 - DNA, 20 bp, synthetic construct
  misc_feature 1..20: note = chemically synthesized
  source 1..20: mol_type = other DNA
ttgacctgtgcagaggacag

SEQ ID NO: 40972 - DNA, 20 bp, synthetic construct
  misc_feature 1..20: note = chemically synthesized
  source 1..20: mol_type = other DNA
atggatcttggaaaatgatg

SEQ ID NO: 40973 - DNA, 20 bp, synthetic construct
  misc_feature 1..20: note = chemically synthesized
  source 1..20: mol_type = other DNA
tacctttaccaccctacctc

SEQ ID NO: 40974 - DNA, 20 bp, synthetic construct
  misc_feature 1..20: note = chemically synthesized
  source 1..20: mol_type = other DNA
cattcatgacattatgatga

SEQ ID NO: 40975 - DNA, 20 bp, synthetic construct
  misc_feature 1..20: note = chemically synthesized
  source 1..20: mol_type = other DNA
ggtgagacatttgtatgcca

SEQ ID NO: 40976 - DNA, 20 bp, synthetic construct
  misc_feature 1..20: note = chemically synthesized
  source 1..20: mol_type = other DNA
ttctacctcggtaaaatttc

SEQ ID NO: 40977 - DNA, 20 bp, synthetic construct
  misc_feature 1..20: note = chemically synthesized
  source 1..20: mol_type = other DNA
acaatgcctggtgggcctat

SEQ ID NO: 40978 - DNA, 20 bp, synthetic construct
  misc_feature 1..20: note = chemically synthesized
  source 1..20: mol_type = other DNA
ggaggcaacacattcctcgt

SEQ ID NO: 40979 - DNA, 20 bp, synthetic construct
  misc_feature 1..20: note = chemically synthesized
  source 1..20: mol_type = other DNA
gtgttactctggcccattta

SEQ ID NO: 40980 - DNA, 20 bp, synthetic construct
  misc_feature 1..20: note = chemically synthesized
  source 1..20: mol_type = other DNA
ttgaggtgtcagtggcagat

SEQ ID NO: 40981 - DNA, 20 bp, synthetic construct
  misc_feature 1..20: note = chemically synthesized
  source 1..20: mol_type = other DNA
cctttggcaggcccccatag

SEQ ID NO: 40982 - DNA, 20 bp, synthetic construct
  misc_feature 1..20: note = chemically synthesized
  source 1..20: mol_type = other DNA
tgaatcacagtggagacctc

SEQ ID NO: 40983 - DNA, 20 bp, synthetic construct
  misc_feature 1..20: note = chemically synthesized
  source 1..20: mol_type = other DNA
tggtaactgaacgtttgact

SEQ ID NO: 40984 - DNA, 20 bp, synthetic construct
  misc_feature 1..20: note = chemically synthesized
  source 1..20: mol_type = other DNA
ctgacccatctagccatgaa

SEQ ID NO: 40985 - DNA, 20 bp, synthetic construct
  misc_feature 1..20: note = chemically synthesized
  source 1..20: mol_type = other DNA
cctgcaccaatggcctcatg

SEQ ID NO: 40986 - DNA, 20 bp, synthetic construct
  misc_feature 1..20: note = chemically synthesized
  source 1..20: mol_type = other DNA
tatgtaataacttttggttt

SEQ ID NO: 40987 - DNA, 20 bp, synthetic construct
  misc_feature 1..20: note = chemically synthesized
  source 1..20: mol_type = other DNA
tggtgcgtttctggttgtat

SEQ ID NO: 40988 - DNA, 20 bp, synthetic construct
  misc_feature 1..20: note = chemically synthesized
  source 1..20: mol_type = other DNA
ttgaagattatgtatgattt

SEQ ID NO: 40989 - DNA, 20 bp, synthetic construct
  misc_feature 1..20: note = chemically synthesized
  source 1..20: mol_type = other DNA
tatgatttcaggatgtgtgt

SEQ ID NO: 40990 - DNA, 20 bp, synthetic construct
  misc_feature 1..20: note = chemically synthesized
  source 1..20: mol_type = other DNA
tgtatgggttcaagttgaca

SEQ ID NO: 40991 - DNA, 20 bp, synthetic construct
  misc_feature 1..20: note = chemically synthesized
  source 1..20: mol_type = other DNA
ggttaatactgtcaacttga

SEQ ID NO: 40992 - DNA, 20 bp, synthetic construct
  misc_feature 1..20: note = chemically synthesized
  source 1..20: mol_type = other DNA
ttaatctcggttatgtctgt

SEQ ID NO: 40993 - DNA, 20 bp, synthetic construct
  misc_feature 1..20: note = chemically synthesized
  source 1..20: mol_type = other DNA
tggcaaaaggagattaacat

SEQ ID NO: 40994 - DNA, 20 bp, synthetic construct
  misc_feature 1..20: note = chemically synthesized
  source 1..20: mol_type = other DNA
atacaactatcctcatacaa

SEQ ID NO: 40995 - DNA, 20 bp, synthetic construct
  misc_feature 1..20: note = chemically synthesized
  source 1..20: mol_type = other DNA
gcacaagtgtacacatgcat

SEQ ID NO: 40996 - DNA, 20 bp, synthetic construct
  misc_feature 1..20: note = chemically synthesized
  source 1..20: mol_type = other DNA
ccacttcatggctagatggg

SEQ ID NO: 40997 - DNA, 20 bp, synthetic construct
  misc_feature 1..20: note = chemically synthesized
  source 1..20: mol_type = other DNA
ggtctcatgccactggaacc

SEQ ID NO: 40998 - DNA, 20 bp, synthetic construct
  misc_feature 1..20: note = chemically synthesized
  source 1..20: mol_type = other DNA
accctagaaattttaccgag

SEQ ID NO: 40999 - DNA, 20 bp, synthetic construct
  misc_feature 1..20: note = chemically synthesized
  source 1..20: mol_type = other DNA
tgggtcttatggacaggaat

SEQ ID NO: 41000 - DNA, 20 bp, synthetic construct
  misc_feature 1..20: note = chemically synthesized
  source 1..20: mol_type = other DNA
cccactggaaccactgtaag

SEQ ID NO: 41001 - DNA, 20 bp, synthetic construct
  misc_feature 1..20: note = chemically synthesized
  source 1..20: mol_type = other DNA
ggtctccttagggaaggatg

SEQ ID NO: 41002 - DNA, 20 bp, synthetic construct
  misc_feature 1..20: note = chemically synthesized
  source 1..20: mol_type = other DNA
atggggtttcaccattttag

SEQ ID NO: 41003 - DNA, 20 bp, synthetic construct
  misc_feature 1..20: note = chemically synthesized
  source 1..20: mol_type = other DNA
cccgagctgcaacattaaat

SEQ ID NO: 41004 - DNA, 20 bp, synthetic construct
  misc_feature 1..20: note = chemically synthesized
  source 1..20: mol_type = other DNA
cagatttctgccaatataaa

SEQ ID NO: 41005 - DNA, 20 bp, synthetic construct
  misc_feature 1..20: note = chemically synthesized
  source 1..20: mol_type = other DNA
gcattaggggtgcctcttga

SEQ ID NO: 41006 - DNA, 20 bp, synthetic construct
  misc_feature 1..20: note = chemically synthesized
  source 1..20: mol_type = other DNA
cagaagtcccaaaaccaatg

SEQ ID NO: 41007 - DNA, 20 bp, synthetic construct
  misc_feature 1..20: note = chemically synthesized
  source 1..20: mol_type = other DNA
agcaggaaggatccagcaca

SEQ ID NO: 41008 - DNA, 20 bp, synthetic construct
  misc_feature 1..20: note = chemically synthesized
  source 1..20: mol_type = other DNA
gagtagcaggtgaaagctca

SEQ ID NO: 41009 - DNA, 20 bp, synthetic construct
  misc_feature 1..20: note = chemically synthesized
  source 1..20: mol_type = other DNA
caggtgaaagctcacaagaa

SEQ ID NO: 41010 - DNA, 20 bp, synthetic construct
  misc_feature 1..20: note = chemically synthesized
  source 1..20: mol_type = other DNA
tagtaggggcagggaccagt

SEQ ID NO: 41011 - DNA, 20 bp, synthetic construct
  misc_feature 1..20: note = chemically synthesized
  source 1..20: mol_type = other DNA
ttgagataaacagtggtaag

SEQ ID NO: 41012 - DNA, 20 bp, synthetic construct
  misc_feature 1..20: note = chemically synthesized
  source 1..20: mol_type = other DNA
cgtagaagtaattccaacct

SEQ ID NO: 41013 - DNA, 20 bp, synthetic construct
  misc_feature 1..20: note = chemically synthesized
  source 1..20: mol_type = other DNA
acaatattgcaaatcattat

SEQ ID NO: 41014 - DNA, 20 bp, synthetic construct
  misc_feature 1..20: note = chemically synthesized
  source 1..20: mol_type = other DNA
tctaaccataaaatcttaaa

SEQ ID NO: 41015 - DNA, 20 bp, synthetic construct
  misc_feature 1..20: note = chemically synthesized
  source 1..20: mol_type = other DNA
gttgatctgctaatccctgt

SEQ ID NO: 41016 - DNA, 20 bp, synthetic construct
  misc_feature 1..20: note = chemically synthesized
  source 1..20: mol_type = other DNA
gacacaccactattagttgg

SEQ ID NO: 41017 - DNA, 20 bp, synthetic construct
  misc_feature 1..20: note = chemically synthesized
  source 1..20: mol_type = other DNA
atgccgatgacaagtatcca

SEQ ID NO: 41018 - DNA, 20 bp, synthetic construct
  misc_feature 1..20: note = chemically synthesized
  source 1..20: mol_type = other DNA
agatgaacagattctcattc

SEQ ID NO: 41019 - DNA, 20 bp, synthetic construct
  misc_feature 1..20: note = chemically synthesized
  source 1..20: mol_type = other DNA
tagatatatcaaaatatcat

SEQ ID NO: 41020 - DNA, 20 bp, synthetic construct
  misc_feature 1..20: note = chemically synthesized
  source 1..20: mol_type = other DNA
ttgctaggaaatatcccaaa

SEQ ID NO: 41021 - DNA, 20 bp, synthetic construct
  misc_feature 1..20: note = chemically synthesized
  source 1..20: mol_type = other DNA
aatagggtttatttgttggt

SEQ ID NO: 41022 - DNA, 20 bp, synthetic construct
  misc_feature 1..20: note = chemically synthesized
  source 1..20: mol_type = other DNA
aatgtattttattaatggtg

SEQ ID NO: 41023 - DNA, 20 bp, synthetic construct
  misc_feature 1..20: note = chemically synthesized
  source 1..20: mol_type = other DNA
tctcactgagcatggctgta

SEQ ID NO: 41024 - DNA, 20 bp, synthetic construct
  misc_feature 1..20: note = chemically synthesized
  source 1..20: mol_type = other DNA
attggaaagataacacgtcc

SEQ ID NO: 41025 - DNA, 20 bp, synthetic construct
  misc_feature 1..20: note = chemically synthesized
  source 1..20: mol_type = other DNA
gctttccaaaagagcttatc

SEQ ID NO: 41026 - DNA, 20 bp, synthetic construct
  misc_feature 1..20: note = chemically synthesized
  source 1..20: mol_type = other DNA
cctagtttccatgggctgaa

SEQ ID NO: 41027 - DNA, 20 bp, synthetic construct
  misc_feature 1..20: note = chemically synthesized
  source 1..20: mol_type = other DNA
ttactcaggccataacaaag

SEQ ID NO: 41028 - DNA, 20 bp, synthetic construct
  misc_feature 1..20: note = chemically synthesized
  source 1..20: mol_type = other DNA
tgtaggcacactcttttaga

SEQ ID NO: 41029 - DNA, 20 bp, synthetic construct
  misc_feature 1..20: note = chemically synthesized
  source 1..20: mol_type = other DNA
ggaaattaaacttatttttt

SEQ ID NO: 41030 - DNA, 20 bp, synthetic construct
  misc_feature 1..20: note = chemically synthesized
  source 1..20: mol_type = other DNA
tgtatttttactacattgtg

SEQ ID NO: 41031 - DNA, 20 bp, synthetic construct
  misc_feature 1..20: note = chemically synthesized
  source 1..20: mol_type = other DNA
aaactatgtcttacctgatt

SEQ ID NO: 41032 - DNA, 20 bp, synthetic construct
  misc_feature 1..20: note = chemically synthesized
  source 1..20: mol_type = other DNA
ttgggactggccagcagtgc

SEQ ID NO: 41033 - DNA, 20 bp, synthetic construct
  misc_feature 1..20: note = chemically synthesized
  source 1..20: mol_type = other DNA
ctactaagtaggctgaggca

SEQ ID NO: 41034 - DNA, 20 bp, synthetic construct
  misc_feature 1..20: note = chemically synthesized
  source 1..20: mol_type = other DNA
agatggaggttgcagtgagc

SEQ ID NO: 41035 - DNA, 20 bp, synthetic construct
  misc_feature 1..20: note = chemically synthesized
  source 1..20: mol_type = other DNA
ctccagcctgggtgacagag

SEQ ID NO: 41036 - DNA, 20 bp, synthetic construct
  misc_feature 1..20: note = chemically synthesized
  source 1..20: mol_type = other DNA
cagagcaagaatgtctcagg

SEQ ID NO: 41037 - DNA, 20 bp, synthetic construct
  misc_feature 1..20: note = chemically synthesized
  source 1..20: mol_type = other DNA
catgaagtaaagcaagagtg

SEQ ID NO: 41038 - DNA, 20 bp, synthetic construct
  misc_feature 1..20: note = chemically synthesized
  source 1..20: mol_type = other DNA
accctctacctccttcccta

SEQ ID NO: 41039 - DNA, 20 bp, synthetic construct
  misc_feature 1..20: note = chemically synthesized
  source 1..20: mol_type = other DNA
agtggatttgactcttccat

SEQ ID NO: 41040 - DNA, 20 bp, synthetic construct
  misc_feature 1..20: note = chemically synthesized
  source 1..20: mol_type = other DNA
cacagggagctgggcttcct

SEQ ID NO: 41041 - DNA, 20 bp, synthetic construct
  misc_feature 1..20: note = chemically synthesized
  source 1..20: mol_type = other DNA
tacctgtgtttaaaaagatg

SEQ ID NO: 41042 - DNA, 20 bp, synthetic construct
  misc_feature 1..20: note = chemically synthesized
  source 1..20: mol_type = other DNA
ttctttgcttttaaaaccat

SEQ ID NO: 41043 - DNA, 20 bp, synthetic construct
  misc_feature 1..20: note = chemically synthesized
  source 1..20: mol_type = other DNA
taatgtttaaatgtagagtc

SEQ ID NO: 41044 - DNA, 20 bp, synthetic construct
  misc_feature 1..20: note = chemically synthesized
  source 1..20: mol_type = other DNA
gtacattttattgcaataaa

SEQ ID NO: 41045 - DNA, 20 bp, synthetic construct
  misc_feature 1..20: note = chemically synthesized
  source 1..20: mol_type = other DNA
tatgacagtgtaaaatgtca

SEQ ID NO: 41046 - DNA, 20 bp, synthetic construct
  misc_feature 1..20: note = chemically synthesized
  source 1..20: mol_type = other DNA
ttttgcaagcccagctttca

SEQ ID NO: 41047 - DNA, 20 bp, synthetic construct
  misc_feature 1..20: note = chemically synthesized
  source 1..20: mol_type = other DNA
cttagatcattgactttggt

SEQ ID NO: 41048 - DNA, 20 bp, synthetic construct
  misc_feature 1..20: note = chemically synthesized
  source 1..20: mol_type = other DNA
gtgtgagggagcaccgttct

SEQ ID NO: 41049 - DNA, 20 bp, synthetic construct
  misc_feature 1..20: note = chemically synthesized
  source 1..20: mol_type = other DNA
cctgatgtcattattgacat

SEQ ID NO: 41050 - DNA, 20 bp, synthetic construct
  misc_feature 1..20: note = chemically synthesized
  source 1..20: mol_type = other DNA
tcatggtctagttagtgttc

SEQ ID NO: 41051 - DNA, 20 bp, synthetic construct
  misc_feature 1..20: note = chemically synthesized
  source 1..20: mol_type = other DNA
agcctagtgggggatggtgg

SEQ ID NO: 41052 - DNA, 20 bp, synthetic construct
  misc_feature 1..20: note = chemically synthesized
  source 1..20: mol_type = other DNA
gtgtggatggttgtggggca

SEQ ID NO: 41053 - DNA, 20 bp, synthetic construct
  misc_feature 1..20: note = chemically synthesized
  source 1..20: mol_type = other DNA
tgatgataatggtgatggtg

SEQ ID NO: 41054 - DNA, 20 bp, synthetic construct
  misc_feature 1..20: note = chemically synthesized
  source 1..20: mol_type = other DNA
ggtctcacctgcaggtccac

SEQ ID NO: 41055 - DNA, 20 bp, synthetic construct
  misc_feature 1..20: note = chemically synthesized
  source 1..20: mol_type = other DNA
ctctgcccgatgcttggtag

SEQ ID NO: 41056 - DNA, 20 bp, synthetic construct
  misc_feature 1..20: note = chemically synthesized
  source 1..20: mol_type = other DNA
tgcagtcaaaggctctgggg

SEQ ID NO: 41057 - DNA, 20 bp, synthetic construct
  misc_feature 1..20: note = chemically synthesized
  source 1..20: mol_type = other DNA
tgaaagctgggcttgcaaaa

SEQ ID NO: 41058 - DNA, 20 bp, synthetic construct
  misc_feature 1..20: note = chemically synthesized
  source 1..20: mol_type = other DNA
ccgttctatttgaatttggc

SEQ ID NO: 41059 - DNA, 20 bp, synthetic construct
  misc_feature 1..20: note = chemically synthesized
  source 1..20: mol_type = other DNA
aaataaagcagtttttcaca

SEQ ID NO: 41060 - DNA, 20 bp, synthetic construct
  misc_feature 1..20: note = chemically synthesized
  source 1..20: mol_type = other DNA
caaaagaataaacacaacca

SEQ ID NO: 41061 - DNA, 20 bp, synthetic construct
  misc_feature 1..20: note = chemically synthesized
  source 1..20: mol_type = other DNA
aattgtcaaagaagtataaa

SEQ ID NO: 41062 - DNA, 20 bp, synthetic construct
  misc_feature 1..20: note = chemically synthesized
  source 1..20: mol_type = other DNA
ttttacactgtcataacctt

SEQ ID NO: 41063 - DNA, 20 bp, synthetic construct
  misc_feature 1..20: note = chemically synthesized
  source 1..20: mol_type = other DNA
attggcagtgttattgggag

SEQ ID NO: 41064 - DNA, 20 bp, synthetic construct
  misc_feature 1..20: note = chemically synthesized
  source 1..20: mol_type = other DNA
taatttatgggaacttaggc

SEQ ID NO: 41065 - DNA, 20 bp, synthetic construct
  misc_feature 1..20: note = chemically synthesized
  source 1..20: mol_type = other DNA
gctcagaaaatattaaggaa

SEQ ID NO: 41066 - DNA, 20 bp, synthetic construct
  misc_feature 1..20: note = chemically synthesized
  source 1..20: mol_type = other DNA
gtgcaaccatcatcatattt

SEQ ID NO: 41067 - DNA, 20 bp, synthetic construct
  misc_feature 1..20: note = chemically synthesized
  source 1..20: mol_type = other DNA
ttctttatggttttaaaagc

SEQ ID NO: 41068 - DNA, 20 bp, synthetic construct
  misc_feature 1..20: note = chemically synthesized
  source 1..20: mol_type = other DNA
ttaaaagcaaagaaaaaggt

SEQ ID NO: 41069 - DNA, 20 bp, synthetic construct
  misc_feature 1..20: note = chemically synthesized
  source 1..20: mol_type = other DNA
gaagcccagctccctgtgat

SEQ ID NO: 41070 - DNA, 20 bp, synthetic construct
  misc_feature 1..20: note = chemically synthesized
  source 1..20: mol_type = other DNA
aggcattgacagttgcaagg

SEQ ID NO: 41071 - DNA, 20 bp, synthetic construct
  misc_feature 1..20: note = chemically synthesized
  source 1..20: mol_type = other DNA
gaccccagtctaagtgttgc

SEQ ID NO: 41072 - DNA, 20 bp, synthetic construct
  misc_feature 1..20: note = chemically synthesized
  source 1..20: mol_type = other DNA
atttatttaagccacaacta

SEQ ID NO: 41073 - DNA, 20 bp, synthetic construct
  misc_feature 1..20: note = chemically synthesized
  source 1..20: mol_type = other DNA
ttataacataatttataatt

SEQ ID NO: 41074 - DNA, 20 bp, synthetic construct
  misc_feature 1..20: note = chemically synthesized
  source 1..20: mol_type = other DNA
ttatgattttattttatcca

SEQ ID NO: 41075 - DNA, 20 bp, synthetic construct
  misc_feature 1..20: note = chemically synthesized
  source 1..20: mol_type = other DNA
ttttattttatccaaaagaa

SEQ ID NO: 41076 - DNA, 20 bp, synthetic construct
  misc_feature 1..20: note = chemically synthesized
  source 1..20: mol_type = other DNA
gccagtggcatgggtctctg

SEQ ID NO: 41077 - DNA, 20 bp, synthetic construct
  misc_feature 1..20: note = chemically synthesized
  source 1..20: mol_type = other DNA
gacatagtttttttaaatta

SEQ ID NO: 41078 - DNA, 20 bp, synthetic construct
  misc_feature 1..20: note = chemically synthesized
  source 1..20: mol_type = other DNA
cacggtgctggaatgaatgg

SEQ ID NO: 41079 - DNA, 20 bp, synthetic construct
  misc_feature 1..20: note = chemically synthesized
  source 1..20: mol_type = other DNA
tacatttgcttcttatccct

SEQ ID NO: 41080 - DNA, 20 bp, synthetic construct
  misc_feature 1..20: note = chemically synthesized
  source 1..20: mol_type = other DNA
gtcatccccattttataaac

SEQ ID NO: 41081 - DNA, 20 bp, synthetic construct
  misc_feature 1..20: note = chemically synthesized
  source 1..20: mol_type = other DNA
aattcccaaatcaaggaaat

SEQ ID NO: 41082 - DNA, 20 bp, synthetic construct
  misc_feature 1..20: note = chemically synthesized
  source 1..20: mol_type = other DNA
ctggatttaagccagatttc

SEQ ID NO: 41083 - DNA, 20 bp, synthetic construct
  misc_feature 1..20: note = chemically synthesized
  source 1..20: mol_type = other DNA
aggttaattgtttgccactt

SEQ ID NO: 41084 - DNA, 20 bp, synthetic construct
  misc_feature 1..20: note = chemically synthesized
  source 1..20: mol_type = other DNA
agaagagagaagtctggtat

SEQ ID NO: 41085 - DNA, 20 bp, synthetic construct
  misc_feature 1..20: note = chemically synthesized
  source 1..20: mol_type = other DNA
cttccaaagctagcttaggg

SEQ ID NO: 41086 - DNA, 20 bp, synthetic construct
  misc_feature 1..20: note = chemically synthesized
  source 1..20: mol_type = other DNA
cgtactacttcactttagga

SEQ ID NO: 41087 - DNA, 20 bp, synthetic construct
  misc_feature 1..20: note = chemically synthesized
  source 1..20: mol_type = other DNA
tgaatttagtggaagccatt

SEQ ID NO: 41088 - DNA, 20 bp, synthetic construct
  misc_feature 1..20: note = chemically synthesized
  source 1..20: mol_type = other DNA
aagccattcaagaaaatatc

SEQ ID NO: 41089 - DNA, 20 bp, synthetic construct
  misc_feature 1..20: note = chemically synthesized
  source 1..20: mol_type = other DNA
agccatgctcagtgagaagc

SEQ ID NO: 41090 - DNA, 20 bp, synthetic construct
  misc_feature 1..20: note = chemically synthesized
  source 1..20: mol_type = other DNA
cattcacacaccacagtgag

SEQ ID NO: 41091 - DNA, 20 bp, synthetic construct
  misc_feature 1..20: note = chemically synthesized
  source 1..20: mol_type = other DNA
atgagccctggaggtgaatc

SEQ ID NO: 41092 - DNA, 20 bp, synthetic construct
  misc_feature 1..20: note = chemically synthesized
  source 1..20: mol_type = other DNA
gaaaaatcatcaggttaaaa

SEQ ID NO: 41093 - DNA, 20 bp, synthetic construct
  misc_feature 1..20: note = chemically synthesized
  source 1..20: mol_type = other DNA
ttgaagtcacactgtgagct

SEQ ID NO: 41094 - DNA, 20 bp, synthetic construct
  misc_feature 1..20: note = chemically synthesized
  source 1..20: mol_type = other DNA
cctggaaaagagagttcaaa

SEQ ID NO: 41095 - DNA, 20 bp, synthetic construct
  misc_feature 1..20: note = chemically synthesized
  source 1..20: mol_type = other DNA
tgctttttagtggattaggt

SEQ ID NO: 41096 - DNA, 20 bp, synthetic construct
  misc_feature 1..20: note = chemically synthesized
  source 1..20: mol_type = other DNA
gaggtcaggacaggcctttc

SEQ ID NO: 41097 - DNA, 20 bp, synthetic construct
  misc_feature 1..20: note = chemically synthesized
  source 1..20: mol_type = other DNA
aggacaggcctttctgagaa

SEQ ID NO: 41098 - DNA, 20 bp, synthetic construct
  misc_feature 1..20: note = chemically synthesized
  source 1..20: mol_type = other DNA
ccaccctttgccacaaccag

SEQ ID NO: 41099 - DNA, 20 bp, synthetic construct
  misc_feature 1..20: note = chemically synthesized
  source 1..20: mol_type = other DNA
gttgcctcagatttgatctc

SEQ ID NO: 41100 - DNA, 20 bp, synthetic construct
  misc_feature 1..20: note = chemically synthesized
  source 1..20: mol_type = other DNA
tacaaccaatgcacatattg

SEQ ID NO: 41101 - DNA, 20 bp, synthetic construct
  misc_feature 1..20: note = chemically synthesized
  source 1..20: mol_type = other DNA
gcaggaggtggaagcccctg

SEQ ID NO: 41102 - DNA, 20 bp, synthetic construct
  misc_feature 1..20: note = chemically synthesized
  source 1..20: mol_type = other DNA
ccctgagagaatggaggtct

SEQ ID NO: 41103 - DNA, 20 bp, synthetic construct
  misc_feature 1..20: note = chemically synthesized
  source 1..20: mol_type = other DNA
ggaggagggggaatacctag

SEQ ID NO: 41104 - DNA, 20 bp, synthetic construct
  misc_feature 1..20: note = chemically synthesized
  source 1..20: mol_type = other DNA
agggggaatacctaggtaga

SEQ ID NO: 41105 - DNA, 20 bp, synthetic construct
  misc_feature 1..20: note = chemically synthesized
  source 1..20: mol_type = other DNA
ctcactgtgcagttaacttt

SEQ ID NO: 41106 - DNA, 20 bp, synthetic construct
  misc_feature 1..20: note = chemically synthesized
  source 1..20: mol_type = other DNA
tagggagggaagagggcaaa

SEQ ID NO: 41107 - DNA, 20 bp, synthetic construct
  misc_feature 1..20: note = chemically synthesized
  source 1..20: mol_type = other DNA
agaagcaatgcagccattac

SEQ ID NO: 41108 - DNA, 20 bp, synthetic construct
  misc_feature 1..20: note = chemically synthesized
  source 1..20: mol_type = other DNA
acacctgtatcacaggtgtt

SEQ ID NO: 41109 - DNA, 20 bp, synthetic construct
  misc_feature 1..20: note = chemically synthesized
  source 1..20: mol_type = other DNA
tatcacaggtgttaaagaaa

SEQ ID NO: 41110 - DNA, 20 bp, synthetic construct
  misc_feature 1..20: note = chemically synthesized
  source 1..20: mol_type = other DNA
accgttaatgcccttgggct

SEQ ID NO: 41111 - DNA, 20 bp, synthetic construct
  misc_feature 1..20: note = chemically synthesized
  source 1..20: mol_type = other DNA
acctccagcacacagcaggg

SEQ ID NO: 41112 - DNA, 20 bp, synthetic construct
  misc_feature 1..20: note = chemically synthesized
  source 1..20: mol_type = other DNA
gctgcccccaagctgtagag

SEQ ID NO: 41113 - DNA, 20 bp, synthetic construct
  misc_feature 1..20: note = chemically synthesized
  source 1..20: mol_type = other DNA
agagccagaatataaagctg

SEQ ID NO: 41114 - DNA, 20 bp, synthetic construct
  misc_feature 1..20: note = chemically synthesized
  source 1..20: mol_type = other DNA
ccagaagtggttcttgagga

SEQ ID NO: 41115 - DNA, 20 bp, synthetic construct
  misc_feature 1..20: note = chemically synthesized
  source 1..20: mol_type = other DNA
tgattgctcctaagttctct

SEQ ID NO: 41116 - DNA, 20 bp, synthetic construct
  misc_feature 1..20: note = chemically synthesized
  source 1..20: mol_type = other DNA
gttctctggagaaagagatg

SEQ ID NO: 41117 - DNA, 20 bp, synthetic construct
  misc_feature 1..20: note = chemically synthesized
  source 1..20: mol_type = other DNA
atgagagttttaactcctgt

SEQ ID NO: 41118 - DNA, 20 bp, synthetic construct
  misc_feature 1..20: note = chemically synthesized
  source 1..20: mol_type = other DNA
ctgatgaaacttttttgcca

SEQ ID NO: 41119 - DNA, 20 bp, synthetic construct
  misc_feature 1..20: note = chemically synthesized
  source 1..20: mol_type = other DNA
aagctttctaatttatattg

SEQ ID NO: 41120 - DNA, 20 bp, synthetic construct
  misc_feature 1..20: note = chemically synthesized
  source 1..20: mol_type = other DNA
taatgttgcagctcggggac

SEQ ID NO: 41121 - DNA, 20 bp, synthetic construct
  misc_feature 1..20: note = chemically synthesized
  source 1..20: mol_type = other DNA
cagcagaggcaaagcagcca

SEQ ID NO: 41122 - DNA, 20 bp, synthetic construct
  misc_feature 1..20: note = chemically synthesized
  source 1..20: mol_type = other DNA
tataaacaaaaaactgccag

SEQ ID NO: 41123 - DNA, 20 bp, synthetic construct
  misc_feature 1..20: note = chemically synthesized
  source 1..20: mol_type = other DNA
ctaatctgaattataaaaac

SEQ ID NO: 41124 - DNA, 20 bp, synthetic construct
  misc_feature 1..20: note = chemically synthesized
  source 1..20: mol_type = other DNA
ccagggtaactgtgtgtact

SEQ ID NO: 41125 - DNA, 20 bp, synthetic construct
  misc_feature 1..20: note = chemically synthesized
  source 1..20: mol_type = other DNA
aagggaagtaatgagacatt

SEQ ID NO: 41126 - DNA, 20 bp, synthetic construct
  misc_feature 1..20: note = chemically synthesized
  source 1..20: mol_type = other DNA
atagacatacttattagctg

SEQ ID NO: 41127 - DNA, 20 bp, synthetic construct
  misc_feature 1..20: note = chemically synthesized
  source 1..20: mol_type = other DNA
gccattagagctgtctctac

SEQ ID NO: 41128 - DNA, 20 bp, synthetic construct
  misc_feature 1..20: note = chemically synthesized
  source 1..20: mol_type = other DNA
cgtttggcccctcttacaac

SEQ ID NO: 41129 - DNA, 20 bp, synthetic construct
  misc_feature 1..20: note = chemically synthesized
  source 1..20: mol_type = other DNA
atgcatgtgtacacttgtgc

SEQ ID NO: 41130 - DNA, 20 bp, synthetic construct
  misc_feature 1..20: note = chemically synthesized
  source 1..20: mol_type = other DNA
gtgttaatttgctcaagcaa

SEQ ID NO: 41131 - DNA, 20 bp, synthetic construct
  misc_feature 1..20: note = chemically synthesized
  source 1..20: mol_type = other DNA
actgtaagtcagaaatgagc

SEQ ID NO: 41132 - DNA, 20 bp, synthetic construct
  misc_feature 1..20: note = chemically synthesized
  source 1..20: mol_type = other DNA
aactctttctctacaggagt

SEQ ID NO: 41133 - DNA, 20 bp, synthetic construct
  misc_feature 1..20: note = chemically synthesized
  source 1..20: mol_type = other DNA
tcagccaacaccagaagtcc

SEQ ID NO: 41134 - DNA, 20 bp, synthetic construct
  misc_feature 1..20: note = chemically synthesized
  source 1..20: mol_type = other DNA
ctctgggagcttcaccccac

SEQ ID NO: 41135 - DNA, 20 bp, synthetic construct
  misc_feature 1..20: note = chemically synthesized
  source 1..20: mol_type = other DNA
taggggcagggaccagtgca

SEQ ID NO: 41136 - DNA, 20 bp, synthetic construct
  misc_feature 1..20: note = chemically synthesized
  source 1..20: mol_type = other DNA
atttaatatgctctatgctg

SEQ ID NO: 41137 - DNA, 20 bp, synthetic construct
  misc_feature 1..20: note = chemically synthesized
  source 1..20: mol_type = other DNA
tatagctcacagtgtgactt

SEQ ID NO: 41138 - DNA, 20 bp, synthetic construct
  misc_feature 1..20: note = chemically synthesized
  source 1..20: mol_type = other DNA
catgttgctaggaaatatcc

SEQ ID NO: 41139 - DNA, 20 bp, synthetic construct
  misc_feature 1..20: note = chemically synthesized
  source 1..20: mol_type = other DNA
aatgtgccccccaggtcgat

SEQ ID NO: 41140 - DNA, 20 bp, synthetic construct
  misc_feature 1..20: note = chemically synthesized
  source 1..20: mol_type = other DNA
catagacaccaatttcccca

SEQ ID NO: 41141 - DNA, 20 bp, synthetic construct
  misc_feature 1..20: note = chemically synthesized
  source 1..20: mol_type = other DNA
aaaccaaagcatgcccacta

SEQ ID NO: 41142 - DNA, 20 bp, synthetic construct
  misc_feature 1..20: note = chemically synthesized
  source 1..20: mol_type = other DNA
aaataattcttataatttaa

SEQ ID NO: 41143 - DNA, 20 bp, synthetic construct
  misc_feature 1..20: note = chemically synthesized
  source 1..20: mol_type = other DNA
gacaagcctgggcaacatgc

SEQ ID NO: 41144 - DNA, 20 bp, synthetic construct
  misc_feature 1..20: note = chemically synthesized
  source 1..20: mol_type = other DNA
taaataaatatttttaaaaa

SEQ ID NO: 41145 - DNA, 20 bp, synthetic construct
  misc_feature 1..20: note = chemically synthesized
  source 1..20: mol_type = other DNA
gttaggaggctcctcccgtt

SEQ ID NO: 41146 - DNA, 20 bp, synthetic construct
  misc_feature 1..20: note = chemically synthesized
  source 1..20: mol_type = other DNA
catataagagtctatgttcc

SEQ ID NO: 41147 - DNA, 20 bp, synthetic construct
  misc_feature 1..20: note = chemically synthesized
  source 1..20: mol_type = other DNA
tttacctttttctttgcttt

SEQ ID NO: 41148 - DNA, 20 bp, synthetic construct
  misc_feature 1..20: note = chemically synthesized
  source 1..20: mol_type = other DNA
gacagtgtaaaatgtcacta

SEQ ID NO: 41149 - DNA, 20 bp, synthetic construct
  misc_feature 1..20: note = chemically synthesized
  source 1..20: mol_type = other DNA
gttgtgtttattcttttgtg

SEQ ID NO: 41150 - DNA, 20 bp, synthetic construct
  misc_feature 1..20: note = chemically synthesized
  source 1..20: mol_type = other DNA
gcaaacatcctgataatggt

SEQ ID NO: 41151 - DNA, 20 bp, synthetic construct
  misc_feature 1..20: note = chemically synthesized
  source 1..20: mol_type = other DNA
aaacatgaaggggagagcag

SEQ ID NO: 41152 - DNA, 20 bp, synthetic construct
  misc_feature 1..20: note = chemically synthesized
  source 1..20: mol_type = other DNA
aactagaccatgaggtgcca

SEQ ID NO: 41153 - DNA, 20 bp, synthetic construct
  misc_feature 1..20: note = chemically synthesized
  source 1..20: mol_type = other DNA
aagctgggcttgcaaaatta

SEQ ID NO: 41154 - DNA, 20 bp, synthetic construct
  misc_feature 1..20: note = chemically synthesized
  source 1..20: mol_type = other DNA
ccctgggtgtgtccatctgg

SEQ ID NO: 41155 - DNA, 20 bp, synthetic construct
  misc_feature 1..20: note = chemically synthesized
  source 1..20: mol_type = other DNA
atgaagatcatagcactata

SEQ ID NO: 41156 - DNA, 20 bp, synthetic construct
  misc_feature 1..20: note = chemically synthesized
  source 1..20: mol_type = other DNA
tacaaaaagtctgaaaatat

SEQ ID NO: 41157 - DNA, 20 bp, synthetic construct
  misc_feature 1..20: note = chemically synthesized
  source 1..20: mol_type = other DNA
taacataatttataattaca

SEQ ID NO: 41158 - DNA, 20 bp, synthetic construct
  misc_feature 1..20: note = chemically synthesized
  source 1..20: mol_type = other DNA
agcctgctctgctacatttc

SEQ ID NO: 41159 - DNA, 20 bp, synthetic construct
  misc_feature 1..20: note = chemically synthesized
  source 1..20: mol_type = other DNA
gatgcctatcaacaccttgg

SEQ ID NO: 41160 - DNA, 20 bp, synthetic construct
  misc_feature 1..20: note = chemically synthesized
  source 1..20: mol_type = other DNA
agaaagagttgaaattgtga

SEQ ID NO: 41161 - DNA, 20 bp, synthetic construct
  misc_feature 1..20: note = chemically synthesized
  source 1..20: mol_type = other DNA
ctacttgatttatataaaca

SEQ ID NO: 41162 - DNA, 20 bp, synthetic construct
  misc_feature 1..20: note = chemically synthesized
  source 1..20: mol_type = other DNA
taaagactaatctgaattat

SEQ ID NO: 41163 - DNA, 20 bp, synthetic construct
  misc_feature 1..20: note = chemically synthesized
  source 1..20: mol_type = other DNA
gacgttgattccagggtacc

SEQ ID NO: 41164 - DNA, 20 bp, synthetic construct
  misc_feature 1..20: note = chemically synthesized
  source 1..20: mol_type = other DNA
cctagaaaaataaaaaaatc

SEQ ID NO: 41165 - DNA, 20 bp, synthetic construct
  misc_feature 1..20: note = chemically synthesized
  source 1..20: mol_type = other DNA
ccacaccctcacagacataa

SEQ ID NO: 41166 - DNA, 20 bp, synthetic construct
  misc_feature 1..20: note = chemically synthesized
  source 1..20: mol_type = other DNA
tgctgatatgaacaacactt

SEQ ID NO: 41167 - DNA, 20 bp, synthetic construct
  misc_feature 1..20: note = chemically synthesized
  source 1..20: mol_type = other DNA
caaaatcctagaggtctcca

SEQ ID NO: 41168 - DNA, 20 bp, synthetic construct
  misc_feature 1..20: note = chemically synthesized
  source 1..20: mol_type = other DNA
tcatgtggcccaaatggcag

SEQ ID NO: 41169 - DNA, 20 bp, synthetic construct
  misc_feature 1..20: note = chemically synthesized
  source 1..20: mol_type = other DNA
cagctttcacagcagcctgg

SEQ ID NO: 41170 - DNA, 20 bp, synthetic construct
  misc_feature 1..20: note = chemically synthesized
  source 1..20: mol_type = other DNA
gaggggccaaacgcagcaag

SEQ ID NO: 41171 - DNA, 20 bp, synthetic construct
  misc_feature 1..20: note = chemically synthesized
  source 1..20: mol_type = other DNA
tagaaagtccctaaatttta

SEQ ID NO: 41172 - DNA, 20 bp, synthetic construct
  misc_feature 1..20: note = chemically synthesized
  source 1..20: mol_type = other DNA
atgtctcaccaataagttca

SEQ ID NO: 41173 - DNA, 20 bp, synthetic construct
  misc_feature 1..20: note = chemically synthesized
  source 1..20: mol_type = other DNA
agcgagcaaggtctctccaa

SEQ ID NO: 41174 - DNA, 20 bp, synthetic construct
  misc_feature 1..20: note = chemically synthesized
  source 1..20: mol_type = other DNA
ggccttgtcagctgaaggca

SEQ ID NO: 41175 - DNA, 20 bp, synthetic construct
  misc_feature 1..20: note = chemically synthesized
  source 1..20: mol_type = other DNA
caattggagtcaccacttgg

SEQ ID NO: 41176 - DNA, 20 bp, synthetic construct
  misc_feature 1..20: note = chemically synthesized
  source 1..20: mol_type = other DNA
cagtccctccagggatggga

SEQ ID NO: 41177 - DNA, 20 bp, synthetic construct
  misc_feature 1..20: note = chemically synthesized
  source 1..20: mol_type = other DNA
ctccagggatgggatattgt

SEQ ID NO: 41178 - DNA, 20 bp, synthetic construct
  misc_feature 1..20: note = chemically synthesized
  source 1..20: mol_type = other DNA
ttctaggtagagacagctct

SEQ ID NO: 41179 - DNA, 20 bp, synthetic construct
  misc_feature 1..20: note = chemically synthesized
  source 1..20: mol_type = other DNA
gtagagacagctctaatggc

SEQ ID NO: 41180 - DNA, 20 bp, synthetic construct
  misc_feature 1..20: note = chemically synthesized
  source 1..20: mol_type = other DNA
ctttaactggggaaccacaa

SEQ ID NO: 41181 - DNA, 20 bp, synthetic construct
  misc_feature 1..20: note = chemically synthesized
  source 1..20: mol_type = other DNA
gtaacaggttcgagtctgga

SEQ ID NO: 41182 - DNA, 20 bp, synthetic construct
  misc_feature 1..20: note = chemically synthesized
  source 1..20: mol_type = other DNA
tctggaaattgattgagggc

SEQ ID NO: 41183 - DNA, 20 bp, synthetic construct
  misc_feature 1..20: note = chemically synthesized
  source 1..20: mol_type = other DNA
ttgattgagggcccatgatt

SEQ ID NO: 41184 - DNA, 20 bp, synthetic construct
  misc_feature 1..20: note = chemically synthesized
  source 1..20: mol_type = other DNA
atgattctctgtttttataa

SEQ ID NO: 41185 - DNA, 20 bp, synthetic construct
  misc_feature 1..20: note = chemically synthesized
  source 1..20: mol_type = other DNA
gtctttagtccattctacct

SEQ ID NO: 41186 - DNA, 20 bp, synthetic construct
  misc_feature 1..20: note = chemically synthesized
  source 1..20: mol_type = other DNA
gtccattctacctggcagtt

SEQ ID NO: 41187 - DNA, 20 bp, synthetic construct
  misc_feature 1..20: note = chemically synthesized
  source 1..20: mol_type = other DNA
ataaatcaagtaggaataca

SEQ ID NO: 41188 - DNA, 20 bp, synthetic construct
  misc_feature 1..20: note = chemically synthesized
  source 1..20: mol_type = other DNA
caatttcacttctaggaaca

SEQ ID NO: 41189 - DNA, 20 bp, synthetic construct
  misc_feature 1..20: note = chemically synthesized
  source 1..20: mol_type = other DNA
atgagtcagactattctgat

SEQ ID NO: 41190 - DNA, 20 bp, synthetic construct
  misc_feature 1..20: note = chemically synthesized
  source 1..20: mol_type = other DNA
gctctcacaaatctatttca

SEQ ID NO: 41191 - DNA, 20 bp, synthetic construct
  misc_feature 1..20: note = chemically synthesized
  source 1..20: mol_type = other DNA
tgcctcagcctcccaagtag

SEQ ID NO: 41192 - DNA, 20 bp, synthetic construct
  misc_feature 1..20: note = chemically synthesized
  source 1..20: mol_type = other DNA
ttttgtatttttagcagaga

SEQ ID NO: 41193 - DNA, 20 bp, synthetic construct
  misc_feature 1..20: note = chemically synthesized
  source 1..20: mol_type = other DNA
cgcccccgcctcccaaggtg

SEQ ID NO: 41194 - DNA, 20 bp, synthetic construct
  misc_feature 1..20: note = chemically synthesized
  source 1..20: mol_type = other DNA
agtagggccaaaccaataaa

SEQ ID NO: 41195 - DNA, 20 bp, synthetic construct
  misc_feature 1..20: note = chemically synthesized
  source 1..20: mol_type = other DNA
atccattcccatgcctgttc

SEQ ID NO: 41196 - DNA, 20 bp, synthetic construct
  misc_feature 1..20: note = chemically synthesized
  source 1..20: mol_type = other DNA
atttctgccaatataaatta

SEQ ID NO: 41197 - DNA, 20 bp, synthetic construct
  misc_feature 1..20: note = chemically synthesized
  source 1..20: mol_type = other DNA
cactgttgcctcaagcagtg

SEQ ID NO: 41198 - DNA, 20 bp, synthetic construct
  misc_feature 1..20: note = chemically synthesized
  source 1..20: mol_type = other DNA
accactactggggatgggga

SEQ ID NO: 41199 - DNA, 20 bp, synthetic construct
  misc_feature 1..20: note = chemically synthesized
  source 1..20: mol_type = other DNA
gaaactgtttcttctggcaa

SEQ ID NO: 41200 - DNA, 20 bp, synthetic construct
  misc_feature 1..20: note = chemically synthesized
  source 1..20: mol_type = other DNA
gagttcacaaactcagtgtc

SEQ ID NO: 41201 - DNA, 20 bp, synthetic construct
  misc_feature 1..20: note = chemically synthesized
  source 1..20: mol_type = other DNA
agatcagctactcgcatgat

SEQ ID NO: 41202 - DNA, 20 bp, synthetic construct
  misc_feature 1..20: note = chemically synthesized
  source 1..20: mol_type = other DNA
ctcgcatgataacagcttgt

SEQ ID NO: 41203 - DNA, 20 bp, synthetic construct
  misc_feature 1..20: note = chemically synthesized
  source 1..20: mol_type = other DNA
ctctcattcagggcaatctt

SEQ ID NO: 41204 - DNA, 20 bp, synthetic construct
  misc_feature 1..20: note = chemically synthesized
  source 1..20: mol_type = other DNA
tagcagatttgtggctcagt

SEQ ID NO: 41205 - DNA, 20 bp, synthetic construct
  misc_feature 1..20: note = chemically synthesized
  source 1..20: mol_type = other DNA
tctagagggacagaactaat

SEQ ID NO: 41206 - DNA, 20 bp, synthetic construct
  misc_feature 1..20: note = chemically synthesized
  source 1..20: mol_type = other DNA
atagatatactcacacaaag

SEQ ID NO: 41207 - DNA, 20 bp, synthetic construct
  misc_feature 1..20: note = chemically synthesized
  source 1..20: mol_type = other DNA
ttattaagtggtattaactc

SEQ ID NO: 41208 - DNA, 20 bp, synthetic construct
  misc_feature 1..20: note = chemically synthesized
  source 1..20: mol_type = other DNA
tagcctttttacatttttct

SEQ ID NO: 41209 - DNA, 20 bp, synthetic construct
  misc_feature 1..20: note = chemically synthesized
  source 1..20: mol_type = other DNA
ccagctttatattctggctc

SEQ ID NO: 41210 - DNA, 20 bp, synthetic construct
  misc_feature 1..20: note = chemically synthesized
  source 1..20: mol_type = other DNA
cagcaggggcaggggcctca

SEQ ID NO: 41211 - DNA, 20 bp, synthetic construct
  misc_feature 1..20: note = chemically synthesized
  source 1..20: mol_type = other DNA
aaggactttcagtcacctct

SEQ ID NO: 41212 - DNA, 20 bp, synthetic construct
  misc_feature 1..20: note = chemically synthesized
  source 1..20: mol_type = other DNA
agaggggctgtgggttgtct

SEQ ID NO: 41213 - DNA, 20 bp, synthetic construct
  misc_feature 1..20: note = chemically synthesized
  source 1..20: mol_type = other DNA
tgagcccatactttaatctc

SEQ ID NO: 41214 - DNA, 20 bp, synthetic construct
  misc_feature 1..20: note = chemically synthesized
  source 1..20: mol_type = other DNA
tttttaaaaatcatatttat

SEQ ID NO: 41215 - DNA, 20 bp, synthetic construct
  misc_feature 1..20: note = chemically synthesized
  source 1..20: mol_type = other DNA
tattaagaatacaagaagta

SEQ ID NO: 41216 - DNA, 20 bp, synthetic construct
  misc_feature 1..20: note = chemically synthesized
  source 1..20: mol_type = other DNA
aatacaagaagtacaatgtt

SEQ ID NO: 41217 - DNA, 20 bp, synthetic construct
  misc_feature 1..20: note = chemically synthesized
  source 1..20: mol_type = other DNA
ttctttaacacctgtgatac

SEQ ID NO: 41218 - DNA, 20 bp, synthetic construct
  misc_feature 1..20: note = chemically synthesized
  source 1..20: mol_type = other DNA
tgaattctacgtaatggctg

SEQ ID NO: 41219 - DNA, 20 bp, synthetic construct
  misc_feature 1..20: note = chemically synthesized
  source 1..20: mol_type = other DNA
tgcaggacttgggtaatctc

SEQ ID NO: 41220 - DNA, 20 bp, synthetic construct
  misc_feature 1..20: note = chemically synthesized
  source 1..20: mol_type = other DNA
acttgggtaatctctggggt

SEQ ID NO: 41221 - DNA, 20 bp, synthetic construct
  misc_feature 1..20: note = chemically synthesized
  source 1..20: mol_type = other DNA
ctccagacctccattctctc

SEQ ID NO: 41222 - DNA, 20 bp, synthetic construct
  misc_feature 1..20: note = chemically synthesized
  source 1..20: mol_type = other DNA
aaatcttaaataagaataaa

SEQ ID NO: 41223 - DNA, 20 bp, synthetic construct
  misc_feature 1..20: note = chemically synthesized
  source 1..20: mol_type = other DNA
taagaataaatcatgtttgc

SEQ ID NO: 41224 - DNA, 20 bp, synthetic construct
  misc_feature 1..20: note = chemically synthesized
  source 1..20: mol_type = other DNA
catcagtggcaactgtgttg

SEQ ID NO: 41225 - DNA, 20 bp, synthetic construct
  misc_feature 1..20: note = chemically synthesized
  source 1..20: mol_type = other DNA
tagaaatgaaccttggaggc

SEQ ID NO: 41226 - DNA, 20 bp, synthetic construct
  misc_feature 1..20: note = chemically synthesized
  source 1..20: mol_type = other DNA
aatgaaccttggaggccatt

SEQ ID NO: 41227 - DNA, 20 bp, synthetic construct
  misc_feature 1..20: note = chemically synthesized
  source 1..20: mol_type = other DNA
caaagaaggccatttttgta

SEQ ID NO: 41228 - DNA, 20 bp, synthetic construct
  misc_feature 1..20: note = chemically synthesized
  source 1..20: mol_type = other DNA
ccactattagttggggagaa

SEQ ID NO: 41229 - DNA, 20 bp, synthetic construct
  misc_feature 1..20: note = chemically synthesized
  source 1..20: mol_type = other DNA
ttccaaggtgttgataggca

SEQ ID NO: 41230 - DNA, 20 bp, synthetic construct
  misc_feature 1..20: note = chemically synthesized
  source 1..20: mol_type = other DNA
gaacctgggaccaatactgc

SEQ ID NO: 41231 - DNA, 20 bp, synthetic construct
  misc_feature 1..20: note = chemically synthesized
  source 1..20: mol_type = other DNA
aggcaacaaatctgttcaaa

SEQ ID NO: 41232 - DNA, 20 bp, synthetic construct
  misc_feature 1..20: note = chemically synthesized
  source 1..20: mol_type = other DNA
aggctccttaggacacctgg

SEQ ID NO: 41233 - DNA, 20 bp, synthetic construct
  misc_feature 1..20: note = chemically synthesized
  source 1..20: mol_type = other DNA
tccatctctggcacaaaatg

SEQ ID NO: 41234 - DNA, 20 bp, synthetic construct
  misc_feature 1..20: note = chemically synthesized
  source 1..20: mol_type = other DNA
ggctaataaaatgaagatag

SEQ ID NO: 41235 - DNA, 20 bp, synthetic construct
  misc_feature 1..20: note = chemically synthesized
  source 1..20: mol_type = other DNA
gatgacacactgcagagaac

SEQ ID NO: 41236 - DNA, 20 bp, synthetic construct
  misc_feature 1..20: note = chemically synthesized
  source 1..20: mol_type = other DNA
atccagtagaaaggcagatg

SEQ ID NO: 41237 - DNA, 20 bp, synthetic construct
  misc_feature 1..20: note = chemically synthesized
  source 1..20: mol_type = other DNA
caaggaggaggatgcacgct

SEQ ID NO: 41238 - DNA, 20 bp, synthetic construct
  misc_feature 1..20: note = chemically synthesized
  source 1..20: mol_type = other DNA
aatatgctctatgctggaaa

SEQ ID NO: 41239 - DNA, 20 bp, synthetic construct
  misc_feature 1..20: note = chemically synthesized
  source 1..20: mol_type = other DNA
atatccatgtcttcaccccg

SEQ ID NO: 41240 - DNA, 20 bp, synthetic construct
  misc_feature 1..20: note = chemically synthesized
  source 1..20: mol_type = other DNA
actctcttttccaggaagag

SEQ ID NO: 41241 - DNA, 20 bp, synthetic construct
  misc_feature 1..20: note = chemically synthesized
  source 1..20: mol_type = other DNA
aaacacacaataaattaata

SEQ ID NO: 41242 - DNA, 20 bp, synthetic construct
  misc_feature 1..20: note = chemically synthesized
  source 1..20: mol_type = other DNA
gttcagttaaacattttgaa

SEQ ID NO: 41243 - DNA, 20 bp, synthetic construct
  misc_feature 1..20: note = chemically synthesized
  source 1..20: mol_type = other DNA
cctgtaactgtgtcatttta

SEQ ID NO: 41244 - DNA, 20 bp, synthetic construct
  misc_feature 1..20: note = chemically synthesized
  source 1..20: mol_type = other DNA
caatttttctttttttaacc

SEQ ID NO: 41245 - DNA, 20 bp, synthetic construct
  misc_feature 1..20: note = chemically synthesized
  source 1..20: mol_type = other DNA
tgatgatttttccacaatcc

SEQ ID NO: 41246 - DNA, 20 bp, synthetic construct
  misc_feature 1..20: note = chemically synthesized
  source 1..20: mol_type = other DNA
tttccacaatccttttgttt

SEQ ID NO: 41247 - DNA, 20 bp, synthetic construct
  misc_feature 1..20: note = chemically synthesized
  source 1..20: mol_type = other DNA
ctccagggctcatatggcaa

SEQ ID NO: 41248 - DNA, 20 bp, synthetic construct
  misc_feature 1..20: note = chemically synthesized
  source 1..20: mol_type = other DNA
atatggcaatggggatttaa

SEQ ID NO: 41249 - DNA, 20 bp, synthetic construct
  misc_feature 1..20: note = chemically synthesized
  source 1..20: mol_type = other DNA
cttagcaatttgtgaataga

SEQ ID NO: 41250 - DNA, 20 bp, synthetic construct
  misc_feature 1..20: note = chemically synthesized
  source 1..20: mol_type = other DNA
tttgtgaatagaagatgttt

SEQ ID NO: 41251 - DNA, 20 bp, synthetic construct
  misc_feature 1..20: note = chemically synthesized
  source 1..20: mol_type = other DNA
gataacacgtccacagaaag

SEQ ID NO: 41252 - DNA, 20 bp, synthetic construct
  misc_feature 1..20: note = chemically synthesized
  source 1..20: mol_type = other DNA
cagaaagcctggctttccaa

SEQ ID NO: 41253 - DNA, 20 bp, synthetic construct
  misc_feature 1..20: note = chemically synthesized
  source 1..20: mol_type = other DNA
atcagagaatgtgcccccca

SEQ ID NO: 41254 - DNA, 20 bp, synthetic construct
  misc_feature 1..20: note = chemically synthesized
  source 1..20: mol_type = other DNA
atatgttaatcctgtggcag

SEQ ID NO: 41255 - DNA, 20 bp, synthetic construct
  misc_feature 1..20: note = chemically synthesized
  source 1..20: mol_type = other DNA
aagttcacagtgatctacat

SEQ ID NO: 41256 - DNA, 20 bp, synthetic construct
  misc_feature 1..20: note = chemically synthesized
  source 1..20: mol_type = other DNA
accaatttccccaaaaaact

SEQ ID NO: 41257 - DNA, 20 bp, synthetic construct
  misc_feature 1..20: note = chemically synthesized
  source 1..20: mol_type = other DNA
ttttctttgatattttcttg

SEQ ID NO: 41258 - DNA, 20 bp, synthetic construct
  misc_feature 1..20: note = chemically synthesized
  source 1..20: mol_type = other DNA
atggcttccactaaattcaa

SEQ ID NO: 41259 - DNA, 20 bp, synthetic construct
  misc_feature 1..20: note = chemically synthesized
  source 1..20: mol_type = other DNA
taaaattttatctggtaatt

SEQ ID NO: 41260 - DNA, 20 bp, synthetic construct
  misc_feature 1..20: note = chemically synthesized
  source 1..20: mol_type = other DNA
gcaagttcatctaactatgt

SEQ ID NO: 41261 - DNA, 20 bp, synthetic construct
  misc_feature 1..20: note = chemically synthesized
  source 1..20: mol_type = other DNA
gatggaactcctgagttcac

SEQ ID NO: 41262 - DNA, 20 bp, synthetic construct
  misc_feature 1..20: note = chemically synthesized
  source 1..20: mol_type = other DNA
actacaaaactctcaccctc

SEQ ID NO: 41263 - DNA, 20 bp, synthetic construct
  misc_feature 1..20: note = chemically synthesized
  source 1..20: mol_type = other DNA
tgctgcatttcttcccctaa

SEQ ID NO: 41264 - DNA, 20 bp, synthetic construct
  misc_feature 1..20: note = chemically synthesized
  source 1..20: mol_type = other DNA
accagacttctctcttctta

SEQ ID NO: 41265 - DNA, 20 bp, synthetic construct
  misc_feature 1..20: note = chemically synthesized
  source 1..20: mol_type = other DNA
tgctcttcagttacattgga

SEQ ID NO: 41266 - DNA, 20 bp, synthetic construct
  misc_feature 1..20: note = chemically synthesized
  source 1..20: mol_type = other DNA
ttcagttacattggaatgtg

SEQ ID NO: 41267 - DNA, 20 bp, synthetic construct
  misc_feature 1..20: note = chemically synthesized
  source 1..20: mol_type = other DNA
gatgaaaaagtgagaagagc

SEQ ID NO: 41268 - DNA, 20 bp, synthetic construct
  misc_feature 1..20: note = chemically synthesized
  source 1..20: mol_type = other DNA
cctagattttttcttggaaa

SEQ ID NO: 41269 - DNA, 20 bp, synthetic construct
  misc_feature 1..20: note = chemically synthesized
  source 1..20: mol_type = other DNA
cttggaaatctggcttaaat

SEQ ID NO: 41270 - DNA, 20 bp, synthetic construct
  misc_feature 1..20: note = chemically synthesized
  source 1..20: mol_type = other DNA
aaatccaggtttctttattt

SEQ ID NO: 41271 - DNA, 20 bp, synthetic construct
  misc_feature 1..20: note = chemically synthesized
  source 1..20: mol_type = other DNA
atttggtcacgagacaaata

SEQ ID NO: 41272 - DNA, 20 bp, synthetic construct
  misc_feature 1..20: note = chemically synthesized
  source 1..20: mol_type = other DNA
aataacatgattttcctaag

SEQ ID NO: 41273 - DNA, 20 bp, synthetic construct
  misc_feature 1..20: note = chemically synthesized
  source 1..20: mol_type = other DNA
attttcctaagtctagattt

SEQ ID NO: 41274 - DNA, 20 bp, synthetic construct
  misc_feature 1..20: note = chemically synthesized
  source 1..20: mol_type = other DNA
acatattcaaagagttattt

SEQ ID NO: 41275 - DNA, 20 bp, synthetic construct
  misc_feature 1..20: note = chemically synthesized
  source 1..20: mol_type = other DNA
atgaaactgagaaccaagcg

SEQ ID NO: 41276 - DNA, 20 bp, synthetic construct
  misc_feature 1..20: note = chemically synthesized
  source 1..20: mol_type = other DNA
ccatcatgtaggcacactct

SEQ ID NO: 41277 - DNA, 20 bp, synthetic construct
  misc_feature 1..20: note = chemically synthesized
  source 1..20: mol_type = other DNA
taagaatttttcaatcatat

SEQ ID NO: 41278 - DNA, 20 bp, synthetic construct
  misc_feature 1..20: note = chemically synthesized
  source 1..20: mol_type = other DNA
atttaaaaaaactatgtctt

SEQ ID NO: 41279 - DNA, 20 bp, synthetic construct
  misc_feature 1..20: note = chemically synthesized
  source 1..20: mol_type = other DNA
accagatagtcaaattaagt

SEQ ID NO: 41280 - DNA, 20 bp, synthetic construct
  misc_feature 1..20: note = chemically synthesized
  source 1..20: mol_type = other DNA
cacccctagaccttcatctt

SEQ ID NO: 41281 - DNA, 20 bp, synthetic construct
  misc_feature 1..20: note = chemically synthesized
  source 1..20: mol_type = other DNA
ccttcatctttcctgattag

SEQ ID NO: 41282 - DNA, 20 bp, synthetic construct
  misc_feature 1..20: note = chemically synthesized
  source 1..20: mol_type = other DNA
ctgcacatccatagcctccc

SEQ ID NO: 41283 - DNA, 20 bp, synthetic construct
  misc_feature 1..20: note = chemically synthesized
  source 1..20: mol_type = other DNA
tagacacaaccctttcaggt

SEQ ID NO: 41284 - DNA, 20 bp, synthetic construct
  misc_feature 1..20: note = chemically synthesized
  source 1..20: mol_type = other DNA
tatttattcctagtgaactc

SEQ ID NO: 41285 - DNA, 20 bp, synthetic construct
  misc_feature 1..20: note = chemically synthesized
  source 1..20: mol_type = other DNA
cagatggatcacctgaggcc

SEQ ID NO: 41286 - DNA, 20 bp, synthetic construct
  misc_feature 1..20: note = chemically synthesized
  source 1..20: mol_type = other DNA
taagtaggctgaggcactag

SEQ ID NO: 41287 - DNA, 20 bp, synthetic construct
  misc_feature 1..20: note = chemically synthesized
  source 1..20: mol_type = other DNA
atccttcctattctagtagt

SEQ ID NO: 41288 - DNA, 20 bp, synthetic construct
  misc_feature 1..20: note = chemically synthesized
  source 1..20: mol_type = other DNA
gacaggtggatcacaaggtc

SEQ ID NO: 41289 - DNA, 20 bp, synthetic construct
  misc_feature 1..20: note = chemically synthesized
  source 1..20: mol_type = other DNA
caagatggttaggaggctcc

SEQ ID NO: 41290 - DNA, 20 bp, synthetic construct
  misc_feature 1..20: note = chemically synthesized
  source 1..20: mol_type = other DNA
atacatttgggacagatcta

SEQ ID NO: 41291 - DNA, 20 bp, synthetic construct
  misc_feature 1..20: note = chemically synthesized
  source 1..20: mol_type = other DNA
acacttagactggggtcttc

SEQ ID NO: 41292 - DNA, 20 bp, synthetic construct
  misc_feature 1..20: note = chemically synthesized
  source 1..20: mol_type = other DNA
aaatgcccagcacagagctc

SEQ ID NO: 41293 - DNA, 20 bp, synthetic construct
  misc_feature 1..20: note = chemically synthesized
  source 1..20: mol_type = other DNA
ctcttccattcagaaactca

SEQ ID NO: 41294 - DNA, 20 bp, synthetic construct
  misc_feature 1..20: note = chemically synthesized
  source 1..20: mol_type = other DNA
tcattctcaatcacagggag

SEQ ID NO: 41295 - DNA, 20 bp, synthetic construct
  misc_feature 1..20: note = chemically synthesized
  source 1..20: mol_type = other DNA
aaagccagccccaaaggtac

SEQ ID NO: 41296 - DNA, 20 bp, synthetic construct
  misc_feature 1..20: note = chemically synthesized
  source 1..20: mol_type = other DNA
aagagtctatgttccaaaaa

SEQ ID NO: 41297 - DNA, 20 bp, synthetic construct
  misc_feature 1..20: note = chemically synthesized
  source 1..20: mol_type = other DNA
aaaaacctggatttaacaat

SEQ ID NO: 41298 - DNA, 20 bp, synthetic construct
  misc_feature 1..20: note = chemically synthesized
  source 1..20: mol_type = other DNA
taacaatctgagctttgtca

SEQ ID NO: 41299 - DNA, 20 bp, synthetic construct
  misc_feature 1..20: note = chemically synthesized
  source 1..20: mol_type = other DNA
catggtgctttgcggttggt

SEQ ID NO: 41300 - DNA, 20 bp, synthetic construct
  misc_feature 1..20: note = chemically synthesized
  source 1..20: mol_type = other DNA
tgttgtttctttaccttttt

SEQ ID NO: 41301 - DNA, 20 bp, synthetic construct
  misc_feature 1..20: note = chemically synthesized
  source 1..20: mol_type = other DNA
gcttttaaaaccataaagaa

SEQ ID NO: 41302 - DNA, 20 bp, synthetic construct
  misc_feature 1..20: note = chemically synthesized
  source 1..20: mol_type = other DNA
agtctgagaaatgcaattgc

SEQ ID NO: 41303 - DNA, 20 bp, synthetic construct
  misc_feature 1..20: note = chemically synthesized
  source 1..20: mol_type = other DNA
tttatattttcagacttttt

SEQ ID NO: 41304 - DNA, 20 bp, synthetic construct
  misc_feature 1..20: note = chemically synthesized
  source 1..20: mol_type = other DNA
tcatatcacaaaatttcaca

SEQ ID NO: 41305 - DNA, 20 bp, synthetic construct
  misc_feature 1..20: note = chemically synthesized
  source 1..20: mol_type = other DNA
ttttcactcaacattacata

SEQ ID NO: 41306 - DNA, 20 bp, synthetic construct
  misc_feature 1..20: note = chemically synthesized
  source 1..20: mol_type = other DNA
ctaatattttaaaggagagc

SEQ ID NO: 41307 - DNA, 20 bp, synthetic construct
  misc_feature 1..20: note = chemically synthesized
  source 1..20: mol_type = other DNA
gagctactgattaatgagca

SEQ ID NO: 41308 - DNA, 20 bp, synthetic construct
  misc_feature 1..20: note = chemically synthesized
  source 1..20: mol_type = other DNA
aagcattatcctttccaggc

SEQ ID NO: 41309 - DNA, 20 bp, synthetic construct
  misc_feature 1..20: note = chemically synthesized
  source 1..20: mol_type = other DNA
ggtctgcggagtcactgccc

SEQ ID NO: 41310 - DNA, 20 bp, synthetic construct
  misc_feature 1..20: note = chemically synthesized
  source 1..20: mol_type = other DNA
cccgtgcgcgttggcccccc

SEQ ID NO: 41311 - DNA, 20 bp, synthetic construct
  misc_feature 1..20: note = chemically synthesized
  source 1..20: mol_type = other DNA
aatctaacaggttgaaattg

SEQ ID NO: 41312 - DNA, 20 bp, synthetic construct
  misc_feature 1..20: note = chemically synthesized
  source 1..20: mol_type = other DNA
tctttgacaatttgggagag

SEQ ID NO: 41313 - DNA, 20 bp, synthetic construct
  misc_feature 1..20: note = chemically synthesized
  source 1..20: mol_type = other DNA
gagagtgaagattctcctgg

SEQ ID NO: 41314 - DNA, 20 bp, synthetic construct
  misc_feature 1..20: note = chemically synthesized
  source 1..20: mol_type = other DNA
gtgtttattcttttgtgaaa

SEQ ID NO: 41315 - DNA, 20 bp, synthetic construct
  misc_feature 1..20: note = chemically synthesized
  source 1..20: mol_type = other DNA
tgcaaaattgccagaggaaa

SEQ ID NO: 41316 - DNA, 20 bp, synthetic construct
  misc_feature 1..20: note = chemically synthesized
  source 1..20: mol_type = other DNA
ttccagatggacacacccag

SEQ ID NO: 41317 - DNA, 20 bp, synthetic construct
  misc_feature 1..20: note = chemically synthesized
  source 1..20: mol_type = other DNA
ttcagtgttctcacaaataa

SEQ ID NO: 41318 - DNA, 20 bp, synthetic construct
  misc_feature 1..20: note = chemically synthesized
  source 1..20: mol_type = other DNA
cagttttctaattttgcaag

SEQ ID NO: 41319 - DNA, 20 bp, synthetic construct
  misc_feature 1..20: note = chemically synthesized
  source 1..20: mol_type = other DNA
cattagaattttgcaaaaat

SEQ ID NO: 41320 - DNA, 20 bp, synthetic construct
  misc_feature 1..20: note = chemically synthesized
  source 1..20: mol_type = other DNA
gttgacatgagcagcatgga

SEQ ID NO: 41321 - DNA, 20 bp, synthetic construct
  misc_feature 1..20: note = chemically synthesized
  source 1..20: mol_type = other DNA
tctgggcagagctgcatgat

SEQ ID NO: 41322 - DNA, 20 bp, synthetic construct
  misc_feature 1..20: note = chemically synthesized
  source 1..20: mol_type = other DNA
caggtaggccacaggtgaca

SEQ ID NO: 41323 - DNA, 20 bp, synthetic construct
  misc_feature 1..20: note = chemically synthesized
  source 1..20: mol_type = other DNA
gtccagcggcaggatcagtc

SEQ ID NO: 41324 - DNA, 20 bp, synthetic construct
  misc_feature 1..20: note = chemically synthesized
  source 1..20: mol_type = other DNA
aattgatgaacaggcctgag

SEQ ID NO: 41325 - DNA, 20 bp, synthetic construct
  misc_feature 1..20: note = chemically synthesized
  source 1..20: mol_type = other DNA
gctaatggtggtggtaatga

SEQ ID NO: 41326 - DNA, 20 bp, synthetic construct
  misc_feature 1..20: note = chemically synthesized
  source 1..20: mol_type = other DNA
tcatcagtagacatcatata

SEQ ID NO: 41327 - DNA, 20 bp, synthetic construct
  misc_feature 1..20: note = chemically synthesized
  source 1..20: mol_type = other DNA
tagctggcccagagcctact

SEQ ID NO: 41328 - DNA, 20 bp, synthetic construct
  misc_feature 1..20: note = chemically synthesized
  source 1..20: mol_type = other DNA
tttctaaccaccatccccca

SEQ ID NO: 41329 - DNA, 20 bp, synthetic construct
  misc_feature 1..20: note = chemically synthesized
  source 1..20: mol_type = other DNA
cacctgcaggtccactgaga

SEQ ID NO: 41330 - DNA, 20 bp, synthetic construct
  misc_feature 1..20: note = chemically synthesized
  source 1..20: mol_type = other DNA
tcagcctctgagagggaggt

SEQ ID NO: 41331 - DNA, 20 bp, synthetic construct
  misc_feature 1..20: note = chemically synthesized
  source 1..20: mol_type = other DNA
aagttttcctgctctcccct

SEQ ID NO: 41332 - DNA, 20 bp, synthetic construct
  misc_feature 1..20: note = chemically synthesized
  source 1..20: mol_type = other DNA
tccctgacttggatcaaatg

SEQ ID NO: 41333 - DNA, 20 bp, synthetic construct
  misc_feature 1..20: note = chemically synthesized
  source 1..20: mol_type = other DNA
gtttggaggtgttgaggcca

SEQ ID NO: 41334 - DNA, 20 bp, synthetic construct
  misc_feature 1..20: note = chemically synthesized
  source 1..20: mol_type = other DNA
ctccccaaggccccatcagg

SEQ ID NO: 41335 - DNA, 20 bp, synthetic construct
  misc_feature 1..20: note = chemically synthesized
  source 1..20: mol_type = other DNA
aactttcctggcaacttgcg

SEQ ID NO: 41336 - DNA, 20 bp, synthetic construct
  misc_feature 1..20: note = chemically synthesized
  source 1..20: mol_type = other DNA
gtaggttttcaccattatca

SEQ ID NO: 41337 - DNA, 20 bp, synthetic construct
  misc_feature 1..20: note = chemically synthesized
  source 1..20: mol_type = other DNA
gatgtttgccttgctcaaat

SEQ ID NO: 41338 - DNA, 20 bp, synthetic construct
  misc_feature 1..20: note = chemically synthesized
  source 1..20: mol_type = other DNA
caggtgatgcaccctctgcc

SEQ ID NO: 41339 - DNA, 20 bp, synthetic construct
  misc_feature 1..20: note = chemically synthesized
  source 1..20: mol_type = other DNA
acttccatcatgcagctctg

SEQ ID NO: 41340 - DNA, 20 bp, synthetic construct
  misc_feature 1..20: note = chemically synthesized
  source 1..20: mol_type = other DNA
catgtcaactccagatgcag

SEQ ID NO: 41341 - DNA, 20 bp, synthetic construct
  misc_feature 1..20: note = chemically synthesized
  source 1..20: mol_type = other DNA
cctgtgccatgctcgcaaag

SEQ ID NO: 41342 - DNA, 20 bp, synthetic construct
  misc_feature 1..20: note = chemically synthesized
  source 1..20: mol_type = other DNA
ttgcaaaattctaatgaaag

SEQ ID NO: 41343 - DNA, 20 bp, synthetic construct
  misc_feature 1..20: note = chemically synthesized
  source 1..20: mol_type = other DNA
tgggcttgcaaaattagaaa

SEQ ID NO: 41344 - DNA, 20 bp, synthetic construct
  misc_feature 1..20: note = chemically synthesized
  source 1..20: mol_type = other DNA
gaatttggcaaagaaaataa

SEQ ID NO: 41345 - DNA, 20 bp, synthetic construct
  misc_feature 1..20: note = chemically synthesized
  source 1..20: mol_type = other DNA
aatcaggacaatttcaacct

SEQ ID NO: 41346 - DNA, 20 bp, synthetic construct
  misc_feature 1..20: note = chemically synthesized
  source 1..20: mol_type = other DNA
acactcatacaagtgtggtg

SEQ ID NO: 41347 - DNA, 20 bp, synthetic construct
  misc_feature 1..20: note = chemically synthesized
  source 1..20: mol_type = other DNA
tcatacaagtgtggtgaagt

SEQ ID NO: 41348 - DNA, 20 bp, synthetic construct
  misc_feature 1..20: note = chemically synthesized
  source 1..20: mol_type = other DNA
actagacaacctccttacac

SEQ ID NO: 41349 - DNA, 20 bp, synthetic construct
  misc_feature 1..20: note = chemically synthesized
  source 1..20: mol_type = other DNA
agagcaggagtgatggaact

SEQ ID NO: 41350 - DNA, 20 bp, synthetic construct
  misc_feature 1..20: note = chemically synthesized
  source 1..20: mol_type = other DNA
gaagtgagatacaccacatt

SEQ ID NO: 41351 - DNA, 20 bp, synthetic construct
  misc_feature 1..20: note = chemically synthesized
  source 1..20: mol_type = other DNA
aagcttgtgcctggaaagga

SEQ ID NO: 41352 - DNA, 20 bp, synthetic construct
  misc_feature 1..20: note = chemically synthesized
  source 1..20: mol_type = other DNA
tacatttaaacattattctt

SEQ ID NO: 41353 - DNA, 20 bp, synthetic construct
  misc_feature 1..20: note = chemically synthesized
  source 1..20: mol_type = other DNA
cgcaaagcaccatgacaaag

SEQ ID NO: 41354 - DNA, 20 bp, synthetic construct
  misc_feature 1..20: note = chemically synthesized
  source 1..20: mol_type = other DNA
caaagctcagattgttaaat

SEQ ID NO: 41355 - DNA, 20 bp, synthetic construct
  misc_feature 1..20: note = chemically synthesized
  source 1..20: mol_type = other DNA
ttggaacatagactcttata

SEQ ID NO: 41356 - DNA, 20 bp, synthetic construct
  misc_feature 1..20: note = chemically synthesized
  source 1..20: mol_type = other DNA
tcaccactgctctgttcttc

SEQ ID NO: 41357 - DNA, 20 bp, synthetic construct
  misc_feature 1..20: note = chemically synthesized
  source 1..20: mol_type = other DNA
taaacacaggtacctttggg

SEQ ID NO: 41358 - DNA, 20 bp, synthetic construct
  misc_feature 1..20: note = chemically synthesized
  source 1..20: mol_type = other DNA
tctcaaggaagcccagctcc

SEQ ID NO: 41359 - DNA, 20 bp, synthetic construct
  misc_feature 1..20: note = chemically synthesized
  source 1..20: mol_type = other DNA
gaatgaagtgtgcaatcgct

SEQ ID NO: 41360 - DNA, 20 bp, synthetic construct
  misc_feature 1..20: note = chemically synthesized
  source 1..20: mol_type = other DNA
tcccaaagtagcgaattcaa

SEQ ID NO: 41361 - DNA, 20 bp, synthetic construct
  misc_feature 1..20: note = chemically synthesized
  source 1..20: mol_type = other DNA
gatcatccaaggggacttct

SEQ ID NO: 41362 - DNA, 20 bp, synthetic construct
  misc_feature 1..20: note = chemically synthesized
  source 1..20: mol_type = other DNA
ccggtggccagggactaaag

SEQ ID NO: 41363 - DNA, 20 bp, synthetic construct
  misc_feature 1..20: note = chemically synthesized
  source 1..20: mol_type = other DNA
cagagttggcgtgtctcccc

SEQ ID NO: 41364 - DNA, 20 bp, synthetic construct
  misc_feature 1..20: note = chemically synthesized
  source 1..20: mol_type = other DNA
ctccccaattgatttacaac

SEQ ID NO: 41365 - DNA, 20 bp, synthetic construct
  misc_feature 1..20: note = chemically synthesized
  source 1..20: mol_type = other DNA
atttacaactggggcttgga

SEQ ID NO: 41366 - DNA, 20 bp, synthetic construct
  misc_feature 1..20: note = chemically synthesized
  source 1..20: mol_type = other DNA
tttccacttaattctaccac

SEQ ID NO: 41367 - DNA, 20 bp, synthetic construct
  misc_feature 1..20: note = chemically synthesized
  source 1..20: mol_type = other DNA
tacttcatgagaacgaaaat

SEQ ID NO: 41368 - DNA, 20 bp, synthetic construct
  misc_feature 1..20: note = chemically synthesized
  source 1..20: mol_type = other DNA
gcaccatgaattcatttgcg

SEQ ID NO: 41369 - DNA, 20 bp, synthetic construct
  misc_feature 1..20: note = chemically synthesized
  source 1..20: mol_type = other DNA
catttgcggaaagattgata

SEQ ID NO: 41370 - DNA, 20 bp, synthetic construct
  misc_feature 1..20: note = chemically synthesized
  source 1..20: mol_type = other DNA
accccggttgaagtgcactg

SEQ ID NO: 41371 - DNA, 20 bp, synthetic construct
  misc_feature 1..20: note = chemically synthesized
  source 1..20: mol_type = other DNA
tactccagcctccctagtag

SEQ ID NO: 41372 - DNA, 20 bp, synthetic construct
  misc_feature 1..20: note = chemically synthesized
  source 1..20: mol_type = other DNA
ttttgtatttttagtagaga

SEQ ID NO: 41373 - DNA, 20 bp, synthetic construct
  misc_feature 1..20: note = chemically synthesized
  source 1..20: mol_type = other DNA
tgtcttggcctcccaaagtg

SEQ ID NO: 41374 - DNA, 20 bp, synthetic construct
  misc_feature 1..20: note = chemically synthesized
  source 1..20: mol_type = other DNA
ttgagccaccgcactcgacc

SEQ ID NO: 41375 - DNA, 20 bp, synthetic construct
  misc_feature 1..20: note = chemically synthesized
  source 1..20: mol_type = other DNA
agccacaactactagaatag

SEQ ID NO: 41376 - DNA, 20 bp, synthetic construct
  misc_feature 1..20: note = chemically synthesized
  source 1..20: mol_type = other DNA
ttttgtattttttgtagaga

SEQ ID NO: 41377 - DNA, 20 bp, synthetic construct
  misc_feature 1..20: note = chemically synthesized
  source 1..20: mol_type = other DNA
acagggttttggcatgttgc

SEQ ID NO: 41378 - DNA, 20 bp, synthetic construct
  misc_feature 1..20: note = chemically synthesized
  source 1..20: mol_type = other DNA
tgccgtggcctcccaaaatg

SEQ ID NO: 41379 - DNA, 20 bp, synthetic construct
  misc_feature 1..20: note = chemically synthesized
  source 1..20: mol_type = other DNA
tgagccaccaccccctcctg

SEQ ID NO: 41380 - DNA, 20 bp, synthetic construct
  misc_feature 1..20: note = chemically synthesized
  source 1..20: mol_type = other DNA
aaataaattttgaagataat

SEQ ID NO: 41381 - DNA, 20 bp, synthetic construct
  misc_feature 1..20: note = chemically synthesized
  source 1..20: mol_type = other DNA
cacttatgttgtcatttcgg

SEQ ID NO: 41382 - DNA, 20 bp, synthetic construct
  misc_feature 1..20: note = chemically synthesized
  source 1..20: mol_type = other DNA
tggagatgttaacatttata

SEQ ID NO: 41383 - DNA, 20 bp, synthetic construct
  misc_feature 1..20: note = chemically synthesized
  source 1..20: mol_type = other DNA
tcgtacagcactgcctgttg

SEQ ID NO: 41384 - DNA, 20 bp, synthetic construct
  misc_feature 1..20: note = chemically synthesized
  source 1..20: mol_type = other DNA
ccagcaaatatgagctactt

SEQ ID NO: 41385 - DNA, 20 bp, synthetic construct
  misc_feature 1..20: note = chemically synthesized
  source 1..20: mol_type = other DNA
gtggagcagctgagggggga

SEQ ID NO: 41386 - DNA, 20 bp, synthetic construct
  misc_feature 1..20: note = chemically synthesized
  source 1..20: mol_type = other DNA
ataagactctatattcaagg

SEQ ID NO: 41387 - DNA, 20 bp, synthetic construct
  misc_feature 1..20: note = chemically synthesized
  source 1..20: mol_type = other DNA
tcattaacttaatttgacta

SEQ ID NO: 41388 - DNA, 20 bp, synthetic construct
  misc_feature 1..20: note = chemically synthesized
  source 1..20: mol_type = other DNA
tttgactatctggtttgtgg

SEQ ID NO: 41389 - DNA, 20 bp, synthetic construct
  misc_feature 1..20: note = chemically synthesized
  source 1..20: mol_type = other DNA
tcatgtaagtcaacaatgtc

SEQ ID NO: 41390 - DNA, 20 bp, synthetic construct
  misc_feature 1..20: note = chemically synthesized
  source 1..20: mol_type = other DNA
atttctgaaatcaggtaaga

SEQ ID NO: 41391 - DNA, 20 bp, synthetic construct
  misc_feature 1..20: note = chemically synthesized
  source 1..20: mol_type = other DNA
tgtagtaaaaatacatatgc

SEQ ID NO: 41392 - DNA, 20 bp, synthetic construct
  misc_feature 1..20: note = chemically synthesized
  source 1..20: mol_type = other DNA
ttatgtgcaattcatttaat

SEQ ID NO: 41393 - DNA, 20 bp, synthetic construct
  misc_feature 1..20: note = chemically synthesized
  source 1..20: mol_type = other DNA
ttcccagttcaaaatcttgt

SEQ ID NO: 41394 - DNA, 20 bp, synthetic construct
  misc_feature 1..20: note = chemically synthesized
  source 1..20: mol_type = other DNA
attgaaaaattcttaaaaaa

SEQ ID NO: 41395 - DNA, 20 bp, synthetic construct
  misc_feature 1..20: note = chemically synthesized
  source 1..20: mol_type = other DNA
gaatgggcagaaaaaataat

SEQ ID NO: 41396 - DNA, 20 bp, synthetic construct
  misc_feature 1..20: note = chemically synthesized
  source 1..20: mol_type = other DNA
atgcaaaggatggctaagct

SEQ ID NO: 41397 - DNA, 20 bp, synthetic construct
  misc_feature 1..20: note = chemically synthesized
  source 1..20: mol_type = other DNA
gctaagctcttcgcttggtt

SEQ ID NO: 41398 - DNA, 20 bp, synthetic construct
  misc_feature 1..20: note = chemically synthesized
  source 1..20: mol_type = other DNA
acaatgaaataactctttga

SEQ ID NO: 41399 - DNA, 20 bp, synthetic construct
  misc_feature 1..20: note = chemically synthesized
  source 1..20: mol_type = other DNA
tctctttgttatggcctgag

SEQ ID NO: 41400 - DNA, 20 bp, synthetic construct
  misc_feature 1..20: note = chemically synthesized
  source 1..20: mol_type = other DNA
aaggctttccatcggtatac

SEQ ID NO: 41401 - DNA, 20 bp, synthetic construct
  misc_feature 1..20: note = chemically synthesized
  source 1..20: mol_type = other DNA
tgccagatgatatacgcata

SEQ ID NO: 41402 - DNA, 20 bp, synthetic construct
  misc_feature 1..20: note = chemically synthesized
  source 1..20: mol_type = other DNA
catacacacatacacaccgt

SEQ ID NO: 41403 - DNA, 20 bp, synthetic construct
  misc_feature 1..20: note = chemically synthesized
  source 1..20: mol_type = other DNA
agtgtgtgtcctttacaaat

SEQ ID NO: 41404 - DNA, 20 bp, synthetic construct
  misc_feature 1..20: note = chemically synthesized
  source 1..20: mol_type = other DNA
aaatcaaggaaataaagaaa

SEQ ID NO: 41405 - DNA, 20 bp, synthetic construct
  misc_feature 1..20: note = chemically synthesized
  source 1..20: mol_type = other DNA
ataaagaaacctggatttaa

SEQ ID NO: 41406 - DNA, 20 bp, synthetic construct
  misc_feature 1..20: note = chemically synthesized
  source 1..20: mol_type = other DNA
atgtaactgaagagcaggtt

SEQ ID NO: 41407 - DNA, 20 bp, synthetic construct
  misc_feature 1..20: note = chemically synthesized
  source 1..20: mol_type = other DNA
agagaagtctggtataaaga

SEQ ID NO: 41408 - DNA, 20 bp, synthetic construct
  misc_feature 1..20: note = chemically synthesized
  source 1..20: mol_type = other DNA
agtctggtataaagaaagtg

SEQ ID NO: 41409 - DNA, 20 bp, synthetic construct
  misc_feature 1..20: note = chemically synthesized
  source 1..20: mol_type = other DNA
gaaagtgatttgcttccaaa

SEQ ID NO: 41410 - DNA, 20 bp, synthetic construct
  misc_feature 1..20: note = chemically synthesized
  source 1..20: mol_type = other DNA
aaggcaacagaggaggcgag

SEQ ID NO: 41411 - DNA, 20 bp, synthetic construct
  misc_feature 1..20: note = chemically synthesized
  source 1..20: mol_type = other DNA
gcaaggattcaggggtccat

SEQ ID NO: 41412 - DNA, 20 bp, synthetic construct
  misc_feature 1..20: note = chemically synthesized
  source 1..20: mol_type = other DNA
gaggcaaatctctggagggt

SEQ ID NO: 41413 - DNA, 20 bp, synthetic construct
  misc_feature 1..20: note = chemically synthesized
  source 1..20: mol_type = other DNA
gggtgagagttttgtagtgg

SEQ ID NO: 41414 - DNA, 20 bp, synthetic construct
  misc_feature 1..20: note = chemically synthesized
  source 1..20: mol_type = other DNA
gagttttgtagtgggcatgc

SEQ ID NO: 41415 - DNA, 20 bp, synthetic construct
  misc_feature 1..20: note = chemically synthesized
  source 1..20: mol_type = other DNA
gagtctgatgaaagggaggt

SEQ ID NO: 41416 - DNA, 20 bp, synthetic construct
  misc_feature 1..20: note = chemically synthesized
  source 1..20: mol_type = other DNA
caaagaaaatacagagcagg

SEQ ID NO: 41417 - DNA, 20 bp, synthetic construct
  misc_feature 1..20: note = chemically synthesized
  source 1..20: mol_type = other DNA
gagcaggagaagattaagca

SEQ ID NO: 41418 - DNA, 20 bp, synthetic construct
  misc_feature 1..20: note = chemically synthesized
  source 1..20: mol_type = other DNA
ctagaacaaacttctctgcc

SEQ ID NO: 41419 - DNA, 20 bp, synthetic construct
  misc_feature 1..20: note = chemically synthesized
  source 1..20: mol_type = other DNA
ttctctgccacaggattaac

SEQ ID NO: 41420 - DNA, 20 bp, synthetic construct
  misc_feature 1..20: note = chemically synthesized
  source 1..20: mol_type = other DNA
tgataagctcttttggaaag

SEQ ID NO: 41421 - DNA, 20 bp, synthetic construct
  misc_feature 1..20: note = chemically synthesized
  source 1..20: mol_type = other DNA
tggaatgcccggggagagga

SEQ ID NO: 41422 - DNA, 20 bp, synthetic construct
  misc_feature 1..20: note = chemically synthesized
  source 1..20: mol_type = other DNA
ataaaagtatttttcctatt

SEQ ID NO: 41423 - DNA, 20 bp, synthetic construct
  misc_feature 1..20: note = chemically synthesized
  source 1..20: mol_type = other DNA
agtatttttcctattaaaag

SEQ ID NO: 41424 - DNA, 20 bp, synthetic construct
  misc_feature 1..20: note = chemically synthesized
  source 1..20: mol_type = other DNA
ttcctattaaaagatttgtt

SEQ ID NO: 41425 - DNA, 20 bp, synthetic construct
  misc_feature 1..20: note = chemically synthesized
  source 1..20: mol_type = other DNA
ggaggtgaatcagagaaaca

SEQ ID NO: 41426 - DNA, 20 bp, synthetic construct
  misc_feature 1..20: note = chemically synthesized
  source 1..20: mol_type = other DNA
catcaggttaaaaaaagaaa

SEQ ID NO: 41427 - DNA, 20 bp, synthetic construct
  misc_feature 1..20: note = chemically synthesized
  source 1..20: mol_type = other DNA
gttaaaaaaagaaaaattga

SEQ ID NO: 41428 - DNA, 20 bp, synthetic construct
  misc_feature 1..20: note = chemically synthesized
  source 1..20: mol_type = other DNA
agttaaagggggaaataaat

SEQ ID NO: 41429 - DNA, 20 bp, synthetic construct
  misc_feature 1..20: note = chemically synthesized
  source 1..20: mol_type = other DNA
catttcaaaaacactcttca

SEQ ID NO: 41430 - DNA, 20 bp, synthetic construct
  misc_feature 1..20: note = chemically synthesized
  source 1..20: mol_type = other DNA
aagcaccttattaatttatt

SEQ ID NO: 41431 - DNA, 20 bp, synthetic construct
  misc_feature 1..20: note = chemically synthesized
  source 1..20: mol_type = other DNA
gatattttgatatatctatc

SEQ ID NO: 41432 - DNA, 20 bp, synthetic construct
  misc_feature 1..20: note = chemically synthesized
  source 1..20: mol_type = other DNA
atatctatcaagtgcttttt

SEQ ID NO: 41433 - DNA, 20 bp, synthetic construct
  misc_feature 1..20: note = chemically synthesized
  source 1..20: mol_type = other DNA
agccaatgcctgttcaataa

SEQ ID NO: 41434 - DNA, 20 bp, synthetic construct
  misc_feature 1..20: note = chemically synthesized
  source 1..20: mol_type = other DNA
cctgtattccctagaagtct

SEQ ID NO: 41435 - DNA, 20 bp, synthetic construct
  misc_feature 1..20: note = chemically synthesized
  source 1..20: mol_type = other DNA
aagtctcgctgctttcagag

SEQ ID NO: 41436 - DNA, 20 bp, synthetic construct
  misc_feature 1..20: note = chemically synthesized
  source 1..20: mol_type = other DNA
caaagtggtcaaggttgtcc

SEQ ID NO: 41437 - DNA, 20 bp, synthetic construct
  misc_feature 1..20: note = chemically synthesized
  source 1..20: mol_type = other DNA
gtcctgttgcttaattccat

SEQ ID NO: 41438 - DNA, 20 bp, synthetic construct
  misc_feature 1..20: note = chemically synthesized
  source 1..20: mol_type = other DNA
cagagatggagctggcatct

SEQ ID NO: 41439 - DNA, 20 bp, synthetic construct
  misc_feature 1..20: note = chemically synthesized
  source 1..20: mol_type = other DNA
tttgccacaaccaggcagaa

SEQ ID NO: 41440 - DNA, 20 bp, synthetic construct
  misc_feature 1..20: note = chemically synthesized
  source 1..20: mol_type = other DNA
caggcagaaagcagcttttg

SEQ ID NO: 41441 - DNA, 20 bp, synthetic construct
  misc_feature 1..20: note = chemically synthesized
  source 1..20: mol_type = other DNA
cttttgaacagatttgttgc

SEQ ID NO: 41442 - DNA, 20 bp, synthetic construct
  misc_feature 1..20: note = chemically synthesized
  source 1..20: mol_type = other DNA
tgggcagtattggtcccagg

SEQ ID NO: 41443 - DNA, 20 bp, synthetic construct
  misc_feature 1..20: note = chemically synthesized
  source 1..20: mol_type = other DNA
aaaaatggccttctttgtgg

SEQ ID NO: 41444 - DNA, 20 bp, synthetic construct
  misc_feature 1..20: note = chemically synthesized
  source 1..20: mol_type = other DNA
cttcatatcctccatttttt

SEQ ID NO: 41445 - DNA, 20 bp, synthetic construct
  misc_feature 1..20: note = chemically synthesized
  source 1..20: mol_type = other DNA
taaaggagggaccattcaga

SEQ ID NO: 41446 - DNA, 20 bp, synthetic construct
  misc_feature 1..20: note = chemically synthesized
  source 1..20: mol_type = other DNA
ctccaaggttcatttctaca

SEQ ID NO: 41447 - DNA, 20 bp, synthetic construct
  misc_feature 1..20: note = chemically synthesized
  source 1..20: mol_type = other DNA
gacatggcaatcaagagcaa

SEQ ID NO: 41448 - DNA, 20 bp, synthetic construct
  misc_feature 1..20: note = chemically synthesized
  source 1..20: mol_type = other DNA
caaacatgatttattcttat

SEQ ID NO: 41449 - DNA, 20 bp, synthetic construct
  misc_feature 1..20: note = chemically synthesized
  source 1..20: mol_type = other DNA
gtctggagaatctgaaaccc

SEQ ID NO: 41450 - DNA, 20 bp, synthetic construct
  misc_feature 1..20: note = chemically synthesized
  source 1..20: mol_type = other DNA
tgtacttcttgtattcttaa

SEQ ID NO: 41451 - DNA, 20 bp, synthetic construct
  misc_feature 1..20: note = chemically synthesized
  source 1..20: mol_type = other DNA
atcactgcaaacctctataa

SEQ ID NO: 41452 - DNA, 20 bp, synthetic construct
  misc_feature 1..20: note = chemically synthesized
  source 1..20: mol_type = other DNA
ctacgcattgacttatcttc

SEQ ID NO: 41453 - DNA, 20 bp, synthetic construct
  misc_feature 1..20: note = chemically synthesized
  source 1..20: mol_type = other DNA
cgttgtactttcttccttac

SEQ ID NO: 41454 - DNA, 20 bp, synthetic construct
  misc_feature 1..20: note = chemically synthesized
  source 1..20: mol_type = other DNA
ccactgtttatctcaaactc

SEQ ID NO: 41455 - DNA, 20 bp, synthetic construct
  misc_feature 1..20: note = chemically synthesized
  source 1..20: mol_type = other DNA
tatgggctcaggagggagcg

SEQ ID NO: 41456 - DNA, 20 bp, synthetic construct
  misc_feature 1..20: note = chemically synthesized
  source 1..20: mol_type = other DNA
gccttatggaaaagtggcca

SEQ ID NO: 41457 - DNA, 20 bp, synthetic construct
  misc_feature 1..20: note = chemically synthesized
  source 1..20: mol_type = other DNA
cattttagtcagtgttggct

SEQ ID NO: 41458 - DNA, 20 bp, synthetic construct
  misc_feature 1..20: note = chemically synthesized
  source 1..20: mol_type = other DNA
cagtaccaccgttaatgccc

SEQ ID NO: 41459 - DNA, 20 bp, synthetic construct
  misc_feature 1..20: note = chemically synthesized
  source 1..20: mol_type = other DNA
gcacacagcagggaaagaat

SEQ ID NO: 41460 - DNA, 20 bp, synthetic construct
  misc_feature 1..20: note = chemically synthesized
  source 1..20: mol_type = other DNA
aattccagtttctctttctt

SEQ ID NO: 41461 - DNA, 20 bp, synthetic construct
  misc_feature 1..20: note = chemically synthesized
  source 1..20: mol_type = other DNA
actcttcaccaggcaaggct

SEQ ID NO: 41462 - DNA, 20 bp, synthetic construct
  misc_feature 1..20: note = chemically synthesized
  source 1..20: mol_type = other DNA
acatttccactggctgcact

SEQ ID NO: 41463 - DNA, 20 bp, synthetic construct
  misc_feature 1..20: note = chemically synthesized
  source 1..20: mol_type = other DNA
agggaaggaaaaaagatcct

SEQ ID NO: 41464 - DNA, 20 bp, synthetic construct
  misc_feature 1..20: note = chemically synthesized
  source 1..20: mol_type = other DNA
gaaaaatgtaaaaaggctag

SEQ ID NO: 41465 - DNA, 20 bp, synthetic construct
  misc_feature 1..20: note = chemically synthesized
  source 1..20: mol_type = other DNA
ttggactgtcttccttgctc

SEQ ID NO: 41466 - DNA, 20 bp, synthetic construct
  misc_feature 1..20: note = chemically synthesized
  source 1..20: mol_type = other DNA
ctctagagaaccccgactaa

SEQ ID NO: 41467 - DNA, 20 bp, synthetic construct
  misc_feature 1..20: note = chemically synthesized
  source 1..20: mol_type = other DNA
attaaggatggaattctttc

SEQ ID NO: 41468 - DNA, 20 bp, synthetic construct
  misc_feature 1..20: note = chemically synthesized
  source 1..20: mol_type = other DNA
gttttgggacttctggtgtt

SEQ ID NO: 41469 - DNA, 20 bp, synthetic construct
  misc_feature 1..20: note = chemically synthesized
  source 1..20: mol_type = other DNA
cttctggtgttggctgatta

SEQ ID NO: 41470 - DNA, 20 bp, synthetic construct
  misc_feature 1..20: note = chemically synthesized
  source 1..20: mol_type = other DNA
cactgatagtacttggcctg

SEQ ID NO: 41471 - DNA, 20 bp, synthetic construct
  misc_feature 1..20: note = chemically synthesized
  source 1..20: mol_type = other DNA
aaaataaatgcatttgacac

SEQ ID NO: 41472 - DNA, 20 bp, synthetic construct
  misc_feature 1..20: note = chemically synthesized
  source 1..20: mol_type = other DNA
ttcatcacttatgagaggca

SEQ ID NO: 41473 - DNA, 20 bp, synthetic construct
  misc_feature 1..20: note = chemically synthesized
  source 1..20: mol_type = other DNA
ccaaggaacataatgaagtt

SEQ ID NO: 41474 - DNA, 20 bp, synthetic construct
  misc_feature 1..20: note = chemically synthesized
  source 1..20: mol_type = other DNA
gatactgagccacaaatctg

SEQ ID NO: 41475 - DNA, 20 bp, synthetic construct
  misc_feature 1..20: note = chemically synthesized
  source 1..20: mol_type = other DNA
ctgctaagattgccctgaat

SEQ ID NO: 41476 - DNA, 20 bp, synthetic construct
  misc_feature 1..20: note = chemically synthesized
  source 1..20: mol_type = other DNA
ggtgcatgcacagccttgcc

SEQ ID NO: 41477 - DNA, 20 bp, synthetic construct
  misc_feature 1..20: note = chemically synthesized
  source 1..20: mol_type = other DNA
ccctgatgaagctgaggaca

SEQ ID NO: 41478 - DNA, 20 bp, synthetic construct
  misc_feature 1..20: note = chemically synthesized
  source 1..20: mol_type = other DNA
gaaacttttttgccagaaga

SEQ ID NO: 41479 - DNA, 20 bp, synthetic construct
  misc_feature 1..20: note = chemically synthesized
  source 1..20: mol_type = other DNA
gtctgaggatgtaaaccctg

SEQ ID NO: 41480 - DNA, 20 bp, synthetic construct
  misc_feature 1..20: note = chemically synthesized
  source 1..20: mol_type = other DNA
gcagctgccaggcaagataa

SEQ ID NO: 41481 - DNA, 20 bp, synthetic construct
  misc_feature 1..20: note = chemically synthesized
  source 1..20: mol_type = other DNA
gaggcacccctaatgcccct

SEQ ID NO: 41482 - DNA, 20 bp, synthetic construct
  misc_feature 1..20: note = chemically synthesized
  source 1..20: mol_type = other DNA
ggtgcattatactctaaaag

SEQ ID NO: 41483 - DNA, 20 bp, synthetic construct
  misc_feature 1..20: note = chemically synthesized
  source 1..20: mol_type = other DNA
ttatactctaaaagaactgc

SEQ ID NO: 41484 - DNA, 20 bp, synthetic construct
  misc_feature 1..20: note = chemically synthesized
  source 1..20: mol_type = other DNA
agttggatcaagctgaattt

SEQ ID NO: 41485 - DNA, 20 bp, synthetic construct
  misc_feature 1..20: note = chemically synthesized
  source 1..20: mol_type = other DNA
attggtttggccctactaag

SEQ ID NO: 41486 - DNA, 20 bp, synthetic construct
  misc_feature 1..20: note = chemically synthesized
  source 1..20: mol_type = other DNA
ggcgggcagatcacgagatc

SEQ ID NO: 41487 - DNA, 20 bp, synthetic construct
  misc_feature 1..20: note = chemically synthesized
  source 1..20: mol_type = other DNA
ttgggaggctgaggcaagag

SEQ ID NO: 41488 - DNA, 20 bp, synthetic construct
  misc_feature 1..20: note = chemically synthesized
  source 1..20: mol_type = other DNA
aactgcttgaacctgtgagg

SEQ ID NO: 41489 - DNA, 20 bp, synthetic construct
  misc_feature 1..20: note = chemically synthesized
  source 1..20: mol_type = other DNA
aaaaaaaaaaaaaaagttat

SEQ ID NO: 41490 - DNA, 20 bp, synthetic construct
  misc_feature 1..20: note = chemically synthesized
  source 1..20: mol_type = other DNA
aaaaaaagttataatagttt

SEQ ID NO: 41491 - DNA, 20 bp, synthetic construct
  misc_feature 1..20: note = chemically synthesized
  source 1..20: mol_type = other DNA
atttgcttggttagctgaaa

SEQ ID NO: 41492 - DNA, 20 bp, synthetic construct
  misc_feature 1..20: note = chemically synthesized
  source 1..20: mol_type = other DNA
tgttagtgagctggaaatgc

SEQ ID NO: 41493 - DNA, 20 bp, synthetic construct
  misc_feature 1..20: note = chemically synthesized
  source 1..20: mol_type = other DNA
taatgtagaggaagtgatcc

SEQ ID NO: 41494 - DNA, 20 bp, synthetic construct
  misc_feature 1..20: note = chemically synthesized
  source 1..20: mol_type = other DNA
ggaagtgatccaaaggctta

SEQ ID NO: 41495 - DNA, 20 bp, synthetic construct
  misc_feature 1..20: note = chemically synthesized
  source 1..20: mol_type = other DNA
tagggagattaggatggtgg

SEQ ID NO: 41496 - DNA, 20 bp, synthetic construct
  misc_feature 1..20: note = chemically synthesized
  source 1..20: mol_type = other DNA
ccagaagatacacccttggc

SEQ ID NO: 41497 - DNA, 20 bp, synthetic construct
  misc_feature 1..20: note = chemically synthesized
  source 1..20: mol_type = other DNA
ccttggccgaagctttgtga

SEQ ID NO: 41498 - DNA, 20 bp, synthetic construct
  misc_feature 1..20: note = chemically synthesized
  source 1..20: mol_type = other DNA
gggaaacctactgtattcct

SEQ ID NO: 41499 - DNA, 20 bp, synthetic construct
  misc_feature 1..20: note = chemically synthesized
  source 1..20: mol_type = other DNA
ggacactggctctgagctga

SEQ ID NO: 41500 - DNA, 20 bp, synthetic construct
  misc_feature 1..20: note = chemically synthesized
  source 1..20: mol_type = other DNA
tgtggttccccagttaaagt

SEQ ID NO: 41501 - DNA, 20 bp, synthetic construct
  misc_feature 1..20: note = chemically synthesized
  source 1..20: mol_type = other DNA
tatggaggttaggtaattaa

SEQ ID NO: 41502 - DNA, 20 bp, synthetic construct
  misc_feature 1..20: note = chemically synthesized
  source 1..20: mol_type = other DNA
tcccatccctggagggactg

SEQ ID NO: 41503 - DNA, 20 bp, synthetic construct
  misc_feature 1..20: note = chemically synthesized
  source 1..20: mol_type = other DNA
ggacttgaaagacgcagggg

SEQ ID NO: 41504 - DNA, 20 bp, synthetic construct
  misc_feature 1..20: note = chemically synthesized
  source 1..20: mol_type = other DNA
gatggatcttggaaaatgat

SEQ ID NO: 41505 - DNA, 20 bp, synthetic construct
  misc_feature 1..20: note = chemically synthesized
  source 1..20: mol_type = other DNA
gaaaatgatggtggattatt

SEQ ID NO: 41506 - DNA, 20 bp, synthetic construct
  misc_feature 1..20: note = chemically synthesized
  source 1..20: mol_type = other DNA
attgcagctgctctaccagt

SEQ ID NO: 41507 - DNA, 20 bp, synthetic construct
  misc_feature 1..20: note = chemically synthesized
  source 1..20: mol_type = other DNA
tgctctaccagttgtggttt

SEQ ID NO: 41508 - DNA, 20 bp, synthetic construct
  misc_feature 1..20: note = chemically synthesized
  source 1..20: mol_type = other DNA
ctggtgcctggtatgcagcc

SEQ ID NO: 41509 - DNA, 20 bp, synthetic construct
  misc_feature 1..20: note = chemically synthesized
  source 1..20: mol_type = other DNA
atgcagccattggcttggca

SEQ ID NO: 41510 - DNA, 20 bp, synthetic construct
  misc_feature 1..20: note = chemically synthesized
  source 1..20: mol_type = other DNA
cctcaggggtgtatcaactc

SEQ ID NO: 41511 - DNA, 20 bp, synthetic construct
  misc_feature 1..20: note = chemically synthesized
  source 1..20: mol_type = other DNA
atcttatttggagagacctt

SEQ ID NO: 41512 - DNA, 20 bp, synthetic construct
  misc_feature 1..20: note = chemically synthesized
  source 1..20: mol_type = other DNA
ccattacattcatgacatta

SEQ ID NO: 41513 - DNA, 20 bp, synthetic construct
  misc_feature 1..20: note = chemically synthesized
  source 1..20: mol_type = other DNA
ctaaggtgaagcataacttg

SEQ ID NO: 41514 - DNA, 20 bp, synthetic construct
  misc_feature 1..20: note = chemically synthesized
  source 1..20: mol_type = other DNA
cacaatgcctggtgggccta

SEQ ID NO: 41515 - DNA, 20 bp, synthetic construct
  misc_feature 1..20: note = chemically synthesized
  source 1..20: mol_type = other DNA
gattttggaggcaacacatt

SEQ ID NO: 41516 - DNA, 20 bp, synthetic construct
  misc_feature 1..20: note = chemically synthesized
  source 1..20: mol_type = other DNA
atcgagtgacctgaaaggct

SEQ ID NO: 41517 - DNA, 20 bp, synthetic construct
  misc_feature 1..20: note = chemically synthesized
  source 1..20: mol_type = other DNA
acatgaccccgcagatccaa

SEQ ID NO: 41518 - DNA, 20 bp, synthetic construct
  misc_feature 1..20: note = chemically synthesized
  source 1..20: mol_type = other DNA
gtgtcagtggcagataggga

SEQ ID NO: 41519 - DNA, 20 bp, synthetic construct
  misc_feature 1..20: note = chemically synthesized
  source 1..20: mol_type = other DNA
gtgaatcacagtggagacct

SEQ ID NO: 41520 - DNA, 20 bp, synthetic construct
  misc_feature 1..20: note = chemically synthesized
  source 1..20: mol_type = other DNA
agacagctattggtctgtta

SEQ ID NO: 41521 - DNA, 20 bp, synthetic construct
  misc_feature 1..20: note = chemically synthesized
  source 1..20: mol_type = other DNA
attgggctttggtggtaact

SEQ ID NO: 41522 - DNA, 20 bp, synthetic construct
  misc_feature 1..20: note = chemically synthesized
  source 1..20: mol_type = other DNA
gaacctgcctatcatgaact

SEQ ID NO: 41523 - DNA, 20 bp, synthetic construct
  misc_feature 1..20: note = chemically synthesized
  source 1..20: mol_type = other DNA
ttgaagtggtgtgtatgtga

SEQ ID NO: 41524 - DNA, 20 bp, synthetic construct
  misc_feature 1..20: note = chemically synthesized
  source 1..20: mol_type = other DNA
tttttcctttatcatgtgac

SEQ ID NO: 41525 - DNA, 20 bp, synthetic construct
  misc_feature 1..20: note = chemically synthesized
  source 1..20: mol_type = other DNA
gttaaccttatgtaataact

SEQ ID NO: 41526 - DNA, 20 bp, synthetic construct
  misc_feature 1..20: note = chemically synthesized
  source 1..20: mol_type = other DNA
ttatgtaataacttttggtt

SEQ ID NO: 41527 - DNA, 20 bp, synthetic construct
  misc_feature 1..20: note = chemically synthesized
  source 1..20: mol_type = other DNA
aacttttggtttggggattg

SEQ ID NO: 41528 - DNA, 20 bp, synthetic construct
  misc_feature 1..20: note = chemically synthesized
  source 1..20: mol_type = other DNA
accttattattgtctttatt

SEQ ID NO: 41529 - DNA, 20 bp, synthetic construct
  misc_feature 1..20: note = chemically synthesized
  source 1..20: mol_type = other DNA
tgtctttatttgaagattat

SEQ ID NO: 41530 - DNA, 20 bp, synthetic construct
  misc_feature 1..20: note = chemically synthesized
  source 1..20: mol_type = other DNA
tgtgatggttaatactgtca

SEQ ID NO: 41531 - DNA, 20 bp, synthetic construct
  misc_feature 1..20: note = chemically synthesized
  source 1..20: mol_type = other DNA
tggttaatactgtcaacttg

SEQ ID NO: 41532 - DNA, 20 bp, synthetic construct
  misc_feature 1..20: note = chemically synthesized
  source 1..20: mol_type = other DNA
gtctgtgagggtgtggcaaa

SEQ ID NO: 41533 - DNA, 22 bp, synthetic construct
  misc_feature 1..22: note = chemically synthesized
  source 1..22: mol_type = other DNA
ccagcccactgactcaaatgtt

SEQ ID NO: 41534 - DNA, 22 bp, synthetic construct
  misc_feature 1..22: note = chemically synthesized
  source 1..22: mol_type = other DNA
actcaaatgttaatctcctttt

SEQ ID NO: 41535 - DNA, 22 bp, synthetic construct
  misc_feature 1..22: note = chemically synthesized
  source 1..22: mol_type = other DNA
aaatgttaatctccttttgcca

SEQ ID NO: 41536 - DNA, 22 bp, synthetic construct
  misc_feature 1..22: note = chemically synthesized
  source 1..22: mol_type = other DNA
atctccttttgccacaccctca

SEQ ID NO: 41537 - DNA, 22 bp, synthetic construct
  misc_feature 1..22: note = chemically synthesized
  source 1..22: mol_type = other DNA
cttttgccacaccctcacagac

SEQ ID NO: 41538 - DNA, 22 bp, synthetic construct
  misc_feature 1..22: note = chemically synthesized
  source 1..22: mol_type = other DNA
ttgccacaccctcacagacata

SEQ ID NO: 41539 - DNA, 22 bp, synthetic construct
  misc_feature 1..22: note = chemically synthesized
  source 1..22: mol_type = other DNA
tgccacaccctcacagacataa

SEQ ID NO: 41540 - DNA, 22 bp, synthetic construct
  misc_feature 1..22: note = chemically synthesized
  source 1..22: mol_type = other DNA
gccacaccctcacagacataac

SEQ ID NO: 41541 - DNA, 22 bp, synthetic construct
  misc_feature 1..22: note = chemically synthesized
  source 1..22: mol_type = other DNA
ccacaccctcacagacataacc

SEQ ID NO: 41542 - DNA, 22 bp, synthetic construct
  misc_feature 1..22: note = chemically synthesized
  source 1..22: mol_type = other DNA
acagacataaccgagattaata

SEQ ID NO: 41543 - DNA, 22 bp, synthetic construct
  misc_feature 1..22: note = chemically synthesized
  source 1..22: mol_type = other DNA
atactttgcatctttcaatcca

SEQ ID NO: 41544 - DNA, 22 bp, synthetic construct
  misc_feature 1..22: note = chemically synthesized
  source 1..22: mol_type = other DNA
tgcatctttcaatccaatcaag

SEQ ID NO: 41545 - DNA, 22 bp, synthetic construct
  misc_feature 1..22: note = chemically synthesized
  source 1..22: mol_type = other DNA
gcatctttcaatccaatcaagt

SEQ ID NO: 41546 - DNA, 22 bp, synthetic construct
  misc_feature 1..22: note = chemically synthesized
  source 1..22: mol_type = other DNA
catctttcaatccaatcaagtt

SEQ ID NO: 41547 - DNA, 22 bp, synthetic construct
  misc_feature 1..22: note = chemically synthesized
  source 1..22: mol_type = other DNA
tcaatccaatcaagttgacagt

SEQ ID NO: 41548 - DNA, 22 bp, synthetic construct
  misc_feature 1..22: note = chemically synthesized
  source 1..22: mol_type = other DNA
caatccaatcaagttgacagta

SEQ ID NO: 41549 - DNA, 22 bp, synthetic construct
  misc_feature 1..22: note = chemically synthesized
  source 1..22: mol_type = other DNA
aatccaatcaagttgacagtat

SEQ ID NO: 41550 - DNA, 22 bp, synthetic construct
  misc_feature 1..22: note = chemically synthesized
  source 1..22: mol_type = other DNA
acagtattaaccatcacaagtc

SEQ ID NO: 41551 - DNA, 22 bp, synthetic construct
  misc_feature 1..22: note = chemically synthesized
  source 1..22: mol_type = other DNA
accatcacaagtccaactcctt

SEQ ID NO: 41552 - DNA, 22 bp, synthetic construct
  misc_feature 1..22: note = chemically synthesized
  source 1..22: mol_type = other DNA
cttgtcaacttgaacccataca

SEQ ID NO: 41553 - DNA, 22 bp, synthetic construct
  misc_feature 1..22: note = chemically synthesized
  source 1..22: mol_type = other DNA
gtcaacttgaacccatacacac

SEQ ID NO: 41554 - DNA, 22 bp, synthetic construct
  misc_feature 1..22: note = chemically synthesized
  source 1..22: mol_type = other DNA
tcaacttgaacccatacacaca

SEQ ID NO: 41555 - DNA, 22 bp, synthetic construct
  misc_feature 1..22: note = chemically synthesized
  source 1..22: mol_type = other DNA
gaacccatacacacatcctgaa

SEQ ID NO: 41556 - DNA, 22 bp, synthetic construct
  misc_feature 1..22: note = chemically synthesized
  source 1..22: mol_type = other DNA
aacccatacacacatcctgaaa

SEQ ID NO: 41557 - DNA, 22 bp, synthetic construct
  misc_feature 1..22: note = chemically synthesized
  source 1..22: mol_type = other DNA
aaatcatacataatcttcaaat

SEQ ID NO: 41558 - DNA, 22 bp, synthetic construct
  misc_feature 1..22: note = chemically synthesized
  source 1..22: mol_type = other DNA
caaataaagacaataataaggt

SEQ ID NO: 41559 - DNA, 22 bp, synthetic construct
  misc_feature 1..22: note = chemically synthesized
  source 1..22: mol_type = other DNA
aaataaagacaataataaggtc

SEQ ID NO: 41560 - DNA, 22 bp, synthetic construct
  misc_feature 1..22: note = chemically synthesized
  source 1..22: mol_type = other DNA
tgcctaatataatacaactatc

SEQ ID NO: 41561 - DNA, 22 bp, synthetic construct
  misc_feature 1..22: note = chemically synthesized
  source 1..22: mol_type = other DNA
atataatacaactatcctcata

SEQ ID NO: 41562 - DNA, 22 bp, synthetic construct
  misc_feature 1..22: note = chemically synthesized
  source 1..22: mol_type = other DNA
tcctcatacaaccagaaacgca

SEQ ID NO: 41563 - DNA, 22 bp, synthetic construct
  misc_feature 1..22: note = chemically synthesized
  source 1..22: mol_type = other DNA
atacaaccagaaacgcaccaat

SEQ ID NO: 41564 - DNA, 22 bp, synthetic construct
  misc_feature 1..22: note = chemically synthesized
  source 1..22: mol_type = other DNA
ttacataaggttaacaatattt

SEQ ID NO: 41565 - DNA, 22 bp, synthetic construct
  misc_feature 1..22: note = chemically synthesized
  source 1..22: mol_type = other DNA
cataaggttaacaatatttaaa

SEQ ID NO: 41566 - DNA, 22 bp, synthetic construct
  misc_feature 1..22: note = chemically synthesized
  source 1..22: mol_type = other DNA
acaatatttaaatgctgatatg

SEQ ID NO: 41567 - DNA, 22 bp, synthetic construct
  misc_feature 1..22: note = chemically synthesized
  source 1..22: mol_type = other DNA
aaatgctgatatgaacaacact

SEQ ID NO: 41568 - DNA, 22 bp, synthetic construct
  misc_feature 1..22: note = chemically synthesized
  source 1..22: mol_type = other DNA
aatgctgatatgaacaacactt

SEQ ID NO: 41569 - DNA, 22 bp, synthetic construct
  misc_feature 1..22: note = chemically synthesized
  source 1..22: mol_type = other DNA
atatgaacaacacttaaatgct

SEQ ID NO: 41570 - DNA, 22 bp, synthetic construct
  misc_feature 1..22: note = chemically synthesized
  source 1..22: mol_type = other DNA
aaatgcttaaatgctgatgtga

SEQ ID NO: 41571 - DNA, 22 bp, synthetic construct
  misc_feature 1..22: note = chemically synthesized
  source 1..22: mol_type = other DNA
aatgcttaaatgctgatgtgaa

SEQ ID NO: 41572 - DNA, 22 bp, synthetic construct
  misc_feature 1..22: note = chemically synthesized
  source 1..22: mol_type = other DNA
aaatgctgatgtgaagtccata

SEQ ID NO: 41573 - DNA, 22 bp, synthetic construct
  misc_feature 1..22: note = chemically synthesized
  source 1..22: mol_type = other DNA
aatgctgatgtgaagtccataa

SEQ ID NO: 41574 - DNA, 22 bp, synthetic construct
  misc_feature 1..22: note = chemically synthesized
  source 1..22: mol_type = other DNA
atgtgaagtccataaatctaag

SEQ ID NO: 41575 - DNA, 22 bp, synthetic construct
  misc_feature 1..22: note = chemically synthesized
  source 1..22: mol_type = other DNA
aggtcacatgataaaggaaaaa

SEQ ID NO: 41576 - DNA, 22 bp, synthetic construct
  misc_feature 1..22: note = chemically synthesized
  source 1..22: mol_type = other DNA
tcttagcacaagtgtacacatg

SEQ ID NO: 41577 - DNA, 22 bp, synthetic construct
  misc_feature 1..22: note = chemically synthesized
  source 1..22: mol_type = other DNA
cttagcacaagtgtacacatgc

SEQ ID NO: 41578 - DNA, 22 bp, synthetic construct
  misc_feature 1..22: note = chemically synthesized
  source 1..22: mol_type = other DNA
ttagcacaagtgtacacatgca

SEQ ID NO: 41579 - DNA, 22 bp, synthetic construct
  misc_feature 1..22: note = chemically synthesized
  source 1..22: mol_type = other DNA
agcacaagtgtacacatgcatt

SEQ ID NO: 41580 - DNA, 22 bp, synthetic construct
  misc_feature 1..22: note = chemically synthesized
  source 1..22: mol_type = other DNA
gcacaagtgtacacatgcattt

SEQ ID NO: 41581 - DNA, 22 bp, synthetic construct
  misc_feature 1..22: note = chemically synthesized
  source 1..22: mol_type = other DNA
agaaagtggatatagtgctgca

SEQ ID NO: 41582 - DNA, 22 bp, synthetic construct
  misc_feature 1..22: note = chemically synthesized
  source 1..22: mol_type = other DNA
gaaagtggatatagtgctgcag

SEQ ID NO: 41583 - DNA, 22 bp, synthetic construct
  misc_feature 1..22: note = chemically synthesized
  source 1..22: mol_type = other DNA
cagctgtccactttcgggtggt

SEQ ID NO: 41584 - DNA, 22 bp, synthetic construct
  misc_feature 1..22: note = chemically synthesized
  source 1..22: mol_type = other DNA
tccactttcgggtggtgcctgc

SEQ ID NO: 41585 - DNA, 22 bp, synthetic construct
  misc_feature 1..22: note = chemically synthesized
  source 1..22: mol_type = other DNA
tcgggtggtgcctgcatatcgt

SEQ ID NO: 41586 - DNA, 22 bp, synthetic construct
  misc_feature 1..22: note = chemically synthesized
  source 1..22: mol_type = other DNA
cgggtggtgcctgcatatcgtg

SEQ ID NO: 41587 - DNA, 22 bp, synthetic construct
  misc_feature 1..22: note = chemically synthesized
  source 1..22: mol_type = other DNA
gggtggtgcctgcatatcgtgc

SEQ ID NO: 41588 - DNA, 22 bp, synthetic construct
  misc_feature 1..22: note = chemically synthesized
  source 1..22: mol_type = other DNA
catatcgtgcagaaccatctat

SEQ ID NO: 41589 - DNA, 22 bp, synthetic construct
  misc_feature 1..22: note = chemically synthesized
  source 1..22: mol_type = other DNA
tgaaccagtccttagtcttccc

SEQ ID NO: 41590 - DNA, 22 bp, synthetic construct
  misc_feature 1..22: note = chemically synthesized
  source 1..22: mol_type = other DNA
agtcttcccttcctctgtcaac

SEQ ID NO: 41591 - DNA, 22 bp, synthetic construct
  misc_feature 1..22: note = chemically synthesized
  source 1..22: mol_type = other DNA
gtcttcccttcctctgtcaact

SEQ ID NO: 41592 - DNA, 22 bp, synthetic construct
  misc_feature 1..22: note = chemically synthesized
  source 1..22: mol_type = other DNA
cccttcctctgtcaactgatca

SEQ ID NO: 41593 - DNA, 22 bp, synthetic construct
  misc_feature 1..22: note = chemically synthesized
  source 1..22: mol_type = other DNA
ccttcctctgtcaactgatcat

SEQ ID NO: 41594 - DNA, 22 bp, synthetic construct
  misc_feature 1..22: note = chemically synthesized
  source 1..22: mol_type = other DNA
cctctgtcaactgatcataggg

SEQ ID NO: 41595 - DNA, 22 bp, synthetic construct
  misc_feature 1..22: note = chemically synthesized
  source 1..22: mol_type = other DNA
ctctgtcaactgatcataggga

SEQ ID NO: 41596 - DNA, 22 bp, synthetic construct
  misc_feature 1..22: note = chemically synthesized
  source 1..22: mol_type = other DNA
tgtcaactgatcatagggaact

SEQ ID NO: 41597 - DNA, 22 bp, synthetic construct
  misc_feature 1..22: note = chemically synthesized
  source 1..22: mol_type = other DNA
tcaactgatcatagggaactcc

SEQ ID NO: 41598 - DNA, 22 bp, synthetic construct
  misc_feature 1..22: note = chemically synthesized
  source 1..22: mol_type = other DNA
atcatagggaactccccatgag

SEQ ID NO: 41599 - DNA, 22 bp, synthetic construct
  misc_feature 1..22: note = chemically synthesized
  source 1..22: mol_type = other DNA
cccatgaggccattggtgcagg

SEQ ID NO: 41600 - DNA, 22 bp, synthetic construct
  misc_feature 1..22: note = chemically synthesized
  source 1..22: mol_type = other DNA
gtgcaggctgggggagggaagg

SEQ ID NO: 41601 - DNA, 22 bp, synthetic construct
  misc_feature 1..22: note = chemically synthesized
  source 1..22: mol_type = other DNA
ggggagggaaggcagggtggca

SEQ ID NO: 41602 - DNA, 22 bp, synthetic construct
  misc_feature 1..22: note = chemically synthesized
  source 1..22: mol_type = other DNA
gagccacttccttatgtaactt

SEQ ID NO: 41603 - DNA, 22 bp, synthetic construct
  misc_feature 1..22: note = chemically synthesized
  source 1..22: mol_type = other DNA
agccacttccttatgtaactta

SEQ ID NO: 41604 - DNA, 22 bp, synthetic construct
  misc_feature 1..22: note = chemically synthesized
  source 1..22: mol_type = other DNA
ccttatgtaacttacttgtgcc

SEQ ID NO: 41605 - DNA, 22 bp, synthetic construct
  misc_feature 1..22: note = chemically synthesized
  source 1..22: mol_type = other DNA
cttatgtaacttacttgtgcct

SEQ ID NO: 41606 - DNA, 22 bp, synthetic construct
  misc_feature 1..22: note = chemically synthesized
  source 1..22: mol_type = other DNA
atgtaacttacttgtgccttca

SEQ ID NO: 41607 - DNA, 22 bp, synthetic construct
  misc_feature 1..22: note = chemically synthesized
  source 1..22: mol_type = other DNA
tgtaacttacttgtgccttcag

SEQ ID NO: 41608 - DNA, 22 bp, synthetic construct
  misc_feature 1..22: note = chemically synthesized
  source 1..22: mol_type = other DNA
acttgtgccttcaggacctgct

SEQ ID NO: 41609 - DNA, 22 bp, synthetic construct
  misc_feature 1..22: note = chemically synthesized
  source 1..22: mol_type = other DNA
cttgtgccttcaggacctgctc

SEQ ID NO: 41610 - DNA, 22 bp, synthetic construct
  misc_feature 1..22: note = chemically synthesized
  source 1..22: mol_type = other DNA
gtgccttcaggacctgctcaag

SEQ ID NO: 41611 - DNA, 22 bp, synthetic construct
  misc_feature 1..22: note = chemically synthesized
  source 1..22: mol_type = other DNA
tgccttcaggacctgctcaagc

SEQ ID NO: 41612 - DNA, 22 bp, synthetic construct
  misc_feature 1..22: note = chemically synthesized
  source 1..22: mol_type = other DNA
caggacctgctcaagcccgatc

SEQ ID NO: 41613 - DNA, 22 bp, synthetic construct
  misc_feature 1..22: note = chemically synthesized
  source 1..22: mol_type = other DNA
aggacctgctcaagcccgatca

SEQ ID NO: 41614 - DNA, 22 bp, synthetic construct
  misc_feature 1..22: note = chemically synthesized
  source 1..22: mol_type = other DNA
ctcaagcccgatcacatacaca

SEQ ID NO: 41615 - DNA, 22 bp, synthetic construct
  misc_feature 1..22: note = chemically synthesized
  source 1..22: mol_type = other DNA
aagcccgatcacatacacacca

SEQ ID NO: 41616 - DNA, 22 bp, synthetic construct
  misc_feature 1..22: note = chemically synthesized
  source 1..22: mol_type = other DNA
caatttgatgatgaaatgccgc

SEQ ID NO: 41617 - DNA, 22 bp, synthetic construct
  misc_feature 1..22: note = chemically synthesized
  source 1..22: mol_type = other DNA
aatttgatgatgaaatgccgct

SEQ ID NO: 41618 - DNA, 22 bp, synthetic construct
  misc_feature 1..22: note = chemically synthesized
  source 1..22: mol_type = other DNA
gatgatgaaatgccgctgtgct

SEQ ID NO: 41619 - DNA, 22 bp, synthetic construct
  misc_feature 1..22: note = chemically synthesized
  source 1..22: mol_type = other DNA
atgatgaaatgccgctgtgctg

SEQ ID NO: 41620 - DNA, 22 bp, synthetic construct
  misc_feature 1..22: note = chemically synthesized
  source 1..22: mol_type = other DNA
tgctgacccacttcatggctag

SEQ ID NO: 41621 - DNA, 22 bp, synthetic construct
  misc_feature 1..22: note = chemically synthesized
  source 1..22: mol_type = other DNA
acccacttcatggctagatggg

SEQ ID NO: 41622 - DNA, 22 bp, synthetic construct
  misc_feature 1..22: note = chemically synthesized
  source 1..22: mol_type = other DNA
catggctagatgggtcagaaag

SEQ ID NO: 41623 - DNA, 22 bp, synthetic construct
  misc_feature 1..22: note = chemically synthesized
  source 1..22: mol_type = other DNA
atggctagatgggtcagaaagc

SEQ ID NO: 41624 - DNA, 22 bp, synthetic construct
  misc_feature 1..22: note = chemically synthesized
  source 1..22: mol_type = other DNA
gatgggtcagaaagcaaccagt

SEQ ID NO: 41625 - DNA, 22 bp, synthetic construct
  misc_feature 1..22: note = chemically synthesized
  source 1..22: mol_type = other DNA
atgataggcaggttcaggtagc

SEQ ID NO: 41626 - DNA, 22 bp, synthetic construct
  misc_feature 1..22: note = chemically synthesized
  source 1..22: mol_type = other DNA
aggtagcatggtgactttatga

SEQ ID NO: 41627 - DNA, 22 bp, synthetic construct
  misc_feature 1..22: note = chemically synthesized
  source 1..22: mol_type = other DNA
tatgacccacagtcaaacgttc

SEQ ID NO: 41628 - DNA, 22 bp, synthetic construct
  misc_feature 1..22: note = chemically synthesized
  source 1..22: mol_type = other DNA
atgacccacagtcaaacgttca

SEQ ID NO: 41629 - DNA, 22 bp, synthetic construct
  misc_feature 1..22: note = chemically synthesized
  source 1..22: mol_type = other DNA
tgacccacagtcaaacgttcag

SEQ ID NO: 41630 - DNA, 22 bp, synthetic construct
  misc_feature 1..22: note = chemically synthesized
  source 1..22: mol_type = other DNA
agttaccaccaaagcccaataa

SEQ ID NO: 41631 - DNA, 22 bp, synthetic construct
  misc_feature 1..22: note = chemically synthesized
  source 1..22: mol_type = other DNA
ccaccaaagcccaataacagac

SEQ ID NO: 41632 - DNA, 22 bp, synthetic construct
  misc_feature 1..22: note = chemically synthesized
  source 1..22: mol_type = other DNA
tctctcaaaaggagagtagtta

SEQ ID NO: 41633 - DNA, 22 bp, synthetic construct
  misc_feature 1..22: note = chemically synthesized
  source 1..22: mol_type = other DNA
tcaaaaggagagtagttatctg

SEQ ID NO: 41634 - DNA, 22 bp, synthetic construct
  misc_feature 1..22: note = chemically synthesized
  source 1..22: mol_type = other DNA
aaaaggagagtagttatctgca

SEQ ID NO: 41635 - DNA, 22 bp, synthetic construct
  misc_feature 1..22: note = chemically synthesized
  source 1..22: mol_type = other DNA
tctgcagaagtggcagggcctt

SEQ ID NO: 41636 - DNA, 22 bp, synthetic construct
  misc_feature 1..22: note = chemically synthesized
  source 1..22: mol_type = other DNA
cagaagtggcagggccttgctc

SEQ ID NO: 41637 - DNA, 22 bp, synthetic construct
  misc_feature 1..22: note = chemically synthesized
  source 1..22: mol_type = other DNA
gctccaaaatcctagaggtctc

SEQ ID NO: 41638 - DNA, 22 bp, synthetic construct
  misc_feature 1..22: note = chemically synthesized
  source 1..22: mol_type = other DNA
ctccaaaatcctagaggtctcc

SEQ ID NO: 41639 - DNA, 22 bp, synthetic construct
  misc_feature 1..22: note = chemically synthesized
  source 1..22: mol_type = other DNA
caaaatcctagaggtctccact

SEQ ID NO: 41640 - DNA, 22 bp, synthetic construct
  misc_feature 1..22: note = chemically synthesized
  source 1..22: mol_type = other DNA
gaggtctccactgtgattcacc

SEQ ID NO: 41641 - DNA, 22 bp, synthetic construct
  misc_feature 1..22: note = chemically synthesized
  source 1..22: mol_type = other DNA
cactgtgattcacctatggggg

SEQ ID NO: 41642 - DNA, 22 bp, synthetic construct
  misc_feature 1..22: note = chemically synthesized
  source 1..22: mol_type = other DNA
tgattcacctatgggggcctgc

SEQ ID NO: 41643 - DNA, 22 bp, synthetic construct
  misc_feature 1..22: note = chemically synthesized
  source 1..22: mol_type = other DNA
acctatgggggcctgccaaagg

SEQ ID NO: 41644 - DNA, 22 bp, synthetic construct
  misc_feature 1..22: note = chemically synthesized
  source 1..22: mol_type = other DNA
tgggggcctgccaaaggctcca

SEQ ID NO: 41645 - DNA, 22 bp, synthetic construct
  misc_feature 1..22: note = chemically synthesized
  source 1..22: mol_type = other DNA
ccaaaggctccaaacagcatcc

SEQ ID NO: 41646 - DNA, 22 bp, synthetic construct
  misc_feature 1..22: note = chemically synthesized
  source 1..22: mol_type = other DNA
caaacagcatccctatctgcca

SEQ ID NO: 41647 - DNA, 22 bp, synthetic construct
  misc_feature 1..22: note = chemically synthesized
  source 1..22: mol_type = other DNA
tctgccactgacacctcaagca

SEQ ID NO: 41648 - DNA, 22 bp, synthetic construct
  misc_feature 1..22: note = chemically synthesized
  source 1..22: mol_type = other DNA
ccactgacacctcaagcaccat

SEQ ID NO: 41649 - DNA, 22 bp, synthetic construct
  misc_feature 1..22: note = chemically synthesized
  source 1..22: mol_type = other DNA
acacctcaagcaccattggatc

SEQ ID NO: 41650 - DNA, 22 bp, synthetic construct
  misc_feature 1..22: note = chemically synthesized
  source 1..22: mol_type = other DNA
aagcaccattggatctgcgggg

SEQ ID NO: 41651 - DNA, 22 bp, synthetic construct
  misc_feature 1..22: note = chemically synthesized
  source 1..22: mol_type = other DNA
gatctgcggggtcatgtggccc

SEQ ID NO: 41652 - DNA, 22 bp, synthetic construct
  misc_feature 1..22: note = chemically synthesized
  source 1..22: mol_type = other DNA
cggggtcatgtggcccaaatgg

SEQ ID NO: 41653 - DNA, 22 bp, synthetic construct
  misc_feature 1..22: note = chemically synthesized
  source 1..22: mol_type = other DNA
tcacagcagcctggacctgttt

SEQ ID NO: 41654 - DNA, 22 bp, synthetic construct
  misc_feature 1..22: note = chemically synthesized
  source 1..22: mol_type = other DNA
cacagcagcctggacctgtttc

SEQ ID NO: 41655 - DNA, 22 bp, synthetic construct
  misc_feature 1..22: note = chemically synthesized
  source 1..22: mol_type = other DNA
acagcagcctggacctgtttca

SEQ ID NO: 41656 - DNA, 22 bp, synthetic construct
  misc_feature 1..22: note = chemically synthesized
  source 1..22: mol_type = other DNA
gacctgtttcagagccttcttt

SEQ ID NO: 41657 - DNA, 22 bp, synthetic construct
  misc_feature 1..22: note = chemically synthesized
  source 1..22: mol_type = other DNA
tttcagagccttcttttgttct

SEQ ID NO: 41658 - DNA, 22 bp, synthetic construct
  misc_feature 1..22: note = chemically synthesized
  source 1..22: mol_type = other DNA
cagagccttcttttgttctaga

SEQ ID NO: 41659 - DNA, 22 bp, synthetic construct
  misc_feature 1..22: note = chemically synthesized
  source 1..22: mol_type = other DNA
agagccttcttttgttctagac

SEQ ID NO: 41660 - DNA, 22 bp, synthetic construct
  misc_feature 1..22: note = chemically synthesized
  source 1..22: mol_type = other DNA
cttttgttctagactgcactta

SEQ ID NO: 41661 - DNA, 22 bp, synthetic construct
  misc_feature 1..22: note = chemically synthesized
  source 1..22: mol_type = other DNA
ttttgttctagactgcacttaa

SEQ ID NO: 41662 - DNA, 22 bp, synthetic construct
  misc_feature 1..22: note = chemically synthesized
  source 1..22: mol_type = other DNA
ttgttctagactgcacttaaat

SEQ ID NO: 41663 - DNA, 22 bp, synthetic construct
  misc_feature 1..22: note = chemically synthesized
  source 1..22: mol_type = other DNA
tgttctagactgcacttaaatc

SEQ ID NO: 41664 - DNA, 22 bp, synthetic construct
  misc_feature 1..22: note = chemically synthesized
  source 1..22: mol_type = other DNA
gttctagactgcacttaaatct

SEQ ID NO: 41665 - DNA, 22 bp, synthetic construct
  misc_feature 1..22: note = chemically synthesized
  source 1..22: mol_type = other DNA
ttctagactgcacttaaatctg

SEQ ID NO: 41666 - DNA, 22 bp, synthetic construct
  misc_feature 1..22: note = chemically synthesized
  source 1..22: mol_type = other DNA
tagactgcacttaaatctggca

SEQ ID NO: 41667 - DNA, 22 bp, synthetic construct
  misc_feature 1..22: note = chemically synthesized
  source 1..22: mol_type = other DNA
gactgcacttaaatctggcagc

SEQ ID NO: 41668 - DNA, 22 bp, synthetic construct
  misc_feature 1..22: note = chemically synthesized
  source 1..22: mol_type = other DNA
cacttaaatctggcagcctttc

SEQ ID NO: 41669 - DNA, 22 bp, synthetic construct
  misc_feature 1..22: note = chemically synthesized
  source 1..22: mol_type = other DNA
aaatctggcagcctttcaggtc

SEQ ID NO: 41670 - DNA, 22 bp, synthetic construct
  misc_feature 1..22: note = chemically synthesized
  source 1..22: mol_type = other DNA
aatctggcagcctttcaggtca

SEQ ID NO: 41671 - DNA, 22 bp, synthetic construct
  misc_feature 1..22: note = chemically synthesized
  source 1..22: mol_type = other DNA
gcagcctttcaggtcactcgat

SEQ ID NO: 41672 - DNA, 22 bp, synthetic construct
  misc_feature 1..22: note = chemically synthesized
  source 1..22: mol_type = other DNA
tcaggtcactcgataaatgggc

SEQ ID NO: 41673 - DNA, 22 bp, synthetic construct
  misc_feature 1..22: note = chemically synthesized
  source 1..22: mol_type = other DNA
caggtcactcgataaatgggcc

SEQ ID NO: 41674 - DNA, 22 bp, synthetic construct
  misc_feature 1..22: note = chemically synthesized
  source 1..22: mol_type = other DNA
aggtcactcgataaatgggcca

SEQ ID NO: 41675 - DNA, 22 bp, synthetic construct
  misc_feature 1..22: note = chemically synthesized
  source 1..22: mol_type = other DNA
gataaatgggccagagtaacac

SEQ ID NO: 41676 - DNA, 22 bp, synthetic construct
  misc_feature 1..22: note = chemically synthesized
  source 1..22: mol_type = other DNA
cctccaaaatccaaataggccc

SEQ ID NO: 41677 - DNA, 22 bp, synthetic construct
  misc_feature 1..22: note = chemically synthesized
  source 1..22: mol_type = other DNA
caaaatccaaataggcccacca

SEQ ID NO: 41678 - DNA, 22 bp, synthetic construct
  misc_feature 1..22: note = chemically synthesized
  source 1..22: mol_type = other DNA
tgcctctttcttggttgtaaga

SEQ ID NO: 41679 - DNA, 22 bp, synthetic construct
  misc_feature 1..22: note = chemically synthesized
  source 1..22: mol_type = other DNA
tttcttggttgtaagaggggcc

SEQ ID NO: 41680 - DNA, 22 bp, synthetic construct
  misc_feature 1..22: note = chemically synthesized
  source 1..22: mol_type = other DNA
tcttggttgtaagaggggccaa

SEQ ID NO: 41681 - DNA, 22 bp, synthetic construct
  misc_feature 1..22: note = chemically synthesized
  source 1..22: mol_type = other DNA
cttggttgtaagaggggccaaa

SEQ ID NO: 41682 - DNA, 22 bp, synthetic construct
  misc_feature 1..22: note = chemically synthesized
  source 1..22: mol_type = other DNA
ttggttgtaagaggggccaaac

SEQ ID NO: 41683 - DNA, 22 bp, synthetic construct
  misc_feature 1..22: note = chemically synthesized
  source 1..22: mol_type = other DNA
ggttgtaagaggggccaaacgc

SEQ ID NO: 41684 - DNA, 22 bp, synthetic construct
  misc_feature 1..22: note = chemically synthesized
  source 1..22: mol_type = other DNA
gttgtaagaggggccaaacgca

SEQ ID NO: 41685 - DNA, 22 bp, synthetic construct
  misc_feature 1..22: note = chemically synthesized
  source 1..22: mol_type = other DNA
taagaggggccaaacgcagcaa

SEQ ID NO: 41686 - DNA, 22 bp, synthetic construct
  misc_feature 1..22: note = chemically synthesized
  source 1..22: mol_type = other DNA
tgcttcaccttagaaggaatat

SEQ ID NO: 41687 - DNA, 22 bp, synthetic construct
  misc_feature 1..22: note = chemically synthesized
  source 1..22: mol_type = other DNA
caccttagaaggaatatctcca

SEQ ID NO: 41688 - DNA, 22 bp, synthetic construct
  misc_feature 1..22: note = chemically synthesized
  source 1..22: mol_type = other DNA
accttagaaggaatatctccat

SEQ ID NO: 41689 - DNA, 22 bp, synthetic construct
  misc_feature 1..22: note = chemically synthesized
  source 1..22: mol_type = other DNA
agaaggaatatctccataggtc

SEQ ID NO: 41690 - DNA, 22 bp, synthetic construct
  misc_feature 1..22: note = chemically synthesized
  source 1..22: mol_type = other DNA
gaaggaatatctccataggtct

SEQ ID NO: 41691 - DNA, 22 bp, synthetic construct
  misc_feature 1..22: note = chemically synthesized
  source 1..22: mol_type = other DNA
cataggtctcatgccactggaa

SEQ ID NO: 41692 - DNA, 22 bp, synthetic construct
  misc_feature 1..22: note = chemically synthesized
  source 1..22: mol_type = other DNA
atgccactggaaccctagaaat

SEQ ID NO: 41693 - DNA, 22 bp, synthetic construct
  misc_feature 1..22: note = chemically synthesized
  source 1..22: mol_type = other DNA
gaaccctagaaattttaccgag

SEQ ID NO: 41694 - DNA, 22 bp, synthetic construct
  misc_feature 1..22: note = chemically synthesized
  source 1..22: mol_type = other DNA
gaaattttaccgaggtagaaag

SEQ ID NO: 41695 - DNA, 22 bp, synthetic construct
  misc_feature 1..22: note = chemically synthesized
  source 1..22: mol_type = other DNA
taccgaggtagaaagtccctaa

SEQ ID NO: 41696 - DNA, 22 bp, synthetic construct
  misc_feature 1..22: note = chemically synthesized
  source 1..22: mol_type = other DNA
accgaggtagaaagtccctaaa

SEQ ID NO: 41697 - DNA, 22 bp, synthetic construct
  misc_feature 1..22: note = chemically synthesized
  source 1..22: mol_type = other DNA
ccgaggtagaaagtccctaaat

SEQ ID NO: 41698 - DNA, 22 bp, synthetic construct
  misc_feature 1..22: note = chemically synthesized
  source 1..22: mol_type = other DNA
aattttagctggatttatttcc

SEQ ID NO: 41699 - DNA, 22 bp, synthetic construct
  misc_feature 1..22: note = chemically synthesized
  source 1..22: mol_type = other DNA
tagctggatttatttcccatcc

SEQ ID NO: 41700 - DNA, 22 bp, synthetic construct
  misc_feature 1..22: note = chemically synthesized
  source 1..22: mol_type = other DNA
agctggatttatttcccatcct

SEQ ID NO: 41701 - DNA, 22 bp, synthetic construct
  misc_feature 1..22: note = chemically synthesized
  source 1..22: mol_type = other DNA
gctggatttatttcccatcctc

SEQ ID NO: 41702 - DNA, 22 bp, synthetic construct
  misc_feature 1..22: note = chemically synthesized
  source 1..22: mol_type = other DNA
gatttatttcccatcctctggc

SEQ ID NO: 41703 - DNA, 22 bp, synthetic construct
  misc_feature 1..22: note = chemically synthesized
  source 1..22: mol_type = other DNA
atttcccatcctctggcataca

SEQ ID NO: 41704 - DNA, 22 bp, synthetic construct
  misc_feature 1..22: note = chemically synthesized
  source 1..22: mol_type = other DNA
tttcccatcctctggcatacaa

SEQ ID NO: 41705 - DNA, 22 bp, synthetic construct
  misc_feature 1..22: note = chemically synthesized
  source 1..22: mol_type = other DNA
cccatcctctggcatacaaatg

SEQ ID NO: 41706 - DNA, 22 bp, synthetic construct
  misc_feature 1..22: note = chemically synthesized
  source 1..22: mol_type = other DNA
ccatcctctggcatacaaatgt

SEQ ID NO: 41707 - DNA, 22 bp, synthetic construct
  misc_feature 1..22: note = chemically synthesized
  source 1..22: mol_type = other DNA
tggcatacaaatgtctcaccaa

SEQ ID NO: 41708 - DNA, 22 bp, synthetic construct
  misc_feature 1..22: note = chemically synthesized
  source 1..22: mol_type = other DNA
gcatacaaatgtctcaccaata

SEQ ID NO: 41709 - DNA, 22 bp, synthetic construct
  misc_feature 1..22: note = chemically synthesized
  source 1..22: mol_type = other DNA
accaataagttcagtgtgtttg

SEQ ID NO: 41710 - DNA, 22 bp, synthetic construct
  misc_feature 1..22: note = chemically synthesized
  source 1..22: mol_type = other DNA
agtgtgtttgctacttcttgct

SEQ ID NO: 41711 - DNA, 22 bp, synthetic construct
  misc_feature 1..22: note = chemically synthesized
  source 1..22: mol_type = other DNA
gctacttcttgctcactgtatc

SEQ ID NO: 41712 - DNA, 22 bp, synthetic construct
  misc_feature 1..22: note = chemically synthesized
  source 1..22: mol_type = other DNA
ctacttcttgctcactgtatcc

SEQ ID NO: 41713 - DNA, 22 bp, synthetic construct
  misc_feature 1..22: note = chemically synthesized
  source 1..22: mol_type = other DNA
cttcttgctcactgtatccaat

SEQ ID NO: 41714 - DNA, 22 bp, synthetic construct
  misc_feature 1..22: note = chemically synthesized
  source 1..22: mol_type = other DNA
cttgctcactgtatccaatcat

SEQ ID NO: 41715 - DNA, 22 bp, synthetic construct
  misc_feature 1..22: note = chemically synthesized
  source 1..22: mol_type = other DNA
ttgctcactgtatccaatcatc

SEQ ID NO: 41716 - DNA, 22 bp, synthetic construct
  misc_feature 1..22: note = chemically synthesized
  source 1..22: mol_type = other DNA
gctcactgtatccaatcatcat

SEQ ID NO: 41717 - DNA, 22 bp, synthetic construct
  misc_feature 1..22: note = chemically synthesized
  source 1..22: mol_type = other DNA
ctcactgtatccaatcatcata

SEQ ID NO: 41718 - DNA, 22 bp, synthetic construct
  misc_feature 1..22: note = chemically synthesized
  source 1..22: mol_type = other DNA
actgtatccaatcatcataatg

SEQ ID NO: 41719 - DNA, 22 bp, synthetic construct
  misc_feature 1..22: note = chemically synthesized
  source 1..22: mol_type = other DNA
tatccaatcatcataatgtcat

SEQ ID NO: 41720 - DNA, 22 bp, synthetic construct
  misc_feature 1..22: note = chemically synthesized
  source 1..22: mol_type = other DNA
tatctcgtggaagtgaaaagcg

SEQ ID NO: 41721 - DNA, 22 bp, synthetic construct
  misc_feature 1..22: note = chemically synthesized
  source 1..22: mol_type = other DNA
gtggaagtgaaaagcgagcaag

SEQ ID NO: 41722 - DNA, 22 bp, synthetic construct
  misc_feature 1..22: note = chemically synthesized
  source 1..22: mol_type = other DNA
tccaaataagattatgacacaa

SEQ ID NO: 41723 - DNA, 22 bp, synthetic construct
  misc_feature 1..22: note = chemically synthesized
  source 1..22: mol_type = other DNA
caaataagattatgacacaaag

SEQ ID NO: 41724 - DNA, 22 bp, synthetic construct
  misc_feature 1..22: note = chemically synthesized
  source 1..22: mol_type = other DNA
tgacacaaagctggagagttga

SEQ ID NO: 41725 - DNA, 22 bp, synthetic construct
  misc_feature 1..22: note = chemically synthesized
  source 1..22: mol_type = other DNA
gagagttgatacacccctgagg

SEQ ID NO: 41726 - DNA, 22 bp, synthetic construct
  misc_feature 1..22: note = chemically synthesized
  source 1..22: mol_type = other DNA
atacacccctgaggtagggtgg

SEQ ID NO: 41727 - DNA, 22 bp, synthetic construct
  misc_feature 1..22: note = chemically synthesized
  source 1..22: mol_type = other DNA
aggtagggtggtaaaggtataa

SEQ ID NO: 41728 - DNA, 22 bp, synthetic construct
  misc_feature 1..22: note = chemically synthesized
  source 1..22: mol_type = other DNA
gccttgtcagctgaaggcaaat

SEQ ID NO: 41729 - DNA, 22 bp, synthetic construct
  misc_feature 1..22: note = chemically synthesized
  source 1..22: mol_type = other DNA
gtcagctgaaggcaaattgctt

SEQ ID NO: 41730 - DNA, 22 bp, synthetic construct
  misc_feature 1..22: note = chemically synthesized
  source 1..22: mol_type = other DNA
tcagctgaaggcaaattgcttc

SEQ ID NO: 41731 - DNA, 22 bp, synthetic construct
  misc_feature 1..22: note = chemically synthesized
  source 1..22: mol_type = other DNA
aaggcaaattgcttctggtggg

SEQ ID NO: 41732 - DNA, 22 bp, synthetic construct
  misc_feature 1..22: note = chemically synthesized
  source 1..22: mol_type = other DNA
cttctggtgggtcttatggaca

SEQ ID NO: 41733 - DNA, 22 bp, synthetic construct
  misc_feature 1..22: note = chemically synthesized
  source 1..22: mol_type = other DNA
ctggtgggtcttatggacagga

SEQ ID NO: 41734 - DNA, 22 bp, synthetic construct
  misc_feature 1..22: note = chemically synthesized
  source 1..22: mol_type = other DNA
tggtgggtcttatggacaggaa

SEQ ID NO: 41735 - DNA, 22 bp, synthetic construct
  misc_feature 1..22: note = chemically synthesized
  source 1..22: mol_type = other DNA
gtgggtcttatggacaggaatg

SEQ ID NO: 41736 - DNA, 22 bp, synthetic construct
  misc_feature 1..22: note = chemically synthesized
  source 1..22: mol_type = other DNA
atggacaggaatggagaaaaag

SEQ ID NO: 41737 - DNA, 22 bp, synthetic construct
  misc_feature 1..22: note = chemically synthesized
  source 1..22: mol_type = other DNA
tggacaggaatggagaaaaagc

SEQ ID NO: 41738 - DNA, 22 bp, synthetic construct
  misc_feature 1..22: note = chemically synthesized
  source 1..22: mol_type = other DNA
gccaagccaatggctgcatacc

SEQ ID NO: 41739 - DNA, 22 bp, synthetic construct
  misc_feature 1..22: note = chemically synthesized
  source 1..22: mol_type = other DNA
ccaagccaatggctgcatacca

SEQ ID NO: 41740 - DNA, 22 bp, synthetic construct
  misc_feature 1..22: note = chemically synthesized
  source 1..22: mol_type = other DNA
cataccaggcaccaggagatgt

SEQ ID NO: 41741 - DNA, 22 bp, synthetic construct
  misc_feature 1..22: note = chemically synthesized
  source 1..22: mol_type = other DNA
atttgctcaagcaacaaaacca

SEQ ID NO: 41742 - DNA, 22 bp, synthetic construct
  misc_feature 1..22: note = chemically synthesized
  source 1..22: mol_type = other DNA
gctcaagcaacaaaaccacaac

SEQ ID NO: 41743 - DNA, 22 bp, synthetic construct
  misc_feature 1..22: note = chemically synthesized
  source 1..22: mol_type = other DNA
ctcaagcaacaaaaccacaact

SEQ ID NO: 41744 - DNA, 22 bp, synthetic construct
  misc_feature 1..22: note = chemically synthesized
  source 1..22: mol_type = other DNA
aagcaacaaaaccacaactggt

SEQ ID NO: 41745 - DNA, 22 bp, synthetic construct
  misc_feature 1..22: note = chemically synthesized
  source 1..22: mol_type = other DNA
gtagagcagctgcaattggagt

SEQ ID NO: 41746 - DNA, 22 bp, synthetic construct
  misc_feature 1..22: note = chemically synthesized
  source 1..22: mol_type = other DNA
caattggagtcaccacttggtt

SEQ ID NO: 41747 - DNA, 22 bp, synthetic construct
  misc_feature 1..22: note = chemically synthesized
  source 1..22: mol_type = other DNA
gagtcaccacttggttaagctt

SEQ ID NO: 41748 - DNA, 22 bp, synthetic construct
  misc_feature 1..22: note = chemically synthesized
  source 1..22: mol_type = other DNA
ggttaagcttaaaataatccac

SEQ ID NO: 41749 - DNA, 22 bp, synthetic construct
  misc_feature 1..22: note = chemically synthesized
  source 1..22: mol_type = other DNA
gttaagcttaaaataatccacc

SEQ ID NO: 41750 - DNA, 22 bp, synthetic construct
  misc_feature 1..22: note = chemically synthesized
  source 1..22: mol_type = other DNA
agcttaaaataatccaccatca

SEQ ID NO: 41751 - DNA, 22 bp, synthetic construct
  misc_feature 1..22: note = chemically synthesized
  source 1..22: mol_type = other DNA
aaaataatccaccatcattttc

SEQ ID NO: 41752 - DNA, 22 bp, synthetic construct
  misc_feature 1..22: note = chemically synthesized
  source 1..22: mol_type = other DNA
aaataatccaccatcattttcc

SEQ ID NO: 41753 - DNA, 22 bp, synthetic construct
  misc_feature 1..22: note = chemically synthesized
  source 1..22: mol_type = other DNA
tccaagatccatctgtcctctg

SEQ ID NO: 41754 - DNA, 22 bp, synthetic construct
  misc_feature 1..22: note = chemically synthesized
  source 1..22: mol_type = other DNA
ccaagatccatctgtcctctgc

SEQ ID NO: 41755 - DNA, 22 bp, synthetic construct
  misc_feature 1..22: note = chemically synthesized
  source 1..22: mol_type = other DNA
caagatccatctgtcctctgca

SEQ ID NO: 41756 - DNA, 22 bp, synthetic construct
  misc_feature 1..22: note = chemically synthesized
  source 1..22: mol_type = other DNA
tcctctgcacaggtcaaatggg

SEQ ID NO: 41757 - DNA, 22 bp, synthetic construct
  misc_feature 1..22: note = chemically synthesized
  source 1..22: mol_type = other DNA
tgcacaggtcaaatgggagagt

SEQ ID NO: 41758 - DNA, 22 bp, synthetic construct
  misc_feature 1..22: note = chemically synthesized
  source 1..22: mol_type = other DNA
cacaggtcaaatgggagagttg

SEQ ID NO: 41759 - DNA, 22 bp, synthetic construct
  misc_feature 1..22: note = chemically synthesized
  source 1..22: mol_type = other DNA
aacagggatgtggtgggaatca

SEQ ID NO: 41760 - DNA, 22 bp, synthetic construct
  misc_feature 1..22: note = chemically synthesized
  source 1..22: mol_type = other DNA
cgtctttcaagtccttgatggt

SEQ ID NO: 41761 - DNA, 22 bp, synthetic construct
  misc_feature 1..22: note = chemically synthesized
  source 1..22: mol_type = other DNA
tcaagtccttgatggtgacact

SEQ ID NO: 41762 - DNA, 22 bp, synthetic construct
  misc_feature 1..22: note = chemically synthesized
  source 1..22: mol_type = other DNA
caagtccttgatggtgacacta

SEQ ID NO: 41763 - DNA, 22 bp, synthetic construct
  misc_feature 1..22: note = chemically synthesized
  source 1..22: mol_type = other DNA
aagtccttgatggtgacactaa

SEQ ID NO: 41764 - DNA, 22 bp, synthetic construct
  misc_feature 1..22: note = chemically synthesized
  source 1..22: mol_type = other DNA
gatggtgacactaatcacttca

SEQ ID NO: 41765 - DNA, 22 bp, synthetic construct
  misc_feature 1..22: note = chemically synthesized
  source 1..22: mol_type = other DNA
atggtgacactaatcacttcag

SEQ ID NO: 41766 - DNA, 22 bp, synthetic construct
  misc_feature 1..22: note = chemically synthesized
  source 1..22: mol_type = other DNA
atcacttcagtccctccaggga

SEQ ID NO: 41767 - DNA, 22 bp, synthetic construct
  misc_feature 1..22: note = chemically synthesized
  source 1..22: mol_type = other DNA
cagtccctccagggatgggata

SEQ ID NO: 41768 - DNA, 22 bp, synthetic construct
  misc_feature 1..22: note = chemically synthesized
  source 1..22: mol_type = other DNA
agtccctccagggatgggatat

SEQ ID NO: 41769 - DNA, 22 bp, synthetic construct
  misc_feature 1..22: note = chemically synthesized
  source 1..22: mol_type = other DNA
cagggatgggatattgtttttg

SEQ ID NO: 41770 - DNA, 22 bp, synthetic construct
  misc_feature 1..22: note = chemically synthesized
  source 1..22: mol_type = other DNA
tttttgatttttttatttttct

SEQ ID NO: 41771 - DNA, 22 bp, synthetic construct
  misc_feature 1..22: note = chemically synthesized
  source 1..22: mol_type = other DNA
ttgatttttttatttttctagg

SEQ ID NO: 41772 - DNA, 22 bp, synthetic construct
  misc_feature 1..22: note = chemically synthesized
  source 1..22: mol_type = other DNA
tgatttttttatttttctaggt

SEQ ID NO: 41773 - DNA, 22 bp, synthetic construct
  misc_feature 1..22: note = chemically synthesized
  source 1..22: mol_type = other DNA
gatttttttatttttctaggta

SEQ ID NO: 41774 - DNA, 22 bp, synthetic construct
  misc_feature 1..22: note = chemically synthesized
  source 1..22: mol_type = other DNA
atttttttatttttctaggtag

SEQ ID NO: 41775 - DNA, 22 bp, synthetic construct
  misc_feature 1..22: note = chemically synthesized
  source 1..22: mol_type = other DNA
ttttatttttctaggtagagac

SEQ ID NO: 41776 - DNA, 22 bp, synthetic construct
  misc_feature 1..22: note = chemically synthesized
  source 1..22: mol_type = other DNA
tttatttttctaggtagagaca

SEQ ID NO: 41777 - DNA, 22 bp, synthetic construct
  misc_feature 1..22: note = chemically synthesized
  source 1..22: mol_type = other DNA
ttatttttctaggtagagacag

SEQ ID NO: 41778 - DNA, 22 bp, synthetic construct
  misc_feature 1..22: note = chemically synthesized
  source 1..22: mol_type = other DNA
tatttttctaggtagagacagc

SEQ ID NO: 41779 - DNA, 22 bp, synthetic construct
  misc_feature 1..22: note = chemically synthesized
  source 1..22: mol_type = other DNA
atttttctaggtagagacagct

SEQ ID NO: 41780 - DNA, 22 bp, synthetic construct
  misc_feature 1..22: note = chemically synthesized
  source 1..22: mol_type = other DNA
tttttctaggtagagacagctc

SEQ ID NO: 41781 - DNA, 22 bp, synthetic construct
  misc_feature 1..22: note = chemically synthesized
  source 1..22: mol_type = other DNA
ttctaggtagagacagctctaa

SEQ ID NO: 41782 - DNA, 22 bp, synthetic construct
  misc_feature 1..22: note = chemically synthesized
  source 1..22: mol_type = other DNA
tctaggtagagacagctctaat

SEQ ID NO: 41783 - DNA, 22 bp, synthetic construct
  misc_feature 1..22: note = chemically synthesized
  source 1..22: mol_type = other DNA
ctaggtagagacagctctaatg

SEQ ID NO: 41784 - DNA, 22 bp, synthetic construct
  misc_feature 1..22: note = chemically synthesized
  source 1..22: mol_type = other DNA
taggtagagacagctctaatgg

SEQ ID NO: 41785 - DNA, 22 bp, synthetic construct
  misc_feature 1..22: note = chemically synthesized
  source 1..22: mol_type = other DNA
ggtagagacagctctaatggct

SEQ ID NO: 41786 - DNA, 22 bp, synthetic construct
  misc_feature 1..22: note = chemically synthesized
  source 1..22: mol_type = other DNA
taatggcttctgtttggccttt

SEQ ID NO: 41787 - DNA, 22 bp, synthetic construct
  misc_feature 1..22: note = chemically synthesized
  source 1..22: mol_type = other DNA
atggcttctgtttggcctttcc

SEQ ID NO: 41788 - DNA, 22 bp, synthetic construct
  misc_feature 1..22: note = chemically synthesized
  source 1..22: mol_type = other DNA
ctgtttggcctttcccaccata

SEQ ID NO: 41789 - DNA, 22 bp, synthetic construct
  misc_feature 1..22: note = chemically synthesized
  source 1..22: mol_type = other DNA
tgtttggcctttcccaccataa

SEQ ID NO: 41790 - DNA, 22 bp, synthetic construct
  misc_feature 1..22: note = chemically synthesized
  source 1..22: mol_type = other DNA
tttggcctttcccaccataata

SEQ ID NO: 41791 - DNA, 22 bp, synthetic construct
  misc_feature 1..22: note = chemically synthesized
  source 1..22: mol_type = other DNA
ggcctttcccaccataatagcc

SEQ ID NO: 41792 - DNA, 22 bp, synthetic construct
  misc_feature 1..22: note = chemically synthesized
  source 1..22: mol_type = other DNA
gcctttcccaccataatagccc

SEQ ID NO: 41793 - DNA, 22 bp, synthetic construct
  misc_feature 1..22: note = chemically synthesized
  source 1..22: mol_type = other DNA
tcccaccataatagccctcatc

SEQ ID NO: 41794 - DNA, 22 bp, synthetic construct
  misc_feature 1..22: note = chemically synthesized
  source 1..22: mol_type = other DNA
cccaccataatagccctcatcc

SEQ ID NO: 41795 - DNA, 22 bp, synthetic construct
  misc_feature 1..22: note = chemically synthesized
  source 1..22: mol_type = other DNA
ccaccataatagccctcatcct

SEQ ID NO: 41796 - DNA, 22 bp, synthetic construct
  misc_feature 1..22: note = chemically synthesized
  source 1..22: mol_type = other DNA
atcctaccagtcagggagccaa

SEQ ID NO: 41797 - DNA, 22 bp, synthetic construct
  misc_feature 1..22: note = chemically synthesized
  source 1..22: mol_type = other DNA
ccagtcagggagccaatgtggc

SEQ ID NO: 41798 - DNA, 22 bp, synthetic construct
  misc_feature 1..22: note = chemically synthesized
  source 1..22: mol_type = other DNA
ctgccagctaataagtatgtct

SEQ ID NO: 41799 - DNA, 22 bp, synthetic construct
  misc_feature 1..22: note = chemically synthesized
  source 1..22: mol_type = other DNA
tgccagctaataagtatgtcta

SEQ ID NO: 41800 - DNA, 22 bp, synthetic construct
  misc_feature 1..22: note = chemically synthesized
  source 1..22: mol_type = other DNA
ccagctaataagtatgtctata

SEQ ID NO: 41801 - DNA, 22 bp, synthetic construct
  misc_feature 1..22: note = chemically synthesized
  source 1..22: mol_type = other DNA
ataagtatgtctatacaaatta

SEQ ID NO: 41802 - DNA, 22 bp, synthetic construct
  misc_feature 1..22: note = chemically synthesized
  source 1..22: mol_type = other DNA
tacaaattatgcattttggcac

SEQ ID NO: 41803 - DNA, 22 bp, synthetic construct
  misc_feature 1..22: note = chemically synthesized
  source 1..22: mol_type = other DNA
tgcattttggcactgggaaaat

SEQ ID NO: 41804 - DNA, 22 bp, synthetic construct
  misc_feature 1..22: note = chemically synthesized
  source 1..22: mol_type = other DNA
tggcactgggaaaatgaccaga

SEQ ID NO: 41805 - DNA, 22 bp, synthetic construct
  misc_feature 1..22: note = chemically synthesized
  source 1..22: mol_type = other DNA
ggcactgggaaaatgaccagag

SEQ ID NO: 41806 - DNA, 22 bp, synthetic construct
  misc_feature 1..22: note = chemically synthesized
  source 1..22: mol_type = other DNA
gcactgggaaaatgaccagagg

SEQ ID NO: 41807 - DNA, 22 bp, synthetic construct
  misc_feature 1..22: note = chemically synthesized
  source 1..22: mol_type = other DNA
ggaaaatgaccagaggataagt

SEQ ID NO: 41808 - DNA, 22 bp, synthetic construct
  misc_feature 1..22: note = chemically synthesized
  source 1..22: mol_type = other DNA
gaaccactgtaagtcagaaatg

SEQ ID NO: 41809 - DNA, 22 bp, synthetic construct
  misc_feature 1..22: note = chemically synthesized
  source 1..22: mol_type = other DNA
taagtcagaaatgagctaaaac

SEQ ID NO: 41810 - DNA, 22 bp, synthetic construct
  misc_feature 1..22: note = chemically synthesized
  source 1..22: mol_type = other DNA
aaactccattaattacctaacc

SEQ ID NO: 41811 - DNA, 22 bp, synthetic construct
  misc_feature 1..22: note = chemically synthesized
  source 1..22: mol_type = other DNA
cattaattacctaacctccata

SEQ ID NO: 41812 - DNA, 22 bp, synthetic construct
  misc_feature 1..22: note = chemically synthesized
  source 1..22: mol_type = other DNA
attacctaacctccataagccc

SEQ ID NO: 41813 - DNA, 22 bp, synthetic construct
  misc_feature 1..22: note = chemically synthesized
  source 1..22: mol_type = other DNA
cctaacctccataagcccctac

SEQ ID NO: 41814 - DNA, 22 bp, synthetic construct
  misc_feature 1..22: note = chemically synthesized
  source 1..22: mol_type = other DNA
acctccataagcccctacttta

SEQ ID NO: 41815 - DNA, 22 bp, synthetic construct
  misc_feature 1..22: note = chemically synthesized
  source 1..22: mol_type = other DNA
cataagcccctactttaactgg

SEQ ID NO: 41816 - DNA, 22 bp, synthetic construct
  misc_feature 1..22: note = chemically synthesized
  source 1..22: mol_type = other DNA
ctttaactggggaaccacaata

SEQ ID NO: 41817 - DNA, 22 bp, synthetic construct
  misc_feature 1..22: note = chemically synthesized
  source 1..22: mol_type = other DNA
taactggggaaccacaataacg

SEQ ID NO: 41818 - DNA, 22 bp, synthetic construct
  misc_feature 1..22: note = chemically synthesized
  source 1..22: mol_type = other DNA
aactggggaaccacaataacgt

SEQ ID NO: 41819 - DNA, 22 bp, synthetic construct
  misc_feature 1..22: note = chemically synthesized
  source 1..22: mol_type = other DNA
actggggaaccacaataacgtt

SEQ ID NO: 41820 - DNA, 22 bp, synthetic construct
  misc_feature 1..22: note = chemically synthesized
  source 1..22: mol_type = other DNA
gggaaccacaataacgttttgg

SEQ ID NO: 41821 - DNA, 22 bp, synthetic construct
  misc_feature 1..22: note = chemically synthesized
  source 1..22: mol_type = other DNA
tgggtaccctggaatcaacgtc

SEQ ID NO: 41822 - DNA, 22 bp, synthetic construct
  misc_feature 1..22: note = chemically synthesized
  source 1..22: mol_type = other DNA
gggtaccctggaatcaacgtca

SEQ ID NO: 41823 - DNA, 22 bp, synthetic construct
  misc_feature 1..22: note = chemically synthesized
  source 1..22: mol_type = other DNA
ggtaccctggaatcaacgtcag

SEQ ID NO: 41824 - DNA, 22 bp, synthetic construct
  misc_feature 1..22: note = chemically synthesized
  source 1..22: mol_type = other DNA
gaatcaacgtcagctcagagcc

SEQ ID NO: 41825 - DNA, 22 bp, synthetic construct
  misc_feature 1..22: note = chemically synthesized
  source 1..22: mol_type = other DNA
agagccagtgtccagtactttc

SEQ ID NO: 41826 - DNA, 22 bp, synthetic construct
  misc_feature 1..22: note = chemically synthesized
  source 1..22: mol_type = other DNA
tctgaaatgtctcattacttcc

SEQ ID NO: 41827 - DNA, 22 bp, synthetic construct
  misc_feature 1..22: note = chemically synthesized
  source 1..22: mol_type = other DNA
ctgaaatgtctcattacttccc

SEQ ID NO: 41828 - DNA, 22 bp, synthetic construct
  misc_feature 1..22: note = chemically synthesized
  source 1..22: mol_type = other DNA
tgaaatgtctcattacttccct

SEQ ID NO: 41829 - DNA, 22 bp, synthetic construct
  misc_feature 1..22: note = chemically synthesized
  source 1..22: mol_type = other DNA
aaatgtctcattacttcccttt

SEQ ID NO: 41830 - DNA, 22 bp, synthetic construct
  misc_feature 1..22: note = chemically synthesized
  source 1..22: mol_type = other DNA
attacttccctttctccagtac

SEQ ID NO: 41831 - DNA, 22 bp, synthetic construct
  misc_feature 1..22: note = chemically synthesized
  source 1..22: mol_type = other DNA
cttccctttctccagtacacac

SEQ ID NO: 41832 - DNA, 22 bp, synthetic construct
  misc_feature 1..22: note = chemically synthesized
  source 1..22: mol_type = other DNA
ccctttctccagtacacacagt

SEQ ID NO: 41833 - DNA, 22 bp, synthetic construct
  misc_feature 1..22: note = chemically synthesized
  source 1..22: mol_type = other DNA
cctttctccagtacacacagtt

SEQ ID NO: 41834 - DNA, 22 bp, synthetic construct
  misc_feature 1..22: note = chemically synthesized
  source 1..22: mol_type = other DNA
tctccagtacacacagttaccc

SEQ ID NO: 41835 - DNA, 22 bp, synthetic construct
  misc_feature 1..22: note = chemically synthesized
  source 1..22: mol_type = other DNA
ctccagtacacacagttaccct

SEQ ID NO: 41836 - DNA, 22 bp, synthetic construct
  misc_feature 1..22: note = chemically synthesized
  source 1..22: mol_type = other DNA
tccagtacacacagttaccctg

SEQ ID NO: 41837 - DNA, 22 bp, synthetic construct
  misc_feature 1..22: note = chemically synthesized
  source 1..22: mol_type = other DNA
cagtacacacagttaccctggt

SEQ ID NO: 41838 - DNA, 22 bp, synthetic construct
  misc_feature 1..22: note = chemically synthesized
  source 1..22: mol_type = other DNA
ccctggtaaaaggccagaggtc

SEQ ID NO: 41839 - DNA, 22 bp, synthetic construct
  misc_feature 1..22: note = chemically synthesized
  source 1..22: mol_type = other DNA
gtaaaaggccagaggtctcctt

SEQ ID NO: 41840 - DNA, 22 bp, synthetic construct
  misc_feature 1..22: note = chemically synthesized
  source 1..22: mol_type = other DNA
cttagggaaggatgggagaaag

SEQ ID NO: 41841 - DNA, 22 bp, synthetic construct
  misc_feature 1..22: note = chemically synthesized
  source 1..22: mol_type = other DNA
agggaaggatgggagaaagagt

SEQ ID NO: 41842 - DNA, 22 bp, synthetic construct
  misc_feature 1..22: note = chemically synthesized
  source 1..22: mol_type = other DNA
gggaaggatgggagaaagagta

SEQ ID NO: 41843 - DNA, 22 bp, synthetic construct
  misc_feature 1..22: note = chemically synthesized
  source 1..22: mol_type = other DNA
tcagtagcctagtggtgtcctt

SEQ ID NO: 41844 - DNA, 22 bp, synthetic construct
  misc_feature 1..22: note = chemically synthesized
  source 1..22: mol_type = other DNA
gtggtgtccttcctcaagggga

SEQ ID NO: 41845 - DNA, 22 bp, synthetic construct
  misc_feature 1..22: note = chemically synthesized
  source 1..22: mol_type = other DNA
cctcaaggggatccagcctccc

SEQ ID NO: 41846 - DNA, 22 bp, synthetic construct
  misc_feature 1..22: note = chemically synthesized
  source 1..22: mol_type = other DNA
ctcaaggggatccagcctcccc

SEQ ID NO: 41847 - DNA, 22 bp, synthetic construct
  misc_feature 1..22: note = chemically synthesized
  source 1..22: mol_type = other DNA
aaggggatccagcctccccttc

SEQ ID NO: 41848 - DNA, 22 bp, synthetic construct
  misc_feature 1..22: note = chemically synthesized
  source 1..22: mol_type = other DNA
cccttcattcagtgggttctgg

SEQ ID NO: 41849 - DNA, 22 bp, synthetic construct
  misc_feature 1..22: note = chemically synthesized
  source 1..22: mol_type = other DNA
cattcagtgggttctggaactg

SEQ ID NO: 41850 - DNA, 22 bp, synthetic construct
  misc_feature 1..22: note = chemically synthesized
  source 1..22: mol_type = other DNA
attcagtgggttctggaactgt

SEQ ID NO: 41851 - DNA, 22 bp, synthetic construct
  misc_feature 1..22: note = chemically synthesized
  source 1..22: mol_type = other DNA
agtgggttctggaactgtaaca

SEQ ID NO: 41852 - DNA, 22 bp, synthetic construct
  misc_feature 1..22: note = chemically synthesized
  source 1..22: mol_type = other DNA
tggaactgtaacaggttcgagt

SEQ ID NO: 41853 - DNA, 22 bp, synthetic construct
  misc_feature 1..22: note = chemically synthesized
  source 1..22: mol_type = other DNA
gaactgtaacaggttcgagtct

SEQ ID NO: 41854 - DNA, 22 bp, synthetic construct
  misc_feature 1..22: note = chemically synthesized
  source 1..22: mol_type = other DNA
taacaggttcgagtctggaaat

SEQ ID NO: 41855 - DNA, 22 bp, synthetic construct
  misc_feature 1..22: note = chemically synthesized
  source 1..22: mol_type = other DNA
gagtctggaaattgattgaggg

SEQ ID NO: 41856 - DNA, 22 bp, synthetic construct
  misc_feature 1..22: note = chemically synthesized
  source 1..22: mol_type = other DNA
gaaattgattgagggcccatga

SEQ ID NO: 41857 - DNA, 22 bp, synthetic construct
  misc_feature 1..22: note = chemically synthesized
  source 1..22: mol_type = other DNA
attgagggcccatgattctctg

SEQ ID NO: 41858 - DNA, 22 bp, synthetic construct
  misc_feature 1..22: note = chemically synthesized
  source 1..22: mol_type = other DNA
agggcccatgattctctgtttt

SEQ ID NO: 41859 - DNA, 22 bp, synthetic construct
  misc_feature 1..22: note = chemically synthesized
  source 1..22: mol_type = other DNA
tctgtttttataattcagatta

SEQ ID NO: 41860 - DNA, 22 bp, synthetic construct
  misc_feature 1..22: note = chemically synthesized
  source 1..22: mol_type = other DNA
tgtttttataattcagattagt

SEQ ID NO: 41861 - DNA, 22 bp, synthetic construct
  misc_feature 1..22: note = chemically synthesized
  source 1..22: mol_type = other DNA
tttttataattcagattagtct

SEQ ID NO: 41862 - DNA, 22 bp, synthetic construct
  misc_feature 1..22: note = chemically synthesized
  source 1..22: mol_type = other DNA
ttataattcagattagtcttta

SEQ ID NO: 41863 - DNA, 22 bp, synthetic construct
  misc_feature 1..22: note = chemically synthesized
  source 1..22: mol_type = other DNA
tataattcagattagtctttag

SEQ ID NO: 41864 - DNA, 22 bp, synthetic construct
  misc_feature 1..22: note = chemically synthesized
  source 1..22: mol_type = other DNA
ataattcagattagtctttagt

SEQ ID NO: 41865 - DNA, 22 bp, synthetic construct
  misc_feature 1..22: note = chemically synthesized
  source 1..22: mol_type = other DNA
taattcagattagtctttagtc

SEQ ID NO: 41866 - DNA, 22 bp, synthetic construct
  misc_feature 1..22: note = chemically synthesized
  source 1..22: mol_type = other DNA
agattagtctttagtccattct

SEQ ID NO: 41867 - DNA, 22 bp, synthetic construct
  misc_feature 1..22: note = chemically synthesized
  source 1..22: mol_type = other DNA
gtctttagtccattctacctgg

SEQ ID NO: 41868 - DNA, 22 bp, synthetic construct
  misc_feature 1..22: note = chemically synthesized
  source 1..22: mol_type = other DNA
tagtccattctacctggcagtt

SEQ ID NO: 41869 - DNA, 22 bp, synthetic construct
  misc_feature 1..22: note = chemically synthesized
  source 1..22: mol_type = other DNA
agtccattctacctggcagttt

SEQ ID NO: 41870 - DNA, 22 bp, synthetic construct
  misc_feature 1..22: note = chemically synthesized
  source 1..22: mol_type = other DNA
gtccattctacctggcagtttt

SEQ ID NO: 41871 - DNA, 22 bp, synthetic construct
  misc_feature 1..22: note = chemically synthesized
  source 1..22: mol_type = other DNA
tacctggcagttttttgtttat

SEQ ID NO: 41872 - DNA, 22 bp, synthetic construct
  misc_feature 1..22: note = chemically synthesized
  source 1..22: mol_type = other DNA
cctggcagttttttgtttatat

SEQ ID NO: 41873 - DNA, 22 bp, synthetic construct
  misc_feature 1..22: note = chemically synthesized
  source 1..22: mol_type = other DNA
gcagttttttgtttatataaat

SEQ ID NO: 41874 - DNA, 22 bp, synthetic construct
  misc_feature 1..22: note = chemically synthesized
  source 1..22: mol_type = other DNA
tttgtttatataaatcaagtag

SEQ ID NO: 41875 - DNA, 22 bp, synthetic construct
  misc_feature 1..22: note = chemically synthesized
  source 1..22: mol_type = other DNA
ttgtttatataaatcaagtagg

SEQ ID NO: 41876 - DNA, 22 bp, synthetic construct
  misc_feature 1..22: note = chemically synthesized
  source 1..22: mol_type = other DNA
tgtttatataaatcaagtagga

SEQ ID NO: 41877 - DNA, 22 bp, synthetic construct
  misc_feature 1..22: note = chemically synthesized
  source 1..22: mol_type = other DNA
gtttatataaatcaagtaggaa

SEQ ID NO: 41878 - DNA, 22 bp, synthetic construct
  misc_feature 1..22: note = chemically synthesized
  source 1..22: mol_type = other DNA
tttatataaatcaagtaggaat

SEQ ID NO: 41879 - DNA, 22 bp, synthetic construct
  misc_feature 1..22: note = chemically synthesized
  source 1..22: mol_type = other DNA
atataaatcaagtaggaataca

SEQ ID NO: 41880 - DNA, 22 bp, synthetic construct
  misc_feature 1..22: note = chemically synthesized
  source 1..22: mol_type = other DNA
tataaatcaagtaggaatacag

SEQ ID NO: 41881 - DNA, 22 bp, synthetic construct
  misc_feature 1..22: note = chemically synthesized
  source 1..22: mol_type = other DNA
cccatcaatttcacttctagga

SEQ ID NO: 41882 - DNA, 22 bp, synthetic construct
  misc_feature 1..22: note = chemically synthesized
  source 1..22: mol_type = other DNA
ccatcaatttcacttctaggaa

SEQ ID NO: 41883 - DNA, 22 bp, synthetic construct
  misc_feature 1..22: note = chemically synthesized
  source 1..22: mol_type = other DNA
cacttctaggaacaccatgatt

SEQ ID NO: 41884 - DNA, 22 bp, synthetic construct
  misc_feature 1..22: note = chemically synthesized
  source 1..22: mol_type = other DNA
acttctaggaacaccatgatta

SEQ ID NO: 41885 - DNA, 22 bp, synthetic construct
  misc_feature 1..22: note = chemically synthesized
  source 1..22: mol_type = other DNA
ctaggaacaccatgattaatta

SEQ ID NO: 41886 - DNA, 22 bp, synthetic construct
  misc_feature 1..22: note = chemically synthesized
  source 1..22: mol_type = other DNA
taggaacaccatgattaattag

SEQ ID NO: 41887 - DNA, 22 bp, synthetic construct
  misc_feature 1..22: note = chemically synthesized
  source 1..22: mol_type = other DNA
ggaacaccatgattaattagcc

SEQ ID NO: 41888 - DNA, 22 bp, synthetic construct
  misc_feature 1..22: note = chemically synthesized
  source 1..22: mol_type = other DNA
attagccaatgccagagctcta

SEQ ID NO: 41889 - DNA, 22 bp, synthetic construct
  misc_feature 1..22: note = chemically synthesized
  source 1..22: mol_type = other DNA
gccaatgccagagctctacatg

SEQ ID NO: 41890 - DNA, 22 bp, synthetic construct
  misc_feature 1..22: note = chemically synthesized
  source 1..22: mol_type = other DNA
tacatgagtcagactattctga

SEQ ID NO: 41891 - DNA, 22 bp, synthetic construct
  misc_feature 1..22: note = chemically synthesized
  source 1..22: mol_type = other DNA
catgagtcagactattctgatg

SEQ ID NO: 41892 - DNA, 22 bp, synthetic construct
  misc_feature 1..22: note = chemically synthesized
  source 1..22: mol_type = other DNA
ttctgatggctgctttgcctct

SEQ ID NO: 41893 - DNA, 22 bp, synthetic construct
  misc_feature 1..22: note = chemically synthesized
  source 1..22: mol_type = other DNA
tgatggctgctttgcctctgct

SEQ ID NO: 41894 - DNA, 22 bp, synthetic construct
  misc_feature 1..22: note = chemically synthesized
  source 1..22: mol_type = other DNA
atggctgctttgcctctgctgt

SEQ ID NO: 41895 - DNA, 22 bp, synthetic construct
  misc_feature 1..22: note = chemically synthesized
  source 1..22: mol_type = other DNA
ctttgcctctgctgtctattat

SEQ ID NO: 41896 - DNA, 22 bp, synthetic construct
  misc_feature 1..22: note = chemically synthesized
  source 1..22: mol_type = other DNA
tgcctctgctgtctattatggt

SEQ ID NO: 41897 - DNA, 22 bp, synthetic construct
  misc_feature 1..22: note = chemically synthesized
  source 1..22: mol_type = other DNA
gcctctgctgtctattatggta

SEQ ID NO: 41898 - DNA, 22 bp, synthetic construct
  misc_feature 1..22: note = chemically synthesized
  source 1..22: mol_type = other DNA
cctctgctgtctattatggtag

SEQ ID NO: 41899 - DNA, 22 bp, synthetic construct
  misc_feature 1..22: note = chemically synthesized
  source 1..22: mol_type = other DNA
tgctgtctattatggtagttat

SEQ ID NO: 41900 - DNA, 22 bp, synthetic construct
  misc_feature 1..22: note = chemically synthesized
  source 1..22: mol_type = other DNA
ctgtctattatggtagttatgc

SEQ ID NO: 41901 - DNA, 22 bp, synthetic construct
  misc_feature 1..22: note = chemically synthesized
  source 1..22: mol_type = other DNA
tctattatggtagttatgccca

SEQ ID NO: 41902 - DNA, 22 bp, synthetic construct
  misc_feature 1..22: note = chemically synthesized
  source 1..22: mol_type = other DNA
ttatggtagttatgcccacctt

SEQ ID NO: 41903 - DNA, 22 bp, synthetic construct
  misc_feature 1..22: note = chemically synthesized
  source 1..22: mol_type = other DNA
tggtagttatgcccaccttgcc

SEQ ID NO: 41904 - DNA, 22 bp, synthetic construct
  misc_feature 1..22: note = chemically synthesized
  source 1..22: mol_type = other DNA
tgcccaccttgcctttgatggt

SEQ ID NO: 41905 - DNA, 22 bp, synthetic construct
  misc_feature 1..22: note = chemically synthesized
  source 1..22: mol_type = other DNA
gcctttgatggttcagtgccaa

SEQ ID NO: 41906 - DNA, 22 bp, synthetic construct
  misc_feature 1..22: note = chemically synthesized
  source 1..22: mol_type = other DNA
cctttgatggttcagtgccaac

SEQ ID NO: 41907 - DNA, 22 bp, synthetic construct
  misc_feature 1..22: note = chemically synthesized
  source 1..22: mol_type = other DNA
tgatggttcagtgccaacactt

SEQ ID NO: 41908 - DNA, 22 bp, synthetic construct
  misc_feature 1..22: note = chemically synthesized
  source 1..22: mol_type = other DNA
gatggttcagtgccaacacttg

SEQ ID NO: 41909 - DNA, 22 bp, synthetic construct
  misc_feature 1..22: note = chemically synthesized
  source 1..22: mol_type = other DNA
atggttcagtgccaacacttgg

SEQ ID NO: 41910 - DNA, 22 bp, synthetic construct
  misc_feature 1..22: note = chemically synthesized
  source 1..22: mol_type = other DNA
agtgccaacacttggcccctgc

SEQ ID NO: 41911 - DNA, 22 bp, synthetic construct
  misc_feature 1..22: note = chemically synthesized
  source 1..22: mol_type = other DNA
ggcccctgccacctcaggatcc

SEQ ID NO: 41912 - DNA, 22 bp, synthetic construct
  misc_feature 1..22: note = chemically synthesized
  source 1..22: mol_type = other DNA
gcccctgccacctcaggatcca

SEQ ID NO: 41913 - DNA, 22 bp, synthetic construct
  misc_feature 1..22: note = chemically synthesized
  source 1..22: mol_type = other DNA
ccacctcaggatccaattattc

SEQ ID NO: 41914 - DNA, 22 bp, synthetic construct
  misc_feature 1..22: note = chemically synthesized
  source 1..22: mol_type = other DNA
aggatccaattattcccattgt

SEQ ID NO: 41915 - DNA, 22 bp, synthetic construct
  misc_feature 1..22: note = chemically synthesized
  source 1..22: mol_type = other DNA
ttcccattgtatttaaattttg

SEQ ID NO: 41916 - DNA, 22 bp, synthetic construct
  misc_feature 1..22: note = chemically synthesized
  source 1..22: mol_type = other DNA
ccattgtatttaaattttgtag

SEQ ID NO: 41917 - DNA, 22 bp, synthetic construct
  misc_feature 1..22: note = chemically synthesized
  source 1..22: mol_type = other DNA
tatttaaattttgtagttgagt

SEQ ID NO: 41918 - DNA, 22 bp, synthetic construct
  misc_feature 1..22: note = chemically synthesized
  source 1..22: mol_type = other DNA
aaattttgtagttgagtgactg

SEQ ID NO: 41919 - DNA, 22 bp, synthetic construct
  misc_feature 1..22: note = chemically synthesized
  source 1..22: mol_type = other DNA
aattttgtagttgagtgactgt

SEQ ID NO: 41920 - DNA, 22 bp, synthetic construct
  misc_feature 1..22: note = chemically synthesized
  source 1..22: mol_type = other DNA
tgtagttgagtgactgtggttc

SEQ ID NO: 41921 - DNA, 22 bp, synthetic construct
  misc_feature 1..22: note = chemically synthesized
  source 1..22: mol_type = other DNA
gtagttgagtgactgtggttcc

SEQ ID NO: 41922 - DNA, 22 bp, synthetic construct
  misc_feature 1..22: note = chemically synthesized
  source 1..22: mol_type = other DNA
tagttgagtgactgtggttcct

SEQ ID NO: 41923 - DNA, 22 bp, synthetic construct
  misc_feature 1..22: note = chemically synthesized
  source 1..22: mol_type = other DNA
agtgactgtggttcctactgtt

SEQ ID NO: 41924 - DNA, 22 bp, synthetic construct
  misc_feature 1..22: note = chemically synthesized
  source 1..22: mol_type = other DNA
tggttcctactgttagatctga

SEQ ID NO: 41925 - DNA, 22 bp, synthetic construct
  misc_feature 1..22: note = chemically synthesized
  source 1..22: mol_type = other DNA
ctactgttagatctgacataca

SEQ ID NO: 41926 - DNA, 22 bp, synthetic construct
  misc_feature 1..22: note = chemically synthesized
  source 1..22: mol_type = other DNA
ctgttagatctgacatacagag

SEQ ID NO: 41927 - DNA, 22 bp, synthetic construct
  misc_feature 1..22: note = chemically synthesized
  source 1..22: mol_type = other DNA
ttagatctgacatacagagaag

SEQ ID NO: 41928 - DNA, 22 bp, synthetic construct
  misc_feature 1..22: note = chemically synthesized
  source 1..22: mol_type = other DNA
gatctgacatacagagaagagc

SEQ ID NO: 41929 - DNA, 22 bp, synthetic construct
  misc_feature 1..22: note = chemically synthesized
  source 1..22: mol_type = other DNA
acatacagagaagagcaattac

SEQ ID NO: 41930 - DNA, 22 bp, synthetic construct
  misc_feature 1..22: note = chemically synthesized
  source 1..22: mol_type = other DNA
cgggctcttcaaaaatacaggt

SEQ ID NO: 41931 - DNA, 22 bp, synthetic construct
  misc_feature 1..22: note = chemically synthesized
  source 1..22: mol_type = other DNA
ttcaaaaatacaggtgctgctc

SEQ ID NO: 41932 - DNA, 22 bp, synthetic construct
  misc_feature 1..22: note = chemically synthesized
  source 1..22: mol_type = other DNA
caaaaatacaggtgctgctctc

SEQ ID NO: 41933 - DNA, 22 bp, synthetic construct
  misc_feature 1..22: note = chemically synthesized
  source 1..22: mol_type = other DNA
aaaaatacaggtgctgctctca

SEQ ID NO: 41934 - DNA, 22 bp, synthetic construct
  misc_feature 1..22: note = chemically synthesized
  source 1..22: mol_type = other DNA
ctctcacaaatctatttcacaa

SEQ ID NO: 41935 - DNA, 22 bp, synthetic construct
  misc_feature 1..22: note = chemically synthesized
  source 1..22: mol_type = other DNA
tcacaaatctatttcacaaagc

SEQ ID NO: 41936 - DNA, 22 bp, synthetic construct
  misc_feature 1..22: note = chemically synthesized
  source 1..22: mol_type = other DNA
acaaatctatttcacaaagctt

SEQ ID NO: 41937 - DNA, 22 bp, synthetic construct
  misc_feature 1..22: note = chemically synthesized
  source 1..22: mol_type = other DNA
tttcacaaagcttcggccaagg

SEQ ID NO: 41938 - DNA, 22 bp, synthetic construct
  misc_feature 1..22: note = chemically synthesized
  source 1..22: mol_type = other DNA
cacaaagcttcggccaagggtg

SEQ ID NO: 41939 - DNA, 22 bp, synthetic construct
  misc_feature 1..22: note = chemically synthesized
  source 1..22: mol_type = other DNA
acaaagcttcggccaagggtgt

SEQ ID NO: 41940 - DNA, 22 bp, synthetic construct
  misc_feature 1..22: note = chemically synthesized
  source 1..22: mol_type = other DNA
cggccaagggtgtatcttctgg

SEQ ID NO: 41941 - DNA, 22 bp, synthetic construct
  misc_feature 1..22: note = chemically synthesized
  source 1..22: mol_type = other DNA
ggccaagggtgtatcttctgga

SEQ ID NO: 41942 - DNA, 22 bp, synthetic construct
  misc_feature 1..22: note = chemically synthesized
  source 1..22: mol_type = other DNA
ctggaccctcccagctgggatg

SEQ ID NO: 41943 - DNA, 22 bp, synthetic construct
  misc_feature 1..22: note = chemically synthesized
  source 1..22: mol_type = other DNA
tggaccctcccagctgggatga

SEQ ID NO: 41944 - DNA, 22 bp, synthetic construct
  misc_feature 1..22: note = chemically synthesized
  source 1..22: mol_type = other DNA
gaccctcccagctgggatgagt

SEQ ID NO: 41945 - DNA, 22 bp, synthetic construct
  misc_feature 1..22: note = chemically synthesized
  source 1..22: mol_type = other DNA
ccagctgggatgagtaggtcta

SEQ ID NO: 41946 - DNA, 22 bp, synthetic construct
  misc_feature 1..22: note = chemically synthesized
  source 1..22: mol_type = other DNA
ggatgagtaggtctaaagtgac

SEQ ID NO: 41947 - DNA, 22 bp, synthetic construct
  misc_feature 1..22: note = chemically synthesized
  source 1..22: mol_type = other DNA
aagtgactaatccactccacca

SEQ ID NO: 41948 - DNA, 22 bp, synthetic construct
  misc_feature 1..22: note = chemically synthesized
  source 1..22: mol_type = other DNA
atccactccaccatcctaatct

SEQ ID NO: 41949 - DNA, 22 bp, synthetic construct
  misc_feature 1..22: note = chemically synthesized
  source 1..22: mol_type = other DNA
caccatcctaatctccctaagc

SEQ ID NO: 41950 - DNA, 22 bp, synthetic construct
  misc_feature 1..22: note = chemically synthesized
  source 1..22: mol_type = other DNA
atctccctaagcctttggatca

SEQ ID NO: 41951 - DNA, 22 bp, synthetic construct
  misc_feature 1..22: note = chemically synthesized
  source 1..22: mol_type = other DNA
cctaagcctttggatcacttcc

SEQ ID NO: 41952 - DNA, 22 bp, synthetic construct
  misc_feature 1..22: note = chemically synthesized
  source 1..22: mol_type = other DNA
agcctttggatcacttcctcta

SEQ ID NO: 41953 - DNA, 22 bp, synthetic construct
  misc_feature 1..22: note = chemically synthesized
  source 1..22: mol_type = other DNA
tggatcacttcctctacattaa

SEQ ID NO: 41954 - DNA, 22 bp, synthetic construct
  misc_feature 1..22: note = chemically synthesized
  source 1..22: mol_type = other DNA
ggatcacttcctctacattaaa

SEQ ID NO: 41955 - DNA, 22 bp, synthetic construct
  misc_feature 1..22: note = chemically synthesized
  source 1..22: mol_type = other DNA
gatcacttcctctacattaaac

SEQ ID NO: 41956 - DNA, 22 bp, synthetic construct
  misc_feature 1..22: note = chemically synthesized
  source 1..22: mol_type = other DNA
cctctacattaaaccaaggcat

SEQ ID NO: 41957 - DNA, 22 bp, synthetic construct
  misc_feature 1..22: note = chemically synthesized
  source 1..22: mol_type = other DNA
ctctacattaaaccaaggcatt

SEQ ID NO: 41958 - DNA, 22 bp, synthetic construct
  misc_feature 1..22: note = chemically synthesized
  source 1..22: mol_type = other DNA
tacattaaaccaaggcatttcc

SEQ ID NO: 41959 - DNA, 22 bp, synthetic construct
  misc_feature 1..22: note = chemically synthesized
  source 1..22: mol_type = other DNA
cattaaaccaaggcatttccag

SEQ ID NO: 41960 - DNA, 22 bp, synthetic construct
  misc_feature 1..22: note = chemically synthesized
  source 1..22: mol_type = other DNA
aaccaaggcatttccagctcac

SEQ ID NO: 41961 - DNA, 22 bp, synthetic construct
  misc_feature 1..22: note = chemically synthesized
  source 1..22: mol_type = other DNA
ccagctcactaacattggacca

SEQ ID NO: 41962 - DNA, 22 bp, synthetic construct
  misc_feature 1..22: note = chemically synthesized
  source 1..22: mol_type = other DNA
cagctcactaacattggaccat

SEQ ID NO: 41963 - DNA, 22 bp, synthetic construct
  misc_feature 1..22: note = chemically synthesized
  source 1..22: mol_type = other DNA
actaacattggaccatctttta

SEQ ID NO: 41964 - DNA, 22 bp, synthetic construct
  misc_feature 1..22: note = chemically synthesized
  source 1..22: mol_type = other DNA
acattggaccatcttttaatcc

SEQ ID NO: 41965 - DNA, 22 bp, synthetic construct
  misc_feature 1..22: note = chemically synthesized
  source 1..22: mol_type = other DNA
gaccatcttttaatccatattt

SEQ ID NO: 41966 - DNA, 22 bp, synthetic construct
  misc_feature 1..22: note = chemically synthesized
  source 1..22: mol_type = other DNA
ttaatccatatttcagctaacc

SEQ ID NO: 41967 - DNA, 22 bp, synthetic construct
  misc_feature 1..22: note = chemically synthesized
  source 1..22: mol_type = other DNA
taatccatatttcagctaacca

SEQ ID NO: 41968 - DNA, 22 bp, synthetic construct
  misc_feature 1..22: note = chemically synthesized
  source 1..22: mol_type = other DNA
aatccatatttcagctaaccaa

SEQ ID NO: 41969 - DNA, 22 bp, synthetic construct
  misc_feature 1..22: note = chemically synthesized
  source 1..22: mol_type = other DNA
atccatatttcagctaaccaag

SEQ ID NO: 41970 - DNA, 22 bp, synthetic construct
  misc_feature 1..22: note = chemically synthesized
  source 1..22: mol_type = other DNA
cagctaaccaagcaaataaact

SEQ ID NO: 41971 - DNA, 22 bp, synthetic construct
  misc_feature 1..22: note = chemically synthesized
  source 1..22: mol_type = other DNA
agctaaccaagcaaataaacta

SEQ ID NO: 41972 - DNA, 22 bp, synthetic construct
  misc_feature 1..22: note = chemically synthesized
  source 1..22: mol_type = other DNA
accaagcaaataaactattata

SEQ ID NO: 41973 - DNA, 22 bp, synthetic construct
  misc_feature 1..22: note = chemically synthesized
  source 1..22: mol_type = other DNA
ttataacttttttttttttttt

SEQ ID NO: 41974 - DNA, 22 bp, synthetic construct
  misc_feature 1..22: note = chemically synthesized
  source 1..22: mol_type = other DNA
taactttttttttttttttttt

SEQ ID NO: 41975 - DNA, 22 bp, synthetic construct
  misc_feature 1..22: note = chemically synthesized
  source 1..22: mol_type = other DNA
ttttttttttttttttggaaat

SEQ ID NO: 41976 - DNA, 22 bp, synthetic construct
  misc_feature 1..22: note = chemically synthesized
  source 1..22: mol_type = other DNA
tttttttttttttttggaaatg

SEQ ID NO: 41977 - DNA, 22 bp, synthetic construct
  misc_feature 1..22: note = chemically synthesized
  source 1..22: mol_type = other DNA
ttttttttttttttggaaatgg

SEQ ID NO: 41978 - DNA, 22 bp, synthetic construct
  misc_feature 1..22: note = chemically synthesized
  source 1..22: mol_type = other DNA
tttttttttttttggaaatgga

SEQ ID NO: 41979 - DNA, 22 bp, synthetic construct
  misc_feature 1..22: note = chemically synthesized
  source 1..22: mol_type = other DNA
ttttttttttttggaaatggag

SEQ ID NO: 41980 - DNA, 22 bp, synthetic construct
  misc_feature 1..22: note = chemically synthesized
  source 1..22: mol_type = other DNA
tttttttttttggaaatggagt

SEQ ID NO: 41981 - DNA, 22 bp, synthetic construct
  misc_feature 1..22: note = chemically synthesized
  source 1..22: mol_type = other DNA
ttttttttttggaaatggagtc

SEQ ID NO: 41982 - DNA, 22 bp, synthetic construct
  misc_feature 1..22: note = chemically synthesized
  source 1..22: mol_type = other DNA
tttttttttggaaatggagtct

SEQ ID NO: 41983 - DNA, 22 bp, synthetic construct
  misc_feature 1..22: note = chemically synthesized
  source 1..22: mol_type = other DNA
ttttttttggaaatggagtctt

SEQ ID NO: 41984 - DNA, 22 bp, synthetic construct
  misc_feature 1..22: note = chemically synthesized
  source 1..22: mol_type = other DNA
tttttttggaaatggagtcttg

SEQ ID NO: 41985 - DNA, 22 bp, synthetic construct
  misc_feature 1..22: note = chemically synthesized
  source 1..22: mol_type = other DNA
ttttttggaaatggagtcttgc

SEQ ID NO: 41986 - DNA, 22 bp, synthetic construct
  misc_feature 1..22: note = chemically synthesized
  source 1..22: mol_type = other DNA
tttttggaaatggagtcttgct

SEQ ID NO: 41987 - DNA, 22 bp, synthetic construct
  misc_feature 1..22: note = chemically synthesized
  source 1..22: mol_type = other DNA
ttttggaaatggagtcttgctc

SEQ ID NO: 41988 - DNA, 22 bp, synthetic construct
  misc_feature 1..22: note = chemically synthesized
  source 1..22: mol_type = other DNA
tttggaaatggagtcttgctct

SEQ ID NO: 41989 - DNA, 22 bp, synthetic construct
  misc_feature 1..22: note = chemically synthesized
  source 1..22: mol_type = other DNA
ttggaaatggagtcttgctctg

SEQ ID NO: 41990 - DNA, 22 bp, synthetic construct
  misc_feature 1..22: note = chemically synthesized
  source 1..22: mol_type = other DNA
tggaaatggagtcttgctctgt

SEQ ID NO: 41991 - DNA, 22 bp, synthetic construct
  misc_feature 1..22: note = chemically synthesized
  source 1..22: mol_type = other DNA
ggaaatggagtcttgctctgtt

SEQ ID NO: 41992 - DNA, 22 bp, synthetic construct
  misc_feature 1..22: note = chemically synthesized
  source 1..22: mol_type = other DNA
gaaatggagtcttgctctgtta

SEQ ID NO: 41993 - DNA, 22 bp, synthetic construct
  misc_feature 1..22: note = chemically synthesized
  source 1..22: mol_type = other DNA
gctctgttaccaggctggaatg

SEQ ID NO: 41994 - DNA, 22 bp, synthetic construct
  misc_feature 1..22: note = chemically synthesized
  source 1..22: mol_type = other DNA
ctctgttaccaggctggaatgc

SEQ ID NO: 41995 - DNA, 22 bp, synthetic construct
  misc_feature 1..22: note = chemically synthesized
  source 1..22: mol_type = other DNA
tgttaccaggctggaatgcagt

SEQ ID NO: 41996 - DNA, 22 bp, synthetic construct
  misc_feature 1..22: note = chemically synthesized
  source 1..22: mol_type = other DNA
ttaccaggctggaatgcagtgg

SEQ ID NO: 41997 - DNA, 22 bp, synthetic construct
  misc_feature 1..22: note = chemically synthesized
  source 1..22: mol_type = other DNA
ccaggctggaatgcagtggggc

SEQ ID NO: 41998 - DNA, 22 bp, synthetic construct
  misc_feature 1..22: note = chemically synthesized
  source 1..22: mol_type = other DNA
gaatgcagtggggcgatcttgg

SEQ ID NO: 41999 - DNA, 22 bp, synthetic construct
  misc_feature 1..22: note = chemically synthesized
  source 1..22: mol_type = other DNA
ggctcactgcaatctctgcctc

SEQ ID NO: 42000 - DNA, 22 bp, synthetic construct
  misc_feature 1..22: note = chemically synthesized
  source 1..22: mol_type = other DNA
gctcactgcaatctctgcctca

SEQ ID NO: 42001 - DNA, 22 bp, synthetic construct
  misc_feature 1..22: note = chemically synthesized
  source 1..22: mol_type = other DNA
actgcaatctctgcctcacagg

SEQ ID NO: 42002 - DNA, 22 bp, synthetic construct
  misc_feature 1..22: note = chemically synthesized
  source 1..22: mol_type = other DNA
caatctctgcctcacaggttca

SEQ ID NO: 42003 - DNA, 22 bp, synthetic construct
  misc_feature 1..22: note = chemically synthesized
  source 1..22: mol_type = other DNA
tgcctcacaggttcaagcagtt

SEQ ID NO: 42004 - DNA, 22 bp, synthetic construct
  misc_feature 1..22: note = chemically synthesized
  source 1..22: mol_type = other DNA
cctcacaggttcaagcagttct

SEQ ID NO: 42005 - DNA, 22 bp, synthetic construct
  misc_feature 1..22: note = chemically synthesized
  source 1..22: mol_type = other DNA
acaggttcaagcagttctcttg

SEQ ID NO: 42006 - DNA, 22 bp, synthetic construct
  misc_feature 1..22: note = chemically synthesized
  source 1..22: mol_type = other DNA
aagcagttctcttgcctcagcc

SEQ ID NO: 42007 - DNA, 22 bp, synthetic construct
  misc_feature 1..22: note = chemically synthesized
  source 1..22: mol_type = other DNA
tcttgcctcagcctcccaagta

SEQ ID NO: 42008 - DNA, 22 bp, synthetic construct
  misc_feature 1..22: note = chemically synthesized
  source 1..22: mol_type = other DNA
ttgcctcagcctcccaagtaga

SEQ ID NO: 42009 - DNA, 22 bp, synthetic construct
  misc_feature 1..22: note = chemically synthesized
  source 1..22: mol_type = other DNA
gcctcagcctcccaagtagatg

SEQ ID NO: 42010 - DNA, 22 bp, synthetic construct
  misc_feature 1..22: note = chemically synthesized
  source 1..22: mol_type = other DNA
cctcagcctcccaagtagatga

SEQ ID NO: 42011 - DNA, 22 bp, synthetic construct
  misc_feature 1..22: note = chemically synthesized
  source 1..22: mol_type = other DNA
agcctcccaagtagatgagatt

SEQ ID NO: 42012 - DNA, 22 bp, synthetic construct
  misc_feature 1..22: note = chemically synthesized
  source 1..22: mol_type = other DNA
ccaagtagatgagattacagtt

SEQ ID NO: 42013 - DNA, 22 bp, synthetic construct
  misc_feature 1..22: note = chemically synthesized
  source 1..22: mol_type = other DNA
cagttacgcatcaccatgccca

SEQ ID NO: 42014 - DNA, 22 bp, synthetic construct
  misc_feature 1..22: note = chemically synthesized
  source 1..22: mol_type = other DNA
cgcatcaccatgcccagctaat

SEQ ID NO: 42015 - DNA, 22 bp, synthetic construct
  misc_feature 1..22: note = chemically synthesized
  source 1..22: mol_type = other DNA
atttttgtatttttagcagaga

SEQ ID NO: 42016 - DNA, 22 bp, synthetic construct
  misc_feature 1..22: note = chemically synthesized
  source 1..22: mol_type = other DNA
ttgtatttttagcagagatggg

SEQ ID NO: 42017 - DNA, 22 bp, synthetic construct
  misc_feature 1..22: note = chemically synthesized
  source 1..22: mol_type = other DNA
tgtatttttagcagagatgggg

SEQ ID NO: 42018 - DNA, 22 bp, synthetic construct
  misc_feature 1..22: note = chemically synthesized
  source 1..22: mol_type = other DNA
gtatttttagcagagatggggt

SEQ ID NO: 42019 - DNA, 22 bp, synthetic construct
  misc_feature 1..22: note = chemically synthesized
  source 1..22: mol_type = other DNA
tatttttagcagagatggggtt

SEQ ID NO: 42020 - DNA, 22 bp, synthetic construct
  misc_feature 1..22: note = chemically synthesized
  source 1..22: mol_type = other DNA
ttagcagagatggggtttcacc

SEQ ID NO: 42021 - DNA, 22 bp, synthetic construct
  misc_feature 1..22: note = chemically synthesized
  source 1..22: mol_type = other DNA
tagcagagatggggtttcacca

SEQ ID NO: 42022 - DNA, 22 bp, synthetic construct
  misc_feature 1..22: note = chemically synthesized
  source 1..22: mol_type = other DNA
agcagagatggggtttcaccat

SEQ ID NO: 42023 - DNA, 22 bp, synthetic construct
  misc_feature 1..22: note = chemically synthesized
  source 1..22: mol_type = other DNA
gcagagatggggtttcaccatt

SEQ ID NO: 42024 - DNA, 22 bp, synthetic construct
  misc_feature 1..22: note = chemically synthesized
  source 1..22: mol_type = other DNA
caccattttagccagaattgtc

SEQ ID NO: 42025 - DNA, 22 bp, synthetic construct
  misc_feature 1..22: note = chemically synthesized
  source 1..22: mol_type = other DNA
accattttagccagaattgtct

SEQ ID NO: 42026 - DNA, 22 bp, synthetic construct
  misc_feature 1..22: note = chemically synthesized
  source 1..22: mol_type = other DNA
tagccagaattgtctcaatctc

SEQ ID NO: 42027 - DNA, 22 bp, synthetic construct
  misc_feature 1..22: note = chemically synthesized
  source 1..22: mol_type = other DNA
agccagaattgtctcaatctcc

SEQ ID NO: 42028 - DNA, 22 bp, synthetic construct
  misc_feature 1..22: note = chemically synthesized
  source 1..22: mol_type = other DNA
gccagaattgtctcaatctcct

SEQ ID NO: 42029 - DNA, 22 bp, synthetic construct
  misc_feature 1..22: note = chemically synthesized
  source 1..22: mol_type = other DNA
tctcaatctcctgatctcgtga

SEQ ID NO: 42030 - DNA, 22 bp, synthetic construct
  misc_feature 1..22: note = chemically synthesized
  source 1..22: mol_type = other DNA
aatctcctgatctcgtgatctg

SEQ ID NO: 42031 - DNA, 22 bp, synthetic construct
  misc_feature 1..22: note = chemically synthesized
  source 1..22: mol_type = other DNA
ctgatctcgtgatctgcccgcc

SEQ ID NO: 42032 - DNA, 22 bp, synthetic construct
  misc_feature 1..22: note = chemically synthesized
  source 1..22: mol_type = other DNA
atctcgtgatctgcccgccccc

SEQ ID NO: 42033 - DNA, 22 bp, synthetic construct
  misc_feature 1..22: note = chemically synthesized
  source 1..22: mol_type = other DNA
gtgatctgcccgcccccgcctc

SEQ ID NO: 42034 - DNA, 22 bp, synthetic construct
  misc_feature 1..22: note = chemically synthesized
  source 1..22: mol_type = other DNA
cccgcccccgcctcccaaggtg

SEQ ID NO: 42035 - DNA, 22 bp, synthetic construct
  misc_feature 1..22: note = chemically synthesized
  source 1..22: mol_type = other DNA
ccaaggtgctgggattacaggc

SEQ ID NO: 42036 - DNA, 22 bp, synthetic construct
  misc_feature 1..22: note = chemically synthesized
  source 1..22: mol_type = other DNA
ggattacaggcgtgagccactg

SEQ ID NO: 42037 - DNA, 22 bp, synthetic construct
  misc_feature 1..22: note = chemically synthesized
  source 1..22: mol_type = other DNA
caggcgtgagccactgctcccg

SEQ ID NO: 42038 - DNA, 22 bp, synthetic construct
  misc_feature 1..22: note = chemically synthesized
  source 1..22: mol_type = other DNA
ctcccggccctatcagaacctt

SEQ ID NO: 42039 - DNA, 22 bp, synthetic construct
  misc_feature 1..22: note = chemically synthesized
  source 1..22: mol_type = other DNA
ccggccctatcagaaccttttc

SEQ ID NO: 42040 - DNA, 22 bp, synthetic construct
  misc_feature 1..22: note = chemically synthesized
  source 1..22: mol_type = other DNA
tcagaaccttttctaagtcccc

SEQ ID NO: 42041 - DNA, 22 bp, synthetic construct
  misc_feature 1..22: note = chemically synthesized
  source 1..22: mol_type = other DNA
ttctaagtccccgagctgcaac

SEQ ID NO: 42042 - DNA, 22 bp, synthetic construct
  misc_feature 1..22: note = chemically synthesized
  source 1..22: mol_type = other DNA
tctaagtccccgagctgcaaca

SEQ ID NO: 42043 - DNA, 22 bp, synthetic construct
  misc_feature 1..22: note = chemically synthesized
  source 1..22: mol_type = other DNA
ctaagtccccgagctgcaacat

SEQ ID NO: 42044 - DNA, 22 bp, synthetic construct
  misc_feature 1..22: note = chemically synthesized
  source 1..22: mol_type = other DNA
taagtccccgagctgcaacatt

SEQ ID NO: 42045 - DNA, 22 bp, synthetic construct
  misc_feature 1..22: note = chemically synthesized
  source 1..22: mol_type = other DNA
agtccccgagctgcaacattaa

SEQ ID NO: 42046 - DNA, 22 bp, synthetic construct
  misc_feature 1..22: note = chemically synthesized
  source 1..22: mol_type = other DNA
caacattaaatgcagaatccct

SEQ ID NO: 42047 - DNA, 22 bp, synthetic construct
  misc_feature 1..22: note = chemically synthesized
  source 1..22: mol_type = other DNA
aatgcagaatccctacttagta

SEQ ID NO: 42048 - DNA, 22 bp, synthetic construct
  misc_feature 1..22: note = chemically synthesized
  source 1..22: mol_type = other DNA
cttagtagggccaaaccaataa

SEQ ID NO: 42049 - DNA, 22 bp, synthetic construct
  misc_feature 1..22: note = chemically synthesized
  source 1..22: mol_type = other DNA
agtagggccaaaccaataaatt

SEQ ID NO: 42050 - DNA, 22 bp, synthetic construct
  misc_feature 1..22: note = chemically synthesized
  source 1..22: mol_type = other DNA
gtagggccaaaccaataaattc

SEQ ID NO: 42051 - DNA, 22 bp, synthetic construct
  misc_feature 1..22: note = chemically synthesized
  source 1..22: mol_type = other DNA
agcttgatccaactctatgtcc

SEQ ID NO: 42052 - DNA, 22 bp, synthetic construct
  misc_feature 1..22: note = chemically synthesized
  source 1..22: mol_type = other DNA
gatccaactctatgtcccttcc

SEQ ID NO: 42053 - DNA, 22 bp, synthetic construct
  misc_feature 1..22: note = chemically synthesized
  source 1..22: mol_type = other DNA
atccaactctatgtcccttcca

SEQ ID NO: 42054 - DNA, 22 bp, synthetic construct
  misc_feature 1..22: note = chemically synthesized
  source 1..22: mol_type = other DNA
tatgtcccttccaccattatcc

SEQ ID NO: 42055 - DNA, 22 bp, synthetic construct
  misc_feature 1..22: note = chemically synthesized
  source 1..22: mol_type = other DNA
tgtcccttccaccattatccct

SEQ ID NO: 42056 - DNA, 22 bp, synthetic construct
  misc_feature 1..22: note = chemically synthesized
  source 1..22: mol_type = other DNA
ccaccattatcccttaccctta

SEQ ID NO: 42057 - DNA, 22 bp, synthetic construct
  misc_feature 1..22: note = chemically synthesized
  source 1..22: mol_type = other DNA
caccattatcccttacccttaa

SEQ ID NO: 42058 - DNA, 22 bp, synthetic construct
  misc_feature 1..22: note = chemically synthesized
  source 1..22: mol_type = other DNA
tcccttacccttaatatccatt

SEQ ID NO: 42059 - DNA, 22 bp, synthetic construct
  misc_feature 1..22: note = chemically synthesized
  source 1..22: mol_type = other DNA
acccttaatatccattcccatg

SEQ ID NO: 42060 - DNA, 22 bp, synthetic construct
  misc_feature 1..22: note = chemically synthesized
  source 1..22: mol_type = other DNA
cccttaatatccattcccatgc

SEQ ID NO: 42061 - DNA, 22 bp, synthetic construct
  misc_feature 1..22: note = chemically synthesized
  source 1..22: mol_type = other DNA
aatatccattcccatgcctgtt

SEQ ID NO: 42062 - DNA, 22 bp, synthetic construct
  misc_feature 1..22: note = chemically synthesized
  source 1..22: mol_type = other DNA
atatccattcccatgcctgttc

SEQ ID NO: 42063 - DNA, 22 bp, synthetic construct
  misc_feature 1..22: note = chemically synthesized
  source 1..22: mol_type = other DNA
ccatgcctgttctccagatttc

SEQ ID NO: 42064 - DNA, 22 bp, synthetic construct
  misc_feature 1..22: note = chemically synthesized
  source 1..22: mol_type = other DNA
ttctccagatttctgccaatat

SEQ ID NO: 42065 - DNA, 22 bp, synthetic construct
  misc_feature 1..22: note = chemically synthesized
  source 1..22: mol_type = other DNA
tccagatttctgccaatataaa

SEQ ID NO: 42066 - DNA, 22 bp, synthetic construct
  misc_feature 1..22: note = chemically synthesized
  source 1..22: mol_type = other DNA
cagatttctgccaatataaatt

SEQ ID NO: 42067 - DNA, 22 bp, synthetic construct
  misc_feature 1..22: note = chemically synthesized
  source 1..22: mol_type = other DNA
ctgccaatataaattagaaagc

SEQ ID NO: 42068 - DNA, 22 bp, synthetic construct
  misc_feature 1..22: note = chemically synthesized
  source 1..22: mol_type = other DNA
tgccaatataaattagaaagct

SEQ ID NO: 42069 - DNA, 22 bp, synthetic construct
  misc_feature 1..22: note = chemically synthesized
  source 1..22: mol_type = other DNA
ccaatataaattagaaagctta

SEQ ID NO: 42070 - DNA, 22 bp, synthetic construct
  misc_feature 1..22: note = chemically synthesized
  source 1..22: mol_type = other DNA
gaaagcttaagcagttctttta

SEQ ID NO: 42071 - DNA, 22 bp, synthetic construct
  misc_feature 1..22: note = chemically synthesized
  source 1..22: mol_type = other DNA
aagcagttcttttagagtataa

SEQ ID NO: 42072 - DNA, 22 bp, synthetic construct
  misc_feature 1..22: note = chemically synthesized
  source 1..22: mol_type = other DNA
agcagttcttttagagtataat

SEQ ID NO: 42073 - DNA, 22 bp, synthetic construct
  misc_feature 1..22: note = chemically synthesized
  source 1..22: mol_type = other DNA
ttttagagtataatgcacctcc

SEQ ID NO: 42074 - DNA, 22 bp, synthetic construct
  misc_feature 1..22: note = chemically synthesized
  source 1..22: mol_type = other DNA
ttagagtataatgcacctcctc

SEQ ID NO: 42075 - DNA, 22 bp, synthetic construct
  misc_feature 1..22: note = chemically synthesized
  source 1..22: mol_type = other DNA
tagagtataatgcacctcctca

SEQ ID NO: 42076 - DNA, 22 bp, synthetic construct
  misc_feature 1..22: note = chemically synthesized
  source 1..22: mol_type = other DNA
agagtataatgcacctcctcat

SEQ ID NO: 42077 - DNA, 22 bp, synthetic construct
  misc_feature 1..22: note = chemically synthesized
  source 1..22: mol_type = other DNA
gagtataatgcacctcctcatg

SEQ ID NO: 42078 - DNA, 22 bp, synthetic construct
  misc_feature 1..22: note = chemically synthesized
  source 1..22: mol_type = other DNA
ctcatgggtcacactctgaacc

SEQ ID NO: 42079 - DNA, 22 bp, synthetic construct
  misc_feature 1..22: note = chemically synthesized
  source 1..22: mol_type = other DNA
atgggtcacactctgaacctca

SEQ ID NO: 42080 - DNA, 22 bp, synthetic construct
  misc_feature 1..22: note = chemically synthesized
  source 1..22: mol_type = other DNA
tgaacctcacctctggggcccg

SEQ ID NO: 42081 - DNA, 22 bp, synthetic construct
  misc_feature 1..22: note = chemically synthesized
  source 1..22: mol_type = other DNA
aacctcacctctggggcccgca

SEQ ID NO: 42082 - DNA, 22 bp, synthetic construct
  misc_feature 1..22: note = chemically synthesized
  source 1..22: mol_type = other DNA
acctctggggcccgcaaggaat

SEQ ID NO: 42083 - DNA, 22 bp, synthetic construct
  misc_feature 1..22: note = chemically synthesized
  source 1..22: mol_type = other DNA
tggggcccgcaaggaatttagc

SEQ ID NO: 42084 - DNA, 22 bp, synthetic construct
  misc_feature 1..22: note = chemically synthesized
  source 1..22: mol_type = other DNA
gggcccgcaaggaatttagcct

SEQ ID NO: 42085 - DNA, 22 bp, synthetic construct
  misc_feature 1..22: note = chemically synthesized
  source 1..22: mol_type = other DNA
agcctagttataggtctagaag

SEQ ID NO: 42086 - DNA, 22 bp, synthetic construct
  misc_feature 1..22: note = chemically synthesized
  source 1..22: mol_type = other DNA
gcctagttataggtctagaagc

SEQ ID NO: 42087 - DNA, 22 bp, synthetic construct
  misc_feature 1..22: note = chemically synthesized
  source 1..22: mol_type = other DNA
gttataggtctagaagcattca

SEQ ID NO: 42088 - DNA, 22 bp, synthetic construct
  misc_feature 1..22: note = chemically synthesized
  source 1..22: mol_type = other DNA
taggtctagaagcattcagggg

SEQ ID NO: 42089 - DNA, 22 bp, synthetic construct
  misc_feature 1..22: note = chemically synthesized
  source 1..22: mol_type = other DNA
gaagcattcaggggcattaggg

SEQ ID NO: 42090 - DNA, 22 bp, synthetic construct
  misc_feature 1..22: note = chemically synthesized
  source 1..22: mol_type = other DNA
aggggcattaggggtgcctctt

SEQ ID NO: 42091 - DNA, 22 bp, synthetic construct
  misc_feature 1..22: note = chemically synthesized
  source 1..22: mol_type = other DNA
ggggtgcctcttgaggagaatc

SEQ ID NO: 42092 - DNA, 22 bp, synthetic construct
  misc_feature 1..22: note = chemically synthesized
  source 1..22: mol_type = other DNA
ttgaggagaatcaacattatct

SEQ ID NO: 42093 - DNA, 22 bp, synthetic construct
  misc_feature 1..22: note = chemically synthesized
  source 1..22: mol_type = other DNA
gaggagaatcaacattatcttg

SEQ ID NO: 42094 - DNA, 22 bp, synthetic construct
  misc_feature 1..22: note = chemically synthesized
  source 1..22: mol_type = other DNA
aggagaatcaacattatcttgc

SEQ ID NO: 42095 - DNA, 22 bp, synthetic construct
  misc_feature 1..22: note = chemically synthesized
  source 1..22: mol_type = other DNA
tcttgcctggcagctgcctcag

SEQ ID NO: 42096 - DNA, 22 bp, synthetic construct
  misc_feature 1..22: note = chemically synthesized
  source 1..22: mol_type = other DNA
gcctggcagctgcctcagggaa

SEQ ID NO: 42097 - DNA, 22 bp, synthetic construct
  misc_feature 1..22: note = chemically synthesized
  source 1..22: mol_type = other DNA
cctggcagctgcctcagggaag

SEQ ID NO: 42098 - DNA, 22 bp, synthetic construct
  misc_feature 1..22: note = chemically synthesized
  source 1..22: mol_type = other DNA
gcagctgcctcagggaaggcca

SEQ ID NO: 42099 - DNA, 22 bp, synthetic construct
  misc_feature 1..22: note = chemically synthesized
  source 1..22: mol_type = other DNA
cctcagggaaggccatcactgt

SEQ ID NO: 42100 - DNA, 22 bp, synthetic construct
  misc_feature 1..22: note = chemically synthesized
  source 1..22: mol_type = other DNA
agggaaggccatcactgttgcc

SEQ ID NO: 42101 - DNA, 22 bp, synthetic construct
  misc_feature 1..22: note = chemically synthesized
  source 1..22: mol_type = other DNA
ttgcctcaagcagtgcagggtt

SEQ ID NO: 42102 - DNA, 22 bp, synthetic construct
  misc_feature 1..22: note = chemically synthesized
  source 1..22: mol_type = other DNA
cctcaagcagtgcagggtttac

SEQ ID NO: 42103 - DNA, 22 bp, synthetic construct
  misc_feature 1..22: note = chemically synthesized
  source 1..22: mol_type = other DNA
aagcagtgcagggtttacatcc

SEQ ID NO: 42104 - DNA, 22 bp, synthetic construct
  misc_feature 1..22: note = chemically synthesized
  source 1..22: mol_type = other DNA
acatcctcagacaaaggtggaa

SEQ ID NO: 42105 - DNA, 22 bp, synthetic construct
  misc_feature 1..22: note = chemically synthesized
  source 1..22: mol_type = other DNA
catcctcagacaaaggtggaaa

SEQ ID NO: 42106 - DNA, 22 bp, synthetic construct
  misc_feature 1..22: note = chemically synthesized
  source 1..22: mol_type = other DNA
agacaaaggtggaaaggctaat

SEQ ID NO: 42107 - DNA, 22 bp, synthetic construct
  misc_feature 1..22: note = chemically synthesized
  source 1..22: mol_type = other DNA
atggcagcacgggtcagggagg

SEQ ID NO: 42108 - DNA, 22 bp, synthetic construct
  misc_feature 1..22: note = chemically synthesized
  source 1..22: mol_type = other DNA
ccactactggggatggggaaac

SEQ ID NO: 42109 - DNA, 22 bp, synthetic construct
  misc_feature 1..22: note = chemically synthesized
  source 1..22: mol_type = other DNA
ctggggatggggaaactgtttc

SEQ ID NO: 42110 - DNA, 22 bp, synthetic construct
  misc_feature 1..22: note = chemically synthesized
  source 1..22: mol_type = other DNA
gggatggggaaactgtttcttc

SEQ ID NO: 42111 - DNA, 22 bp, synthetic construct
  misc_feature 1..22: note = chemically synthesized
  source 1..22: mol_type = other DNA
tttcttctggcaaaaaagtttc

SEQ ID NO: 42112 - DNA, 22 bp, synthetic construct
  misc_feature 1..22: note = chemically synthesized
  source 1..22: mol_type = other DNA
cttctggcaaaaaagtttcatc

SEQ ID NO: 42113 - DNA, 22 bp, synthetic construct
  misc_feature 1..22: note = chemically synthesized
  source 1..22: mol_type = other DNA
ttctggcaaaaaagtttcatca

SEQ ID NO: 42114 - DNA, 22 bp, synthetic construct
  misc_feature 1..22: note = chemically synthesized
  source 1..22: mol_type = other DNA
ctggcaaaaaagtttcatcaga

SEQ ID NO: 42115 - DNA, 22 bp, synthetic construct
  misc_feature 1..22: note = chemically synthesized
  source 1..22: mol_type = other DNA
tggcaaaaaagtttcatcagag

SEQ ID NO: 42116 - DNA, 22 bp, synthetic construct
  misc_feature 1..22: note = chemically synthesized
  source 1..22: mol_type = other DNA
gcaaaaaagtttcatcagagtt

SEQ ID NO: 42117 - DNA, 22 bp, synthetic construct
  misc_feature 1..22: note = chemically synthesized
  source 1..22: mol_type = other DNA
catcagagttcacaaactcagt

SEQ ID NO: 42118 - DNA, 22 bp, synthetic construct
  misc_feature 1..22: note = chemically synthesized
  source 1..22: mol_type = other DNA
atcagagttcacaaactcagtg

SEQ ID NO: 42119 - DNA, 22 bp, synthetic construct
  misc_feature 1..22: note = chemically synthesized
  source 1..22: mol_type = other DNA
acaaactcagtgtcctcagctt

SEQ ID NO: 42120 - DNA, 22 bp, synthetic construct
  misc_feature 1..22: note = chemically synthesized
  source 1..22: mol_type = other DNA
agtgtcctcagcttcatcaggg

SEQ ID NO: 42121 - DNA, 22 bp, synthetic construct
  misc_feature 1..22: note = chemically synthesized
  source 1..22: mol_type = other DNA
agcttcatcagggttctcccac

SEQ ID NO: 42122 - DNA, 22 bp, synthetic construct
  misc_feature 1..22: note = chemically synthesized
  source 1..22: mol_type = other DNA
catcagggttctcccacacatc

SEQ ID NO: 42123 - DNA, 22 bp, synthetic construct
  misc_feature 1..22: note = chemically synthesized
  source 1..22: mol_type = other DNA
atcagggttctcccacacatcc

SEQ ID NO: 42124 - DNA, 22 bp, synthetic construct
  misc_feature 1..22: note = chemically synthesized
  source 1..22: mol_type = other DNA
tcccacacatccccactccaag

SEQ ID NO: 42125 - DNA, 22 bp, synthetic construct
  misc_feature 1..22: note = chemically synthesized
  source 1..22: mol_type = other DNA
ccacacatccccactccaagtt

SEQ ID NO: 42126 - DNA, 22 bp, synthetic construct
  misc_feature 1..22: note = chemically synthesized
  source 1..22: mol_type = other DNA
caagttccagggtcccattttt

SEQ ID NO: 42127 - DNA, 22 bp, synthetic construct
  misc_feature 1..22: note = chemically synthesized
  source 1..22: mol_type = other DNA
cagggtcccatttttttccagt

SEQ ID NO: 42128 - DNA, 22 bp, synthetic construct
  misc_feature 1..22: note = chemically synthesized
  source 1..22: mol_type = other DNA
ttttccagtcaatgccctcact

SEQ ID NO: 42129 - DNA, 22 bp, synthetic construct
  misc_feature 1..22: note = chemically synthesized
  source 1..22: mol_type = other DNA
tttccagtcaatgccctcactt

SEQ ID NO: 42130 - DNA, 22 bp, synthetic construct
  misc_feature 1..22: note = chemically synthesized
  source 1..22: mol_type = other DNA
ttccagtcaatgccctcacttt

SEQ ID NO: 42131 - DNA, 22 bp, synthetic construct
  misc_feature 1..22: note = chemically synthesized
  source 1..22: mol_type = other DNA
tccagtcaatgccctcacttta

SEQ ID NO: 42132 - DNA, 22 bp, synthetic construct
  misc_feature 1..22: note = chemically synthesized
  source 1..22: mol_type = other DNA
ccagtcaatgccctcactttaa

SEQ ID NO: 42133 - DNA, 22 bp, synthetic construct
  misc_feature 1..22: note = chemically synthesized
  source 1..22: mol_type = other DNA
cagtcaatgccctcactttaac

SEQ ID NO: 42134 - DNA, 22 bp, synthetic construct
  misc_feature 1..22: note = chemically synthesized
  source 1..22: mol_type = other DNA
actttaacagtaaacacctggc

SEQ ID NO: 42135 - DNA, 22 bp, synthetic construct
  misc_feature 1..22: note = chemically synthesized
  source 1..22: mol_type = other DNA
taacagtaaacacctggcaagg

SEQ ID NO: 42136 - DNA, 22 bp, synthetic construct
  misc_feature 1..22: note = chemically synthesized
  source 1..22: mol_type = other DNA
aacagtaaacacctggcaaggc

SEQ ID NO: 42137 - DNA, 22 bp, synthetic construct
  misc_feature 1..22: note = chemically synthesized
  source 1..22: mol_type = other DNA
acagtaaacacctggcaaggct

SEQ ID NO: 42138 - DNA, 22 bp, synthetic construct
  misc_feature 1..22: note = chemically synthesized
  source 1..22: mol_type = other DNA
gcaaggctgtgcatgcacctct

SEQ ID NO: 42139 - DNA, 22 bp, synthetic construct
  misc_feature 1..22: note = chemically synthesized
  source 1..22: mol_type = other DNA
tgcatgcacctcttgttgcaga

SEQ ID NO: 42140 - DNA, 22 bp, synthetic construct
  misc_feature 1..22: note = chemically synthesized
  source 1..22: mol_type = other DNA
ttgttgcagatcagctactcgc

SEQ ID NO: 42141 - DNA, 22 bp, synthetic construct
  misc_feature 1..22: note = chemically synthesized
  source 1..22: mol_type = other DNA
gttgcagatcagctactcgcat

SEQ ID NO: 42142 - DNA, 22 bp, synthetic construct
  misc_feature 1..22: note = chemically synthesized
  source 1..22: mol_type = other DNA
ttgcagatcagctactcgcatg

SEQ ID NO: 42143 - DNA, 22 bp, synthetic construct
  misc_feature 1..22: note = chemically synthesized
  source 1..22: mol_type = other DNA
cagatcagctactcgcatgata

SEQ ID NO: 42144 - DNA, 22 bp, synthetic construct
  misc_feature 1..22: note = chemically synthesized
  source 1..22: mol_type = other DNA
ctcgcatgataacagcttgtct

SEQ ID NO: 42145 - DNA, 22 bp, synthetic construct
  misc_feature 1..22: note = chemically synthesized
  source 1..22: mol_type = other DNA
gcatgataacagcttgtctctg

SEQ ID NO: 42146 - DNA, 22 bp, synthetic construct
  misc_feature 1..22: note = chemically synthesized
  source 1..22: mol_type = other DNA
gtctctgttttttcacaatttc

SEQ ID NO: 42147 - DNA, 22 bp, synthetic construct
  misc_feature 1..22: note = chemically synthesized
  source 1..22: mol_type = other DNA
tctctgttttttcacaatttca

SEQ ID NO: 42148 - DNA, 22 bp, synthetic construct
  misc_feature 1..22: note = chemically synthesized
  source 1..22: mol_type = other DNA
tgttttttcacaatttcaactc

SEQ ID NO: 42149 - DNA, 22 bp, synthetic construct
  misc_feature 1..22: note = chemically synthesized
  source 1..22: mol_type = other DNA
ttttttcacaatttcaactctt

SEQ ID NO: 42150 - DNA, 22 bp, synthetic construct
  misc_feature 1..22: note = chemically synthesized
  source 1..22: mol_type = other DNA
tttcacaatttcaactctttct

SEQ ID NO: 42151 - DNA, 22 bp, synthetic construct
  misc_feature 1..22: note = chemically synthesized
  source 1..22: mol_type = other DNA
ttcacaatttcaactctttctc

SEQ ID NO: 42152 - DNA, 22 bp, synthetic construct
  misc_feature 1..22: note = chemically synthesized
  source 1..22: mol_type = other DNA
tcacaatttcaactctttctct

SEQ ID NO: 42153 - DNA, 22 bp, synthetic construct
  misc_feature 1..22: note = chemically synthesized
  source 1..22: mol_type = other DNA
cacaatttcaactctttctcta

SEQ ID NO: 42154 - DNA, 22 bp, synthetic construct
  misc_feature 1..22: note = chemically synthesized
  source 1..22: mol_type = other DNA
acaatttcaactctttctctac

SEQ ID NO: 42155 - DNA, 22 bp, synthetic construct
  misc_feature 1..22: note = chemically synthesized
  source 1..22: mol_type = other DNA
caactctttctctacaggagtt

SEQ ID NO: 42156 - DNA, 22 bp, synthetic construct
  misc_feature 1..22: note = chemically synthesized
  source 1..22: mol_type = other DNA
aactctttctctacaggagtta

SEQ ID NO: 42157 - DNA, 22 bp, synthetic construct
  misc_feature 1..22: note = chemically synthesized
  source 1..22: mol_type = other DNA
tttctctacaggagttaaaact

SEQ ID NO: 42158 - DNA, 22 bp, synthetic construct
  misc_feature 1..22: note = chemically synthesized
  source 1..22: mol_type = other DNA
tctctacaggagttaaaactct

SEQ ID NO: 42159 - DNA, 22 bp, synthetic construct
  misc_feature 1..22: note = chemically synthesized
  source 1..22: mol_type = other DNA
ctctacaggagttaaaactctc

SEQ ID NO: 42160 - DNA, 22 bp, synthetic construct
  misc_feature 1..22: note = chemically synthesized
  source 1..22: mol_type = other DNA
tctacaggagttaaaactctca

SEQ ID NO: 42161 - DNA, 22 bp, synthetic construct
  misc_feature 1..22: note = chemically synthesized
  source 1..22: mol_type = other DNA
tacaggagttaaaactctcatt

SEQ ID NO: 42162 - DNA, 22 bp, synthetic construct
  misc_feature 1..22: note = chemically synthesized
  source 1..22: mol_type = other DNA
caggagttaaaactctcattca

SEQ ID NO: 42163 - DNA, 22 bp, synthetic construct
  misc_feature 1..22: note = chemically synthesized
  source 1..22: mol_type = other DNA
aaactctcattcagggcaatct

SEQ ID NO: 42164 - DNA, 22 bp, synthetic construct
  misc_feature 1..22: note = chemically synthesized
  source 1..22: mol_type = other DNA
tcattcagggcaatcttagcag

SEQ ID NO: 42165 - DNA, 22 bp, synthetic construct
  misc_feature 1..22: note = chemically synthesized
  source 1..22: mol_type = other DNA
attcagggcaatcttagcagat

SEQ ID NO: 42166 - DNA, 22 bp, synthetic construct
  misc_feature 1..22: note = chemically synthesized
  source 1..22: mol_type = other DNA
agggcaatcttagcagatttgt

SEQ ID NO: 42167 - DNA, 22 bp, synthetic construct
  misc_feature 1..22: note = chemically synthesized
  source 1..22: mol_type = other DNA
agcagatttgtggctcagtatc

SEQ ID NO: 42168 - DNA, 22 bp, synthetic construct
  misc_feature 1..22: note = chemically synthesized
  source 1..22: mol_type = other DNA
gcagatttgtggctcagtatct

SEQ ID NO: 42169 - DNA, 22 bp, synthetic construct
  misc_feature 1..22: note = chemically synthesized
  source 1..22: mol_type = other DNA
gtggctcagtatctgcttctga

SEQ ID NO: 42170 - DNA, 22 bp, synthetic construct
  misc_feature 1..22: note = chemically synthesized
  source 1..22: mol_type = other DNA
tggctcagtatctgcttctgaa

SEQ ID NO: 42171 - DNA, 22 bp, synthetic construct
  misc_feature 1..22: note = chemically synthesized
  source 1..22: mol_type = other DNA
agtatctgcttctgaaggtggg

SEQ ID NO: 42172 - DNA, 22 bp, synthetic construct
  misc_feature 1..22: note = chemically synthesized
  source 1..22: mol_type = other DNA
cttctgaaggtgggagacagat

SEQ ID NO: 42173 - DNA, 22 bp, synthetic construct
  misc_feature 1..22: note = chemically synthesized
  source 1..22: mol_type = other DNA
ctgaaggtgggagacagatccc

SEQ ID NO: 42174 - DNA, 22 bp, synthetic construct
  misc_feature 1..22: note = chemically synthesized
  source 1..22: mol_type = other DNA
tgaaggtgggagacagatcccc

SEQ ID NO: 42175 - DNA, 22 bp, synthetic construct
  misc_feature 1..22: note = chemically synthesized
  source 1..22: mol_type = other DNA
aaggtgggagacagatcccctg

SEQ ID NO: 42176 - DNA, 22 bp, synthetic construct
  misc_feature 1..22: note = chemically synthesized
  source 1..22: mol_type = other DNA
agatcatcattttctttcatct

SEQ ID NO: 42177 - DNA, 22 bp, synthetic construct
  misc_feature 1..22: note = chemically synthesized
  source 1..22: mol_type = other DNA
tctttcatctctttctccagag

SEQ ID NO: 42178 - DNA, 22 bp, synthetic construct
  misc_feature 1..22: note = chemically synthesized
  source 1..22: mol_type = other DNA
ctttcatctctttctccagaga

SEQ ID NO: 42179 - DNA, 22 bp, synthetic construct
  misc_feature 1..22: note = chemically synthesized
  source 1..22: mol_type = other DNA
tttcatctctttctccagagaa

SEQ ID NO: 42180 - DNA, 22 bp, synthetic construct
  misc_feature 1..22: note = chemically synthesized
  source 1..22: mol_type = other DNA
tcatctctttctccagagaact

SEQ ID NO: 42181 - DNA, 22 bp, synthetic construct
  misc_feature 1..22: note = chemically synthesized
  source 1..22: mol_type = other DNA
catctctttctccagagaactt

SEQ ID NO: 42182 - DNA, 22 bp, synthetic construct
  misc_feature 1..22: note = chemically synthesized
  source 1..22: mol_type = other DNA
atctctttctccagagaactta

SEQ ID NO: 42183 - DNA, 22 bp, synthetic construct
  misc_feature 1..22: note = chemically synthesized
  source 1..22: mol_type = other DNA
tttctccagagaacttaggagc

SEQ ID NO: 42184 - DNA, 22 bp, synthetic construct
  misc_feature 1..22: note = chemically synthesized
  source 1..22: mol_type = other DNA
tctccagagaacttaggagcaa

SEQ ID NO: 42185 - DNA, 22 bp, synthetic construct
  misc_feature 1..22: note = chemically synthesized
  source 1..22: mol_type = other DNA
ctccagagaacttaggagcaat

SEQ ID NO: 42186 - DNA, 22 bp, synthetic construct
  misc_feature 1..22: note = chemically synthesized
  source 1..22: mol_type = other DNA
tccagagaacttaggagcaatc

SEQ ID NO: 42187 - DNA, 22 bp, synthetic construct
  misc_feature 1..22: note = chemically synthesized
  source 1..22: mol_type = other DNA
cagagaacttaggagcaatcaa

SEQ ID NO: 42188 - DNA, 22 bp, synthetic construct
  misc_feature 1..22: note = chemically synthesized
  source 1..22: mol_type = other DNA
aggagcaatcaaccaacttcat

SEQ ID NO: 42189 - DNA, 22 bp, synthetic construct
  misc_feature 1..22: note = chemically synthesized
  source 1..22: mol_type = other DNA
ggagcaatcaaccaacttcatt

SEQ ID NO: 42190 - DNA, 22 bp, synthetic construct
  misc_feature 1..22: note = chemically synthesized
  source 1..22: mol_type = other DNA
cattatgttccttggttctcca

SEQ ID NO: 42191 - DNA, 22 bp, synthetic construct
  misc_feature 1..22: note = chemically synthesized
  source 1..22: mol_type = other DNA
attatgttccttggttctccac

SEQ ID NO: 42192 - DNA, 22 bp, synthetic construct
  misc_feature 1..22: note = chemically synthesized
  source 1..22: mol_type = other DNA
tgttccttggttctccacatat

SEQ ID NO: 42193 - DNA, 22 bp, synthetic construct
  misc_feature 1..22: note = chemically synthesized
  source 1..22: mol_type = other DNA
cttggttctccacatatagtca

SEQ ID NO: 42194 - DNA, 22 bp, synthetic construct
  misc_feature 1..22: note = chemically synthesized
  source 1..22: mol_type = other DNA
ggttctccacatatagtcaaag

SEQ ID NO: 42195 - DNA, 22 bp, synthetic construct
  misc_feature 1..22: note = chemically synthesized
  source 1..22: mol_type = other DNA
gttctccacatatagtcaaagg

SEQ ID NO: 42196 - DNA, 22 bp, synthetic construct
  misc_feature 1..22: note = chemically synthesized
  source 1..22: mol_type = other DNA
tccacatatagtcaaaggtatt

SEQ ID NO: 42197 - DNA, 22 bp, synthetic construct
  misc_feature 1..22: note = chemically synthesized
  source 1..22: mol_type = other DNA
cacatatagtcaaaggtattat

SEQ ID NO: 42198 - DNA, 22 bp, synthetic construct
  misc_feature 1..22: note = chemically synthesized
  source 1..22: mol_type = other DNA
tgtatagagtcactaaactcct

SEQ ID NO: 42199 - DNA, 22 bp, synthetic construct
  misc_feature 1..22: note = chemically synthesized
  source 1..22: mol_type = other DNA
aactccttgcctctcataagtg

SEQ ID NO: 42200 - DNA, 22 bp, synthetic construct
  misc_feature 1..22: note = chemically synthesized
  source 1..22: mol_type = other DNA
cttgcctctcataagtgatgaa

SEQ ID NO: 42201 - DNA, 22 bp, synthetic construct
  misc_feature 1..22: note = chemically synthesized
  source 1..22: mol_type = other DNA
gcctctcataagtgatgaatca

SEQ ID NO: 42202 - DNA, 22 bp, synthetic construct
  misc_feature 1..22: note = chemically synthesized
  source 1..22: mol_type = other DNA
cctctcataagtgatgaatcag

SEQ ID NO: 42203 - DNA, 22 bp, synthetic construct
  misc_feature 1..22: note = chemically synthesized
  source 1..22: mol_type = other DNA
tcataagtgatgaatcagtagt

SEQ ID NO: 42204 - DNA, 22 bp, synthetic construct
  misc_feature 1..22: note = chemically synthesized
  source 1..22: mol_type = other DNA
ataagtgatgaatcagtagtgt

SEQ ID NO: 42205 - DNA, 22 bp, synthetic construct
  misc_feature 1..22: note = chemically synthesized
  source 1..22: mol_type = other DNA
attttgcataactctctaaaca

SEQ ID NO: 42206 - DNA, 22 bp, synthetic construct
  misc_feature 1..22: note = chemically synthesized
  source 1..22: mol_type = other DNA
ttttgcataactctctaaacaa

SEQ ID NO: 42207 - DNA, 22 bp, synthetic construct
  misc_feature 1..22: note = chemically synthesized
  source 1..22: mol_type = other DNA
tgcataactctctaaacaattc

SEQ ID NO: 42208 - DNA, 22 bp, synthetic construct
  misc_feature 1..22: note = chemically synthesized
  source 1..22: mol_type = other DNA
gcataactctctaaacaattca

SEQ ID NO: 42209 - DNA, 22 bp, synthetic construct
  misc_feature 1..22: note = chemically synthesized
  source 1..22: mol_type = other DNA
cataactctctaaacaattcag

SEQ ID NO: 42210 - DNA, 22 bp, synthetic construct
  misc_feature 1..22: note = chemically synthesized
  source 1..22: mol_type = other DNA
tctaaacaattcaggccaagta

SEQ ID NO: 42211 - DNA, 22 bp, synthetic construct
  misc_feature 1..22: note = chemically synthesized
  source 1..22: mol_type = other DNA
taaacaattcaggccaagtact

SEQ ID NO: 42212 - DNA, 22 bp, synthetic construct
  misc_feature 1..22: note = chemically synthesized
  source 1..22: mol_type = other DNA
aacaattcaggccaagtactat

SEQ ID NO: 42213 - DNA, 22 bp, synthetic construct
  misc_feature 1..22: note = chemically synthesized
  source 1..22: mol_type = other DNA
aggccaagtactatcagtgttc

SEQ ID NO: 42214 - DNA, 22 bp, synthetic construct
  misc_feature 1..22: note = chemically synthesized
  source 1..22: mol_type = other DNA
tcagtgttctccatactattag

SEQ ID NO: 42215 - DNA, 22 bp, synthetic construct
  misc_feature 1..22: note = chemically synthesized
  source 1..22: mol_type = other DNA
tccatactattagaagtagagt

SEQ ID NO: 42216 - DNA, 22 bp, synthetic construct
  misc_feature 1..22: note = chemically synthesized
  source 1..22: mol_type = other DNA
catactattagaagtagagtcc

SEQ ID NO: 42217 - DNA, 22 bp, synthetic construct
  misc_feature 1..22: note = chemically synthesized
  source 1..22: mol_type = other DNA
ttagaagtagagtccttagcat

SEQ ID NO: 42218 - DNA, 22 bp, synthetic construct
  misc_feature 1..22: note = chemically synthesized
  source 1..22: mol_type = other DNA
gaagtagagtccttagcatttt

SEQ ID NO: 42219 - DNA, 22 bp, synthetic construct
  misc_feature 1..22: note = chemically synthesized
  source 1..22: mol_type = other DNA
agcattttttggtctaatcata

SEQ ID NO: 42220 - DNA, 22 bp, synthetic construct
  misc_feature 1..22: note = chemically synthesized
  source 1..22: mol_type = other DNA
gcattttttggtctaatcatat

SEQ ID NO: 42221 - DNA, 22 bp, synthetic construct
  misc_feature 1..22: note = chemically synthesized
  source 1..22: mol_type = other DNA
tttggtctaatcatattaatca

SEQ ID NO: 42222 - DNA, 22 bp, synthetic construct
  misc_feature 1..22: note = chemically synthesized
  source 1..22: mol_type = other DNA
ttggtctaatcatattaatcag

SEQ ID NO: 42223 - DNA, 22 bp, synthetic construct
  misc_feature 1..22: note = chemically synthesized
  source 1..22: mol_type = other DNA
tggtctaatcatattaatcagc

SEQ ID NO: 42224 - DNA, 22 bp, synthetic construct
  misc_feature 1..22: note = chemically synthesized
  source 1..22: mol_type = other DNA
ggtctaatcatattaatcagcc

SEQ ID NO: 42225 - DNA, 22 bp, synthetic construct
  misc_feature 1..22: note = chemically synthesized
  source 1..22: mol_type = other DNA
gtctaatcatattaatcagcca

SEQ ID NO: 42226 - DNA, 22 bp, synthetic construct
  misc_feature 1..22: note = chemically synthesized
  source 1..22: mol_type = other DNA
atcatattaatcagccaacacc

SEQ ID NO: 42227 - DNA, 22 bp, synthetic construct
  misc_feature 1..22: note = chemically synthesized
  source 1..22: mol_type = other DNA
atcagccaacaccagaagtccc

SEQ ID NO: 42228 - DNA, 22 bp, synthetic construct
  misc_feature 1..22: note = chemically synthesized
  source 1..22: mol_type = other DNA
catccttaatattctgttcctc

SEQ ID NO: 42229 - DNA, 22 bp, synthetic construct
  misc_feature 1..22: note = chemically synthesized
  source 1..22: mol_type = other DNA
aatattctgttcctcaagaacc

SEQ ID NO: 42230 - DNA, 22 bp, synthetic construct
  misc_feature 1..22: note = chemically synthesized
  source 1..22: mol_type = other DNA
atattctgttcctcaagaacca

SEQ ID NO: 42231 - DNA, 22 bp, synthetic construct
  misc_feature 1..22: note = chemically synthesized
  source 1..22: mol_type = other DNA
tgttcctcaagaaccacttctg

SEQ ID NO: 42232 - DNA, 22 bp, synthetic construct
  misc_feature 1..22: note = chemically synthesized
  source 1..22: mol_type = other DNA
ttcctcaagaaccacttctggt

SEQ ID NO: 42233 - DNA, 22 bp, synthetic construct
  misc_feature 1..22: note = chemically synthesized
  source 1..22: mol_type = other DNA
ctcaagaaccacttctggtatg

SEQ ID NO: 42234 - DNA, 22 bp, synthetic construct
  misc_feature 1..22: note = chemically synthesized
  source 1..22: mol_type = other DNA
aagaaccacttctggtatgaaa

SEQ ID NO: 42235 - DNA, 22 bp, synthetic construct
  misc_feature 1..22: note = chemically synthesized
  source 1..22: mol_type = other DNA
ctggtatgaaaatctgtattag

SEQ ID NO: 42236 - DNA, 22 bp, synthetic construct
  misc_feature 1..22: note = chemically synthesized
  source 1..22: mol_type = other DNA
tggtatgaaaatctgtattagt

SEQ ID NO: 42237 - DNA, 22 bp, synthetic construct
  misc_feature 1..22: note = chemically synthesized
  source 1..22: mol_type = other DNA
gtatgaaaatctgtattagtcg

SEQ ID NO: 42238 - DNA, 22 bp, synthetic construct
  misc_feature 1..22: note = chemically synthesized
  source 1..22: mol_type = other DNA
tattagtcggggttctctagag

SEQ ID NO: 42239 - DNA, 22 bp, synthetic construct
  misc_feature 1..22: note = chemically synthesized
  source 1..22: mol_type = other DNA
gtcggggttctctagagggaca

SEQ ID NO: 42240 - DNA, 22 bp, synthetic construct
  misc_feature 1..22: note = chemically synthesized
  source 1..22: mol_type = other DNA
tctagagggacagaactaatag

SEQ ID NO: 42241 - DNA, 22 bp, synthetic construct
  misc_feature 1..22: note = chemically synthesized
  source 1..22: mol_type = other DNA
tagagggacagaactaatagga

SEQ ID NO: 42242 - DNA, 22 bp, synthetic construct
  misc_feature 1..22: note = chemically synthesized
  source 1..22: mol_type = other DNA
gagggacagaactaataggaga

SEQ ID NO: 42243 - DNA, 22 bp, synthetic construct
  misc_feature 1..22: note = chemically synthesized
  source 1..22: mol_type = other DNA
ataggagattatatatatatat

SEQ ID NO: 42244 - DNA, 22 bp, synthetic construct
  misc_feature 1..22: note = chemically synthesized
  source 1..22: mol_type = other DNA
tatatatatatatatgagagag

SEQ ID NO: 42245 - DNA, 22 bp, synthetic construct
  misc_feature 1..22: note = chemically synthesized
  source 1..22: mol_type = other DNA
tatctatctatagatatagata

SEQ ID NO: 42246 - DNA, 22 bp, synthetic construct
  misc_feature 1..22: note = chemically synthesized
  source 1..22: mol_type = other DNA
tctatagatatagatatactca

SEQ ID NO: 42247 - DNA, 22 bp, synthetic construct
  misc_feature 1..22: note = chemically synthesized
  source 1..22: mol_type = other DNA
tagatatagatatactcacaca

SEQ ID NO: 42248 - DNA, 22 bp, synthetic construct
  misc_feature 1..22: note = chemically synthesized
  source 1..22: mol_type = other DNA
acacaaaggggagcttattaag

SEQ ID NO: 42249 - DNA, 22 bp, synthetic construct
  misc_feature 1..22: note = chemically synthesized
  source 1..22: mol_type = other DNA
attaagtggtattaactcacaa

SEQ ID NO: 42250 - DNA, 22 bp, synthetic construct
  misc_feature 1..22: note = chemically synthesized
  source 1..22: mol_type = other DNA
ttaagtggtattaactcacaag

SEQ ID NO: 42251 - DNA, 22 bp, synthetic construct
  misc_feature 1..22: note = chemically synthesized
  source 1..22: mol_type = other DNA
agtggtattaactcacaagatt

SEQ ID NO: 42252 - DNA, 22 bp, synthetic construct
  misc_feature 1..22: note = chemically synthesized
  source 1..22: mol_type = other DNA
actcacaagattacaaggtccc

SEQ ID NO: 42253 - DNA, 22 bp, synthetic construct
  misc_feature 1..22: note = chemically synthesized
  source 1..22: mol_type = other DNA
acaagattacaaggtcccataa

SEQ ID NO: 42254 - DNA, 22 bp, synthetic construct
  misc_feature 1..22: note = chemically synthesized
  source 1..22: mol_type = other DNA
caaggtcccataataggccacc

SEQ ID NO: 42255 - DNA, 22 bp, synthetic construct
  misc_feature 1..22: note = chemically synthesized
  source 1..22: mol_type = other DNA
caatctgaggagcaaggaagac

SEQ ID NO: 42256 - DNA, 22 bp, synthetic construct
  misc_feature 1..22: note = chemically synthesized
  source 1..22: mol_type = other DNA
aggagcaaggaagacagtccaa

SEQ ID NO: 42257 - DNA, 22 bp, synthetic construct
  misc_feature 1..22: note = chemically synthesized
  source 1..22: mol_type = other DNA
aagaacttggagtccgatgttc

SEQ ID NO: 42258 - DNA, 22 bp, synthetic construct
  misc_feature 1..22: note = chemically synthesized
  source 1..22: mol_type = other DNA
ggagtccgatgttcaagagcag

SEQ ID NO: 42259 - DNA, 22 bp, synthetic construct
  misc_feature 1..22: note = chemically synthesized
  source 1..22: mol_type = other DNA
gagtccgatgttcaagagcagg

SEQ ID NO: 42260 - DNA, 22 bp, synthetic construct
  misc_feature 1..22: note = chemically synthesized
  source 1..22: mol_type = other DNA
aagagcaggaaggatccagcac

SEQ ID NO: 42261 - DNA, 22 bp, synthetic construct
  misc_feature 1..22: note = chemically synthesized
  source 1..22: mol_type = other DNA
ggaggctaagccagtctagcct

SEQ ID NO: 42262 - DNA, 22 bp, synthetic construct
  misc_feature 1..22: note = chemically synthesized
  source 1..22: mol_type = other DNA
agccagtctagcctttttacat

SEQ ID NO: 42263 - DNA, 22 bp, synthetic construct
  misc_feature 1..22: note = chemically synthesized
  source 1..22: mol_type = other DNA
gcctttttacatttttctgcca

SEQ ID NO: 42264 - DNA, 22 bp, synthetic construct
  misc_feature 1..22: note = chemically synthesized
  source 1..22: mol_type = other DNA
tttacatttttctgccagcttt

SEQ ID NO: 42265 - DNA, 22 bp, synthetic construct
  misc_feature 1..22: note = chemically synthesized
  source 1..22: mol_type = other DNA
ttacatttttctgccagcttta

SEQ ID NO: 42266 - DNA, 22 bp, synthetic construct
  misc_feature 1..22: note = chemically synthesized
  source 1..22: mol_type = other DNA
tacatttttctgccagctttat

SEQ ID NO: 42267 - DNA, 22 bp, synthetic construct
  misc_feature 1..22: note = chemically synthesized
  source 1..22: mol_type = other DNA
acatttttctgccagctttata

SEQ ID NO: 42268 - DNA, 22 bp, synthetic construct
  misc_feature 1..22: note = chemically synthesized
  source 1..22: mol_type = other DNA
catttttctgccagctttatat

SEQ ID NO: 42269 - DNA, 22 bp, synthetic construct
  misc_feature 1..22: note = chemically synthesized
  source 1..22: mol_type = other DNA
ttctgccagctttatattctgg

SEQ ID NO: 42270 - DNA, 22 bp, synthetic construct
  misc_feature 1..22: note = chemically synthesized
  source 1..22: mol_type = other DNA
tctgccagctttatattctggc

SEQ ID NO: 42271 - DNA, 22 bp, synthetic construct
  misc_feature 1..22: note = chemically synthesized
  source 1..22: mol_type = other DNA
ctgccagctttatattctggct

SEQ ID NO: 42272 - DNA, 22 bp, synthetic construct
  misc_feature 1..22: note = chemically synthesized
  source 1..22: mol_type = other DNA
tgccagctttatattctggctc

SEQ ID NO: 42273 - DNA, 22 bp, synthetic construct
  misc_feature 1..22: note = chemically synthesized
  source 1..22: mol_type = other DNA
ccagctttatattctggctcta

SEQ ID NO: 42274 - DNA, 22 bp, synthetic construct
  misc_feature 1..22: note = chemically synthesized
  source 1..22: mol_type = other DNA
tatattctggctctacagcttg

SEQ ID NO: 42275 - DNA, 22 bp, synthetic construct
  misc_feature 1..22: note = chemically synthesized
  source 1..22: mol_type = other DNA
atattctggctctacagcttgg

SEQ ID NO: 42276 - DNA, 22 bp, synthetic construct
  misc_feature 1..22: note = chemically synthesized
  source 1..22: mol_type = other DNA
tattctggctctacagcttggg

SEQ ID NO: 42277 - DNA, 22 bp, synthetic construct
  misc_feature 1..22: note = chemically synthesized
  source 1..22: mol_type = other DNA
tggctctacagcttgggggcag

SEQ ID NO: 42278 - DNA, 22 bp, synthetic construct
  misc_feature 1..22: note = chemically synthesized
  source 1..22: mol_type = other DNA
gctctacagcttgggggcagca

SEQ ID NO: 42279 - DNA, 22 bp, synthetic construct
  misc_feature 1..22: note = chemically synthesized
  source 1..22: mol_type = other DNA
tacagcttgggggcagcagggg

SEQ ID NO: 42280 - DNA, 22 bp, synthetic construct
  misc_feature 1..22: note = chemically synthesized
  source 1..22: mol_type = other DNA
cagcttgggggcagcaggggca

SEQ ID NO: 42281 - DNA, 22 bp, synthetic construct
  misc_feature 1..22: note = chemically synthesized
  source 1..22: mol_type = other DNA
gggggcagcaggggcaggggcc

SEQ ID NO: 42282 - DNA, 22 bp, synthetic construct
  misc_feature 1..22: note = chemically synthesized
  source 1..22: mol_type = other DNA
ggggcagcaggggcaggggcct

SEQ ID NO: 42283 - DNA, 22 bp, synthetic construct
  misc_feature 1..22: note = chemically synthesized
  source 1..22: mol_type = other DNA
agggtgcttgcagggatgacac

SEQ ID NO: 42284 - DNA, 22 bp, synthetic construct
  misc_feature 1..22: note = chemically synthesized
  source 1..22: mol_type = other DNA
gcagggatgacacactggcctc

SEQ ID NO: 42285 - DNA, 22 bp, synthetic construct
  misc_feature 1..22: note = chemically synthesized
  source 1..22: mol_type = other DNA
cagggatgacacactggcctct

SEQ ID NO: 42286 - DNA, 22 bp, synthetic construct
  misc_feature 1..22: note = chemically synthesized
  source 1..22: mol_type = other DNA
gcctcttttccatagggtggct

SEQ ID NO: 42287 - DNA, 22 bp, synthetic construct
  misc_feature 1..22: note = chemically synthesized
  source 1..22: mol_type = other DNA
ttttccatagggtggctggggc

SEQ ID NO: 42288 - DNA, 22 bp, synthetic construct
  misc_feature 1..22: note = chemically synthesized
  source 1..22: mol_type = other DNA
ttccatagggtggctggggcac

SEQ ID NO: 42289 - DNA, 22 bp, synthetic construct
  misc_feature 1..22: note = chemically synthesized
  source 1..22: mol_type = other DNA
tccatagggtggctggggcaca

SEQ ID NO: 42290 - DNA, 22 bp, synthetic construct
  misc_feature 1..22: note = chemically synthesized
  source 1..22: mol_type = other DNA
ccatagggtggctggggcacac

SEQ ID NO: 42291 - DNA, 22 bp, synthetic construct
  misc_feature 1..22: note = chemically synthesized
  source 1..22: mol_type = other DNA
catagggtggctggggcacact

SEQ ID NO: 42292 - DNA, 22 bp, synthetic construct
  misc_feature 1..22: note = chemically synthesized
  source 1..22: mol_type = other DNA
gggcacactggggtgtgagtaa

SEQ ID NO: 42293 - DNA, 22 bp, synthetic construct
  misc_feature 1..22: note = chemically synthesized
  source 1..22: mol_type = other DNA
gggtgtgagtaaagcactcagg

SEQ ID NO: 42294 - DNA, 22 bp, synthetic construct
  misc_feature 1..22: note = chemically synthesized
  source 1..22: mol_type = other DNA
aggatcttttttccttccctag

SEQ ID NO: 42295 - DNA, 22 bp, synthetic construct
  misc_feature 1..22: note = chemically synthesized
  source 1..22: mol_type = other DNA
ttttccttccctagtccaagta

SEQ ID NO: 42296 - DNA, 22 bp, synthetic construct
  misc_feature 1..22: note = chemically synthesized
  source 1..22: mol_type = other DNA
tttccttccctagtccaagtac

SEQ ID NO: 42297 - DNA, 22 bp, synthetic construct
  misc_feature 1..22: note = chemically synthesized
  source 1..22: mol_type = other DNA
ttccttccctagtccaagtaca

SEQ ID NO: 42298 - DNA, 22 bp, synthetic construct
  misc_feature 1..22: note = chemically synthesized
  source 1..22: mol_type = other DNA
tccttccctagtccaagtacag

SEQ ID NO: 42299 - DNA, 22 bp, synthetic construct
  misc_feature 1..22: note = chemically synthesized
  source 1..22: mol_type = other DNA
ccttccctagtccaagtacagc

SEQ ID NO: 42300 - DNA, 22 bp, synthetic construct
  misc_feature 1..22: note = chemically synthesized
  source 1..22: mol_type = other DNA
cttccctagtccaagtacagca

SEQ ID NO: 42301 - DNA, 22 bp, synthetic construct
  misc_feature 1..22: note = chemically synthesized
  source 1..22: mol_type = other DNA
ccctagtccaagtacagcaagg

SEQ ID NO: 42302 - DNA, 22 bp, synthetic construct
  misc_feature 1..22: note = chemically synthesized
  source 1..22: mol_type = other DNA
cctagtccaagtacagcaaggg

SEQ ID NO: 42303 - DNA, 22 bp, synthetic construct
  misc_feature 1..22: note = chemically synthesized
  source 1..22: mol_type = other DNA
gtccaagtacagcaagggcagt

SEQ ID NO: 42304 - DNA, 22 bp, synthetic construct
  misc_feature 1..22: note = chemically synthesized
  source 1..22: mol_type = other DNA
cagtgttagtggcagaaggact

SEQ ID NO: 42305 - DNA, 22 bp, synthetic construct
  misc_feature 1..22: note = chemically synthesized
  source 1..22: mol_type = other DNA
gtggcagaaggactttcagtca

SEQ ID NO: 42306 - DNA, 22 bp, synthetic construct
  misc_feature 1..22: note = chemically synthesized
  source 1..22: mol_type = other DNA
tcagtcacctctgggagcttca

SEQ ID NO: 42307 - DNA, 22 bp, synthetic construct
  misc_feature 1..22: note = chemically synthesized
  source 1..22: mol_type = other DNA
cagtcacctctgggagcttcac

SEQ ID NO: 42308 - DNA, 22 bp, synthetic construct
  misc_feature 1..22: note = chemically synthesized
  source 1..22: mol_type = other DNA
agtcacctctgggagcttcacc

SEQ ID NO: 42309 - DNA, 22 bp, synthetic construct
  misc_feature 1..22: note = chemically synthesized
  source 1..22: mol_type = other DNA
tgggagcttcaccccacaaaaa

SEQ ID NO: 42310 - DNA, 22 bp, synthetic construct
  misc_feature 1..22: note = chemically synthesized
  source 1..22: mol_type = other DNA
ggagcttcaccccacaaaaaca

SEQ ID NO: 42311 - DNA, 22 bp, synthetic construct
  misc_feature 1..22: note = chemically synthesized
  source 1..22: mol_type = other DNA
caccccacaaaaacacagagtg

SEQ ID NO: 42312 - DNA, 22 bp, synthetic construct
  misc_feature 1..22: note = chemically synthesized
  source 1..22: mol_type = other DNA
accccacaaaaacacagagtgc

SEQ ID NO: 42313 - DNA, 22 bp, synthetic construct
  misc_feature 1..22: note = chemically synthesized
  source 1..22: mol_type = other DNA
aactgagttcgaggtgcctgca

SEQ ID NO: 42314 - DNA, 22 bp, synthetic construct
  misc_feature 1..22: note = chemically synthesized
  source 1..22: mol_type = other DNA
agttcgaggtgcctgcactgtg

SEQ ID NO: 42315 - DNA, 22 bp, synthetic construct
  misc_feature 1..22: note = chemically synthesized
  source 1..22: mol_type = other DNA
gaggtgcctgcactgtgggccc

SEQ ID NO: 42316 - DNA, 22 bp, synthetic construct
  misc_feature 1..22: note = chemically synthesized
  source 1..22: mol_type = other DNA
cactgtgggcccaagccaggag

SEQ ID NO: 42317 - DNA, 22 bp, synthetic construct
  misc_feature 1..22: note = chemically synthesized
  source 1..22: mol_type = other DNA
tgggcccaagccaggagccttg

SEQ ID NO: 42318 - DNA, 22 bp, synthetic construct
  misc_feature 1..22: note = chemically synthesized
  source 1..22: mol_type = other DNA
gcctggtgaagagtagcaggtg

SEQ ID NO: 42319 - DNA, 22 bp, synthetic construct
  misc_feature 1..22: note = chemically synthesized
  source 1..22: mol_type = other DNA
cctggtgaagagtagcaggtga

SEQ ID NO: 42320 - DNA, 22 bp, synthetic construct
  misc_feature 1..22: note = chemically synthesized
  source 1..22: mol_type = other DNA
gtgaagagtagcaggtgaaagc

SEQ ID NO: 42321 - DNA, 22 bp, synthetic construct
  misc_feature 1..22: note = chemically synthesized
  source 1..22: mol_type = other DNA
acaagaaagagaaactggaatt

SEQ ID NO: 42322 - DNA, 22 bp, synthetic construct
  misc_feature 1..22: note = chemically synthesized
  source 1..22: mol_type = other DNA
gaattctttccctgctgtgtgc

SEQ ID NO: 42323 - DNA, 22 bp, synthetic construct
  misc_feature 1..22: note = chemically synthesized
  source 1..22: mol_type = other DNA
tttccctgctgtgtgctggagg

SEQ ID NO: 42324 - DNA, 22 bp, synthetic construct
  misc_feature 1..22: note = chemically synthesized
  source 1..22: mol_type = other DNA
tccctgctgtgtgctggaggtg

SEQ ID NO: 42325 - DNA, 22 bp, synthetic construct
  misc_feature 1..22: note = chemically synthesized
  source 1..22: mol_type = other DNA
ccctgctgtgtgctggaggtgt

SEQ ID NO: 42326 - DNA, 22 bp, synthetic construct
  misc_feature 1..22: note = chemically synthesized
  source 1..22: mol_type = other DNA
cctgctgtgtgctggaggtgtc

SEQ ID NO: 42327 - DNA, 22 bp, synthetic construct
  misc_feature 1..22: note = chemically synthesized
  source 1..22: mol_type = other DNA
ctgtgtgctggaggtgtcaggg

SEQ ID NO: 42328 - DNA, 22 bp, synthetic construct
  misc_feature 1..22: note = chemically synthesized
  source 1..22: mol_type = other DNA
tgtgctggaggtgtcagggaag

SEQ ID NO: 42329 - DNA, 22 bp, synthetic construct
  misc_feature 1..22: note = chemically synthesized
  source 1..22: mol_type = other DNA
gaggtgtcagggaagtggccag

SEQ ID NO: 42330 - DNA, 22 bp, synthetic construct
  misc_feature 1..22: note = chemically synthesized
  source 1..22: mol_type = other DNA
ctttctcaagcccaagggcatt

SEQ ID NO: 42331 - DNA, 22 bp, synthetic construct
  misc_feature 1..22: note = chemically synthesized
  source 1..22: mol_type = other DNA
tttctcaagcccaagggcatta

SEQ ID NO: 42332 - DNA, 22 bp, synthetic construct
  misc_feature 1..22: note = chemically synthesized
  source 1..22: mol_type = other DNA
tctcaagcccaagggcattaac

SEQ ID NO: 42333 - DNA, 22 bp, synthetic construct
  misc_feature 1..22: note = chemically synthesized
  source 1..22: mol_type = other DNA
ctcaagcccaagggcattaacg

SEQ ID NO: 42334 - DNA, 22 bp, synthetic construct
  misc_feature 1..22: note = chemically synthesized
  source 1..22: mol_type = other DNA
tcaagcccaagggcattaacgg

SEQ ID NO: 42335 - DNA, 22 bp, synthetic construct
  misc_feature 1..22: note = chemically synthesized
  source 1..22: mol_type = other DNA
aagcccaagggcattaacggtg

SEQ ID NO: 42336 - DNA, 22 bp, synthetic construct
  misc_feature 1..22: note = chemically synthesized
  source 1..22: mol_type = other DNA
acggtggtactgctgcagctga

SEQ ID NO: 42337 - DNA, 22 bp, synthetic construct
  misc_feature 1..22: note = chemically synthesized
  source 1..22: mol_type = other DNA
ctgcagctgaaatggcagaggg

SEQ ID NO: 42338 - DNA, 22 bp, synthetic construct
  misc_feature 1..22: note = chemically synthesized
  source 1..22: mol_type = other DNA
cagctgaaatggcagaggggct

SEQ ID NO: 42339 - DNA, 22 bp, synthetic construct
  misc_feature 1..22: note = chemically synthesized
  source 1..22: mol_type = other DNA
aaatggcagaggggctgtgggt

SEQ ID NO: 42340 - DNA, 22 bp, synthetic construct
  misc_feature 1..22: note = chemically synthesized
  source 1..22: mol_type = other DNA
tgggttgtctcttggatttcct

SEQ ID NO: 42341 - DNA, 22 bp, synthetic construct
  misc_feature 1..22: note = chemically synthesized
  source 1..22: mol_type = other DNA
tctcttggatttcctccccaga

SEQ ID NO: 42342 - DNA, 22 bp, synthetic construct
  misc_feature 1..22: note = chemically synthesized
  source 1..22: mol_type = other DNA
ttggatttcctccccagagaag

SEQ ID NO: 42343 - DNA, 22 bp, synthetic construct
  misc_feature 1..22: note = chemically synthesized
  source 1..22: mol_type = other DNA
ggatttcctccccagagaagca

SEQ ID NO: 42344 - DNA, 22 bp, synthetic construct
  misc_feature 1..22: note = chemically synthesized
  source 1..22: mol_type = other DNA
gatttcctccccagagaagcac

SEQ ID NO: 42345 - DNA, 22 bp, synthetic construct
  misc_feature 1..22: note = chemically synthesized
  source 1..22: mol_type = other DNA
cctccccagagaagcacagagc

SEQ ID NO: 42346 - DNA, 22 bp, synthetic construct
  misc_feature 1..22: note = chemically synthesized
  source 1..22: mol_type = other DNA
ctccccagagaagcacagagcc

SEQ ID NO: 42347 - DNA, 22 bp, synthetic construct
  misc_feature 1..22: note = chemically synthesized
  source 1..22: mol_type = other DNA
cccagagaagcacagagccaac

SEQ ID NO: 42348 - DNA, 22 bp, synthetic construct
  misc_feature 1..22: note = chemically synthesized
  source 1..22: mol_type = other DNA
actaaaatgttcaggcagggcc

SEQ ID NO: 42349 - DNA, 22 bp, synthetic construct
  misc_feature 1..22: note = chemically synthesized
  source 1..22: mol_type = other DNA
aaatgttcaggcagggccaggg

SEQ ID NO: 42350 - DNA, 22 bp, synthetic construct
  misc_feature 1..22: note = chemically synthesized
  source 1..22: mol_type = other DNA
aggcagggccagggtggctgtg

SEQ ID NO: 42351 - DNA, 22 bp, synthetic construct
  misc_feature 1..22: note = chemically synthesized
  source 1..22: mol_type = other DNA
tgctctgcccagtgaggaatag

SEQ ID NO: 42352 - DNA, 22 bp, synthetic construct
  misc_feature 1..22: note = chemically synthesized
  source 1..22: mol_type = other DNA
tgcccagtgaggaatagtaggg

SEQ ID NO: 42353 - DNA, 22 bp, synthetic construct
  misc_feature 1..22: note = chemically synthesized
  source 1..22: mol_type = other DNA
cccagtgaggaatagtaggggc

SEQ ID NO: 42354 - DNA, 22 bp, synthetic construct
  misc_feature 1..22: note = chemically synthesized
  source 1..22: mol_type = other DNA
ttccataaggcagctacactgt

SEQ ID NO: 42355 - DNA, 22 bp, synthetic construct
  misc_feature 1..22: note = chemically synthesized
  source 1..22: mol_type = other DNA
tccataaggcagctacactgtg

SEQ ID NO: 42356 - DNA, 22 bp, synthetic construct
  misc_feature 1..22: note = chemically synthesized
  source 1..22: mol_type = other DNA
ccataaggcagctacactgtgc

SEQ ID NO: 42357 - DNA, 22 bp, synthetic construct
  misc_feature 1..22: note = chemically synthesized
  source 1..22: mol_type = other DNA
cataaggcagctacactgtgct

SEQ ID NO: 42358 - DNA, 22 bp, synthetic construct
  misc_feature 1..22: note = chemically synthesized
  source 1..22: mol_type = other DNA
cactgtgctggaggtccgtgag

SEQ ID NO: 42359 - DNA, 22 bp, synthetic construct
  misc_feature 1..22: note = chemically synthesized
  source 1..22: mol_type = other DNA
tgctggaggtccgtgagagtcc

SEQ ID NO: 42360 - DNA, 22 bp, synthetic construct
  misc_feature 1..22: note = chemically synthesized
  source 1..22: mol_type = other DNA
gaggtccgtgagagtcctgaag

SEQ ID NO: 42361 - DNA, 22 bp, synthetic construct
  misc_feature 1..22: note = chemically synthesized
  source 1..22: mol_type = other DNA
aagctcctcgctccctcctgag

SEQ ID NO: 42362 - DNA, 22 bp, synthetic construct
  misc_feature 1..22: note = chemically synthesized
  source 1..22: mol_type = other DNA
ctcgctccctcctgagcccata

SEQ ID NO: 42363 - DNA, 22 bp, synthetic construct
  misc_feature 1..22: note = chemically synthesized
  source 1..22: mol_type = other DNA
gctccctcctgagcccatactt

SEQ ID NO: 42364 - DNA, 22 bp, synthetic construct
  misc_feature 1..22: note = chemically synthesized
  source 1..22: mol_type = other DNA
cctcctgagcccatactttaat

SEQ ID NO: 42365 - DNA, 22 bp, synthetic construct
  misc_feature 1..22: note = chemically synthesized
  source 1..22: mol_type = other DNA
ctgagcccatactttaatctca

SEQ ID NO: 42366 - DNA, 22 bp, synthetic construct
  misc_feature 1..22: note = chemically synthesized
  source 1..22: mol_type = other DNA
agcccatactttaatctcaaga

SEQ ID NO: 42367 - DNA, 22 bp, synthetic construct
  misc_feature 1..22: note = chemically synthesized
  source 1..22: mol_type = other DNA
taatctcaagagtttgagataa

SEQ ID NO: 42368 - DNA, 22 bp, synthetic construct
  misc_feature 1..22: note = chemically synthesized
  source 1..22: mol_type = other DNA
aatctcaagagtttgagataaa

SEQ ID NO: 42369 - DNA, 22 bp, synthetic construct
  misc_feature 1..22: note = chemically synthesized
  source 1..22: mol_type = other DNA
atctcaagagtttgagataaac

SEQ ID NO: 42370 - DNA, 22 bp, synthetic construct
  misc_feature 1..22: note = chemically synthesized
  source 1..22: mol_type = other DNA
aagagtttgagataaacagtgg

SEQ ID NO: 42371 - DNA, 22 bp, synthetic construct
  misc_feature 1..22: note = chemically synthesized
  source 1..22: mol_type = other DNA
gagataaacagtggtaaggaag

SEQ ID NO: 42372 - DNA, 22 bp, synthetic construct
  misc_feature 1..22: note = chemically synthesized
  source 1..22: mol_type = other DNA
agataaacagtggtaaggaaga

SEQ ID NO: 42373 - DNA, 22 bp, synthetic construct
  misc_feature 1..22: note = chemically synthesized
  source 1..22: mol_type = other DNA
atgaaacccaggaagataagtc

SEQ ID NO: 42374 - DNA, 22 bp, synthetic construct
  misc_feature 1..22: note = chemically synthesized
  source 1..22: mol_type = other DNA
caacctaaagaaatacttttta

SEQ ID NO: 42375 - DNA, 22 bp, synthetic construct
  misc_feature 1..22: note = chemically synthesized
  source 1..22: mol_type = other DNA
aagaaatactttttaaaaatca

SEQ ID NO: 42376 - DNA, 22 bp, synthetic construct
  misc_feature 1..22: note = chemically synthesized
  source 1..22: mol_type = other DNA
tttaaaaatcatatttatagag

SEQ ID NO: 42377 - DNA, 22 bp, synthetic construct
  misc_feature 1..22: note = chemically synthesized
  source 1..22: mol_type = other DNA
ttaaaaatcatatttatagagg

SEQ ID NO: 42378 - DNA, 22 bp, synthetic construct
  misc_feature 1..22: note = chemically synthesized
  source 1..22: mol_type = other DNA
taaaaatcatatttatagaggt

SEQ ID NO: 42379 - DNA, 22 bp, synthetic construct
  misc_feature 1..22: note = chemically synthesized
  source 1..22: mol_type = other DNA
aaaaatcatatttatagaggtt

SEQ ID NO: 42380 - DNA, 22 bp, synthetic construct
  misc_feature 1..22: note = chemically synthesized
  source 1..22: mol_type = other DNA
aaaatcatatttatagaggttt

SEQ ID NO: 42381 - DNA, 22 bp, synthetic construct
  misc_feature 1..22: note = chemically synthesized
  source 1..22: mol_type = other DNA
atagaggtttgcagtgatacta

SEQ ID NO: 42382 - DNA, 22 bp, synthetic construct
  misc_feature 1..22: note = chemically synthesized
  source 1..22: mol_type = other DNA
tagaggtttgcagtgatactaa

SEQ ID NO: 42383 - DNA, 22 bp, synthetic construct
  misc_feature 1..22: note = chemically synthesized
  source 1..22: mol_type = other DNA
gcagtgatactaaagacaatat

SEQ ID NO: 42384 - DNA, 22 bp, synthetic construct
  misc_feature 1..22: note = chemically synthesized
  source 1..22: mol_type = other DNA
cagtgatactaaagacaatatt

SEQ ID NO: 42385 - DNA, 22 bp, synthetic construct
  misc_feature 1..22: note = chemically synthesized
  source 1..22: mol_type = other DNA
aagacaatattgcaaatcatta

SEQ ID NO: 42386 - DNA, 22 bp, synthetic construct
  misc_feature 1..22: note = chemically synthesized
  source 1..22: mol_type = other DNA
caaatcattattaagaatacaa

SEQ ID NO: 42387 - DNA, 22 bp, synthetic construct
  misc_feature 1..22: note = chemically synthesized
  source 1..22: mol_type = other DNA
ttaagaatacaagaagtacaat

SEQ ID NO: 42388 - DNA, 22 bp, synthetic construct
  misc_feature 1..22: note = chemically synthesized
  source 1..22: mol_type = other DNA
agaatacaagaagtacaatgtt

SEQ ID NO: 42389 - DNA, 22 bp, synthetic construct
  misc_feature 1..22: note = chemically synthesized
  source 1..22: mol_type = other DNA
cttgtttctttaacacctgtga

SEQ ID NO: 42390 - DNA, 22 bp, synthetic construct
  misc_feature 1..22: note = chemically synthesized
  source 1..22: mol_type = other DNA
ttgtttctttaacacctgtgat

SEQ ID NO: 42391 - DNA, 22 bp, synthetic construct
  misc_feature 1..22: note = chemically synthesized
  source 1..22: mol_type = other DNA
gtttctttaacacctgtgatac

SEQ ID NO: 42392 - DNA, 22 bp, synthetic construct
  misc_feature 1..22: note = chemically synthesized
  source 1..22: mol_type = other DNA
tttctttaacacctgtgataca

SEQ ID NO: 42393 - DNA, 22 bp, synthetic construct
  misc_feature 1..22: note = chemically synthesized
  source 1..22: mol_type = other DNA
ctttaacacctgtgatacaggt

SEQ ID NO: 42394 - DNA, 22 bp, synthetic construct
  misc_feature 1..22: note = chemically synthesized
  source 1..22: mol_type = other DNA
tttaacacctgtgatacaggtg

SEQ ID NO: 42395 - DNA, 22 bp, synthetic construct
  misc_feature 1..22: note = chemically synthesized
  source 1..22: mol_type = other DNA
taacacctgtgatacaggtgtt

SEQ ID NO: 42396 - DNA, 22 bp, synthetic construct
  misc_feature 1..22: note = chemically synthesized
  source 1..22: mol_type = other DNA
aacacctgtgatacaggtgttt

SEQ ID NO: 42397 - DNA, 22 bp, synthetic construct
  misc_feature 1..22: note = chemically synthesized
  source 1..22: mol_type = other DNA
acacctgtgatacaggtgtttg

SEQ ID NO: 42398 - DNA, 22 bp, synthetic construct
  misc_feature 1..22: note = chemically synthesized
  source 1..22: mol_type = other DNA
tgatacaggtgtttgatatgaa

SEQ ID NO: 42399 - DNA, 22 bp, synthetic construct
  misc_feature 1..22: note = chemically synthesized
  source 1..22: mol_type = other DNA
gatatgaattctacgtaatggc

SEQ ID NO: 42400 - DNA, 22 bp, synthetic construct
  misc_feature 1..22: note = chemically synthesized
  source 1..22: mol_type = other DNA
atatgaattctacgtaatggct

SEQ ID NO: 42401 - DNA, 22 bp, synthetic construct
  misc_feature 1..22: note = chemically synthesized
  source 1..22: mol_type = other DNA
tacgtaatggctgcattgcttc

SEQ ID NO: 42402 - DNA, 22 bp, synthetic construct
  misc_feature 1..22: note = chemically synthesized
  source 1..22: mol_type = other DNA
cgtaatggctgcattgcttctt

SEQ ID NO: 42403 - DNA, 22 bp, synthetic construct
  misc_feature 1..22: note = chemically synthesized
  source 1..22: mol_type = other DNA
cattgcttcttgccaccaccca

SEQ ID NO: 42404 - DNA, 22 bp, synthetic construct
  misc_feature 1..22: note = chemically synthesized
  source 1..22: mol_type = other DNA
cttcttgccaccacccaaagaa

SEQ ID NO: 42405 - DNA, 22 bp, synthetic construct
  misc_feature 1..22: note = chemically synthesized
  source 1..22: mol_type = other DNA
cttgccaccacccaaagaaggt

SEQ ID NO: 42406 - DNA, 22 bp, synthetic construct
  misc_feature 1..22: note = chemically synthesized
  source 1..22: mol_type = other DNA
ttgccaccacccaaagaaggtt

SEQ ID NO: 42407 - DNA, 22 bp, synthetic construct
  misc_feature 1..22: note = chemically synthesized
  source 1..22: mol_type = other DNA
gccaccacccaaagaaggttgt

SEQ ID NO: 42408 - DNA, 22 bp, synthetic construct
  misc_feature 1..22: note = chemically synthesized
  source 1..22: mol_type = other DNA
ccaccacccaaagaaggttgta

SEQ ID NO: 42409 - DNA, 22 bp, synthetic construct
  misc_feature 1..22: note = chemically synthesized
  source 1..22: mol_type = other DNA
tatagcactcagatgtatacta

SEQ ID NO: 42410 - DNA, 22 bp, synthetic construct
  misc_feature 1..22: note = chemically synthesized
  source 1..22: mol_type = other DNA
agatgtatactaactgcaaccg

SEQ ID NO: 42411 - DNA, 22 bp, synthetic construct
  misc_feature 1..22: note = chemically synthesized
  source 1..22: mol_type = other DNA
actgcaaccgtgtatctcttag

SEQ ID NO: 42412 - DNA, 22 bp, synthetic construct
  misc_feature 1..22: note = chemically synthesized
  source 1..22: mol_type = other DNA
caaccgtgtatctcttaggaat

SEQ ID NO: 42413 - DNA, 22 bp, synthetic construct
  misc_feature 1..22: note = chemically synthesized
  source 1..22: mol_type = other DNA
ttaggaatttctcctttgccct

SEQ ID NO: 42414 - DNA, 22 bp, synthetic construct
  misc_feature 1..22: note = chemically synthesized
  source 1..22: mol_type = other DNA
aggaatttctcctttgccctct

SEQ ID NO: 42415 - DNA, 22 bp, synthetic construct
  misc_feature 1..22: note = chemically synthesized
  source 1..22: mol_type = other DNA
ggaatttctcctttgccctctt

SEQ ID NO: 42416 - DNA, 22 bp, synthetic construct
  misc_feature 1..22: note = chemically synthesized
  source 1..22: mol_type = other DNA
ctcctttgccctcttccctccc

SEQ ID NO: 42417 - DNA, 22 bp, synthetic construct
  misc_feature 1..22: note = chemically synthesized
  source 1..22: mol_type = other DNA
tcctttgccctcttccctccct

SEQ ID NO: 42418 - DNA, 22 bp, synthetic construct
  misc_feature 1..22: note = chemically synthesized
  source 1..22: mol_type = other DNA
ctttgccctcttccctccctat

SEQ ID NO: 42419 - DNA, 22 bp, synthetic construct
  misc_feature 1..22: note = chemically synthesized
  source 1..22: mol_type = other DNA
tgccctcttccctccctatcag

SEQ ID NO: 42420 - DNA, 22 bp, synthetic construct
  misc_feature 1..22: note = chemically synthesized
  source 1..22: mol_type = other DNA
gccctcttccctccctatcagc

SEQ ID NO: 42421 - DNA, 22 bp, synthetic construct
  misc_feature 1..22: note = chemically synthesized
  source 1..22: mol_type = other DNA
ccctcttccctccctatcagca

SEQ ID NO: 42422 - DNA, 22 bp, synthetic construct
  misc_feature 1..22: note = chemically synthesized
  source 1..22: mol_type = other DNA
ttccctccctatcagcatgtat

SEQ ID NO: 42423 - DNA, 22 bp, synthetic construct
  misc_feature 1..22: note = chemically synthesized
  source 1..22: mol_type = other DNA
ccctccctatcagcatgtatct

SEQ ID NO: 42424 - DNA, 22 bp, synthetic construct
  misc_feature 1..22: note = chemically synthesized
  source 1..22: mol_type = other DNA
cctccctatcagcatgtatcta

SEQ ID NO: 42425 - DNA, 22 bp, synthetic construct
  misc_feature 1..22: note = chemically synthesized
  source 1..22: mol_type = other DNA
cctatcagcatgtatctagcag

SEQ ID NO: 42426 - DNA, 22 bp, synthetic construct
  misc_feature 1..22: note = chemically synthesized
  source 1..22: mol_type = other DNA
tcagcatgtatctagcagcatt

SEQ ID NO: 42427 - DNA, 22 bp, synthetic construct
  misc_feature 1..22: note = chemically synthesized
  source 1..22: mol_type = other DNA
gcagcattctgaaaagttaact

SEQ ID NO: 42428 - DNA, 22 bp, synthetic construct
  misc_feature 1..22: note = chemically synthesized
  source 1..22: mol_type = other DNA
tgaaaagttaactgcacagtga

SEQ ID NO: 42429 - DNA, 22 bp, synthetic construct
  misc_feature 1..22: note = chemically synthesized
  source 1..22: mol_type = other DNA
aaaagttaactgcacagtgagc

SEQ ID NO: 42430 - DNA, 22 bp, synthetic construct
  misc_feature 1..22: note = chemically synthesized
  source 1..22: mol_type = other DNA
actgcacagtgagcgactgctg

SEQ ID NO: 42431 - DNA, 22 bp, synthetic construct
  misc_feature 1..22: note = chemically synthesized
  source 1..22: mol_type = other DNA
cacagtgagcgactgctgggca

SEQ ID NO: 42432 - DNA, 22 bp, synthetic construct
  misc_feature 1..22: note = chemically synthesized
  source 1..22: mol_type = other DNA
ctgggcatcttaaggggcattc

SEQ ID NO: 42433 - DNA, 22 bp, synthetic construct
  misc_feature 1..22: note = chemically synthesized
  source 1..22: mol_type = other DNA
ggcatcttaaggggcattcttt

SEQ ID NO: 42434 - DNA, 22 bp, synthetic construct
  misc_feature 1..22: note = chemically synthesized
  source 1..22: mol_type = other DNA
aaggggcattcttttctaccta

SEQ ID NO: 42435 - DNA, 22 bp, synthetic construct
  misc_feature 1..22: note = chemically synthesized
  source 1..22: mol_type = other DNA
aggggcattcttttctacctag

SEQ ID NO: 42436 - DNA, 22 bp, synthetic construct
  misc_feature 1..22: note = chemically synthesized
  source 1..22: mol_type = other DNA
ttttctacctaggtattccccc

SEQ ID NO: 42437 - DNA, 22 bp, synthetic construct
  misc_feature 1..22: note = chemically synthesized
  source 1..22: mol_type = other DNA
ttctacctaggtattccccctc

SEQ ID NO: 42438 - DNA, 22 bp, synthetic construct
  misc_feature 1..22: note = chemically synthesized
  source 1..22: mol_type = other DNA
tctacctaggtattccccctcc

SEQ ID NO: 42439 - DNA, 22 bp, synthetic construct
  misc_feature 1..22: note = chemically synthesized
  source 1..22: mol_type = other DNA
ctacctaggtattccccctcct

SEQ ID NO: 42440 - DNA, 22 bp, synthetic construct
  misc_feature 1..22: note = chemically synthesized
  source 1..22: mol_type = other DNA
tacctaggtattccccctcctc

SEQ ID NO: 42441 - DNA, 22 bp, synthetic construct
  misc_feature 1..22: note = chemically synthesized
  source 1..22: mol_type = other DNA
cctaggtattccccctcctcca

SEQ ID NO: 42442 - DNA, 22 bp, synthetic construct
  misc_feature 1..22: note = chemically synthesized
  source 1..22: mol_type = other DNA
ggtattccccctcctccactca

SEQ ID NO: 42443 - DNA, 22 bp, synthetic construct
  misc_feature 1..22: note = chemically synthesized
  source 1..22: mol_type = other DNA
cccctcctccactcatgtctag

SEQ ID NO: 42444 - DNA, 22 bp, synthetic construct
  misc_feature 1..22: note = chemically synthesized
  source 1..22: mol_type = other DNA
ctccactcatgtctagcatgca

SEQ ID NO: 42445 - DNA, 22 bp, synthetic construct
  misc_feature 1..22: note = chemically synthesized
  source 1..22: mol_type = other DNA
cactcatgtctagcatgcagga

SEQ ID NO: 42446 - DNA, 22 bp, synthetic construct
  misc_feature 1..22: note = chemically synthesized
  source 1..22: mol_type = other DNA
atgtctagcatgcaggacttgg

SEQ ID NO: 42447 - DNA, 22 bp, synthetic construct
  misc_feature 1..22: note = chemically synthesized
  source 1..22: mol_type = other DNA
gcatgcaggacttgggtaatct

SEQ ID NO: 42448 - DNA, 22 bp, synthetic construct
  misc_feature 1..22: note = chemically synthesized
  source 1..22: mol_type = other DNA
gggtaatctctggggtttcaga

SEQ ID NO: 42449 - DNA, 22 bp, synthetic construct
  misc_feature 1..22: note = chemically synthesized
  source 1..22: mol_type = other DNA
ggtaatctctggggtttcagat

SEQ ID NO: 42450 - DNA, 22 bp, synthetic construct
  misc_feature 1..22: note = chemically synthesized
  source 1..22: mol_type = other DNA
tggggtttcagattctccagac

SEQ ID NO: 42451 - DNA, 22 bp, synthetic construct
  misc_feature 1..22: note = chemically synthesized
  source 1..22: mol_type = other DNA
gggtttcagattctccagacct

SEQ ID NO: 42452 - DNA, 22 bp, synthetic construct
  misc_feature 1..22: note = chemically synthesized
  source 1..22: mol_type = other DNA
cagattctccagacctccattc

SEQ ID NO: 42453 - DNA, 22 bp, synthetic construct
  misc_feature 1..22: note = chemically synthesized
  source 1..22: mol_type = other DNA
agattctccagacctccattct

SEQ ID NO: 42454 - DNA, 22 bp, synthetic construct
  misc_feature 1..22: note = chemically synthesized
  source 1..22: mol_type = other DNA
tccagacctccattctctcagg

SEQ ID NO: 42455 - DNA, 22 bp, synthetic construct
  misc_feature 1..22: note = chemically synthesized
  source 1..22: mol_type = other DNA
cagacctccattctctcagggg

SEQ ID NO: 42456 - DNA, 22 bp, synthetic construct
  misc_feature 1..22: note = chemically synthesized
  source 1..22: mol_type = other DNA
cattctctcaggggcttccacc

SEQ ID NO: 42457 - DNA, 22 bp, synthetic construct
  misc_feature 1..22: note = chemically synthesized
  source 1..22: mol_type = other DNA
tctcaggggcttccacctcctg

SEQ ID NO: 42458 - DNA, 22 bp, synthetic construct
  misc_feature 1..22: note = chemically synthesized
  source 1..22: mol_type = other DNA
tcaggggcttccacctcctgct

SEQ ID NO: 42459 - DNA, 22 bp, synthetic construct
  misc_feature 1..22: note = chemically synthesized
  source 1..22: mol_type = other DNA
aggggcttccacctcctgctca

SEQ ID NO: 42460 - DNA, 22 bp, synthetic construct
  misc_feature 1..22: note = chemically synthesized
  source 1..22: mol_type = other DNA
ccacctcctgctcatatctagc

SEQ ID NO: 42461 - DNA, 22 bp, synthetic construct
  misc_feature 1..22: note = chemically synthesized
  source 1..22: mol_type = other DNA
cacctcctgctcatatctagct

SEQ ID NO: 42462 - DNA, 22 bp, synthetic construct
  misc_feature 1..22: note = chemically synthesized
  source 1..22: mol_type = other DNA
ctgctcatatctagctatctgc

SEQ ID NO: 42463 - DNA, 22 bp, synthetic construct
  misc_feature 1..22: note = chemically synthesized
  source 1..22: mol_type = other DNA
ctcatatctagctatctgccta

SEQ ID NO: 42464 - DNA, 22 bp, synthetic construct
  misc_feature 1..22: note = chemically synthesized
  source 1..22: mol_type = other DNA
atatctagctatctgcctagtc

SEQ ID NO: 42465 - DNA, 22 bp, synthetic construct
  misc_feature 1..22: note = chemically synthesized
  source 1..22: mol_type = other DNA
gctatctgcctagtctaaccat

SEQ ID NO: 42466 - DNA, 22 bp, synthetic construct
  misc_feature 1..22: note = chemically synthesized
  source 1..22: mol_type = other DNA
tctgcctagtctaaccataaaa

SEQ ID NO: 42467 - DNA, 22 bp, synthetic construct
  misc_feature 1..22: note = chemically synthesized
  source 1..22: mol_type = other DNA
cctagtctaaccataaaatctt

SEQ ID NO: 42468 - DNA, 22 bp, synthetic construct
  misc_feature 1..22: note = chemically synthesized
  source 1..22: mol_type = other DNA
gtctaaccataaaatcttaaat

SEQ ID NO: 42469 - DNA, 22 bp, synthetic construct
  misc_feature 1..22: note = chemically synthesized
  source 1..22: mol_type = other DNA
accataaaatcttaaataagaa

SEQ ID NO: 42470 - DNA, 22 bp, synthetic construct
  misc_feature 1..22: note = chemically synthesized
  source 1..22: mol_type = other DNA
aaataagaataaatcatgtttg

SEQ ID NO: 42471 - DNA, 22 bp, synthetic construct
  misc_feature 1..22: note = chemically synthesized
  source 1..22: mol_type = other DNA
aataagaataaatcatgtttgc

SEQ ID NO: 42472 - DNA, 22 bp, synthetic construct
  misc_feature 1..22: note = chemically synthesized
  source 1..22: mol_type = other DNA
gctcttgattgccatgtcatga

SEQ ID NO: 42473 - DNA, 22 bp, synthetic construct
  misc_feature 1..22: note = chemically synthesized
  source 1..22: mol_type = other DNA
ctcttgattgccatgtcatgat

SEQ ID NO: 42474 - DNA, 22 bp, synthetic construct
  misc_feature 1..22: note = chemically synthesized
  source 1..22: mol_type = other DNA
ttgattgccatgtcatgataaa

SEQ ID NO: 42475 - DNA, 22 bp, synthetic construct
  misc_feature 1..22: note = chemically synthesized
  source 1..22: mol_type = other DNA
gattgccatgtcatgataaaaa

SEQ ID NO: 42476 - DNA, 22 bp, synthetic construct
  misc_feature 1..22: note = chemically synthesized
  source 1..22: mol_type = other DNA
attgccatgtcatgataaaaaa

SEQ ID NO: 42477 - DNA, 22 bp, synthetic construct
  misc_feature 1..22: note = chemically synthesized
  source 1..22: mol_type = other DNA
ccatgtcatgataaaaaaaata

SEQ ID NO: 42478 - DNA, 22 bp, synthetic construct
  misc_feature 1..22: note = chemically synthesized
  source 1..22: mol_type = other DNA
tgttgccaagattgatgttgat

SEQ ID NO: 42479 - DNA, 22 bp, synthetic construct
  misc_feature 1..22: note = chemically synthesized
  source 1..22: mol_type = other DNA
ccaagattgatgttgatctgct

SEQ ID NO: 42480 - DNA, 22 bp, synthetic construct
  misc_feature 1..22: note = chemically synthesized
  source 1..22: mol_type = other DNA
atgttgatctgctaatccctgt

SEQ ID NO: 42481 - DNA, 22 bp, synthetic construct
  misc_feature 1..22: note = chemically synthesized
  source 1..22: mol_type = other DNA
atctgctaatccctgtgtagaa

SEQ ID NO: 42482 - DNA, 22 bp, synthetic construct
  misc_feature 1..22: note = chemically synthesized
  source 1..22: mol_type = other DNA
ctaatccctgtgtagaaatgaa

SEQ ID NO: 42483 - DNA, 22 bp, synthetic construct
  misc_feature 1..22: note = chemically synthesized
  source 1..22: mol_type = other DNA
atccctgtgtagaaatgaacct

SEQ ID NO: 42484 - DNA, 22 bp, synthetic construct
  misc_feature 1..22: note = chemically synthesized
  source 1..22: mol_type = other DNA
tgtagaaatgaaccttggaggc

SEQ ID NO: 42485 - DNA, 22 bp, synthetic construct
  misc_feature 1..22: note = chemically synthesized
  source 1..22: mol_type = other DNA
ggaggccattgtttgatttctt

SEQ ID NO: 42486 - DNA, 22 bp, synthetic construct
  misc_feature 1..22: note = chemically synthesized
  source 1..22: mol_type = other DNA
gaggccattgtttgatttctta

SEQ ID NO: 42487 - DNA, 22 bp, synthetic construct
  misc_feature 1..22: note = chemically synthesized
  source 1..22: mol_type = other DNA
tttgatttcttacaatatgtgc

SEQ ID NO: 42488 - DNA, 22 bp, synthetic construct
  misc_feature 1..22: note = chemically synthesized
  source 1..22: mol_type = other DNA
gatttcttacaatatgtgcatt

SEQ ID NO: 42489 - DNA, 22 bp, synthetic construct
  misc_feature 1..22: note = chemically synthesized
  source 1..22: mol_type = other DNA
atttcttacaatatgtgcattg

SEQ ID NO: 42490 - DNA, 22 bp, synthetic construct
  misc_feature 1..22: note = chemically synthesized
  source 1..22: mol_type = other DNA
cttacaatatgtgcattggttg

SEQ ID NO: 42491 - DNA, 22 bp, synthetic construct
  misc_feature 1..22: note = chemically synthesized
  source 1..22: mol_type = other DNA
ttacaatatgtgcattggttgt

SEQ ID NO: 42492 - DNA, 22 bp, synthetic construct
  misc_feature 1..22: note = chemically synthesized
  source 1..22: mol_type = other DNA
acaatatgtgcattggttgtaa

SEQ ID NO: 42493 - DNA, 22 bp, synthetic construct
  misc_feature 1..22: note = chemically synthesized
  source 1..22: mol_type = other DNA
caatatgtgcattggttgtaac

SEQ ID NO: 42494 - DNA, 22 bp, synthetic construct
  misc_feature 1..22: note = chemically synthesized
  source 1..22: mol_type = other DNA
gttgtaacactgtcactttgac

SEQ ID NO: 42495 - DNA, 22 bp, synthetic construct
  misc_feature 1..22: note = chemically synthesized
  source 1..22: mol_type = other DNA
taacactgtcactttgacagtt

SEQ ID NO: 42496 - DNA, 22 bp, synthetic construct
  misc_feature 1..22: note = chemically synthesized
  source 1..22: mol_type = other DNA
tcactttgacagttgataagca

SEQ ID NO: 42497 - DNA, 22 bp, synthetic construct
  misc_feature 1..22: note = chemically synthesized
  source 1..22: mol_type = other DNA
tgacagttgataagcatcttct

SEQ ID NO: 42498 - DNA, 22 bp, synthetic construct
  misc_feature 1..22: note = chemically synthesized
  source 1..22: mol_type = other DNA
gacagttgataagcatcttctg

SEQ ID NO: 42499 - DNA, 22 bp, synthetic construct
  misc_feature 1..22: note = chemically synthesized
  source 1..22: mol_type = other DNA
acagttgataagcatcttctga

SEQ ID NO: 42500 - DNA, 22 bp, synthetic construct
  misc_feature 1..22: note = chemically synthesized
  source 1..22: mol_type = other DNA
ataagcatcttctgaatggtcc

SEQ ID NO: 42501 - DNA, 22 bp, synthetic construct
  misc_feature 1..22: note = chemically synthesized
  source 1..22: mol_type = other DNA
ctgaatggtccctcctttagtt

SEQ ID NO: 42502 - DNA, 22 bp, synthetic construct
  misc_feature 1..22: note = chemically synthesized
  source 1..22: mol_type = other DNA
tgaatggtccctcctttagtta

SEQ ID NO: 42503 - DNA, 22 bp, synthetic construct
  misc_feature 1..22: note = chemically synthesized
  source 1..22: mol_type = other DNA
aatggtccctcctttagttaca

SEQ ID NO: 42504 - DNA, 22 bp, synthetic construct
  misc_feature 1..22: note = chemically synthesized
  source 1..22: mol_type = other DNA
ctttagttacaaaaatgttggt

SEQ ID NO: 42505 - DNA, 22 bp, synthetic construct
  misc_feature 1..22: note = chemically synthesized
  source 1..22: mol_type = other DNA
tagttacaaaaatgttggtgca

SEQ ID NO: 42506 - DNA, 22 bp, synthetic construct
  misc_feature 1..22: note = chemically synthesized
  source 1..22: mol_type = other DNA
agttacaaaaatgttggtgcat

SEQ ID NO: 42507 - DNA, 22 bp, synthetic construct
  misc_feature 1..22: note = chemically synthesized
  source 1..22: mol_type = other DNA
gttacaaaaatgttggtgcatg

SEQ ID NO: 42508 - DNA, 22 bp, synthetic construct
  misc_feature 1..22: note = chemically synthesized
  source 1..22: mol_type = other DNA
caaaaatgttggtgcatggatg

SEQ ID NO: 42509 - DNA, 22 bp, synthetic construct
  misc_feature 1..22: note = chemically synthesized
  source 1..22: mol_type = other DNA
gtgcatggatgatgttgggaat

SEQ ID NO: 42510 - DNA, 22 bp, synthetic construct
  misc_feature 1..22: note = chemically synthesized
  source 1..22: mol_type = other DNA
ggaataaataaaaagtgaacta

SEQ ID NO: 42511 - DNA, 22 bp, synthetic construct
  misc_feature 1..22: note = chemically synthesized
  source 1..22: mol_type = other DNA
aattatgttctcatcttgggca

SEQ ID NO: 42512 - DNA, 22 bp, synthetic construct
  misc_feature 1..22: note = chemically synthesized
  source 1..22: mol_type = other DNA
tgttctcatcttgggcaaaaat

SEQ ID NO: 42513 - DNA, 22 bp, synthetic construct
  misc_feature 1..22: note = chemically synthesized
  source 1..22: mol_type = other DNA
tcatcttgggcaaaaattaagc

SEQ ID NO: 42514 - DNA, 22 bp, synthetic construct
  misc_feature 1..22: note = chemically synthesized
  source 1..22: mol_type = other DNA
atcttgggcaaaaattaagcaa

SEQ ID NO: 42515 - DNA, 22 bp, synthetic construct
  misc_feature 1..22: note = chemically synthesized
  source 1..22: mol_type = other DNA
gggcaaaaattaagcaaaaaaa

SEQ ID NO: 42516 - DNA, 22 bp, synthetic construct
  misc_feature 1..22: note = chemically synthesized
  source 1..22: mol_type = other DNA
ggcaaaaattaagcaaaaaaaa

SEQ ID NO: 42517 - DNA, 22 bp, synthetic construct
  misc_feature 1..22: note = chemically synthesized
  source 1..22: mol_type = other DNA
agcaaaaaaaaaatggaggata

SEQ ID NO: 42518 - DNA, 22 bp, synthetic construct
  misc_feature 1..22: note = chemically synthesized
  source 1..22: mol_type = other DNA
ctccacaaagaaggccattttt

SEQ ID NO: 42519 - DNA, 22 bp, synthetic construct
  misc_feature 1..22: note = chemically synthesized
  source 1..22: mol_type = other DNA
cacaaagaaggccatttttgta

SEQ ID NO: 42520 - DNA, 22 bp, synthetic construct
  misc_feature 1..22: note = chemically synthesized
  source 1..22: mol_type = other DNA
ttgtactaggcttactacagtg

SEQ ID NO: 42521 - DNA, 22 bp, synthetic construct
  misc_feature 1..22: note = chemically synthesized
  source 1..22: mol_type = other DNA
tgtactaggcttactacagtga

SEQ ID NO: 42522 - DNA, 22 bp, synthetic construct
  misc_feature 1..22: note = chemically synthesized
  source 1..22: mol_type = other DNA
gtactaggcttactacagtgac

SEQ ID NO: 42523 - DNA, 22 bp, synthetic construct
  misc_feature 1..22: note = chemically synthesized
  source 1..22: mol_type = other DNA
tactaggcttactacagtgaca

SEQ ID NO: 42524 - DNA, 22 bp, synthetic construct
  misc_feature 1..22: note = chemically synthesized
  source 1..22: mol_type = other DNA
ggcttactacagtgacacacca

SEQ ID NO: 42525 - DNA, 22 bp, synthetic construct
  misc_feature 1..22: note = chemically synthesized
  source 1..22: mol_type = other DNA
actacagtgacacaccactatt

SEQ ID NO: 42526 - DNA, 22 bp, synthetic construct
  misc_feature 1..22: note = chemically synthesized
  source 1..22: mol_type = other DNA
ctacagtgacacaccactatta

SEQ ID NO: 42527 - DNA, 22 bp, synthetic construct
  misc_feature 1..22: note = chemically synthesized
  source 1..22: mol_type = other DNA
cagtgacacaccactattagtt

SEQ ID NO: 42528 - DNA, 22 bp, synthetic construct
  misc_feature 1..22: note = chemically synthesized
  source 1..22: mol_type = other DNA
ttagttggggagaattcagttt

SEQ ID NO: 42529 - DNA, 22 bp, synthetic construct
  misc_feature 1..22: note = chemically synthesized
  source 1..22: mol_type = other DNA
gttggggagaattcagtttttc

SEQ ID NO: 42530 - DNA, 22 bp, synthetic construct
  misc_feature 1..22: note = chemically synthesized
  source 1..22: mol_type = other DNA
gggagaattcagtttttccaag

SEQ ID NO: 42531 - DNA, 22 bp, synthetic construct
  misc_feature 1..22: note = chemically synthesized
  source 1..22: mol_type = other DNA
agtttttccaaggtgttgatag

SEQ ID NO: 42532 - DNA, 22 bp, synthetic construct
  misc_feature 1..22: note = chemically synthesized
  source 1..22: mol_type = other DNA
ttccaaggtgttgataggcatc

SEQ ID NO: 42533 - DNA, 22 bp, synthetic construct
  misc_feature 1..22: note = chemically synthesized
  source 1..22: mol_type = other DNA
tccaaggtgttgataggcatcc

SEQ ID NO: 42534 - DNA, 22 bp, synthetic construct
  misc_feature 1..22: note = chemically synthesized
  source 1..22: mol_type = other DNA
ccaaggtgttgataggcatcca

SEQ ID NO: 42535 - DNA, 22 bp, synthetic construct
  misc_feature 1..22: note = chemically synthesized
  source 1..22: mol_type = other DNA
caaggtgttgataggcatccag

SEQ ID NO: 42536 - DNA, 22 bp, synthetic construct
  misc_feature 1..22: note = chemically synthesized
  source 1..22: mol_type = other DNA
ataggcatccagatttcagagg

SEQ ID NO: 42537 - DNA, 22 bp, synthetic construct
  misc_feature 1..22: note = chemically synthesized
  source 1..22: mol_type = other DNA
cagaggaaattgtaaaaaagca

SEQ ID NO: 42538 - DNA, 22 bp, synthetic construct
  misc_feature 1..22: note = chemically synthesized
  source 1..22: mol_type = other DNA
agaggaaattgtaaaaaagcag

SEQ ID NO: 42539 - DNA, 22 bp, synthetic construct
  misc_feature 1..22: note = chemically synthesized
  source 1..22: mol_type = other DNA
taaaaaagcagaacctgggacc

SEQ ID NO: 42540 - DNA, 22 bp, synthetic construct
  misc_feature 1..22: note = chemically synthesized
  source 1..22: mol_type = other DNA
ggaccaatactgcccacgattt

SEQ ID NO: 42541 - DNA, 22 bp, synthetic construct
  misc_feature 1..22: note = chemically synthesized
  source 1..22: mol_type = other DNA
cccacgatttttctttgagatc

SEQ ID NO: 42542 - DNA, 22 bp, synthetic construct
  misc_feature 1..22: note = chemically synthesized
  source 1..22: mol_type = other DNA
ttctttgagatcaaatctgagg

SEQ ID NO: 42543 - DNA, 22 bp, synthetic construct
  misc_feature 1..22: note = chemically synthesized
  source 1..22: mol_type = other DNA
tctttgagatcaaatctgaggc

SEQ ID NO: 42544 - DNA, 22 bp, synthetic construct
  misc_feature 1..22: note = chemically synthesized
  source 1..22: mol_type = other DNA
ctttgagatcaaatctgaggca

SEQ ID NO: 42545 - DNA, 22 bp, synthetic construct
  misc_feature 1..22: note = chemically synthesized
  source 1..22: mol_type = other DNA
tttgagatcaaatctgaggcaa

SEQ ID NO: 42546 - DNA, 22 bp, synthetic construct
  misc_feature 1..22: note = chemically synthesized
  source 1..22: mol_type = other DNA
tgagatcaaatctgaggcaaca

SEQ ID NO: 42547 - DNA, 22 bp, synthetic construct
  misc_feature 1..22: note = chemically synthesized
  source 1..22: mol_type = other DNA
gagatcaaatctgaggcaacaa

SEQ ID NO: 42548 - DNA, 22 bp, synthetic construct
  misc_feature 1..22: note = chemically synthesized
  source 1..22: mol_type = other DNA
agatcaaatctgaggcaacaaa

SEQ ID NO: 42549 - DNA, 22 bp, synthetic construct
  misc_feature 1..22: note = chemically synthesized
  source 1..22: mol_type = other DNA
aggcaacaaatctgttcaaaag

SEQ ID NO: 42550 - DNA, 22 bp, synthetic construct
  misc_feature 1..22: note = chemically synthesized
  source 1..22: mol_type = other DNA
ttcaaaagctgctttctgcctg

SEQ ID NO: 42551 - DNA, 22 bp, synthetic construct
  misc_feature 1..22: note = chemically synthesized
  source 1..22: mol_type = other DNA
aaaagctgctttctgcctggtt

SEQ ID NO: 42552 - DNA, 22 bp, synthetic construct
  misc_feature 1..22: note = chemically synthesized
  source 1..22: mol_type = other DNA
ctttctgcctggttgtggcaaa

SEQ ID NO: 42553 - DNA, 22 bp, synthetic construct
  misc_feature 1..22: note = chemically synthesized
  source 1..22: mol_type = other DNA
tctgcctggttgtggcaaaggg

SEQ ID NO: 42554 - DNA, 22 bp, synthetic construct
  misc_feature 1..22: note = chemically synthesized
  source 1..22: mol_type = other DNA
ctgcctggttgtggcaaagggt

SEQ ID NO: 42555 - DNA, 22 bp, synthetic construct
  misc_feature 1..22: note = chemically synthesized
  source 1..22: mol_type = other DNA
tgcctggttgtggcaaagggtg

SEQ ID NO: 42556 - DNA, 22 bp, synthetic construct
  misc_feature 1..22: note = chemically synthesized
  source 1..22: mol_type = other DNA
cctggttgtggcaaagggtggc

SEQ ID NO: 42557 - DNA, 22 bp, synthetic construct
  misc_feature 1..22: note = chemically synthesized
  source 1..22: mol_type = other DNA
gttgtggcaaagggtggccaag

SEQ ID NO: 42558 - DNA, 22 bp, synthetic construct
  misc_feature 1..22: note = chemically synthesized
  source 1..22: mol_type = other DNA
tggcaaagggtggccaagtggg

SEQ ID NO: 42559 - DNA, 22 bp, synthetic construct
  misc_feature 1..22: note = chemically synthesized
  source 1..22: mol_type = other DNA
agctgtgttcccattgcaaggc

SEQ ID NO: 42560 - DNA, 22 bp, synthetic construct
  misc_feature 1..22: note = chemically synthesized
  source 1..22: mol_type = other DNA
tgttcccattgcaaggctactg

SEQ ID NO: 42561 - DNA, 22 bp, synthetic construct
  misc_feature 1..22: note = chemically synthesized
  source 1..22: mol_type = other DNA
ccattgcaaggctactgagcat

SEQ ID NO: 42562 - DNA, 22 bp, synthetic construct
  misc_feature 1..22: note = chemically synthesized
  source 1..22: mol_type = other DNA
caaggctactgagcatcccctg

SEQ ID NO: 42563 - DNA, 22 bp, synthetic construct
  misc_feature 1..22: note = chemically synthesized
  source 1..22: mol_type = other DNA
ctgagcatcccctgtcctgagg

SEQ ID NO: 42564 - DNA, 22 bp, synthetic construct
  misc_feature 1..22: note = chemically synthesized
  source 1..22: mol_type = other DNA
agcatcccctgtcctgaggctc

SEQ ID NO: 42565 - DNA, 22 bp, synthetic construct
  misc_feature 1..22: note = chemically synthesized
  source 1..22: mol_type = other DNA
tcctgaggctccttaggacacc

SEQ ID NO: 42566 - DNA, 22 bp, synthetic construct
  misc_feature 1..22: note = chemically synthesized
  source 1..22: mol_type = other DNA
aggctccttaggacacctggct

SEQ ID NO: 42567 - DNA, 22 bp, synthetic construct
  misc_feature 1..22: note = chemically synthesized
  source 1..22: mol_type = other DNA
cttaggacacctggctgagctt

SEQ ID NO: 42568 - DNA, 22 bp, synthetic construct
  misc_feature 1..22: note = chemically synthesized
  source 1..22: mol_type = other DNA
aggacacctggctgagcttcag

SEQ ID NO: 42569 - DNA, 22 bp, synthetic construct
  misc_feature 1..22: note = chemically synthesized
  source 1..22: mol_type = other DNA
ggacacctggctgagcttcagc

SEQ ID NO: 42570 - DNA, 22 bp, synthetic construct
  misc_feature 1..22: note = chemically synthesized
  source 1..22: mol_type = other DNA
gctgagcttcagcagccctctt

SEQ ID NO: 42571 - DNA, 22 bp, synthetic construct
  misc_feature 1..22: note = chemically synthesized
  source 1..22: mol_type = other DNA
agcttcagcagccctcttccaa

SEQ ID NO: 42572 - DNA, 22 bp, synthetic construct
  misc_feature 1..22: note = chemically synthesized
  source 1..22: mol_type = other DNA
cagcagccctcttccaagcctg

SEQ ID NO: 42573 - DNA, 22 bp, synthetic construct
  misc_feature 1..22: note = chemically synthesized
  source 1..22: mol_type = other DNA
agcagccctcttccaagcctgg

SEQ ID NO: 42574 - DNA, 22 bp, synthetic construct
  misc_feature 1..22: note = chemically synthesized
  source 1..22: mol_type = other DNA
ttccaagcctggagatgccagc

SEQ ID NO: 42575 - DNA, 22 bp, synthetic construct
  misc_feature 1..22: note = chemically synthesized
  source 1..22: mol_type = other DNA
ccaagcctggagatgccagctc

SEQ ID NO: 42576 - DNA, 22 bp, synthetic construct
  misc_feature 1..22: note = chemically synthesized
  source 1..22: mol_type = other DNA
caagcctggagatgccagctcc

SEQ ID NO: 42577 - DNA, 22 bp, synthetic construct
  misc_feature 1..22: note = chemically synthesized
  source 1..22: mol_type = other DNA
gagatgccagctccatctctgg

SEQ ID NO: 42578 - DNA, 22 bp, synthetic construct
  misc_feature 1..22: note = chemically synthesized
  source 1..22: mol_type = other DNA
catctctggcacaaaatgtagt

SEQ ID NO: 42579 - DNA, 22 bp, synthetic construct
  misc_feature 1..22: note = chemically synthesized
  source 1..22: mol_type = other DNA
tggcacaaaatgtagtgatttt

SEQ ID NO: 42580 - DNA, 22 bp, synthetic construct
  misc_feature 1..22: note = chemically synthesized
  source 1..22: mol_type = other DNA
gcacaaaatgtagtgattttca

SEQ ID NO: 42581 - DNA, 22 bp, synthetic construct
  misc_feature 1..22: note = chemically synthesized
  source 1..22: mol_type = other DNA
tcacagggtgagaggccaaaag

SEQ ID NO: 42582 - DNA, 22 bp, synthetic construct
  misc_feature 1..22: note = chemically synthesized
  source 1..22: mol_type = other DNA
cacagggtgagaggccaaaaga

SEQ ID NO: 42583 - DNA, 22 bp, synthetic construct
  misc_feature 1..22: note = chemically synthesized
  source 1..22: mol_type = other DNA
acagggtgagaggccaaaagag

SEQ ID NO: 42584 - DNA, 22 bp, synthetic construct
  misc_feature 1..22: note = chemically synthesized
  source 1..22: mol_type = other DNA
ataaaatgaagatagccaagct

SEQ ID NO: 42585 - DNA, 22 bp, synthetic construct
  misc_feature 1..22: note = chemically synthesized
  source 1..22: mol_type = other DNA
ccatggaattaagcaacaggac

SEQ ID NO: 42586 - DNA, 22 bp, synthetic construct
  misc_feature 1..22: note = chemically synthesized
  source 1..22: mol_type = other DNA
catggaattaagcaacaggaca

SEQ ID NO: 42587 - DNA, 22 bp, synthetic construct
  misc_feature 1..22: note = chemically synthesized
  source 1..22: mol_type = other DNA
agcaacaggacaaccttgacca

SEQ ID NO: 42588 - DNA, 22 bp, synthetic construct
  misc_feature 1..22: note = chemically synthesized
  source 1..22: mol_type = other DNA
gaccactttgaggggtgtggtg

SEQ ID NO: 42589 - DNA, 22 bp, synthetic construct
  misc_feature 1..22: note = chemically synthesized
  source 1..22: mol_type = other DNA
accactttgaggggtgtggtgg

SEQ ID NO: 42590 - DNA, 22 bp, synthetic construct
  misc_feature 1..22: note = chemically synthesized
  source 1..22: mol_type = other DNA
tgaggggtgtggtgggggccac

SEQ ID NO: 42591 - DNA, 22 bp, synthetic construct
  misc_feature 1..22: note = chemically synthesized
  source 1..22: mol_type = other DNA
gaggggtgtggtgggggccaca

SEQ ID NO: 42592 - DNA, 22 bp, synthetic construct
  misc_feature 1..22: note = chemically synthesized
  source 1..22: mol_type = other DNA
aggggtgtggtgggggccacat

SEQ ID NO: 42593 - DNA, 22 bp, synthetic construct
  misc_feature 1..22: note = chemically synthesized
  source 1..22: mol_type = other DNA
aagagtgactagaagagcagtg

SEQ ID NO: 42594 - DNA, 22 bp, synthetic construct
  misc_feature 1..22: note = chemically synthesized
  source 1..22: mol_type = other DNA
gaagagcagtgggggtggcagc

SEQ ID NO: 42595 - DNA, 22 bp, synthetic construct
  misc_feature 1..22: note = chemically synthesized
  source 1..22: mol_type = other DNA
gctctgaaagcagcgagacttc

SEQ ID NO: 42596 - DNA, 22 bp, synthetic construct
  misc_feature 1..22: note = chemically synthesized
  source 1..22: mol_type = other DNA
tgaaagcagcgagacttctagg

SEQ ID NO: 42597 - DNA, 22 bp, synthetic construct
  misc_feature 1..22: note = chemically synthesized
  source 1..22: mol_type = other DNA
aaagcagcgagacttctaggga

SEQ ID NO: 42598 - DNA, 22 bp, synthetic construct
  misc_feature 1..22: note = chemically synthesized
  source 1..22: mol_type = other DNA
ctagggaatacagggtcagggg

SEQ ID NO: 42599 - DNA, 22 bp, synthetic construct
  misc_feature 1..22: note = chemically synthesized
  source 1..22: mol_type = other DNA
tagggaatacagggtcagggga

SEQ ID NO: 42600 - DNA, 22 bp, synthetic construct
  misc_feature 1..22: note = chemically synthesized
  source 1..22: mol_type = other DNA
gggaatacagggtcaggggagg

SEQ ID NO: 42601 - DNA, 22 bp, synthetic construct
  misc_feature 1..22: note = chemically synthesized
  source 1..22: mol_type = other DNA
tgaaagatgacacactgcagag

SEQ ID NO: 42602 - DNA, 22 bp, synthetic construct
  misc_feature 1..22: note = chemically synthesized
  source 1..22: mol_type = other DNA
aaagatgacacactgcagagaa

SEQ ID NO: 42603 - DNA, 22 bp, synthetic construct
  misc_feature 1..22: note = chemically synthesized
  source 1..22: mol_type = other DNA
cagagaacatgtgtttgtatgc

SEQ ID NO: 42604 - DNA, 22 bp, synthetic construct
  misc_feature 1..22: note = chemically synthesized
  source 1..22: mol_type = other DNA
gtatgccgatgacaagtatcca

SEQ ID NO: 42605 - DNA, 22 bp, synthetic construct
  misc_feature 1..22: note = chemically synthesized
  source 1..22: mol_type = other DNA
tatgccgatgacaagtatccag

SEQ ID NO: 42606 - DNA, 22 bp, synthetic construct
  misc_feature 1..22: note = chemically synthesized
  source 1..22: mol_type = other DNA
tcattctcagaaaggcctgtcc

SEQ ID NO: 42607 - DNA, 22 bp, synthetic construct
  misc_feature 1..22: note = chemically synthesized
  source 1..22: mol_type = other DNA
attctcagaaaggcctgtcctg

SEQ ID NO: 42608 - DNA, 22 bp, synthetic construct
  misc_feature 1..22: note = chemically synthesized
  source 1..22: mol_type = other DNA
tcagaaaggcctgtcctgacct

SEQ ID NO: 42609 - DNA, 22 bp, synthetic construct
  misc_feature 1..22: note = chemically synthesized
  source 1..22: mol_type = other DNA
agaaaggcctgtcctgacctcc

SEQ ID NO: 42610 - DNA, 22 bp, synthetic construct
  misc_feature 1..22: note = chemically synthesized
  source 1..22: mol_type = other DNA
tcctgacctcctgagagtacac

SEQ ID NO: 42611 - DNA, 22 bp, synthetic construct
  misc_feature 1..22: note = chemically synthesized
  source 1..22: mol_type = other DNA
acctcctgagagtacacagacc

SEQ ID NO: 42612 - DNA, 22 bp, synthetic construct
  misc_feature 1..22: note = chemically synthesized
  source 1..22: mol_type = other DNA
ctgagagtacacagaccatgag

SEQ ID NO: 42613 - DNA, 22 bp, synthetic construct
  misc_feature 1..22: note = chemically synthesized
  source 1..22: mol_type = other DNA
agagtacacagaccatgagggc

SEQ ID NO: 42614 - DNA, 22 bp, synthetic construct
  misc_feature 1..22: note = chemically synthesized
  source 1..22: mol_type = other DNA
actgtttcatgcaaagtccttg

SEQ ID NO: 42615 - DNA, 22 bp, synthetic construct
  misc_feature 1..22: note = chemically synthesized
  source 1..22: mol_type = other DNA
tttcatgcaaagtccttggcca

SEQ ID NO: 42616 - DNA, 22 bp, synthetic construct
  misc_feature 1..22: note = chemically synthesized
  source 1..22: mol_type = other DNA
catgcaaagtccttggccacag

SEQ ID NO: 42617 - DNA, 22 bp, synthetic construct
  misc_feature 1..22: note = chemically synthesized
  source 1..22: mol_type = other DNA
atgcaaagtccttggccacagt

SEQ ID NO: 42618 - DNA, 22 bp, synthetic construct
  misc_feature 1..22: note = chemically synthesized
  source 1..22: mol_type = other DNA
ggccacagtccacctgctcccc

SEQ ID NO: 42619 - DNA, 22 bp, synthetic construct
  misc_feature 1..22: note = chemically synthesized
  source 1..22: mol_type = other DNA
gccacagtccacctgctcccca

SEQ ID NO: 42620 - DNA, 22 bp, synthetic construct
  misc_feature 1..22: note = chemically synthesized
  source 1..22: mol_type = other DNA
ctccccacctctgtgactttgt

SEQ ID NO: 42621 - DNA, 22 bp, synthetic construct
  misc_feature 1..22: note = chemically synthesized
  source 1..22: mol_type = other DNA
cccacctctgtgactttgtcct

SEQ ID NO: 42622 - DNA, 22 bp, synthetic construct
  misc_feature 1..22: note = chemically synthesized
  source 1..22: mol_type = other DNA
tgtgactttgtccttcctcaat

SEQ ID NO: 42623 - DNA, 22 bp, synthetic construct
  misc_feature 1..22: note = chemically synthesized
  source 1..22: mol_type = other DNA
tgactttgtccttcctcaattt

SEQ ID NO: 42624 - DNA, 22 bp, synthetic construct
  misc_feature 1..22: note = chemically synthesized
  source 1..22: mol_type = other DNA
tgtccttcctcaatttaatatg

SEQ ID NO: 42625 - DNA, 22 bp, synthetic construct
  misc_feature 1..22: note = chemically synthesized
  source 1..22: mol_type = other DNA
gtccttcctcaatttaatatgc

SEQ ID NO: 42626 - DNA, 22 bp, synthetic construct
  misc_feature 1..22: note = chemically synthesized
  source 1..22: mol_type = other DNA
tccttcctcaatttaatatgct

SEQ ID NO: 42627 - DNA, 22 bp, synthetic construct
  misc_feature 1..22: note = chemically synthesized
  source 1..22: mol_type = other DNA
cctcaatttaatatgctctatg

SEQ ID NO: 42628 - DNA, 22 bp, synthetic construct
  misc_feature 1..22: note = chemically synthesized
  source 1..22: mol_type = other DNA
ctcaatttaatatgctctatgc

SEQ ID NO: 42629 - DNA, 22 bp, synthetic construct
  misc_feature 1..22: note = chemically synthesized
  source 1..22: mol_type = other DNA
aatttaatatgctctatgctgg

SEQ ID NO: 42630 - DNA, 22 bp, synthetic construct
  misc_feature 1..22: note = chemically synthesized
  source 1..22: mol_type = other DNA
aatatgctctatgctggaaaac

SEQ ID NO: 42631 - DNA, 22 bp, synthetic construct
  misc_feature 1..22: note = chemically synthesized
  source 1..22: mol_type = other DNA
atatgctctatgctggaaaact

SEQ ID NO: 42632 - DNA, 22 bp, synthetic construct
  misc_feature 1..22: note = chemically synthesized
  source 1..22: mol_type = other DNA
tatgctggaaaactggattatt

SEQ ID NO: 42633 - DNA, 22 bp, synthetic construct
  misc_feature 1..22: note = chemically synthesized
  source 1..22: mol_type = other DNA
tgctggaaaactggattattga

SEQ ID NO: 42634 - DNA, 22 bp, synthetic construct
  misc_feature 1..22: note = chemically synthesized
  source 1..22: mol_type = other DNA
gaaaactggattattgaacagg

SEQ ID NO: 42635 - DNA, 22 bp, synthetic construct
  misc_feature 1..22: note = chemically synthesized
  source 1..22: mol_type = other DNA
gattattgaacaggcattggct

SEQ ID NO: 42636 - DNA, 22 bp, synthetic construct
  misc_feature 1..22: note = chemically synthesized
  source 1..22: mol_type = other DNA
ttgaacaggcattggctgatgc

SEQ ID NO: 42637 - DNA, 22 bp, synthetic construct
  misc_feature 1..22: note = chemically synthesized
  source 1..22: mol_type = other DNA
aacaggcattggctgatgcatt

SEQ ID NO: 42638 - DNA, 22 bp, synthetic construct
  misc_feature 1..22: note = chemically synthesized
  source 1..22: mol_type = other DNA
gctgatgcattctgaacctaat

SEQ ID NO: 42639 - DNA, 22 bp, synthetic construct
  misc_feature 1..22: note = chemically synthesized
  source 1..22: mol_type = other DNA
atgcattctgaacctaatccac

SEQ ID NO: 42640 - DNA, 22 bp, synthetic construct
  misc_feature 1..22: note = chemically synthesized
  source 1..22: mol_type = other DNA
tgaacctaatccactaaaaagc

SEQ ID NO: 42641 - DNA, 22 bp, synthetic construct
  misc_feature 1..22: note = chemically synthesized
  source 1..22: mol_type = other DNA
aacctaatccactaaaaagcac

SEQ ID NO: 42642 - DNA, 22 bp, synthetic construct
  misc_feature 1..22: note = chemically synthesized
  source 1..22: mol_type = other DNA
atccactaaaaagcacttgata

SEQ ID NO: 42643 - DNA, 22 bp, synthetic construct
  misc_feature 1..22: note = chemically synthesized
  source 1..22: mol_type = other DNA
aaaagcacttgatagatatatc

SEQ ID NO: 42644 - DNA, 22 bp, synthetic construct
  misc_feature 1..22: note = chemically synthesized
  source 1..22: mol_type = other DNA
gatagatatatcaaaatatcat

SEQ ID NO: 42645 - DNA, 22 bp, synthetic construct
  misc_feature 1..22: note = chemically synthesized
  source 1..22: mol_type = other DNA
atagatatatcaaaatatcatt

SEQ ID NO: 42646 - DNA, 22 bp, synthetic construct
  misc_feature 1..22: note = chemically synthesized
  source 1..22: mol_type = other DNA
agaaatagatattttaggccca

SEQ ID NO: 42647 - DNA, 22 bp, synthetic construct
  misc_feature 1..22: note = chemically synthesized
  source 1..22: mol_type = other DNA
taggcccatatccatgtcttca

SEQ ID NO: 42648 - DNA, 22 bp, synthetic construct
  misc_feature 1..22: note = chemically synthesized
  source 1..22: mol_type = other DNA
aggcccatatccatgtcttcac

SEQ ID NO: 42649 - DNA, 22 bp, synthetic construct
  misc_feature 1..22: note = chemically synthesized
  source 1..22: mol_type = other DNA
ggcccatatccatgtcttcacc

SEQ ID NO: 42650 - DNA, 22 bp, synthetic construct
  misc_feature 1..22: note = chemically synthesized
  source 1..22: mol_type = other DNA
caccccgcactgtttctcattt

SEQ ID NO: 42651 - DNA, 22 bp, synthetic construct
  misc_feature 1..22: note = chemically synthesized
  source 1..22: mol_type = other DNA
accccgcactgtttctcatttg

SEQ ID NO: 42652 - DNA, 22 bp, synthetic construct
  misc_feature 1..22: note = chemically synthesized
  source 1..22: mol_type = other DNA
tttctcatttgaactctctttt

SEQ ID NO: 42653 - DNA, 22 bp, synthetic construct
  misc_feature 1..22: note = chemically synthesized
  source 1..22: mol_type = other DNA
ctcatttgaactctcttttcca

SEQ ID NO: 42654 - DNA, 22 bp, synthetic construct
  misc_feature 1..22: note = chemically synthesized
  source 1..22: mol_type = other DNA
tcatttgaactctcttttccag

SEQ ID NO: 42655 - DNA, 22 bp, synthetic construct
  misc_feature 1..22: note = chemically synthesized
  source 1..22: mol_type = other DNA
atttgaactctcttttccagga

SEQ ID NO: 42656 - DNA, 22 bp, synthetic construct
  misc_feature 1..22: note = chemically synthesized
  source 1..22: mol_type = other DNA
gaactctcttttccaggaagag

SEQ ID NO: 42657 - DNA, 22 bp, synthetic construct
  misc_feature 1..22: note = chemically synthesized
  source 1..22: mol_type = other DNA
aactctcttttccaggaagagt

SEQ ID NO: 42658 - DNA, 22 bp, synthetic construct
  misc_feature 1..22: note = chemically synthesized
  source 1..22: mol_type = other DNA
tcttttccaggaagagttgtgc

SEQ ID NO: 42659 - DNA, 22 bp, synthetic construct
  misc_feature 1..22: note = chemically synthesized
  source 1..22: mol_type = other DNA
ttttccaggaagagttgtgctt

SEQ ID NO: 42660 - DNA, 22 bp, synthetic construct
  misc_feature 1..22: note = chemically synthesized
  source 1..22: mol_type = other DNA
ttccaggaagagttgtgcttgg

SEQ ID NO: 42661 - DNA, 22 bp, synthetic construct
  misc_feature 1..22: note = chemically synthesized
  source 1..22: mol_type = other DNA
tccaggaagagttgtgcttggg

SEQ ID NO: 42662 - DNA, 22 bp, synthetic construct
  misc_feature 1..22: note = chemically synthesized
  source 1..22: mol_type = other DNA
ccaggaagagttgtgcttgggt

SEQ ID NO: 42663 - DNA, 22 bp, synthetic construct
  misc_feature 1..22: note = chemically synthesized
  source 1..22: mol_type = other DNA
caggaagagttgtgcttgggta

SEQ ID NO: 42664 - DNA, 22 bp, synthetic construct
  misc_feature 1..22: note = chemically synthesized
  source 1..22: mol_type = other DNA
tgcttgggtaaattctatagct

SEQ ID NO: 42665 - DNA, 22 bp, synthetic construct
  misc_feature 1..22: note = chemically synthesized
  source 1..22: mol_type = other DNA
gggtaaattctatagctcacag

SEQ ID NO: 42666 - DNA, 22 bp, synthetic construct
  misc_feature 1..22: note = chemically synthesized
  source 1..22: mol_type = other DNA
ggtaaattctatagctcacagt

SEQ ID NO: 42667 - DNA, 22 bp, synthetic construct
  misc_feature 1..22: note = chemically synthesized
  source 1..22: mol_type = other DNA
tatagctcacagtgtgacttca

SEQ ID NO: 42668 - DNA, 22 bp, synthetic construct
  misc_feature 1..22: note = chemically synthesized
  source 1..22: mol_type = other DNA
tagctcacagtgtgacttcaaa

SEQ ID NO: 42669 - DNA, 22 bp, synthetic construct
  misc_feature 1..22: note = chemically synthesized
  source 1..22: mol_type = other DNA
acagtgtgacttcaaaacacac

SEQ ID NO: 42670 - DNA, 22 bp, synthetic construct
  misc_feature 1..22: note = chemically synthesized
  source 1..22: mol_type = other DNA
caaaacacacaataaattaata

SEQ ID NO: 42671 - DNA, 22 bp, synthetic construct
  misc_feature 1..22: note = chemically synthesized
  source 1..22: mol_type = other DNA
aaaacacacaataaattaataa

SEQ ID NO: 42672 - DNA, 22 bp, synthetic construct
  misc_feature 1..22: note = chemically synthesized
  source 1..22: mol_type = other DNA
ataaggtgcttcctacagtgag

SEQ ID NO: 42673 - DNA, 22 bp, synthetic construct
  misc_feature 1..22: note = chemically synthesized
  source 1..22: mol_type = other DNA
cctacagtgagttcagttaaac

SEQ ID NO: 42674 - DNA, 22 bp, synthetic construct
  misc_feature 1..22: note = chemically synthesized
  source 1..22: mol_type = other DNA
ctacagtgagttcagttaaaca

SEQ ID NO: 42675 - DNA, 22 bp, synthetic construct
  misc_feature 1..22: note = chemically synthesized
  source 1..22: mol_type = other DNA
cagtgagttcagttaaacattt

SEQ ID NO: 42676 - DNA, 22 bp, synthetic construct
  misc_feature 1..22: note = chemically synthesized
  source 1..22: mol_type = other DNA
agttaaacattttgaagagtgt

SEQ ID NO: 42677 - DNA, 22 bp, synthetic construct
  misc_feature 1..22: note = chemically synthesized
  source 1..22: mol_type = other DNA
aacattttgaagagtgtttttg

SEQ ID NO: 42678 - DNA, 22 bp, synthetic construct
  misc_feature 1..22: note = chemically synthesized
  source 1..22: mol_type = other DNA
tgaagagtgtttttgaaatgta

SEQ ID NO: 42679 - DNA, 22 bp, synthetic construct
  misc_feature 1..22: note = chemically synthesized
  source 1..22: mol_type = other DNA
gaagagtgtttttgaaatgtag

SEQ ID NO: 42680 - DNA, 22 bp, synthetic construct
  misc_feature 1..22: note = chemically synthesized
  source 1..22: mol_type = other DNA
aagagtgtttttgaaatgtagc

SEQ ID NO: 42681 - DNA, 22 bp, synthetic construct
  misc_feature 1..22: note = chemically synthesized
  source 1..22: mol_type = other DNA
ttgaaatgtagcagagcaggct

SEQ ID NO: 42682 - DNA, 22 bp, synthetic construct
  misc_feature 1..22: note = chemically synthesized
  source 1..22: mol_type = other DNA
tgaaatgtagcagagcaggcta

SEQ ID NO: 42683 - DNA, 22 bp, synthetic construct
  misc_feature 1..22: note = chemically synthesized
  source 1..22: mol_type = other DNA
gaaatgtagcagagcaggctac

SEQ ID NO: 42684 - DNA, 22 bp, synthetic construct
  misc_feature 1..22: note = chemically synthesized
  source 1..22: mol_type = other DNA
aaatgtagcagagcaggctaca

SEQ ID NO: 42685 - DNA, 22 bp, synthetic construct
  misc_feature 1..22: note = chemically synthesized
  source 1..22: mol_type = other DNA
caattgatattcaaaaagagga

SEQ ID NO: 42686 - DNA, 22 bp, synthetic construct
  misc_feature 1..22: note = chemically synthesized
  source 1..22: mol_type = other DNA
atattcaaaaagaggaaacttc

SEQ ID NO: 42687 - DNA, 22 bp, synthetic construct
  misc_feature 1..22: note = chemically synthesized
  source 1..22: mol_type = other DNA
aaaaagaggaaacttccattta

SEQ ID NO: 42688 - DNA, 22 bp, synthetic construct
  misc_feature 1..22: note = chemically synthesized
  source 1..22: mol_type = other DNA
ccatttatttccccctttaact

SEQ ID NO: 42689 - DNA, 22 bp, synthetic construct
  misc_feature 1..22: note = chemically synthesized
  source 1..22: mol_type = other DNA
catttatttccccctttaacta

SEQ ID NO: 42690 - DNA, 22 bp, synthetic construct
  misc_feature 1..22: note = chemically synthesized
  source 1..22: mol_type = other DNA
atttccccctttaactaagtta

SEQ ID NO: 42691 - DNA, 22 bp, synthetic construct
  misc_feature 1..22: note = chemically synthesized
  source 1..22: mol_type = other DNA
tttccccctttaactaagttac

SEQ ID NO: 42692 - DNA, 22 bp, synthetic construct
  misc_feature 1..22: note = chemically synthesized
  source 1..22: mol_type = other DNA
ccccctttaactaagttacctg

SEQ ID NO: 42693 - DNA, 22 bp, synthetic construct
  misc_feature 1..22: note = chemically synthesized
  source 1..22: mol_type = other DNA
cccctttaactaagttacctgt

SEQ ID NO: 42694 - DNA, 22 bp, synthetic construct
  misc_feature 1..22: note = chemically synthesized
  source 1..22: mol_type = other DNA
taactaagttacctgtaactgt

SEQ ID NO: 42695 - DNA, 22 bp, synthetic construct
  misc_feature 1..22: note = chemically synthesized
  source 1..22: mol_type = other DNA
aactaagttacctgtaactgtg

SEQ ID NO: 42696 - DNA, 22 bp, synthetic construct
  misc_feature 1..22: note = chemically synthesized
  source 1..22: mol_type = other DNA
actaagttacctgtaactgtgt

SEQ ID NO: 42697 - DNA, 22 bp, synthetic construct
  misc_feature 1..22: note = chemically synthesized
  source 1..22: mol_type = other DNA
agttacctgtaactgtgtcatt

SEQ ID NO: 42698 - DNA, 22 bp, synthetic construct
  misc_feature 1..22: note = chemically synthesized
  source 1..22: mol_type = other DNA
cctgtaactgtgtcattttatt

SEQ ID NO: 42699 - DNA, 22 bp, synthetic construct
  misc_feature 1..22: note = chemically synthesized
  source 1..22: mol_type = other DNA
taactgtgtcattttattatgc

SEQ ID NO: 42700 - DNA, 22 bp, synthetic construct
  misc_feature 1..22: note = chemically synthesized
  source 1..22: mol_type = other DNA
tgtcattttattatgcttcata

SEQ ID NO: 42701 - DNA, 22 bp, synthetic construct
  misc_feature 1..22: note = chemically synthesized
  source 1..22: mol_type = other DNA
tattatgcttcatagagcatca

SEQ ID NO: 42702 - DNA, 22 bp, synthetic construct
  misc_feature 1..22: note = chemically synthesized
  source 1..22: mol_type = other DNA
attatgcttcatagagcatcac

SEQ ID NO: 42703 - DNA, 22 bp, synthetic construct
  misc_feature 1..22: note = chemically synthesized
  source 1..22: mol_type = other DNA
ttatgcttcatagagcatcact

SEQ ID NO: 42704 - DNA, 22 bp, synthetic construct
  misc_feature 1..22: note = chemically synthesized
  source 1..22: mol_type = other DNA
tgcttcatagagcatcactgct

SEQ ID NO: 42705 - DNA, 22 bp, synthetic construct
  misc_feature 1..22: note = chemically synthesized
  source 1..22: mol_type = other DNA
catagagcatcactgctgagat

SEQ ID NO: 42706 - DNA, 22 bp, synthetic construct
  misc_feature 1..22: note = chemically synthesized
  source 1..22: mol_type = other DNA
atagagcatcactgctgagatc

SEQ ID NO: 42707 - DNA, 22 bp, synthetic construct
  misc_feature 1..22: note = chemically synthesized
  source 1..22: mol_type = other DNA
ctgagatcccctccccagctca

SEQ ID NO: 42708 - DNA, 22 bp, synthetic construct
  misc_feature 1..22: note = chemically synthesized
  source 1..22: mol_type = other DNA
agatcccctccccagctcatgt

SEQ ID NO: 42709 - DNA, 22 bp, synthetic construct
  misc_feature 1..22: note = chemically synthesized
  source 1..22: mol_type = other DNA
cccagctcatgttgctaggaaa

SEQ ID NO: 42710 - DNA, 22 bp, synthetic construct
  misc_feature 1..22: note = chemically synthesized
  source 1..22: mol_type = other DNA
atgttgctaggaaatatcccaa

SEQ ID NO: 42711 - DNA, 22 bp, synthetic construct
  misc_feature 1..22: note = chemically synthesized
  source 1..22: mol_type = other DNA
ctaggaaatatcccaaaacaga

SEQ ID NO: 42712 - DNA, 22 bp, synthetic construct
  misc_feature 1..22: note = chemically synthesized
  source 1..22: mol_type = other DNA
ggaaatatcccaaaacagaatc

SEQ ID NO: 42713 - DNA, 22 bp, synthetic construct
  misc_feature 1..22: note = chemically synthesized
  source 1..22: mol_type = other DNA
ttctttttttaacctgatgatt

SEQ ID NO: 42714 - DNA, 22 bp, synthetic construct
  misc_feature 1..22: note = chemically synthesized
  source 1..22: mol_type = other DNA
tctttttttaacctgatgattt

SEQ ID NO: 42715 - DNA, 22 bp, synthetic construct
  misc_feature 1..22: note = chemically synthesized
  source 1..22: mol_type = other DNA
ctttttttaacctgatgatttt

SEQ ID NO: 42716 - DNA, 22 bp, synthetic construct
  misc_feature 1..22: note = chemically synthesized
  source 1..22: mol_type = other DNA
tttttttaacctgatgattttt

SEQ ID NO: 42717 - DNA, 22 bp, synthetic construct
  misc_feature 1..22: note = chemically synthesized
  source 1..22: mol_type = other DNA
tttttaacctgatgatttttcc

SEQ ID NO: 42718 - DNA, 22 bp, synthetic construct
  misc_feature 1..22: note = chemically synthesized
  source 1..22: mol_type = other DNA
ttttaacctgatgatttttcca

SEQ ID NO: 42719 - DNA, 22 bp, synthetic construct
  misc_feature 1..22: note = chemically synthesized
  source 1..22: mol_type = other DNA
tttaacctgatgatttttccac

SEQ ID NO: 42720 - DNA, 22 bp, synthetic construct
  misc_feature 1..22: note = chemically synthesized
  source 1..22: mol_type = other DNA
ttaacctgatgatttttccaca

SEQ ID NO: 42721 - DNA, 22 bp, synthetic construct
  misc_feature 1..22: note = chemically synthesized
  source 1..22: mol_type = other DNA
taacctgatgatttttccacaa

SEQ ID NO: 42722 - DNA, 22 bp, synthetic construct
  misc_feature 1..22: note = chemically synthesized
  source 1..22: mol_type = other DNA
aacctgatgatttttccacaat

SEQ ID NO: 42723 - DNA, 22 bp, synthetic construct
  misc_feature 1..22: note = chemically synthesized
  source 1..22: mol_type = other DNA
acctgatgatttttccacaatc

SEQ ID NO: 42724 - DNA, 22 bp, synthetic construct
  misc_feature 1..22: note = chemically synthesized
  source 1..22: mol_type = other DNA
atgatttttccacaatcctttt

SEQ ID NO: 42725 - DNA, 22 bp, synthetic construct
  misc_feature 1..22: note = chemically synthesized
  source 1..22: mol_type = other DNA
ttccacaatccttttgtttctc

SEQ ID NO: 42726 - DNA, 22 bp, synthetic construct
  misc_feature 1..22: note = chemically synthesized
  source 1..22: mol_type = other DNA
tccacaatccttttgtttctct

SEQ ID NO: 42727 - DNA, 22 bp, synthetic construct
  misc_feature 1..22: note = chemically synthesized
  source 1..22: mol_type = other DNA
ccacaatccttttgtttctctg

SEQ ID NO: 42728 - DNA, 22 bp, synthetic construct
  misc_feature 1..22: note = chemically synthesized
  source 1..22: mol_type = other DNA
cacaatccttttgtttctctga

SEQ ID NO: 42729 - DNA, 22 bp, synthetic construct
  misc_feature 1..22: note = chemically synthesized
  source 1..22: mol_type = other DNA
ttgtttctctgattcacctcca

SEQ ID NO: 42730 - DNA, 22 bp, synthetic construct
  misc_feature 1..22: note = chemically synthesized
  source 1..22: mol_type = other DNA
tgtttctctgattcacctccag

SEQ ID NO: 42731 - DNA, 22 bp, synthetic construct
  misc_feature 1..22: note = chemically synthesized
  source 1..22: mol_type = other DNA
gtttctctgattcacctccagg

SEQ ID NO: 42732 - DNA, 22 bp, synthetic construct
  misc_feature 1..22: note = chemically synthesized
  source 1..22: mol_type = other DNA
tttctctgattcacctccaggg

SEQ ID NO: 42733 - DNA, 22 bp, synthetic construct
  misc_feature 1..22: note = chemically synthesized
  source 1..22: mol_type = other DNA
ctctgattcacctccagggctc

SEQ ID NO: 42734 - DNA, 22 bp, synthetic construct
  misc_feature 1..22: note = chemically synthesized
  source 1..22: mol_type = other DNA
tctgattcacctccagggctca

SEQ ID NO: 42735 - DNA, 22 bp, synthetic construct
  misc_feature 1..22: note = chemically synthesized
  source 1..22: mol_type = other DNA
tgattcacctccagggctcata

SEQ ID NO: 42736 - DNA, 22 bp, synthetic construct
  misc_feature 1..22: note = chemically synthesized
  source 1..22: mol_type = other DNA
attcacctccagggctcatatg

SEQ ID NO: 42737 - DNA, 22 bp, synthetic construct
  misc_feature 1..22: note = chemically synthesized
  source 1..22: mol_type = other DNA
acctccagggctcatatggcaa

SEQ ID NO: 42738 - DNA, 22 bp, synthetic construct
  misc_feature 1..22: note = chemically synthesized
  source 1..22: mol_type = other DNA
cagggctcatatggcaatgggg

SEQ ID NO: 42739 - DNA, 22 bp, synthetic construct
  misc_feature 1..22: note = chemically synthesized
  source 1..22: mol_type = other DNA
atatggcaatggggatttaata

SEQ ID NO: 42740 - DNA, 22 bp, synthetic construct
  misc_feature 1..22: note = chemically synthesized
  source 1..22: mol_type = other DNA
aatagggtttatttgttggtga

SEQ ID NO: 42741 - DNA, 22 bp, synthetic construct
  misc_feature 1..22: note = chemically synthesized
  source 1..22: mol_type = other DNA
atagggtttatttgttggtgaa

SEQ ID NO: 42742 - DNA, 22 bp, synthetic construct
  misc_feature 1..22: note = chemically synthesized
  source 1..22: mol_type = other DNA
atttgttggtgaagaaacatta

SEQ ID NO: 42743 - DNA, 22 bp, synthetic construct
  misc_feature 1..22: note = chemically synthesized
  source 1..22: mol_type = other DNA
tttgttggtgaagaaacattaa

SEQ ID NO: 42744 - DNA, 22 bp, synthetic construct
  misc_feature 1..22: note = chemically synthesized
  source 1..22: mol_type = other DNA
gttggtgaagaaacattaaaca

SEQ ID NO: 42745 - DNA, 22 bp, synthetic construct
  misc_feature 1..22: note = chemically synthesized
  source 1..22: mol_type = other DNA
ttggtgaagaaacattaaacaa

SEQ ID NO: 42746 - DNA, 22 bp, synthetic construct
  misc_feature 1..22: note = chemically synthesized
  source 1..22: mol_type = other DNA
gtgaagaaacattaaacaaatc

SEQ ID NO: 42747 - DNA, 22 bp, synthetic construct
  misc_feature 1..22: note = chemically synthesized
  source 1..22: mol_type = other DNA
aacaaatcttttaataggaaaa

SEQ ID NO: 42748 - DNA, 22 bp, synthetic construct
  misc_feature 1..22: note = chemically synthesized
  source 1..22: mol_type = other DNA
ttaataggaaaaatacttttat

SEQ ID NO: 42749 - DNA, 22 bp, synthetic construct
  misc_feature 1..22: note = chemically synthesized
  source 1..22: mol_type = other DNA
taataggaaaaatacttttata

SEQ ID NO: 42750 - DNA, 22 bp, synthetic construct
  misc_feature 1..22: note = chemically synthesized
  source 1..22: mol_type = other DNA
aataggaaaaatacttttatat

SEQ ID NO: 42751 - DNA, 22 bp, synthetic construct
  misc_feature 1..22: note = chemically synthesized
  source 1..22: mol_type = other DNA
ataggaaaaatacttttatatt

SEQ ID NO: 42752 - DNA, 22 bp, synthetic construct
  misc_feature 1..22: note = chemically synthesized
  source 1..22: mol_type = other DNA
ttatattataggcaaaatgtag

SEQ ID NO: 42753 - DNA, 22 bp, synthetic construct
  misc_feature 1..22: note = chemically synthesized
  source 1..22: mol_type = other DNA
tatattataggcaaaatgtaga

SEQ ID NO: 42754 - DNA, 22 bp, synthetic construct
  misc_feature 1..22: note = chemically synthesized
  source 1..22: mol_type = other DNA
atattataggcaaaatgtagat

SEQ ID NO: 42755 - DNA, 22 bp, synthetic construct
  misc_feature 1..22: note = chemically synthesized
  source 1..22: mol_type = other DNA
tattataggcaaaatgtagatg

SEQ ID NO: 42756 - DNA, 22 bp, synthetic construct
  misc_feature 1..22: note = chemically synthesized
  source 1..22: mol_type = other DNA
taggcaaaatgtagatgtatat

SEQ ID NO: 42757 - DNA, 22 bp, synthetic construct
  misc_feature 1..22: note = chemically synthesized
  source 1..22: mol_type = other DNA
ctactgaagtaaatgtatttta

SEQ ID NO: 42758 - DNA, 22 bp, synthetic construct
  misc_feature 1..22: note = chemically synthesized
  source 1..22: mol_type = other DNA
ctgaagtaaatgtattttatta

SEQ ID NO: 42759 - DNA, 22 bp, synthetic construct
  misc_feature 1..22: note = chemically synthesized
  source 1..22: mol_type = other DNA
aagtaaatgtattttattaatg

SEQ ID NO: 42760 - DNA, 22 bp, synthetic construct
  misc_feature 1..22: note = chemically synthesized
  source 1..22: mol_type = other DNA
tattaatggtgtgagaatttct

SEQ ID NO: 42761 - DNA, 22 bp, synthetic construct
  misc_feature 1..22: note = chemically synthesized
  source 1..22: mol_type = other DNA
attaatggtgtgagaatttctt

SEQ ID NO: 42762 - DNA, 22 bp, synthetic construct
  misc_feature 1..22: note = chemically synthesized
  source 1..22: mol_type = other DNA
ttaatggtgtgagaatttcttc

SEQ ID NO: 42763 - DNA, 22 bp, synthetic construct
  misc_feature 1..22: note = chemically synthesized
  source 1..22: mol_type = other DNA
atggtgtgagaatttcttcctc

SEQ ID NO: 42764 - DNA, 22 bp, synthetic construct
  misc_feature 1..22: note = chemically synthesized
  source 1..22: mol_type = other DNA
cttcctcactgtggtgtgtgaa

SEQ ID NO: 42765 - DNA, 22 bp, synthetic construct
  misc_feature 1..22: note = chemically synthesized
  source 1..22: mol_type = other DNA
ttcctcactgtggtgtgtgaat

SEQ ID NO: 42766 - DNA, 22 bp, synthetic construct
  misc_feature 1..22: note = chemically synthesized
  source 1..22: mol_type = other DNA
cctcactgtggtgtgtgaatgt

SEQ ID NO: 42767 - DNA, 22 bp, synthetic construct
  misc_feature 1..22: note = chemically synthesized
  source 1..22: mol_type = other DNA
ctcactgtggtgtgtgaatgtg

SEQ ID NO: 42768 - DNA, 22 bp, synthetic construct
  misc_feature 1..22: note = chemically synthesized
  source 1..22: mol_type = other DNA
actgtggtgtgtgaatgtgtat

SEQ ID NO: 42769 - DNA, 22 bp, synthetic construct
  misc_feature 1..22: note = chemically synthesized
  source 1..22: mol_type = other DNA
tggtgtgtgaatgtgtatgcat

SEQ ID NO: 42770 - DNA, 22 bp, synthetic construct
  misc_feature 1..22: note = chemically synthesized
  source 1..22: mol_type = other DNA
gcatgtgtaaaagacttagcaa

SEQ ID NO: 42771 - DNA, 22 bp, synthetic construct
  misc_feature 1..22: note = chemically synthesized
  source 1..22: mol_type = other DNA
catgtgtaaaagacttagcaat

SEQ ID NO: 42772 - DNA, 22 bp, synthetic construct
  misc_feature 1..22: note = chemically synthesized
  source 1..22: mol_type = other DNA
agcaatttgtgaatagaagatg

SEQ ID NO: 42773 - DNA, 22 bp, synthetic construct
  misc_feature 1..22: note = chemically synthesized
  source 1..22: mol_type = other DNA
gcaatttgtgaatagaagatgt

SEQ ID NO: 42774 - DNA, 22 bp, synthetic construct
  misc_feature 1..22: note = chemically synthesized
  source 1..22: mol_type = other DNA
gtgaatagaagatgtttctccg

SEQ ID NO: 42775 - DNA, 22 bp, synthetic construct
  misc_feature 1..22: note = chemically synthesized
  source 1..22: mol_type = other DNA
tgaatagaagatgtttctccgc

SEQ ID NO: 42776 - DNA, 22 bp, synthetic construct
  misc_feature 1..22: note = chemically synthesized
  source 1..22: mol_type = other DNA
ctccgcttctcactgagcatgg

SEQ ID NO: 42777 - DNA, 22 bp, synthetic construct
  misc_feature 1..22: note = chemically synthesized
  source 1..22: mol_type = other DNA
tccgcttctcactgagcatggc

SEQ ID NO: 42778 - DNA, 22 bp, synthetic construct
  misc_feature 1..22: note = chemically synthesized
  source 1..22: mol_type = other DNA
cgcttctcactgagcatggctg

SEQ ID NO: 42779 - DNA, 22 bp, synthetic construct
  misc_feature 1..22: note = chemically synthesized
  source 1..22: mol_type = other DNA
ctcactgagcatggctgtaaaa

SEQ ID NO: 42780 - DNA, 22 bp, synthetic construct
  misc_feature 1..22: note = chemically synthesized
  source 1..22: mol_type = other DNA
tcactgagcatggctgtaaaag

SEQ ID NO: 42781 - DNA, 22 bp, synthetic construct
  misc_feature 1..22: note = chemically synthesized
  source 1..22: mol_type = other DNA
actgagcatggctgtaaaagaa

SEQ ID NO: 42782 - DNA, 22 bp, synthetic construct
  misc_feature 1..22: note = chemically synthesized
  source 1..22: mol_type = other DNA
agcatggctgtaaaagaaactt

SEQ ID NO: 42783 - DNA, 22 bp, synthetic construct
  misc_feature 1..22: note = chemically synthesized
  source 1..22: mol_type = other DNA
taaaagaaactttttcctctcc

SEQ ID NO: 42784 - DNA, 22 bp, synthetic construct
  misc_feature 1..22: note = chemically synthesized
  source 1..22: mol_type = other DNA
tttcctctccccgggcattcca

SEQ ID NO: 42785 - DNA, 22 bp, synthetic construct
  misc_feature 1..22: note = chemically synthesized
  source 1..22: mol_type = other DNA
ttcctctccccgggcattccag

SEQ ID NO: 42786 - DNA, 22 bp, synthetic construct
  misc_feature 1..22: note = chemically synthesized
  source 1..22: mol_type = other DNA
tcctctccccgggcattccagc

SEQ ID NO: 42787 - DNA, 22 bp, synthetic construct
  misc_feature 1..22: note = chemically synthesized
  source 1..22: mol_type = other DNA
cctctccccgggcattccagca

SEQ ID NO: 42788 - DNA, 22 bp, synthetic construct
  misc_feature 1..22: note = chemically synthesized
  source 1..22: mol_type = other DNA
ctctccccgggcattccagcac

SEQ ID NO: 42789 - DNA, 22 bp, synthetic construct
  misc_feature 1..22: note = chemically synthesized
  source 1..22: mol_type = other DNA
tccccgggcattccagcacaca

SEQ ID NO: 42790 - DNA, 22 bp, synthetic construct
  misc_feature 1..22: note = chemically synthesized
  source 1..22: mol_type = other DNA
cccgggcattccagcacacatt

SEQ ID NO: 42791 - DNA, 22 bp, synthetic construct
  misc_feature 1..22: note = chemically synthesized
  source 1..22: mol_type = other DNA
cagcacacattggaaagataac

SEQ ID NO: 42792 - DNA, 22 bp, synthetic construct
  misc_feature 1..22: note = chemically synthesized
  source 1..22: mol_type = other DNA
gaaagataacacgtccacagaa

SEQ ID NO: 42793 - DNA, 22 bp, synthetic construct
  misc_feature 1..22: note = chemically synthesized
  source 1..22: mol_type = other DNA
gctttccaaaagagcttatcag

SEQ ID NO: 42794 - DNA, 22 bp, synthetic construct
  misc_feature 1..22: note = chemically synthesized
  source 1..22: mol_type = other DNA
tccaaaagagcttatcagagaa

SEQ ID NO: 42795 - DNA, 22 bp, synthetic construct
  misc_feature 1..22: note = chemically synthesized
  source 1..22: mol_type = other DNA
ccaaaagagcttatcagagaat

SEQ ID NO: 42796 - DNA, 22 bp, synthetic construct
  misc_feature 1..22: note = chemically synthesized
  source 1..22: mol_type = other DNA
caaaagagcttatcagagaatg

SEQ ID NO: 42797 - DNA, 22 bp, synthetic construct
  misc_feature 1..22: note = chemically synthesized
  source 1..22: mol_type = other DNA
atcagagaatgtgccccccagg

SEQ ID NO: 42798 - DNA, 22 bp, synthetic construct
  misc_feature 1..22: note = chemically synthesized
  source 1..22: mol_type = other DNA
tcagagaatgtgccccccaggt

SEQ ID NO: 42799 - DNA, 22 bp, synthetic construct
  misc_feature 1..22: note = chemically synthesized
  source 1..22: mol_type = other DNA
aaacatatgttaatcctgtggc

SEQ ID NO: 42800 - DNA, 22 bp, synthetic construct
  misc_feature 1..22: note = chemically synthesized
  source 1..22: mol_type = other DNA
atcctgtggcagagaagtttgt

SEQ ID NO: 42801 - DNA, 22 bp, synthetic construct
  misc_feature 1..22: note = chemically synthesized
  source 1..22: mol_type = other DNA
tggcagagaagtttgttctagc

SEQ ID NO: 42802 - DNA, 22 bp, synthetic construct
  misc_feature 1..22: note = chemically synthesized
  source 1..22: mol_type = other DNA
gttctagcctttgggtgtagcc

SEQ ID NO: 42803 - DNA, 22 bp, synthetic construct
  misc_feature 1..22: note = chemically synthesized
  source 1..22: mol_type = other DNA
ttctagcctttgggtgtagcct

SEQ ID NO: 42804 - DNA, 22 bp, synthetic construct
  misc_feature 1..22: note = chemically synthesized
  source 1..22: mol_type = other DNA
tagcctttgggtgtagcctgct

SEQ ID NO: 42805 - DNA, 22 bp, synthetic construct
  misc_feature 1..22: note = chemically synthesized
  source 1..22: mol_type = other DNA
gcctttgggtgtagcctgctga

SEQ ID NO: 42806 - DNA, 22 bp, synthetic construct
  misc_feature 1..22: note = chemically synthesized
  source 1..22: mol_type = other DNA
tgggtgtagcctgctgaataag

SEQ ID NO: 42807 - DNA, 22 bp, synthetic construct
  misc_feature 1..22: note = chemically synthesized
  source 1..22: mol_type = other DNA
gggtgtagcctgctgaataagt

SEQ ID NO: 42808 - DNA, 22 bp, synthetic construct
  misc_feature 1..22: note = chemically synthesized
  source 1..22: mol_type = other DNA
ggtgtagcctgctgaataagtt

SEQ ID NO: 42809 - DNA, 22 bp, synthetic construct
  misc_feature 1..22: note = chemically synthesized
  source 1..22: mol_type = other DNA
ctgaataagttcacagtgatct

SEQ ID NO: 42810 - DNA, 22 bp, synthetic construct
  misc_feature 1..22: note = chemically synthesized
  source 1..22: mol_type = other DNA
aataagttcacagtgatctaca

SEQ ID NO: 42811 - DNA, 22 bp, synthetic construct
  misc_feature 1..22: note = chemically synthesized
  source 1..22: mol_type = other DNA
acagtgatctacatcctagttt

SEQ ID NO: 42812 - DNA, 22 bp, synthetic construct
  misc_feature 1..22: note = chemically synthesized
  source 1..22: mol_type = other DNA
catcctagtttccatgggctga

SEQ ID NO: 42813 - DNA, 22 bp, synthetic construct
  misc_feature 1..22: note = chemically synthesized
  source 1..22: mol_type = other DNA
gtttccatgggctgaaatagaa

SEQ ID NO: 42814 - DNA, 22 bp, synthetic construct
  misc_feature 1..22: note = chemically synthesized
  source 1..22: mol_type = other DNA
ccatgggctgaaatagaatatt

SEQ ID NO: 42815 - DNA, 22 bp, synthetic construct
  misc_feature 1..22: note = chemically synthesized
  source 1..22: mol_type = other DNA
catgggctgaaatagaatattc

SEQ ID NO: 42816 - DNA, 22 bp, synthetic construct
  misc_feature 1..22: note = chemically synthesized
  source 1..22: mol_type = other DNA
aaatagaatattcatatcccct

SEQ ID NO: 42817 - DNA, 22 bp, synthetic construct
  misc_feature 1..22: note = chemically synthesized
  source 1..22: mol_type = other DNA
atatcccctgcactccctacac

SEQ ID NO: 42818 - DNA, 22 bp, synthetic construct
  misc_feature 1..22: note = chemically synthesized
  source 1..22: mol_type = other DNA
cactccctacacacacagacat

SEQ ID NO: 42819 - DNA, 22 bp, synthetic construct
  misc_feature 1..22: note = chemically synthesized
  source 1..22: mol_type = other DNA
cctacacacacagacatagaca

SEQ ID NO: 42820 - DNA, 22 bp, synthetic construct
  misc_feature 1..22: note = chemically synthesized
  source 1..22: mol_type = other DNA
cacacacagacatagacaccaa

SEQ ID NO: 42821 - DNA, 22 bp, synthetic construct
  misc_feature 1..22: note = chemically synthesized
  source 1..22: mol_type = other DNA
ccccaaaaaactctttgcttaa

SEQ ID NO: 42822 - DNA, 22 bp, synthetic construct
  misc_feature 1..22: note = chemically synthesized
  source 1..22: mol_type = other DNA
cccaaaaaactctttgcttaat

SEQ ID NO: 42823 - DNA, 22 bp, synthetic construct
  misc_feature 1..22: note = chemically synthesized
  source 1..22: mol_type = other DNA
tttgcttaatcttctcctgctc

SEQ ID NO: 42824 - DNA, 22 bp, synthetic construct
  misc_feature 1..22: note = chemically synthesized
  source 1..22: mol_type = other DNA
tgcttaatcttctcctgctctg

SEQ ID NO: 42825 - DNA, 22 bp, synthetic construct
  misc_feature 1..22: note = chemically synthesized
  source 1..22: mol_type = other DNA
gcttaatcttctcctgctctgt

SEQ ID NO: 42826 - DNA, 22 bp, synthetic construct
  misc_feature 1..22: note = chemically synthesized
  source 1..22: mol_type = other DNA
cttaatcttctcctgctctgta

SEQ ID NO: 42827 - DNA, 22 bp, synthetic construct
  misc_feature 1..22: note = chemically synthesized
  source 1..22: mol_type = other DNA
aatcttctcctgctctgtattt

SEQ ID NO: 42828 - DNA, 22 bp, synthetic construct
  misc_feature 1..22: note = chemically synthesized
  source 1..22: mol_type = other DNA
atcttctcctgctctgtatttt

SEQ ID NO: 42829 - DNA, 22 bp, synthetic construct
  misc_feature 1..22: note = chemically synthesized
  source 1..22: mol_type = other DNA
ctcctgctctgtattttctttg

SEQ ID NO: 42830 - DNA, 22 bp, synthetic construct
  misc_feature 1..22: note = chemically synthesized
  source 1..22: mol_type = other DNA
tcctgctctgtattttctttga

SEQ ID NO: 42831 - DNA, 22 bp, synthetic construct
  misc_feature 1..22: note = chemically synthesized
  source 1..22: mol_type = other DNA
ctgctctgtattttctttgata

SEQ ID NO: 42832 - DNA, 22 bp, synthetic construct
  misc_feature 1..22: note = chemically synthesized
  source 1..22: mol_type = other DNA
ctctgtattttctttgatattt

SEQ ID NO: 42833 - DNA, 22 bp, synthetic construct
  misc_feature 1..22: note = chemically synthesized
  source 1..22: mol_type = other DNA
tgtattttctttgatattttct

SEQ ID NO: 42834 - DNA, 22 bp, synthetic construct
  misc_feature 1..22: note = chemically synthesized
  source 1..22: mol_type = other DNA
tattttctttgatattttcttg

SEQ ID NO: 42835 - DNA, 22 bp, synthetic construct
  misc_feature 1..22: note = chemically synthesized
  source 1..22: mol_type = other DNA
tctttgatattttcttgaatgg

SEQ ID NO: 42836 - DNA, 22 bp, synthetic construct
  misc_feature 1..22: note = chemically synthesized
  source 1..22: mol_type = other DNA
ctttgatattttcttgaatggc

SEQ ID NO: 42837 - DNA, 22 bp, synthetic construct
  misc_feature 1..22: note = chemically synthesized
  source 1..22: mol_type = other DNA
tttgatattttcttgaatggct

SEQ ID NO: 42838 - DNA, 22 bp, synthetic construct
  misc_feature 1..22: note = chemically synthesized
  source 1..22: mol_type = other DNA
tgatattttcttgaatggcttc

SEQ ID NO: 42839 - DNA, 22 bp, synthetic construct
  misc_feature 1..22: note = chemically synthesized
  source 1..22: mol_type = other DNA
gatattttcttgaatggcttcc

SEQ ID NO: 42840 - DNA, 22 bp, synthetic construct
  misc_feature 1..22: note = chemically synthesized
  source 1..22: mol_type = other DNA
atattttcttgaatggcttcca

SEQ ID NO: 42841 - DNA, 22 bp, synthetic construct
  misc_feature 1..22: note = chemically synthesized
  source 1..22: mol_type = other DNA
tcttgaatggcttccactaaat

SEQ ID NO: 42842 - DNA, 22 bp, synthetic construct
  misc_feature 1..22: note = chemically synthesized
  source 1..22: mol_type = other DNA
cttgaatggcttccactaaatt

SEQ ID NO: 42843 - DNA, 22 bp, synthetic construct
  misc_feature 1..22: note = chemically synthesized
  source 1..22: mol_type = other DNA
ttgaatggcttccactaaattc

SEQ ID NO: 42844 - DNA, 22 bp, synthetic construct
  misc_feature 1..22: note = chemically synthesized
  source 1..22: mol_type = other DNA
gaatggcttccactaaattcaa

SEQ ID NO: 42845 - DNA, 22 bp, synthetic construct
  misc_feature 1..22: note = chemically synthesized
  source 1..22: mol_type = other DNA
aatggcttccactaaattcaaa

SEQ ID NO: 42846 - DNA, 22 bp, synthetic construct
  misc_feature 1..22: note = chemically synthesized
  source 1..22: mol_type = other DNA
ccactaaattcaaatgtgtttg

SEQ ID NO: 42847 - DNA, 22 bp, synthetic construct
  misc_feature 1..22: note = chemically synthesized
  source 1..22: mol_type = other DNA
cactaaattcaaatgtgtttga

SEQ ID NO: 42848 - DNA, 22 bp, synthetic construct
  misc_feature 1..22: note = chemically synthesized
  source 1..22: mol_type = other DNA
aattcaaatgtgtttgacttta

SEQ ID NO: 42849 - DNA, 22 bp, synthetic construct
  misc_feature 1..22: note = chemically synthesized
  source 1..22: mol_type = other DNA
aaatgtgtttgactttaaagtc

SEQ ID NO: 42850 - DNA, 22 bp, synthetic construct
  misc_feature 1..22: note = chemically synthesized
  source 1..22: mol_type = other DNA
gactttaaagtcaacttgtaaa

SEQ ID NO: 42851 - DNA, 22 bp, synthetic construct
  misc_feature 1..22: note = chemically synthesized
  source 1..22: mol_type = other DNA
actttaaagtcaacttgtaaaa

SEQ ID NO: 42852 - DNA, 22 bp, synthetic construct
  misc_feature 1..22: note = chemically synthesized
  source 1..22: mol_type = other DNA
taaagtcaacttgtaaaatttt

SEQ ID NO: 42853 - DNA, 22 bp, synthetic construct
  misc_feature 1..22: note = chemically synthesized
  source 1..22: mol_type = other DNA
aaagtcaacttgtaaaatttta

SEQ ID NO: 42854 - DNA, 22 bp, synthetic construct
  misc_feature 1..22: note = chemically synthesized
  source 1..22: mol_type = other DNA
aagtcaacttgtaaaattttat

SEQ ID NO: 42855 - DNA, 22 bp, synthetic construct
  misc_feature 1..22: note = chemically synthesized
  source 1..22: mol_type = other DNA
gtaaaattttatctggtaattt

SEQ ID NO: 42856 - DNA, 22 bp, synthetic construct
  misc_feature 1..22: note = chemically synthesized
  source 1..22: mol_type = other DNA
taaaattttatctggtaattta

SEQ ID NO: 42857 - DNA, 22 bp, synthetic construct
  misc_feature 1..22: note = chemically synthesized
  source 1..22: mol_type = other DNA
tatctggtaatttatagattaa

SEQ ID NO: 42858 - DNA, 22 bp, synthetic construct
  misc_feature 1..22: note = chemically synthesized
  source 1..22: mol_type = other DNA
atctggtaatttatagattaaa

SEQ ID NO: 42859 - DNA, 22 bp, synthetic construct
  misc_feature 1..22: note = chemically synthesized
  source 1..22: mol_type = other DNA
tctggtaatttatagattaaat

SEQ ID NO: 42860 - DNA, 22 bp, synthetic construct
  misc_feature 1..22: note = chemically synthesized
  source 1..22: mol_type = other DNA
gtaatttatagattaaattgca

SEQ ID NO: 42861 - DNA, 22 bp, synthetic construct
  misc_feature 1..22: note = chemically synthesized
  source 1..22: mol_type = other DNA
atagattaaattgcaagcatct

SEQ ID NO: 42862 - DNA, 22 bp, synthetic construct
  misc_feature 1..22: note = chemically synthesized
  source 1..22: mol_type = other DNA
tagattaaattgcaagcatcta

SEQ ID NO: 42863 - DNA, 22 bp, synthetic construct
  misc_feature 1..22: note = chemically synthesized
  source 1..22: mol_type = other DNA
aattgcaagcatctacctccct

SEQ ID NO: 42864 - DNA, 22 bp, synthetic construct
  misc_feature 1..22: note = chemically synthesized
  source 1..22: mol_type = other DNA
caagcatctacctccctttcat

SEQ ID NO: 42865 - DNA, 22 bp, synthetic construct
  misc_feature 1..22: note = chemically synthesized
  source 1..22: mol_type = other DNA
cctccctttcatcagactctcc

SEQ ID NO: 42866 - DNA, 22 bp, synthetic construct
  misc_feature 1..22: note = chemically synthesized
  source 1..22: mol_type = other DNA
cctttcatcagactctccctgc

SEQ ID NO: 42867 - DNA, 22 bp, synthetic construct
  misc_feature 1..22: note = chemically synthesized
  source 1..22: mol_type = other DNA
tcatcagactctccctgcaggg

SEQ ID NO: 42868 - DNA, 22 bp, synthetic construct
  misc_feature 1..22: note = chemically synthesized
  source 1..22: mol_type = other DNA
catcagactctccctgcagggc

SEQ ID NO: 42869 - DNA, 22 bp, synthetic construct
  misc_feature 1..22: note = chemically synthesized
  source 1..22: mol_type = other DNA
atcagactctccctgcagggca

SEQ ID NO: 42870 - DNA, 22 bp, synthetic construct
  misc_feature 1..22: note = chemically synthesized
  source 1..22: mol_type = other DNA
tccctgcagggcaagttcatct

SEQ ID NO: 42871 - DNA, 22 bp, synthetic construct
  misc_feature 1..22: note = chemically synthesized
  source 1..22: mol_type = other DNA
cctgcagggcaagttcatctaa

SEQ ID NO: 42872 - DNA, 22 bp, synthetic construct
  misc_feature 1..22: note = chemically synthesized
  source 1..22: mol_type = other DNA
cagggcaagttcatctaactat

SEQ ID NO: 42873 - DNA, 22 bp, synthetic construct
  misc_feature 1..22: note = chemically synthesized
  source 1..22: mol_type = other DNA
atctaactatgtatgtgcttca

SEQ ID NO: 42874 - DNA, 22 bp, synthetic construct
  misc_feature 1..22: note = chemically synthesized
  source 1..22: mol_type = other DNA
actatgtatgtgcttcaagatg

SEQ ID NO: 42875 - DNA, 22 bp, synthetic construct
  misc_feature 1..22: note = chemically synthesized
  source 1..22: mol_type = other DNA
tgtatgtgcttcaagatggaac

SEQ ID NO: 42876 - DNA, 22 bp, synthetic construct
  misc_feature 1..22: note = chemically synthesized
  source 1..22: mol_type = other DNA
caagatggaactcctgagttca

SEQ ID NO: 42877 - DNA, 22 bp, synthetic construct
  misc_feature 1..22: note = chemically synthesized
  source 1..22: mol_type = other DNA
aagatggaactcctgagttcac

SEQ ID NO: 42878 - DNA, 22 bp, synthetic construct
  misc_feature 1..22: note = chemically synthesized
  source 1..22: mol_type = other DNA
ctgagttcacaggtgatttata

SEQ ID NO: 42879 - DNA, 22 bp, synthetic construct
  misc_feature 1..22: note = chemically synthesized
  source 1..22: mol_type = other DNA
agttcacaggtgatttataaac

SEQ ID NO: 42880 - DNA, 22 bp, synthetic construct
  misc_feature 1..22: note = chemically synthesized
  source 1..22: mol_type = other DNA
acaggtgatttataaaccaaag

SEQ ID NO: 42881 - DNA, 22 bp, synthetic construct
  misc_feature 1..22: note = chemically synthesized
  source 1..22: mol_type = other DNA
ataaaccaaagcatgcccacta

SEQ ID NO: 42882 - DNA, 22 bp, synthetic construct
  misc_feature 1..22: note = chemically synthesized
  source 1..22: mol_type = other DNA
taaaccaaagcatgcccactac

SEQ ID NO: 42883 - DNA, 22 bp, synthetic construct
  misc_feature 1..22: note = chemically synthesized
  source 1..22: mol_type = other DNA
caaaactctcaccctccagaga

SEQ ID NO: 42884 - DNA, 22 bp, synthetic construct
  misc_feature 1..22: note = chemically synthesized
  source 1..22: mol_type = other DNA
tcaccctccagagatttgcctc

SEQ ID NO: 42885 - DNA, 22 bp, synthetic construct
  misc_feature 1..22: note = chemically synthesized
  source 1..22: mol_type = other DNA
accctccagagatttgcctcaa

SEQ ID NO: 42886 - DNA, 22 bp, synthetic construct
  misc_feature 1..22: note = chemically synthesized
  source 1..22: mol_type = other DNA
cagagatttgcctcaagggaca

SEQ ID NO: 42887 - DNA, 22 bp, synthetic construct
  misc_feature 1..22: note = chemically synthesized
  source 1..22: mol_type = other DNA
gcctcaagggacaacaccctgc

SEQ ID NO: 42888 - DNA, 22 bp, synthetic construct
  misc_feature 1..22: note = chemically synthesized
  source 1..22: mol_type = other DNA
cctcaagggacaacaccctgct

SEQ ID NO: 42889 - DNA, 22 bp, synthetic construct
  misc_feature 1..22: note = chemically synthesized
  source 1..22: mol_type = other DNA
aagggacaacaccctgctcaca

SEQ ID NO: 42890 - DNA, 22 bp, synthetic construct
  misc_feature 1..22: note = chemically synthesized
  source 1..22: mol_type = other DNA
ctcacaaaggcaccagcaggca

SEQ ID NO: 42891 - DNA, 22 bp, synthetic construct
  misc_feature 1..22: note = chemically synthesized
  source 1..22: mol_type = other DNA
acaaaggcaccagcaggcaact

SEQ ID NO: 42892 - DNA, 22 bp, synthetic construct
  misc_feature 1..22: note = chemically synthesized
  source 1..22: mol_type = other DNA
ctcaactacctggtggataagg

SEQ ID NO: 42893 - DNA, 22 bp, synthetic construct
  misc_feature 1..22: note = chemically synthesized
  source 1..22: mol_type = other DNA
aactacctggtggataaggtgc

SEQ ID NO: 42894 - DNA, 22 bp, synthetic construct
  misc_feature 1..22: note = chemically synthesized
  source 1..22: mol_type = other DNA
cctggtggataaggtgcccaag

SEQ ID NO: 42895 - DNA, 22 bp, synthetic construct
  misc_feature 1..22: note = chemically synthesized
  source 1..22: mol_type = other DNA
gtggataaggtgcccaagctag

SEQ ID NO: 42896 - DNA, 22 bp, synthetic construct
  misc_feature 1..22: note = chemically synthesized
  source 1..22: mol_type = other DNA
gcatggacccctgaatccttgc

SEQ ID NO: 42897 - DNA, 22 bp, synthetic construct
  misc_feature 1..22: note = chemically synthesized
  source 1..22: mol_type = other DNA
aatccttgctcgcctcctctgt

SEQ ID NO: 42898 - DNA, 22 bp, synthetic construct
  misc_feature 1..22: note = chemically synthesized
  source 1..22: mol_type = other DNA
gctcgcctcctctgttgccttt

SEQ ID NO: 42899 - DNA, 22 bp, synthetic construct
  misc_feature 1..22: note = chemically synthesized
  source 1..22: mol_type = other DNA
ctcgcctcctctgttgcctttt

SEQ ID NO: 42900 - DNA, 22 bp, synthetic construct
  misc_feature 1..22: note = chemically synthesized
  source 1..22: mol_type = other DNA
gcctcctctgttgccttttaaa

SEQ ID NO: 42901 - DNA, 22 bp, synthetic construct
  misc_feature 1..22: note = chemically synthesized
  source 1..22: mol_type = other DNA
ctctgttgccttttaaaagtgc

SEQ ID NO: 42902 - DNA, 22 bp, synthetic construct
  misc_feature 1..22: note = chemically synthesized
  source 1..22: mol_type = other DNA
tgttgccttttaaaagtgccac

SEQ ID NO: 42903 - DNA, 22 bp, synthetic construct
  misc_feature 1..22: note = chemically synthesized
  source 1..22: mol_type = other DNA
ttgccttttaaaagtgccactt

SEQ ID NO: 42904 - DNA, 22 bp, synthetic construct
  misc_feature 1..22: note = chemically synthesized
  source 1..22: mol_type = other DNA
ccttttaaaagtgccactttct

SEQ ID NO: 42905 - DNA, 22 bp, synthetic construct
  misc_feature 1..22: note = chemically synthesized
  source 1..22: mol_type = other DNA
ttaaaagtgccactttctgctc

SEQ ID NO: 42906 - DNA, 22 bp, synthetic construct
  misc_feature 1..22: note = chemically synthesized
  source 1..22: mol_type = other DNA
taaaagtgccactttctgctcc

SEQ ID NO: 42907 - DNA, 22 bp, synthetic construct
  misc_feature 1..22: note = chemically synthesized
  source 1..22: mol_type = other DNA
aaaagtgccactttctgctcct

SEQ ID NO: 42908 - DNA, 22 bp, synthetic construct
  misc_feature 1..22: note = chemically synthesized
  source 1..22: mol_type = other DNA
aaagtgccactttctgctccta

SEQ ID NO: 42909 - DNA, 22 bp, synthetic construct
  misc_feature 1..22: note = chemically synthesized
  source 1..22: mol_type = other DNA
tctgctcctaaagtgaagtagt

SEQ ID NO: 42910 - DNA, 22 bp, synthetic construct
  misc_feature 1..22: note = chemically synthesized
  source 1..22: mol_type = other DNA
ctgctcctaaagtgaagtagta

SEQ ID NO: 42911 - DNA, 22 bp, synthetic construct
  misc_feature 1..22: note = chemically synthesized
  source 1..22: mol_type = other DNA
tgctcctaaagtgaagtagtac

SEQ ID NO: 42912 - DNA, 22 bp, synthetic construct
  misc_feature 1..22: note = chemically synthesized
  source 1..22: mol_type = other DNA
ctcctaaagtgaagtagtacgg

SEQ ID NO: 42913 - DNA, 22 bp, synthetic construct
  misc_feature 1..22: note = chemically synthesized
  source 1..22: mol_type = other DNA
ctaaagtgaagtagtacggcag

SEQ ID NO: 42914 - DNA, 22 bp, synthetic construct
  misc_feature 1..22: note = chemically synthesized
  source 1..22: mol_type = other DNA
aagtgaagtagtacggcaggac

SEQ ID NO: 42915 - DNA, 22 bp, synthetic construct
  misc_feature 1..22: note = chemically synthesized
  source 1..22: mol_type = other DNA
ctgcatttcttcccctaagcta

SEQ ID NO: 42916 - DNA, 22 bp, synthetic construct
  misc_feature 1..22: note = chemically synthesized
  source 1..22: mol_type = other DNA
catttcttcccctaagctagct

SEQ ID NO: 42917 - DNA, 22 bp, synthetic construct
  misc_feature 1..22: note = chemically synthesized
  source 1..22: mol_type = other DNA
cttcccctaagctagctttgga

SEQ ID NO: 42918 - DNA, 22 bp, synthetic construct
  misc_feature 1..22: note = chemically synthesized
  source 1..22: mol_type = other DNA
ttcccctaagctagctttggaa

SEQ ID NO: 42919 - DNA, 22 bp, synthetic construct
  misc_feature 1..22: note = chemically synthesized
  source 1..22: mol_type = other DNA
cccctaagctagctttggaagc

SEQ ID NO: 42920 - DNA, 22 bp, synthetic construct
  misc_feature 1..22: note = chemically synthesized
  source 1..22: mol_type = other DNA
ccctaagctagctttggaagca

SEQ ID NO: 42921 - DNA, 22 bp, synthetic construct
  misc_feature 1..22: note = chemically synthesized
  source 1..22: mol_type = other DNA
agctagctttggaagcaaatca

SEQ ID NO: 42922 - DNA, 22 bp, synthetic construct
  misc_feature 1..22: note = chemically synthesized
  source 1..22: mol_type = other DNA
gctttggaagcaaatcactttc

SEQ ID NO: 42923 - DNA, 22 bp, synthetic construct
  misc_feature 1..22: note = chemically synthesized
  source 1..22: mol_type = other DNA
tggaagcaaatcactttcttta

SEQ ID NO: 42924 - DNA, 22 bp, synthetic construct
  misc_feature 1..22: note = chemically synthesized
  source 1..22: mol_type = other DNA
ggaagcaaatcactttctttat

SEQ ID NO: 42925 - DNA, 22 bp, synthetic construct
  misc_feature 1..22: note = chemically synthesized
  source 1..22: mol_type = other DNA
gaagcaaatcactttctttata

SEQ ID NO: 42926 - DNA, 22 bp, synthetic construct
  misc_feature 1..22: note = chemically synthesized
  source 1..22: mol_type = other DNA
tctttataccagacttctctct

SEQ ID NO: 42927 - DNA, 22 bp, synthetic construct
  misc_feature 1..22: note = chemically synthesized
  source 1..22: mol_type = other DNA
ctttataccagacttctctctt

SEQ ID NO: 42928 - DNA, 22 bp, synthetic construct
  misc_feature 1..22: note = chemically synthesized
  source 1..22: mol_type = other DNA
tttataccagacttctctcttc

SEQ ID NO: 42929 - DNA, 22 bp, synthetic construct
  misc_feature 1..22: note = chemically synthesized
  source 1..22: mol_type = other DNA
tataccagacttctctcttctt

SEQ ID NO: 42930 - DNA, 22 bp, synthetic construct
  misc_feature 1..22: note = chemically synthesized
  source 1..22: mol_type = other DNA
ataccagacttctctcttctta

SEQ ID NO: 42931 - DNA, 22 bp, synthetic construct
  misc_feature 1..22: note = chemically synthesized
  source 1..22: mol_type = other DNA
taccagacttctctcttcttaa

SEQ ID NO: 42932 - DNA, 22 bp, synthetic construct
  misc_feature 1..22: note = chemically synthesized
  source 1..22: mol_type = other DNA
ctctcttcttaattggattctg

SEQ ID NO: 42933 - DNA, 22 bp, synthetic construct
  misc_feature 1..22: note = chemically synthesized
  source 1..22: mol_type = other DNA
tctcttcttaattggattctgc

SEQ ID NO: 42934 - DNA, 22 bp, synthetic construct
  misc_feature 1..22: note = chemically synthesized
  source 1..22: mol_type = other DNA
tcttcttaattggattctgcaa

SEQ ID NO: 42935 - DNA, 22 bp, synthetic construct
  misc_feature 1..22: note = chemically synthesized
  source 1..22: mol_type = other DNA
ttcttaattggattctgcaagt

SEQ ID NO: 42936 - DNA, 22 bp, synthetic construct
  misc_feature 1..22: note = chemically synthesized
  source 1..22: mol_type = other DNA
cttaattggattctgcaagtgg

SEQ ID NO: 42937 - DNA, 22 bp, synthetic construct
  misc_feature 1..22: note = chemically synthesized
  source 1..22: mol_type = other DNA
ttaattggattctgcaagtggc

SEQ ID NO: 42938 - DNA, 22 bp, synthetic construct
  misc_feature 1..22: note = chemically synthesized
  source 1..22: mol_type = other DNA
aattggattctgcaagtggcaa

SEQ ID NO: 42939 - DNA, 22 bp, synthetic construct
  misc_feature 1..22: note = chemically synthesized
  source 1..22: mol_type = other DNA
attggattctgcaagtggcaaa

SEQ ID NO: 42940 - DNA, 22 bp, synthetic construct
  misc_feature 1..22: note = chemically synthesized
  source 1..22: mol_type = other DNA
gattctgcaagtggcaaacaat

SEQ ID NO: 42941 - DNA, 22 bp, synthetic construct
  misc_feature 1..22: note = chemically synthesized
  source 1..22: mol_type = other DNA
tgcaagtggcaaacaattaacc

SEQ ID NO: 42942 - DNA, 22 bp, synthetic construct
  misc_feature 1..22: note = chemically synthesized
  source 1..22: mol_type = other DNA
caagtggcaaacaattaacctg

SEQ ID NO: 42943 - DNA, 22 bp, synthetic construct
  misc_feature 1..22: note = chemically synthesized
  source 1..22: mol_type = other DNA
acctgctcttcagttacattgg

SEQ ID NO: 42944 - DNA, 22 bp, synthetic construct
  misc_feature 1..22: note = chemically synthesized
  source 1..22: mol_type = other DNA
ctcttcagttacattggaatgt

SEQ ID NO: 42945 - DNA, 22 bp, synthetic construct
  misc_feature 1..22: note = chemically synthesized
  source 1..22: mol_type = other DNA
ttcagttacattggaatgtgtt

SEQ ID NO: 42946 - DNA, 22 bp, synthetic construct
  misc_feature 1..22: note = chemically synthesized
  source 1..22: mol_type = other DNA
cagttacattggaatgtgttta

SEQ ID NO: 42947 - DNA, 22 bp, synthetic construct
  misc_feature 1..22: note = chemically synthesized
  source 1..22: mol_type = other DNA
agttacattggaatgtgtttag

SEQ ID NO: 42948 - DNA, 22 bp, synthetic construct
  misc_feature 1..22: note = chemically synthesized
  source 1..22: mol_type = other DNA
cattggaatgtgtttagattta

SEQ ID NO: 42949 - DNA, 22 bp, synthetic construct
  misc_feature 1..22: note = chemically synthesized
  source 1..22: mol_type = other DNA
gaatgtgtttagatttattttt

SEQ ID NO: 42950 - DNA, 22 bp, synthetic construct
  misc_feature 1..22: note = chemically synthesized
  source 1..22: mol_type = other DNA
agatttattttttcaaatgttg

SEQ ID NO: 42951 - DNA, 22 bp, synthetic construct
  misc_feature 1..22: note = chemically synthesized
  source 1..22: mol_type = other DNA
gatttattttttcaaatgttgg

SEQ ID NO: 42952 - DNA, 22 bp, synthetic construct
  misc_feature 1..22: note = chemically synthesized
  source 1..22: mol_type = other DNA
attttttcaaatgttggaacaa

SEQ ID NO: 42953 - DNA, 22 bp, synthetic construct
  misc_feature 1..22: note = chemically synthesized
  source 1..22: mol_type = other DNA
ttttttcaaatgttggaacaaa

SEQ ID NO: 42954 - DNA, 22 bp, synthetic construct
  misc_feature 1..22: note = chemically synthesized
  source 1..22: mol_type = other DNA
tttcaaatgttggaacaaagat

SEQ ID NO: 42955 - DNA, 22 bp, synthetic construct
  misc_feature 1..22: note = chemically synthesized
  source 1..22: mol_type = other DNA
ttcaaatgttggaacaaagatg

SEQ ID NO: 42956 - DNA, 22 bp, synthetic construct
  misc_feature 1..22: note = chemically synthesized
  source 1..22: mol_type = other DNA
tcaaatgttggaacaaagatga

SEQ ID NO: 42957 - DNA, 22 bp, synthetic construct
  misc_feature 1..22: note = chemically synthesized
  source 1..22: mol_type = other DNA
caaatgttggaacaaagatgaa

SEQ ID NO: 42958 - DNA, 22 bp, synthetic construct
  misc_feature 1..22: note = chemically synthesized
  source 1..22: mol_type = other DNA
aaatgttggaacaaagatgaaa

SEQ ID NO: 42959 - DNA, 22 bp, synthetic construct
  misc_feature 1..22: note = chemically synthesized
  source 1..22: mol_type = other DNA
gaacaaagatgaaaaagtgaga

SEQ ID NO: 42960 - DNA, 22 bp, synthetic construct
  misc_feature 1..22: note = chemically synthesized
  source 1..22: mol_type = other DNA
gattttttcttggaaatctggc

SEQ ID NO: 42961 - DNA, 22 bp, synthetic construct
  misc_feature 1..22: note = chemically synthesized
  source 1..22: mol_type = other DNA
tttcttggaaatctggcttaaa

SEQ ID NO: 42962 - DNA, 22 bp, synthetic construct
  misc_feature 1..22: note = chemically synthesized
  source 1..22: mol_type = other DNA
ttcttggaaatctggcttaaat

SEQ ID NO: 42963 - DNA, 22 bp, synthetic construct
  misc_feature 1..22: note = chemically synthesized
  source 1..22: mol_type = other DNA
tcttggaaatctggcttaaatc

SEQ ID NO: 42964 - DNA, 22 bp, synthetic construct
  misc_feature 1..22: note = chemically synthesized
  source 1..22: mol_type = other DNA
cttggaaatctggcttaaatcc

SEQ ID NO: 42965 - DNA, 22 bp, synthetic construct
  misc_feature 1..22: note = chemically synthesized
  source 1..22: mol_type = other DNA
ttggaaatctggcttaaatcca

SEQ ID NO: 42966 - DNA, 22 bp, synthetic construct
  misc_feature 1..22: note = chemically synthesized
  source 1..22: mol_type = other DNA
ggaaatctggcttaaatccagg

SEQ ID NO: 42967 - DNA, 22 bp, synthetic construct
  misc_feature 1..22: note = chemically synthesized
  source 1..22: mol_type = other DNA
gaaatctggcttaaatccaggt

SEQ ID NO: 42968 - DNA, 22 bp, synthetic construct
  misc_feature 1..22: note = chemically synthesized
  source 1..22: mol_type = other DNA
gcttaaatccaggtttctttat

SEQ ID NO: 42969 - DNA, 22 bp, synthetic construct
  misc_feature 1..22: note = chemically synthesized
  source 1..22: mol_type = other DNA
aaatccaggtttctttatttcc

SEQ ID NO: 42970 - DNA, 22 bp, synthetic construct
  misc_feature 1..22: note = chemically synthesized
  source 1..22: mol_type = other DNA
aatccaggtttctttatttcct

SEQ ID NO: 42971 - DNA, 22 bp, synthetic construct
  misc_feature 1..22: note = chemically synthesized
  source 1..22: mol_type = other DNA
ctttatttccttgatttgggaa

SEQ ID NO: 42972 - DNA, 22 bp, synthetic construct
  misc_feature 1..22: note = chemically synthesized
  source 1..22: mol_type = other DNA
tttatttccttgatttgggaat

SEQ ID NO: 42973 - DNA, 22 bp, synthetic construct
  misc_feature 1..22: note = chemically synthesized
  source 1..22: mol_type = other DNA
tatttccttgatttgggaattt

SEQ ID NO: 42974 - DNA, 22 bp, synthetic construct
  misc_feature 1..22: note = chemically synthesized
  source 1..22: mol_type = other DNA
atttccttgatttgggaatttg

SEQ ID NO: 42975 - DNA, 22 bp, synthetic construct
  misc_feature 1..22: note = chemically synthesized
  source 1..22: mol_type = other DNA
tttccttgatttgggaatttgg

SEQ ID NO: 42976 - DNA, 22 bp, synthetic construct
  misc_feature 1..22: note = chemically synthesized
  source 1..22: mol_type = other DNA
ccttgatttgggaatttggtca

SEQ ID NO: 42977 - DNA, 22 bp, synthetic construct
  misc_feature 1..22: note = chemically synthesized
  source 1..22: mol_type = other DNA
cttgatttgggaatttggtcac

SEQ ID NO: 42978 - DNA, 22 bp, synthetic construct
  misc_feature 1..22: note = chemically synthesized
  source 1..22: mol_type = other DNA
gatttgggaatttggtcacgag

SEQ ID NO: 42979 - DNA, 22 bp, synthetic construct
  misc_feature 1..22: note = chemically synthesized
  source 1..22: mol_type = other DNA
atttgggaatttggtcacgaga

SEQ ID NO: 42980 - DNA, 22 bp, synthetic construct
  misc_feature 1..22: note = chemically synthesized
  source 1..22: mol_type = other DNA
gggaatttggtcacgagacaaa

SEQ ID NO: 42981 - DNA, 22 bp, synthetic construct
  misc_feature 1..22: note = chemically synthesized
  source 1..22: mol_type = other DNA
ggaatttggtcacgagacaaat

SEQ ID NO: 42982 - DNA, 22 bp, synthetic construct
  misc_feature 1..22: note = chemically synthesized
  source 1..22: mol_type = other DNA
ggtcacgagacaaataacatga

SEQ ID NO: 42983 - DNA, 22 bp, synthetic construct
  misc_feature 1..22: note = chemically synthesized
  source 1..22: mol_type = other DNA
gtcacgagacaaataacatgat

SEQ ID NO: 42984 - DNA, 22 bp, synthetic construct
  misc_feature 1..22: note = chemically synthesized
  source 1..22: mol_type = other DNA
tcctaagtctagatttctttgt

SEQ ID NO: 42985 - DNA, 22 bp, synthetic construct
  misc_feature 1..22: note = chemically synthesized
  source 1..22: mol_type = other DNA
cctaagtctagatttctttgtt

SEQ ID NO: 42986 - DNA, 22 bp, synthetic construct
  misc_feature 1..22: note = chemically synthesized
  source 1..22: mol_type = other DNA
ctaagtctagatttctttgttt

SEQ ID NO: 42987 - DNA, 22 bp, synthetic construct
  misc_feature 1..22: note = chemically synthesized
  source 1..22: mol_type = other DNA
agtctagatttctttgtttata

SEQ ID NO: 42988 - DNA, 22 bp, synthetic construct
  misc_feature 1..22: note = chemically synthesized
  source 1..22: mol_type = other DNA
gatttctttgtttataaaatgg

SEQ ID NO: 42989 - DNA, 22 bp, synthetic construct
  misc_feature 1..22: note = chemically synthesized
  source 1..22: mol_type = other DNA
ctttgtttataaaatggggatg

SEQ ID NO: 42990 - DNA, 22 bp, synthetic construct
  misc_feature 1..22: note = chemically synthesized
  source 1..22: mol_type = other DNA
tttgtttataaaatggggatga

SEQ ID NO: 42991 - DNA, 22 bp, synthetic construct
  misc_feature 1..22: note = chemically synthesized
  source 1..22: mol_type = other DNA
tgtttataaaatggggatgact

SEQ ID NO: 42992 - DNA, 22 bp, synthetic construct
  misc_feature 1..22: note = chemically synthesized
  source 1..22: mol_type = other DNA
gtttataaaatggggatgacta

SEQ ID NO: 42993 - DNA, 22 bp, synthetic construct
  misc_feature 1..22: note = chemically synthesized
  source 1..22: mol_type = other DNA
tttataaaatggggatgactat

SEQ ID NO: 42994 - DNA, 22 bp, synthetic construct
  misc_feature 1..22: note = chemically synthesized
  source 1..22: mol_type = other DNA
ataaaatggggatgactatgct

SEQ ID NO: 42995 - DNA, 22 bp, synthetic construct
  misc_feature 1..22: note = chemically synthesized
  source 1..22: mol_type = other DNA
taaaatggggatgactatgcta

SEQ ID NO: 42996 - DNA, 22 bp, synthetic construct
  misc_feature 1..22: note = chemically synthesized
  source 1..22: mol_type = other DNA
tgctaccctacctataccatga

SEQ ID NO: 42997 - DNA, 22 bp, synthetic construct
  misc_feature 1..22: note = chemically synthesized
  source 1..22: mol_type = other DNA
ccctacctataccatgagctaa

SEQ ID NO: 42998 - DNA, 22 bp, synthetic construct
  misc_feature 1..22: note = chemically synthesized
  source 1..22: mol_type = other DNA
cctataccatgagctaaataag

SEQ ID NO: 42999 - DNA, 22 bp, synthetic construct
  misc_feature 1..22: note = chemically synthesized
  source 1..22: mol_type = other DNA
taccatgagctaaataagctag

SEQ ID NO: 43000 - DNA, 22 bp, synthetic construct
  misc_feature 1..22: note = chemically synthesized
  source 1..22: mol_type = other DNA
aataagctagtatttgtaaagg

SEQ ID NO: 43001 - DNA, 22 bp, synthetic construct
  misc_feature 1..22: note = chemically synthesized
  source 1..22: mol_type = other DNA
gtatttgtaaaggacacacact

SEQ ID NO: 43002 - DNA, 22 bp, synthetic construct
  misc_feature 1..22: note = chemically synthesized
  source 1..22: mol_type = other DNA
gtaaaggacacacacttacatt

SEQ ID NO: 43003 - DNA, 22 bp, synthetic construct
  misc_feature 1..22: note = chemically synthesized
  source 1..22: mol_type = other DNA
taaaggacacacacttacattc

SEQ ID NO: 43004 - DNA, 22 bp, synthetic construct
  misc_feature 1..22: note = chemically synthesized
  source 1..22: mol_type = other DNA
acattcacaatcacacacggtg

SEQ ID NO: 43005 - DNA, 22 bp, synthetic construct
  misc_feature 1..22: note = chemically synthesized
  source 1..22: mol_type = other DNA
cattcacaatcacacacggtgt

SEQ ID NO: 43006 - DNA, 22 bp, synthetic construct
  misc_feature 1..22: note = chemically synthesized
  source 1..22: mol_type = other DNA
acaatcacacacggtgtgtatg

SEQ ID NO: 43007 - DNA, 22 bp, synthetic construct
  misc_feature 1..22: note = chemically synthesized
  source 1..22: mol_type = other DNA
acccactcaacaaataccctga

SEQ ID NO: 43008 - DNA, 22 bp, synthetic construct
  misc_feature 1..22: note = chemically synthesized
  source 1..22: mol_type = other DNA
aacaaataccctgagtatttgt

SEQ ID NO: 43009 - DNA, 22 bp, synthetic construct
  misc_feature 1..22: note = chemically synthesized
  source 1..22: mol_type = other DNA
agtatttgttgaatcattatat

SEQ ID NO: 43010 - DNA, 22 bp, synthetic construct
  misc_feature 1..22: note = chemically synthesized
  source 1..22: mol_type = other DNA
gttgaatcattatatgcgtata

SEQ ID NO: 43011 - DNA, 22 bp, synthetic construct
  misc_feature 1..22: note = chemically synthesized
  source 1..22: mol_type = other DNA
ttgaatcattatatgcgtatat

SEQ ID NO: 43012 - DNA, 22 bp, synthetic construct
  misc_feature 1..22: note = chemically synthesized
  source 1..22: mol_type = other DNA
aatcattatatgcgtatatcat

SEQ ID NO: 43013 - DNA, 22 bp, synthetic construct
  misc_feature 1..22: note = chemically synthesized
  source 1..22: mol_type = other DNA
tatgcgtatatcatctggcaaa

SEQ ID NO: 43014 - DNA, 22 bp, synthetic construct
  misc_feature 1..22: note = chemically synthesized
  source 1..22: mol_type = other DNA
gcaaatggatgtgtataatttc

SEQ ID NO: 43015 - DNA, 22 bp, synthetic construct
  misc_feature 1..22: note = chemically synthesized
  source 1..22: mol_type = other DNA
ctccagggataagaagcaaatg

SEQ ID NO: 43016 - DNA, 22 bp, synthetic construct
  misc_feature 1..22: note = chemically synthesized
  source 1..22: mol_type = other DNA
tccagggataagaagcaaatgt

SEQ ID NO: 43017 - DNA, 22 bp, synthetic construct
  misc_feature 1..22: note = chemically synthesized
  source 1..22: mol_type = other DNA
cagggataagaagcaaatgtat

SEQ ID NO: 43018 - DNA, 22 bp, synthetic construct
  misc_feature 1..22: note = chemically synthesized
  source 1..22: mol_type = other DNA
actcaggccataacaaagagag

SEQ ID NO: 43019 - DNA, 22 bp, synthetic construct
  misc_feature 1..22: note = chemically synthesized
  source 1..22: mol_type = other DNA
ctcaggccataacaaagagaga

SEQ ID NO: 43020 - DNA, 22 bp, synthetic construct
  misc_feature 1..22: note = chemically synthesized
  source 1..22: mol_type = other DNA
aggccataacaaagagagaaat

SEQ ID NO: 43021 - DNA, 22 bp, synthetic construct
  misc_feature 1..22: note = chemically synthesized
  source 1..22: mol_type = other DNA
agtcccactccatgaacaggtc

SEQ ID NO: 43022 - DNA, 22 bp, synthetic construct
  misc_feature 1..22: note = chemically synthesized
  source 1..22: mol_type = other DNA
catgaacaggtcaaggaaccaa

SEQ ID NO: 43023 - DNA, 22 bp, synthetic construct
  misc_feature 1..22: note = chemically synthesized
  source 1..22: mol_type = other DNA
aaagagttatttcattgtttca

SEQ ID NO: 43024 - DNA, 22 bp, synthetic construct
  misc_feature 1..22: note = chemically synthesized
  source 1..22: mol_type = other DNA
tttcattgtttcaacttgctag

SEQ ID NO: 43025 - DNA, 22 bp, synthetic construct
  misc_feature 1..22: note = chemically synthesized
  source 1..22: mol_type = other DNA
cattgtttcaacttgctagtga

SEQ ID NO: 43026 - DNA, 22 bp, synthetic construct
  misc_feature 1..22: note = chemically synthesized
  source 1..22: mol_type = other DNA
attgtttcaacttgctagtgag

SEQ ID NO: 43027 - DNA, 22 bp, synthetic construct
  misc_feature 1..22: note = chemically synthesized
  source 1..22: mol_type = other DNA
tttcaacttgctagtgagggga

SEQ ID NO: 43028 - DNA, 22 bp, synthetic construct
  misc_feature 1..22: note = chemically synthesized
  source 1..22: mol_type = other DNA
caacttgctagtgaggggagca

SEQ ID NO: 43029 - DNA, 22 bp, synthetic construct
  misc_feature 1..22: note = chemically synthesized
  source 1..22: mol_type = other DNA
aacttgctagtgaggggagcat

SEQ ID NO: 43030 - DNA, 22 bp, synthetic construct
  misc_feature 1..22: note = chemically synthesized
  source 1..22: mol_type = other DNA
gctagtgaggggagcatggcac

SEQ ID NO: 43031 - DNA, 22 bp, synthetic construct
  misc_feature 1..22: note = chemically synthesized
  source 1..22: mol_type = other DNA
ctagtgaggggagcatggcacc

SEQ ID NO: 43032 - DNA, 22 bp, synthetic construct
  misc_feature 1..22: note = chemically synthesized
  source 1..22: mol_type = other DNA
gtgaggggagcatggcacctga

SEQ ID NO: 43033 - DNA, 22 bp, synthetic construct
  misc_feature 1..22: note = chemically synthesized
  source 1..22: mol_type = other DNA
aacagagatgatataaattaat

SEQ ID NO: 43034 - DNA, 22 bp, synthetic construct
  misc_feature 1..22: note = chemically synthesized
  source 1..22: mol_type = other DNA
atgaaactgagaaccaagcgaa

SEQ ID NO: 43035 - DNA, 22 bp, synthetic construct
  misc_feature 1..22: note = chemically synthesized
  source 1..22: mol_type = other DNA
agaaccaagcgaagagcttagc

SEQ ID NO: 43036 - DNA, 22 bp, synthetic construct
  misc_feature 1..22: note = chemically synthesized
  source 1..22: mol_type = other DNA
agccatcctttgcatagttagc

SEQ ID NO: 43037 - DNA, 22 bp, synthetic construct
  misc_feature 1..22: note = chemically synthesized
  source 1..22: mol_type = other DNA
gccatcctttgcatagttagct

SEQ ID NO: 43038 - DNA, 22 bp, synthetic construct
  misc_feature 1..22: note = chemically synthesized
  source 1..22: mol_type = other DNA
tgcatagttagctacaatggct

SEQ ID NO: 43039 - DNA, 22 bp, synthetic construct
  misc_feature 1..22: note = chemically synthesized
  source 1..22: mol_type = other DNA
gcatagttagctacaatggcta

SEQ ID NO: 43040 - DNA, 22 bp, synthetic construct
  misc_feature 1..22: note = chemically synthesized
  source 1..22: mol_type = other DNA
catagttagctacaatggctat

SEQ ID NO: 43041 - DNA, 22 bp, synthetic construct
  misc_feature 1..22: note = chemically synthesized
  source 1..22: mol_type = other DNA
gctacaatggctatttattttt

SEQ ID NO: 43042 - DNA, 22 bp, synthetic construct
  misc_feature 1..22: note = chemically synthesized
  source 1..22: mol_type = other DNA
caatggctatttatttttcagc

SEQ ID NO: 43043 - DNA, 22 bp, synthetic construct
  misc_feature 1..22: note = chemically synthesized
  source 1..22: mol_type = other DNA
tttatttttcagccagactggc

SEQ ID NO: 43044 - DNA, 22 bp, synthetic construct
  misc_feature 1..22: note = chemically synthesized
  source 1..22: mol_type = other DNA
atttttcagccagactggccat

SEQ ID NO: 43045 - DNA, 22 bp, synthetic construct
  misc_feature 1..22: note = chemically synthesized
  source 1..22: mol_type = other DNA
tttttcagccagactggccatc

SEQ ID NO: 43046 - DNA, 22 bp, synthetic construct
  misc_feature 1..22: note = chemically synthesized
  source 1..22: mol_type = other DNA
ttcagccagactggccatcatg

SEQ ID NO: 43047 - DNA, 22 bp, synthetic construct
  misc_feature 1..22: note = chemically synthesized
  source 1..22: mol_type = other DNA
tcagccagactggccatcatgt

SEQ ID NO: 43048 - DNA, 22 bp, synthetic construct
  misc_feature 1..22: note = chemically synthesized
  source 1..22: mol_type = other DNA
cagccagactggccatcatgta

SEQ ID NO: 43049 - DNA, 22 bp, synthetic construct
  misc_feature 1..22: note = chemically synthesized
  source 1..22: mol_type = other DNA
agccagactggccatcatgtag

SEQ ID NO: 43050 - DNA, 22 bp, synthetic construct
  misc_feature 1..22: note = chemically synthesized
  source 1..22: mol_type = other DNA
gccatcatgtaggcacactctt

SEQ ID NO: 43051 - DNA, 22 bp, synthetic construct
  misc_feature 1..22: note = chemically synthesized
  source 1..22: mol_type = other DNA
ttttagattagaaaaatcaacc

SEQ ID NO: 43052 - DNA, 22 bp, synthetic construct
  misc_feature 1..22: note = chemically synthesized
  source 1..22: mol_type = other DNA
ttagattagaaaaatcaaccat

SEQ ID NO: 43053 - DNA, 22 bp, synthetic construct
  misc_feature 1..22: note = chemically synthesized
  source 1..22: mol_type = other DNA
tagattagaaaaatcaaccatt

SEQ ID NO: 43054 - DNA, 22 bp, synthetic construct
  misc_feature 1..22: note = chemically synthesized
  source 1..22: mol_type = other DNA
agattagaaaaatcaaccatta

SEQ ID NO: 43055 - DNA, 22 bp, synthetic construct
  misc_feature 1..22: note = chemically synthesized
  source 1..22: mol_type = other DNA
gattagaaaaatcaaccattat

SEQ ID NO: 43056 - DNA, 22 bp, synthetic construct
  misc_feature 1..22: note = chemically synthesized
  source 1..22: mol_type = other DNA
gaaaaatcaaccattatttttt

SEQ ID NO: 43057 - DNA, 22 bp, synthetic construct
  misc_feature 1..22: note = chemically synthesized
  source 1..22: mol_type = other DNA
ttttttctgcccattcattcca

SEQ ID NO: 43058 - DNA, 22 bp, synthetic construct
  misc_feature 1..22: note = chemically synthesized
  source 1..22: mol_type = other DNA
tttctgcccattcattccagca

SEQ ID NO: 43059 - DNA, 22 bp, synthetic construct
  misc_feature 1..22: note = chemically synthesized
  source 1..22: mol_type = other DNA
ttctgcccattcattccagcac

SEQ ID NO: 43060 - DNA, 22 bp, synthetic construct
  misc_feature 1..22: note = chemically synthesized
  source 1..22: mol_type = other DNA
tctgcccattcattccagcacc

SEQ ID NO: 43061 - DNA, 22 bp, synthetic construct
  misc_feature 1..22: note = chemically synthesized
  source 1..22: mol_type = other DNA
ctgcccattcattccagcaccg

SEQ ID NO: 43062 - DNA, 22 bp, synthetic construct
  misc_feature 1..22: note = chemically synthesized
  source 1..22: mol_type = other DNA
tgcccattcattccagcaccgt

SEQ ID NO: 43063 - DNA, 22 bp, synthetic construct
  misc_feature 1..22: note = chemically synthesized
  source 1..22: mol_type = other DNA
cccattcattccagcaccgtga

SEQ ID NO: 43064 - DNA, 22 bp, synthetic construct
  misc_feature 1..22: note = chemically synthesized
  source 1..22: mol_type = other DNA
attccagcaccgtgacagtctt

SEQ ID NO: 43065 - DNA, 22 bp, synthetic construct
  misc_feature 1..22: note = chemically synthesized
  source 1..22: mol_type = other DNA
cagcaccgtgacagtcttcacg

SEQ ID NO: 43066 - DNA, 22 bp, synthetic construct
  misc_feature 1..22: note = chemically synthesized
  source 1..22: mol_type = other DNA
cacggggaaattaaacttattt

SEQ ID NO: 43067 - DNA, 22 bp, synthetic construct
  misc_feature 1..22: note = chemically synthesized
  source 1..22: mol_type = other DNA
acggggaaattaaacttatttt

SEQ ID NO: 43068 - DNA, 22 bp, synthetic construct
  misc_feature 1..22: note = chemically synthesized
  source 1..22: mol_type = other DNA
aacttatttttttaagaatttt

SEQ ID NO: 43069 - DNA, 22 bp, synthetic construct
  misc_feature 1..22: note = chemically synthesized
  source 1..22: mol_type = other DNA
atttttttaagaatttttcaat

SEQ ID NO: 43070 - DNA, 22 bp, synthetic construct
  misc_feature 1..22: note = chemically synthesized
  source 1..22: mol_type = other DNA
tttttttaagaatttttcaatc

SEQ ID NO: 43071 - DNA, 22 bp, synthetic construct
  misc_feature 1..22: note = chemically synthesized
  source 1..22: mol_type = other DNA
ttttaagaatttttcaatcata

SEQ ID NO: 43072 - DNA, 22 bp, synthetic construct
  misc_feature 1..22: note = chemically synthesized
  source 1..22: mol_type = other DNA
tttaagaatttttcaatcatat

SEQ ID NO: 43073 - DNA, 22 bp, synthetic construct
  misc_feature 1..22: note = chemically synthesized
  source 1..22: mol_type = other DNA
ttaagaatttttcaatcatata

SEQ ID NO: 43074 - DNA, 22 bp, synthetic construct
  misc_feature 1..22: note = chemically synthesized
  source 1..22: mol_type = other DNA
taagaatttttcaatcatatac

SEQ ID NO: 43075 - DNA, 22 bp, synthetic construct
  misc_feature 1..22: note = chemically synthesized
  source 1..22: mol_type = other DNA
aagaatttttcaatcatataca

SEQ ID NO: 43076 - DNA, 22 bp, synthetic construct
  misc_feature 1..22: note = chemically synthesized
  source 1..22: mol_type = other DNA
agaatttttcaatcatatacaa

SEQ ID NO: 43077 - DNA, 22 bp, synthetic construct
  misc_feature 1..22: note = chemically synthesized
  source 1..22: mol_type = other DNA
ttcaatcatatacaagattttg

SEQ ID NO: 43078 - DNA, 22 bp, synthetic construct
  misc_feature 1..22: note = chemically synthesized
  source 1..22: mol_type = other DNA
tcaatcatatacaagattttga

SEQ ID NO: 43079 - DNA, 22 bp, synthetic construct
  misc_feature 1..22: note = chemically synthesized
  source 1..22: mol_type = other DNA
caatcatatacaagattttgaa

SEQ ID NO: 43080 - DNA, 22 bp, synthetic construct
  misc_feature 1..22: note = chemically synthesized
  source 1..22: mol_type = other DNA
aatcatatacaagattttgaac

SEQ ID NO: 43081 - DNA, 22 bp, synthetic construct
  misc_feature 1..22: note = chemically synthesized
  source 1..22: mol_type = other DNA
tgaactgggaatttcatgaatc

SEQ ID NO: 43082 - DNA, 22 bp, synthetic construct
  misc_feature 1..22: note = chemically synthesized
  source 1..22: mol_type = other DNA
gaactgggaatttcatgaatca

SEQ ID NO: 43083 - DNA, 22 bp, synthetic construct
  misc_feature 1..22: note = chemically synthesized
  source 1..22: mol_type = other DNA
aactgggaatttcatgaatcaa

SEQ ID NO: 43084 - DNA, 22 bp, synthetic construct
  misc_feature 1..22: note = chemically synthesized
  source 1..22: mol_type = other DNA
ggaatttcatgaatcaaaaatt

SEQ ID NO: 43085 - DNA, 22 bp, synthetic construct
  misc_feature 1..22: note = chemically synthesized
  source 1..22: mol_type = other DNA
catgaatcaaaaattaaatgaa

SEQ ID NO: 43086 - DNA, 22 bp, synthetic construct
  misc_feature 1..22: note = chemically synthesized
  source 1..22: mol_type = other DNA
atgaatcaaaaattaaatgaat

SEQ ID NO: 43087 - DNA, 22 bp, synthetic construct
  misc_feature 1..22: note = chemically synthesized
  source 1..22: mol_type = other DNA
aatgaattgcacataaagccat

SEQ ID NO: 43088 - DNA, 22 bp, synthetic construct
  misc_feature 1..22: note = chemically synthesized
  source 1..22: mol_type = other DNA
cacataaagccatggcatatgt

SEQ ID NO: 43089 - DNA, 22 bp, synthetic construct
  misc_feature 1..22: note = chemically synthesized
  source 1..22: mol_type = other DNA
ttactacattgtgggagaaaaa

SEQ ID NO: 43090 - DNA, 22 bp, synthetic construct
  misc_feature 1..22: note = chemically synthesized
  source 1..22: mol_type = other DNA
tactacattgtgggagaaaaaa

SEQ ID NO: 43091 - DNA, 22 bp, synthetic construct
  misc_feature 1..22: note = chemically synthesized
  source 1..22: mol_type = other DNA
actacattgtgggagaaaaaat

SEQ ID NO: 43092 - DNA, 22 bp, synthetic construct
  misc_feature 1..22: note = chemically synthesized
  source 1..22: mol_type = other DNA
ctacattgtgggagaaaaaata

SEQ ID NO: 43093 - DNA, 22 bp, synthetic construct
  misc_feature 1..22: note = chemically synthesized
  source 1..22: mol_type = other DNA
cattgtgggagaaaaaataatt

SEQ ID NO: 43094 - DNA, 22 bp, synthetic construct
  misc_feature 1..22: note = chemically synthesized
  source 1..22: mol_type = other DNA
tgggagaaaaaataattcttat

SEQ ID NO: 43095 - DNA, 22 bp, synthetic construct
  misc_feature 1..22: note = chemically synthesized
  source 1..22: mol_type = other DNA
ttataatttaaaaaaactatgt

SEQ ID NO: 43096 - DNA, 22 bp, synthetic construct
  misc_feature 1..22: note = chemically synthesized
  source 1..22: mol_type = other DNA
ataatttaaaaaaactatgtct

SEQ ID NO: 43097 - DNA, 22 bp, synthetic construct
  misc_feature 1..22: note = chemically synthesized
  source 1..22: mol_type = other DNA
taatttaaaaaaactatgtctt

SEQ ID NO: 43098 - DNA, 22 bp, synthetic construct
  misc_feature 1..22: note = chemically synthesized
  source 1..22: mol_type = other DNA
aaaaaaactatgtcttacctga

SEQ ID NO: 43099 - DNA, 22 bp, synthetic construct
  misc_feature 1..22: note = chemically synthesized
  source 1..22: mol_type = other DNA
aaaaaactatgtcttacctgat

SEQ ID NO: 43100 - DNA, 22 bp, synthetic construct
  misc_feature 1..22: note = chemically synthesized
  source 1..22: mol_type = other DNA
tgtcttacctgatttcagaaat

SEQ ID NO: 43101 - DNA, 22 bp, synthetic construct
  misc_feature 1..22: note = chemically synthesized
  source 1..22: mol_type = other DNA
acctgatttcagaaataaaaga

SEQ ID NO: 43102 - DNA, 22 bp, synthetic construct
  misc_feature 1..22: note = chemically synthesized
  source 1..22: mol_type = other DNA
cctgatttcagaaataaaagaa

SEQ ID NO: 43103 - DNA, 22 bp, synthetic construct
  misc_feature 1..22: note = chemically synthesized
  source 1..22: mol_type = other DNA
atttcagaaataaaagaagtag

SEQ ID NO: 43104 - DNA, 22 bp, synthetic construct
  misc_feature 1..22: note = chemically synthesized
  source 1..22: mol_type = other DNA
cagaaataaaagaagtagaaga

SEQ ID NO: 43105 - DNA, 22 bp, synthetic construct
  misc_feature 1..22: note = chemically synthesized
  source 1..22: mol_type = other DNA
agaaataaaagaagtagaagaa

SEQ ID NO: 43106 - DNA, 22 bp, synthetic construct
  misc_feature 1..22: note = chemically synthesized
  source 1..22: mol_type = other DNA
ccttatgttccattttgggact

SEQ ID NO: 43107 - DNA, 22 bp, synthetic construct
  misc_feature 1..22: note = chemically synthesized
  source 1..22: mol_type = other DNA
cttatgttccattttgggactg

SEQ ID NO: 43108 - DNA, 22 bp, synthetic construct
  misc_feature 1..22: note = chemically synthesized
  source 1..22: mol_type = other DNA
atgttccattttgggactggcc

SEQ ID NO: 43109 - DNA, 22 bp, synthetic construct
  misc_feature 1..22: note = chemically synthesized
  source 1..22: mol_type = other DNA
tgttccattttgggactggcca

SEQ ID NO: 43110 - DNA, 22 bp, synthetic construct
  misc_feature 1..22: note = chemically synthesized
  source 1..22: mol_type = other DNA
cattttgggactggccagcagt

SEQ ID NO: 43111 - DNA, 22 bp, synthetic construct
  misc_feature 1..22: note = chemically synthesized
  source 1..22: mol_type = other DNA
tgggactggccagcagtgccca

SEQ ID NO: 43112 - DNA, 22 bp, synthetic construct
  misc_feature 1..22: note = chemically synthesized
  source 1..22: mol_type = other DNA
gggactggccagcagtgcccag

SEQ ID NO: 43113 - DNA, 22 bp, synthetic construct
  misc_feature 1..22: note = chemically synthesized
  source 1..22: mol_type = other DNA
ggactggccagcagtgcccaga

SEQ ID NO: 43114 - DNA, 22 bp, synthetic construct
  misc_feature 1..22: note = chemically synthesized
  source 1..22: mol_type = other DNA
gccagcagtgcccagaaagtgt

SEQ ID NO: 43115 - DNA, 22 bp, synthetic construct
  misc_feature 1..22: note = chemically synthesized
  source 1..22: mol_type = other DNA
ttgacttacatgagagtaaacg

SEQ ID NO: 43116 - DNA, 22 bp, synthetic construct
  misc_feature 1..22: note = chemically synthesized
  source 1..22: mol_type = other DNA
acttacatgagagtaaacgcac

SEQ ID NO: 43117 - DNA, 22 bp, synthetic construct
  misc_feature 1..22: note = chemically synthesized
  source 1..22: mol_type = other DNA
acatgagagtaaacgcacccac

SEQ ID NO: 43118 - DNA, 22 bp, synthetic construct
  misc_feature 1..22: note = chemically synthesized
  source 1..22: mol_type = other DNA
catgagagtaaacgcacccaca

SEQ ID NO: 43119 - DNA, 22 bp, synthetic construct
  misc_feature 1..22: note = chemically synthesized
  source 1..22: mol_type = other DNA
agttaatgattctctcagagac

SEQ ID NO: 43120 - DNA, 22 bp, synthetic construct
  misc_feature 1..22: note = chemically synthesized
  source 1..22: mol_type = other DNA
atgattctctcagagacccatg

SEQ ID NO: 43121 - DNA, 22 bp, synthetic construct
  misc_feature 1..22: note = chemically synthesized
  source 1..22: mol_type = other DNA
tctcagagacccatgccactgg

SEQ ID NO: 43122 - DNA, 22 bp, synthetic construct
  misc_feature 1..22: note = chemically synthesized
  source 1..22: mol_type = other DNA
tcagagacccatgccactggct

SEQ ID NO: 43123 - DNA, 22 bp, synthetic construct
  misc_feature 1..22: note = chemically synthesized
  source 1..22: mol_type = other DNA
agagacccatgccactggctca

SEQ ID NO: 43124 - DNA, 22 bp, synthetic construct
  misc_feature 1..22: note = chemically synthesized
  source 1..22: mol_type = other DNA
gctcagcagggttcaaacatta

SEQ ID NO: 43125 - DNA, 22 bp, synthetic construct
  misc_feature 1..22: note = chemically synthesized
  source 1..22: mol_type = other DNA
agcagggttcaaacattacctt

SEQ ID NO: 43126 - DNA, 22 bp, synthetic construct
  misc_feature 1..22: note = chemically synthesized
  source 1..22: mol_type = other DNA
aaacattaccttgaatatagag

SEQ ID NO: 43127 - DNA, 22 bp, synthetic construct
  misc_feature 1..22: note = chemically synthesized
  source 1..22: mol_type = other DNA
ccttgaatatagagtcttataa

SEQ ID NO: 43128 - DNA, 22 bp, synthetic construct
  misc_feature 1..22: note = chemically synthesized
  source 1..22: mol_type = other DNA
gaatatagagtcttataaaata

SEQ ID NO: 43129 - DNA, 22 bp, synthetic construct
  misc_feature 1..22: note = chemically synthesized
  source 1..22: mol_type = other DNA
aatatagagtcttataaaatat

SEQ ID NO: 43130 - DNA, 22 bp, synthetic construct
  misc_feature 1..22: note = chemically synthesized
  source 1..22: mol_type = other DNA
ataaaatatttgagagtgcaat

SEQ ID NO: 43131 - DNA, 22 bp, synthetic construct
  misc_feature 1..22: note = chemically synthesized
  source 1..22: mol_type = other DNA
taaaatatttgagagtgcaatg

SEQ ID NO: 43132 - DNA, 22 bp, synthetic construct
  misc_feature 1..22: note = chemically synthesized
  source 1..22: mol_type = other DNA
gagagtgcaatgtcaatagatg

SEQ ID NO: 43133 - DNA, 22 bp, synthetic construct
  misc_feature 1..22: note = chemically synthesized
  source 1..22: mol_type = other DNA
agagtgcaatgtcaatagatgc

SEQ ID NO: 43134 - DNA, 22 bp, synthetic construct
  misc_feature 1..22: note = chemically synthesized
  source 1..22: mol_type = other DNA
ggaagtggtgaaagccatttcc

SEQ ID NO: 43135 - DNA, 22 bp, synthetic construct
  misc_feature 1..22: note = chemically synthesized
  source 1..22: mol_type = other DNA
cccccctcagctgctccacatt

SEQ ID NO: 43136 - DNA, 22 bp, synthetic construct
  misc_feature 1..22: note = chemically synthesized
  source 1..22: mol_type = other DNA
ccccctcagctgctccacattg

SEQ ID NO: 43137 - DNA, 22 bp, synthetic construct
  misc_feature 1..22: note = chemically synthesized
  source 1..22: mol_type = other DNA
agctgctccacattgcctttat

SEQ ID NO: 43138 - DNA, 22 bp, synthetic construct
  misc_feature 1..22: note = chemically synthesized
  source 1..22: mol_type = other DNA
ctccacattgcctttatgtctc

SEQ ID NO: 43139 - DNA, 22 bp, synthetic construct
  misc_feature 1..22: note = chemically synthesized
  source 1..22: mol_type = other DNA
cacattgcctttatgtctcctt

SEQ ID NO: 43140 - DNA, 22 bp, synthetic construct
  misc_feature 1..22: note = chemically synthesized
  source 1..22: mol_type = other DNA
cctttatgtctccttactcctt

SEQ ID NO: 43141 - DNA, 22 bp, synthetic construct
  misc_feature 1..22: note = chemically synthesized
  source 1..22: mol_type = other DNA
tatgtctccttactccttccct

SEQ ID NO: 43142 - DNA, 22 bp, synthetic construct
  misc_feature 1..22: note = chemically synthesized
  source 1..22: mol_type = other DNA
atgtctccttactccttccctc

SEQ ID NO: 43143 - DNA, 22 bp, synthetic construct
  misc_feature 1..22: note = chemically synthesized
  source 1..22: mol_type = other DNA
tgtctccttactccttccctca

SEQ ID NO: 43144 - DNA, 22 bp, synthetic construct
  misc_feature 1..22: note = chemically synthesized
  source 1..22: mol_type = other DNA
cttactccttccctcaccccta

SEQ ID NO: 43145 - DNA, 22 bp, synthetic construct
  misc_feature 1..22: note = chemically synthesized
  source 1..22: mol_type = other DNA
actccttccctcacccctagac

SEQ ID NO: 43146 - DNA, 22 bp, synthetic construct
  misc_feature 1..22: note = chemically synthesized
  source 1..22: mol_type = other DNA
ctccttccctcacccctagacc

SEQ ID NO: 43147 - DNA, 22 bp, synthetic construct
  misc_feature 1..22: note = chemically synthesized
  source 1..22: mol_type = other DNA
cttccctcacccctagaccttc

SEQ ID NO: 43148 - DNA, 22 bp, synthetic construct
  misc_feature 1..22: note = chemically synthesized
  source 1..22: mol_type = other DNA
ccctcacccctagaccttcatc

SEQ ID NO: 43149 - DNA, 22 bp, synthetic construct
  misc_feature 1..22: note = chemically synthesized
  source 1..22: mol_type = other DNA
cctcacccctagaccttcatct

SEQ ID NO: 43150 - DNA, 22 bp, synthetic construct
  misc_feature 1..22: note = chemically synthesized
  source 1..22: mol_type = other DNA
acccctagaccttcatctttcc

SEQ ID NO: 43151 - DNA, 22 bp, synthetic construct
  misc_feature 1..22: note = chemically synthesized
  source 1..22: mol_type = other DNA
gaccttcatctttcctgattag

SEQ ID NO: 43152 - DNA, 22 bp, synthetic construct
  misc_feature 1..22: note = chemically synthesized
  source 1..22: mol_type = other DNA
catctttcctgattagtcttgt

SEQ ID NO: 43153 - DNA, 22 bp, synthetic construct
  misc_feature 1..22: note = chemically synthesized
  source 1..22: mol_type = other DNA
atctttcctgattagtcttgtt

SEQ ID NO: 43154 - DNA, 22 bp, synthetic construct
  misc_feature 1..22: note = chemically synthesized
  source 1..22: mol_type = other DNA
tcctgattagtcttgtttcctc

SEQ ID NO: 43155 - DNA, 22 bp, synthetic construct
  misc_feature 1..22: note = chemically synthesized
  source 1..22: mol_type = other DNA
cctgattagtcttgtttcctcc

SEQ ID NO: 43156 - DNA, 22 bp, synthetic construct
  misc_feature 1..22: note = chemically synthesized
  source 1..22: mol_type = other DNA
ctgattagtcttgtttcctccc

SEQ ID NO: 43157 - DNA, 22 bp, synthetic construct
  misc_feature 1..22: note = chemically synthesized
  source 1..22: mol_type = other DNA
attagtcttgtttcctcccctc

SEQ ID NO: 43158 - DNA, 22 bp, synthetic construct
  misc_feature 1..22: note = chemically synthesized
  source 1..22: mol_type = other DNA
gtcttgtttcctcccctcttct

SEQ ID NO: 43159 - DNA, 22 bp, synthetic construct
  misc_feature 1..22: note = chemically synthesized
  source 1..22: mol_type = other DNA
gtttcctcccctcttctttcat

SEQ ID NO: 43160 - DNA, 22 bp, synthetic construct
  misc_feature 1..22: note = chemically synthesized
  source 1..22: mol_type = other DNA
tttcctcccctcttctttcatt

SEQ ID NO: 43161 - DNA, 22 bp, synthetic construct
  misc_feature 1..22: note = chemically synthesized
  source 1..22: mol_type = other DNA
cctcccctcttctttcattctc

SEQ ID NO: 43162 - DNA, 22 bp, synthetic construct
  misc_feature 1..22: note = chemically synthesized
  source 1..22: mol_type = other DNA
ctcccctcttctttcattctct

SEQ ID NO: 43163 - DNA, 22 bp, synthetic construct
  misc_feature 1..22: note = chemically synthesized
  source 1..22: mol_type = other DNA
ccctcttctttcattctctttc

SEQ ID NO: 43164 - DNA, 22 bp, synthetic construct
  misc_feature 1..22: note = chemically synthesized
  source 1..22: mol_type = other DNA
ttctttcattctctttcttttg

SEQ ID NO: 43165 - DNA, 22 bp, synthetic construct
  misc_feature 1..22: note = chemically synthesized
  source 1..22: mol_type = other DNA
ctttcattctctttcttttgga

SEQ ID NO: 43166 - DNA, 22 bp, synthetic construct
  misc_feature 1..22: note = chemically synthesized
  source 1..22: mol_type = other DNA
tttcattctctttcttttggat

SEQ ID NO: 43167 - DNA, 22 bp, synthetic construct
  misc_feature 1..22: note = chemically synthesized
  source 1..22: mol_type = other DNA
tcattctctttcttttggataa

SEQ ID NO: 43168 - DNA, 22 bp, synthetic construct
  misc_feature 1..22: note = chemically synthesized
  source 1..22: mol_type = other DNA
cattctctttcttttggataaa

SEQ ID NO: 43169 - DNA, 22 bp, synthetic construct
  misc_feature 1..22: note = chemically synthesized
  source 1..22: mol_type = other DNA
attctctttcttttggataaaa

SEQ ID NO: 43170 - DNA, 22 bp, synthetic construct
  misc_feature 1..22: note = chemically synthesized
  source 1..22: mol_type = other DNA
tctttcttttggataaaataaa

SEQ ID NO: 43171 - DNA, 22 bp, synthetic construct
  misc_feature 1..22: note = chemically synthesized
  source 1..22: mol_type = other DNA
tttcttttggataaaataaaat

SEQ ID NO: 43172 - DNA, 22 bp, synthetic construct
  misc_feature 1..22: note = chemically synthesized
  source 1..22: mol_type = other DNA
tcttttggataaaataaaatca

SEQ ID NO: 43173 - DNA, 22 bp, synthetic construct
  misc_feature 1..22: note = chemically synthesized
  source 1..22: mol_type = other DNA
cttttggataaaataaaatcat

SEQ ID NO: 43174 - DNA, 22 bp, synthetic construct
  misc_feature 1..22: note = chemically synthesized
  source 1..22: mol_type = other DNA
ttttggataaaataaaatcata

SEQ ID NO: 43175 - DNA, 22 bp, synthetic construct
  misc_feature 1..22: note = chemically synthesized
  source 1..22: mol_type = other DNA
ttggataaaataaaatcataaa

SEQ ID NO: 43176 - DNA, 22 bp, synthetic construct
  misc_feature 1..22: note = chemically synthesized
  source 1..22: mol_type = other DNA
tggataaaataaaatcataaaa

SEQ ID NO: 43177 - DNA, 22 bp, synthetic construct
  misc_feature 1..22: note = chemically synthesized
  source 1..22: mol_type = other DNA
ggataaaataaaatcataaaag

SEQ ID NO: 43178 - DNA, 22 bp, synthetic construct
  misc_feature 1..22: note = chemically synthesized
  source 1..22: mol_type = other DNA
gataaaataaaatcataaaagt

SEQ ID NO: 43179 - DNA, 22 bp, synthetic construct
  misc_feature 1..22: note = chemically synthesized
  source 1..22: mol_type = other DNA
atatttgctggtaacttccatg

SEQ ID NO: 43180 - DNA, 22 bp, synthetic construct
  misc_feature 1..22: note = chemically synthesized
  source 1..22: mol_type = other DNA
gctggtaacttccatgaccaga

SEQ ID NO: 43181 - DNA, 22 bp, synthetic construct
  misc_feature 1..22: note = chemically synthesized
  source 1..22: mol_type = other DNA
ctggtaacttccatgaccagac

SEQ ID NO: 43182 - DNA, 22 bp, synthetic construct
  misc_feature 1..22: note = chemically synthesized
  source 1..22: mol_type = other DNA
gtaacttccatgaccagaccct

SEQ ID NO: 43183 - DNA, 22 bp, synthetic construct
  misc_feature 1..22: note = chemically synthesized
  source 1..22: mol_type = other DNA
ccatgaccagaccctctgccaa

SEQ ID NO: 43184 - DNA, 22 bp, synthetic construct
  misc_feature 1..22: note = chemically synthesized
  source 1..22: mol_type = other DNA
catgaccagaccctctgccaag

SEQ ID NO: 43185 - DNA, 22 bp, synthetic construct
  misc_feature 1..22: note = chemically synthesized
  source 1..22: mol_type = other DNA
tgccaagtgctgcacatccata

SEQ ID NO: 43186 - DNA, 22 bp, synthetic construct
  misc_feature 1..22: note = chemically synthesized
  source 1..22: mol_type = other DNA
ccaagtgctgcacatccatagc

SEQ ID NO: 43187 - DNA, 22 bp, synthetic construct
  misc_feature 1..22: note = chemically synthesized
  source 1..22: mol_type = other DNA
cacatccatagcctccctcaag

SEQ ID NO: 43188 - DNA, 22 bp, synthetic construct
  misc_feature 1..22: note = chemically synthesized
  source 1..22: mol_type = other DNA
cctcaagctttccaacaggcag

SEQ ID NO: 43189 - DNA, 22 bp, synthetic construct
  misc_feature 1..22: note = chemically synthesized
  source 1..22: mol_type = other DNA
aagctttccaacaggcagtgct

SEQ ID NO: 43190 - DNA, 22 bp, synthetic construct
  misc_feature 1..22: note = chemically synthesized
  source 1..22: mol_type = other DNA
tccaacaggcagtgctgtacga

SEQ ID NO: 43191 - DNA, 22 bp, synthetic construct
  misc_feature 1..22: note = chemically synthesized
  source 1..22: mol_type = other DNA
ccaacaggcagtgctgtacgag

SEQ ID NO: 43192 - DNA, 22 bp, synthetic construct
  misc_feature 1..22: note = chemically synthesized
  source 1..22: mol_type = other DNA
caacaggcagtgctgtacgagg

SEQ ID NO: 43193 - DNA, 22 bp, synthetic construct
  misc_feature 1..22: note = chemically synthesized
  source 1..22: mol_type = other DNA
tacgaggagggggctgaggcct

SEQ ID NO: 43194 - DNA, 22 bp, synthetic construct
  misc_feature 1..22: note = chemically synthesized
  source 1..22: mol_type = other DNA
aggccttcccgaggttgtgtcg

SEQ ID NO: 43195 - DNA, 22 bp, synthetic construct
  misc_feature 1..22: note = chemically synthesized
  source 1..22: mol_type = other DNA
cccgaggttgtgtcgctaccca

SEQ ID NO: 43196 - DNA, 22 bp, synthetic construct
  misc_feature 1..22: note = chemically synthesized
  source 1..22: mol_type = other DNA
ccgaggttgtgtcgctacccag

SEQ ID NO: 43197 - DNA, 22 bp, synthetic construct
  misc_feature 1..22: note = chemically synthesized
  source 1..22: mol_type = other DNA
tgtcgctacccaggggtgcagc

SEQ ID NO: 43198 - DNA, 22 bp, synthetic construct
  misc_feature 1..22: note = chemically synthesized
  source 1..22: mol_type = other DNA
cccaggggtgcagctgatagac

SEQ ID NO: 43199 - DNA, 22 bp, synthetic construct
  misc_feature 1..22: note = chemically synthesized
  source 1..22: mol_type = other DNA
atagacacaaccctttcaggtc

SEQ ID NO: 43200 - DNA, 22 bp, synthetic construct
  misc_feature 1..22: note = chemically synthesized
  source 1..22: mol_type = other DNA
tcaggtcttagtttacgagcaa

SEQ ID NO: 43201 - DNA, 22 bp, synthetic construct
  misc_feature 1..22: note = chemically synthesized
  source 1..22: mol_type = other DNA
caggtcttagtttacgagcaag

SEQ ID NO: 43202 - DNA, 22 bp, synthetic construct
  misc_feature 1..22: note = chemically synthesized
  source 1..22: mol_type = other DNA
aggtcttagtttacgagcaagc

SEQ ID NO: 43203 - DNA, 22 bp, synthetic construct
  misc_feature 1..22: note = chemically synthesized
  source 1..22: mol_type = other DNA
agtttacgagcaagctaggtat

SEQ ID NO: 43204 - DNA, 22 bp, synthetic construct
  misc_feature 1..22: note = chemically synthesized
  source 1..22: mol_type = other DNA
gtttacgagcaagctaggtata

SEQ ID NO: 43205 - DNA, 22 bp, synthetic construct
  misc_feature 1..22: note = chemically synthesized
  source 1..22: mol_type = other DNA
acgagcaagctaggtataaatg

SEQ ID NO: 43206 - DNA, 22 bp, synthetic construct
  misc_feature 1..22: note = chemically synthesized
  source 1..22: mol_type = other DNA
cgagcaagctaggtataaatgt

SEQ ID NO: 43207 - DNA, 22 bp, synthetic construct
  misc_feature 1..22: note = chemically synthesized
  source 1..22: mol_type = other DNA
ggtataaatgttaacatctcca

SEQ ID NO: 43208 - DNA, 22 bp, synthetic construct
  misc_feature 1..22: note = chemically synthesized
  source 1..22: mol_type = other DNA
acatctccacatcctataccaa

SEQ ID NO: 43209 - DNA, 22 bp, synthetic construct
  misc_feature 1..22: note = chemically synthesized
  source 1..22: mol_type = other DNA
cacatcctataccaaactgtgc

SEQ ID NO: 43210 - DNA, 22 bp, synthetic construct
  misc_feature 1..22: note = chemically synthesized
  source 1..22: mol_type = other DNA
taccaaactgtgccgaaatgac

SEQ ID NO: 43211 - DNA, 22 bp, synthetic construct
  misc_feature 1..22: note = chemically synthesized
  source 1..22: mol_type = other DNA
tgccgaaatgacaacataagtg

SEQ ID NO: 43212 - DNA, 22 bp, synthetic construct
  misc_feature 1..22: note = chemically synthesized
  source 1..22: mol_type = other DNA
ttattatcttcaaaatttattt

SEQ ID NO: 43213 - DNA, 22 bp, synthetic construct
  misc_feature 1..22: note = chemically synthesized
  source 1..22: mol_type = other DNA
tattatcttcaaaatttattta

SEQ ID NO: 43214 - DNA, 22 bp, synthetic construct
  misc_feature 1..22: note = chemically synthesized
  source 1..22: mol_type = other DNA
attatcttcaaaatttatttat

SEQ ID NO: 43215 - DNA, 22 bp, synthetic construct
  misc_feature 1..22: note = chemically synthesized
  source 1..22: mol_type = other DNA
ttatcttcaaaatttatttatt

SEQ ID NO: 43216 - DNA, 22 bp, synthetic construct
  misc_feature 1..22: note = chemically synthesized
  source 1..22: mol_type = other DNA
tcttcaaaatttatttattcct

SEQ ID NO: 43217 - DNA, 22 bp, synthetic construct
  misc_feature 1..22: note = chemically synthesized
  source 1..22: mol_type = other DNA
caaaatttatttattcctagtg

SEQ ID NO: 43218 - DNA, 22 bp, synthetic construct
  misc_feature 1..22: note = chemically synthesized
  source 1..22: mol_type = other DNA
aaaatttatttattcctagtga

SEQ ID NO: 43219 - DNA, 22 bp, synthetic construct
  misc_feature 1..22: note = chemically synthesized
  source 1..22: mol_type = other DNA
atttattcctagtgaactcaca

SEQ ID NO: 43220 - DNA, 22 bp, synthetic construct
  misc_feature 1..22: note = chemically synthesized
  source 1..22: mol_type = other DNA
tttattcctagtgaactcacat

SEQ ID NO: 43221 - DNA, 22 bp, synthetic construct
  misc_feature 1..22: note = chemically synthesized
  source 1..22: mol_type = other DNA
attcctagtgaactcacatgtt

SEQ ID NO: 43222 - DNA, 22 bp, synthetic construct
  misc_feature 1..22: note = chemically synthesized
  source 1..22: mol_type = other DNA
ttcctagtgaactcacatgttt

SEQ ID NO: 43223 - DNA, 22 bp, synthetic construct
  misc_feature 1..22: note = chemically synthesized
  source 1..22: mol_type = other DNA
ctagtgaactcacatgttttct

SEQ ID NO: 43224 - DNA, 22 bp, synthetic construct
  misc_feature 1..22: note = chemically synthesized
  source 1..22: mol_type = other DNA
gtgaactcacatgttttctgta

SEQ ID NO: 43225 - DNA, 22 bp, synthetic construct
  misc_feature 1..22: note = chemically synthesized
  source 1..22: mol_type = other DNA
acatgttttctgtaattataaa

SEQ ID NO: 43226 - DNA, 22 bp, synthetic construct
  misc_feature 1..22: note = chemically synthesized
  source 1..22: mol_type = other DNA
tctgtaattataaattatgtta

SEQ ID NO: 43227 - DNA, 22 bp, synthetic construct
  misc_feature 1..22: note = chemically synthesized
  source 1..22: mol_type = other DNA
ctgtaattataaattatgttat

SEQ ID NO: 43228 - DNA, 22 bp, synthetic construct
  misc_feature 1..22: note = chemically synthesized
  source 1..22: mol_type = other DNA
tgtaattataaattatgttata

SEQ ID NO: 43229 - DNA, 22 bp, synthetic construct
  misc_feature 1..22: note = chemically synthesized
  source 1..22: mol_type = other DNA
taattataaattatgttataag

SEQ ID NO: 43230 - DNA, 22 bp, synthetic construct
  misc_feature 1..22: note = chemically synthesized
  source 1..22: mol_type = other DNA
taaattatgttataagatatca

SEQ ID NO: 43231 - DNA, 22 bp, synthetic construct
  misc_feature 1..22: note = chemically synthesized
  source 1..22: mol_type = other DNA
tgttataagatatcaatccttc

SEQ ID NO: 43232 - DNA, 22 bp, synthetic construct
  misc_feature 1..22: note = chemically synthesized
  source 1..22: mol_type = other DNA
taagatatcaatccttccagga

SEQ ID NO: 43233 - DNA, 22 bp, synthetic construct
  misc_feature 1..22: note = chemically synthesized
  source 1..22: mol_type = other DNA
ccaggagggggtggtggctcat

SEQ ID NO: 43234 - DNA, 22 bp, synthetic construct
  misc_feature 1..22: note = chemically synthesized
  source 1..22: mol_type = other DNA
caggagggggtggtggctcatg

SEQ ID NO: 43235 - DNA, 22 bp, synthetic construct
  misc_feature 1..22: note = chemically synthesized
  source 1..22: mol_type = other DNA
atgcctataatcccagcatttt

SEQ ID NO: 43236 - DNA, 22 bp, synthetic construct
  misc_feature 1..22: note = chemically synthesized
  source 1..22: mol_type = other DNA
taatcccagcattttgggaggc

SEQ ID NO: 43237 - DNA, 22 bp, synthetic construct
  misc_feature 1..22: note = chemically synthesized
  source 1..22: mol_type = other DNA
tgggaggccacggcagatggat

SEQ ID NO: 43238 - DNA, 22 bp, synthetic construct
  misc_feature 1..22: note = chemically synthesized
  source 1..22: mol_type = other DNA
gggaggccacggcagatggatc

SEQ ID NO: 43239 - DNA, 22 bp, synthetic construct
  misc_feature 1..22: note = chemically synthesized
  source 1..22: mol_type = other DNA
ggaggccacggcagatggatca

SEQ ID NO: 43240 - DNA, 22 bp, synthetic construct
  misc_feature 1..22: note = chemically synthesized
  source 1..22: mol_type = other DNA
aggccaggagtttgagacaagc

SEQ ID NO: 43241 - DNA, 22 bp, synthetic construct
  misc_feature 1..22: note = chemically synthesized
  source 1..22: mol_type = other DNA
gagacaagcctgggcaacatgc

SEQ ID NO: 43242 - DNA, 22 bp, synthetic construct
  misc_feature 1..22: note = chemically synthesized
  source 1..22: mol_type = other DNA
agacaagcctgggcaacatgcc

SEQ ID NO: 43243 - DNA, 22 bp, synthetic construct
  misc_feature 1..22: note = chemically synthesized
  source 1..22: mol_type = other DNA
ggcaacatgccaaaaccctgtc

SEQ ID NO: 43244 - DNA, 22 bp, synthetic construct
  misc_feature 1..22: note = chemically synthesized
  source 1..22: mol_type = other DNA
tctctacaaaaaatacaaaaat

SEQ ID NO: 43245 - DNA, 22 bp, synthetic construct
  misc_feature 1..22: note = chemically synthesized
  source 1..22: mol_type = other DNA
tacaaaaaatacaaaaattagc

SEQ ID NO: 43246 - DNA, 22 bp, synthetic construct
  misc_feature 1..22: note = chemically synthesized
  source 1..22: mol_type = other DNA
caaaaaatacaaaaattagctg

SEQ ID NO: 43247 - DNA, 22 bp, synthetic construct
  misc_feature 1..22: note = chemically synthesized
  source 1..22: mol_type = other DNA
gctgggtgtggaggcacatgcc

SEQ ID NO: 43248 - DNA, 22 bp, synthetic construct
  misc_feature 1..22: note = chemically synthesized
  source 1..22: mol_type = other DNA
ggtgtggaggcacatgccagtc

SEQ ID NO: 43249 - DNA, 22 bp, synthetic construct
  misc_feature 1..22: note = chemically synthesized
  source 1..22: mol_type = other DNA
ctaagtaggctgaggcactaga

SEQ ID NO: 43250 - DNA, 22 bp, synthetic construct
  misc_feature 1..22: note = chemically synthesized
  source 1..22: mol_type = other DNA
agtaggctgaggcactagaatt

SEQ ID NO: 43251 - DNA, 22 bp, synthetic construct
  misc_feature 1..22: note = chemically synthesized
  source 1..22: mol_type = other DNA
aggcactagaattgcttgaaca

SEQ ID NO: 43252 - DNA, 22 bp, synthetic construct
  misc_feature 1..22: note = chemically synthesized
  source 1..22: mol_type = other DNA
gaattgcttgaacacaggagat

SEQ ID NO: 43253 - DNA, 22 bp, synthetic construct
  misc_feature 1..22: note = chemically synthesized
  source 1..22: mol_type = other DNA
cttgaacacaggagatggaggt

SEQ ID NO: 43254 - DNA, 22 bp, synthetic construct
  misc_feature 1..22: note = chemically synthesized
  source 1..22: mol_type = other DNA
gaacacaggagatggaggttgc

SEQ ID NO: 43255 - DNA, 22 bp, synthetic construct
  misc_feature 1..22: note = chemically synthesized
  source 1..22: mol_type = other DNA
aacacaggagatggaggttgca

SEQ ID NO: 43256 - DNA, 22 bp, synthetic construct
  misc_feature 1..22: note = chemically synthesized
  source 1..22: mol_type = other DNA
cagtgagccaagaatgtgccac

SEQ ID NO: 43257 - DNA, 22 bp, synthetic construct
  misc_feature 1..22: note = chemically synthesized
  source 1..22: mol_type = other DNA
cactccagcctgggtgacagag

SEQ ID NO: 43258 - DNA, 22 bp, synthetic construct
  misc_feature 1..22: note = chemically synthesized
  source 1..22: mol_type = other DNA
cagcctgggtgacagagcaaga

SEQ ID NO: 43259 - DNA, 22 bp, synthetic construct
  misc_feature 1..22: note = chemically synthesized
  source 1..22: mol_type = other DNA
ggtgacagagcaagaatgtctc

SEQ ID NO: 43260 - DNA, 22 bp, synthetic construct
  misc_feature 1..22: note = chemically synthesized
  source 1..22: mol_type = other DNA
aggaaagaaaaaaaaataataa

SEQ ID NO: 43261 - DNA, 22 bp, synthetic construct
  misc_feature 1..22: note = chemically synthesized
  source 1..22: mol_type = other DNA
ataaaatatcaatccttcctat

SEQ ID NO: 43262 - DNA, 22 bp, synthetic construct
  misc_feature 1..22: note = chemically synthesized
  source 1..22: mol_type = other DNA
cctattctagtagttgtggctt

SEQ ID NO: 43263 - DNA, 22 bp, synthetic construct
  misc_feature 1..22: note = chemically synthesized
  source 1..22: mol_type = other DNA
ctattctagtagttgtggctta

SEQ ID NO: 43264 - DNA, 22 bp, synthetic construct
  misc_feature 1..22: note = chemically synthesized
  source 1..22: mol_type = other DNA
ttctagtagttgtggcttaaat

SEQ ID NO: 43265 - DNA, 22 bp, synthetic construct
  misc_feature 1..22: note = chemically synthesized
  source 1..22: mol_type = other DNA
tagtagttgtggcttaaataaa

SEQ ID NO: 43266 - DNA, 22 bp, synthetic construct
  misc_feature 1..22: note = chemically synthesized
  source 1..22: mol_type = other DNA
gtagttgtggcttaaataaata

SEQ ID NO: 43267 - DNA, 22 bp, synthetic construct
  misc_feature 1..22: note = chemically synthesized
  source 1..22: mol_type = other DNA
tggcttaaataaataaataaat

SEQ ID NO: 43268 - DNA, 22 bp, synthetic construct
  misc_feature 1..22: note = chemically synthesized
  source 1..22: mol_type = other DNA
aaataaataaataaatattttt

SEQ ID NO: 43269 - DNA, 22 bp, synthetic construct
  misc_feature 1..22: note = chemically synthesized
  source 1..22: mol_type = other DNA
aataaataaataaatattttta

SEQ ID NO: 43270 - DNA, 22 bp, synthetic construct
  misc_feature 1..22: note = chemically synthesized
  source 1..22: mol_type = other DNA
ttaaaaataaaacatagggtcg

SEQ ID NO: 43271 - DNA, 22 bp, synthetic construct
  misc_feature 1..22: note = chemically synthesized
  source 1..22: mol_type = other DNA
taaaaataaaacatagggtcga

SEQ ID NO: 43272 - DNA, 22 bp, synthetic construct
  misc_feature 1..22: note = chemically synthesized
  source 1..22: mol_type = other DNA
aaaaataaaacatagggtcgag

SEQ ID NO: 43273 - DNA, 22 bp, synthetic construct
  misc_feature 1..22: note = chemically synthesized
  source 1..22: mol_type = other DNA
aaaataaaacatagggtcgagt

SEQ ID NO: 43274 - DNA, 22 bp, synthetic construct
  misc_feature 1..22: note = chemically synthesized
  source 1..22: mol_type = other DNA
aactctgtaatcccagcacttt

SEQ ID NO: 43275 - DNA, 22 bp, synthetic construct
  misc_feature 1..22: note = chemically synthesized
  source 1..22: mol_type = other DNA
tgtaatcccagcactttgggag

SEQ ID NO: 43276 - DNA, 22 bp, synthetic construct
  misc_feature 1..22: note = chemically synthesized
  source 1..22: mol_type = other DNA
taatcccagcactttgggaggc

SEQ ID NO: 43277 - DNA, 22 bp, synthetic construct
  misc_feature 1..22: note = chemically synthesized
  source 1..22: mol_type = other DNA
tgggaggccaagacaggtggat

SEQ ID NO: 43278 - DNA, 22 bp, synthetic construct
  misc_feature 1..22: note = chemically synthesized
  source 1..22: mol_type = other DNA
gggaggccaagacaggtggatc

SEQ ID NO: 43279 - DNA, 22 bp, synthetic construct
  misc_feature 1..22: note = chemically synthesized
  source 1..22: mol_type = other DNA
ggaggccaagacaggtggatca

SEQ ID NO: 43280 - DNA, 22 bp, synthetic construct
  misc_feature 1..22: note = chemically synthesized
  source 1..22: mol_type = other DNA
gagaccagccaggccaatgtgg

SEQ ID NO: 43281 - DNA, 22 bp, synthetic construct
  misc_feature 1..22: note = chemically synthesized
  source 1..22: mol_type = other DNA
agaccagccaggccaatgtggt

SEQ ID NO: 43282 - DNA, 22 bp, synthetic construct
  misc_feature 1..22: note = chemically synthesized
  source 1..22: mol_type = other DNA
tactaaaaatacaaaaattagc

SEQ ID NO: 43283 - DNA, 22 bp, synthetic construct
  misc_feature 1..22: note = chemically synthesized
  source 1..22: mol_type = other DNA
ctaaaaatacaaaaattagcca

SEQ ID NO: 43284 - DNA, 22 bp, synthetic construct
  misc_feature 1..22: note = chemically synthesized
  source 1..22: mol_type = other DNA
aaaatacaaaaattagccaggc

SEQ ID NO: 43285 - DNA, 22 bp, synthetic construct
  misc_feature 1..22: note = chemically synthesized
  source 1..22: mol_type = other DNA
gccaggcgtggtggtgggcacc

SEQ ID NO: 43286 - DNA, 22 bp, synthetic construct
  misc_feature 1..22: note = chemically synthesized
  source 1..22: mol_type = other DNA
taatcccagctactagggaggc

SEQ ID NO: 43287 - DNA, 22 bp, synthetic construct
  misc_feature 1..22: note = chemically synthesized
  source 1..22: mol_type = other DNA
ctagggaggctggagtattcac

SEQ ID NO: 43288 - DNA, 22 bp, synthetic construct
  misc_feature 1..22: note = chemically synthesized
  source 1..22: mol_type = other DNA
gggaggctggagtattcacttg

SEQ ID NO: 43289 - DNA, 22 bp, synthetic construct
  misc_feature 1..22: note = chemically synthesized
  source 1..22: mol_type = other DNA
gagtattcacttgaacccagga

SEQ ID NO: 43290 - DNA, 22 bp, synthetic construct
  misc_feature 1..22: note = chemically synthesized
  source 1..22: mol_type = other DNA
acttgaacccaggaggtggaag

SEQ ID NO: 43291 - DNA, 22 bp, synthetic construct
  misc_feature 1..22: note = chemically synthesized
  source 1..22: mol_type = other DNA
gaacccaggaggtggaagttgc

SEQ ID NO: 43292 - DNA, 22 bp, synthetic construct
  misc_feature 1..22: note = chemically synthesized
  source 1..22: mol_type = other DNA
aacccaggaggtggaagttgca

SEQ ID NO: 43293 - DNA, 22 bp, synthetic construct
  misc_feature 1..22: note = chemically synthesized
  source 1..22: mol_type = other DNA
cagtgagccaaaatcacgtcag

SEQ ID NO: 43294 - DNA, 22 bp, synthetic construct
  misc_feature 1..22: note = chemically synthesized
  source 1..22: mol_type = other DNA
caaccggggtgagagtctcaat

SEQ ID NO: 43295 - DNA, 22 bp, synthetic construct
  misc_feature 1..22: note = chemically synthesized
  source 1..22: mol_type = other DNA
aaccggggtgagagtctcaata

SEQ ID NO: 43296 - DNA, 22 bp, synthetic construct
  misc_feature 1..22: note = chemically synthesized
  source 1..22: mol_type = other DNA
aataaaataaaataaaataaaa

SEQ ID NO: 43297 - DNA, 22 bp, synthetic construct
  misc_feature 1..22: note = chemically synthesized
  source 1..22: mol_type = other DNA
tccgcaaatgaattcatggtgc

SEQ ID NO: 43298 - DNA, 22 bp, synthetic construct
  misc_feature 1..22: note = chemically synthesized
  source 1..22: mol_type = other DNA
ccgcaaatgaattcatggtgca

SEQ ID NO: 43299 - DNA, 22 bp, synthetic construct
  misc_feature 1..22: note = chemically synthesized
  source 1..22: mol_type = other DNA
cgcaaatgaattcatggtgcaa

SEQ ID NO: 43300 - DNA, 22 bp, synthetic construct
  misc_feature 1..22: note = chemically synthesized
  source 1..22: mol_type = other DNA
atggtgcaatcttacattttcg

SEQ ID NO: 43301 - DNA, 22 bp, synthetic construct
  misc_feature 1..22: note = chemically synthesized
  source 1..22: mol_type = other DNA
acattttcgttctcatgaagta

SEQ ID NO: 43302 - DNA, 22 bp, synthetic construct
  misc_feature 1..22: note = chemically synthesized
  source 1..22: mol_type = other DNA
cattttcgttctcatgaagtaa

SEQ ID NO: 43303 - DNA, 22 bp, synthetic construct
  misc_feature 1..22: note = chemically synthesized
  source 1..22: mol_type = other DNA
tcgttctcatgaagtaaagcaa

SEQ ID NO: 43304 - DNA, 22 bp, synthetic construct
  misc_feature 1..22: note = chemically synthesized
  source 1..22: mol_type = other DNA
cgttctcatgaagtaaagcaag

SEQ ID NO: 43305 - DNA, 22 bp, synthetic construct
  misc_feature 1..22: note = chemically synthesized
  source 1..22: mol_type = other DNA
gttctcatgaagtaaagcaaga

SEQ ID NO: 43306 - DNA, 22 bp, synthetic construct
  misc_feature 1..22: note = chemically synthesized
  source 1..22: mol_type = other DNA
tcatgaagtaaagcaagagtgg

SEQ ID NO: 43307 - DNA, 22 bp, synthetic construct
  misc_feature 1..22: note = chemically synthesized
  source 1..22: mol_type = other DNA
atgaagtaaagcaagagtggta

SEQ ID NO: 43308 - DNA, 22 bp, synthetic construct
  misc_feature 1..22: note = chemically synthesized
  source 1..22: mol_type = other DNA
agtggaaagagtctatctctag

SEQ ID NO: 43309 - DNA, 22 bp, synthetic construct
  misc_feature 1..22: note = chemically synthesized
  source 1..22: mol_type = other DNA
tctctagtgtagtcacgtcagt

SEQ ID NO: 43310 - DNA, 22 bp, synthetic construct
  misc_feature 1..22: note = chemically synthesized
  source 1..22: mol_type = other DNA
tagtgtagtcacgtcagtggtt

SEQ ID NO: 43311 - DNA, 22 bp, synthetic construct
  misc_feature 1..22: note = chemically synthesized
  source 1..22: mol_type = other DNA
gtgtagtcacgtcagtggttgt

SEQ ID NO: 43312 - DNA, 22 bp, synthetic construct
  misc_feature 1..22: note = chemically synthesized
  source 1..22: mol_type = other DNA
tgtcaagatggttaggaggctc

SEQ ID NO: 43313 - DNA, 22 bp, synthetic construct
  misc_feature 1..22: note = chemically synthesized
  source 1..22: mol_type = other DNA
ggaggctcctcccgtttaaaac

SEQ ID NO: 43314 - DNA, 22 bp, synthetic construct
  misc_feature 1..22: note = chemically synthesized
  source 1..22: mol_type = other DNA
ctcccgtttaaaacagtatcca

SEQ ID NO: 43315 - DNA, 22 bp, synthetic construct
  misc_feature 1..22: note = chemically synthesized
  source 1..22: mol_type = other DNA
ccgtttaaaacagtatccaagc

SEQ ID NO: 43316 - DNA, 22 bp, synthetic construct
  misc_feature 1..22: note = chemically synthesized
  source 1..22: mol_type = other DNA
aaaacagtatccaagccccagt

SEQ ID NO: 43317 - DNA, 22 bp, synthetic construct
  misc_feature 1..22: note = chemically synthesized
  source 1..22: mol_type = other DNA
aaacagtatccaagccccagtt

SEQ ID NO: 43318 - DNA, 22 bp, synthetic construct
  misc_feature 1..22: note = chemically synthesized
  source 1..22: mol_type = other DNA
taaatcaattggggagacacgc

SEQ ID NO: 43319 - DNA, 22 bp, synthetic construct
  misc_feature 1..22: note = chemically synthesized
  source 1..22: mol_type = other DNA
gggagacacgccaactctgatc

SEQ ID NO: 43320 - DNA, 22 bp, synthetic construct
  misc_feature 1..22: note = chemically synthesized
  source 1..22: mol_type = other DNA
tgatcatcagcaatatctgagc

SEQ ID NO: 43321 - DNA, 22 bp, synthetic construct
  misc_feature 1..22: note = chemically synthesized
  source 1..22: mol_type = other DNA
atcatcagcaatatctgagctc

SEQ ID NO: 43322 - DNA, 22 bp, synthetic construct
  misc_feature 1..22: note = chemically synthesized
  source 1..22: mol_type = other DNA
agctccagtctcagatattgtg

SEQ ID NO: 43323 - DNA, 22 bp, synthetic construct
  misc_feature 1..22: note = chemically synthesized
  source 1..22: mol_type = other DNA
cagtctcagatattgtgtgcag

SEQ ID NO: 43324 - DNA, 22 bp, synthetic construct
  misc_feature 1..22: note = chemically synthesized
  source 1..22: mol_type = other DNA
agatattgtgtgcagttagtct

SEQ ID NO: 43325 - DNA, 22 bp, synthetic construct
  misc_feature 1..22: note = chemically synthesized
  source 1..22: mol_type = other DNA
tgtgcagttagtctctgtcctg

SEQ ID NO: 43326 - DNA, 22 bp, synthetic construct
  misc_feature 1..22: note = chemically synthesized
  source 1..22: mol_type = other DNA
gtctctgtcctgtaccctctac

SEQ ID NO: 43327 - DNA, 22 bp, synthetic construct
  misc_feature 1..22: note = chemically synthesized
  source 1..22: mol_type = other DNA
tgtcctgtaccctctacctcct

SEQ ID NO: 43328 - DNA, 22 bp, synthetic construct
  misc_feature 1..22: note = chemically synthesized
  source 1..22: mol_type = other DNA
tcctgtaccctctacctccttc

SEQ ID NO: 43329 - DNA, 22 bp, synthetic construct
  misc_feature 1..22: note = chemically synthesized
  source 1..22: mol_type = other DNA
taccctctacctccttccctac

SEQ ID NO: 43330 - DNA, 22 bp, synthetic construct
  misc_feature 1..22: note = chemically synthesized
  source 1..22: mol_type = other DNA
tacctccttccctaccagaaaa

SEQ ID NO: 43331 - DNA, 22 bp, synthetic construct
  misc_feature 1..22: note = chemically synthesized
  source 1..22: mol_type = other DNA
cctccttccctaccagaaaaat

SEQ ID NO: 43332 - DNA, 22 bp, synthetic construct
  misc_feature 1..22: note = chemically synthesized
  source 1..22: mol_type = other DNA
cttccctaccagaaaaatcacc

SEQ ID NO: 43333 - DNA, 22 bp, synthetic construct
  misc_feature 1..22: note = chemically synthesized
  source 1..22: mol_type = other DNA
ccctaccagaaaaatcaccact

SEQ ID NO: 43334 - DNA, 22 bp, synthetic construct
  misc_feature 1..22: note = chemically synthesized
  source 1..22: mol_type = other DNA
cctaccagaaaaatcaccactt

SEQ ID NO: 43335 - DNA, 22 bp, synthetic construct
  misc_feature 1..22: note = chemically synthesized
  source 1..22: mol_type = other DNA
ccagaaaaatcaccactttagt

SEQ ID NO: 43336 - DNA, 22 bp, synthetic construct
  misc_feature 1..22: note = chemically synthesized
  source 1..22: mol_type = other DNA
tagtccctggccaccgggacac

SEQ ID NO: 43337 - DNA, 22 bp, synthetic construct
  misc_feature 1..22: note = chemically synthesized
  source 1..22: mol_type = other DNA
agtccctggccaccgggacacc

SEQ ID NO: 43338 - DNA, 22 bp, synthetic construct
  misc_feature 1..22: note = chemically synthesized
  source 1..22: mol_type = other DNA
gtccctggccaccgggacaccc

SEQ ID NO: 43339 - DNA, 22 bp, synthetic construct
  misc_feature 1..22: note = chemically synthesized
  source 1..22: mol_type = other DNA
gccaccgggacaccccaggagg

SEQ ID NO: 43340 - DNA, 22 bp, synthetic construct
  misc_feature 1..22: note = chemically synthesized
  source 1..22: mol_type = other DNA
aggtagttatggcacttatggc

SEQ ID NO: 43341 - DNA, 22 bp, synthetic construct
  misc_feature 1..22: note = chemically synthesized
  source 1..22: mol_type = other DNA
tggcacttatggctcccttgct

SEQ ID NO: 43342 - DNA, 22 bp, synthetic construct
  misc_feature 1..22: note = chemically synthesized
  source 1..22: mol_type = other DNA
atggctcccttgctgctgatct

SEQ ID NO: 43343 - DNA, 22 bp, synthetic construct
  misc_feature 1..22: note = chemically synthesized
  source 1..22: mol_type = other DNA
tggctcccttgctgctgatctg

SEQ ID NO: 43344 - DNA, 22 bp, synthetic construct
  misc_feature 1..22: note = chemically synthesized
  source 1..22: mol_type = other DNA
ccttgctgctgatctggaactc

SEQ ID NO: 43345 - DNA, 22 bp, synthetic construct
  misc_feature 1..22: note = chemically synthesized
  source 1..22: mol_type = other DNA
gctgctgatctggaactcaagc

SEQ ID NO: 43346 - DNA, 22 bp, synthetic construct
  misc_feature 1..22: note = chemically synthesized
  source 1..22: mol_type = other DNA
ctgctgatctggaactcaagcc

SEQ ID NO: 43347 - DNA, 22 bp, synthetic construct
  misc_feature 1..22: note = chemically synthesized
  source 1..22: mol_type = other DNA
ctgatctggaactcaagcccca

SEQ ID NO: 43348 - DNA, 22 bp, synthetic construct
  misc_feature 1..22: note = chemically synthesized
  source 1..22: mol_type = other DNA
atctggaactcaagccccaaga

SEQ ID NO: 43349 - DNA, 22 bp, synthetic construct
  misc_feature 1..22: note = chemically synthesized
  source 1..22: mol_type = other DNA
gaactcaagccccaagaagtcc

SEQ ID NO: 43350 - DNA, 22 bp, synthetic construct
  misc_feature 1..22: note = chemically synthesized
  source 1..22: mol_type = other DNA
aagccccaagaagtccccttgg

SEQ ID NO: 43351 - DNA, 22 bp, synthetic construct
  misc_feature 1..22: note = chemically synthesized
  source 1..22: mol_type = other DNA
ggatgatctgaatatacatttg

SEQ ID NO: 43352 - DNA, 22 bp, synthetic construct
  misc_feature 1..22: note = chemically synthesized
  source 1..22: mol_type = other DNA
gatgatctgaatatacatttgg

SEQ ID NO: 43353 - DNA, 22 bp, synthetic construct
  misc_feature 1..22: note = chemically synthesized
  source 1..22: mol_type = other DNA
aatatacatttgggacagatct

SEQ ID NO: 43354 - DNA, 22 bp, synthetic construct
  misc_feature 1..22: note = chemically synthesized
  source 1..22: mol_type = other DNA
gggacagatctagggagtttct

SEQ ID NO: 43355 - DNA, 22 bp, synthetic construct
  misc_feature 1..22: note = chemically synthesized
  source 1..22: mol_type = other DNA
ggacagatctagggagtttctg

SEQ ID NO: 43356 - DNA, 22 bp, synthetic construct
  misc_feature 1..22: note = chemically synthesized
  source 1..22: mol_type = other DNA
gggagtttctgagcaacactta

SEQ ID NO: 43357 - DNA, 22 bp, synthetic construct
  misc_feature 1..22: note = chemically synthesized
  source 1..22: mol_type = other DNA
ctgagcaacacttagactgggg

SEQ ID NO: 43358 - DNA, 22 bp, synthetic construct
  misc_feature 1..22: note = chemically synthesized
  source 1..22: mol_type = other DNA
tgagcaacacttagactggggt

SEQ ID NO: 43359 - DNA, 22 bp, synthetic construct
  misc_feature 1..22: note = chemically synthesized
  source 1..22: mol_type = other DNA
agcaacacttagactggggtct

SEQ ID NO: 43360 - DNA, 22 bp, synthetic construct
  misc_feature 1..22: note = chemically synthesized
  source 1..22: mol_type = other DNA
agactggggtcttccattgatt

SEQ ID NO: 43361 - DNA, 22 bp, synthetic construct
  misc_feature 1..22: note = chemically synthesized
  source 1..22: mol_type = other DNA
gactggggtcttccattgatta

SEQ ID NO: 43362 - DNA, 22 bp, synthetic construct
  misc_feature 1..22: note = chemically synthesized
  source 1..22: mol_type = other DNA
gggtcttccattgattaaatcc

SEQ ID NO: 43363 - DNA, 22 bp, synthetic construct
  misc_feature 1..22: note = chemically synthesized
  source 1..22: mol_type = other DNA
ccattgattaaatcctacttga

SEQ ID NO: 43364 - DNA, 22 bp, synthetic construct
  misc_feature 1..22: note = chemically synthesized
  source 1..22: mol_type = other DNA
cattgattaaatcctacttgaa

SEQ ID NO: 43365 - DNA, 22 bp, synthetic construct
  misc_feature 1..22: note = chemically synthesized
  source 1..22: mol_type = other DNA
attaaatcctacttgaattcgc

SEQ ID NO: 43366 - DNA, 22 bp, synthetic construct
  misc_feature 1..22: note = chemically synthesized
  source 1..22: mol_type = other DNA
aatcctacttgaattcgctact

SEQ ID NO: 43367 - DNA, 22 bp, synthetic construct
  misc_feature 1..22: note = chemically synthesized
  source 1..22: mol_type = other DNA
cttgaattcgctactttgggac

SEQ ID NO: 43368 - DNA, 22 bp, synthetic construct
  misc_feature 1..22: note = chemically synthesized
  source 1..22: mol_type = other DNA
gaattcgctactttgggactca

SEQ ID NO: 43369 - DNA, 22 bp, synthetic construct
  misc_feature 1..22: note = chemically synthesized
  source 1..22: mol_type = other DNA
aattcgctactttgggactcaa

SEQ ID NO: 43370 - DNA, 22 bp, synthetic construct
  misc_feature 1..22: note = chemically synthesized
  source 1..22: mol_type = other DNA
gctactttgggactcaagtcta

SEQ ID NO: 43371 - DNA, 22 bp, synthetic construct
  misc_feature 1..22: note = chemically synthesized
  source 1..22: mol_type = other DNA
ctttgggactcaagtctaaggg

SEQ ID NO: 43372 - DNA, 22 bp, synthetic construct
  misc_feature 1..22: note = chemically synthesized
  source 1..22: mol_type = other DNA
tgggactcaagtctaagggact

SEQ ID NO: 43373 - DNA, 22 bp, synthetic construct
  misc_feature 1..22: note = chemically synthesized
  source 1..22: mol_type = other DNA
gggactcaagtctaagggactg

SEQ ID NO: 43374 - DNA, 22 bp, synthetic construct
  misc_feature 1..22: note = chemically synthesized
  source 1..22: mol_type = other DNA
ggactcaagtctaagggactga

SEQ ID NO: 43375 - DNA, 22 bp, synthetic construct
  misc_feature 1..22: note = chemically synthesized
  source 1..22: mol_type = other DNA
aagtctaagggactgagactga

SEQ ID NO: 43376 - DNA, 22 bp, synthetic construct
  misc_feature 1..22: note = chemically synthesized
  source 1..22: mol_type = other DNA
agggactgagactgagacagga

SEQ ID NO: 43377 - DNA, 22 bp, synthetic construct
  misc_feature 1..22: note = chemically synthesized
  source 1..22: mol_type = other DNA
agactgagacaggagagcacaa

SEQ ID NO: 43378 - DNA, 22 bp, synthetic construct
  misc_feature 1..22: note = chemically synthesized
  source 1..22: mol_type = other DNA
agacaggagagcacaagactaa

SEQ ID NO: 43379 - DNA, 22 bp, synthetic construct
  misc_feature 1..22: note = chemically synthesized
  source 1..22: mol_type = other DNA
actttggtctcttgatcttttc

SEQ ID NO: 43380 - DNA, 22 bp, synthetic construct
  misc_feature 1..22: note = chemically synthesized
  source 1..22: mol_type = other DNA
tggtctcttgatcttttcttac

SEQ ID NO: 43381 - DNA, 22 bp, synthetic construct
  misc_feature 1..22: note = chemically synthesized
  source 1..22: mol_type = other DNA
ggtctcttgatcttttcttacc

SEQ ID NO: 43382 - DNA, 22 bp, synthetic construct
  misc_feature 1..22: note = chemically synthesized
  source 1..22: mol_type = other DNA
gtctcttgatcttttcttacct

SEQ ID NO: 43383 - DNA, 22 bp, synthetic construct
  misc_feature 1..22: note = chemically synthesized
  source 1..22: mol_type = other DNA
ttgatcttttcttaccttgcaa

SEQ ID NO: 43384 - DNA, 22 bp, synthetic construct
  misc_feature 1..22: note = chemically synthesized
  source 1..22: mol_type = other DNA
gatcttttcttaccttgcaact

SEQ ID NO: 43385 - DNA, 22 bp, synthetic construct
  misc_feature 1..22: note = chemically synthesized
  source 1..22: mol_type = other DNA
atcttttcttaccttgcaactg

SEQ ID NO: 43386 - DNA, 22 bp, synthetic construct
  misc_feature 1..22: note = chemically synthesized
  source 1..22: mol_type = other DNA
ttcttaccttgcaactgtcaat

SEQ ID NO: 43387 - DNA, 22 bp, synthetic construct
  misc_feature 1..22: note = chemically synthesized
  source 1..22: mol_type = other DNA
tcttaccttgcaactgtcaatg

SEQ ID NO: 43388 - DNA, 22 bp, synthetic construct
  misc_feature 1..22: note = chemically synthesized
  source 1..22: mol_type = other DNA
cttaccttgcaactgtcaatgc

SEQ ID NO: 43389 - DNA, 22 bp, synthetic construct
  misc_feature 1..22: note = chemically synthesized
  source 1..22: mol_type = other DNA
ttaccttgcaactgtcaatgcc

SEQ ID NO: 43390 - DNA, 22 bp, synthetic construct
  misc_feature 1..22: note = chemically synthesized
  source 1..22: mol_type = other DNA
accttgcaactgtcaatgcctc

SEQ ID NO: 43391 - DNA, 22 bp, synthetic construct
  misc_feature 1..22: note = chemically synthesized
  source 1..22: mol_type = other DNA
ccttgcaactgtcaatgcctcc

SEQ ID NO: 43392 - DNA, 22 bp, synthetic construct
  misc_feature 1..22: note = chemically synthesized
  source 1..22: mol_type = other DNA
gcaactgtcaatgcctccagcc

SEQ ID NO: 43393 - DNA, 22 bp, synthetic construct
  misc_feature 1..22: note = chemically synthesized
  source 1..22: mol_type = other DNA
caactgtcaatgcctccagcca

SEQ ID NO: 43394 - DNA, 22 bp, synthetic construct
  misc_feature 1..22: note = chemically synthesized
  source 1..22: mol_type = other DNA
tcaatgcctccagccaaatgcc

SEQ ID NO: 43395 - DNA, 22 bp, synthetic construct
  misc_feature 1..22: note = chemically synthesized
  source 1..22: mol_type = other DNA
cagccaaatgcccagcacagag

SEQ ID NO: 43396 - DNA, 22 bp, synthetic construct
  misc_feature 1..22: note = chemically synthesized
  source 1..22: mol_type = other DNA
agtggatttgactcttccattc

SEQ ID NO: 43397 - DNA, 22 bp, synthetic construct
  misc_feature 1..22: note = chemically synthesized
  source 1..22: mol_type = other DNA
gactcttccattcagaaactca

SEQ ID NO: 43398 - DNA, 22 bp, synthetic construct
  misc_feature 1..22: note = chemically synthesized
  source 1..22: mol_type = other DNA
actcttccattcagaaactcat

SEQ ID NO: 43399 - DNA, 22 bp, synthetic construct
  misc_feature 1..22: note = chemically synthesized
  source 1..22: mol_type = other DNA
ttccattcagaaactcatagcg

SEQ ID NO: 43400 - DNA, 22 bp, synthetic construct
  misc_feature 1..22: note = chemically synthesized
  source 1..22: mol_type = other DNA
ccattcagaaactcatagcgat

SEQ ID NO: 43401 - DNA, 22 bp, synthetic construct
  misc_feature 1..22: note = chemically synthesized
  source 1..22: mol_type = other DNA
cattcagaaactcatagcgatt

SEQ ID NO: 43402 - DNA, 22 bp, synthetic construct
  misc_feature 1..22: note = chemically synthesized
  source 1..22: mol_type = other DNA
agaaactcatagcgattgcaca

SEQ ID NO: 43403 - DNA, 22 bp, synthetic construct
  misc_feature 1..22: note = chemically synthesized
  source 1..22: mol_type = other DNA
atagcgattgcacacttcattc

SEQ ID NO: 43404 - DNA, 22 bp, synthetic construct
  misc_feature 1..22: note = chemically synthesized
  source 1..22: mol_type = other DNA
cacacttcattctcaatcacag

SEQ ID NO: 43405 - DNA, 22 bp, synthetic construct
  misc_feature 1..22: note = chemically synthesized
  source 1..22: mol_type = other DNA
cattctcaatcacagggagctg

SEQ ID NO: 43406 - DNA, 22 bp, synthetic construct
  misc_feature 1..22: note = chemically synthesized
  source 1..22: mol_type = other DNA
attctcaatcacagggagctgg

SEQ ID NO: 43407 - DNA, 22 bp, synthetic construct
  misc_feature 1..22: note = chemically synthesized
  source 1..22: mol_type = other DNA
tcaatcacagggagctgggctt

SEQ ID NO: 43408 - DNA, 22 bp, synthetic construct
  misc_feature 1..22: note = chemically synthesized
  source 1..22: mol_type = other DNA
aatcacagggagctgggcttcc

SEQ ID NO: 43409 - DNA, 22 bp, synthetic construct
  misc_feature 1..22: note = chemically synthesized
  source 1..22: mol_type = other DNA
ggcttccttgagaaagccagcc

SEQ ID NO: 43410 - DNA, 22 bp, synthetic construct
  misc_feature 1..22: note = chemically synthesized
  source 1..22: mol_type = other DNA
ccttgagaaagccagccccaaa

SEQ ID NO: 43411 - DNA, 22 bp, synthetic construct
  misc_feature 1..22: note = chemically synthesized
  source 1..22: mol_type = other DNA
cttgagaaagccagccccaaag

SEQ ID NO: 43412 - DNA, 22 bp, synthetic construct
  misc_feature 1..22: note = chemically synthesized
  source 1..22: mol_type = other DNA
gagaaagccagccccaaaggta

SEQ ID NO: 43413 - DNA, 22 bp, synthetic construct
  misc_feature 1..22: note = chemically synthesized
  source 1..22: mol_type = other DNA
agaaagccagccccaaaggtac

SEQ ID NO: 43414 - DNA, 22 bp, synthetic construct
  misc_feature 1..22: note = chemically synthesized
  source 1..22: mol_type = other DNA
tgtttaaaaagatgaaagaaat

SEQ ID NO: 43415 - DNA, 22 bp, synthetic construct
  misc_feature 1..22: note = chemically synthesized
  source 1..22: mol_type = other DNA
aaaaagatgaaagaaatggtaa

SEQ ID NO: 43416 - DNA, 22 bp, synthetic construct
  misc_feature 1..22: note = chemically synthesized
  source 1..22: mol_type = other DNA
aaaagatgaaagaaatggtaac

SEQ ID NO: 43417 - DNA, 22 bp, synthetic construct
  misc_feature 1..22: note = chemically synthesized
  source 1..22: mol_type = other DNA
cgtccacaacatgttcacaagg

SEQ ID NO: 43418 - DNA, 22 bp, synthetic construct
  misc_feature 1..22: note = chemically synthesized
  source 1..22: mol_type = other DNA
acaaggaaactccagaagaaca

SEQ ID NO: 43419 - DNA, 22 bp, synthetic construct
  misc_feature 1..22: note = chemically synthesized
  source 1..22: mol_type = other DNA
cagaagaacagagcagtggtga

SEQ ID NO: 43420 - DNA, 22 bp, synthetic construct
  misc_feature 1..22: note = chemically synthesized
  source 1..22: mol_type = other DNA
ctgtctgtccgtgaggctgtag

SEQ ID NO: 43421 - DNA, 22 bp, synthetic construct
  misc_feature 1..22: note = chemically synthesized
  source 1..22: mol_type = other DNA
tctgtccgtgaggctgtagaac

SEQ ID NO: 43422 - DNA, 22 bp, synthetic construct
  misc_feature 1..22: note = chemically synthesized
  source 1..22: mol_type = other DNA
tccgtgaggctgtagaacacaa

SEQ ID NO: 43423 - DNA, 22 bp, synthetic construct
  misc_feature 1..22: note = chemically synthesized
  source 1..22: mol_type = other DNA
tagaacacaaggcagctcccaa

SEQ ID NO: 43424 - DNA, 22 bp, synthetic construct
  misc_feature 1..22: note = chemically synthesized
  source 1..22: mol_type = other DNA
ccaatgctgccagactctctga

SEQ ID NO: 43425 - DNA, 22 bp, synthetic construct
  misc_feature 1..22: note = chemically synthesized
  source 1..22: mol_type = other DNA
ccagactctctgaaccctggag

SEQ ID NO: 43426 - DNA, 22 bp, synthetic construct
  misc_feature 1..22: note = chemically synthesized
  source 1..22: mol_type = other DNA
tctgaaccctggagagtgtaaa

SEQ ID NO: 43427 - DNA, 22 bp, synthetic construct
  misc_feature 1..22: note = chemically synthesized
  source 1..22: mol_type = other DNA
tgaaccctggagagtgtaaacg

SEQ ID NO: 43428 - DNA, 22 bp, synthetic construct
  misc_feature 1..22: note = chemically synthesized
  source 1..22: mol_type = other DNA
aaccctggagagtgtaaacgtc

SEQ ID NO: 43429 - DNA, 22 bp, synthetic construct
  misc_feature 1..22: note = chemically synthesized
  source 1..22: mol_type = other DNA
gagagtgtaaacgtcatataag

SEQ ID NO: 43430 - DNA, 22 bp, synthetic construct
  misc_feature 1..22: note = chemically synthesized
  source 1..22: mol_type = other DNA
tgttccaaaaacctggatttaa

SEQ ID NO: 43431 - DNA, 22 bp, synthetic construct
  misc_feature 1..22: note = chemically synthesized
  source 1..22: mol_type = other DNA
caaaaacctggatttaacaatc

SEQ ID NO: 43432 - DNA, 22 bp, synthetic construct
  misc_feature 1..22: note = chemically synthesized
  source 1..22: mol_type = other DNA
gatttaacaatctgagctttgt

SEQ ID NO: 43433 - DNA, 22 bp, synthetic construct
  misc_feature 1..22: note = chemically synthesized
  source 1..22: mol_type = other DNA
aacaatctgagctttgtcatgg

SEQ ID NO: 43434 - DNA, 22 bp, synthetic construct
  misc_feature 1..22: note = chemically synthesized
  source 1..22: mol_type = other DNA
acaatctgagctttgtcatggt

SEQ ID NO: 43435 - DNA, 22 bp, synthetic construct
  misc_feature 1..22: note = chemically synthesized
  source 1..22: mol_type = other DNA
agctttgtcatggtgctttgcg

SEQ ID NO: 43436 - DNA, 22 bp, synthetic construct
  misc_feature 1..22: note = chemically synthesized
  source 1..22: mol_type = other DNA
tgtcatggtgctttgcggttgg

SEQ ID NO: 43437 - DNA, 22 bp, synthetic construct
  misc_feature 1..22: note = chemically synthesized
  source 1..22: mol_type = other DNA
gtcatggtgctttgcggttggt

SEQ ID NO: 43438 - DNA, 22 bp, synthetic construct
  misc_feature 1..22: note = chemically synthesized
  source 1..22: mol_type = other DNA
tcatggtgctttgcggttggtt

SEQ ID NO: 43439 - DNA, 22 bp, synthetic construct
  misc_feature 1..22: note = chemically synthesized
  source 1..22: mol_type = other DNA
tgcggttggttgttgtttcttt

SEQ ID NO: 43440 - DNA, 22 bp, synthetic construct
  misc_feature 1..22: note = chemically synthesized
  source 1..22: mol_type = other DNA
gcggttggttgttgtttcttta

SEQ ID NO: 43441 - DNA, 22 bp, synthetic construct
  misc_feature 1..22: note = chemically synthesized
  source 1..22: mol_type = other DNA
cggttggttgttgtttctttac

SEQ ID NO: 43442 - DNA, 22 bp, synthetic construct
  misc_feature 1..22: note = chemically synthesized
  source 1..22: mol_type = other DNA
gttgttgtttctttaccttttt

SEQ ID NO: 43443 - DNA, 22 bp, synthetic construct
  misc_feature 1..22: note = chemically synthesized
  source 1..22: mol_type = other DNA
ttgtttctttacctttttcttt

SEQ ID NO: 43444 - DNA, 22 bp, synthetic construct
  misc_feature 1..22: note = chemically synthesized
  source 1..22: mol_type = other DNA
tttctttacctttttctttgct

SEQ ID NO: 43445 - DNA, 22 bp, synthetic construct
  misc_feature 1..22: note = chemically synthesized
  source 1..22: mol_type = other DNA
ctttacctttttctttgctttt

SEQ ID NO: 43446 - DNA, 22 bp, synthetic construct
  misc_feature 1..22: note = chemically synthesized
  source 1..22: mol_type = other DNA
tttacctttttctttgctttta

SEQ ID NO: 43447 - DNA, 22 bp, synthetic construct
  misc_feature 1..22: note = chemically synthesized
  source 1..22: mol_type = other DNA
tacctttttctttgcttttaaa

SEQ ID NO: 43448 - DNA, 22 bp, synthetic construct
  misc_feature 1..22: note = chemically synthesized
  source 1..22: mol_type = other DNA
acctttttctttgcttttaaaa

SEQ ID NO: 43449 - DNA, 22 bp, synthetic construct
  misc_feature 1..22: note = chemically synthesized
  source 1..22: mol_type = other DNA
cctttttctttgcttttaaaac

SEQ ID NO: 43450 - DNA, 22 bp, synthetic construct
  misc_feature 1..22: note = chemically synthesized
  source 1..22: mol_type = other DNA
tttctttgcttttaaaaccata

SEQ ID NO: 43451 - DNA, 22 bp, synthetic construct
  misc_feature 1..22: note = chemically synthesized
  source 1..22: mol_type = other DNA
ttctttgcttttaaaaccataa

SEQ ID NO: 43452 - DNA, 22 bp, synthetic construct
  misc_feature 1..22: note = chemically synthesized
  source 1..22: mol_type = other DNA
tctttgcttttaaaaccataaa

SEQ ID NO: 43453 - DNA, 22 bp, synthetic construct
  misc_feature 1..22: note = chemically synthesized
  source 1..22: mol_type = other DNA
ctttgcttttaaaaccataaag

SEQ ID NO: 43454 - DNA, 22 bp, synthetic construct
  misc_feature 1..22: note = chemically synthesized
  source 1..22: mol_type = other DNA
tttgcttttaaaaccataaaga

SEQ ID NO: 43455 - DNA, 22 bp, synthetic construct
  misc_feature 1..22: note = chemically synthesized
  source 1..22: mol_type = other DNA
tgcttttaaaaccataaagaat

SEQ ID NO: 43456 - DNA, 22 bp, synthetic construct
  misc_feature 1..22: note = chemically synthesized
  source 1..22: mol_type = other DNA
gcttttaaaaccataaagaata

SEQ ID NO: 43457 - DNA, 22 bp, synthetic construct
  misc_feature 1..22: note = chemically synthesized
  source 1..22: mol_type = other DNA
cttttaaaaccataaagaataa

SEQ ID NO: 43458 - DNA, 22 bp, synthetic construct
  misc_feature 1..22: note = chemically synthesized
  source 1..22: mol_type = other DNA
ttaaaaccataaagaataatgt

SEQ ID NO: 43459 - DNA, 22 bp, synthetic construct
  misc_feature 1..22: note = chemically synthesized
  source 1..22: mol_type = other DNA
taaaaccataaagaataatgtt

SEQ ID NO: 43460 - DNA, 22 bp, synthetic construct
  misc_feature 1..22: note = chemically synthesized
  source 1..22: mol_type = other DNA
aaaaccataaagaataatgttt

SEQ ID NO: 43461 - DNA, 22 bp, synthetic construct
  misc_feature 1..22: note = chemically synthesized
  source 1..22: mol_type = other DNA
aaaccataaagaataatgttta

SEQ ID NO: 43462 - DNA, 22 bp, synthetic construct
  misc_feature 1..22: note = chemically synthesized
  source 1..22: mol_type = other DNA
aaatgtagagtctgagaaatgc

SEQ ID NO: 43463 - DNA, 22 bp, synthetic construct
  misc_feature 1..22: note = chemically synthesized
  source 1..22: mol_type = other DNA
aatgtagagtctgagaaatgca

SEQ ID NO: 43464 - DNA, 22 bp, synthetic construct
  misc_feature 1..22: note = chemically synthesized
  source 1..22: mol_type = other DNA
agaaatgcaattgctattgttt

SEQ ID NO: 43465 - DNA, 22 bp, synthetic construct
  misc_feature 1..22: note = chemically synthesized
  source 1..22: mol_type = other DNA
ctattgtttttatattttcaga

SEQ ID NO: 43466 - DNA, 22 bp, synthetic construct
  misc_feature 1..22: note = chemically synthesized
  source 1..22: mol_type = other DNA
ttgtttttatattttcagactt

SEQ ID NO: 43467 - DNA, 22 bp, synthetic construct
  misc_feature 1..22: note = chemically synthesized
  source 1..22: mol_type = other DNA
tttttatattttcagacttttt

SEQ ID NO: 43468 - DNA, 22 bp, synthetic construct
  misc_feature 1..22: note = chemically synthesized
  source 1..22: mol_type = other DNA
ttatattttcagactttttgta

SEQ ID NO: 43469 - DNA, 22 bp, synthetic construct
  misc_feature 1..22: note = chemically synthesized
  source 1..22: mol_type = other DNA
tatattttcagactttttgtat

SEQ ID NO: 43470 - DNA, 22 bp, synthetic construct
  misc_feature 1..22: note = chemically synthesized
  source 1..22: mol_type = other DNA
atattttcagactttttgtatg

SEQ ID NO: 43471 - DNA, 22 bp, synthetic construct
  misc_feature 1..22: note = chemically synthesized
  source 1..22: mol_type = other DNA
tattttcagactttttgtatgc

SEQ ID NO: 43472 - DNA, 22 bp, synthetic construct
  misc_feature 1..22: note = chemically synthesized
  source 1..22: mol_type = other DNA
tcagactttttgtatgcttctt

SEQ ID NO: 43473 - DNA, 22 bp, synthetic construct
  misc_feature 1..22: note = chemically synthesized
  source 1..22: mol_type = other DNA
cagactttttgtatgcttcttt

SEQ ID NO: 43474 - DNA, 22 bp, synthetic construct
  misc_feature 1..22: note = chemically synthesized
  source 1..22: mol_type = other DNA
agactttttgtatgcttctttc

SEQ ID NO: 43475 - DNA, 22 bp, synthetic construct
  misc_feature 1..22: note = chemically synthesized
  source 1..22: mol_type = other DNA
tttgtatgcttctttcactaat

SEQ ID NO: 43476 - DNA, 22 bp, synthetic construct
  misc_feature 1..22: note = chemically synthesized
  source 1..22: mol_type = other DNA
ttgtatgcttctttcactaatt

SEQ ID NO: 43477 - DNA, 22 bp, synthetic construct
  misc_feature 1..22: note = chemically synthesized
  source 1..22: mol_type = other DNA
tgtatgcttctttcactaatta

SEQ ID NO: 43478 - DNA, 22 bp, synthetic construct
  misc_feature 1..22: note = chemically synthesized
  source 1..22: mol_type = other DNA
gtatgcttctttcactaattac

SEQ ID NO: 43479 - DNA, 22 bp, synthetic construct
  misc_feature 1..22: note = chemically synthesized
  source 1..22: mol_type = other DNA
tatgcttctttcactaattaca

SEQ ID NO: 43480 - DNA, 22 bp, synthetic construct
  misc_feature 1..22: note = chemically synthesized
  source 1..22: mol_type = other DNA
ctttcactaattacatcatatc

SEQ ID NO: 43481 - DNA, 22 bp, synthetic construct
  misc_feature 1..22: note = chemically synthesized
  source 1..22: mol_type = other DNA
tttcactaattacatcatatca

SEQ ID NO: 43482 - DNA, 22 bp, synthetic construct
  misc_feature 1..22: note = chemically synthesized
  source 1..22: mol_type = other DNA
tcactaattacatcatatcaca

SEQ ID NO: 43483 - DNA, 22 bp, synthetic construct
  misc_feature 1..22: note = chemically synthesized
  source 1..22: mol_type = other DNA
cactaattacatcatatcacaa

SEQ ID NO: 43484 - DNA, 22 bp, synthetic construct
  misc_feature 1..22: note = chemically synthesized
  source 1..22: mol_type = other DNA
actaattacatcatatcacaaa

SEQ ID NO: 43485 - DNA, 22 bp, synthetic construct
  misc_feature 1..22: note = chemically synthesized
  source 1..22: mol_type = other DNA
attacatcatatcacaaaattt

SEQ ID NO: 43486 - DNA, 22 bp, synthetic construct
  misc_feature 1..22: note = chemically synthesized
  source 1..22: mol_type = other DNA
catcatatcacaaaatttcaca

SEQ ID NO: 43487 - DNA, 22 bp, synthetic construct
  misc_feature 1..22: note = chemically synthesized
  source 1..22: mol_type = other DNA
cacaccctgattttttcactca

SEQ ID NO: 43488 - DNA, 22 bp, synthetic construct
  misc_feature 1..22: note = chemically synthesized
  source 1..22: mol_type = other DNA
acaccctgattttttcactcaa

SEQ ID NO: 43489 - DNA, 22 bp, synthetic construct
  misc_feature 1..22: note = chemically synthesized
  source 1..22: mol_type = other DNA
attttttcactcaacattacat

SEQ ID NO: 43490 - DNA, 22 bp, synthetic construct
  misc_feature 1..22: note = chemically synthesized
  source 1..22: mol_type = other DNA
tttcactcaacattacataatg

SEQ ID NO: 43491 - DNA, 22 bp, synthetic construct
  misc_feature 1..22: note = chemically synthesized
  source 1..22: mol_type = other DNA
ttcactcaacattacataatga

SEQ ID NO: 43492 - DNA, 22 bp, synthetic construct
  misc_feature 1..22: note = chemically synthesized
  source 1..22: mol_type = other DNA
tcactcaacattacataatgag

SEQ ID NO: 43493 - DNA, 22 bp, synthetic construct
  misc_feature 1..22: note = chemically synthesized
  source 1..22: mol_type = other DNA
cactcaacattacataatgagt

SEQ ID NO: 43494 - DNA, 22 bp, synthetic construct
  misc_feature 1..22: note = chemically synthesized
  source 1..22: mol_type = other DNA
actcaacattacataatgagtt

SEQ ID NO: 43495 - DNA, 22 bp, synthetic construct
  misc_feature 1..22: note = chemically synthesized
  source 1..22: mol_type = other DNA
aacattacataatgagttttgt

SEQ ID NO: 43496 - DNA, 22 bp, synthetic construct
  misc_feature 1..22: note = chemically synthesized
  source 1..22: mol_type = other DNA
cataatgagttttgtatagtgc

SEQ ID NO: 43497 - DNA, 22 bp, synthetic construct
  misc_feature 1..22: note = chemically synthesized
  source 1..22: mol_type = other DNA
tgtatagtgctatgatcttcat

SEQ ID NO: 43498 - DNA, 22 bp, synthetic construct
  misc_feature 1..22: note = chemically synthesized
  source 1..22: mol_type = other DNA
gtatagtgctatgatcttcata

SEQ ID NO: 43499 - DNA, 22 bp, synthetic construct
  misc_feature 1..22: note = chemically synthesized
  source 1..22: mol_type = other DNA
tatagtgctatgatcttcataa

SEQ ID NO: 43500 - DNA, 22 bp, synthetic construct
  misc_feature 1..22: note = chemically synthesized
  source 1..22: mol_type = other DNA
tgatcttcataactaatatttt

SEQ ID NO: 43501 - DNA, 22 bp, synthetic construct
  misc_feature 1..22: note = chemically synthesized
  source 1..22: mol_type = other DNA
cataactaatattttaaaggag

SEQ ID NO: 43502 - DNA, 22 bp, synthetic construct
  misc_feature 1..22: note = chemically synthesized
  source 1..22: mol_type = other DNA
ataactaatattttaaaggaga

SEQ ID NO: 43503 - DNA, 22 bp, synthetic construct
  misc_feature 1..22: note = chemically synthesized
  source 1..22: mol_type = other DNA
atattttaaaggagagctactg

SEQ ID NO: 43504 - DNA, 22 bp, synthetic construct
  misc_feature 1..22: note = chemically synthesized
  source 1..22: mol_type = other DNA
taaaggagagctactgattaat

SEQ ID NO: 43505 - DNA, 22 bp, synthetic construct
  misc_feature 1..22: note = chemically synthesized
  source 1..22: mol_type = other DNA
aaaggagagctactgattaatg

SEQ ID NO: 43506 - DNA, 22 bp, synthetic construct
  misc_feature 1..22: note = chemically synthesized
  source 1..22: mol_type = other DNA
aaggagagctactgattaatga

SEQ ID NO: 43507 - DNA, 22 bp, synthetic construct
  misc_feature 1..22: note = chemically synthesized
  source 1..22: mol_type = other DNA
ctgattaatgagcatgaggttt

SEQ ID NO: 43508 - DNA, 22 bp, synthetic construct
  misc_feature 1..22: note = chemically synthesized
  source 1..22: mol_type = other DNA
attaatgagcatgaggtttcct

SEQ ID NO: 43509 - DNA, 22 bp, synthetic construct
  misc_feature 1..22: note = chemically synthesized
  source 1..22: mol_type = other DNA
atgagcatgaggtttcctttgg

SEQ ID NO: 43510 - DNA, 22 bp, synthetic construct
  misc_feature 1..22: note = chemically synthesized
  source 1..22: mol_type = other DNA
cctttggggatgaggaaaatat

SEQ ID NO: 43511 - DNA, 22 bp, synthetic construct
  misc_feature 1..22: note = chemically synthesized
  source 1..22: mol_type = other DNA
ctttggggatgaggaaaatatt

SEQ ID NO: 43512 - DNA, 22 bp, synthetic construct
  misc_feature 1..22: note = chemically synthesized
  source 1..22: mol_type = other DNA
tggggatgaggaaaatattctg

SEQ ID NO: 43513 - DNA, 22 bp, synthetic construct
  misc_feature 1..22: note = chemically synthesized
  source 1..22: mol_type = other DNA
ggggatgaggaaaatattctgg

SEQ ID NO: 43514 - DNA, 22 bp, synthetic construct
  misc_feature 1..22: note = chemically synthesized
  source 1..22: mol_type = other DNA
gggatgaggaaaatattctgga

SEQ ID NO: 43515 - DNA, 22 bp, synthetic construct
  misc_feature 1..22: note = chemically synthesized
  source 1..22: mol_type = other DNA
tggaaatatgatgatggttgca

SEQ ID NO: 43516 - DNA, 22 bp, synthetic construct
  misc_feature 1..22: note = chemically synthesized
  source 1..22: mol_type = other DNA
gaaatatgatgatggttgcaca

SEQ ID NO: 43517 - DNA, 22 bp, synthetic construct
  misc_feature 1..22: note = chemically synthesized
  source 1..22: mol_type = other DNA
cacaccactgtgaatgtactaa

SEQ ID NO: 43518 - DNA, 22 bp, synthetic construct
  misc_feature 1..22: note = chemically synthesized
  source 1..22: mol_type = other DNA
tgaatgtactaaatgccacttg

SEQ ID NO: 43519 - DNA, 22 bp, synthetic construct
  misc_feature 1..22: note = chemically synthesized
  source 1..22: mol_type = other DNA
aatgccacttggtggtaccctg

SEQ ID NO: 43520 - DNA, 22 bp, synthetic construct
  misc_feature 1..22: note = chemically synthesized
  source 1..22: mol_type = other DNA
ggtggtaccctgcaaaaatggt

SEQ ID NO: 43521 - DNA, 22 bp, synthetic construct
  misc_feature 1..22: note = chemically synthesized
  source 1..22: mol_type = other DNA
gtggtaccctgcaaaaatggtt

SEQ ID NO: 43522 - DNA, 22 bp, synthetic construct
  misc_feature 1..22: note = chemically synthesized
  source 1..22: mol_type = other DNA
caaaaatggttaaaatagtaac

SEQ ID NO: 43523 - DNA, 22 bp, synthetic construct
  misc_feature 1..22: note = chemically synthesized
  source 1..22: mol_type = other DNA
aaatagtaactcttacgctgtg

SEQ ID NO: 43524 - DNA, 22 bp, synthetic construct
  misc_feature 1..22: note = chemically synthesized
  source 1..22: mol_type = other DNA
ttacgctgtgtacattttattg

SEQ ID NO: 43525 - DNA, 22 bp, synthetic construct
  misc_feature 1..22: note = chemically synthesized
  source 1..22: mol_type = other DNA
acgctgtgtacattttattgca

SEQ ID NO: 43526 - DNA, 22 bp, synthetic construct
  misc_feature 1..22: note = chemically synthesized
  source 1..22: mol_type = other DNA
cgctgtgtacattttattgcaa

SEQ ID NO: 43527 - DNA, 22 bp, synthetic construct
  misc_feature 1..22: note = chemically synthesized
  source 1..22: mol_type = other DNA
tgtacattttattgcaataaaa

SEQ ID NO: 43528 - DNA, 22 bp, synthetic construct
  misc_feature 1..22: note = chemically synthesized
  source 1..22: mol_type = other DNA
tattgcaataaaaaagaatagt

SEQ ID NO: 43529 - DNA, 22 bp, synthetic construct
  misc_feature 1..22: note = chemically synthesized
  source 1..22: mol_type = other DNA
attgcaataaaaaagaatagtc

SEQ ID NO: 43530 - DNA, 22 bp, synthetic construct
  misc_feature 1..22: note = chemically synthesized
  source 1..22: mol_type = other DNA
ttgcaataaaaaagaatagtca

SEQ ID NO: 43531 - DNA, 22 bp, synthetic construct
  misc_feature 1..22: note = chemically synthesized
  source 1..22: mol_type = other DNA
caataaaaaagaatagtcatca

SEQ ID NO: 43532 - DNA, 22 bp, synthetic construct
  misc_feature 1..22: note = chemically synthesized
  source 1..22: mol_type = other DNA
actaagcattatcctttccagg

SEQ ID NO: 43533 - DNA, 22 bp, synthetic construct
  misc_feature 1..22: note = chemically synthesized
  source 1..22: mol_type = other DNA
ctaagcattatcctttccaggc

SEQ ID NO: 43534 - DNA, 22 bp, synthetic construct
  misc_feature 1..22: note = chemically synthesized
  source 1..22: mol_type = other DNA
agcattatcctttccaggcaca

SEQ ID NO: 43535 - DNA, 22 bp, synthetic construct
  misc_feature 1..22: note = chemically synthesized
  source 1..22: mol_type = other DNA
tcctttccaggcacaagcttat

SEQ ID NO: 43536 - DNA, 22 bp, synthetic construct
  misc_feature 1..22: note = chemically synthesized
  source 1..22: mol_type = other DNA
tccaggcacaagcttataatgt

SEQ ID NO: 43537 - DNA, 22 bp, synthetic construct
  misc_feature 1..22: note = chemically synthesized
  source 1..22: mol_type = other DNA
ccaggcacaagcttataatgtg

SEQ ID NO: 43538 - DNA, 22 bp, synthetic construct
  misc_feature 1..22: note = chemically synthesized
  source 1..22: mol_type = other DNA
caggcacaagcttataatgtgg

SEQ ID NO: 43539 - DNA, 22 bp, synthetic construct
  misc_feature 1..22: note = chemically synthesized
  source 1..22: mol_type = other DNA
ataatgtggtgtatctcacttc

SEQ ID NO: 43540 - DNA, 22 bp, synthetic construct
  misc_feature 1..22: note = chemically synthesized
  source 1..22: mol_type = other DNA
taatgtggtgtatctcacttca

SEQ ID NO: 43541 - DNA, 22 bp, synthetic construct
  misc_feature 1..22: note = chemically synthesized
  source 1..22: mol_type = other DNA
acttcatcctcacaacagtcct

SEQ ID NO: 43542 - DNA, 22 bp, synthetic construct
  misc_feature 1..22: note = chemically synthesized
  source 1..22: mol_type = other DNA
catcctcacaacagtcctatga

SEQ ID NO: 43543 - DNA, 22 bp, synthetic construct
  misc_feature 1..22: note = chemically synthesized
  source 1..22: mol_type = other DNA
atcctcacaacagtcctatgaa

SEQ ID NO: 43544 - DNA, 22 bp, synthetic construct
  misc_feature 1..22: note = chemically synthesized
  source 1..22: mol_type = other DNA
acaacagtcctatgaaacaggc

SEQ ID NO: 43545 - DNA, 22 bp, synthetic construct
  misc_feature 1..22: note = chemically synthesized
  source 1..22: mol_type = other DNA
tgaaacaggcagttccatcact

SEQ ID NO: 43546 - DNA, 22 bp, synthetic construct
  misc_feature 1..22: note = chemically synthesized
  source 1..22: mol_type = other DNA
catcactcctgctctacagtta

SEQ ID NO: 43547 - DNA, 22 bp, synthetic construct
  misc_feature 1..22: note = chemically synthesized
  source 1..22: mol_type = other DNA
ctgctctacagttaaggaaact

SEQ ID NO: 43548 - DNA, 22 bp, synthetic construct
  misc_feature 1..22: note = chemically synthesized
  source 1..22: mol_type = other DNA
ctctacagttaaggaaactgag

SEQ ID NO: 43549 - DNA, 22 bp, synthetic construct
  misc_feature 1..22: note = chemically synthesized
  source 1..22: mol_type = other DNA
tacagttaaggaaactgaggtg

SEQ ID NO: 43550 - DNA, 22 bp, synthetic construct
  misc_feature 1..22: note = chemically synthesized
  source 1..22: mol_type = other DNA
cagttaaggaaactgaggtgta

SEQ ID NO: 43551 - DNA, 22 bp, synthetic construct
  misc_feature 1..22: note = chemically synthesized
  source 1..22: mol_type = other DNA
aggaaactgaggtgtaaggagg

SEQ ID NO: 43552 - DNA, 22 bp, synthetic construct
  misc_feature 1..22: note = chemically synthesized
  source 1..22: mol_type = other DNA
aggtgtaaggaggttgtctagt

SEQ ID NO: 43553 - DNA, 22 bp, synthetic construct
  misc_feature 1..22: note = chemically synthesized
  source 1..22: mol_type = other DNA
tctagttcaacctgagcctggg

SEQ ID NO: 43554 - DNA, 22 bp, synthetic construct
  misc_feature 1..22: note = chemically synthesized
  source 1..22: mol_type = other DNA
gttcaacctgagcctgggtctg

SEQ ID NO: 43555 - DNA, 22 bp, synthetic construct
  misc_feature 1..22: note = chemically synthesized
  source 1..22: mol_type = other DNA
aacctgagcctgggtctgcgga

SEQ ID NO: 43556 - DNA, 22 bp, synthetic construct
  misc_feature 1..22: note = chemically synthesized
  source 1..22: mol_type = other DNA
agcctgggtctgcggagtcact

SEQ ID NO: 43557 - DNA, 22 bp, synthetic construct
  misc_feature 1..22: note = chemically synthesized
  source 1..22: mol_type = other DNA
ggtctgcggagtcactgcccaa

SEQ ID NO: 43558 - DNA, 22 bp, synthetic construct
  misc_feature 1..22: note = chemically synthesized
  source 1..22: mol_type = other DNA
cggagtcactgcccaaatgctt

SEQ ID NO: 43559 - DNA, 22 bp, synthetic construct
  misc_feature 1..22: note = chemically synthesized
  source 1..22: mol_type = other DNA
cccaaatgcttcctccccgtgc

SEQ ID NO: 43560 - DNA, 22 bp, synthetic construct
  misc_feature 1..22: note = chemically synthesized
  source 1..22: mol_type = other DNA
cctccccgtgcgcgttggcccc

SEQ ID NO: 43561 - DNA, 22 bp, synthetic construct
  misc_feature 1..22: note = chemically synthesized
  source 1..22: mol_type = other DNA
ctccccgtgcgcgttggccccc

SEQ ID NO: 43562 - DNA, 22 bp, synthetic construct
  misc_feature 1..22: note = chemically synthesized
  source 1..22: mol_type = other DNA
cccgtgcgcgttggcccccctc

SEQ ID NO: 43563 - DNA, 22 bp, synthetic construct
  misc_feature 1..22: note = chemically synthesized
  source 1..22: mol_type = other DNA
gcccccctcttgcttccaaccc

SEQ ID NO: 43564 - DNA, 22 bp, synthetic construct
  misc_feature 1..22: note = chemically synthesized
  source 1..22: mol_type = other DNA
ttgcttccaaccctccacatct

SEQ ID NO: 43565 - DNA, 22 bp, synthetic construct
  misc_feature 1..22: note = chemically synthesized
  source 1..22: mol_type = other DNA
gcttccaaccctccacatcttt

SEQ ID NO: 43566 - DNA, 22 bp, synthetic construct
  misc_feature 1..22: note = chemically synthesized
  source 1..22: mol_type = other DNA
cttccaaccctccacatctttg

SEQ ID NO: 43567 - DNA, 22 bp, synthetic construct
  misc_feature 1..22: note = chemically synthesized
  source 1..22: mol_type = other DNA
ccaaccctccacatctttgttc

SEQ ID NO: 43568 - DNA, 22 bp, synthetic construct
  misc_feature 1..22: note = chemically synthesized
  source 1..22: mol_type = other DNA
caaccctccacatctttgttca

SEQ ID NO: 43569 - DNA, 22 bp, synthetic construct
  misc_feature 1..22: note = chemically synthesized
  source 1..22: mol_type = other DNA
cacatctttgttcataaagttc

SEQ ID NO: 43570 - DNA, 22 bp, synthetic construct
  misc_feature 1..22: note = chemically synthesized
  source 1..22: mol_type = other DNA
tgttcataaagttcattcttat

SEQ ID NO: 43571 - DNA, 22 bp, synthetic construct
  misc_feature 1..22: note = chemically synthesized
  source 1..22: mol_type = other DNA
gttcataaagttcattcttatt

SEQ ID NO: 43572 - DNA, 22 bp, synthetic construct
  misc_feature 1..22: note = chemically synthesized
  source 1..22: mol_type = other DNA
ttcataaagttcattcttattc

SEQ ID NO: 43573 - DNA, 22 bp, synthetic construct
  misc_feature 1..22: note = chemically synthesized
  source 1..22: mol_type = other DNA
ataaagttcattcttattcctt

SEQ ID NO: 43574 - DNA, 22 bp, synthetic construct
  misc_feature 1..22: note = chemically synthesized
  source 1..22: mol_type = other DNA
attcttattccttaatattttc

SEQ ID NO: 43575 - DNA, 22 bp, synthetic construct
  misc_feature 1..22: note = chemically synthesized
  source 1..22: mol_type = other DNA
ttattccttaatattttctgag

SEQ ID NO: 43576 - DNA, 22 bp, synthetic construct
  misc_feature 1..22: note = chemically synthesized
  source 1..22: mol_type = other DNA
attccttaatattttctgagcc

SEQ ID NO: 43577 - DNA, 22 bp, synthetic construct
  misc_feature 1..22: note = chemically synthesized
  source 1..22: mol_type = other DNA
ttccttaatattttctgagcct

SEQ ID NO: 43578 - DNA, 22 bp, synthetic construct
  misc_feature 1..22: note = chemically synthesized
  source 1..22: mol_type = other DNA
cttaatattttctgagcctaag

SEQ ID NO: 43579 - DNA, 22 bp, synthetic construct
  misc_feature 1..22: note = chemically synthesized
  source 1..22: mol_type = other DNA
aatattttctgagcctaagttc

SEQ ID NO: 43580 - DNA, 22 bp, synthetic construct
  misc_feature 1..22: note = chemically synthesized
  source 1..22: mol_type = other DNA
atattttctgagcctaagttcc

SEQ ID NO: 43581 - DNA, 22 bp, synthetic construct
  misc_feature 1..22: note = chemically synthesized
  source 1..22: mol_type = other DNA
tctgagcctaagttcccataaa

SEQ ID NO: 43582 - DNA, 22 bp, synthetic construct
  misc_feature 1..22: note = chemically synthesized
  source 1..22: mol_type = other DNA
ctgagcctaagttcccataaat

SEQ ID NO: 43583 - DNA, 22 bp, synthetic construct
  misc_feature 1..22: note = chemically synthesized
  source 1..22: mol_type = other DNA
tgagcctaagttcccataaatt

SEQ ID NO: 43584 - DNA, 22 bp, synthetic construct
  misc_feature 1..22: note = chemically synthesized
  source 1..22: mol_type = other DNA
agcctaagttcccataaattat

SEQ ID NO: 43585 - DNA, 22 bp, synthetic construct
  misc_feature 1..22: note = chemically synthesized
  source 1..22: mol_type = other DNA
agttcccataaattatatagac

SEQ ID NO: 43586 - DNA, 22 bp, synthetic construct
  misc_feature 1..22: note = chemically synthesized
  source 1..22: mol_type = other DNA
ccataaattatatagacatatt

SEQ ID NO: 43587 - DNA, 22 bp, synthetic construct
  misc_feature 1..22: note = chemically synthesized
  source 1..22: mol_type = other DNA
tatagacatatttctgtctccc

SEQ ID NO: 43588 - DNA, 22 bp, synthetic construct
  misc_feature 1..22: note = chemically synthesized
  source 1..22: mol_type = other DNA
ctgtctcccaataacactgcca

SEQ ID NO: 43589 - DNA, 22 bp, synthetic construct
  misc_feature 1..22: note = chemically synthesized
  source 1..22: mol_type = other DNA
tgtctcccaataacactgccaa

SEQ ID NO: 43590 - DNA, 22 bp, synthetic construct
  misc_feature 1..22: note = chemically synthesized
  source 1..22: mol_type = other DNA
tctcccaataacactgccaatt

SEQ ID NO: 43591 - DNA, 22 bp, synthetic construct
  misc_feature 1..22: note = chemically synthesized
  source 1..22: mol_type = other DNA
ccaataacactgccaatttatt

SEQ ID NO: 43592 - DNA, 22 bp, synthetic construct
  misc_feature 1..22: note = chemically synthesized
  source 1..22: mol_type = other DNA
ccaatttattttctagaaggtt

SEQ ID NO: 43593 - DNA, 22 bp, synthetic construct
  misc_feature 1..22: note = chemically synthesized
  source 1..22: mol_type = other DNA
attttctagaaggttatgacag

SEQ ID NO: 43594 - DNA, 22 bp, synthetic construct
  misc_feature 1..22: note = chemically synthesized
  source 1..22: mol_type = other DNA
ttttctagaaggttatgacagt

SEQ ID NO: 43595 - DNA, 22 bp, synthetic construct
  misc_feature 1..22: note = chemically synthesized
  source 1..22: mol_type = other DNA
tctagaaggttatgacagtgta

SEQ ID NO: 43596 - DNA, 22 bp, synthetic construct
  misc_feature 1..22: note = chemically synthesized
  source 1..22: mol_type = other DNA
ctagaaggttatgacagtgtaa

SEQ ID NO: 43597 - DNA, 22 bp, synthetic construct
  misc_feature 1..22: note = chemically synthesized
  source 1..22: mol_type = other DNA
tagaaggttatgacagtgtaaa

SEQ ID NO: 43598 - DNA, 22 bp, synthetic construct
  misc_feature 1..22: note = chemically synthesized
  source 1..22: mol_type = other DNA
gaaggttatgacagtgtaaaat

SEQ ID NO: 43599 - DNA, 22 bp, synthetic construct
  misc_feature 1..22: note = chemically synthesized
  source 1..22: mol_type = other DNA
tgacagtgtaaaatgtcactag

SEQ ID NO: 43600 - DNA, 22 bp, synthetic construct
  misc_feature 1..22: note = chemically synthesized
  source 1..22: mol_type = other DNA
gaaaacaatcacttcaccacac

SEQ ID NO: 43601 - DNA, 22 bp, synthetic construct
  misc_feature 1..22: note = chemically synthesized
  source 1..22: mol_type = other DNA
caccacacttgtatgagtgttc

SEQ ID NO: 43602 - DNA, 22 bp, synthetic construct
  misc_feature 1..22: note = chemically synthesized
  source 1..22: mol_type = other DNA
accacacttgtatgagtgttca

SEQ ID NO: 43603 - DNA, 22 bp, synthetic construct
  misc_feature 1..22: note = chemically synthesized
  source 1..22: mol_type = other DNA
gtatgagtgttcaatttttaaa

SEQ ID NO: 43604 - DNA, 22 bp, synthetic construct
  misc_feature 1..22: note = chemically synthesized
  source 1..22: mol_type = other DNA
tatgagtgttcaatttttaaat

SEQ ID NO: 43605 - DNA, 22 bp, synthetic construct
  misc_feature 1..22: note = chemically synthesized
  source 1..22: mol_type = other DNA
aatttttaaatattagctaatc

SEQ ID NO: 43606 - DNA, 22 bp, synthetic construct
  misc_feature 1..22: note = chemically synthesized
  source 1..22: mol_type = other DNA
ttaaatattagctaatctaaca

SEQ ID NO: 43607 - DNA, 22 bp, synthetic construct
  misc_feature 1..22: note = chemically synthesized
  source 1..22: mol_type = other DNA
taaatattagctaatctaacag

SEQ ID NO: 43608 - DNA, 22 bp, synthetic construct
  misc_feature 1..22: note = chemically synthesized
  source 1..22: mol_type = other DNA
aaatattagctaatctaacagg

SEQ ID NO: 43609 - DNA, 22 bp, synthetic construct
  misc_feature 1..22: note = chemically synthesized
  source 1..22: mol_type = other DNA
aatattagctaatctaacaggt

SEQ ID NO: 43610 - DNA, 22 bp, synthetic construct
  misc_feature 1..22: note = chemically synthesized
  source 1..22: mol_type = other DNA
gctaatctaacaggttgaaatt

SEQ ID NO: 43611 - DNA, 22 bp, synthetic construct
  misc_feature 1..22: note = chemically synthesized
  source 1..22: mol_type = other DNA
atctaacaggttgaaattgtcc

SEQ ID NO: 43612 - DNA, 22 bp, synthetic construct
  misc_feature 1..22: note = chemically synthesized
  source 1..22: mol_type = other DNA
acaggttgaaattgtcctgatt

SEQ ID NO: 43613 - DNA, 22 bp, synthetic construct
  misc_feature 1..22: note = chemically synthesized
  source 1..22: mol_type = other DNA
aaattgtcctgattcattttct

SEQ ID NO: 43614 - DNA, 22 bp, synthetic construct
  misc_feature 1..22: note = chemically synthesized
  source 1..22: mol_type = other DNA
tcctgattcattttctaattta

SEQ ID NO: 43615 - DNA, 22 bp, synthetic construct
  misc_feature 1..22: note = chemically synthesized
  source 1..22: mol_type = other DNA
attcattttctaatttatactt

SEQ ID NO: 43616 - DNA, 22 bp, synthetic construct
  misc_feature 1..22: note = chemically synthesized
  source 1..22: mol_type = other DNA
attttctaatttatacttcttt

SEQ ID NO: 43617 - DNA, 22 bp, synthetic construct
  misc_feature 1..22: note = chemically synthesized
  source 1..22: mol_type = other DNA
tctaatttatacttctttgaca

SEQ ID NO: 43618 - DNA, 22 bp, synthetic construct
  misc_feature 1..22: note = chemically synthesized
  source 1..22: mol_type = other DNA
ctaatttatacttctttgacaa

SEQ ID NO: 43619 - DNA, 22 bp, synthetic construct
  misc_feature 1..22: note = chemically synthesized
  source 1..22: mol_type = other DNA
taatttatacttctttgacaat

SEQ ID NO: 43620 - DNA, 22 bp, synthetic construct
  misc_feature 1..22: note = chemically synthesized
  source 1..22: mol_type = other DNA
atttatacttctttgacaattt

SEQ ID NO: 43621 - DNA, 22 bp, synthetic construct
  misc_feature 1..22: note = chemically synthesized
  source 1..22: mol_type = other DNA
atacttctttgacaatttggga

SEQ ID NO: 43622 - DNA, 22 bp, synthetic construct
  misc_feature 1..22: note = chemically synthesized
  source 1..22: mol_type = other DNA
tacttctttgacaatttgggag

SEQ ID NO: 43623 - DNA, 22 bp, synthetic construct
  misc_feature 1..22: note = chemically synthesized
  source 1..22: mol_type = other DNA
ctttgacaatttgggagagtga

SEQ ID NO: 43624 - DNA, 22 bp, synthetic construct
  misc_feature 1..22: note = chemically synthesized
  source 1..22: mol_type = other DNA
tttgacaatttgggagagtgaa

SEQ ID NO: 43625 - DNA, 22 bp, synthetic construct
  misc_feature 1..22: note = chemically synthesized
  source 1..22: mol_type = other DNA
tgacaatttgggagagtgaaga

SEQ ID NO: 43626 - DNA, 22 bp, synthetic construct
  misc_feature 1..22: note = chemically synthesized
  source 1..22: mol_type = other DNA
gacaatttgggagagtgaagat

SEQ ID NO: 43627 - DNA, 22 bp, synthetic construct
  misc_feature 1..22: note = chemically synthesized
  source 1..22: mol_type = other DNA
acaatttgggagagtgaagatt

SEQ ID NO: 43628 - DNA, 22 bp, synthetic construct
  misc_feature 1..22: note = chemically synthesized
  source 1..22: mol_type = other DNA
gggagagtgaagattctcctgg

SEQ ID NO: 43629 - DNA, 22 bp, synthetic construct
  misc_feature 1..22: note = chemically synthesized
  source 1..22: mol_type = other DNA
ggagagtgaagattctcctggt

SEQ ID NO: 43630 - DNA, 22 bp, synthetic construct
  misc_feature 1..22: note = chemically synthesized
  source 1..22: mol_type = other DNA
tcctggttgtgtttattctttt

SEQ ID NO: 43631 - DNA, 22 bp, synthetic construct
  misc_feature 1..22: note = chemically synthesized
  source 1..22: mol_type = other DNA
ctggttgtgtttattcttttgt

SEQ ID NO: 43632 - DNA, 22 bp, synthetic construct
  misc_feature 1..22: note = chemically synthesized
  source 1..22: mol_type = other DNA
gttgtgtttattcttttgtgaa

SEQ ID NO: 43633 - DNA, 22 bp, synthetic construct
  misc_feature 1..22: note = chemically synthesized
  source 1..22: mol_type = other DNA
tgtttattcttttgtgaaaaac

SEQ ID NO: 43634 - DNA, 22 bp, synthetic construct
  misc_feature 1..22: note = chemically synthesized
  source 1..22: mol_type = other DNA
attcttttgtgaaaaactgctt

SEQ ID NO: 43635 - DNA, 22 bp, synthetic construct
  misc_feature 1..22: note = chemically synthesized
  source 1..22: mol_type = other DNA
ttcttttgtgaaaaactgcttt

SEQ ID NO: 43636 - DNA, 22 bp, synthetic construct
  misc_feature 1..22: note = chemically synthesized
  source 1..22: mol_type = other DNA
ttttgtgaaaaactgctttatt

SEQ ID NO: 43637 - DNA, 22 bp, synthetic construct
  misc_feature 1..22: note = chemically synthesized
  source 1..22: mol_type = other DNA
ttgtgaaaaactgctttatttt

SEQ ID NO: 43638 - DNA, 22 bp, synthetic construct
  misc_feature 1..22: note = chemically synthesized
  source 1..22: mol_type = other DNA
tgtgaaaaactgctttattttc

SEQ ID NO: 43639 - DNA, 22 bp, synthetic construct
  misc_feature 1..22: note = chemically synthesized
  source 1..22: mol_type = other DNA
gtgaaaaactgctttattttct

SEQ ID NO: 43640 - DNA, 22 bp, synthetic construct
  misc_feature 1..22: note = chemically synthesized
  source 1..22: mol_type = other DNA
tgaaaaactgctttattttctt

SEQ ID NO: 43641 - DNA, 22 bp, synthetic construct
  misc_feature 1..22: note = chemically synthesized
  source 1..22: mol_type = other DNA
ctttattttctttgccaaattc

SEQ ID NO: 43642 - DNA, 22 bp, synthetic construct
  misc_feature 1..22: note = chemically synthesized
  source 1..22: mol_type = other DNA
tattttctttgccaaattcaaa

SEQ ID NO: 43643 - DNA, 22 bp, synthetic construct
  misc_feature 1..22: note = chemically synthesized
  source 1..22: mol_type = other DNA
attttctttgccaaattcaaat

SEQ ID NO: 43644 - DNA, 22 bp, synthetic construct
  misc_feature 1..22: note = chemically synthesized
  source 1..22: mol_type = other DNA
ttttctttgccaaattcaaata

SEQ ID NO: 43645 - DNA, 22 bp, synthetic construct
  misc_feature 1..22: note = chemically synthesized
  source 1..22: mol_type = other DNA
tctttgccaaattcaaatagaa

SEQ ID NO: 43646 - DNA, 22 bp, synthetic construct
  misc_feature 1..22: note = chemically synthesized
  source 1..22: mol_type = other DNA
ctttgccaaattcaaatagaac

SEQ ID NO: 43647 - DNA, 22 bp, synthetic construct
  misc_feature 1..22: note = chemically synthesized
  source 1..22: mol_type = other DNA
tttgccaaattcaaatagaacg

SEQ ID NO: 43648 - DNA, 22 bp, synthetic construct
  misc_feature 1..22: note = chemically synthesized
  source 1..22: mol_type = other DNA
tgccaaattcaaatagaacggt

SEQ ID NO: 43649 - DNA, 22 bp, synthetic construct
  misc_feature 1..22: note = chemically synthesized
  source 1..22: mol_type = other DNA
gccaaattcaaatagaacggtt

SEQ ID NO: 43650 - DNA, 22 bp, synthetic construct
  misc_feature 1..22: note = chemically synthesized
  source 1..22: mol_type = other DNA
ccaaattcaaatagaacggttg

SEQ ID NO: 43651 - DNA, 22 bp, synthetic construct
  misc_feature 1..22: note = chemically synthesized
  source 1..22: mol_type = other DNA
aaatagaacggttgcaaaattg

SEQ ID NO: 43652 - DNA, 22 bp, synthetic construct
  misc_feature 1..22: note = chemically synthesized
  source 1..22: mol_type = other DNA
caaaattgccagaggaaatgct

SEQ ID NO: 43653 - DNA, 22 bp, synthetic construct
  misc_feature 1..22: note = chemically synthesized
  source 1..22: mol_type = other DNA
ccagaggaaatgctgtttttcc

SEQ ID NO: 43654 - DNA, 22 bp, synthetic construct
  misc_feature 1..22: note = chemically synthesized
  source 1..22: mol_type = other DNA
tttttccagatggacacaccca

SEQ ID NO: 43655 - DNA, 22 bp, synthetic construct
  misc_feature 1..22: note = chemically synthesized
  source 1..22: mol_type = other DNA
ttccagatggacacacccaggg

SEQ ID NO: 43656 - DNA, 22 bp, synthetic construct
  misc_feature 1..22: note = chemically synthesized
  source 1..22: mol_type = other DNA
tccagatggacacacccaggga

SEQ ID NO: 43657 - DNA, 22 bp, synthetic construct
  misc_feature 1..22: note = chemically synthesized
  source 1..22: mol_type = other DNA
ccagatggacacacccagggat

SEQ ID NO: 43658 - DNA, 22 bp, synthetic construct
  misc_feature 1..22: note = chemically synthesized
  source 1..22: mol_type = other DNA
cagatggacacacccagggatg

SEQ ID NO: 43659 - DNA, 22 bp, synthetic construct
  misc_feature 1..22: note = chemically synthesized
  source 1..22: mol_type = other DNA
cagtgttctcacaaataatcca

SEQ ID NO: 43660 - DNA, 22 bp, synthetic construct
  misc_feature 1..22: note = chemically synthesized
  source 1..22: mol_type = other DNA
agtgttctcacaaataatccag

SEQ ID NO: 43661 - DNA, 22 bp, synthetic construct
  misc_feature 1..22: note = chemically synthesized
  source 1..22: mol_type = other DNA
tcacaaataatccagttttcta

SEQ ID NO: 43662 - DNA, 22 bp, synthetic construct
  misc_feature 1..22: note = chemically synthesized
  source 1..22: mol_type = other DNA
acaaataatccagttttctaat

SEQ ID NO: 43663 - DNA, 22 bp, synthetic construct
  misc_feature 1..22: note = chemically synthesized
  source 1..22: mol_type = other DNA
tctaattttgcaagcccagctt

SEQ ID NO: 43664 - DNA, 22 bp, synthetic construct
  misc_feature 1..22: note = chemically synthesized
  source 1..22: mol_type = other DNA
ctaattttgcaagcccagcttt

SEQ ID NO: 43665 - DNA, 22 bp, synthetic construct
  misc_feature 1..22: note = chemically synthesized
  source 1..22: mol_type = other DNA
taattttgcaagcccagctttc

SEQ ID NO: 43666 - DNA, 22 bp, synthetic construct
  misc_feature 1..22: note = chemically synthesized
  source 1..22: mol_type = other DNA
attttgcaagcccagctttcat

SEQ ID NO: 43667 - DNA, 22 bp, synthetic construct
  misc_feature 1..22: note = chemically synthesized
  source 1..22: mol_type = other DNA
tgcaagcccagctttcattaga

SEQ ID NO: 43668 - DNA, 22 bp, synthetic construct
  misc_feature 1..22: note = chemically synthesized
  source 1..22: mol_type = other DNA
gcaagcccagctttcattagaa

SEQ ID NO: 43669 - DNA, 22 bp, synthetic construct
  misc_feature 1..22: note = chemically synthesized
  source 1..22: mol_type = other DNA
caagcccagctttcattagaat

SEQ ID NO: 43670 - DNA, 22 bp, synthetic construct
  misc_feature 1..22: note = chemically synthesized
  source 1..22: mol_type = other DNA
tcattagaattttgcaaaaatc

SEQ ID NO: 43671 - DNA, 22 bp, synthetic construct
  misc_feature 1..22: note = chemically synthesized
  source 1..22: mol_type = other DNA
cattagaattttgcaaaaatcc

SEQ ID NO: 43672 - DNA, 22 bp, synthetic construct
  misc_feature 1..22: note = chemically synthesized
  source 1..22: mol_type = other DNA
attagaattttgcaaaaatcct

SEQ ID NO: 43673 - DNA, 22 bp, synthetic construct
  misc_feature 1..22: note = chemically synthesized
  source 1..22: mol_type = other DNA
gaattttgcaaaaatccttgct

SEQ ID NO: 43674 - DNA, 22 bp, synthetic construct
  misc_feature 1..22: note = chemically synthesized
  source 1..22: mol_type = other DNA
tgcaaaaatccttgctttgcga

SEQ ID NO: 43675 - DNA, 22 bp, synthetic construct
  misc_feature 1..22: note = chemically synthesized
  source 1..22: mol_type = other DNA
gcaaaaatccttgctttgcgag

SEQ ID NO: 43676 - DNA, 22 bp, synthetic construct
  misc_feature 1..22: note = chemically synthesized
  source 1..22: mol_type = other DNA
caaaaatccttgctttgcgagc

SEQ ID NO: 43677 - DNA, 22 bp, synthetic construct
  misc_feature 1..22: note = chemically synthesized
  source 1..22: mol_type = other DNA
gctttgcgagcatggcacaggc

SEQ ID NO: 43678 - DNA, 22 bp, synthetic construct
  misc_feature 1..22: note = chemically synthesized
  source 1..22: mol_type = other DNA
ctttgcgagcatggcacaggca

SEQ ID NO: 43679 - DNA, 22 bp, synthetic construct
  misc_feature 1..22: note = chemically synthesized
  source 1..22: mol_type = other DNA
tgcgagcatggcacaggcaaga

SEQ ID NO: 43680 - DNA, 22 bp, synthetic construct
  misc_feature 1..22: note = chemically synthesized
  source 1..22: mol_type = other DNA
gcgagcatggcacaggcaagag

SEQ ID NO: 43681 - DNA, 22 bp, synthetic construct
  misc_feature 1..22: note = chemically synthesized
  source 1..22: mol_type = other DNA
cgagcatggcacaggcaagaga

SEQ ID NO: 43682 - DNA, 22 bp, synthetic construct
  misc_feature 1..22: note = chemically synthesized
  source 1..22: mol_type = other DNA
tctctttcttcccccagagcct

SEQ ID NO: 43683 - DNA, 22 bp, synthetic construct
  misc_feature 1..22: note = chemically synthesized
  source 1..22: mol_type = other DNA
tctttcttcccccagagccttt

SEQ ID NO: 43684 - DNA, 22 bp, synthetic construct
  misc_feature 1..22: note = chemically synthesized
  source 1..22: mol_type = other DNA
tttcttcccccagagcctttga

SEQ ID NO: 43685 - DNA, 22 bp, synthetic construct
  misc_feature 1..22: note = chemically synthesized
  source 1..22: mol_type = other DNA
tcttcccccagagcctttgact

SEQ ID NO: 43686 - DNA, 22 bp, synthetic construct
  misc_feature 1..22: note = chemically synthesized
  source 1..22: mol_type = other DNA
cttcccccagagcctttgactg

SEQ ID NO: 43687 - DNA, 22 bp, synthetic construct
  misc_feature 1..22: note = chemically synthesized
  source 1..22: mol_type = other DNA
ttcccccagagcctttgactgc

SEQ ID NO: 43688 - DNA, 22 bp, synthetic construct
  misc_feature 1..22: note = chemically synthesized
  source 1..22: mol_type = other DNA
cccccagagcctttgactgcac

SEQ ID NO: 43689 - DNA, 22 bp, synthetic construct
  misc_feature 1..22: note = chemically synthesized
  source 1..22: mol_type = other DNA
ccccagagcctttgactgcact

SEQ ID NO: 43690 - DNA, 22 bp, synthetic construct
  misc_feature 1..22: note = chemically synthesized
  source 1..22: mol_type = other DNA
tgactgcacttagatcattgac

SEQ ID NO: 43691 - DNA, 22 bp, synthetic construct
  misc_feature 1..22: note = chemically synthesized
  source 1..22: mol_type = other DNA
gactgcacttagatcattgact

SEQ ID NO: 43692 - DNA, 22 bp, synthetic construct
  misc_feature 1..22: note = chemically synthesized
  source 1..22: mol_type = other DNA
actgcacttagatcattgactt

SEQ ID NO: 43693 - DNA, 22 bp, synthetic construct
  misc_feature 1..22: note = chemically synthesized
  source 1..22: mol_type = other DNA
cacttagatcattgactttggt

SEQ ID NO: 43694 - DNA, 22 bp, synthetic construct
  misc_feature 1..22: note = chemically synthesized
  source 1..22: mol_type = other DNA
agatcattgactttggttcaga

SEQ ID NO: 43695 - DNA, 22 bp, synthetic construct
  misc_feature 1..22: note = chemically synthesized
  source 1..22: mol_type = other DNA
gatcattgactttggttcagaa

SEQ ID NO: 43696 - DNA, 22 bp, synthetic construct
  misc_feature 1..22: note = chemically synthesized
  source 1..22: mol_type = other DNA
actttggttcagaaacctgact

SEQ ID NO: 43697 - DNA, 22 bp, synthetic construct
  misc_feature 1..22: note = chemically synthesized
  source 1..22: mol_type = other DNA
tggttcagaaacctgactgcat

SEQ ID NO: 43698 - DNA, 22 bp, synthetic construct
  misc_feature 1..22: note = chemically synthesized
  source 1..22: mol_type = other DNA
ggttcagaaacctgactgcatc

SEQ ID NO: 43699 - DNA, 22 bp, synthetic construct
  misc_feature 1..22: note = chemically synthesized
  source 1..22: mol_type = other DNA
gttcagaaacctgactgcatct

SEQ ID NO: 43700 - DNA, 22 bp, synthetic construct
  misc_feature 1..22: note = chemically synthesized
  source 1..22: mol_type = other DNA
agaaacctgactgcatctggag

SEQ ID NO: 43701 - DNA, 22 bp, synthetic construct
  misc_feature 1..22: note = chemically synthesized
  source 1..22: mol_type = other DNA
actgcatctggagttgacatga

SEQ ID NO: 43702 - DNA, 22 bp, synthetic construct
  misc_feature 1..22: note = chemically synthesized
  source 1..22: mol_type = other DNA
catctggagttgacatgagcag

SEQ ID NO: 43703 - DNA, 22 bp, synthetic construct
  misc_feature 1..22: note = chemically synthesized
  source 1..22: mol_type = other DNA
gagttgacatgagcagcatgga

SEQ ID NO: 43704 - DNA, 22 bp, synthetic construct
  misc_feature 1..22: note = chemically synthesized
  source 1..22: mol_type = other DNA
acatgagcagcatggaagatgt

SEQ ID NO: 43705 - DNA, 22 bp, synthetic construct
  misc_feature 1..22: note = chemically synthesized
  source 1..22: mol_type = other DNA
gtcccagcacctcactccagag

SEQ ID NO: 43706 - DNA, 22 bp, synthetic construct
  misc_feature 1..22: note = chemically synthesized
  source 1..22: mol_type = other DNA
tcccagcacctcactccagagg

SEQ ID NO: 43707 - DNA, 22 bp, synthetic construct
  misc_feature 1..22: note = chemically synthesized
  source 1..22: mol_type = other DNA
actccagaggccagctcagctc

SEQ ID NO: 43708 - DNA, 22 bp, synthetic construct
  misc_feature 1..22: note = chemically synthesized
  source 1..22: mol_type = other DNA
cagaggccagctcagctcaatc

SEQ ID NO: 43709 - DNA, 22 bp, synthetic construct
  misc_feature 1..22: note = chemically synthesized
  source 1..22: mol_type = other DNA
agctcaatctgggcagagctgc

SEQ ID NO: 43710 - DNA, 22 bp, synthetic construct
  misc_feature 1..22: note = chemically synthesized
  source 1..22: mol_type = other DNA
aatctgggcagagctgcatgat

SEQ ID NO: 43711 - DNA, 22 bp, synthetic construct
  misc_feature 1..22: note = chemically synthesized
  source 1..22: mol_type = other DNA
ggcagagctgcatgatggaagt

SEQ ID NO: 43712 - DNA, 22 bp, synthetic construct
  misc_feature 1..22: note = chemically synthesized
  source 1..22: mol_type = other DNA
catgatggaagtttctgactac

SEQ ID NO: 43713 - DNA, 22 bp, synthetic construct
  misc_feature 1..22: note = chemically synthesized
  source 1..22: mol_type = other DNA
ctgactaccaagcatcgggcag

SEQ ID NO: 43714 - DNA, 22 bp, synthetic construct
  misc_feature 1..22: note = chemically synthesized
  source 1..22: mol_type = other DNA
tgactaccaagcatcgggcaga

SEQ ID NO: 43715 - DNA, 22 bp, synthetic construct
  misc_feature 1..22: note = chemically synthesized
  source 1..22: mol_type = other DNA
actaccaagcatcgggcagagg

SEQ ID NO: 43716 - DNA, 22 bp, synthetic construct
  misc_feature 1..22: note = chemically synthesized
  source 1..22: mol_type = other DNA
ccaagcatcgggcagagggtgc

SEQ ID NO: 43717 - DNA, 22 bp, synthetic construct
  misc_feature 1..22: note = chemically synthesized
  source 1..22: mol_type = other DNA
gactacatagttgtgtgaggga

SEQ ID NO: 43718 - DNA, 22 bp, synthetic construct
  misc_feature 1..22: note = chemically synthesized
  source 1..22: mol_type = other DNA
catagttgtgtgagggagcacc

SEQ ID NO: 43719 - DNA, 22 bp, synthetic construct
  misc_feature 1..22: note = chemically synthesized
  source 1..22: mol_type = other DNA
tgtgagggagcaccgttctcta

SEQ ID NO: 43720 - DNA, 22 bp, synthetic construct
  misc_feature 1..22: note = chemically synthesized
  source 1..22: mol_type = other DNA
tctagaatctgctatttgagca

SEQ ID NO: 43721 - DNA, 22 bp, synthetic construct
  misc_feature 1..22: note = chemically synthesized
  source 1..22: mol_type = other DNA
tagaatctgctatttgagcaag

SEQ ID NO: 43722 - DNA, 22 bp, synthetic construct
  misc_feature 1..22: note = chemically synthesized
  source 1..22: mol_type = other DNA
gaatctgctatttgagcaaggc

SEQ ID NO: 43723 - DNA, 22 bp, synthetic construct
  misc_feature 1..22: note = chemically synthesized
  source 1..22: mol_type = other DNA
ctatttgagcaaggcaaacatc

SEQ ID NO: 43724 - DNA, 22 bp, synthetic construct
  misc_feature 1..22: note = chemically synthesized
  source 1..22: mol_type = other DNA
tttgagcaaggcaaacatcctg

SEQ ID NO: 43725 - DNA, 22 bp, synthetic construct
  misc_feature 1..22: note = chemically synthesized
  source 1..22: mol_type = other DNA
gagcaaggcaaacatcctgata

SEQ ID NO: 43726 - DNA, 22 bp, synthetic construct
  misc_feature 1..22: note = chemically synthesized
  source 1..22: mol_type = other DNA
agcaaggcaaacatcctgataa

SEQ ID NO: 43727 - DNA, 22 bp, synthetic construct
  misc_feature 1..22: note = chemically synthesized
  source 1..22: mol_type = other DNA
ataatggtgaaaacctaccgca

SEQ ID NO: 43728 - DNA, 22 bp, synthetic construct
  misc_feature 1..22: note = chemically synthesized
  source 1..22: mol_type = other DNA
ccgcaagttgccaggaaagttg

SEQ ID NO: 43729 - DNA, 22 bp, synthetic construct
  misc_feature 1..22: note = chemically synthesized
  source 1..22: mol_type = other DNA
ccaggaaagttgatgtggtctg

SEQ ID NO: 43730 - DNA, 22 bp, synthetic construct
  misc_feature 1..22: note = chemically synthesized
  source 1..22: mol_type = other DNA
atgtggtctgcgagtaggtgct

SEQ ID NO: 43731 - DNA, 22 bp, synthetic construct
  misc_feature 1..22: note = chemically synthesized
  source 1..22: mol_type = other DNA
cgagtaggtgctgccatccagt

SEQ ID NO: 43732 - DNA, 22 bp, synthetic construct
  misc_feature 1..22: note = chemically synthesized
  source 1..22: mol_type = other DNA
ccatccagtggccgacatagag

SEQ ID NO: 43733 - DNA, 22 bp, synthetic construct
  misc_feature 1..22: note = chemically synthesized
  source 1..22: mol_type = other DNA
tgagggcaggtaggccacaggt

SEQ ID NO: 43734 - DNA, 22 bp, synthetic construct
  misc_feature 1..22: note = chemically synthesized
  source 1..22: mol_type = other DNA
agggcaggtaggccacaggtga

SEQ ID NO: 43735 - DNA, 22 bp, synthetic construct
  misc_feature 1..22: note = chemically synthesized
  source 1..22: mol_type = other DNA
aagccctccctgatggggcctt

SEQ ID NO: 43736 - DNA, 22 bp, synthetic construct
  misc_feature 1..22: note = chemically synthesized
  source 1..22: mol_type = other DNA
cctgatggggccttggggagag

SEQ ID NO: 43737 - DNA, 22 bp, synthetic construct
  misc_feature 1..22: note = chemically synthesized
  source 1..22: mol_type = other DNA
atggggccttggggagagggca

SEQ ID NO: 43738 - DNA, 22 bp, synthetic construct
  misc_feature 1..22: note = chemically synthesized
  source 1..22: mol_type = other DNA
ggggagagggcagcagggtaag

SEQ ID NO: 43739 - DNA, 22 bp, synthetic construct
  misc_feature 1..22: note = chemically synthesized
  source 1..22: mol_type = other DNA
gggagagggcagcagggtaagt

SEQ ID NO: 43740 - DNA, 22 bp, synthetic construct
  misc_feature 1..22: note = chemically synthesized
  source 1..22: mol_type = other DNA
attgtggatgacgactgacctg

SEQ ID NO: 43741 - DNA, 22 bp, synthetic construct
  misc_feature 1..22: note = chemically synthesized
  source 1..22: mol_type = other DNA
tggatgacgactgacctggaaa

SEQ ID NO: 43742 - DNA, 22 bp, synthetic construct
  misc_feature 1..22: note = chemically synthesized
  source 1..22: mol_type = other DNA
acctggaaaatccccttggcct

SEQ ID NO: 43743 - DNA, 22 bp, synthetic construct
  misc_feature 1..22: note = chemically synthesized
  source 1..22: mol_type = other DNA
gaaaatccccttggcctcaaca

SEQ ID NO: 43744 - DNA, 22 bp, synthetic construct
  misc_feature 1..22: note = chemically synthesized
  source 1..22: mol_type = other DNA
ggcctcaacacctccaaactct

SEQ ID NO: 43745 - DNA, 22 bp, synthetic construct
  misc_feature 1..22: note = chemically synthesized
  source 1..22: mol_type = other DNA
gcctcaacacctccaaactctg

SEQ ID NO: 43746 - DNA, 22 bp, synthetic construct
  misc_feature 1..22: note = chemically synthesized
  source 1..22: mol_type = other DNA
aacacctccaaactctgcattt

SEQ ID NO: 43747 - DNA, 22 bp, synthetic construct
  misc_feature 1..22: note = chemically synthesized
  source 1..22: mol_type = other DNA
caaactctgcatttgatccaag

SEQ ID NO: 43748 - DNA, 22 bp, synthetic construct
  misc_feature 1..22: note = chemically synthesized
  source 1..22: mol_type = other DNA
tgcatttgatccaagtcaggga

SEQ ID NO: 43749 - DNA, 22 bp, synthetic construct
  misc_feature 1..22: note = chemically synthesized
  source 1..22: mol_type = other DNA
catttgatccaagtcagggaac

SEQ ID NO: 43750 - DNA, 22 bp, synthetic construct
  misc_feature 1..22: note = chemically synthesized
  source 1..22: mol_type = other DNA
gatccaagtcagggaacacctg

SEQ ID NO: 43751 - DNA, 22 bp, synthetic construct
  misc_feature 1..22: note = chemically synthesized
  source 1..22: mol_type = other DNA
atccaagtcagggaacacctgg

SEQ ID NO: 43752 - DNA, 22 bp, synthetic construct
  misc_feature 1..22: note = chemically synthesized
  source 1..22: mol_type = other DNA
gaaacatgaaggggagagcagg

SEQ ID NO: 43753 - DNA, 22 bp, synthetic construct
  misc_feature 1..22: note = chemically synthesized
  source 1..22: mol_type = other DNA
tgacctccctctcagaggctga

SEQ ID NO: 43754 - DNA, 22 bp, synthetic construct
  misc_feature 1..22: note = chemically synthesized
  source 1..22: mol_type = other DNA
gacctccctctcagaggctgag

SEQ ID NO: 43755 - DNA, 22 bp, synthetic construct
  misc_feature 1..22: note = chemically synthesized
  source 1..22: mol_type = other DNA
acctccctctcagaggctgaga

SEQ ID NO: 43756 - DNA, 22 bp, synthetic construct
  misc_feature 1..22: note = chemically synthesized
  source 1..22: mol_type = other DNA
cctctcagaggctgagaacgcc

SEQ ID NO: 43757 - DNA, 22 bp, synthetic construct
  misc_feature 1..22: note = chemically synthesized
  source 1..22: mol_type = other DNA
tcagaggctgagaacgccaatt

SEQ ID NO: 43758 - DNA, 22 bp, synthetic construct
  misc_feature 1..22: note = chemically synthesized
  source 1..22: mol_type = other DNA
agaggctgagaacgccaattga

SEQ ID NO: 43759 - DNA, 22 bp, synthetic construct
  misc_feature 1..22: note = chemically synthesized
  source 1..22: mol_type = other DNA
agaacgccaattgacctgatgt

SEQ ID NO: 43760 - DNA, 22 bp, synthetic construct
  misc_feature 1..22: note = chemically synthesized
  source 1..22: mol_type = other DNA
acctgatgtcattattgacatg

SEQ ID NO: 43761 - DNA, 22 bp, synthetic construct
  misc_feature 1..22: note = chemically synthesized
  source 1..22: mol_type = other DNA
atgtcattattgacatgtagaa

SEQ ID NO: 43762 - DNA, 22 bp, synthetic construct
  misc_feature 1..22: note = chemically synthesized
  source 1..22: mol_type = other DNA
ttgacatgtagaaaattgatga

SEQ ID NO: 43763 - DNA, 22 bp, synthetic construct
  misc_feature 1..22: note = chemically synthesized
  source 1..22: mol_type = other DNA
acatgtagaaaattgatgaaca

SEQ ID NO: 43764 - DNA, 22 bp, synthetic construct
  misc_feature 1..22: note = chemically synthesized
  source 1..22: mol_type = other DNA
atgaacaggcctgagttatgtt

SEQ ID NO: 43765 - DNA, 22 bp, synthetic construct
  misc_feature 1..22: note = chemically synthesized
  source 1..22: mol_type = other DNA
agttatgttttgtggcacctca

SEQ ID NO: 43766 - DNA, 22 bp, synthetic construct
  misc_feature 1..22: note = chemically synthesized
  source 1..22: mol_type = other DNA
tgttttgtggcacctcatggtc

SEQ ID NO: 43767 - DNA, 22 bp, synthetic construct
  misc_feature 1..22: note = chemically synthesized
  source 1..22: mol_type = other DNA
tgtggcacctcatggtctagtt

SEQ ID NO: 43768 - DNA, 22 bp, synthetic construct
  misc_feature 1..22: note = chemically synthesized
  source 1..22: mol_type = other DNA
gtggcacctcatggtctagtta

SEQ ID NO: 43769 - DNA, 22 bp, synthetic construct
  misc_feature 1..22: note = chemically synthesized
  source 1..22: mol_type = other DNA
tggcacctcatggtctagttag

SEQ ID NO: 43770 - DNA, 22 bp, synthetic construct
  misc_feature 1..22: note = chemically synthesized
  source 1..22: mol_type = other DNA
atggtctagttagtgttctgag

SEQ ID NO: 43771 - DNA, 22 bp, synthetic construct
  misc_feature 1..22: note = chemically synthesized
  source 1..22: mol_type = other DNA
gttagtgttctgagaatcattt

SEQ ID NO: 43772 - DNA, 22 bp, synthetic construct
  misc_feature 1..22: note = chemically synthesized
  source 1..22: mol_type = other DNA
gtgttctgagaatcattttctc

SEQ ID NO: 43773 - DNA, 22 bp, synthetic construct
  misc_feature 1..22: note = chemically synthesized
  source 1..22: mol_type = other DNA
tgagaatcattttctcagtgga

SEQ ID NO: 43774 - DNA, 22 bp, synthetic construct
  misc_feature 1..22: note = chemically synthesized
  source 1..22: mol_type = other DNA
agaatcattttctcagtggacc

SEQ ID NO: 43775 - DNA, 22 bp, synthetic construct
  misc_feature 1..22: note = chemically synthesized
  source 1..22: mol_type = other DNA
tctcagtggacctgcaggtgag

SEQ ID NO: 43776 - DNA, 22 bp, synthetic construct
  misc_feature 1..22: note = chemically synthesized
  source 1..22: mol_type = other DNA
ctcagtggacctgcaggtgaga

SEQ ID NO: 43777 - DNA, 22 bp, synthetic construct
  misc_feature 1..22: note = chemically synthesized
  source 1..22: mol_type = other DNA
tcagtggacctgcaggtgagac

SEQ ID NO: 43778 - DNA, 22 bp, synthetic construct
  misc_feature 1..22: note = chemically synthesized
  source 1..22: mol_type = other DNA
agtggacctgcaggtgagacca

SEQ ID NO: 43779 - DNA, 22 bp, synthetic construct
  misc_feature 1..22: note = chemically synthesized
  source 1..22: mol_type = other DNA
caggtgagaccaggcgaggcag

SEQ ID NO: 43780 - DNA, 22 bp, synthetic construct
  misc_feature 1..22: note = chemically synthesized
  source 1..22: mol_type = other DNA
gtgggggatggtggttagaaat

SEQ ID NO: 43781 - DNA, 22 bp, synthetic construct
  misc_feature 1..22: note = chemically synthesized
  source 1..22: mol_type = other DNA
gaaatgtgtggatggttgtggg

SEQ ID NO: 43782 - DNA, 22 bp, synthetic construct
  misc_feature 1..22: note = chemically synthesized
  source 1..22: mol_type = other DNA
tggggcagaagaaacagcaagt

SEQ ID NO: 43783 - DNA, 22 bp, synthetic construct
  misc_feature 1..22: note = chemically synthesized
  source 1..22: mol_type = other DNA
tgggccagctacaaactggtta

SEQ ID NO: 43784 - DNA, 22 bp, synthetic construct
  misc_feature 1..22: note = chemically synthesized
  source 1..22: mol_type = other DNA
ggccagctacaaactggttata

SEQ ID NO: 43785 - DNA, 22 bp, synthetic construct
  misc_feature 1..22: note = chemically synthesized
  source 1..22: mol_type = other DNA
caaactggttatatgatgtcta

SEQ ID NO: 43786 - DNA, 22 bp, synthetic construct
  misc_feature 1..22: note = chemically synthesized
  source 1..22: mol_type = other DNA
gttatatgatgtctactgatga

SEQ ID NO: 43787 - DNA, 22 bp, synthetic construct
  misc_feature 1..22: note = chemically synthesized
  source 1..22: mol_type = other DNA
tatgatgtctactgatgatgat

SEQ ID NO: 43788 - DNA, 22 bp, synthetic construct
  misc_feature 1..22: note = chemically synthesized
  source 1..22: mol_type = other DNA
ctgatgatgatagtgatggtgg

SEQ ID NO: 43789 - DNA, 22 bp, synthetic construct
  misc_feature 1..22: note = chemically synthesized
  source 1..22: mol_type = other DNA
atgatgatagtgatggtggtgg

SEQ ID NO: 43790 - DNA, 22 bp, synthetic construct
  misc_feature 1..22: note = chemically synthesized
  source 1..22: mol_type = other DNA
tgatggtggtggaatgatgatg

SEQ ID NO: 43791 - DNA, 22 bp, synthetic construct
  misc_feature 1..22: note = chemically synthesized
  source 1..22: mol_type = other DNA
gtgatggtggtagtggtcgtgg

SEQ ID NO: 43792 - DNA, 22 bp, synthetic construct
  misc_feature 1..22: note = chemically synthesized
  source 1..22: mol_type = other DNA
atggtggtggtaatgataatga

SEQ ID NO: 43793 - DNA, 22 bp, synthetic construct
  misc_feature 1..22: note = chemically synthesized
  source 1..22: mol_type = other DNA
tcatgatgatagcggtggtgat

SEQ ID NO: 43794 - DNA, 22 bp, synthetic construct
  misc_feature 1..22: note = chemically synthesized
  source 1..22: mol_type = other DNA
agggtgatgataatagtgacag

SEQ ID NO: 43795 - DNA, 22 bp, synthetic construct
  misc_feature 1..22: note = chemically synthesized
  source 1..22: mol_type = other DNA
agtagtaatgatggtgatggtg

SEQ ID NO: 43796 - DNA, 22 bp, synthetic construct
  misc_feature 1..22: note = chemically synthesized
  source 1..22: mol_type = other DNA
tggtgatgatggtggtggtagt

SEQ ID NO: 43797 - DNA, 22 bp, synthetic construct
  misc_feature 1..22: note = chemically synthesized
  source 1..22: mol_type = other DNA
agggtgatgataatagtgatag

SEQ ID NO: 43798 - DNA, 22 bp, synthetic construct
  misc_feature 1..22: note = chemically synthesized
  source 1..22: mol_type = other DNA
tcactattatcatcaccctcaa

SEQ ID NO: 43799 - DNA, 22 bp, synthetic construct
  misc_feature 1..22: note = chemically synthesized
  source 1..22: mol_type = other DNA
ttatcatcaccctcaacatcat

SEQ ID NO: 43800 - DNA, 22 bp, synthetic construct
  misc_feature 1..22: note = chemically synthesized
  source 1..22: mol_type = other DNA
tcatcaccctcaacatcatcac

SEQ ID NO: 43801 - DNA, 22 bp, synthetic construct
  misc_feature 1..22: note = chemically synthesized
  source 1..22: mol_type = other DNA
aacatcatcaccatcatcacta

SEQ ID NO: 43802 - DNA, 22 bp, synthetic construct
  misc_feature 1..22: note = chemically synthesized
  source 1..22: mol_type = other DNA
tcatcaccaccaccatcatcgt

SEQ ID NO: 43803 - DNA, 22 bp, synthetic construct
  misc_feature 1..22: note = chemically synthesized
  source 1..22: mol_type = other DNA
ctaccactaccaccaccatcat

SEQ ID NO: 43804 - DNA, 22 bp, synthetic construct
  misc_feature 1..22: note = chemically synthesized
  source 1..22: mol_type = other DNA
ccactaccaccaccatcatcac

SEQ ID NO: 43805 - DNA, 22 bp, synthetic construct
  misc_feature 1..22: note = chemically synthesized
  source 1..22: mol_type = other DNA
ccaccaccatcatcaccacagc

SEQ ID NO: 43806 - DNA, 22 bp, synthetic construct
  misc_feature 1..22: note = chemically synthesized
  source 1..22: mol_type = other DNA
ctactcagcaccaccatcatca

SEQ ID NO: 43807 - DNA, 22 bp, synthetic construct
  misc_feature 1..22: note = chemically synthesized
  source 1..22: mol_type = other DNA
ctcagcaccaccatcatcattc

SEQ ID NO: 43808 - DNA, 22 bp, synthetic construct
  misc_feature 1..22: note = chemically synthesized
  source 1..22: mol_type = other DNA
agcaccaccatcatcattccac

SEQ ID NO: 43809 - DNA, 22 bp, synthetic construct
  misc_feature 1..22: note = chemically synthesized
  source 1..22: mol_type = other DNA
caccaccatcaccatcattcca

SEQ ID NO: 43810 - DNA, 22 bp, synthetic construct
  misc_feature 1..22: note = chemically synthesized
  source 1..22: mol_type = other DNA
caccatcaccattatcattacc

SEQ ID NO: 43811 - DNA, 22 bp, synthetic construct
  misc_feature 1..22: note = chemically synthesized
  source 1..22: mol_type = other DNA
tcattaccaccaccactgtcac

SEQ ID NO: 43812 - DNA, 22 bp, synthetic construct
  misc_feature 1..22: note = chemically synthesized
  source 1..22: mol_type = other DNA
ccaccaccactgtcactattat

SEQ ID NO: 43813 - DNA, 22 bp, synthetic construct
  misc_feature 1..22: note = chemically synthesized
  source 1..22: mol_type = other DNA
tcactattatcatcaccctcaa

SEQ ID NO: 43814 - DNA, 22 bp, synthetic construct
  misc_feature 1..22: note = chemically synthesized
  source 1..22: mol_type = other DNA
ttatcatcaccctcaacatcat

SEQ ID NO: 43815 - DNA, 22 bp, synthetic construct
  misc_feature 1..22: note = chemically synthesized
  source 1..22: mol_type = other DNA
tcatcaccctcaacatcatcac

SEQ ID NO: 43816 - DNA, 22 bp, synthetic construct
  misc_feature 1..22: note = chemically synthesized
  source 1..22: mol_type = other DNA
aacatcatcaccaccaccatca

SEQ ID NO: 43817 - DNA, 22 bp, synthetic construct
  misc_feature 1..22: note = chemically synthesized
  source 1..22: mol_type = other DNA
ctaccaccaccaccaccatcac

SEQ ID NO: 43818 - DNA, 22 bp, synthetic construct
  misc_feature 1..22: note = chemically synthesized
  source 1..22: mol_type = other DNA
ccaccaccaccaccatcaccat

SEQ ID NO: 43819 - DNA, 22 bp, synthetic construct
  misc_feature 1..22: note = chemically synthesized
  source 1..22: mol_type = other DNA
taccaccatcaccattatcatc

SEQ ID NO: 43820 - DNA, 22 bp, synthetic construct
  misc_feature 1..22: note = chemically synthesized
  source 1..22: mol_type = other DNA
ccaccatcaccattatcatcac

SEQ ID NO: 43821 - DNA, 22 bp, synthetic construct
  misc_feature 1..22: note = chemically synthesized
  source 1..22: mol_type = other DNA
tcatcaccatcaccatcaccac

SEQ ID NO: 43822 - DNA, 22 bp, synthetic construct
  misc_feature 1..22: note = chemically synthesized
  source 1..22: mol_type = other DNA
tcatcatgataatcattatcat

SEQ ID NO: 43823 - DNA, 22 bp, synthetic construct
  misc_feature 1..22: note = chemically synthesized
  source 1..22: mol_type = other DNA
tcattaccaccaccattagcat

SEQ ID NO: 43824 - DNA, 22 bp, synthetic construct
  misc_feature 1..22: note = chemically synthesized
  source 1..22: mol_type = other DNA
ccaccaccattagcattatcat

SEQ ID NO: 43825 - DNA, 22 bp, synthetic construct
  misc_feature 1..22: note = chemically synthesized
  source 1..22: mol_type = other DNA
gcattatcattaccaccaccat

SEQ ID NO: 43826 - DNA, 22 bp, synthetic construct
  misc_feature 1..22: note = chemically synthesized
  source 1..22: mol_type = other DNA
tcattaccaccaccatcactat

SEQ ID NO: 43827 - DNA, 22 bp, synthetic construct
  misc_feature 1..22: note = chemically synthesized
  source 1..22: mol_type = other DNA
ccaccaccatcactatcactat

SEQ ID NO: 43828 - DNA, 22 bp, synthetic construct
  misc_feature 1..22: note = chemically synthesized
  source 1..22: mol_type = other DNA
tcactatcaccatcaccacgac

SEQ ID NO: 43829 - DNA, 22 bp, synthetic construct
  misc_feature 1..22: note = chemically synthesized
  source 1..22: mol_type = other DNA
tcaccatcaccacgaccactac

SEQ ID NO: 43830 - DNA, 22 bp, synthetic construct
  misc_feature 1..22: note = chemically synthesized
  source 1..22: mol_type = other DNA
ccaccatcaccaacaccatcat

SEQ ID NO: 43831 - DNA, 22 bp, synthetic construct
  misc_feature 1..22: note = chemically synthesized
  source 1..22: mol_type = other DNA
ctacccaccaccaccatcatca

SEQ ID NO: 43832 - DNA, 22 bp, synthetic construct
  misc_feature 1..22: note = chemically synthesized
  source 1..22: mol_type = other DNA
cccaccaccaccatcatcatca

SEQ ID NO: 43833 - DNA, 22 bp, synthetic construct
  misc_feature 1..22: note = chemically synthesized
  source 1..22: mol_type = other DNA
caccaccatcacaattattacc

SEQ ID NO: 43834 - DNA, 22 bp, synthetic construct
  misc_feature 1..22: note = chemically synthesized
  source 1..22: mol_type = other DNA
ttaccaccaccaccatcaccac

SEQ ID NO: 43835 - DNA, 22 bp, synthetic construct
  misc_feature 1..22: note = chemically synthesized
  source 1..22: mol_type = other DNA
ccaccaccaccatcaccaccac

SEQ ID NO: 43836 - DNA, 22 bp, synthetic construct
  misc_feature 1..22: note = chemically synthesized
  source 1..22: mol_type = other DNA
tcatcatcagtagacatcatat

SEQ ID NO: 43837 - DNA, 22 bp, synthetic construct
  misc_feature 1..22: note = chemically synthesized
  source 1..22: mol_type = other DNA
gtagctggcccagagcctactt

SEQ ID NO: 43838 - DNA, 22 bp, synthetic construct
  misc_feature 1..22: note = chemically synthesized
  source 1..22: mol_type = other DNA
tagctggcccagagcctacttg

SEQ ID NO: 43839 - DNA, 22 bp, synthetic construct
  misc_feature 1..22: note = chemically synthesized
  source 1..22: mol_type = other DNA
gcccagagcctacttgctgttt

SEQ ID NO: 43840 - DNA, 22 bp, synthetic construct
  misc_feature 1..22: note = chemically synthesized
  source 1..22: mol_type = other DNA
cttgctgtttcttctgccccac

SEQ ID NO: 43841 - DNA, 22 bp, synthetic construct
  misc_feature 1..22: note = chemically synthesized
  source 1..22: mol_type = other DNA
gctgtttcttctgccccacaac

SEQ ID NO: 43842 - DNA, 22 bp, synthetic construct
  misc_feature 1..22: note = chemically synthesized
  source 1..22: mol_type = other DNA
ctgtttcttctgccccacaacc

SEQ ID NO: 43843 - DNA, 22 bp, synthetic construct
  misc_feature 1..22: note = chemically synthesized
  source 1..22: mol_type = other DNA
tttcttctgccccacaaccatc

SEQ ID NO: 43844 - DNA, 22 bp, synthetic construct
  misc_feature 1..22: note = chemically synthesized
  source 1..22: mol_type = other DNA
cttctgccccacaaccatccac

SEQ ID NO: 43845 - DNA, 22 bp, synthetic construct
  misc_feature 1..22: note = chemically synthesized
  source 1..22: mol_type = other DNA
ttctgccccacaaccatccaca

SEQ ID NO: 43846 - DNA, 22 bp, synthetic construct
  misc_feature 1..22: note = chemically synthesized
  source 1..22: mol_type = other DNA
ctgccccacaaccatccacaca

SEQ ID NO: 43847 - DNA, 22 bp, synthetic construct
  misc_feature 1..22: note = chemically synthesized
  source 1..22: mol_type = other DNA
tgccccacaaccatccacacat

SEQ ID NO: 43848 - DNA, 22 bp, synthetic construct
  misc_feature 1..22: note = chemically synthesized
  source 1..22: mol_type = other DNA
ccccacaaccatccacacattt

SEQ ID NO: 43849 - DNA, 22 bp, synthetic construct
  misc_feature 1..22: note = chemically synthesized
  source 1..22: mol_type = other DNA
ctaaccaccatcccccactagg

SEQ ID NO: 43850 - DNA, 22 bp, synthetic construct
  misc_feature 1..22: note = chemically synthesized
  source 1..22: mol_type = other DNA
taaccaccatcccccactaggc

SEQ ID NO: 43851 - DNA, 22 bp, synthetic construct
  misc_feature 1..22: note = chemically synthesized
  source 1..22: mol_type = other DNA
accaccatcccccactaggctt

SEQ ID NO: 43852 - DNA, 22 bp, synthetic construct
  misc_feature 1..22: note = chemically synthesized
  source 1..22: mol_type = other DNA
ggcttctgcctcgcctggtctc

SEQ ID NO: 43853 - DNA, 22 bp, synthetic construct
  misc_feature 1..22: note = chemically synthesized
  source 1..22: mol_type = other DNA
ctgcctcgcctggtctcacctg

SEQ ID NO: 43854 - DNA, 22 bp, synthetic construct
  misc_feature 1..22: note = chemically synthesized
  source 1..22: mol_type = other DNA
tgcctcgcctggtctcacctgc

SEQ ID NO: 43855 - DNA, 22 bp, synthetic construct
  misc_feature 1..22: note = chemically synthesized
  source 1..22: mol_type = other DNA
cctcgcctggtctcacctgcag

SEQ ID NO: 43856 - DNA, 22 bp, synthetic construct
  misc_feature 1..22: note = chemically synthesized
  source 1..22: mol_type = other DNA
gcctggtctcacctgcaggtcc

SEQ ID NO: 43857 - DNA, 22 bp, synthetic construct
  misc_feature 1..22: note = chemically synthesized
  source 1..22: mol_type = other DNA
gtctcacctgcaggtccactga

SEQ ID NO: 43858 - DNA, 22 bp, synthetic construct
  misc_feature 1..22: note = chemically synthesized
  source 1..22: mol_type = other DNA
acctgcaggtccactgagaaaa

SEQ ID NO: 43859 - DNA, 22 bp, synthetic construct
  misc_feature 1..22: note = chemically synthesized
  source 1..22: mol_type = other DNA
caggtccactgagaaaatgatt

SEQ ID NO: 43860 - DNA, 22 bp, synthetic construct
  misc_feature 1..22: note = chemically synthesized
  source 1..22: mol_type = other DNA
agaaaatgattctcagaacact

SEQ ID NO: 43861 - DNA, 22 bp, synthetic construct
  misc_feature 1..22: note = chemically synthesized
  source 1..22: mol_type = other DNA
tcagaacactaactagaccatg

SEQ ID NO: 43862 - DNA, 22 bp, synthetic construct
  misc_feature 1..22: note = chemically synthesized
  source 1..22: mol_type = other DNA
agaacactaactagaccatgag

SEQ ID NO: 43863 - DNA, 22 bp, synthetic construct
  misc_feature 1..22: note = chemically synthesized
  source 1..22: mol_type = other DNA
actagaccatgaggtgccacaa

SEQ ID NO: 43864 - DNA, 22 bp, synthetic construct
  misc_feature 1..22: note = chemically synthesized
  source 1..22: mol_type = other DNA
gaccatgaggtgccacaaaaca

SEQ ID NO: 43865 - DNA, 22 bp, synthetic construct
  misc_feature 1..22: note = chemically synthesized
  source 1..22: mol_type = other DNA
aggcctgttcatcaattttcta

SEQ ID NO: 43866 - DNA, 22 bp, synthetic construct
  misc_feature 1..22: note = chemically synthesized
  source 1..22: mol_type = other DNA
ttcatcaattttctacatgtca

SEQ ID NO: 43867 - DNA, 22 bp, synthetic construct
  misc_feature 1..22: note = chemically synthesized
  source 1..22: mol_type = other DNA
atcaattttctacatgtcaata

SEQ ID NO: 43868 - DNA, 22 bp, synthetic construct
  misc_feature 1..22: note = chemically synthesized
  source 1..22: mol_type = other DNA
tctacatgtcaataatgacatc

SEQ ID NO: 43869 - DNA, 22 bp, synthetic construct
  misc_feature 1..22: note = chemically synthesized
  source 1..22: mol_type = other DNA
ctacatgtcaataatgacatca

SEQ ID NO: 43870 - DNA, 22 bp, synthetic construct
  misc_feature 1..22: note = chemically synthesized
  source 1..22: mol_type = other DNA
tacatgtcaataatgacatcag

SEQ ID NO: 43871 - DNA, 22 bp, synthetic construct
  misc_feature 1..22: note = chemically synthesized
  source 1..22: mol_type = other DNA
catgtcaataatgacatcaggt

SEQ ID NO: 43872 - DNA, 22 bp, synthetic construct
  misc_feature 1..22: note = chemically synthesized
  source 1..22: mol_type = other DNA
gcgttctcagcctctgagaggg

SEQ ID NO: 43873 - DNA, 22 bp, synthetic construct
  misc_feature 1..22: note = chemically synthesized
  source 1..22: mol_type = other DNA
tcagcctctgagagggaggtca

SEQ ID NO: 43874 - DNA, 22 bp, synthetic construct
  misc_feature 1..22: note = chemically synthesized
  source 1..22: mol_type = other DNA
agcctctgagagggaggtcaaa

SEQ ID NO: 43875 - DNA, 22 bp, synthetic construct
  misc_feature 1..22: note = chemically synthesized
  source 1..22: mol_type = other DNA
tgagagggaggtcaaagttttc

SEQ ID NO: 43876 - DNA, 22 bp, synthetic construct
  misc_feature 1..22: note = chemically synthesized
  source 1..22: mol_type = other DNA
agagggaggtcaaagttttcct

SEQ ID NO: 43877 - DNA, 22 bp, synthetic construct
  misc_feature 1..22: note = chemically synthesized
  source 1..22: mol_type = other DNA
tcctgctctccccttcatgttt

SEQ ID NO: 43878 - DNA, 22 bp, synthetic construct
  misc_feature 1..22: note = chemically synthesized
  source 1..22: mol_type = other DNA
cctgctctccccttcatgtttc

SEQ ID NO: 43879 - DNA, 22 bp, synthetic construct
  misc_feature 1..22: note = chemically synthesized
  source 1..22: mol_type = other DNA
ctgctctccccttcatgtttcc

SEQ ID NO: 43880 - DNA, 22 bp, synthetic construct
  misc_feature 1..22: note = chemically synthesized
  source 1..22: mol_type = other DNA
ctctccccttcatgtttccagg

SEQ ID NO: 43881 - DNA, 22 bp, synthetic construct
  misc_feature 1..22: note = chemically synthesized
  source 1..22: mol_type = other DNA
tccccttcatgtttccaggtgt

SEQ ID NO: 43882 - DNA, 22 bp, synthetic construct
  misc_feature 1..22: note = chemically synthesized
  source 1..22: mol_type = other DNA
cccttcatgtttccaggtgttc

SEQ ID NO: 43883 - DNA, 22 bp, synthetic construct
  misc_feature 1..22: note = chemically synthesized
  source 1..22: mol_type = other DNA
catgtttccaggtgttccctga

SEQ ID NO: 43884 - DNA, 22 bp, synthetic construct
  misc_feature 1..22: note = chemically synthesized
  source 1..22: mol_type = other DNA
atgtttccaggtgttccctgac

SEQ ID NO: 43885 - DNA, 22 bp, synthetic construct
  misc_feature 1..22: note = chemically synthesized
  source 1..22: mol_type = other DNA
ccaggtgttccctgacttggat

SEQ ID NO: 43886 - DNA, 22 bp, synthetic construct
  misc_feature 1..22: note = chemically synthesized
  source 1..22: mol_type = other DNA
caggtgttccctgacttggatc

SEQ ID NO: 43887 - DNA, 22 bp, synthetic construct
  misc_feature 1..22: note = chemically synthesized
  source 1..22: mol_type = other DNA
cctgacttggatcaaatgcaga

SEQ ID NO: 43888 - DNA, 22 bp, synthetic construct
  misc_feature 1..22: note = chemically synthesized
  source 1..22: mol_type = other DNA
acttggatcaaatgcagagttt

SEQ ID NO: 43889 - DNA, 22 bp, synthetic construct
  misc_feature 1..22: note = chemically synthesized
  source 1..22: mol_type = other DNA
ggatcaaatgcagagtttggag

SEQ ID NO: 43890 - DNA, 22 bp, synthetic construct
  misc_feature 1..22: note = chemically synthesized
  source 1..22: mol_type = other DNA
gatcaaatgcagagtttggagg

SEQ ID NO: 43891 - DNA, 22 bp, synthetic construct
  misc_feature 1..22: note = chemically synthesized
  source 1..22: mol_type = other DNA
ggaggtgttgaggccaagggga

SEQ ID NO: 43892 - DNA, 22 bp, synthetic construct
  misc_feature 1..22: note = chemically synthesized
  source 1..22: mol_type = other DNA
gaggtgttgaggccaaggggat

SEQ ID NO: 43893 - DNA, 22 bp, synthetic construct
  misc_feature 1..22: note = chemically synthesized
  source 1..22: mol_type = other DNA
aggccaaggggattttccaggt

SEQ ID NO: 43894 - DNA, 22 bp, synthetic construct
  misc_feature 1..22: note = chemically synthesized
  source 1..22: mol_type = other DNA
tccaggtcagtcgtcatccaca

SEQ ID NO: 43895 - DNA, 22 bp, synthetic construct
  misc_feature 1..22: note = chemically synthesized
  source 1..22: mol_type = other DNA
ccaggtcagtcgtcatccacaa

SEQ ID NO: 43896 - DNA, 22 bp, synthetic construct
  misc_feature 1..22: note = chemically synthesized
  source 1..22: mol_type = other DNA
caggtcagtcgtcatccacaat

SEQ ID NO: 43897 - DNA, 22 bp, synthetic construct
  misc_feature 1..22: note = chemically synthesized
  source 1..22: mol_type = other DNA
atcctgccgctggacttaccct

SEQ ID NO: 43898 - DNA, 22 bp, synthetic construct
  misc_feature 1..22: note = chemically synthesized
  source 1..22: mol_type = other DNA
ccgctggacttaccctgctgcc

SEQ ID NO: 43899 - DNA, 22 bp, synthetic construct
  misc_feature 1..22: note = chemically synthesized
  source 1..22: mol_type = other DNA
gacttaccctgctgccctctcc

SEQ ID NO: 43900 - DNA, 22 bp, synthetic construct
  misc_feature 1..22: note = chemically synthesized
  source 1..22: mol_type = other DNA
accctgctgccctctccccaag

SEQ ID NO: 43901 - DNA, 22 bp, synthetic construct
  misc_feature 1..22: note = chemically synthesized
  source 1..22: mol_type = other DNA
ccctgctgccctctccccaagg

SEQ ID NO: 43902 - DNA, 22 bp, synthetic construct
  misc_feature 1..22: note = chemically synthesized
  source 1..22: mol_type = other DNA
ctgccctctccccaaggcccca

SEQ ID NO: 43903 - DNA, 22 bp, synthetic construct
  misc_feature 1..22: note = chemically synthesized
  source 1..22: mol_type = other DNA
ccctctccccaaggccccatca

SEQ ID NO: 43904 - DNA, 22 bp, synthetic construct
  misc_feature 1..22: note = chemically synthesized
  source 1..22: mol_type = other DNA
tccccaaggccccatcagggag

SEQ ID NO: 43905 - DNA, 22 bp, synthetic construct
  misc_feature 1..22: note = chemically synthesized
  source 1..22: mol_type = other DNA
cccaaggccccatcagggaggg

SEQ ID NO: 43906 - DNA, 22 bp, synthetic construct
  misc_feature 1..22: note = chemically synthesized
  source 1..22: mol_type = other DNA
caatcctcttgtcacctgtggc

SEQ ID NO: 43907 - DNA, 22 bp, synthetic construct
  misc_feature 1..22: note = chemically synthesized
  source 1..22: mol_type = other DNA
aatcctcttgtcacctgtggcc

SEQ ID NO: 43908 - DNA, 22 bp, synthetic construct
  misc_feature 1..22: note = chemically synthesized
  source 1..22: mol_type = other DNA
ttgtcacctgtggcctacctgc

SEQ ID NO: 43909 - DNA, 22 bp, synthetic construct
  misc_feature 1..22: note = chemically synthesized
  source 1..22: mol_type = other DNA
gtcacctgtggcctacctgccc

SEQ ID NO: 43910 - DNA, 22 bp, synthetic construct
  misc_feature 1..22: note = chemically synthesized
  source 1..22: mol_type = other DNA
tcacctgtggcctacctgccct

SEQ ID NO: 43911 - DNA, 22 bp, synthetic construct
  misc_feature 1..22: note = chemically synthesized
  source 1..22: mol_type = other DNA
tggcctacctgccctcagagat

SEQ ID NO: 43912 - DNA, 22 bp, synthetic construct
  misc_feature 1..22: note = chemically synthesized
  source 1..22: mol_type = other DNA
cctgccctcagagatgacatct

SEQ ID NO: 43913 - DNA, 22 bp, synthetic construct
  misc_feature 1..22: note = chemically synthesized
  source 1..22: mol_type = other DNA
ccctcagagatgacatctctat

SEQ ID NO: 43914 - DNA, 22 bp, synthetic construct
  misc_feature 1..22: note = chemically synthesized
  source 1..22: mol_type = other DNA
agagatgacatctctatgtcgg

SEQ ID NO: 43915 - DNA, 22 bp, synthetic construct
  misc_feature 1..22: note = chemically synthesized
  source 1..22: mol_type = other DNA
tatgtcggccactggatggcag

SEQ ID NO: 43916 - DNA, 22 bp, synthetic construct
  misc_feature 1..22: note = chemically synthesized
  source 1..22: mol_type = other DNA
tgtcggccactggatggcagca

SEQ ID NO: 43917 - DNA, 22 bp, synthetic construct
  misc_feature 1..22: note = chemically synthesized
  source 1..22: mol_type = other DNA
gatggcagcacctactcgcaga

SEQ ID NO: 43918 - DNA, 22 bp, synthetic construct
  misc_feature 1..22: note = chemically synthesized
  source 1..22: mol_type = other DNA
ctcgcagaccacatcaactttc

SEQ ID NO: 43919 - DNA, 22 bp, synthetic construct
  misc_feature 1..22: note = chemically synthesized
  source 1..22: mol_type = other DNA
gcagaccacatcaactttcctg

SEQ ID NO: 43920 - DNA, 22 bp, synthetic construct
  misc_feature 1..22: note = chemically synthesized
  source 1..22: mol_type = other DNA
tcctggcaacttgcggtaggtt

SEQ ID NO: 43921 - DNA, 22 bp, synthetic construct
  misc_feature 1..22: note = chemically synthesized
  source 1..22: mol_type = other DNA
cctggcaacttgcggtaggttt

SEQ ID NO: 43922 - DNA, 22 bp, synthetic construct
  misc_feature 1..22: note = chemically synthesized
  source 1..22: mol_type = other DNA
ctggcaacttgcggtaggtttt

SEQ ID NO: 43923 - DNA, 22 bp, synthetic construct
  misc_feature 1..22: note = chemically synthesized
  source 1..22: mol_type = other DNA
gcaacttgcggtaggttttcac

SEQ ID NO: 43924 - DNA, 22 bp, synthetic construct
  misc_feature 1..22: note = chemically synthesized
  source 1..22: mol_type = other DNA
gcggtaggttttcaccattatc

SEQ ID NO: 43925 - DNA, 22 bp, synthetic construct
  misc_feature 1..22: note = chemically synthesized
  source 1..22: mol_type = other DNA
cggtaggttttcaccattatca

SEQ ID NO: 43926 - DNA, 22 bp, synthetic construct
  misc_feature 1..22: note = chemically synthesized
  source 1..22: mol_type = other DNA
tcaccattatcaggatgtttgc

SEQ ID NO: 43927 - DNA, 22 bp, synthetic construct
  misc_feature 1..22: note = chemically synthesized
  source 1..22: mol_type = other DNA
caccattatcaggatgtttgcc

SEQ ID NO: 43928 - DNA, 22 bp, synthetic construct
  misc_feature 1..22: note = chemically synthesized
  source 1..22: mol_type = other DNA
accattatcaggatgtttgcct

SEQ ID NO: 43929 - DNA, 22 bp, synthetic construct
  misc_feature 1..22: note = chemically synthesized
  source 1..22: mol_type = other DNA
tcaggatgtttgccttgctcaa

SEQ ID NO: 43930 - DNA, 22 bp, synthetic construct
  misc_feature 1..22: note = chemically synthesized
  source 1..22: mol_type = other DNA
gccttgctcaaatagcagattc

SEQ ID NO: 43931 - DNA, 22 bp, synthetic construct
  misc_feature 1..22: note = chemically synthesized
  source 1..22: mol_type = other DNA
ccttgctcaaatagcagattct

SEQ ID NO: 43932 - DNA, 22 bp, synthetic construct
  misc_feature 1..22: note = chemically synthesized
  source 1..22: mol_type = other DNA
gctcaaatagcagattctagag

SEQ ID NO: 43933 - DNA, 22 bp, synthetic construct
  misc_feature 1..22: note = chemically synthesized
  source 1..22: mol_type = other DNA
ctcaaatagcagattctagaga

SEQ ID NO: 43934 - DNA, 22 bp, synthetic construct
  misc_feature 1..22: note = chemically synthesized
  source 1..22: mol_type = other DNA
aaatagcagattctagagaacg

SEQ ID NO: 43935 - DNA, 22 bp, synthetic construct
  misc_feature 1..22: note = chemically synthesized
  source 1..22: mol_type = other DNA
tagagaacggtgctccctcaca

SEQ ID NO: 43936 - DNA, 22 bp, synthetic construct
  misc_feature 1..22: note = chemically synthesized
  source 1..22: mol_type = other DNA
gagaacggtgctccctcacaca

SEQ ID NO: 43937 - DNA, 22 bp, synthetic construct
  misc_feature 1..22: note = chemically synthesized
  source 1..22: mol_type = other DNA
cctcacacaactatgtagtcca

SEQ ID NO: 43938 - DNA, 22 bp, synthetic construct
  misc_feature 1..22: note = chemically synthesized
  source 1..22: mol_type = other DNA
acacaactatgtagtccaggtg

SEQ ID NO: 43939 - DNA, 22 bp, synthetic construct
  misc_feature 1..22: note = chemically synthesized
  source 1..22: mol_type = other DNA
tgtagtccaggtgatgcaccct

SEQ ID NO: 43940 - DNA, 22 bp, synthetic construct
  misc_feature 1..22: note = chemically synthesized
  source 1..22: mol_type = other DNA
tgcccgatgcttggtagtcaga

SEQ ID NO: 43941 - DNA, 22 bp, synthetic construct
  misc_feature 1..22: note = chemically synthesized
  source 1..22: mol_type = other DNA
cccgatgcttggtagtcagaaa

SEQ ID NO: 43942 - DNA, 22 bp, synthetic construct
  misc_feature 1..22: note = chemically synthesized
  source 1..22: mol_type = other DNA
ggtagtcagaaacttccatcat

SEQ ID NO: 43943 - DNA, 22 bp, synthetic construct
  misc_feature 1..22: note = chemically synthesized
  source 1..22: mol_type = other DNA
gtagtcagaaacttccatcatg

SEQ ID NO: 43944 - DNA, 22 bp, synthetic construct
  misc_feature 1..22: note = chemically synthesized
  source 1..22: mol_type = other DNA
ccatcatgcagctctgcccaga

SEQ ID NO: 43945 - DNA, 22 bp, synthetic construct
  misc_feature 1..22: note = chemically synthesized
  source 1..22: mol_type = other DNA
catcatgcagctctgcccagat

SEQ ID NO: 43946 - DNA, 22 bp, synthetic construct
  misc_feature 1..22: note = chemically synthesized
  source 1..22: mol_type = other DNA
tgcccagattgagctgagctgg

SEQ ID NO: 43947 - DNA, 22 bp, synthetic construct
  misc_feature 1..22: note = chemically synthesized
  source 1..22: mol_type = other DNA
cccagattgagctgagctggcc

SEQ ID NO: 43948 - DNA, 22 bp, synthetic construct
  misc_feature 1..22: note = chemically synthesized
  source 1..22: mol_type = other DNA
agctgagctggcctctggagtg

SEQ ID NO: 43949 - DNA, 22 bp, synthetic construct
  misc_feature 1..22: note = chemically synthesized
  source 1..22: mol_type = other DNA
agctggcctctggagtgaggtg

SEQ ID NO: 43950 - DNA, 22 bp, synthetic construct
  misc_feature 1..22: note = chemically synthesized
  source 1..22: mol_type = other DNA
gcctctggagtgaggtgctggg

SEQ ID NO: 43951 - DNA, 22 bp, synthetic construct
  misc_feature 1..22: note = chemically synthesized
  source 1..22: mol_type = other DNA
tggagtgaggtgctgggacaaa

SEQ ID NO: 43952 - DNA, 22 bp, synthetic construct
  misc_feature 1..22: note = chemically synthesized
  source 1..22: mol_type = other DNA
gagtgaggtgctgggacaaaca

SEQ ID NO: 43953 - DNA, 22 bp, synthetic construct
  misc_feature 1..22: note = chemically synthesized
  source 1..22: mol_type = other DNA
ggacaaacatcttccatgctgc

SEQ ID NO: 43954 - DNA, 22 bp, synthetic construct
  misc_feature 1..22: note = chemically synthesized
  source 1..22: mol_type = other DNA
ccatgctgctcatgtcaactcc

SEQ ID NO: 43955 - DNA, 22 bp, synthetic construct
  misc_feature 1..22: note = chemically synthesized
  source 1..22: mol_type = other DNA
catgctgctcatgtcaactcca

SEQ ID NO: 43956 - DNA, 22 bp, synthetic construct
  misc_feature 1..22: note = chemically synthesized
  source 1..22: mol_type = other DNA
ctcatgtcaactccagatgcag

SEQ ID NO: 43957 - DNA, 22 bp, synthetic construct
  misc_feature 1..22: note = chemically synthesized
  source 1..22: mol_type = other DNA
atgtcaactccagatgcagtca

SEQ ID NO: 43958 - DNA, 22 bp, synthetic construct
  misc_feature 1..22: note = chemically synthesized
  source 1..22: mol_type = other DNA
cagatgcagtcaggtttctgaa

SEQ ID NO: 43959 - DNA, 22 bp, synthetic construct
  misc_feature 1..22: note = chemically synthesized
  source 1..22: mol_type = other DNA
ctgaaccaaagtcaatgatcta

SEQ ID NO: 43960 - DNA, 22 bp, synthetic construct
  misc_feature 1..22: note = chemically synthesized
  source 1..22: mol_type = other DNA
tgaaccaaagtcaatgatctaa

SEQ ID NO: 43961 - DNA, 22 bp, synthetic construct
  misc_feature 1..22: note = chemically synthesized
  source 1..22: mol_type = other DNA
aaccaaagtcaatgatctaagt

SEQ ID NO: 43962 - DNA, 22 bp, synthetic construct
  misc_feature 1..22: note = chemically synthesized
  source 1..22: mol_type = other DNA
agtgcagtcaaaggctctgggg

SEQ ID NO: 43963 - DNA, 22 bp, synthetic construct
  misc_feature 1..22: note = chemically synthesized
  source 1..22: mol_type = other DNA
tgggggaagaaagagagagtgc

SEQ ID NO: 43964 - DNA, 22 bp, synthetic construct
  misc_feature 1..22: note = chemically synthesized
  source 1..22: mol_type = other DNA
ggggaagaaagagagagtgcct

SEQ ID NO: 43965 - DNA, 22 bp, synthetic construct
  misc_feature 1..22: note = chemically synthesized
  source 1..22: mol_type = other DNA
atctcttgcctgtgccatgctc

SEQ ID NO: 43966 - DNA, 22 bp, synthetic construct
  misc_feature 1..22: note = chemically synthesized
  source 1..22: mol_type = other DNA
ttgcctgtgccatgctcgcaaa

SEQ ID NO: 43967 - DNA, 22 bp, synthetic construct
  misc_feature 1..22: note = chemically synthesized
  source 1..22: mol_type = other DNA
gcctgtgccatgctcgcaaagc

SEQ ID NO: 43968 - DNA, 22 bp, synthetic construct
  misc_feature 1..22: note = chemically synthesized
  source 1..22: mol_type = other DNA
cctgtgccatgctcgcaaagca

SEQ ID NO: 43969 - DNA, 22 bp, synthetic construct
  misc_feature 1..22: note = chemically synthesized
  source 1..22: mol_type = other DNA
tgccatgctcgcaaagcaagga

SEQ ID NO: 43970 - DNA, 22 bp, synthetic construct
  misc_feature 1..22: note = chemically synthesized
  source 1..22: mol_type = other DNA
gcaaagcaaggatttttgcaaa

SEQ ID NO: 43971 - DNA, 22 bp, synthetic construct
  misc_feature 1..22: note = chemically synthesized
  source 1..22: mol_type = other DNA
ttgcaaaattctaatgaaagct

SEQ ID NO: 43972 - DNA, 22 bp, synthetic construct
  misc_feature 1..22: note = chemically synthesized
  source 1..22: mol_type = other DNA
tgcaaaattctaatgaaagctg

SEQ ID NO: 43973 - DNA, 22 bp, synthetic construct
  misc_feature 1..22: note = chemically synthesized
  source 1..22: mol_type = other DNA
gcaaaattctaatgaaagctgg

SEQ ID NO: 43974 - DNA, 22 bp, synthetic construct
  misc_feature 1..22: note = chemically synthesized
  source 1..22: mol_type = other DNA
caaaattctaatgaaagctggg

SEQ ID NO: 43975 - DNA, 22 bp, synthetic construct
  misc_feature 1..22: note = chemically synthesized
  source 1..22: mol_type = other DNA
taatgaaagctgggcttgcaaa

SEQ ID NO: 43976 - DNA, 22 bp, synthetic construct
  misc_feature 1..22: note = chemically synthesized
  source 1..22: mol_type = other DNA
atgaaagctgggcttgcaaaat

SEQ ID NO: 43977 - DNA, 22 bp, synthetic construct
  misc_feature 1..22: note = chemically synthesized
  source 1..22: mol_type = other DNA
ggcttgcaaaattagaaaactg

SEQ ID NO: 43978 - DNA, 22 bp, synthetic construct
  misc_feature 1..22: note = chemically synthesized
  source 1..22: mol_type = other DNA
gcaaaattagaaaactggatta

SEQ ID NO: 43979 - DNA, 22 bp, synthetic construct
  misc_feature 1..22: note = chemically synthesized
  source 1..22: mol_type = other DNA
caaaattagaaaactggattat

SEQ ID NO: 43980 - DNA, 22 bp, synthetic construct
  misc_feature 1..22: note = chemically synthesized
  source 1..22: mol_type = other DNA
gaaaactggattatttgtgaga

SEQ ID NO: 43981 - DNA, 22 bp, synthetic construct
  misc_feature 1..22: note = chemically synthesized
  source 1..22: mol_type = other DNA
gattatttgtgagaacactgaa

SEQ ID NO: 43982 - DNA, 22 bp, synthetic construct
  misc_feature 1..22: note = chemically synthesized
  source 1..22: mol_type = other DNA
tttgtgagaacactgaaacatc

SEQ ID NO: 43983 - DNA, 22 bp, synthetic construct
  misc_feature 1..22: note = chemically synthesized
  source 1..22: mol_type = other DNA
gtgagaacactgaaacatccct

SEQ ID NO: 43984 - DNA, 22 bp, synthetic construct
  misc_feature 1..22: note = chemically synthesized
  source 1..22: mol_type = other DNA
tgagaacactgaaacatccctg

SEQ ID NO: 43985 - DNA, 22 bp, synthetic construct
  misc_feature 1..22: note = chemically synthesized
  source 1..22: mol_type = other DNA
aaacatccctgggtgtgtccat

SEQ ID NO: 43986 - DNA, 22 bp, synthetic construct
  misc_feature 1..22: note = chemically synthesized
  source 1..22: mol_type = other DNA
ggtgtgtccatctggaaaaaca

SEQ ID NO: 43987 - DNA, 22 bp, synthetic construct
  misc_feature 1..22: note = chemically synthesized
  source 1..22: mol_type = other DNA
gaaaaacagcatttcctctggc

SEQ ID NO: 43988 - DNA, 22 bp, synthetic construct
  misc_feature 1..22: note = chemically synthesized
  source 1..22: mol_type = other DNA
cctctggcaattttgcaaccgt

SEQ ID NO: 43989 - DNA, 22 bp, synthetic construct
  misc_feature 1..22: note = chemically synthesized
  source 1..22: mol_type = other DNA
ctctggcaattttgcaaccgtt

SEQ ID NO: 43990 - DNA, 22 bp, synthetic construct
  misc_feature 1..22: note = chemically synthesized
  source 1..22: mol_type = other DNA
tggcaattttgcaaccgttcta

SEQ ID NO: 43991 - DNA, 22 bp, synthetic construct
  misc_feature 1..22: note = chemically synthesized
  source 1..22: mol_type = other DNA
gcaattttgcaaccgttctatt

SEQ ID NO: 43992 - DNA, 22 bp, synthetic construct
  misc_feature 1..22: note = chemically synthesized
  source 1..22: mol_type = other DNA
tgcaaccgttctatttgaattt

SEQ ID NO: 43993 - DNA, 22 bp, synthetic construct
  misc_feature 1..22: note = chemically synthesized
  source 1..22: mol_type = other DNA
gcaaccgttctatttgaatttg

SEQ ID NO: 43994 - DNA, 22 bp, synthetic construct
  misc_feature 1..22: note = chemically synthesized
  source 1..22: mol_type = other DNA
caaccgttctatttgaatttgg

SEQ ID NO: 43995 - DNA, 22 bp, synthetic construct
  misc_feature 1..22: note = chemically synthesized
  source 1..22: mol_type = other DNA
tatttgaatttggcaaagaaaa

SEQ ID NO: 43996 - DNA, 22 bp, synthetic construct
  misc_feature 1..22: note = chemically synthesized
  source 1..22: mol_type = other DNA
tttgaatttggcaaagaaaata

SEQ ID NO: 43997 - DNA, 22 bp, synthetic construct
  misc_feature 1..22: note = chemically synthesized
  source 1..22: mol_type = other DNA
gaatttggcaaagaaaataaag

SEQ ID NO: 43998 - DNA, 22 bp, synthetic construct
  misc_feature 1..22: note = chemically synthesized
  source 1..22: mol_type = other DNA
aatttggcaaagaaaataaagc

SEQ ID NO: 43999 - DNA, 22 bp, synthetic construct
  misc_feature 1..22: note = chemically synthesized
  source 1..22: mol_type = other DNA
ggcaaagaaaataaagcagttt

SEQ ID NO: 44000 - DNA, 22 bp, synthetic construct
  misc_feature 1..22: note = chemically synthesized
  source 1..22: mol_type = other DNA
gcaaagaaaataaagcagtttt

SEQ ID NO: 44001 - DNA, 22 bp, synthetic construct
  misc_feature 1..22: note = chemically synthesized
  source 1..22: mol_type = other DNA
ttcacaaaagaataaacacaac

SEQ ID NO: 44002 - DNA, 22 bp, synthetic construct
  misc_feature 1..22: note = chemically synthesized
  source 1..22: mol_type = other DNA
tcacaaaagaataaacacaacc

SEQ ID NO: 44003 - DNA, 22 bp, synthetic construct
  misc_feature 1..22: note = chemically synthesized
  source 1..22: mol_type = other DNA
cacaaaagaataaacacaacca

SEQ ID NO: 44004 - DNA, 22 bp, synthetic construct
  misc_feature 1..22: note = chemically synthesized
  source 1..22: mol_type = other DNA
acaaaagaataaacacaaccag

SEQ ID NO: 44005 - DNA, 22 bp, synthetic construct
  misc_feature 1..22: note = chemically synthesized
  source 1..22: mol_type = other DNA
cactctcccaaattgtcaaaga

SEQ ID NO: 44006 - DNA, 22 bp, synthetic construct
  misc_feature 1..22: note = chemically synthesized
  source 1..22: mol_type = other DNA
actctcccaaattgtcaaagaa

SEQ ID NO: 44007 - DNA, 22 bp, synthetic construct
  misc_feature 1..22: note = chemically synthesized
  source 1..22: mol_type = other DNA
tcccaaattgtcaaagaagtat

SEQ ID NO: 44008 - DNA, 22 bp, synthetic construct
  misc_feature 1..22: note = chemically synthesized
  source 1..22: mol_type = other DNA
ccaaattgtcaaagaagtataa

SEQ ID NO: 44009 - DNA, 22 bp, synthetic construct
  misc_feature 1..22: note = chemically synthesized
  source 1..22: mol_type = other DNA
tcaaagaagtataaattagaaa

SEQ ID NO: 44010 - DNA, 22 bp, synthetic construct
  misc_feature 1..22: note = chemically synthesized
  source 1..22: mol_type = other DNA
gaaaatgaatcaggacaatttc

SEQ ID NO: 44011 - DNA, 22 bp, synthetic construct
  misc_feature 1..22: note = chemically synthesized
  source 1..22: mol_type = other DNA
caacctgttagattagctaata

SEQ ID NO: 44012 - DNA, 22 bp, synthetic construct
  misc_feature 1..22: note = chemically synthesized
  source 1..22: mol_type = other DNA
aacctgttagattagctaatat

SEQ ID NO: 44013 - DNA, 22 bp, synthetic construct
  misc_feature 1..22: note = chemically synthesized
  source 1..22: mol_type = other DNA
ttagattagctaatatttaaaa

SEQ ID NO: 44014 - DNA, 22 bp, synthetic construct
  misc_feature 1..22: note = chemically synthesized
  source 1..22: mol_type = other DNA
gattagctaatatttaaaaatt

SEQ ID NO: 44015 - DNA, 22 bp, synthetic construct
  misc_feature 1..22: note = chemically synthesized
  source 1..22: mol_type = other DNA
gctaatatttaaaaattgaaca

SEQ ID NO: 44016 - DNA, 22 bp, synthetic construct
  misc_feature 1..22: note = chemically synthesized
  source 1..22: mol_type = other DNA
atatttaaaaattgaacactca

SEQ ID NO: 44017 - DNA, 22 bp, synthetic construct
  misc_feature 1..22: note = chemically synthesized
  source 1..22: mol_type = other DNA
aaaaattgaacactcatacaag

SEQ ID NO: 44018 - DNA, 22 bp, synthetic construct
  misc_feature 1..22: note = chemically synthesized
  source 1..22: mol_type = other DNA
aaaattgaacactcatacaagt

SEQ ID NO: 44019 - DNA, 22 bp, synthetic construct
  misc_feature 1..22: note = chemically synthesized
  source 1..22: mol_type = other DNA
aacactcatacaagtgtggtga

SEQ ID NO: 44020 - DNA, 22 bp, synthetic construct
  misc_feature 1..22: note = chemically synthesized
  source 1..22: mol_type = other DNA
atacaagtgtggtgaagtgatt

SEQ ID NO: 44021 - DNA, 22 bp, synthetic construct
  misc_feature 1..22: note = chemically synthesized
  source 1..22: mol_type = other DNA
ttttctagtgacattttacact

SEQ ID NO: 44022 - DNA, 22 bp, synthetic construct
  misc_feature 1..22: note = chemically synthesized
  source 1..22: mol_type = other DNA
tctagtgacattttacactgtc

SEQ ID NO: 44023 - DNA, 22 bp, synthetic construct
  misc_feature 1..22: note = chemically synthesized
  source 1..22: mol_type = other DNA
ctagtgacattttacactgtca

SEQ ID NO: 44024 - DNA, 22 bp, synthetic construct
  misc_feature 1..22: note = chemically synthesized
  source 1..22: mol_type = other DNA
tagtgacattttacactgtcat

SEQ ID NO: 44025 - DNA, 22 bp, synthetic construct
  misc_feature 1..22: note = chemically synthesized
  source 1..22: mol_type = other DNA
gtgacattttacactgtcataa

SEQ ID NO: 44026 - DNA, 22 bp, synthetic construct
  misc_feature 1..22: note = chemically synthesized
  source 1..22: mol_type = other DNA
tacactgtcataaccttctaga

SEQ ID NO: 44027 - DNA, 22 bp, synthetic construct
  misc_feature 1..22: note = chemically synthesized
  source 1..22: mol_type = other DNA
acactgtcataaccttctagaa

SEQ ID NO: 44028 - DNA, 22 bp, synthetic construct
  misc_feature 1..22: note = chemically synthesized
  source 1..22: mol_type = other DNA
cactgtcataaccttctagaaa

SEQ ID NO: 44029 - DNA, 22 bp, synthetic construct
  misc_feature 1..22: note = chemically synthesized
  source 1..22: mol_type = other DNA
tcataaccttctagaaaataaa

SEQ ID NO: 44030 - DNA, 22 bp, synthetic construct
  misc_feature 1..22: note = chemically synthesized
  source 1..22: mol_type = other DNA
ctagaaaataaattggcagtgt

SEQ ID NO: 44031 - DNA, 22 bp, synthetic construct
  misc_feature 1..22: note = chemically synthesized
  source 1..22: mol_type = other DNA
tagaaaataaattggcagtgtt

SEQ ID NO: 44032 - DNA, 22 bp, synthetic construct
  misc_feature 1..22: note = chemically synthesized
  source 1..22: mol_type = other DNA
gaaaataaattggcagtgttat

SEQ ID NO: 44033 - DNA, 22 bp, synthetic construct
  misc_feature 1..22: note = chemically synthesized
  source 1..22: mol_type = other DNA
gcagtgttattgggagacagaa

SEQ ID NO: 44034 - DNA, 22 bp, synthetic construct
  misc_feature 1..22: note = chemically synthesized
  source 1..22: mol_type = other DNA
ttgggagacagaaatatgtcta

SEQ ID NO: 44035 - DNA, 22 bp, synthetic construct
  misc_feature 1..22: note = chemically synthesized
  source 1..22: mol_type = other DNA
ggagacagaaatatgtctatat

SEQ ID NO: 44036 - DNA, 22 bp, synthetic construct
  misc_feature 1..22: note = chemically synthesized
  source 1..22: mol_type = other DNA
tataatttatgggaacttaggc

SEQ ID NO: 44037 - DNA, 22 bp, synthetic construct
  misc_feature 1..22: note = chemically synthesized
  source 1..22: mol_type = other DNA
atgggaacttaggctcagaaaa

SEQ ID NO: 44038 - DNA, 22 bp, synthetic construct
  misc_feature 1..22: note = chemically synthesized
  source 1..22: mol_type = other DNA
tgggaacttaggctcagaaaat

SEQ ID NO: 44039 - DNA, 22 bp, synthetic construct
  misc_feature 1..22: note = chemically synthesized
  source 1..22: mol_type = other DNA
aggctcagaaaatattaaggaa

SEQ ID NO: 44040 - DNA, 22 bp, synthetic construct
  misc_feature 1..22: note = chemically synthesized
  source 1..22: mol_type = other DNA
ggctcagaaaatattaaggaat

SEQ ID NO: 44041 - DNA, 22 bp, synthetic construct
  misc_feature 1..22: note = chemically synthesized
  source 1..22: mol_type = other DNA
agaaaatattaaggaataagaa

SEQ ID NO: 44042 - DNA, 22 bp, synthetic construct
  misc_feature 1..22: note = chemically synthesized
  source 1..22: mol_type = other DNA
aggaataagaatgaactttatg

SEQ ID NO: 44043 - DNA, 22 bp, synthetic construct
  misc_feature 1..22: note = chemically synthesized
  source 1..22: mol_type = other DNA
tatgaacaaagatgtggagggt

SEQ ID NO: 44044 - DNA, 22 bp, synthetic construct
  misc_feature 1..22: note = chemically synthesized
  source 1..22: mol_type = other DNA
atgaacaaagatgtggagggtt

SEQ ID NO: 44045 - DNA, 22 bp, synthetic construct
  misc_feature 1..22: note = chemically synthesized
  source 1..22: mol_type = other DNA
tgaacaaagatgtggagggttg

SEQ ID NO: 44046 - DNA, 22 bp, synthetic construct
  misc_feature 1..22: note = chemically synthesized
  source 1..22: mol_type = other DNA
gaagcaagaggggggccaacgc

SEQ ID NO: 44047 - DNA, 22 bp, synthetic construct
  misc_feature 1..22: note = chemically synthesized
  source 1..22: mol_type = other DNA
gggcagtgactccgcagaccca

SEQ ID NO: 44048 - DNA, 22 bp, synthetic construct
  misc_feature 1..22: note = chemically synthesized
  source 1..22: mol_type = other DNA
ggcagtgactccgcagacccag

SEQ ID NO: 44049 - DNA, 22 bp, synthetic construct
  misc_feature 1..22: note = chemically synthesized
  source 1..22: mol_type = other DNA
cgcagacccaggctcaggttga

SEQ ID NO: 44050 - DNA, 22 bp, synthetic construct
  misc_feature 1..22: note = chemically synthesized
  source 1..22: mol_type = other DNA
aggttgaactagacaacctcct

SEQ ID NO: 44051 - DNA, 22 bp, synthetic construct
  misc_feature 1..22: note = chemically synthesized
  source 1..22: mol_type = other DNA
aactagacaacctccttacacc

SEQ ID NO: 44052 - DNA, 22 bp, synthetic construct
  misc_feature 1..22: note = chemically synthesized
  source 1..22: mol_type = other DNA
gacaacctccttacacctcagt

SEQ ID NO: 44053 - DNA, 22 bp, synthetic construct
  misc_feature 1..22: note = chemically synthesized
  source 1..22: mol_type = other DNA
cttacacctcagtttccttaac

SEQ ID NO: 44054 - DNA, 22 bp, synthetic construct
  misc_feature 1..22: note = chemically synthesized
  source 1..22: mol_type = other DNA
acacctcagtttccttaactgt

SEQ ID NO: 44055 - DNA, 22 bp, synthetic construct
  misc_feature 1..22: note = chemically synthesized
  source 1..22: mol_type = other DNA
cacctcagtttccttaactgta

SEQ ID NO: 44056 - DNA, 22 bp, synthetic construct
  misc_feature 1..22: note = chemically synthesized
  source 1..22: mol_type = other DNA
agtttccttaactgtagagcag

SEQ ID NO: 44057 - DNA, 22 bp, synthetic construct
  misc_feature 1..22: note = chemically synthesized
  source 1..22: mol_type = other DNA
ccttaactgtagagcaggagtg

SEQ ID NO: 44058 - DNA, 22 bp, synthetic construct
  misc_feature 1..22: note = chemically synthesized
  source 1..22: mol_type = other DNA
cttaactgtagagcaggagtga

SEQ ID NO: 44059 - DNA, 22 bp, synthetic construct
  misc_feature 1..22: note = chemically synthesized
  source 1..22: mol_type = other DNA
aactgtagagcaggagtgatgg

SEQ ID NO: 44060 - DNA, 22 bp, synthetic construct
  misc_feature 1..22: note = chemically synthesized
  source 1..22: mol_type = other DNA
actgtagagcaggagtgatgga

SEQ ID NO: 44061 - DNA, 22 bp, synthetic construct
  misc_feature 1..22: note = chemically synthesized
  source 1..22: mol_type = other DNA
tagagcaggagtgatggaactg

SEQ ID NO: 44062 - DNA, 22 bp, synthetic construct
  misc_feature 1..22: note = chemically synthesized
  source 1..22: mol_type = other DNA
cctgtttcataggactgttgtg

SEQ ID NO: 44063 - DNA, 22 bp, synthetic construct
  misc_feature 1..22: note = chemically synthesized
  source 1..22: mol_type = other DNA
tttcataggactgttgtgagga

SEQ ID NO: 44064 - DNA, 22 bp, synthetic construct
  misc_feature 1..22: note = chemically synthesized
  source 1..22: mol_type = other DNA
cataggactgttgtgaggatga

SEQ ID NO: 44065 - DNA, 22 bp, synthetic construct
  misc_feature 1..22: note = chemically synthesized
  source 1..22: mol_type = other DNA
ataggactgttgtgaggatgaa

SEQ ID NO: 44066 - DNA, 22 bp, synthetic construct
  misc_feature 1..22: note = chemically synthesized
  source 1..22: mol_type = other DNA
ttgtgaggatgaagtgagatac

SEQ ID NO: 44067 - DNA, 22 bp, synthetic construct
  misc_feature 1..22: note = chemically synthesized
  source 1..22: mol_type = other DNA
tgaggatgaagtgagatacacc

SEQ ID NO: 44068 - DNA, 22 bp, synthetic construct
  misc_feature 1..22: note = chemically synthesized
  source 1..22: mol_type = other DNA
taagcttgtgcctggaaaggat

SEQ ID NO: 44069 - DNA, 22 bp, synthetic construct
  misc_feature 1..22: note = chemically synthesized
  source 1..22: mol_type = other DNA
gtgcctggaaaggataatgctt

SEQ ID NO: 44070 - DNA, 22 bp, synthetic construct
  misc_feature 1..22: note = chemically synthesized
  source 1..22: mol_type = other DNA
tgcctggaaaggataatgctta

SEQ ID NO: 44071 - DNA, 22 bp, synthetic construct
  misc_feature 1..22: note = chemically synthesized
  source 1..22: mol_type = other DNA
gaaaggataatgcttagtaaat

SEQ ID NO: 44072 - DNA, 22 bp, synthetic construct
  misc_feature 1..22: note = chemically synthesized
  source 1..22: mol_type = other DNA
agtaaatgatgactattctttt

SEQ ID NO: 44073 - DNA, 22 bp, synthetic construct
  misc_feature 1..22: note = chemically synthesized
  source 1..22: mol_type = other DNA
gtaaatgatgactattcttttt

SEQ ID NO: 44074 - DNA, 22 bp, synthetic construct
  misc_feature 1..22: note = chemically synthesized
  source 1..22: mol_type = other DNA
ttcttttttattgcaataaaat

SEQ ID NO: 44075 - DNA, 22 bp, synthetic construct
  misc_feature 1..22: note = chemically synthesized
  source 1..22: mol_type = other DNA
ttttttattgcaataaaatgta

SEQ ID NO: 44076 - DNA, 22 bp, synthetic construct
  misc_feature 1..22: note = chemically synthesized
  source 1..22: mol_type = other DNA
ttttattgcaataaaatgtaca

SEQ ID NO: 44077 - DNA, 22 bp, synthetic construct
  misc_feature 1..22: note = chemically synthesized
  source 1..22: mol_type = other DNA
tttattgcaataaaatgtacac

SEQ ID NO: 44078 - DNA, 22 bp, synthetic construct
  misc_feature 1..22: note = chemically synthesized
  source 1..22: mol_type = other DNA
ttattgcaataaaatgtacaca

SEQ ID NO: 44079 - DNA, 22 bp, synthetic construct
  misc_feature 1..22: note = chemically synthesized
  source 1..22: mol_type = other DNA
tattgcaataaaatgtacacag

SEQ ID NO: 44080 - DNA, 22 bp, synthetic construct
  misc_feature 1..22: note = chemically synthesized
  source 1..22: mol_type = other DNA
attgcaataaaatgtacacagc

SEQ ID NO: 44081 - DNA, 22 bp, synthetic construct
  misc_feature 1..22: note = chemically synthesized
  source 1..22: mol_type = other DNA
ttgcaataaaatgtacacagcg

SEQ ID NO: 44082 - DNA, 22 bp, synthetic construct
  misc_feature 1..22: note = chemically synthesized
  source 1..22: mol_type = other DNA
caataaaatgtacacagcgtaa

SEQ ID NO: 44083 - DNA, 22 bp, synthetic construct
  misc_feature 1..22: note = chemically synthesized
  source 1..22: mol_type = other DNA
ctattttaaccatttttgcagg

SEQ ID NO: 44084 - DNA, 22 bp, synthetic construct
  misc_feature 1..22: note = chemically synthesized
  source 1..22: mol_type = other DNA
ttttaaccatttttgcagggta

SEQ ID NO: 44085 - DNA, 22 bp, synthetic construct
  misc_feature 1..22: note = chemically synthesized
  source 1..22: mol_type = other DNA
taaccatttttgcagggtacca

SEQ ID NO: 44086 - DNA, 22 bp, synthetic construct
  misc_feature 1..22: note = chemically synthesized
  source 1..22: mol_type = other DNA
aaccatttttgcagggtaccac

SEQ ID NO: 44087 - DNA, 22 bp, synthetic construct
  misc_feature 1..22: note = chemically synthesized
  source 1..22: mol_type = other DNA
accatttttgcagggtaccacc

SEQ ID NO: 44088 - DNA, 22 bp, synthetic construct
  misc_feature 1..22: note = chemically synthesized
  source 1..22: mol_type = other DNA
ttgcagggtaccaccaagtggc

SEQ ID NO: 44089 - DNA, 22 bp, synthetic construct
  misc_feature 1..22: note = chemically synthesized
  source 1..22: mol_type = other DNA
tgcagggtaccaccaagtggca

SEQ ID NO: 44090 - DNA, 22 bp, synthetic construct
  misc_feature 1..22: note = chemically synthesized
  source 1..22: mol_type = other DNA
gcagggtaccaccaagtggcat

SEQ ID NO: 44091 - DNA, 22 bp, synthetic construct
  misc_feature 1..22: note = chemically synthesized
  source 1..22: mol_type = other DNA
cagggtaccaccaagtggcatt

SEQ ID NO: 44092 - DNA, 22 bp, synthetic construct
  misc_feature 1..22: note = chemically synthesized
  source 1..22: mol_type = other DNA
agtacattcacagtggtgtgca

SEQ ID NO: 44093 - DNA, 22 bp, synthetic construct
  misc_feature 1..22: note = chemically synthesized
  source 1..22: mol_type = other DNA
gtacattcacagtggtgtgcaa

SEQ ID NO: 44094 - DNA, 22 bp, synthetic construct
  misc_feature 1..22: note = chemically synthesized
  source 1..22: mol_type = other DNA
acagtggtgtgcaaccatcatc

SEQ ID NO: 44095 - DNA, 22 bp, synthetic construct
  misc_feature 1..22: note = chemically synthesized
  source 1..22: mol_type = other DNA
ccagaatattttcctcatcccc

SEQ ID NO: 44096 - DNA, 22 bp, synthetic construct
  misc_feature 1..22: note = chemically synthesized
  source 1..22: mol_type = other DNA
cagaatattttcctcatcccca

SEQ ID NO: 44097 - DNA, 22 bp, synthetic construct
  misc_feature 1..22: note = chemically synthesized
  source 1..22: mol_type = other DNA
tcctcatccccaaaggaaacct

SEQ ID NO: 44098 - DNA, 22 bp, synthetic construct
  misc_feature 1..22: note = chemically synthesized
  source 1..22: mol_type = other DNA
cctcatccccaaaggaaacctc

SEQ ID NO: 44099 - DNA, 22 bp, synthetic construct
  misc_feature 1..22: note = chemically synthesized
  source 1..22: mol_type = other DNA
ctcatccccaaaggaaacctca

SEQ ID NO: 44100 - DNA, 22 bp, synthetic construct
  misc_feature 1..22: note = chemically synthesized
  source 1..22: mol_type = other DNA
atccccaaaggaaacctcatgc

SEQ ID NO: 44101 - DNA, 22 bp, synthetic construct
  misc_feature 1..22: note = chemically synthesized
  source 1..22: mol_type = other DNA
atgctcattaatcagtagctct

SEQ ID NO: 44102 - DNA, 22 bp, synthetic construct
  misc_feature 1..22: note = chemically synthesized
  source 1..22: mol_type = other DNA
attaatcagtagctctccttta

SEQ ID NO: 44103 - DNA, 22 bp, synthetic construct
  misc_feature 1..22: note = chemically synthesized
  source 1..22: mol_type = other DNA
atcagtagctctcctttaaaat

SEQ ID NO: 44104 - DNA, 22 bp, synthetic construct
  misc_feature 1..22: note = chemically synthesized
  source 1..22: mol_type = other DNA
tcctttaaaatattagttatga

SEQ ID NO: 44105 - DNA, 22 bp, synthetic construct
  misc_feature 1..22: note = chemically synthesized
  source 1..22: mol_type = other DNA
ctttaaaatattagttatgaag

SEQ ID NO: 44106 - DNA, 22 bp, synthetic construct
  misc_feature 1..22: note = chemically synthesized
  source 1..22: mol_type = other DNA
taaaatattagttatgaagatc

SEQ ID NO: 44107 - DNA, 22 bp, synthetic construct
  misc_feature 1..22: note = chemically synthesized
  source 1..22: mol_type = other DNA
aaaatattagttatgaagatca

SEQ ID NO: 44108 - DNA, 22 bp, synthetic construct
  misc_feature 1..22: note = chemically synthesized
  source 1..22: mol_type = other DNA
aaatattagttatgaagatcat

SEQ ID NO: 44109 - DNA, 22 bp, synthetic construct
  misc_feature 1..22: note = chemically synthesized
  source 1..22: mol_type = other DNA
gttatgaagatcatagcactat

SEQ ID NO: 44110 - DNA, 22 bp, synthetic construct
  misc_feature 1..22: note = chemically synthesized
  source 1..22: mol_type = other DNA
tgaagatcatagcactatacaa

SEQ ID NO: 44111 - DNA, 22 bp, synthetic construct
  misc_feature 1..22: note = chemically synthesized
  source 1..22: mol_type = other DNA
tacaaaactcattatgtaatgt

SEQ ID NO: 44112 - DNA, 22 bp, synthetic construct
  misc_feature 1..22: note = chemically synthesized
  source 1..22: mol_type = other DNA
attatgtaatgttgagtgaaaa

SEQ ID NO: 44113 - DNA, 22 bp, synthetic construct
  misc_feature 1..22: note = chemically synthesized
  source 1..22: mol_type = other DNA
tgtaatgttgagtgaaaaaatc

SEQ ID NO: 44114 - DNA, 22 bp, synthetic construct
  misc_feature 1..22: note = chemically synthesized
  source 1..22: mol_type = other DNA
agtgaaaaaatcagggtgtgaa

SEQ ID NO: 44115 - DNA, 22 bp, synthetic construct
  misc_feature 1..22: note = chemically synthesized
  source 1..22: mol_type = other DNA
tgtgatatgatgtaattagtga

SEQ ID NO: 44116 - DNA, 22 bp, synthetic construct
  misc_feature 1..22: note = chemically synthesized
  source 1..22: mol_type = other DNA
gtgatatgatgtaattagtgaa

SEQ ID NO: 44117 - DNA, 22 bp, synthetic construct
  misc_feature 1..22: note = chemically synthesized
  source 1..22: mol_type = other DNA
tgatatgatgtaattagtgaaa

SEQ ID NO: 44118 - DNA, 22 bp, synthetic construct
  misc_feature 1..22: note = chemically synthesized
  source 1..22: mol_type = other DNA
gtgaaagaagcatacaaaaagt

SEQ ID NO: 44119 - DNA, 22 bp, synthetic construct
  misc_feature 1..22: note = chemically synthesized
  source 1..22: mol_type = other DNA
aaaatataaaaacaatagcaat

SEQ ID NO: 44120 - DNA, 22 bp, synthetic construct
  misc_feature 1..22: note = chemically synthesized
  source 1..22: mol_type = other DNA
catttctcagactctacattta

SEQ ID NO: 44121 - DNA, 22 bp, synthetic construct
  misc_feature 1..22: note = chemically synthesized
  source 1..22: mol_type = other DNA
ctcagactctacatttaaacat

SEQ ID NO: 44122 - DNA, 22 bp, synthetic construct
  misc_feature 1..22: note = chemically synthesized
  source 1..22: mol_type = other DNA
tcagactctacatttaaacatt

SEQ ID NO: 44123 - DNA, 22 bp, synthetic construct
  misc_feature 1..22: note = chemically synthesized
  source 1..22: mol_type = other DNA
agactctacatttaaacattat

SEQ ID NO: 44124 - DNA, 22 bp, synthetic construct
  misc_feature 1..22: note = chemically synthesized
  source 1..22: mol_type = other DNA
tacatttaaacattattcttta

SEQ ID NO: 44125 - DNA, 22 bp, synthetic construct
  misc_feature 1..22: note = chemically synthesized
  source 1..22: mol_type = other DNA
catttaaacattattctttatg

SEQ ID NO: 44126 - DNA, 22 bp, synthetic construct
  misc_feature 1..22: note = chemically synthesized
  source 1..22: mol_type = other DNA
aaacattattctttatggtttt

SEQ ID NO: 44127 - DNA, 22 bp, synthetic construct
  misc_feature 1..22: note = chemically synthesized
  source 1..22: mol_type = other DNA
aacattattctttatggtttta

SEQ ID NO: 44128 - DNA, 22 bp, synthetic construct
  misc_feature 1..22: note = chemically synthesized
  source 1..22: mol_type = other DNA
ttctttatggttttaaaagcaa

SEQ ID NO: 44129 - DNA, 22 bp, synthetic construct
  misc_feature 1..22: note = chemically synthesized
  source 1..22: mol_type = other DNA
tttatggttttaaaagcaaaga

SEQ ID NO: 44130 - DNA, 22 bp, synthetic construct
  misc_feature 1..22: note = chemically synthesized
  source 1..22: mol_type = other DNA
tatggttttaaaagcaaagaaa

SEQ ID NO: 44131 - DNA, 22 bp, synthetic construct
  misc_feature 1..22: note = chemically synthesized
  source 1..22: mol_type = other DNA
atggttttaaaagcaaagaaaa

SEQ ID NO: 44132 - DNA, 22 bp, synthetic construct
  misc_feature 1..22: note = chemically synthesized
  source 1..22: mol_type = other DNA
tggttttaaaagcaaagaaaaa

SEQ ID NO: 44133 - DNA, 22 bp, synthetic construct
  misc_feature 1..22: note = chemically synthesized
  source 1..22: mol_type = other DNA
taaaagcaaagaaaaaggtaaa

SEQ ID NO: 44134 - DNA, 22 bp, synthetic construct
  misc_feature 1..22: note = chemically synthesized
  source 1..22: mol_type = other DNA
aaaagcaaagaaaaaggtaaag

SEQ ID NO: 44135 - DNA, 22 bp, synthetic construct
  misc_feature 1..22: note = chemically synthesized
  source 1..22: mol_type = other DNA
aaagcaaagaaaaaggtaaaga

SEQ ID NO: 44136 - DNA, 22 bp, synthetic construct
  misc_feature 1..22: note = chemically synthesized
  source 1..22: mol_type = other DNA
agattgttaaatccaggttttt

SEQ ID NO: 44137 - DNA, 22 bp, synthetic construct
  misc_feature 1..22: note = chemically synthesized
  source 1..22: mol_type = other DNA
ttaaatccaggtttttggaaca

SEQ ID NO: 44138 - DNA, 22 bp, synthetic construct
  misc_feature 1..22: note = chemically synthesized
  source 1..22: mol_type = other DNA
aatccaggtttttggaacatag

SEQ ID NO: 44139 - DNA, 22 bp, synthetic construct
  misc_feature 1..22: note = chemically synthesized
  source 1..22: mol_type = other DNA
ttggaacatagactcttatatg

SEQ ID NO: 44140 - DNA, 22 bp, synthetic construct
  misc_feature 1..22: note = chemically synthesized
  source 1..22: mol_type = other DNA
tggaacatagactcttatatga

SEQ ID NO: 44141 - DNA, 22 bp, synthetic construct
  misc_feature 1..22: note = chemically synthesized
  source 1..22: mol_type = other DNA
ggaacatagactcttatatgac

SEQ ID NO: 44142 - DNA, 22 bp, synthetic construct
  misc_feature 1..22: note = chemically synthesized
  source 1..22: mol_type = other DNA
gaacatagactcttatatgacg

SEQ ID NO: 44143 - DNA, 22 bp, synthetic construct
  misc_feature 1..22: note = chemically synthesized
  source 1..22: mol_type = other DNA
ttatatgacgtttacactctcc

SEQ ID NO: 44144 - DNA, 22 bp, synthetic construct
  misc_feature 1..22: note = chemically synthesized
  source 1..22: mol_type = other DNA
atatgacgtttacactctccag

SEQ ID NO: 44145 - DNA, 22 bp, synthetic construct
  misc_feature 1..22: note = chemically synthesized
  source 1..22: mol_type = other DNA
tatgacgtttacactctccagg

SEQ ID NO: 44146 - DNA, 22 bp, synthetic construct
  misc_feature 1..22: note = chemically synthesized
  source 1..22: mol_type = other DNA
acactctccagggttcagagag

SEQ ID NO: 44147 - DNA, 22 bp, synthetic construct
  misc_feature 1..22: note = chemically synthesized
  source 1..22: mol_type = other DNA
cactctccagggttcagagagt

SEQ ID NO: 44148 - DNA, 22 bp, synthetic construct
  misc_feature 1..22: note = chemically synthesized
  source 1..22: mol_type = other DNA
tccagggttcagagagtctggc

SEQ ID NO: 44149 - DNA, 22 bp, synthetic construct
  misc_feature 1..22: note = chemically synthesized
  source 1..22: mol_type = other DNA
cagggttcagagagtctggcag

SEQ ID NO: 44150 - DNA, 22 bp, synthetic construct
  misc_feature 1..22: note = chemically synthesized
  source 1..22: mol_type = other DNA
agagagtctggcagcattggga

SEQ ID NO: 44151 - DNA, 22 bp, synthetic construct
  misc_feature 1..22: note = chemically synthesized
  source 1..22: mol_type = other DNA
gcagcattgggagctgccttgt

SEQ ID NO: 44152 - DNA, 22 bp, synthetic construct
  misc_feature 1..22: note = chemically synthesized
  source 1..22: mol_type = other DNA
ggagctgccttgtgttctacag

SEQ ID NO: 44153 - DNA, 22 bp, synthetic construct
  misc_feature 1..22: note = chemically synthesized
  source 1..22: mol_type = other DNA
ccttgtgttctacagcctcacg

SEQ ID NO: 44154 - DNA, 22 bp, synthetic construct
  misc_feature 1..22: note = chemically synthesized
  source 1..22: mol_type = other DNA
gtgttctacagcctcacggaca

SEQ ID NO: 44155 - DNA, 22 bp, synthetic construct
  misc_feature 1..22: note = chemically synthesized
  source 1..22: mol_type = other DNA
tgttctacagcctcacggacag

SEQ ID NO: 44156 - DNA, 22 bp, synthetic construct
  misc_feature 1..22: note = chemically synthesized
  source 1..22: mol_type = other DNA
tacagcctcacggacagacagg

SEQ ID NO: 44157 - DNA, 22 bp, synthetic construct
  misc_feature 1..22: note = chemically synthesized
  source 1..22: mol_type = other DNA
cagcctcacggacagacaggag

SEQ ID NO: 44158 - DNA, 22 bp, synthetic construct
  misc_feature 1..22: note = chemically synthesized
  source 1..22: mol_type = other DNA
acggacagacaggaggtccatc

SEQ ID NO: 44159 - DNA, 22 bp, synthetic construct
  misc_feature 1..22: note = chemically synthesized
  source 1..22: mol_type = other DNA
ctctgttcttctggagtttcct

SEQ ID NO: 44160 - DNA, 22 bp, synthetic construct
  misc_feature 1..22: note = chemically synthesized
  source 1..22: mol_type = other DNA
tgttcttctggagtttccttgt

SEQ ID NO: 44161 - DNA, 22 bp, synthetic construct
  misc_feature 1..22: note = chemically synthesized
  source 1..22: mol_type = other DNA
ttcttctggagtttccttgtga

SEQ ID NO: 44162 - DNA, 22 bp, synthetic construct
  misc_feature 1..22: note = chemically synthesized
  source 1..22: mol_type = other DNA
ttctggagtttccttgtgaaca

SEQ ID NO: 44163 - DNA, 22 bp, synthetic construct
  misc_feature 1..22: note = chemically synthesized
  source 1..22: mol_type = other DNA
ctggagtttccttgtgaacatg

SEQ ID NO: 44164 - DNA, 22 bp, synthetic construct
  misc_feature 1..22: note = chemically synthesized
  source 1..22: mol_type = other DNA
tggagtttccttgtgaacatgt

SEQ ID NO: 44165 - DNA, 22 bp, synthetic construct
  misc_feature 1..22: note = chemically synthesized
  source 1..22: mol_type = other DNA
gagtttccttgtgaacatgttg

SEQ ID NO: 44166 - DNA, 22 bp, synthetic construct
  misc_feature 1..22: note = chemically synthesized
  source 1..22: mol_type = other DNA
ccttgtgaacatgttgtggacg

SEQ ID NO: 44167 - DNA, 22 bp, synthetic construct
  misc_feature 1..22: note = chemically synthesized
  source 1..22: mol_type = other DNA
cttgtgaacatgttgtggacgt

SEQ ID NO: 44168 - DNA, 22 bp, synthetic construct
  misc_feature 1..22: note = chemically synthesized
  source 1..22: mol_type = other DNA
gtgaacatgttgtggacgtagt

SEQ ID NO: 44169 - DNA, 22 bp, synthetic construct
  misc_feature 1..22: note = chemically synthesized
  source 1..22: mol_type = other DNA
tgaacatgttgtggacgtagtt

SEQ ID NO: 44170 - DNA, 22 bp, synthetic construct
  misc_feature 1..22: note = chemically synthesized
  source 1..22: mol_type = other DNA
tggacgtagttaccatttcttt

SEQ ID NO: 44171 - DNA, 22 bp, synthetic construct
  misc_feature 1..22: note = chemically synthesized
  source 1..22: mol_type = other DNA
ccatttctttcatctttttaaa

SEQ ID NO: 44172 - DNA, 22 bp, synthetic construct
  misc_feature 1..22: note = chemically synthesized
  source 1..22: mol_type = other DNA
ctttcatctttttaaacacagg

SEQ ID NO: 44173 - DNA, 22 bp, synthetic construct
  misc_feature 1..22: note = chemically synthesized
  source 1..22: mol_type = other DNA
tttcatctttttaaacacaggt

SEQ ID NO: 44174 - DNA, 22 bp, synthetic construct
  misc_feature 1..22: note = chemically synthesized
  source 1..22: mol_type = other DNA
tcatctttttaaacacaggtac

SEQ ID NO: 44175 - DNA, 22 bp, synthetic construct
  misc_feature 1..22: note = chemically synthesized
  source 1..22: mol_type = other DNA
catctttttaaacacaggtacc

SEQ ID NO: 44176 - DNA, 22 bp, synthetic construct
  misc_feature 1..22: note = chemically synthesized
  source 1..22: mol_type = other DNA
atctttttaaacacaggtacct

SEQ ID NO: 44177 - DNA, 22 bp, synthetic construct
  misc_feature 1..22: note = chemically synthesized
  source 1..22: mol_type = other DNA
tttaaacacaggtacctttggg

SEQ ID NO: 44178 - DNA, 22 bp, synthetic construct
  misc_feature 1..22: note = chemically synthesized
  source 1..22: mol_type = other DNA
ttaaacacaggtacctttgggg

SEQ ID NO: 44179 - DNA, 22 bp, synthetic construct
  misc_feature 1..22: note = chemically synthesized
  source 1..22: mol_type = other DNA
taaacacaggtacctttggggc

SEQ ID NO: 44180 - DNA, 22 bp, synthetic construct
  misc_feature 1..22: note = chemically synthesized
  source 1..22: mol_type = other DNA
aaacacaggtacctttggggct

SEQ ID NO: 44181 - DNA, 22 bp, synthetic construct
  misc_feature 1..22: note = chemically synthesized
  source 1..22: mol_type = other DNA
aacacaggtacctttggggctg

SEQ ID NO: 44182 - DNA, 22 bp, synthetic construct
  misc_feature 1..22: note = chemically synthesized
  source 1..22: mol_type = other DNA
tggggctggctttctcaaggaa

SEQ ID NO: 44183 - DNA, 22 bp, synthetic construct
  misc_feature 1..22: note = chemically synthesized
  source 1..22: mol_type = other DNA
ggggctggctttctcaaggaag

SEQ ID NO: 44184 - DNA, 22 bp, synthetic construct
  misc_feature 1..22: note = chemically synthesized
  source 1..22: mol_type = other DNA
gggctggctttctcaaggaagc

SEQ ID NO: 44185 - DNA, 22 bp, synthetic construct
  misc_feature 1..22: note = chemically synthesized
  source 1..22: mol_type = other DNA
gctttctcaaggaagcccagct

SEQ ID NO: 44186 - DNA, 22 bp, synthetic construct
  misc_feature 1..22: note = chemically synthesized
  source 1..22: mol_type = other DNA
tctcaaggaagcccagctccct

SEQ ID NO: 44187 - DNA, 22 bp, synthetic construct
  misc_feature 1..22: note = chemically synthesized
  source 1..22: mol_type = other DNA
ctcaaggaagcccagctccctg

SEQ ID NO: 44188 - DNA, 22 bp, synthetic construct
  misc_feature 1..22: note = chemically synthesized
  source 1..22: mol_type = other DNA
tcaaggaagcccagctccctgt

SEQ ID NO: 44189 - DNA, 22 bp, synthetic construct
  misc_feature 1..22: note = chemically synthesized
  source 1..22: mol_type = other DNA
aaggaagcccagctccctgtga

SEQ ID NO: 44190 - DNA, 22 bp, synthetic construct
  misc_feature 1..22: note = chemically synthesized
  source 1..22: mol_type = other DNA
cctgtgattgagaatgaagtgt

SEQ ID NO: 44191 - DNA, 22 bp, synthetic construct
  misc_feature 1..22: note = chemically synthesized
  source 1..22: mol_type = other DNA
tgattgagaatgaagtgtgcaa

SEQ ID NO: 44192 - DNA, 22 bp, synthetic construct
  misc_feature 1..22: note = chemically synthesized
  source 1..22: mol_type = other DNA
agaatgaagtgtgcaatcgcta

SEQ ID NO: 44193 - DNA, 22 bp, synthetic construct
  misc_feature 1..22: note = chemically synthesized
  source 1..22: mol_type = other DNA
tgagtttctgaatggaagagtc

SEQ ID NO: 44194 - DNA, 22 bp, synthetic construct
  misc_feature 1..22: note = chemically synthesized
  source 1..22: mol_type = other DNA
ctgaatggaagagtcaaatcca

SEQ ID NO: 44195 - DNA, 22 bp, synthetic construct
  misc_feature 1..22: note = chemically synthesized
  source 1..22: mol_type = other DNA
tgaatggaagagtcaaatccac

SEQ ID NO: 44196 - DNA, 22 bp, synthetic construct
  misc_feature 1..22: note = chemically synthesized
  source 1..22: mol_type = other DNA
aatggaagagtcaaatccactg

SEQ ID NO: 44197 - DNA, 22 bp, synthetic construct
  misc_feature 1..22: note = chemically synthesized
  source 1..22: mol_type = other DNA
agctctgtgctgggcatttggc

SEQ ID NO: 44198 - DNA, 22 bp, synthetic construct
  misc_feature 1..22: note = chemically synthesized
  source 1..22: mol_type = other DNA
tgtgctgggcatttggctggag

SEQ ID NO: 44199 - DNA, 22 bp, synthetic construct
  misc_feature 1..22: note = chemically synthesized
  source 1..22: mol_type = other DNA
tgctgggcatttggctggaggc

SEQ ID NO: 44200 - DNA, 22 bp, synthetic construct
  misc_feature 1..22: note = chemically synthesized
  source 1..22: mol_type = other DNA
ggcatttggctggaggcattga

SEQ ID NO: 44201 - DNA, 22 bp, synthetic construct
  misc_feature 1..22: note = chemically synthesized
  source 1..22: mol_type = other DNA
ggctggaggcattgacagttgc

SEQ ID NO: 44202 - DNA, 22 bp, synthetic construct
  misc_feature 1..22: note = chemically synthesized
  source 1..22: mol_type = other DNA
gctggaggcattgacagttgca

SEQ ID NO: 44203 - DNA, 22 bp, synthetic construct
  misc_feature 1..22: note = chemically synthesized
  source 1..22: mol_type = other DNA
gaggcattgacagttgcaaggt

SEQ ID NO: 44204 - DNA, 22 bp, synthetic construct
  misc_feature 1..22: note = chemically synthesized
  source 1..22: mol_type = other DNA
acagttgcaaggtaagaaaaga

SEQ ID NO: 44205 - DNA, 22 bp, synthetic construct
  misc_feature 1..22: note = chemically synthesized
  source 1..22: mol_type = other DNA
caaggtaagaaaagatcaagag

SEQ ID NO: 44206 - DNA, 22 bp, synthetic construct
  misc_feature 1..22: note = chemically synthesized
  source 1..22: mol_type = other DNA
gtcttgtgctctcctgtctcag

SEQ ID NO: 44207 - DNA, 22 bp, synthetic construct
  misc_feature 1..22: note = chemically synthesized
  source 1..22: mol_type = other DNA
gtgctctcctgtctcagtctca

SEQ ID NO: 44208 - DNA, 22 bp, synthetic construct
  misc_feature 1..22: note = chemically synthesized
  source 1..22: mol_type = other DNA
tgctctcctgtctcagtctcag

SEQ ID NO: 44209 - DNA, 22 bp, synthetic construct
  misc_feature 1..22: note = chemically synthesized
  source 1..22: mol_type = other DNA
tcctgtctcagtctcagtccct

SEQ ID NO: 44210 - DNA, 22 bp, synthetic construct
  misc_feature 1..22: note = chemically synthesized
  source 1..22: mol_type = other DNA
ctgtctcagtctcagtccctta

SEQ ID NO: 44211 - DNA, 22 bp, synthetic construct
  misc_feature 1..22: note = chemically synthesized
  source 1..22: mol_type = other DNA
tctcagtctcagtcccttagac

SEQ ID NO: 44212 - DNA, 22 bp, synthetic construct
  misc_feature 1..22: note = chemically synthesized
  source 1..22: mol_type = other DNA
agtctcagtcccttagacttga

SEQ ID NO: 44213 - DNA, 22 bp, synthetic construct
  misc_feature 1..22: note = chemically synthesized
  source 1..22: mol_type = other DNA
agtcccttagacttgagtccca

SEQ ID NO: 44214 - DNA, 22 bp, synthetic construct
  misc_feature 1..22: note = chemically synthesized
  source 1..22: mol_type = other DNA
agacttgagtcccaaagtagcg

SEQ ID NO: 44215 - DNA, 22 bp, synthetic construct
  misc_feature 1..22: note = chemically synthesized
  source 1..22: mol_type = other DNA
gacttgagtcccaaagtagcga

SEQ ID NO: 44216 - DNA, 22 bp, synthetic construct
  misc_feature 1..22: note = chemically synthesized
  source 1..22: mol_type = other DNA
gagtcccaaagtagcgaattca

SEQ ID NO: 44217 - DNA, 22 bp, synthetic construct
  misc_feature 1..22: note = chemically synthesized
  source 1..22: mol_type = other DNA
agtcccaaagtagcgaattcaa

SEQ ID NO: 44218 - DNA, 22 bp, synthetic construct
  misc_feature 1..22: note = chemically synthesized
  source 1..22: mol_type = other DNA
aagtaggatttaatcaatggaa

SEQ ID NO: 44219 - DNA, 22 bp, synthetic construct
  misc_feature 1..22: note = chemically synthesized
  source 1..22: mol_type = other DNA
aatcaatggaagaccccagtct

SEQ ID NO: 44220 - DNA, 22 bp, synthetic construct
  misc_feature 1..22: note = chemically synthesized
  source 1..22: mol_type = other DNA
atcaatggaagaccccagtcta

SEQ ID NO: 44221 - DNA, 22 bp, synthetic construct
  misc_feature 1..22: note = chemically synthesized
  source 1..22: mol_type = other DNA
agtgttgctcagaaactcccta

SEQ ID NO: 44222 - DNA, 22 bp, synthetic construct
  misc_feature 1..22: note = chemically synthesized
  source 1..22: mol_type = other DNA
ctcagaaactccctagatctgt

SEQ ID NO: 44223 - DNA, 22 bp, synthetic construct
  misc_feature 1..22: note = chemically synthesized
  source 1..22: mol_type = other DNA
agaaactccctagatctgtccc

SEQ ID NO: 44224 - DNA, 22 bp, synthetic construct
  misc_feature 1..22: note = chemically synthesized
  source 1..22: mol_type = other DNA
cctagatctgtcccaaatgtat

SEQ ID NO: 44225 - DNA, 22 bp, synthetic construct
  misc_feature 1..22: note = chemically synthesized
  source 1..22: mol_type = other DNA
gatctgtcccaaatgtatattc

SEQ ID NO: 44226 - DNA, 22 bp, synthetic construct
  misc_feature 1..22: note = chemically synthesized
  source 1..22: mol_type = other DNA
tcccaaatgtatattcagatca

SEQ ID NO: 44227 - DNA, 22 bp, synthetic construct
  misc_feature 1..22: note = chemically synthesized
  source 1..22: mol_type = other DNA
agatcatccaaggggacttctt

SEQ ID NO: 44228 - DNA, 22 bp, synthetic construct
  misc_feature 1..22: note = chemically synthesized
  source 1..22: mol_type = other DNA
cttggggcttgagttccagatc

SEQ ID NO: 44229 - DNA, 22 bp, synthetic construct
  misc_feature 1..22: note = chemically synthesized
  source 1..22: mol_type = other DNA
ttggggcttgagttccagatca

SEQ ID NO: 44230 - DNA, 22 bp, synthetic construct
  misc_feature 1..22: note = chemically synthesized
  source 1..22: mol_type = other DNA
ggggcttgagttccagatcagc

SEQ ID NO: 44231 - DNA, 22 bp, synthetic construct
  misc_feature 1..22: note = chemically synthesized
  source 1..22: mol_type = other DNA
gggcttgagttccagatcagca

SEQ ID NO: 44232 - DNA, 22 bp, synthetic construct
  misc_feature 1..22: note = chemically synthesized
  source 1..22: mol_type = other DNA
gagttccagatcagcagcaagg

SEQ ID NO: 44233 - DNA, 22 bp, synthetic construct
  misc_feature 1..22: note = chemically synthesized
  source 1..22: mol_type = other DNA
agttccagatcagcagcaaggg

SEQ ID NO: 44234 - DNA, 22 bp, synthetic construct
  misc_feature 1..22: note = chemically synthesized
  source 1..22: mol_type = other DNA
cagatcagcagcaagggagcca

SEQ ID NO: 44235 - DNA, 22 bp, synthetic construct
  misc_feature 1..22: note = chemically synthesized
  source 1..22: mol_type = other DNA
cctcagaccactcaccctcctg

SEQ ID NO: 44236 - DNA, 22 bp, synthetic construct
  misc_feature 1..22: note = chemically synthesized
  source 1..22: mol_type = other DNA
agaccactcaccctcctggggt

SEQ ID NO: 44237 - DNA, 22 bp, synthetic construct
  misc_feature 1..22: note = chemically synthesized
  source 1..22: mol_type = other DNA
accctcctggggtgtcccggtg

SEQ ID NO: 44238 - DNA, 22 bp, synthetic construct
  misc_feature 1..22: note = chemically synthesized
  source 1..22: mol_type = other DNA
ctggggtgtcccggtggccagg

SEQ ID NO: 44239 - DNA, 22 bp, synthetic construct
  misc_feature 1..22: note = chemically synthesized
  source 1..22: mol_type = other DNA
gggtgtcccggtggccagggac

SEQ ID NO: 44240 - DNA, 22 bp, synthetic construct
  misc_feature 1..22: note = chemically synthesized
  source 1..22: mol_type = other DNA
aagtggtgatttttctggtagg

SEQ ID NO: 44241 - DNA, 22 bp, synthetic construct
  misc_feature 1..22: note = chemically synthesized
  source 1..22: mol_type = other DNA
ttctggtagggaaggaggtaga

SEQ ID NO: 44242 - DNA, 22 bp, synthetic construct
  misc_feature 1..22: note = chemically synthesized
  source 1..22: mol_type = other DNA
tctggtagggaaggaggtagag

SEQ ID NO: 44243 - DNA, 22 bp, synthetic construct
  misc_feature 1..22: note = chemically synthesized
  source 1..22: mol_type = other DNA
ctggtagggaaggaggtagagg

SEQ ID NO: 44244 - DNA, 22 bp, synthetic construct
  misc_feature 1..22: note = chemically synthesized
  source 1..22: mol_type = other DNA
tggtagggaaggaggtagaggg

SEQ ID NO: 44245 - DNA, 22 bp, synthetic construct
  misc_feature 1..22: note = chemically synthesized
  source 1..22: mol_type = other DNA
gtagggaaggaggtagagggta

SEQ ID NO: 44246 - DNA, 22 bp, synthetic construct
  misc_feature 1..22: note = chemically synthesized
  source 1..22: mol_type = other DNA
actgcacacaatatctgagact

SEQ ID NO: 44247 - DNA, 22 bp, synthetic construct
  misc_feature 1..22: note = chemically synthesized
  source 1..22: mol_type = other DNA
cacacaatatctgagactggag

SEQ ID NO: 44248 - DNA, 22 bp, synthetic construct
  misc_feature 1..22: note = chemically synthesized
  source 1..22: mol_type = other DNA
agactggagctcagatattgct

SEQ ID NO: 44249 - DNA, 22 bp, synthetic construct
  misc_feature 1..22: note = chemically synthesized
  source 1..22: mol_type = other DNA
gagctcagatattgctgatgat

SEQ ID NO: 44250 - DNA, 22 bp, synthetic construct
  misc_feature 1..22: note = chemically synthesized
  source 1..22: mol_type = other DNA
agatattgctgatgatcagagt

SEQ ID NO: 44251 - DNA, 22 bp, synthetic construct
  misc_feature 1..22: note = chemically synthesized
  source 1..22: mol_type = other DNA
ctgatgatcagagttggcgtgt

SEQ ID NO: 44252 - DNA, 22 bp, synthetic construct
  misc_feature 1..22: note = chemically synthesized
  source 1..22: mol_type = other DNA
atgatcagagttggcgtgtctc

SEQ ID NO: 44253 - DNA, 22 bp, synthetic construct
  misc_feature 1..22: note = chemically synthesized
  source 1..22: mol_type = other DNA
gcgtgtctccccaattgattta

SEQ ID NO: 44254 - DNA, 22 bp, synthetic construct
  misc_feature 1..22: note = chemically synthesized
  source 1..22: mol_type = other DNA
cccaattgatttacaactgggg

SEQ ID NO: 44255 - DNA, 22 bp, synthetic construct
  misc_feature 1..22: note = chemically synthesized
  source 1..22: mol_type = other DNA
atttacaactggggcttggata

SEQ ID NO: 44256 - DNA, 22 bp, synthetic construct
  misc_feature 1..22: note = chemically synthesized
  source 1..22: mol_type = other DNA
acaactggggcttggatactgt

SEQ ID NO: 44257 - DNA, 22 bp, synthetic construct
  misc_feature 1..22: note = chemically synthesized
  source 1..22: mol_type = other DNA
caactggggcttggatactgtt

SEQ ID NO: 44258 - DNA, 22 bp, synthetic construct
  misc_feature 1..22: note = chemically synthesized
  source 1..22: mol_type = other DNA
gggcttggatactgttttaaac

SEQ ID NO: 44259 - DNA, 22 bp, synthetic construct
  misc_feature 1..22: note = chemically synthesized
  source 1..22: mol_type = other DNA
ggatactgttttaaacgggagg

SEQ ID NO: 44260 - DNA, 22 bp, synthetic construct
  misc_feature 1..22: note = chemically synthesized
  source 1..22: mol_type = other DNA
gatactgttttaaacgggagga

SEQ ID NO: 44261 - DNA, 22 bp, synthetic construct
  misc_feature 1..22: note = chemically synthesized
  source 1..22: mol_type = other DNA
ttttaaacgggaggagcctcct

SEQ ID NO: 44262 - DNA, 22 bp, synthetic construct
  misc_feature 1..22: note = chemically synthesized
  source 1..22: mol_type = other DNA
taaacgggaggagcctcctaac

SEQ ID NO: 44263 - DNA, 22 bp, synthetic construct
  misc_feature 1..22: note = chemically synthesized
  source 1..22: mol_type = other DNA
aaacgggaggagcctcctaacc

SEQ ID NO: 44264 - DNA, 22 bp, synthetic construct
  misc_feature 1..22: note = chemically synthesized
  source 1..22: mol_type = other DNA
aacgggaggagcctcctaacca

SEQ ID NO: 44265 - DNA, 22 bp, synthetic construct
  misc_feature 1..22: note = chemically synthesized
  source 1..22: mol_type = other DNA
ctaaccatcttgacacaaccac

SEQ ID NO: 44266 - DNA, 22 bp, synthetic construct
  misc_feature 1..22: note = chemically synthesized
  source 1..22: mol_type = other DNA
accatcttgacacaaccactga

SEQ ID NO: 44267 - DNA, 22 bp, synthetic construct
  misc_feature 1..22: note = chemically synthesized
  source 1..22: mol_type = other DNA
gacacaaccactgacgtgacta

SEQ ID NO: 44268 - DNA, 22 bp, synthetic construct
  misc_feature 1..22: note = chemically synthesized
  source 1..22: mol_type = other DNA
acacaaccactgacgtgactac

SEQ ID NO: 44269 - DNA, 22 bp, synthetic construct
  misc_feature 1..22: note = chemically synthesized
  source 1..22: mol_type = other DNA
acgtgactacactagagataga

SEQ ID NO: 44270 - DNA, 22 bp, synthetic construct
  misc_feature 1..22: note = chemically synthesized
  source 1..22: mol_type = other DNA
cactagagatagactctttcca

SEQ ID NO: 44271 - DNA, 22 bp, synthetic construct
  misc_feature 1..22: note = chemically synthesized
  source 1..22: mol_type = other DNA
gagatagactctttccacttaa

SEQ ID NO: 44272 - DNA, 22 bp, synthetic construct
  misc_feature 1..22: note = chemically synthesized
  source 1..22: mol_type = other DNA
tttccacttaattctaccactc

SEQ ID NO: 44273 - DNA, 22 bp, synthetic construct
  misc_feature 1..22: note = chemically synthesized
  source 1..22: mol_type = other DNA
tccacttaattctaccactctt

SEQ ID NO: 44274 - DNA, 22 bp, synthetic construct
  misc_feature 1..22: note = chemically synthesized
  source 1..22: mol_type = other DNA
ccacttaattctaccactcttg

SEQ ID NO: 44275 - DNA, 22 bp, synthetic construct
  misc_feature 1..22: note = chemically synthesized
  source 1..22: mol_type = other DNA
cacttaattctaccactcttgc

SEQ ID NO: 44276 - DNA, 22 bp, synthetic construct
  misc_feature 1..22: note = chemically synthesized
  source 1..22: mol_type = other DNA
aattctaccactcttgctttac

SEQ ID NO: 44277 - DNA, 22 bp, synthetic construct
  misc_feature 1..22: note = chemically synthesized
  source 1..22: mol_type = other DNA
attctaccactcttgctttact

SEQ ID NO: 44278 - DNA, 22 bp, synthetic construct
  misc_feature 1..22: note = chemically synthesized
  source 1..22: mol_type = other DNA
taccactcttgctttacttcat

SEQ ID NO: 44279 - DNA, 22 bp, synthetic construct
  misc_feature 1..22: note = chemically synthesized
  source 1..22: mol_type = other DNA
ccactcttgctttacttcatga

SEQ ID NO: 44280 - DNA, 22 bp, synthetic construct
  misc_feature 1..22: note = chemically synthesized
  source 1..22: mol_type = other DNA
ttgctttacttcatgagaacga

SEQ ID NO: 44281 - DNA, 22 bp, synthetic construct
  misc_feature 1..22: note = chemically synthesized
  source 1..22: mol_type = other DNA
gctttacttcatgagaacgaaa

SEQ ID NO: 44282 - DNA, 22 bp, synthetic construct
  misc_feature 1..22: note = chemically synthesized
  source 1..22: mol_type = other DNA
ctttacttcatgagaacgaaaa

SEQ ID NO: 44283 - DNA, 22 bp, synthetic construct
  misc_feature 1..22: note = chemically synthesized
  source 1..22: mol_type = other DNA
tacttcatgagaacgaaaatgt

SEQ ID NO: 44284 - DNA, 22 bp, synthetic construct
  misc_feature 1..22: note = chemically synthesized
  source 1..22: mol_type = other DNA
acttcatgagaacgaaaatgta

SEQ ID NO: 44285 - DNA, 22 bp, synthetic construct
  misc_feature 1..22: note = chemically synthesized
  source 1..22: mol_type = other DNA
cttcatgagaacgaaaatgtaa

SEQ ID NO: 44286 - DNA, 22 bp, synthetic construct
  misc_feature 1..22: note = chemically synthesized
  source 1..22: mol_type = other DNA
catgagaacgaaaatgtaagat

SEQ ID NO: 44287 - DNA, 22 bp, synthetic construct
  misc_feature 1..22: note = chemically synthesized
  source 1..22: mol_type = other DNA
atgagaacgaaaatgtaagatt

SEQ ID NO: 44288 - DNA, 22 bp, synthetic construct
  misc_feature 1..22: note = chemically synthesized
  source 1..22: mol_type = other DNA
caccatgaattcatttgcggaa

SEQ ID NO: 44289 - DNA, 22 bp, synthetic construct
  misc_feature 1..22: note = chemically synthesized
  source 1..22: mol_type = other DNA
atttgcggaaagattgatacta

SEQ ID NO: 44290 - DNA, 22 bp, synthetic construct
  misc_feature 1..22: note = chemically synthesized
  source 1..22: mol_type = other DNA
gcggaaagattgatactatgct

SEQ ID NO: 44291 - DNA, 22 bp, synthetic construct
  misc_feature 1..22: note = chemically synthesized
  source 1..22: mol_type = other DNA
cggaaagattgatactatgctt

SEQ ID NO: 44292 - DNA, 22 bp, synthetic construct
  misc_feature 1..22: note = chemically synthesized
  source 1..22: mol_type = other DNA
atactatgcttttattttattt

SEQ ID NO: 44293 - DNA, 22 bp, synthetic construct
  misc_feature 1..22: note = chemically synthesized
  source 1..22: mol_type = other DNA
tgcttttattttattttatttt

SEQ ID NO: 44294 - DNA, 22 bp, synthetic construct
  misc_feature 1..22: note = chemically synthesized
  source 1..22: mol_type = other DNA
ttattttattttattttatttt

SEQ ID NO: 44295 - DNA, 22 bp, synthetic construct
  misc_feature 1..22: note = chemically synthesized
  source 1..22: mol_type = other DNA
tattttattttattttatttta

SEQ ID NO: 44296 - DNA, 22 bp, synthetic construct
  misc_feature 1..22: note = chemically synthesized
  source 1..22: mol_type = other DNA
attttattttattttattttat

SEQ ID NO: 44297 - DNA, 22 bp, synthetic construct
  misc_feature 1..22: note = chemically synthesized
  source 1..22: mol_type = other DNA
ttttattttattttattttatt

SEQ ID NO: 44298 - DNA, 22 bp, synthetic construct
  misc_feature 1..22: note = chemically synthesized
  source 1..22: mol_type = other DNA
tattttattttattttatttta

SEQ ID NO: 44299 - DNA, 22 bp, synthetic construct
  misc_feature 1..22: note = chemically synthesized
  source 1..22: mol_type = other DNA
attttattttattttattttat

SEQ ID NO: 44300 - DNA, 22 bp, synthetic construct
  misc_feature 1..22: note = chemically synthesized
  source 1..22: mol_type = other DNA
ttttattttattttattttatt

SEQ ID NO: 44301 - DNA, 22 bp, synthetic construct
  misc_feature 1..22: note = chemically synthesized
  source 1..22: mol_type = other DNA
tattttattttattttatttta

SEQ ID NO: 44302 - DNA, 22 bp, synthetic construct
  misc_feature 1..22: note = chemically synthesized
  source 1..22: mol_type = other DNA
attttattttattttattttat

SEQ ID NO: 44303 - DNA, 22 bp, synthetic construct
  misc_feature 1..22: note = chemically synthesized
  source 1..22: mol_type = other DNA
ttttattttattttattttatt

SEQ ID NO: 44304 - DNA, 22 bp, synthetic construct
  misc_feature 1..22: note = chemically synthesized
  source 1..22: mol_type = other DNA
tattttattttattttatttta

SEQ ID NO: 44305 - DNA, 22 bp, synthetic construct
  misc_feature 1..22: note = chemically synthesized
  source 1..22: mol_type = other DNA
attttattttattttattttat

SEQ ID NO: 44306 - DNA, 22 bp, synthetic construct
  misc_feature 1..22: note = chemically synthesized
  source 1..22: mol_type = other DNA
ttttattttattttattttatt

SEQ ID NO: 44307 - DNA, 22 bp, synthetic construct
  misc_feature 1..22: note = chemically synthesized
  source 1..22: mol_type = other DNA
tattttattttattttatttta

SEQ ID NO: 44308 - DNA, 22 bp, synthetic construct
  misc_feature 1..22: note = chemically synthesized
  source 1..22: mol_type = other DNA
attttattttattttattttat

SEQ ID NO: 44309 - DNA, 22 bp, synthetic construct
  misc_feature 1..22: note = chemically synthesized
  source 1..22: mol_type = other DNA
ttttattttattttattttatt

SEQ ID NO: 44310 - DNA, 22 bp, synthetic construct
  misc_feature 1..22: note = chemically synthesized
  source 1..22: mol_type = other DNA
tattttattttattttattgag

SEQ ID NO: 44311 - DNA, 22 bp, synthetic construct
  misc_feature 1..22: note = chemically synthesized
  source 1..22: mol_type = other DNA
attttattttattttattgaga

SEQ ID NO: 44312 - DNA, 22 bp, synthetic construct
  misc_feature 1..22: note = chemically synthesized
  source 1..22: mol_type = other DNA
ttttattttattttattgagac

SEQ ID NO: 44313 - DNA, 22 bp, synthetic construct
  misc_feature 1..22: note = chemically synthesized
  source 1..22: mol_type = other DNA
tattttattttattgagactct

SEQ ID NO: 44314 - DNA, 22 bp, synthetic construct
  misc_feature 1..22: note = chemically synthesized
  source 1..22: mol_type = other DNA
attttattttattgagactctc

SEQ ID NO: 44315 - DNA, 22 bp, synthetic construct
  misc_feature 1..22: note = chemically synthesized
  source 1..22: mol_type = other DNA
ttttattttattgagactctca

SEQ ID NO: 44316 - DNA, 22 bp, synthetic construct
  misc_feature 1..22: note = chemically synthesized
  source 1..22: mol_type = other DNA
tattttattgagactctcaccc

SEQ ID NO: 44317 - DNA, 22 bp, synthetic construct
  misc_feature 1..22: note = chemically synthesized
  source 1..22: mol_type = other DNA
attttattgagactctcacccc

SEQ ID NO: 44318 - DNA, 22 bp, synthetic construct
  misc_feature 1..22: note = chemically synthesized
  source 1..22: mol_type = other DNA
ttttattgagactctcaccccg

SEQ ID NO: 44319 - DNA, 22 bp, synthetic construct
  misc_feature 1..22: note = chemically synthesized
  source 1..22: mol_type = other DNA
tattgagactctcaccccggtt

SEQ ID NO: 44320 - DNA, 22 bp, synthetic construct
  misc_feature 1..22: note = chemically synthesized
  source 1..22: mol_type = other DNA
attgagactctcaccccggttg

SEQ ID NO: 44321 - DNA, 22 bp, synthetic construct
  misc_feature 1..22: note = chemically synthesized
  source 1..22: mol_type = other DNA
ttgagactctcaccccggttga

SEQ ID NO: 44322 - DNA, 22 bp, synthetic construct
  misc_feature 1..22: note = chemically synthesized
  source 1..22: mol_type = other DNA
agactctcaccccggttgaagt

SEQ ID NO: 44323 - DNA, 22 bp, synthetic construct
  misc_feature 1..22: note = chemically synthesized
  source 1..22: mol_type = other DNA
tcaccccggttgaagtgcactg

SEQ ID NO: 44324 - DNA, 22 bp, synthetic construct
  misc_feature 1..22: note = chemically synthesized
  source 1..22: mol_type = other DNA
accccggttgaagtgcactgac

SEQ ID NO: 44325 - DNA, 22 bp, synthetic construct
  misc_feature 1..22: note = chemically synthesized
  source 1..22: mol_type = other DNA
aagtgcactgacgtgattttgg

SEQ ID NO: 44326 - DNA, 22 bp, synthetic construct
  misc_feature 1..22: note = chemically synthesized
  source 1..22: mol_type = other DNA
acgtgattttggctcactgcaa

SEQ ID NO: 44327 - DNA, 22 bp, synthetic construct
  misc_feature 1..22: note = chemically synthesized
  source 1..22: mol_type = other DNA
tggctcactgcaacttccacct

SEQ ID NO: 44328 - DNA, 22 bp, synthetic construct
  misc_feature 1..22: note = chemically synthesized
  source 1..22: mol_type = other DNA
ggctcactgcaacttccacctc

SEQ ID NO: 44329 - DNA, 22 bp, synthetic construct
  misc_feature 1..22: note = chemically synthesized
  source 1..22: mol_type = other DNA
gctcactgcaacttccacctcc

SEQ ID NO: 44330 - DNA, 22 bp, synthetic construct
  misc_feature 1..22: note = chemically synthesized
  source 1..22: mol_type = other DNA
actgcaacttccacctcctggg

SEQ ID NO: 44331 - DNA, 22 bp, synthetic construct
  misc_feature 1..22: note = chemically synthesized
  source 1..22: mol_type = other DNA
caacttccacctcctgggttca

SEQ ID NO: 44332 - DNA, 22 bp, synthetic construct
  misc_feature 1..22: note = chemically synthesized
  source 1..22: mol_type = other DNA
ccacctcctgggttcaagtgaa

SEQ ID NO: 44333 - DNA, 22 bp, synthetic construct
  misc_feature 1..22: note = chemically synthesized
  source 1..22: mol_type = other DNA
cacctcctgggttcaagtgaat

SEQ ID NO: 44334 - DNA, 22 bp, synthetic construct
  misc_feature 1..22: note = chemically synthesized
  source 1..22: mol_type = other DNA
ctgggttcaagtgaatactcca

SEQ ID NO: 44335 - DNA, 22 bp, synthetic construct
  misc_feature 1..22: note = chemically synthesized
  source 1..22: mol_type = other DNA
ggttcaagtgaatactccagcc

SEQ ID NO: 44336 - DNA, 22 bp, synthetic construct
  misc_feature 1..22: note = chemically synthesized
  source 1..22: mol_type = other DNA
aagtgaatactccagcctccct

SEQ ID NO: 44337 - DNA, 22 bp, synthetic construct
  misc_feature 1..22: note = chemically synthesized
  source 1..22: mol_type = other DNA
cagcctccctagtagctgggat

SEQ ID NO: 44338 - DNA, 22 bp, synthetic construct
  misc_feature 1..22: note = chemically synthesized
  source 1..22: mol_type = other DNA
cctagtagctgggattacaggt

SEQ ID NO: 44339 - DNA, 22 bp, synthetic construct
  misc_feature 1..22: note = chemically synthesized
  source 1..22: mol_type = other DNA
gtagctgggattacaggtgccc

SEQ ID NO: 44340 - DNA, 22 bp, synthetic construct
  misc_feature 1..22: note = chemically synthesized
  source 1..22: mol_type = other DNA
ggattacaggtgcccaccacca

SEQ ID NO: 44341 - DNA, 22 bp, synthetic construct
  misc_feature 1..22: note = chemically synthesized
  source 1..22: mol_type = other DNA
caggtgcccaccaccacgcctg

SEQ ID NO: 44342 - DNA, 22 bp, synthetic construct
  misc_feature 1..22: note = chemically synthesized
  source 1..22: mol_type = other DNA
gctaatttttgtatttttagta

SEQ ID NO: 44343 - DNA, 22 bp, synthetic construct
  misc_feature 1..22: note = chemically synthesized
  source 1..22: mol_type = other DNA
atttttgtatttttagtagaga

SEQ ID NO: 44344 - DNA, 22 bp, synthetic construct
  misc_feature 1..22: note = chemically synthesized
  source 1..22: mol_type = other DNA
ttgtatttttagtagagatggg

SEQ ID NO: 44345 - DNA, 22 bp, synthetic construct
  misc_feature 1..22: note = chemically synthesized
  source 1..22: mol_type = other DNA
tgtatttttagtagagatgggg

SEQ ID NO: 44346 - DNA, 22 bp, synthetic construct
  misc_feature 1..22: note = chemically synthesized
  source 1..22: mol_type = other DNA
gtatttttagtagagatggggt

SEQ ID NO: 44347 - DNA, 22 bp, synthetic construct
  misc_feature 1..22: note = chemically synthesized
  source 1..22: mol_type = other DNA
tatttttagtagagatggggtt

SEQ ID NO: 44348 - DNA, 22 bp, synthetic construct
  misc_feature 1..22: note = chemically synthesized
  source 1..22: mol_type = other DNA
ttagtagagatggggtttcacc

SEQ ID NO: 44349 - DNA, 22 bp, synthetic construct
  misc_feature 1..22: note = chemically synthesized
  source 1..22: mol_type = other DNA
tagtagagatggggtttcacca

SEQ ID NO: 44350 - DNA, 22 bp, synthetic construct
  misc_feature 1..22: note = chemically synthesized
  source 1..22: mol_type = other DNA
agtagagatggggtttcaccac

SEQ ID NO: 44351 - DNA, 22 bp, synthetic construct
  misc_feature 1..22: note = chemically synthesized
  source 1..22: mol_type = other DNA
gtagagatggggtttcaccaca

SEQ ID NO: 44352 - DNA, 22 bp, synthetic construct
  misc_feature 1..22: note = chemically synthesized
  source 1..22: mol_type = other DNA
caccacattggcctggctggtc

SEQ ID NO: 44353 - DNA, 22 bp, synthetic construct
  misc_feature 1..22: note = chemically synthesized
  source 1..22: mol_type = other DNA
accacattggcctggctggtct

SEQ ID NO: 44354 - DNA, 22 bp, synthetic construct
  misc_feature 1..22: note = chemically synthesized
  source 1..22: mol_type = other DNA
gcctggctggtctcaaactcct

SEQ ID NO: 44355 - DNA, 22 bp, synthetic construct
  misc_feature 1..22: note = chemically synthesized
  source 1..22: mol_type = other DNA
gctggtctcaaactcctgacct

SEQ ID NO: 44356 - DNA, 22 bp, synthetic construct
  misc_feature 1..22: note = chemically synthesized
  source 1..22: mol_type = other DNA
gtctcaaactcctgaccttgtg

SEQ ID NO: 44357 - DNA, 22 bp, synthetic construct
  misc_feature 1..22: note = chemically synthesized
  source 1..22: mol_type = other DNA
aaactcctgaccttgtgatcca

SEQ ID NO: 44358 - DNA, 22 bp, synthetic construct
  misc_feature 1..22: note = chemically synthesized
  source 1..22: mol_type = other DNA
ctgaccttgtgatccacctgtc

SEQ ID NO: 44359 - DNA, 22 bp, synthetic construct
  misc_feature 1..22: note = chemically synthesized
  source 1..22: mol_type = other DNA
accttgtgatccacctgtcttg

SEQ ID NO: 44360 - DNA, 22 bp, synthetic construct
  misc_feature 1..22: note = chemically synthesized
  source 1..22: mol_type = other DNA
gtgatccacctgtcttggcctc

SEQ ID NO: 44361 - DNA, 22 bp, synthetic construct
  misc_feature 1..22: note = chemically synthesized
  source 1..22: mol_type = other DNA
tgatccacctgtcttggcctcc

SEQ ID NO: 44362 - DNA, 22 bp, synthetic construct
  misc_feature 1..22: note = chemically synthesized
  source 1..22: mol_type = other DNA
tcttggcctcccaaagtgctgg

SEQ ID NO: 44363 - DNA, 22 bp, synthetic construct
  misc_feature 1..22: note = chemically synthesized
  source 1..22: mol_type = other DNA
ggcctcccaaagtgctgggatt

SEQ ID NO: 44364 - DNA, 22 bp, synthetic construct
  misc_feature 1..22: note = chemically synthesized
  source 1..22: mol_type = other DNA
gcctcccaaagtgctgggatta

SEQ ID NO: 44365 - DNA, 22 bp, synthetic construct
  misc_feature 1..22: note = chemically synthesized
  source 1..22: mol_type = other DNA
ccaaagtgctgggattacagag

SEQ ID NO: 44366 - DNA, 22 bp, synthetic construct
  misc_feature 1..22: note = chemically synthesized
  source 1..22: mol_type = other DNA
ggattacagagttgagccaccg

SEQ ID NO: 44367 - DNA, 22 bp, synthetic construct
  misc_feature 1..22: note = chemically synthesized
  source 1..22: mol_type = other DNA
cagagttgagccaccgcactcg

SEQ ID NO: 44368 - DNA, 22 bp, synthetic construct
  misc_feature 1..22: note = chemically synthesized
  source 1..22: mol_type = other DNA
agccaccgcactcgaccctatg

SEQ ID NO: 44369 - DNA, 22 bp, synthetic construct
  misc_feature 1..22: note = chemically synthesized
  source 1..22: mol_type = other DNA
gaccctatgttttatttttaaa

SEQ ID NO: 44370 - DNA, 22 bp, synthetic construct
  misc_feature 1..22: note = chemically synthesized
  source 1..22: mol_type = other DNA
tgttttatttttaaaaatattt

SEQ ID NO: 44371 - DNA, 22 bp, synthetic construct
  misc_feature 1..22: note = chemically synthesized
  source 1..22: mol_type = other DNA
tatttttaaaaatatttattta

SEQ ID NO: 44372 - DNA, 22 bp, synthetic construct
  misc_feature 1..22: note = chemically synthesized
  source 1..22: mol_type = other DNA
atttttaaaaatatttatttat

SEQ ID NO: 44373 - DNA, 22 bp, synthetic construct
  misc_feature 1..22: note = chemically synthesized
  source 1..22: mol_type = other DNA
tttttaaaaatatttatttatt

SEQ ID NO: 44374 - DNA, 22 bp, synthetic construct
  misc_feature 1..22: note = chemically synthesized
  source 1..22: mol_type = other DNA
ttaaaaatatttatttatttat

SEQ ID NO: 44375 - DNA, 22 bp, synthetic construct
  misc_feature 1..22: note = chemically synthesized
  source 1..22: mol_type = other DNA
taaaaatatttatttatttatt

SEQ ID NO: 44376 - DNA, 22 bp, synthetic construct
  misc_feature 1..22: note = chemically synthesized
  source 1..22: mol_type = other DNA
aaaaatatttatttatttattt

SEQ ID NO: 44377 - DNA, 22 bp, synthetic construct
  misc_feature 1..22: note = chemically synthesized
  source 1..22: mol_type = other DNA
aaaatatttatttatttattta

SEQ ID NO: 44378 - DNA, 22 bp, synthetic construct
  misc_feature 1..22: note = chemically synthesized
  source 1..22: mol_type = other DNA
atttatttatttaagccacaac

SEQ ID NO: 44379 - DNA, 22 bp, synthetic construct
  misc_feature 1..22: note = chemically synthesized
  source 1..22: mol_type = other DNA
tttatttatttaagccacaact

SEQ ID NO: 44380 - DNA, 22 bp, synthetic construct
  misc_feature 1..22: note = chemically synthesized
  source 1..22: mol_type = other DNA
atttatttaagccacaactact

SEQ ID NO: 44381 - DNA, 22 bp, synthetic construct
  misc_feature 1..22: note = chemically synthesized
  source 1..22: mol_type = other DNA
tttatttaagccacaactacta

SEQ ID NO: 44382 - DNA, 22 bp, synthetic construct
  misc_feature 1..22: note = chemically synthesized
  source 1..22: mol_type = other DNA
atttaagccacaactactagaa

SEQ ID NO: 44383 - DNA, 22 bp, synthetic construct
  misc_feature 1..22: note = chemically synthesized
  source 1..22: mol_type = other DNA
tttaagccacaactactagaat

SEQ ID NO: 44384 - DNA, 22 bp, synthetic construct
  misc_feature 1..22: note = chemically synthesized
  source 1..22: mol_type = other DNA
aagccacaactactagaatagg

SEQ ID NO: 44385 - DNA, 22 bp, synthetic construct
  misc_feature 1..22: note = chemically synthesized
  source 1..22: mol_type = other DNA
agccacaactactagaatagga

SEQ ID NO: 44386 - DNA, 22 bp, synthetic construct
  misc_feature 1..22: note = chemically synthesized
  source 1..22: mol_type = other DNA
ctagaataggaaggattgatat

SEQ ID NO: 44387 - DNA, 22 bp, synthetic construct
  misc_feature 1..22: note = chemically synthesized
  source 1..22: mol_type = other DNA
gaataggaaggattgatatttt

SEQ ID NO: 44388 - DNA, 22 bp, synthetic construct
  misc_feature 1..22: note = chemically synthesized
  source 1..22: mol_type = other DNA
atattttattaattttatttgg

SEQ ID NO: 44389 - DNA, 22 bp, synthetic construct
  misc_feature 1..22: note = chemically synthesized
  source 1..22: mol_type = other DNA
tattaattttatttggtattta

SEQ ID NO: 44390 - DNA, 22 bp, synthetic construct
  misc_feature 1..22: note = chemically synthesized
  source 1..22: mol_type = other DNA
attaattttatttggtatttat

SEQ ID NO: 44391 - DNA, 22 bp, synthetic construct
  misc_feature 1..22: note = chemically synthesized
  source 1..22: mol_type = other DNA
ttaattttatttggtatttatt

SEQ ID NO: 44392 - DNA, 22 bp, synthetic construct
  misc_feature 1..22: note = chemically synthesized
  source 1..22: mol_type = other DNA
attttatttggtatttattatt

SEQ ID NO: 44393 - DNA, 22 bp, synthetic construct
  misc_feature 1..22: note = chemically synthesized
  source 1..22: mol_type = other DNA
tatttggtatttattatttttt

SEQ ID NO: 44394 - DNA, 22 bp, synthetic construct
  misc_feature 1..22: note = chemically synthesized
  source 1..22: mol_type = other DNA
atttggtatttattattttttt

SEQ ID NO: 44395 - DNA, 22 bp, synthetic construct
  misc_feature 1..22: note = chemically synthesized
  source 1..22: mol_type = other DNA
tttggtatttattatttttttt

SEQ ID NO: 44396 - DNA, 22 bp, synthetic construct
  misc_feature 1..22: note = chemically synthesized
  source 1..22: mol_type = other DNA
ggtatttattatttttttttct

SEQ ID NO: 44397 - DNA, 22 bp, synthetic construct
  misc_feature 1..22: note = chemically synthesized
  source 1..22: mol_type = other DNA
gtatttattatttttttttctt

SEQ ID NO: 44398 - DNA, 22 bp, synthetic construct
  misc_feature 1..22: note = chemically synthesized
  source 1..22: mol_type = other DNA
attatttttttttctttcctga

SEQ ID NO: 44399 - DNA, 22 bp, synthetic construct
  misc_feature 1..22: note = chemically synthesized
  source 1..22: mol_type = other DNA
ttatttttttttctttcctgag

SEQ ID NO: 44400 - DNA, 22 bp, synthetic construct
  misc_feature 1..22: note = chemically synthesized
  source 1..22: mol_type = other DNA
tttttttttctttcctgagaca

SEQ ID NO: 44401 - DNA, 22 bp, synthetic construct
  misc_feature 1..22: note = chemically synthesized
  source 1..22: mol_type = other DNA
ttttttctttcctgagacattc

SEQ ID NO: 44402 - DNA, 22 bp, synthetic construct
  misc_feature 1..22: note = chemically synthesized
  source 1..22: mol_type = other DNA
tttttctttcctgagacattct

SEQ ID NO: 44403 - DNA, 22 bp, synthetic construct
  misc_feature 1..22: note = chemically synthesized
  source 1..22: mol_type = other DNA
ttttctttcctgagacattctt

SEQ ID NO: 44404 - DNA, 22 bp, synthetic construct
  misc_feature 1..22: note = chemically synthesized
  source 1..22: mol_type = other DNA
tttctttcctgagacattcttg

SEQ ID NO: 44405 - DNA, 22 bp, synthetic construct
  misc_feature 1..22: note = chemically synthesized
  source 1..22: mol_type = other DNA
ttctttcctgagacattcttgc

SEQ ID NO: 44406 - DNA, 22 bp, synthetic construct
  misc_feature 1..22: note = chemically synthesized
  source 1..22: mol_type = other DNA
tctttcctgagacattcttgct

SEQ ID NO: 44407 - DNA, 22 bp, synthetic construct
  misc_feature 1..22: note = chemically synthesized
  source 1..22: mol_type = other DNA
ctttcctgagacattcttgctc

SEQ ID NO: 44408 - DNA, 22 bp, synthetic construct
  misc_feature 1..22: note = chemically synthesized
  source 1..22: mol_type = other DNA
tttcctgagacattcttgctct

SEQ ID NO: 44409 - DNA, 22 bp, synthetic construct
  misc_feature 1..22: note = chemically synthesized
  source 1..22: mol_type = other DNA
tcctgagacattcttgctctgt

SEQ ID NO: 44410 - DNA, 22 bp, synthetic construct
  misc_feature 1..22: note = chemically synthesized
  source 1..22: mol_type = other DNA
cctgagacattcttgctctgtc

SEQ ID NO: 44411 - DNA, 22 bp, synthetic construct
  misc_feature 1..22: note = chemically synthesized
  source 1..22: mol_type = other DNA
ctgagacattcttgctctgtca

SEQ ID NO: 44412 - DNA, 22 bp, synthetic construct
  misc_feature 1..22: note = chemically synthesized
  source 1..22: mol_type = other DNA
agacattcttgctctgtcaccc

SEQ ID NO: 44413 - DNA, 22 bp, synthetic construct
  misc_feature 1..22: note = chemically synthesized
  source 1..22: mol_type = other DNA
ttgctctgtcacccaggctgga

SEQ ID NO: 44414 - DNA, 22 bp, synthetic construct
  misc_feature 1..22: note = chemically synthesized
  source 1..22: mol_type = other DNA
gctctgtcacccaggctggagt

SEQ ID NO: 44415 - DNA, 22 bp, synthetic construct
  misc_feature 1..22: note = chemically synthesized
  source 1..22: mol_type = other DNA
ctctgtcacccaggctggagtg

SEQ ID NO: 44416 - DNA, 22 bp, synthetic construct
  misc_feature 1..22: note = chemically synthesized
  source 1..22: mol_type = other DNA
tgtcacccaggctggagtgcag

SEQ ID NO: 44417 - DNA, 22 bp, synthetic construct
  misc_feature 1..22: note = chemically synthesized
  source 1..22: mol_type = other DNA
tcacccaggctggagtgcagtg

SEQ ID NO: 44418 - DNA, 22 bp, synthetic construct
  misc_feature 1..22: note = chemically synthesized
  source 1..22: mol_type = other DNA
gagtgcagtggcacattcttgg

SEQ ID NO: 44419 - DNA, 22 bp, synthetic construct
  misc_feature 1..22: note = chemically synthesized
  source 1..22: mol_type = other DNA
ttggctcactgcaacctccatc

SEQ ID NO: 44420 - DNA, 22 bp, synthetic construct
  misc_feature 1..22: note = chemically synthesized
  source 1..22: mol_type = other DNA
ggctcactgcaacctccatctc

SEQ ID NO: 44421 - DNA, 22 bp, synthetic construct
  misc_feature 1..22: note = chemically synthesized
  source 1..22: mol_type = other DNA
gctcactgcaacctccatctcc

SEQ ID NO: 44422 - DNA, 22 bp, synthetic construct
  misc_feature 1..22: note = chemically synthesized
  source 1..22: mol_type = other DNA
actgcaacctccatctcctgtg

SEQ ID NO: 44423 - DNA, 22 bp, synthetic construct
  misc_feature 1..22: note = chemically synthesized
  source 1..22: mol_type = other DNA
caacctccatctcctgtgttca

SEQ ID NO: 44424 - DNA, 22 bp, synthetic construct
  misc_feature 1..22: note = chemically synthesized
  source 1..22: mol_type = other DNA
catctcctgtgttcaagcaatt

SEQ ID NO: 44425 - DNA, 22 bp, synthetic construct
  misc_feature 1..22: note = chemically synthesized
  source 1..22: mol_type = other DNA
ctgtgttcaagcaattctagtg

SEQ ID NO: 44426 - DNA, 22 bp, synthetic construct
  misc_feature 1..22: note = chemically synthesized
  source 1..22: mol_type = other DNA
tgttcaagcaattctagtgcct

SEQ ID NO: 44427 - DNA, 22 bp, synthetic construct
  misc_feature 1..22: note = chemically synthesized
  source 1..22: mol_type = other DNA
aagcaattctagtgcctcagcc

SEQ ID NO: 44428 - DNA, 22 bp, synthetic construct
  misc_feature 1..22: note = chemically synthesized
  source 1..22: mol_type = other DNA
tagtgcctcagcctacttagta

SEQ ID NO: 44429 - DNA, 22 bp, synthetic construct
  misc_feature 1..22: note = chemically synthesized
  source 1..22: mol_type = other DNA
gtgcctcagcctacttagtagc

SEQ ID NO: 44430 - DNA, 22 bp, synthetic construct
  misc_feature 1..22: note = chemically synthesized
  source 1..22: mol_type = other DNA
agcctacttagtagctgggatg

SEQ ID NO: 44431 - DNA, 22 bp, synthetic construct
  misc_feature 1..22: note = chemically synthesized
  source 1..22: mol_type = other DNA
cttagtagctgggatgactggc

SEQ ID NO: 44432 - DNA, 22 bp, synthetic construct
  misc_feature 1..22: note = chemically synthesized
  source 1..22: mol_type = other DNA
agtagctgggatgactggcatg

SEQ ID NO: 44433 - DNA, 22 bp, synthetic construct
  misc_feature 1..22: note = chemically synthesized
  source 1..22: mol_type = other DNA
gtagctgggatgactggcatgt

SEQ ID NO: 44434 - DNA, 22 bp, synthetic construct
  misc_feature 1..22: note = chemically synthesized
  source 1..22: mol_type = other DNA
ggatgactggcatgtgcctcca

SEQ ID NO: 44435 - DNA, 22 bp, synthetic construct
  misc_feature 1..22: note = chemically synthesized
  source 1..22: mol_type = other DNA
gcatgtgcctccacacccagct

SEQ ID NO: 44436 - DNA, 22 bp, synthetic construct
  misc_feature 1..22: note = chemically synthesized
  source 1..22: mol_type = other DNA
cacacccagctaatttttgtat

SEQ ID NO: 44437 - DNA, 22 bp, synthetic construct
  misc_feature 1..22: note = chemically synthesized
  source 1..22: mol_type = other DNA
atttttgtattttttgtagaga

SEQ ID NO: 44438 - DNA, 22 bp, synthetic construct
  misc_feature 1..22: note = chemically synthesized
  source 1..22: mol_type = other DNA
ttgtattttttgtagagacagg

SEQ ID NO: 44439 - DNA, 22 bp, synthetic construct
  misc_feature 1..22: note = chemically synthesized
  source 1..22: mol_type = other DNA
tgtattttttgtagagacaggg

SEQ ID NO: 44440 - DNA, 22 bp, synthetic construct
  misc_feature 1..22: note = chemically synthesized
  source 1..22: mol_type = other DNA
gtattttttgtagagacagggt

SEQ ID NO: 44441 - DNA, 22 bp, synthetic construct
  misc_feature 1..22: note = chemically synthesized
  source 1..22: mol_type = other DNA
tattttttgtagagacagggtt

SEQ ID NO: 44442 - DNA, 22 bp, synthetic construct
  misc_feature 1..22: note = chemically synthesized
  source 1..22: mol_type = other DNA
tttgtagagacagggttttggc

SEQ ID NO: 44443 - DNA, 22 bp, synthetic construct
  misc_feature 1..22: note = chemically synthesized
  source 1..22: mol_type = other DNA
ttgtagagacagggttttggca

SEQ ID NO: 44444 - DNA, 22 bp, synthetic construct
  misc_feature 1..22: note = chemically synthesized
  source 1..22: mol_type = other DNA
tgtagagacagggttttggcat

SEQ ID NO: 44445 - DNA, 22 bp, synthetic construct
  misc_feature 1..22: note = chemically synthesized
  source 1..22: mol_type = other DNA
gtagagacagggttttggcatg

SEQ ID NO: 44446 - DNA, 22 bp, synthetic construct
  misc_feature 1..22: note = chemically synthesized
  source 1..22: mol_type = other DNA
tagagacagggttttggcatgt

SEQ ID NO: 44447 - DNA, 22 bp, synthetic construct
  misc_feature 1..22: note = chemically synthesized
  source 1..22: mol_type = other DNA
tggcatgttgcccaggcttgtc

SEQ ID NO: 44448 - DNA, 22 bp, synthetic construct
  misc_feature 1..22: note = chemically synthesized
  source 1..22: mol_type = other DNA
ggcatgttgcccaggcttgtct

SEQ ID NO: 44449 - DNA, 22 bp, synthetic construct
  misc_feature 1..22: note = chemically synthesized
  source 1..22: mol_type = other DNA
gcatgttgcccaggcttgtctc

SEQ ID NO: 44450 - DNA, 22 bp, synthetic construct
  misc_feature 1..22: note = chemically synthesized
  source 1..22: mol_type = other DNA
cccaggcttgtctcaaactcct

SEQ ID NO: 44451 - DNA, 22 bp, synthetic construct
  misc_feature 1..22: note = chemically synthesized
  source 1..22: mol_type = other DNA
gtctcaaactcctggcctcagg

SEQ ID NO: 44452 - DNA, 22 bp, synthetic construct
  misc_feature 1..22: note = chemically synthesized
  source 1..22: mol_type = other DNA
tctcaaactcctggcctcaggt

SEQ ID NO: 44453 - DNA, 22 bp, synthetic construct
  misc_feature 1..22: note = chemically synthesized
  source 1..22: mol_type = other DNA
aaactcctggcctcaggtgatc

SEQ ID NO: 44454 - DNA, 22 bp, synthetic construct
  misc_feature 1..22: note = chemically synthesized
  source 1..22: mol_type = other DNA
ctggcctcaggtgatccatctg

SEQ ID NO: 44455 - DNA, 22 bp, synthetic construct
  misc_feature 1..22: note = chemically synthesized
  source 1..22: mol_type = other DNA
gcctcaggtgatccatctgccg

SEQ ID NO: 44456 - DNA, 22 bp, synthetic construct
  misc_feature 1..22: note = chemically synthesized
  source 1..22: mol_type = other DNA
aggtgatccatctgccgtggcc

SEQ ID NO: 44457 - DNA, 22 bp, synthetic construct
  misc_feature 1..22: note = chemically synthesized
  source 1..22: mol_type = other DNA
ccgtggcctcccaaaatgctgg

SEQ ID NO: 44458 - DNA, 22 bp, synthetic construct
  misc_feature 1..22: note = chemically synthesized
  source 1..22: mol_type = other DNA
ccaaaatgctgggattataggc

SEQ ID NO: 44459 - DNA, 22 bp, synthetic construct
  misc_feature 1..22: note = chemically synthesized
  source 1..22: mol_type = other DNA
ggattataggcatgagccacca

SEQ ID NO: 44460 - DNA, 22 bp, synthetic construct
  misc_feature 1..22: note = chemically synthesized
  source 1..22: mol_type = other DNA
taggcatgagccaccaccccct

SEQ ID NO: 44461 - DNA, 22 bp, synthetic construct
  misc_feature 1..22: note = chemically synthesized
  source 1..22: mol_type = other DNA
ctggaaggattgatatcttata

SEQ ID NO: 44462 - DNA, 22 bp, synthetic construct
  misc_feature 1..22: note = chemically synthesized
  source 1..22: mol_type = other DNA
gaaggattgatatcttataaca

SEQ ID NO: 44463 - DNA, 22 bp, synthetic construct
  misc_feature 1..22: note = chemically synthesized
  source 1..22: mol_type = other DNA
atatcttataacataatttata

SEQ ID NO: 44464 - DNA, 22 bp, synthetic construct
  misc_feature 1..22: note = chemically synthesized
  source 1..22: mol_type = other DNA
ataacataatttataattacag

SEQ ID NO: 44465 - DNA, 22 bp, synthetic construct
  misc_feature 1..22: note = chemically synthesized
  source 1..22: mol_type = other DNA
taacataatttataattacaga

SEQ ID NO: 44466 - DNA, 22 bp, synthetic construct
  misc_feature 1..22: note = chemically synthesized
  source 1..22: mol_type = other DNA
ataattacagaaaacatgtgag

SEQ ID NO: 44467 - DNA, 22 bp, synthetic construct
  misc_feature 1..22: note = chemically synthesized
  source 1..22: mol_type = other DNA
taattacagaaaacatgtgagt

SEQ ID NO: 44468 - DNA, 22 bp, synthetic construct
  misc_feature 1..22: note = chemically synthesized
  source 1..22: mol_type = other DNA
cagaaaacatgtgagttcacta

SEQ ID NO: 44469 - DNA, 22 bp, synthetic construct
  misc_feature 1..22: note = chemically synthesized
  source 1..22: mol_type = other DNA
actaggaataaataaattttga

SEQ ID NO: 44470 - DNA, 22 bp, synthetic construct
  misc_feature 1..22: note = chemically synthesized
  source 1..22: mol_type = other DNA
ggaataaataaattttgaagat

SEQ ID NO: 44471 - DNA, 22 bp, synthetic construct
  misc_feature 1..22: note = chemically synthesized
  source 1..22: mol_type = other DNA
tgaagataataaaagattttca

SEQ ID NO: 44472 - DNA, 22 bp, synthetic construct
  misc_feature 1..22: note = chemically synthesized
  source 1..22: mol_type = other DNA
gaagataataaaagattttcac

SEQ ID NO: 44473 - DNA, 22 bp, synthetic construct
  misc_feature 1..22: note = chemically synthesized
  source 1..22: mol_type = other DNA
aagataataaaagattttcact

SEQ ID NO: 44474 - DNA, 22 bp, synthetic construct
  misc_feature 1..22: note = chemically synthesized
  source 1..22: mol_type = other DNA
tcacttatgttgtcatttcggc

SEQ ID NO: 44475 - DNA, 22 bp, synthetic construct
  misc_feature 1..22: note = chemically synthesized
  source 1..22: mol_type = other DNA
cacttatgttgtcatttcggca

SEQ ID NO: 44476 - DNA, 22 bp, synthetic construct
  misc_feature 1..22: note = chemically synthesized
  source 1..22: mol_type = other DNA
acttatgttgtcatttcggcac

SEQ ID NO: 44477 - DNA, 22 bp, synthetic construct
  misc_feature 1..22: note = chemically synthesized
  source 1..22: mol_type = other DNA
atgttgtcatttcggcacagtt

SEQ ID NO: 44478 - DNA, 22 bp, synthetic construct
  misc_feature 1..22: note = chemically synthesized
  source 1..22: mol_type = other DNA
tgttgtcatttcggcacagttt

SEQ ID NO: 44479 - DNA, 22 bp, synthetic construct
  misc_feature 1..22: note = chemically synthesized
  source 1..22: mol_type = other DNA
tcatttcggcacagtttggtat

SEQ ID NO: 44480 - DNA, 22 bp, synthetic construct
  misc_feature 1..22: note = chemically synthesized
  source 1..22: mol_type = other DNA
cggcacagtttggtataggatg

SEQ ID NO: 44481 - DNA, 22 bp, synthetic construct
  misc_feature 1..22: note = chemically synthesized
  source 1..22: mol_type = other DNA
ggcacagtttggtataggatgt

SEQ ID NO: 44482 - DNA, 22 bp, synthetic construct
  misc_feature 1..22: note = chemically synthesized
  source 1..22: mol_type = other DNA
ggtataggatgtggagatgtta

SEQ ID NO: 44483 - DNA, 22 bp, synthetic construct
  misc_feature 1..22: note = chemically synthesized
  source 1..22: mol_type = other DNA
gtataggatgtggagatgttaa

SEQ ID NO: 44484 - DNA, 22 bp, synthetic construct
  misc_feature 1..22: note = chemically synthesized
  source 1..22: mol_type = other DNA
acatttatacctagcttgctcg

SEQ ID NO: 44485 - DNA, 22 bp, synthetic construct
  misc_feature 1..22: note = chemically synthesized
  source 1..22: mol_type = other DNA
atacctagcttgctcgtaaact

SEQ ID NO: 44486 - DNA, 22 bp, synthetic construct
  misc_feature 1..22: note = chemically synthesized
  source 1..22: mol_type = other DNA
tacctagcttgctcgtaaacta

SEQ ID NO: 44487 - DNA, 22 bp, synthetic construct
  misc_feature 1..22: note = chemically synthesized
  source 1..22: mol_type = other DNA
gcttgctcgtaaactaagacct

SEQ ID NO: 44488 - DNA, 22 bp, synthetic construct
  misc_feature 1..22: note = chemically synthesized
  source 1..22: mol_type = other DNA
gctcgtaaactaagacctgaaa

SEQ ID NO: 44489 - DNA, 22 bp, synthetic construct
  misc_feature 1..22: note = chemically synthesized
  source 1..22: mol_type = other DNA
ctcgtaaactaagacctgaaag

SEQ ID NO: 44490 - DNA, 22 bp, synthetic construct
  misc_feature 1..22: note = chemically synthesized
  source 1..22: mol_type = other DNA
gtaaactaagacctgaaagggt

SEQ ID NO: 44491 - DNA, 22 bp, synthetic construct
  misc_feature 1..22: note = chemically synthesized
  source 1..22: mol_type = other DNA
agacctgaaagggttgtgtcta

SEQ ID NO: 44492 - DNA, 22 bp, synthetic construct
  misc_feature 1..22: note = chemically synthesized
  source 1..22: mol_type = other DNA
aaagggttgtgtctatcagctg

SEQ ID NO: 44493 - DNA, 22 bp, synthetic construct
  misc_feature 1..22: note = chemically synthesized
  source 1..22: mol_type = other DNA
tgtctatcagctgcacccctgg

SEQ ID NO: 44494 - DNA, 22 bp, synthetic construct
  misc_feature 1..22: note = chemically synthesized
  source 1..22: mol_type = other DNA
tcagctgcacccctgggtagcg

SEQ ID NO: 44495 - DNA, 22 bp, synthetic construct
  misc_feature 1..22: note = chemically synthesized
  source 1..22: mol_type = other DNA
cacccctgggtagcgacacaac

SEQ ID NO: 44496 - DNA, 22 bp, synthetic construct
  misc_feature 1..22: note = chemically synthesized
  source 1..22: mol_type = other DNA
ggtagcgacacaacctcgggaa

SEQ ID NO: 44497 - DNA, 22 bp, synthetic construct
  misc_feature 1..22: note = chemically synthesized
  source 1..22: mol_type = other DNA
gggaaggcctcagccccctcct

SEQ ID NO: 44498 - DNA, 22 bp, synthetic construct
  misc_feature 1..22: note = chemically synthesized
  source 1..22: mol_type = other DNA
agccccctcctcgtacagcact

SEQ ID NO: 44499 - DNA, 22 bp, synthetic construct
  misc_feature 1..22: note = chemically synthesized
  source 1..22: mol_type = other DNA
ctcgtacagcactgcctgttgg

SEQ ID NO: 44500 - DNA, 22 bp, synthetic construct
  misc_feature 1..22: note = chemically synthesized
  source 1..22: mol_type = other DNA
gtacagcactgcctgttggaaa

SEQ ID NO: 44501 - DNA, 22 bp, synthetic construct
  misc_feature 1..22: note = chemically synthesized
  source 1..22: mol_type = other DNA
cctgttggaaagcttgagggag

SEQ ID NO: 44502 - DNA, 22 bp, synthetic construct
  misc_feature 1..22: note = chemically synthesized
  source 1..22: mol_type = other DNA
ttggaaagcttgagggaggcta

SEQ ID NO: 44503 - DNA, 22 bp, synthetic construct
  misc_feature 1..22: note = chemically synthesized
  source 1..22: mol_type = other DNA
gaaagcttgagggaggctatgg

SEQ ID NO: 44504 - DNA, 22 bp, synthetic construct
  misc_feature 1..22: note = chemically synthesized
  source 1..22: mol_type = other DNA
gagggaggctatggatgtgcag

SEQ ID NO: 44505 - DNA, 22 bp, synthetic construct
  misc_feature 1..22: note = chemically synthesized
  source 1..22: mol_type = other DNA
agggaggctatggatgtgcagc

SEQ ID NO: 44506 - DNA, 22 bp, synthetic construct
  misc_feature 1..22: note = chemically synthesized
  source 1..22: mol_type = other DNA
tggatgtgcagcacttggcaga

SEQ ID NO: 44507 - DNA, 22 bp, synthetic construct
  misc_feature 1..22: note = chemically synthesized
  source 1..22: mol_type = other DNA
ggcagagggtctggtcatggaa

SEQ ID NO: 44508 - DNA, 22 bp, synthetic construct
  misc_feature 1..22: note = chemically synthesized
  source 1..22: mol_type = other DNA
gcagagggtctggtcatggaag

SEQ ID NO: 44509 - DNA, 22 bp, synthetic construct
  misc_feature 1..22: note = chemically synthesized
  source 1..22: mol_type = other DNA
gtcatggaagttaccagcaaat

SEQ ID NO: 44510 - DNA, 22 bp, synthetic construct
  misc_feature 1..22: note = chemically synthesized
  source 1..22: mol_type = other DNA
ccagcaaatatgagctactttt

SEQ ID NO: 44511 - DNA, 22 bp, synthetic construct
  misc_feature 1..22: note = chemically synthesized
  source 1..22: mol_type = other DNA
cttttatgattttattttatcc

SEQ ID NO: 44512 - DNA, 22 bp, synthetic construct
  misc_feature 1..22: note = chemically synthesized
  source 1..22: mol_type = other DNA
ttatgattttattttatccaaa

SEQ ID NO: 44513 - DNA, 22 bp, synthetic construct
  misc_feature 1..22: note = chemically synthesized
  source 1..22: mol_type = other DNA
tatgattttattttatccaaaa

SEQ ID NO: 44514 - DNA, 22 bp, synthetic construct
  misc_feature 1..22: note = chemically synthesized
  source 1..22: mol_type = other DNA
atgattttattttatccaaaag

SEQ ID NO: 44515 - DNA, 22 bp, synthetic construct
  misc_feature 1..22: note = chemically synthesized
  source 1..22: mol_type = other DNA
tgattttattttatccaaaaga

SEQ ID NO: 44516 - DNA, 22 bp, synthetic construct
  misc_feature 1..22: note = chemically synthesized
  source 1..22: mol_type = other DNA
tattttatccaaaagaaagaga

SEQ ID NO: 44517 - DNA, 22 bp, synthetic construct
  misc_feature 1..22: note = chemically synthesized
  source 1..22: mol_type = other DNA
attttatccaaaagaaagagaa

SEQ ID NO: 44518 - DNA, 22 bp, synthetic construct
  misc_feature 1..22: note = chemically synthesized
  source 1..22: mol_type = other DNA
ttttatccaaaagaaagagaat

SEQ ID NO: 44519 - DNA, 22 bp, synthetic construct
  misc_feature 1..22: note = chemically synthesized
  source 1..22: mol_type = other DNA
tatccaaaagaaagagaatgaa

SEQ ID NO: 44520 - DNA, 22 bp, synthetic construct
  misc_feature 1..22: note = chemically synthesized
  source 1..22: mol_type = other DNA
atccaaaagaaagagaatgaaa

SEQ ID NO: 44521 - DNA, 22 bp, synthetic construct
  misc_feature 1..22: note = chemically synthesized
  source 1..22: mol_type = other DNA
tccaaaagaaagagaatgaaag

SEQ ID NO: 44522 - DNA, 22 bp, synthetic construct
  misc_feature 1..22: note = chemically synthesized
  source 1..22: mol_type = other DNA
atcaggaaagatgaaggtctag

SEQ ID NO: 44523 - DNA, 22 bp, synthetic construct
  misc_feature 1..22: note = chemically synthesized
  source 1..22: mol_type = other DNA
ggggtgagggaaggagtaagga

SEQ ID NO: 44524 - DNA, 22 bp, synthetic construct
  misc_feature 1..22: note = chemically synthesized
  source 1..22: mol_type = other DNA
aggggggaaatggctttcacca

SEQ ID NO: 44525 - DNA, 22 bp, synthetic construct
  misc_feature 1..22: note = chemically synthesized
  source 1..22: mol_type = other DNA
tcaccacttcccagcatctatt

SEQ ID NO: 44526 - DNA, 22 bp, synthetic construct
  misc_feature 1..22: note = chemically synthesized
  source 1..22: mol_type = other DNA
caccacttcccagcatctattg

SEQ ID NO: 44527 - DNA, 22 bp, synthetic construct
  misc_feature 1..22: note = chemically synthesized
  source 1..22: mol_type = other DNA
accacttcccagcatctattga

SEQ ID NO: 44528 - DNA, 22 bp, synthetic construct
  misc_feature 1..22: note = chemically synthesized
  source 1..22: mol_type = other DNA
cccagcatctattgacattgca

SEQ ID NO: 44529 - DNA, 22 bp, synthetic construct
  misc_feature 1..22: note = chemically synthesized
  source 1..22: mol_type = other DNA
ccagcatctattgacattgcac

SEQ ID NO: 44530 - DNA, 22 bp, synthetic construct
  misc_feature 1..22: note = chemically synthesized
  source 1..22: mol_type = other DNA
ttgacattgcactctcaaatat

SEQ ID NO: 44531 - DNA, 22 bp, synthetic construct
  misc_feature 1..22: note = chemically synthesized
  source 1..22: mol_type = other DNA
acattgcactctcaaatatttt

SEQ ID NO: 44532 - DNA, 22 bp, synthetic construct
  misc_feature 1..22: note = chemically synthesized
  source 1..22: mol_type = other DNA
cactctcaaatattttataaga

SEQ ID NO: 44533 - DNA, 22 bp, synthetic construct
  misc_feature 1..22: note = chemically synthesized
  source 1..22: mol_type = other DNA
tcaaatattttataagactcta

SEQ ID NO: 44534 - DNA, 22 bp, synthetic construct
  misc_feature 1..22: note = chemically synthesized
  source 1..22: mol_type = other DNA
aaatattttataagactctata

SEQ ID NO: 44535 - DNA, 22 bp, synthetic construct
  misc_feature 1..22: note = chemically synthesized
  source 1..22: mol_type = other DNA
tataagactctatattcaaggt

SEQ ID NO: 44536 - DNA, 22 bp, synthetic construct
  misc_feature 1..22: note = chemically synthesized
  source 1..22: mol_type = other DNA
ataagactctatattcaaggta

SEQ ID NO: 44537 - DNA, 22 bp, synthetic construct
  misc_feature 1..22: note = chemically synthesized
  source 1..22: mol_type = other DNA
taagactctatattcaaggtaa

SEQ ID NO: 44538 - DNA, 22 bp, synthetic construct
  misc_feature 1..22: note = chemically synthesized
  source 1..22: mol_type = other DNA
tatattcaaggtaatgtttgaa

SEQ ID NO: 44539 - DNA, 22 bp, synthetic construct
  misc_feature 1..22: note = chemically synthesized
  source 1..22: mol_type = other DNA
tattcaaggtaatgtttgaacc

SEQ ID NO: 44540 - DNA, 22 bp, synthetic construct
  misc_feature 1..22: note = chemically synthesized
  source 1..22: mol_type = other DNA
aaggtaatgtttgaaccctgct

SEQ ID NO: 44541 - DNA, 22 bp, synthetic construct
  misc_feature 1..22: note = chemically synthesized
  source 1..22: mol_type = other DNA
gaaccctgctgagccagtggca

SEQ ID NO: 44542 - DNA, 22 bp, synthetic construct
  misc_feature 1..22: note = chemically synthesized
  source 1..22: mol_type = other DNA
aaccctgctgagccagtggcat

SEQ ID NO: 44543 - DNA, 22 bp, synthetic construct
  misc_feature 1..22: note = chemically synthesized
  source 1..22: mol_type = other DNA
ctgagccagtggcatgggtctc

SEQ ID NO: 44544 - DNA, 22 bp, synthetic construct
  misc_feature 1..22: note = chemically synthesized
  source 1..22: mol_type = other DNA
agccagtggcatgggtctctga

SEQ ID NO: 44545 - DNA, 22 bp, synthetic construct
  misc_feature 1..22: note = chemically synthesized
  source 1..22: mol_type = other DNA
tgagagaatcattaacttaatt

SEQ ID NO: 44546 - DNA, 22 bp, synthetic construct
  misc_feature 1..22: note = chemically synthesized
  source 1..22: mol_type = other DNA
agagaatcattaacttaatttg

SEQ ID NO: 44547 - DNA, 22 bp, synthetic construct
  misc_feature 1..22: note = chemically synthesized
  source 1..22: mol_type = other DNA
acttaatttgactatctggttt

SEQ ID NO: 44548 - DNA, 22 bp, synthetic construct
  misc_feature 1..22: note = chemically synthesized
  source 1..22: mol_type = other DNA
aatttgactatctggtttgtgg

SEQ ID NO: 44549 - DNA, 22 bp, synthetic construct
  misc_feature 1..22: note = chemically synthesized
  source 1..22: mol_type = other DNA
atttgactatctggtttgtggg

SEQ ID NO: 44550 - DNA, 22 bp, synthetic construct
  misc_feature 1..22: note = chemically synthesized
  source 1..22: mol_type = other DNA
gactatctggtttgtgggtgcg

SEQ ID NO: 44551 - DNA, 22 bp, synthetic construct
  misc_feature 1..22: note = chemically synthesized
  source 1..22: mol_type = other DNA
actatctggtttgtgggtgcgt

SEQ ID NO: 44552 - DNA, 22 bp, synthetic construct
  misc_feature 1..22: note = chemically synthesized
  source 1..22: mol_type = other DNA
tctggtttgtgggtgcgtttac

SEQ ID NO: 44553 - DNA, 22 bp, synthetic construct
  misc_feature 1..22: note = chemically synthesized
  source 1..22: mol_type = other DNA
gtttgtgggtgcgtttactctc

SEQ ID NO: 44554 - DNA, 22 bp, synthetic construct
  misc_feature 1..22: note = chemically synthesized
  source 1..22: mol_type = other DNA
gtgggtgcgtttactctcatgt

SEQ ID NO: 44555 - DNA, 22 bp, synthetic construct
  misc_feature 1..22: note = chemically synthesized
  source 1..22: mol_type = other DNA
tgggtgcgtttactctcatgta

SEQ ID NO: 44556 - DNA, 22 bp, synthetic construct
  misc_feature 1..22: note = chemically synthesized
  source 1..22: mol_type = other DNA
actctcatgtaagtcaacaatg

SEQ ID NO: 44557 - DNA, 22 bp, synthetic construct
  misc_feature 1..22: note = chemically synthesized
  source 1..22: mol_type = other DNA
ctctcatgtaagtcaacaatgt

SEQ ID NO: 44558 - DNA, 22 bp, synthetic construct
  misc_feature 1..22: note = chemically synthesized
  source 1..22: mol_type = other DNA
tcatgtaagtcaacaatgtcct

SEQ ID NO: 44559 - DNA, 22 bp, synthetic construct
  misc_feature 1..22: note = chemically synthesized
  source 1..22: mol_type = other DNA
atgtaagtcaacaatgtcctgg

SEQ ID NO: 44560 - DNA, 22 bp, synthetic construct
  misc_feature 1..22: note = chemically synthesized
  source 1..22: mol_type = other DNA
ggattgggacacactttctggg

SEQ ID NO: 44561 - DNA, 22 bp, synthetic construct
  misc_feature 1..22: note = chemically synthesized
  source 1..22: mol_type = other DNA
ggacacactttctgggcactgc

SEQ ID NO: 44562 - DNA, 22 bp, synthetic construct
  misc_feature 1..22: note = chemically synthesized
  source 1..22: mol_type = other DNA
tctgggcactgctggccagtcc

SEQ ID NO: 44563 - DNA, 22 bp, synthetic construct
  misc_feature 1..22: note = chemically synthesized
  source 1..22: mol_type = other DNA
ctgggcactgctggccagtccc

SEQ ID NO: 44564 - DNA, 22 bp, synthetic construct
  misc_feature 1..22: note = chemically synthesized
  source 1..22: mol_type = other DNA
tgggcactgctggccagtccca

SEQ ID NO: 44565 - DNA, 22 bp, synthetic construct
  misc_feature 1..22: note = chemically synthesized
  source 1..22: mol_type = other DNA
ggcactgctggccagtcccaaa

SEQ ID NO: 44566 - DNA, 22 bp, synthetic construct
  misc_feature 1..22: note = chemically synthesized
  source 1..22: mol_type = other DNA
ctggccagtcccaaaatggaac

SEQ ID NO: 44567 - DNA, 22 bp, synthetic construct
  misc_feature 1..22: note = chemically synthesized
  source 1..22: mol_type = other DNA
gccagtcccaaaatggaacata

SEQ ID NO: 44568 - DNA, 22 bp, synthetic construct
  misc_feature 1..22: note = chemically synthesized
  source 1..22: mol_type = other DNA
ttctacttcttttatttctgaa

SEQ ID NO: 44569 - DNA, 22 bp, synthetic construct
  misc_feature 1..22: note = chemically synthesized
  source 1..22: mol_type = other DNA
ctacttcttttatttctgaaat

SEQ ID NO: 44570 - DNA, 22 bp, synthetic construct
  misc_feature 1..22: note = chemically synthesized
  source 1..22: mol_type = other DNA
tacttcttttatttctgaaatc

SEQ ID NO: 44571 - DNA, 22 bp, synthetic construct
  misc_feature 1..22: note = chemically synthesized
  source 1..22: mol_type = other DNA
cttcttttatttctgaaatcag

SEQ ID NO: 44572 - DNA, 22 bp, synthetic construct
  misc_feature 1..22: note = chemically synthesized
  source 1..22: mol_type = other DNA
cttttatttctgaaatcaggta

SEQ ID NO: 44573 - DNA, 22 bp, synthetic construct
  misc_feature 1..22: note = chemically synthesized
  source 1..22: mol_type = other DNA
ttttatttctgaaatcaggtaa

SEQ ID NO: 44574 - DNA, 22 bp, synthetic construct
  misc_feature 1..22: note = chemically synthesized
  source 1..22: mol_type = other DNA
ttatttctgaaatcaggtaaga

SEQ ID NO: 44575 - DNA, 22 bp, synthetic construct
  misc_feature 1..22: note = chemically synthesized
  source 1..22: mol_type = other DNA
tatttctgaaatcaggtaagac

SEQ ID NO: 44576 - DNA, 22 bp, synthetic construct
  misc_feature 1..22: note = chemically synthesized
  source 1..22: mol_type = other DNA
atttctgaaatcaggtaagaca

SEQ ID NO: 44577 - DNA, 22 bp, synthetic construct
  misc_feature 1..22: note = chemically synthesized
  source 1..22: mol_type = other DNA
tttctgaaatcaggtaagacat

SEQ ID NO: 44578 - DNA, 22 bp, synthetic construct
  misc_feature 1..22: note = chemically synthesized
  source 1..22: mol_type = other DNA
ctgaaatcaggtaagacatagt

SEQ ID NO: 44579 - DNA, 22 bp, synthetic construct
  misc_feature 1..22: note = chemically synthesized
  source 1..22: mol_type = other DNA
tgaaatcaggtaagacatagtt

SEQ ID NO: 44580 - DNA, 22 bp, synthetic construct
  misc_feature 1..22: note = chemically synthesized
  source 1..22: mol_type = other DNA
aaatcaggtaagacatagtttt

SEQ ID NO: 44581 - DNA, 22 bp, synthetic construct
  misc_feature 1..22: note = chemically synthesized
  source 1..22: mol_type = other DNA
ttttaaattataagaattattt

SEQ ID NO: 44582 - DNA, 22 bp, synthetic construct
  misc_feature 1..22: note = chemically synthesized
  source 1..22: mol_type = other DNA
tttaaattataagaattatttt

SEQ ID NO: 44583 - DNA, 22 bp, synthetic construct
  misc_feature 1..22: note = chemically synthesized
  source 1..22: mol_type = other DNA
ttaaattataagaattattttt

SEQ ID NO: 44584 - DNA, 22 bp, synthetic construct
  misc_feature 1..22: note = chemically synthesized
  source 1..22: mol_type = other DNA
taaattataagaattatttttt

SEQ ID NO: 44585 - DNA, 22 bp, synthetic construct
  misc_feature 1..22: note = chemically synthesized
  source 1..22: mol_type = other DNA
aaattataagaattattttttc

SEQ ID NO: 44586 - DNA, 22 bp, synthetic construct
  misc_feature 1..22: note = chemically synthesized
  source 1..22: mol_type = other DNA
aattataagaattattttttct

SEQ ID NO: 44587 - DNA, 22 bp, synthetic construct
  misc_feature 1..22: note = chemically synthesized
  source 1..22: mol_type = other DNA
taagaattattttttctcccac

SEQ ID NO: 44588 - DNA, 22 bp, synthetic construct
  misc_feature 1..22: note = chemically synthesized
  source 1..22: mol_type = other DNA
ttttttctcccacaatgtagta

SEQ ID NO: 44589 - DNA, 22 bp, synthetic construct
  misc_feature 1..22: note = chemically synthesized
  source 1..22: mol_type = other DNA
tttctcccacaatgtagtaaaa

SEQ ID NO: 44590 - DNA, 22 bp, synthetic construct
  misc_feature 1..22: note = chemically synthesized
  source 1..22: mol_type = other DNA
ttctcccacaatgtagtaaaaa

SEQ ID NO: 44591 - DNA, 22 bp, synthetic construct
  misc_feature 1..22: note = chemically synthesized
  source 1..22: mol_type = other DNA
tctcccacaatgtagtaaaaat

SEQ ID NO: 44592 - DNA, 22 bp, synthetic construct
  misc_feature 1..22: note = chemically synthesized
  source 1..22: mol_type = other DNA
ctcccacaatgtagtaaaaata

SEQ ID NO: 44593 - DNA, 22 bp, synthetic construct
  misc_feature 1..22: note = chemically synthesized
  source 1..22: mol_type = other DNA
tcccacaatgtagtaaaaatac

SEQ ID NO: 44594 - DNA, 22 bp, synthetic construct
  misc_feature 1..22: note = chemically synthesized
  source 1..22: mol_type = other DNA
ccacaatgtagtaaaaatacat

SEQ ID NO: 44595 - DNA, 22 bp, synthetic construct
  misc_feature 1..22: note = chemically synthesized
  source 1..22: mol_type = other DNA
tatgtgcaattcatttaatttt

SEQ ID NO: 44596 - DNA, 22 bp, synthetic construct
  misc_feature 1..22: note = chemically synthesized
  source 1..22: mol_type = other DNA
atgtgcaattcatttaattttt

SEQ ID NO: 44597 - DNA, 22 bp, synthetic construct
  misc_feature 1..22: note = chemically synthesized
  source 1..22: mol_type = other DNA
tgtgcaattcatttaatttttg

SEQ ID NO: 44598 - DNA, 22 bp, synthetic construct
  misc_feature 1..22: note = chemically synthesized
  source 1..22: mol_type = other DNA
atttaatttttgattcatgaaa

SEQ ID NO: 44599 - DNA, 22 bp, synthetic construct
  misc_feature 1..22: note = chemically synthesized
  source 1..22: mol_type = other DNA
aatttttgattcatgaaattcc

SEQ ID NO: 44600 - DNA, 22 bp, synthetic construct
  misc_feature 1..22: note = chemically synthesized
  source 1..22: mol_type = other DNA
atttttgattcatgaaattccc

SEQ ID NO: 44601 - DNA, 22 bp, synthetic construct
  misc_feature 1..22: note = chemically synthesized
  source 1..22: mol_type = other DNA
ttgattcatgaaattcccagtt

SEQ ID NO: 44602 - DNA, 22 bp, synthetic construct
  misc_feature 1..22: note = chemically synthesized
  source 1..22: mol_type = other DNA
tgattcatgaaattcccagttc

SEQ ID NO: 44603 - DNA, 22 bp, synthetic construct
  misc_feature 1..22: note = chemically synthesized
  source 1..22: mol_type = other DNA
gattcatgaaattcccagttca

SEQ ID NO: 44604 - DNA, 22 bp, synthetic construct
  misc_feature 1..22: note = chemically synthesized
  source 1..22: mol_type = other DNA
attcatgaaattcccagttcaa

SEQ ID NO: 44605 - DNA, 22 bp, synthetic construct
  misc_feature 1..22: note = chemically synthesized
  source 1..22: mol_type = other DNA
atgaaattcccagttcaaaatc

SEQ ID NO: 44606 - DNA, 22 bp, synthetic construct
  misc_feature 1..22: note = chemically synthesized
  source 1..22: mol_type = other DNA
ccagttcaaaatcttgtatatg

SEQ ID NO: 44607 - DNA, 22 bp, synthetic construct
  misc_feature 1..22: note = chemically synthesized
  source 1..22: mol_type = other DNA
aaaatcttgtatatgattgaaa

SEQ ID NO: 44608 - DNA, 22 bp, synthetic construct
  misc_feature 1..22: note = chemically synthesized
  source 1..22: mol_type = other DNA
gtatatgattgaaaaattctta

SEQ ID NO: 44609 - DNA, 22 bp, synthetic construct
  misc_feature 1..22: note = chemically synthesized
  source 1..22: mol_type = other DNA
tatatgattgaaaaattcttaa

SEQ ID NO: 44610 - DNA, 22 bp, synthetic construct
  misc_feature 1..22: note = chemically synthesized
  source 1..22: mol_type = other DNA
aaaaattcttaaaaaaataagt

SEQ ID NO: 44611 - DNA, 22 bp, synthetic construct
  misc_feature 1..22: note = chemically synthesized
  source 1..22: mol_type = other DNA
ttaaaaaaataagtttaatttc

SEQ ID NO: 44612 - DNA, 22 bp, synthetic construct
  misc_feature 1..22: note = chemically synthesized
  source 1..22: mol_type = other DNA
aaaaaaataagtttaatttccc

SEQ ID NO: 44613 - DNA, 22 bp, synthetic construct
  misc_feature 1..22: note = chemically synthesized
  source 1..22: mol_type = other DNA
aaaaaataagtttaatttcccc

SEQ ID NO: 44614 - DNA, 22 bp, synthetic construct
  misc_feature 1..22: note = chemically synthesized
  source 1..22: mol_type = other DNA
aatttccccgtgaagactgtca

SEQ ID NO: 44615 - DNA, 22 bp, synthetic construct
  misc_feature 1..22: note = chemically synthesized
  source 1..22: mol_type = other DNA
atttccccgtgaagactgtcac

SEQ ID NO: 44616 - DNA, 22 bp, synthetic construct
  misc_feature 1..22: note = chemically synthesized
  source 1..22: mol_type = other DNA
ccccgtgaagactgtcacggtg

SEQ ID NO: 44617 - DNA, 22 bp, synthetic construct
  misc_feature 1..22: note = chemically synthesized
  source 1..22: mol_type = other DNA
cccgtgaagactgtcacggtgc

SEQ ID NO: 44618 - DNA, 22 bp, synthetic construct
  misc_feature 1..22: note = chemically synthesized
  source 1..22: mol_type = other DNA
tcacggtgctggaatgaatggg

SEQ ID NO: 44619 - DNA, 22 bp, synthetic construct
  misc_feature 1..22: note = chemically synthesized
  source 1..22: mol_type = other DNA
gaatgaatgggcagaaaaaata

SEQ ID NO: 44620 - DNA, 22 bp, synthetic construct
  misc_feature 1..22: note = chemically synthesized
  source 1..22: mol_type = other DNA
atttttctaatctaaaagagtg

SEQ ID NO: 44621 - DNA, 22 bp, synthetic construct
  misc_feature 1..22: note = chemically synthesized
  source 1..22: mol_type = other DNA
ttctaatctaaaagagtgtgcc

SEQ ID NO: 44622 - DNA, 22 bp, synthetic construct
  misc_feature 1..22: note = chemically synthesized
  source 1..22: mol_type = other DNA
tctaatctaaaagagtgtgcct

SEQ ID NO: 44623 - DNA, 22 bp, synthetic construct
  misc_feature 1..22: note = chemically synthesized
  source 1..22: mol_type = other DNA
ctaatctaaaagagtgtgccta

SEQ ID NO: 44624 - DNA, 22 bp, synthetic construct
  misc_feature 1..22: note = chemically synthesized
  source 1..22: mol_type = other DNA
taatctaaaagagtgtgcctac

SEQ ID NO: 44625 - DNA, 22 bp, synthetic construct
  misc_feature 1..22: note = chemically synthesized
  source 1..22: mol_type = other DNA
atctaaaagagtgtgcctacat

SEQ ID NO: 44626 - DNA, 22 bp, synthetic construct
  misc_feature 1..22: note = chemically synthesized
  source 1..22: mol_type = other DNA
aaagagtgtgcctacatgatgg

SEQ ID NO: 44627 - DNA, 22 bp, synthetic construct
  misc_feature 1..22: note = chemically synthesized
  source 1..22: mol_type = other DNA
catgatggccagtctggctgaa
